United States Patent Application Publication US 2022/0213167 A1 - sequence listing, part 2

SEQ ID NO: 21537 - protein, 14 aa, Homo sapiens
  CDR3 for alpha chain variable domain of TCR clone 10769 (TRAV26-1, TRAJ49)
CIVRVATGGNQFYF

SEQ ID NO: 21538 - protein, 14 aa, Homo sapiens
  CDR3 for beta chain variable domain of TCR clone 10769 (TRBV7-2, TRBJ2-7)
CASRSQGAAYEQYF

SEQ ID NO: 21539 - protein, 17 aa, Homo sapiens
  CDR3 for alpha chain variable domain of TCR clone 10770 (TRAV23/DV6, TRAJ57)
CAASSTLSQGGSEKLVF

SEQ ID NO: 21540 - protein, 17 aa, Homo sapiens
  CDR3 for beta chain variable domain of TCR clone 10770 (TRBV10-3, TRBJ2-6)
CAISESTAPSGANVLTF

SEQ ID NO: 21541 - protein, 12 aa, Homo sapiens
  CDR3 for alpha chain variable domain of TCR clone 10771 (TRAV35, TRAJ52)
NAGGTSYGKLTF

SEQ ID NO: 21542 - protein, 12 aa, Homo sapiens
  CDR3 for beta chain variable domain of TCR clone 10771 (TRBV11-2, TRBJ2-7)
CASSLPTYEQYF

SEQ ID NO: 21543 - protein, 14 aa, Homo sapiens
  CDR3 for alpha chain variable domain of TCR clone 10772 (TRAV27, TRAJ52)
CAGAGGTSYGKLTF

SEQ ID NO: 21544 - protein, 16 aa, Homo sapiens
  CDR3 for beta chain variable domain of TCR clone 10772 (TRBV7-3, TRBJ2-2)
CASSLKRGTLSGELFF

SEQ ID NO: 21545 - protein, 17 aa, Homo sapiens
  CDR3 for alpha chain variable domain of TCR clone 10773 (TRAV3, TRAJ6)
CAVRDGPRAGGSYIPTF

SEQ ID NO: 21546 - protein, 12 aa, Homo sapiens
  CDR3 for beta chain variable domain of TCR clone 10773 (TRBV7-8, TRBJ2-7)
CASSLGDREQYF

SEQ ID NO: 21547 - protein, 14 aa, Homo sapiens
  CDR3 for alpha chain variable domain of TCR clone 10774 (TRAV12-2, TRAJ40)
CAVKIPSGTYKYIF

SEQ ID NO: 21548 - protein, 14 aa, Homo sapiens
  CDR3 for beta chain variable domain of TCR clone 10774 (TRBV20-1, TRBJ1-1)
CSAQTRVGGTEAFF

SEQ ID NO: 21549 - protein, 13 aa, Homo sapiens
  CDR3 for alpha chain variable domain of TCR clone 10775 (TRAV12-2, TRAJ12)
CAVNGDSSYKLIF

SEQ ID NO: 21550 - protein, 17 aa, Homo sapiens
  CDR3 for beta chain variable domain of TCR clone 10775 (TRBV13, TRBJ2-3)
CASSLSRVAGGRNTQYF

SEQ ID NO: 21551 - protein, 17 aa, Homo sapiens
  CDR3 for alpha chain variable domain of TCR clone 10776 (TRAV12-3, TRAJ52)
CASPPFAGGTSYGKLTF

SEQ ID NO: 21552 - protein, 16 aa, Homo sapiens
  CDR3 for beta chain variable domain of TCR clone 10776 (TRBV6-5, TRBJ2-5)
CASSSVGRWGRETQYF

SEQ ID NO: 21553 - protein, 16 aa, Homo sapiens
  CDR3 for alpha chain variable domain of TCR clone 10777 (TRAV12-3, TRAJ53)
CAMSPESGGSNYKLTF

SEQ ID NO: 21554 - protein, 11 aa, Homo sapiens
  CDR3 for beta chain variable domain of TCR clone 10777 (TRBV29-1, TRBJ2-5)
CSEDRTGTQYF

SEQ ID NO: 21555 - protein, 17 aa, Homo sapiens
  CDR3 for alpha chain variable domain of TCR clone 10778 (TRAV26-2, TRAJ42)
CILRDVGYGGSQGNPIF

SEQ ID NO: 21556 - protein, 16 aa, Homo sapiens
  CDR3 for beta chain variable domain of TCR clone 10778 (TRBV12-4, TRBJ2-7)
CASSLIGGTGTYEQYF

SEQ ID NO: 21557 - protein, 15 aa, Homo sapiens
  CDR3 for alpha chain variable domain of TCR clone 10779 (TRAV26-1, TRAJ40)
CIVSFATSGTYKYIF

SEQ ID NO: 21558 - protein, 11 aa, Homo sapiens
  CDR3 for beta chain variable domain of TCR clone 10779 (TRBV29-1, TRBJ2-5)
CSEDRTGTQYF

SEQ ID NO: 21559 - protein, 13 aa, Homo sapiens
  CDR3 for alpha chain variable domain of TCR clone 10780 (TRAV3, TRAJ20)
CPVRDTGDYKLSF

SEQ ID NO: 21560 - protein, 12 aa, Homo sapiens
  CDR3 for beta chain variable domain of TCR clone 10780 (TRBV29-1, TRBJ2-3)
CSVTGGADTQYF

SEQ ID NO: 21561 - protein, 15 aa, Homo sapiens
  CDR3 for alpha chain variable domain of TCR clone 10781 (TRAV26-1, TRAJ29)
CIVRVEGSGNTPLVF

SEQ ID NO: 21562 - protein, 14 aa, Homo sapiens
  CDR3 for beta chain variable domain of TCR clone 10781 (TRBV18, TRBJ2-5)
CASSPGVPQETQYF

SEQ ID NO: 21563 - protein, 14 aa, Homo sapiens
  CDR3 for alpha chain variable domain of TCR clone 10782 (TRAV8-4, TRAJ13)
CAVTLSGGYQKVTF

SEQ ID NO: 21564 - protein, 14 aa, Homo sapiens
  CDR3 for beta chain variable domain of TCR clone 10782 (TRBV7-2, TRBJ1-2)
RASSQTGSTYGCTF

SEQ ID NO: 21565 - protein, 11 aa, Homo sapiens
  CDR3 for alpha chain variable domain of TCR clone 10783 (TRAV1-1, TRAJ30)
CAVSRDDKIIF

SEQ ID NO: 21566 - protein, 16 aa, Homo sapiens
  CDR3 for beta chain variable domain of TCR clone 10783 (TRBV6-3, TRBJ2-3)
CASSQHSSGVSDTQYF

SEQ ID NO: 21567 - protein, 12 aa, Homo sapiens
  CDR3 for alpha chain variable domain of TCR clone 10784 (TRAV26-1, TRAJ48)
CIAVFGNEKLTF

SEQ ID NO: 21568 - protein, 18 aa, Homo sapiens
  CDR3 for beta chain variable domain of TCR clone 10784 (TRBV7-2, TRBJ2-3)
CASSLETSRGRKADTQYF

SEQ ID NO: 21569 - protein, 11 aa, Homo sapiens
  CDR3 for alpha chain variable domain of TCR clone 10785 (TRAV16, TRAJ26)
CALTRWSEFCL

SEQ ID NO: 21570 - protein, 13 aa, Homo sapiens
  CDR3 for beta chain variable domain of TCR clone 10785 (TRBV4-2, TRBJ1-1)
CASSQAGNTEAFF

SEQ ID NO: 21571 - protein, 16 aa, Homo sapiens
  CDR3 for alpha chain variable domain of TCR clone 10786 (TRAV12-3, TRAJ53)
CSMSPGSGGSNYKLTF

SEQ ID NO: 21572 - protein, 11 aa, Homo sapiens
  CDR3 for beta chain variable domain of TCR clone 10786 (TRBV29-1, TRBJ2-5)
CSEDRTGTQYF

SEQ ID NO: 21573 - protein, 13 aa, Homo sapiens
  CDR3 for alpha chain variable domain of TCR clone 10787 (TRAV1-2, TRAJ12)
CAVSMDSSYKLIF

SEQ ID NO: 21574 - protein, 17 aa, Homo sapiens
  CDR3 for beta chain variable domain of TCR clone 10787 (TRBV11-3, TRBJ2-1)
CASSLYPPGVEYNEQFF

SEQ ID NO: 21575 - protein, 12 aa, Homo sapiens
  CDR3 for alpha chain variable domain of TCR clone 10788 (TRAV36/DV7, TRAJ54)
CAVVRGAQKLVF

SEQ ID NO: 21576 - protein, 15 aa, Homo sapiens
  CDR3 for beta chain variable domain of TCR clone 10788 (TRBV20-1, TRBJ1-1)
CSASRGVTGNTEAFF

SEQ ID NO: 21577 - protein, 13 aa, Homo sapiens
  CDR3 for alpha chain variable domain of TCR clone 10789 (TRAV16, TRAJ31)
CALSAHNNARLMF

SEQ ID NO: 21578 - protein, 17 aa, Homo sapiens
  CDR3 for beta chain variable domain of TCR clone 10789 (TRBV12-4, TRBJ2-1)
CTSSPGLAGGRINEQFF

SEQ ID NO: 21579 - protein, 14 aa, Homo sapiens
  CDR3 for alpha chain variable domain of TCR clone 10790 (TRAV8-3, TRAJ17)
CCGCGKAAGNKLTF

SEQ ID NO: 21580 - protein, 14 aa, Homo sapiens
  CDR3 for beta chain variable domain of TCR clone 10790 (TRBV4-2, TRBJ1-2)
CASSQVGQNYGYTF

SEQ ID NO: 21581 - protein, 13 aa, Homo sapiens
  CDR3 for alpha chain variable domain of TCR clone 10791 (TRAV27, TRAJ8)
CAGGPTGFQKLVF

SEQ ID NO: 21582 - protein, 15 aa, Homo sapiens
  CDR3 for beta chain variable domain of TCR clone 10791 (TRBV5-1, TRBJ2-1)
CASSPPRAPYNEQFF

SEQ ID NO: 21583 - protein, 14 aa, Homo sapiens
  CDR3 for alpha chain variable domain of TCR clone 10792 (TRAV12-2, TRAJ13)
CAGKKTGGYQKVTF

SEQ ID NO: 21584 - protein, 15 aa, Homo sapiens
  CDR3 for beta chain variable domain of TCR clone 10792 (TRBV27, TRBJ2-1)
CASSNGGGSSNEQFF

SEQ ID NO: 21585 - protein, 12 aa, Homo sapiens
  CDR3 for alpha chain variable domain of TCR clone 10793 (TRAV26-2, TRAJ21)
CILKGNFNKFYF

SEQ ID NO: 21586 - protein, 15 aa, Homo sapiens
  CDR3 for beta chain variable domain of TCR clone 10793 (TRBV20-1, TRBJ2-7)
CSARDRVSGMDEQYF

SEQ ID NO: 21587 - protein, 15 aa, Homo sapiens
  CDR3 for alpha chain variable domain of TCR clone 10794 (TRAV27, TRAJ38)
CAARRNAGNNRKMIW

SEQ ID NO: 21588 - protein, 13 aa, Homo sapiens
  CDR3 for beta chain variable domain of TCR clone 10794 (TRBV12-5, TRBJ2-3)
CASGDRQSDTQYF

SEQ ID NO: 21589 - protein, 15 aa, Homo sapiens
  CDR3 for alpha chain variable domain of TCR clone 10795 (TRAV3, TRAJ5)
CAVRDLDTGRRALTF

SEQ ID NO: 21590 - protein, 13 aa, Homo sapiens
  CDR3 for beta chain variable domain of TCR clone 10795 (TRBV12-4, TRBJ2-7)
CASSPTETYEQCF

SEQ ID NO: 21591 - protein, 19 aa, Homo sapiens
  CDR3 for alpha chain variable domain of TCR clone 10796 (TRAV3, TRAJ37)
CAVRDIVGGYPSNTGKLIF

SEQ ID NO: 21592 - protein, 15 aa, Homo sapiens
  CDR3 for beta chain variable domain of TCR clone 10796 (TRBV5-1, TRBJ2-3)
CASSVTSGSTDTQYF

SEQ ID NO: 21593 - protein, 15 aa, Homo sapiens
  CDR3 for alpha chain variable domain of TCR clone 10797 (TRAV26-1, TRAJ53)
CIVRVEGGSNYRLTF

SEQ ID NO: 21594 - protein, 14 aa, Homo sapiens
  CDR3 for beta chain variable domain of TCR clone 10797 (TRBV4-3, TRBJ2-1)
CASSQDRWRGEQFF

SEQ ID NO: 21595 - protein, 11 aa, Homo sapiens
  CDR3 for alpha chain variable domain of TCR clone 10798 (TRAV13-1, TRAJ43)
CAASMRNDMRF

SEQ ID NO: 21596 - protein, 15 aa, Homo sapiens
  CDR3 for beta chain variable domain of TCR clone 10798 (TRBV7-2, TRBJ2-2)
CASSPTGANTGELFF

SEQ ID NO: 21597 - protein, 14 aa, Homo sapiens
  CDR3 for alpha chain variable domain of TCR clone 10799 (TRAV17, TRAJ16)
CATADFSDGQKLPF

SEQ ID NO: 21598 - protein, 15 aa, Homo sapiens
  CDR3 for beta chain variable domain of TCR clone 10799 (TRBV18, TRBJ2-1)
CASSPPSASYNEQFF

SEQ ID NO: 21599 - protein, 13 aa, Homo sapiens
  CDR3 for alpha chain variable domain of TCR clone 10800 (TRAV20, TRAJ56)
CAVHCLANSKLTF

SEQ ID NO: 21600 - protein, 12 aa, Homo sapiens
  CDR3 for beta chain variable domain of TCR clone 10800 (TRBV7-2, TRBJ2-1)
CASSPQDIEQFF

SEQ ID NO: 21601 - protein, 10 aa, Homo sapiens
  CDR3 for alpha chain variable domain of TCR clone 10801 (TRAV8-1, TRAJ43)
CAVNVDDMRF

SEQ ID NO: 21602 - protein, 15 aa, Homo sapiens
  CDR3 for beta chain variable domain of TCR clone 10801 (TRBV11-3, TRBJ2-7)
CASSPGPASSYEQYF

SEQ ID NO: 21603 - protein, 13 aa, Homo sapiens
  CDR3 for alpha chain variable domain of TCR clone 10802 (TRAV27, TRAJ45)
CRSSGGGADGLTF

SEQ ID NO: 21604 - protein, 17 aa, Homo sapiens
  CDR3 for beta chain variable domain of TCR clone 10802 (TRBV11-2, TRBJ2-1)
CASSLYPPGVEYNEQSF

SEQ ID NO: 21605 - protein, 13 aa, Homo sapiens
  CDR3 for alpha chain variable domain of TCR clone 10803 (TRAV13-1, TRAJ6)
CAASRGGSYIPTF

SEQ ID NO: 21606 - protein, 17 aa, Homo sapiens
  CDR3 for beta chain variable domain of TCR clone 10803 (TRBV13, TRBJ2-3)
CASSLSRVAGGRNTQYF

SEQ ID NO: 21607 - protein, 12 aa, Homo sapiens
  CDR3 for alpha chain variable domain of TCR clone 10804 (TRAV2, TRAJ33)
CAFMDSNYQLIW

SEQ ID NO: 21608 - protein, 15 aa, Homo sapiens
  CDR3 for beta chain variable domain of TCR clone 10804 (TRBV5-7, TRBJ1-2)
CASSLGVAANYGYTF

SEQ ID NO: 21609 - protein, 15 aa, Homo sapiens
  CDR3 for alpha chain variable domain of TCR clone 10805 (TRAV3, TRAJ5)
CAARDLDTGRRALTF

SEQ ID NO: 21610 - protein, 13 aa, Homo sapiens
  CDR3 for beta chain variable domain of TCR clone 10805 (TRBV12-4, TRBJ2-7)
CASSPTETYEQYF

SEQ ID NO: 21611 - protein, 12 aa, Homo sapiens
  CDR3 for alpha chain variable domain of TCR clone 10806 (TRAV13-1, TRAJ21)
CAAKEGFNKFYF

SEQ ID NO: 21612 - protein, 16 aa, Homo sapiens
  CDR3 for beta chain variable domain of TCR clone 10806 (TRBV6-1, TRBJ2-5)
CASSETLDRGAETQYF

SEQ ID NO: 21613 - protein, 15 aa, Homo sapiens
  CDR3 for alpha chain variable domain of TCR clone 10807 (TRAV23/DV6, TRAJ18)
CAARYRGSTLGRLYF

SEQ ID NO: 21614 - protein, 15 aa, Homo sapiens
  CDR3 for beta chain variable domain of TCR clone 10807 (TRBV20-1, TRBJ2-7)
CSARDRVSGMDEQYF

SEQ ID NO: 21615 - protein, 14 aa, Homo sapiens
  CDR3 for alpha chain variable domain of TCR clone 10808 (TRAV12-2, TRAJ13)
CAVKKTGGYQKVTF

SEQ ID NO: 21616 - protein, 12 aa, Homo sapiens
  CDR3 for beta chain variable domain of TCR clone 10808 (TRBV5-7, TRBJ2-7)
CASSLGRYEQYF

SEQ ID NO: 21617 - protein, 11 aa, Homo sapiens
  CDR3 for alpha chain variable domain of TCR clone 10809 (TRAV40, TRAJ53)
TSGGSNYKLTF

SEQ ID NO: 21618 - protein, 14 aa, Homo sapiens
  CDR3 for beta chain variable domain of TCR clone 10809 (TRBV9, TRBJ2-1)
CASSVAGTFDEQFF

SEQ ID NO: 21619 - protein, 11 aa, Homo sapiens
  CDR3 for alpha chain variable domain of TCR clone 10810 (TRAV27, TRAJ45)
CAGAQEEVLTD

SEQ ID NO: 21620 - protein, 11 aa, Homo sapiens
  CDR3 for beta chain variable domain of TCR clone 10810 (TRBV19, TRBJ1-1)
CASSIGSEAFF

SEQ ID NO: 21621 - protein, 14 aa, Homo sapiens
  CDR3 for alpha chain variable domain of TCR clone 10811 (TRAV9-2, TRAJ39)
CALYIYNAGNMLTF

SEQ ID NO: 21622 - protein, 13 aa, Homo sapiens
  CDR3 for beta chain variable domain of TCR clone 10811 (TRBV20-1, TRBJ2-1)
CSARPGRYNEQFF

SEQ ID NO: 21623 - protein, 11 aa, Homo sapiens
  CDR3 for alpha chain variable domain of TCR clone 10812 (TRAV2, TRAJ13)
CASGGYQKVTF

SEQ ID NO: 21624 - protein, 14 aa, Homo sapiens
  CDR3 for beta chain variable domain of TCR clone 10812 (TRBV4-1, TRBJ2-7)
CASSPVAGGDEQYF

SEQ ID NO: 21625 - protein, 11 aa, Homo sapiens
  CDR3 for alpha chain variable domain of TCR clone 10813 (TRAV12-1, TRAJ37)
CVVYNTGKLIF

SEQ ID NO: 21626 - protein, 12 aa, Homo sapiens
  CDR3 for beta chain variable domain of TCR clone 10813 (TRBV7-2, TRBJ2-5)
CASSLGPETQYF

SEQ ID NO: 21627 - protein, 17 aa, Homo sapiens
  CDR3 for alpha chain variable domain of TCR clone 10814 (TRAV3, TRAJ6)
CAVRDGPRAGGSYIPTF

SEQ ID NO: 21628 - protein, 14 aa, Homo sapiens
  CDR3 for beta chain variable domain of TCR clone 10814 (TRBV7-2, TRBJ2-7)
CASSTKTSFYEQYF

SEQ ID NO: 21629 - protein, 11 aa, Homo sapiens
  CDR3 for alpha chain variable domain of TCR clone 10815 (TRAV27, TRAJ45)
CAGAQEEVLTD

SEQ ID NO: 21630 - protein, 15 aa, Homo sapiens
  CDR3 for beta chain variable domain of TCR clone 10815 (TRBV9, TRBJ2-2)
CASSDFAGASGELFF

SEQ ID NO: 21631 - protein, 13 aa, Homo sapiens
  CDR3 for alpha chain variable domain of TCR clone 10816 (TRAV8-3, TRAJ36)
CAVGATGANNLFF

SEQ ID NO: 21632 - protein, 15 aa, Homo sapiens
  CDR3 for beta chain variable domain of TCR clone 10816 (TRBV7-2, TRBJ1-2)
CASNPRAGWNYGYTF

SEQ ID NO: 21633 - protein, 12 aa, Homo sapiens
  CDR3 for alpha chain variable domain of TCR clone 10817 (TRAV12-3, TRAJ29)
CAAREGNTPLAF

SEQ ID NO: 21634 - protein, 17 aa, Homo sapiens
  CDR3 for beta chain variable domain of TCR clone 10817 (TRBV18, TRBJ2-1)
CASSPLAAGAGDNEQFF

SEQ ID NO: 21635 - protein, 15 aa, Homo sapiens
  CDR3 for alpha chain variable domain of TCR clone 10818 (TRAV12-3, TRAJ6)
CAMSATTGGSYIPTF

SEQ ID NO: 21636 - protein, 16 aa, Homo sapiens
  CDR3 for beta chain variable domain of TCR clone 10818 (TRBV19, TRBJ2-1)
CASSMGGGSSYNEQFF

SEQ ID NO: 21637 - protein, 18 aa, Homo sapiens
  CDR3 for alpha chain variable domain of TCR clone 10819 (TRAV8-6, TRAJ52)
CAVSRANAGGTSYGKLTF

SEQ ID NO: 21638 - protein, 12 aa, Homo sapiens
  CDR3 for beta chain variable domain of TCR clone 10819 (TRBV14, TRBJ2-7)
CASSRLKGEQYF

SEQ ID NO: 21639 - protein, 13 aa, Homo sapiens
  CDR3 for alpha chain variable domain of TCR clone 10820 (TRAV1-2, TRAJ9)
CAALNTGGFKTIF

SEQ ID NO: 21640 - protein, 16 aa, Homo sapiens
  CDR3 for beta chain variable domain of TCR clone 10820 (TRBV20-1, TRBJ1-4)
CSAPGQGLLTNEKLFF

SEQ ID NO: 21641 - protein, 15 aa, Homo sapiens
  CDR3 for alpha chain variable domain of TCR clone 10821 (TRAV26-1, TRAJ44)
CIVRANTGTASKLTF

SEQ ID NO: 21642 - protein, 13 aa, Homo sapiens
  CDR3 for beta chain variable domain of TCR clone 10821 (TRBV12-5, TRBJ2-3)
CASGDRQSDTQYF

SEQ ID NO: 21643 - protein, 14 aa, Homo sapiens
  CDR3 for alpha chain variable domain of TCR clone 10822 (TRAV13-1, TRAJ6)
CAASKSGGSYIPTF

SEQ ID NO: 21644 - protein, 14 aa, Homo sapiens
  CDR3 for beta chain variable domain of TCR clone 10822 (TRBV2, TRBJ2-5)
CASKKATGLETQYF

SEQ ID NO: 21645 - protein, 13 aa, Homo sapiens
  CDR3 for alpha chain variable domain of TCR clone 10823 (TRAV8-4, TRAJ20)
CAVSRSNDYKLSF

SEQ ID NO: 21646 - protein, 15 aa, Homo sapiens
  CDR3 for beta chain variable domain of TCR clone 10823 (TRBV6-1, TRBJ2-2)
CASIVTSGITGELFF

SEQ ID NO: 21647 - protein, 12 aa, Homo sapiens
  CDR3 for alpha chain variable domain of TCR clone 10824 (TRAV27, TRAJ13)
CAGAGGYQKVTF

SEQ ID NO: 21648 - protein, 14 aa, Homo sapiens
  CDR3 for beta chain variable domain of TCR clone 10824 (TRBV12-5, TRBJ2-5)
CASGSRTHQETQYF

SEQ ID NO: 21649 - protein, 20 aa, Homo sapiens
  CDR3 for alpha chain variable domain of TCR clone 10825 (TRAV12-1, TRAJ42)
SSVIQPPTSVKGGSQGNLIF

SEQ ID NO: 21650 - protein, 17 aa, Homo sapiens
  CDR3 for beta chain variable domain of TCR clone 10825 (TRBV11-2, TRBJ2-3)
CQQLRGASRGAPNTQYF

SEQ ID NO: 21651 - protein, 12 aa, Homo sapiens
  CDR3 for alpha chain variable domain of TCR clone 10826 (TRAV1-1, TRAJ24)
CAARGSWGKFQF

SEQ ID NO: 21652 - protein, 16 aa, Homo sapiens
  CDR3 for beta chain variable domain of TCR clone 10826 (TRBV27, TRBJ2-2)
CASSFRGLVRTGELFF

SEQ ID NO: 21653 - protein, 14 aa, Homo sapiens
  CDR3 for alpha chain variable domain of TCR clone 10827 (TRAV8-4, TRAJ9)
CAVRINTGGFKTIF

SEQ ID NO: 21654 - protein, 14 aa, Homo sapiens
  CDR3 for beta chain variable domain of TCR clone 10827 (TRBV6-1, TRBJ1-3)
CASVQGGGGNTIYF

SEQ ID NO: 21655 - protein, 14 aa, Homo sapiens
  CDR3 for alpha chain variable domain of TCR clone 10828 (TRAV1-2, TRAJ6)
CAVRSSGGSYIPTF

SEQ ID NO: 21656 - protein, 15 aa, Homo sapiens
  CDR3 for beta chain variable domain of TCR clone 10828 (TRBV20-1, TRBJ2-7)
CSARDRVSGMDEQYF

SEQ ID NO: 21657 - protein, 14 aa, Homo sapiens
  CDR3 for alpha chain variable domain of TCR clone 10829 (TRAV23/DV6, TRAJ37)
CAASTTGNTGKLIF

SEQ ID NO: 21658 - protein, 16 aa, Homo sapiens
  CDR3 for beta chain variable domain of TCR clone 10829 (TRBV24-1, TRBJ2-1)
CATSDLAGPTYNEQFF

SEQ ID NO: 21659 - protein, 15 aa, Homo sapiens
  CDR3 for alpha chain variable domain of TCR clone 10830 (TRAV14/DV4, TRAJ48)
CAMTLSNFGNEKLTF

SEQ ID NO: 21660 - protein, 16 aa, Homo sapiens
  CDR3 for beta chain variable domain of TCR clone 10830 (TRBV12-4, TRBJ2-1)
CASSAVGQGNGDEQFF

SEQ ID NO: 21661 - protein, 14 aa, Homo sapiens
  CDR3 for alpha chain variable domain of TCR clone 10831 (TRAV1-2, TRAJ16)
CAVNRFSDGRKLLF

SEQ ID NO: 21662 - protein, 15 aa, Homo sapiens
  CDR3 for beta chain variable domain of TCR clone 10831 (TRBV7-9, TRBJ1-6)
CASSSPGRGNSPLHF

SEQ ID NO: 21663 - protein, 12 aa, Homo sapiens
  CDR3 for alpha chain variable domain of TCR clone 10832 (TRAV13-2, TRAJ13)
CAENIPEVGSYL

SEQ ID NO: 21664 - protein, 14 aa, Homo sapiens
  CDR3 for beta chain variable domain of TCR clone 10832 (TRBV20-1, TRBJ1-5)
CSARDDRGNQPQHF

SEQ ID NO: 21665 - protein, 12 aa, Homo sapiens
  CDR3 for alpha chain variable domain of TCR clone 10833 (TRAV8-3, TRAJ37)
CAVVGNTGKLIF

SEQ ID NO: 21666 - protein, 17 aa, Homo sapiens
  CDR3 for beta chain variable domain of TCR clone 10833 (TRBV12-4, TRBJ2-3)
CASSSGLAGGHFDTQYF

SEQ ID NO: 21667 - protein, 14 aa, Homo sapiens
  CDR3 for alpha chain variable domain of TCR clone 10834 (TRAV13-1, TRAJ35)
CAASKGGFGKVLHC

SEQ ID NO: 21668 - protein, 13 aa, Homo sapiens
  CDR3 for beta chain variable domain of TCR clone 10834 (TRBV7-3, TRBJ1-1)
CASSQDWGAEAFF

SEQ ID NO: 21669 - protein, 13 aa, Homo sapiens
  CDR3 for alpha chain variable domain of TCR clone 10835 (TRAV21, TRAJ27)
CAARHGNAGKSTF

SEQ ID NO: 21670 - protein, 14 aa, Homo sapiens
  CDR3 for beta chain variable domain of TCR clone 10835 (TRBV7-6, TRBJ2-3)
CASSLGTVTDTQYF

SEQ ID NO: 21671 - protein, 11 aa, Homo sapiens
  CDR3 for alpha chain variable domain of TCR clone 10836 (TRAV3, TRAJ21)
CAVGNFNKFCF

SEQ ID NO: 21672 - protein, 16 aa, Homo sapiens
  CDR3 for beta chain variable domain of TCR clone 10836 (TRBV19, TRBJ2-1)
CASSKAGPSSYNEQFF

SEQ ID NO: 21673 - protein, 15 aa, Homo sapiens
  CDR3 for alpha chain variable domain of TCR clone 10837 (TRAV3, TRAJ3)
CAVRDRRSSASKIIF

SEQ ID NO: 21674 - protein, 17 aa, Homo sapiens
  CDR3 for beta chain variable domain of TCR clone 10837 (TRBV5-7, TRBJ2-5)
CQQHARFGQLYQETQYF

SEQ ID NO: 21675 - protein, 17 aa, Homo sapiens
  CDR3 for alpha chain variable domain of TCR clone 10838 (TRAV3, TRAJ6)
CAVRDGPRAGGSYIPTF

SEQ ID NO: 21676 - protein, 14 aa, Homo sapiens
  CDR3 for beta chain variable domain of TCR clone 10838 (TRBV7-2, TRBJ2-7)
CASRSQGAAYEQYF

SEQ ID NO: 21677 - protein, 14 aa, Homo sapiens
  CDR3 for alpha chain variable domain of TCR clone 10839 (TRAV12-2, TRAJ17)
CAVLFKAAGNELTF

SEQ ID NO: 21678 - protein, 17 aa, Homo sapiens
  CDR3 for beta chain variable domain of TCR clone 10839 (TRBV20-1, TRBJ2-2)
CSASGSGQGGLTGELFF

SEQ ID NO: 21679 - protein, 12 aa, Homo sapiens
  CDR3 for alpha chain variable domain of TCR clone 10840 (TRAV12-3, TRAJ17)
CAMTLTGNKLTC

SEQ ID NO: 21680 - protein, 15 aa, Homo sapiens
  CDR3 for beta chain variable domain of TCR clone 10840 (TRBV20-1, TRBJ2-7)
CSARDRVSGMDEQYF

SEQ ID NO: 21681 - protein, 11 aa, Homo sapiens
  CDR3 for alpha chain variable domain of TCR clone 10841 (TRAV2, TRAJ13)
CASGGYQKVTF

SEQ ID NO: 21682 - protein, 13 aa, Homo sapiens
  CDR3 for beta chain variable domain of TCR clone 10841 (TRBV10-3, TRBJ2-7)
CASKLAVNYEQYF

SEQ ID NO: 21683 - protein, 13 aa, Homo sapiens
  CDR3 for alpha chain variable domain of TCR clone 10842 (TRAV8-3, TRAJ28)
CAVGAVGSYQLTF

SEQ ID NO: 21684 - protein, 15 aa, Homo sapiens
  CDR3 for beta chain variable domain of TCR clone 10842 (TRBV7-9, TRBJ1-5)
RASSQGHQPNQPQHF

SEQ ID NO: 21685 - protein, 15 aa, Homo sapiens
  CDR3 for alpha chain variable domain of TCR clone 10843 (TRAV4, TRAJ4)
CLVGPLSGGYNKLIF

SEQ ID NO: 21686 - protein, 16 aa, Homo sapiens
  CDR3 for beta chain variable domain of TCR clone 10843 (TRBV7-8, TRBJ1-4)
CASSLGVGTSNEKLFF

SEQ ID NO: 21687 - protein, 10 aa, Homo sapiens
  CDR3 for alpha chain variable domain of TCR clone 10844 (TRAV1-2, TRAJ31)
CAFFDARLMF

SEQ ID NO: 21688 - protein, 11 aa, Homo sapiens
  CDR3 for beta chain variable domain of TCR clone 10844 (TRBV29-1, TRBJ2-5)
CSEDRTGTQYF

SEQ ID NO: 21689 - protein, 14 aa, Homo sapiens
  CDR3 for alpha chain variable domain of TCR clone 10845 (TRAV13-1, TRAJ35)
CAASKGGFGNVLHY

SEQ ID NO: 21690 - protein, 13 aa, Homo sapiens
  CDR3 for beta chain variable domain of TCR clone 10845 (TRBV7-3, TRBJ1-1)
CASSQDWGAEAFF

SEQ ID NO: 21691 - protein, 15 aa, Homo sapiens
  CDR3 for alpha chain variable domain of TCR clone 10846 (TRAV3, TRAJ20)
CAVKDSRSNDYKLSF

SEQ ID NO: 21692 - protein, 14 aa, Homo sapiens
  CDR3 for beta chain variable domain of TCR clone 10846 (TRBV20-1, TRBJ2-7)
CSARRGNGIYEQYF

SEQ ID NO: 21693 - protein, 14 aa, Homo sapiens
  CDR3 for alpha chain variable domain of TCR clone 10847 (TRAV12-1, TRAJ30)
CVVNIGGRDGKIIF

SEQ ID NO: 21694 - protein, 14 aa, Homo sapiens
  CDR3 for beta chain variable domain of TCR clone 10847 (TRBV7-6, TRBJ2-3)
CVSSLGTVTDTQYF

SEQ ID NO: 21695 - protein, 11 aa, Homo sapiens
  CDR3 for alpha chain variable domain of TCR clone 10848 (TRAV3, TRAJ21)
CAVGNVNKFYF

SEQ ID NO: 21696 - protein, 16 aa, Homo sapiens
  CDR3 for beta chain variable domain of TCR clone 10848 (TRBV19, TRBJ2-1)
CASSKAGPSSYNEQFF

SEQ ID NO: 21697 - protein, 14 aa, Homo sapiens
  CDR3 for alpha chain variable domain of TCR clone 10849 (TRAV9-2, TRAJ38)
CALSRAGNNRKLIW

SEQ ID NO: 21698 - protein, 12 aa, Homo sapiens
  CDR3 for beta chain variable domain of TCR clone 10849 (TRBV7-2, TRBJ2-5)
CASSQYQETQYF

SEQ ID NO: 21699 - protein, 14 aa, Homo sapiens
  CDR3 for alpha chain variable domain of TCR clone 10850 (TRAV9-2, TRAJ39)
CALYIYNAGNMLTF

SEQ ID NO: 21700 - protein, 15 aa, Homo sapiens
  CDR3 for beta chain variable domain of TCR clone 10850 (TRBV20-1, TRBJ1-6)
CSARVQGQGVSPLHF

SEQ ID NO: 21701 - protein, 15 aa, Homo sapiens
  CDR3 for alpha chain variable domain of TCR clone 10851 (TRAV23/DV6, TRAJ44)
CAAALNTGTASKLTF

SEQ ID NO: 21702 - protein, 12 aa, Homo sapiens
  CDR3 for beta chain variable domain of TCR clone 10851 (TRBV20-1, TRBJ1-5)
CSARAPDQPQHF

SEQ ID NO: 21703 - protein, 13 aa, Homo sapiens
  CDR3 for alpha chain variable domain of TCR clone 10852 (TRAV29/DV5, TRAJ49)
CAASQNTGNQFYF

SEQ ID NO: 21704 - protein, 15 aa, Homo sapiens
  CDR3 for beta chain variable domain of TCR clone 10852 (TRBV9, TRBJ2-5)
CASSVTGLYQETQYF

SEQ ID NO: 21705 - protein, 16 aa, Homo sapiens
  CDR3 for alpha chain variable domain of TCR clone 10853 (TRAV12-3, TRAJ53)
FAMSPGSGGSNYKLTF

SEQ ID NO: 21706 - protein, 11 aa, Homo sapiens
  CDR3 for beta chain variable domain of TCR clone 10853 (TRBV29-1, TRBJ2-5)
CSEDRTGTQYF

SEQ ID NO: 21707 - protein, 15 aa, Homo sapiens
  CDR3 for alpha chain variable domain of TCR clone 10854 (TRAV8-3, TRAJ45)
CASSYSGVGADGLTF

SEQ ID NO: 21708 - protein, 13 aa, Homo sapiens
  CDR3 for beta chain variable domain of TCR clone 10854 (TRBV10-3, TRBJ2-7)
CASKLAVNYEQYF

SEQ ID NO: 21709 - protein, 14 aa, Homo sapiens
  CDR3 for alpha chain variable domain of TCR clone 10855 (TRAV13-1, TRAJ35)
CAASKVGFGNVLHC

SEQ ID NO: 21710 - protein, 13 aa, Homo sapiens
  CDR3 for beta chain variable domain of TCR clone 10855 (TRBV7-3, TRBJ1-1)
CASSQDWGAEAFF

SEQ ID NO: 21711 - protein, 11 aa, Homo sapiens
  CDR3 for alpha chain variable domain of TCR clone 10856 (TRAV21, TRAJ11)
CAVNGYSTLTF

SEQ ID NO: 21712 - protein, 11 aa, Homo sapiens
  CDR3 for beta chain variable domain of TCR clone 10856 (TRBV19, TRBJ1-1)
CAGSIGSEAFF

SEQ ID NO: 21713 - protein, 13 aa, Homo sapiens
  CDR3 for alpha chain variable domain of TCR clone 10857 (TRAV2, TRAJ40)
CAVVTSGTYKYIF

SEQ ID NO: 21714 - protein, 13 aa, Homo sapiens
  CDR3 for beta chain variable domain of TCR clone 10857 (TRBV7-6, TRBJ2-1)
CQQLGGGADEQFF

SEQ ID NO: 21715 - protein, 14 aa, Homo sapiens
  CDR3 for alpha chain variable domain of TCR clone 10858 (TRAV8-4, TRAJ4)
CAVSPLGGYNKLIF

SEQ ID NO: 21716 - protein, 13 aa, Homo sapiens
  CDR3 for beta chain variable domain of TCR clone 10858 (TRBV11-3, TRBJ1-2)
CASSLPGDVGYTF

SEQ ID NO: 21717 - protein, 14 aa, Homo sapiens
  CDR3 for alpha chain variable domain of TCR clone 10859 (TRAV12-2, TRAJ17)
CAVLFKAAGNKLTF

SEQ ID NO: 21718 - protein, 17 aa, Homo sapiens
  CDR3 for beta chain variable domain of TCR clone 10859 (TRBV20-1, TRBJ2-2)
CSASGSGRGGLTGELFF

SEQ ID NO: 21719 - protein, 16 aa, Homo sapiens
  CDR3 for alpha chain variable domain of TCR clone 10860 (TRAV30, TRAJ24)
CGTEIVDADSWGKFQI

SEQ ID NO: 21720 - protein, 14 aa, Homo sapiens
  CDR3 for beta chain variable domain of TCR clone 10860 (TRBV12-5, TRBJ2-5)
CASGSRTHQETQYF

SEQ ID NO: 21721 - protein, 13 aa, Homo sapiens
  CDR3 for alpha chain variable domain of TCR clone 10861 (TRAV3, TRAJ21)
CAVREPDFNKFYF

SEQ ID NO: 21722 - protein, 13 aa, Homo sapiens
  CDR3 for beta chain variable domain of TCR clone 10861 (TRBV9, TRBJ2-1)
CASSPSGRNEQFF

SEQ ID NO: 21723 - protein, 13 aa, Homo sapiens
  CDR3 for alpha chain variable domain of TCR clone 10862 (TRAV38-2/DV8, TRAJ34)
CAYRNYNTDKLIF

SEQ ID NO: 21724 - protein, 11 aa, Homo sapiens
  CDR3 for beta chain variable domain of TCR clone 10862 (TRBV29-1, TRBJ2-5)
CSEDRTGTQYF

SEQ ID NO: 21725 - protein, 14 aa, Homo sapiens
  CDR3 for alpha chain variable domain of TCR clone 10863 (TRAV1-2, TRAJ16)
CAVNRFSDGQKLLL

SEQ ID NO: 21726 - protein, 11 aa, Homo sapiens
  CDR3 for beta chain variable domain of TCR clone 10863 (TRBV7-8, TRBJ2-7)
CASSLSLEQYF

SEQ ID NO: 21727 - protein, 14 aa, Homo sapiens
  CDR3 for alpha chain variable domain of TCR clone 10864 (TRAV8-4, TRAJ9)
CAVRINTGGFKTIF

SEQ ID NO: 21728 - protein, 15 aa, Homo sapiens
  CDR3 for beta chain variable domain of TCR clone 10864 (TRBV10-2, TRBJ2-6)
CASSEQGTGTNVLTF

SEQ ID NO: 21729 - protein, 15 aa, Homo sapiens
  CDR3 for alpha chain variable domain of TCR clone 10865 (TRAV25, TRAJ52)
CAGRPGDTSYGKLTF

SEQ ID NO: 21730 - protein, 17 aa, Homo sapiens
  CDR3 for beta chain variable domain of TCR clone 10865 (TRBV7-8, TRBJ2-6)
CASSAGTGGAGANVLTF

SEQ ID NO: 21731 - protein, 13 aa, Homo sapiens
  CDR3 for alpha chain variable domain of TCR clone 10866 (TRAV21, TRAJ27)
CAARPGSAGKSTF

SEQ ID NO: 21732 - protein, 14 aa, Homo sapiens
  CDR3 for beta chain variable domain of TCR clone 10866 (TRBV7-6, TRBJ2-3)
CASSLGTVTDTQYF

SEQ ID NO: 21733 - protein, 14 aa, Homo sapiens
  CDR3 for alpha chain variable domain of TCR clone 10867 (TRAV35, TRAJ22)
CARLRPGSARQLTF

SEQ ID NO: 21734 - protein, 15 aa, Homo sapiens
  CDR3 for beta chain variable domain of TCR clone 10867 (TRBV12-4, TRBJ2-5)
CASSPPTGLQETQYF

SEQ ID NO: 21735 - protein, 10 aa, Homo sapiens
  CDR3 for alpha chain variable domain of TCR clone 10868 (TRAV23/DV6, TRAJ57)
CAASSTLSQG

SEQ ID NO: 21736 - protein, 15 aa, Homo sapiens
  CDR3 for beta chain variable domain of TCR clone 10868 (TRBV20-1, TRBJ2-7)
CSARDRVSGMDEQYF

SEQ ID NO: 21737 - protein, 18 aa, Homo sapiens
  CDR3 for alpha chain variable domain of TCR clone 10869 (TRAV13-1, TRAJ52)
CAAKNPNAGGTSYGKLTF

SEQ ID NO: 21738 - protein, 13 aa, Homo sapiens
  CDR3 for beta chain variable domain of TCR clone 10869 (TRBV27, TRBJ1-1)
CASSLSIGAEAFF

SEQ ID NO: 21739 - protein, 15 aa, Homo sapiens
  CDR3 for alpha chain variable domain of TCR clone 10870 (TRAV3, TRAJ5)
CAVRDLDTGRRALTF

SEQ ID NO: 21740 - protein, 15 aa, Homo sapiens
  CDR3 for beta chain variable domain of TCR clone 10870 (TRBV6-3, TRBJ2-7)
CASSSPGTVFYEQYF

SEQ ID NO: 21741 - protein, 16 aa, Homo sapiens
  CDR3 for alpha chain variable domain of TCR clone 10871 (TRAV12-3, TRAJ53)
CAMSPGSGGSNSKLTF

SEQ ID NO: 21742 - protein, 11 aa, Homo sapiens
  CDR3 for beta chain variable domain of TCR clone 10871 (TRBV29-1, TRBJ2-5)
CSEDRTGTQYF

SEQ ID NO: 21743 - protein, 15 aa, Homo sapiens
  CDR3 for alpha chain variable domain of TCR clone 10872 (TRAV3, TRAJ5)
CAVRDLDTGGRALTF

SEQ ID NO: 21744 - protein, 13 aa, Homo sapiens
  CDR3 for beta chain variable domain of TCR clone 10872 (TRBV12-4, TRBJ2-7)
CASSPTETYEQYF

SEQ ID NO: 21745 - protein, 13 aa, Homo sapiens
  CDR3 for alpha chain variable domain of TCR clone 10873 (TRAV23/DV6, TRAJ45)
CAARRGGADGLTF

SEQ ID NO: 21746 - protein, 14 aa, Homo sapiens
  CDR3 for beta chain variable domain of TCR clone 10873 (TRBV7-2, TRBJ2-5)
CASSPARGTETQYF

SEQ ID NO: 21747 - protein, 16 aa, Homo sapiens
  CDR3 for alpha chain variable domain of TCR clone 10874 (TRAV29/DV5, )
CAARQNKTEASASYSH

SEQ ID NO: 21748 - protein, 14 aa, Homo sapiens
  CDR3 for beta chain variable domain of TCR clone 10874 (TRBV12-5, TRBJ2-5)
CASGSRTHQETQYF

SEQ ID NO: 21749 - protein, 15 aa, Homo sapiens
  CDR3 for alpha chain variable domain of TCR clone 10875 (TRAV17, TRAJ57)
CATGPSQGGSEKLVV

SEQ ID NO: 21750 - protein, 16 aa, Homo sapiens
  CDR3 for beta chain variable domain of TCR clone 10875 (TRBV12-4, TRBJ1-5)
CASSRPVGGSNQPQHF

SEQ ID NO: 21751 - protein, 14 aa, Homo sapiens
  CDR3 for alpha chain variable domain of TCR clone 10876 (TRAV21, TRAJ35)
CAVMPIGFGNGLHC

SEQ ID NO: 21752 - protein, 12 aa, Homo sapiens
  CDR3 for beta chain variable domain of TCR clone 10876 (TRBV7-9, TRBJ2-7)
CASSIKREEQYF

SEQ ID NO: 21753 - protein, 15 aa, Homo sapiens
  CDR3 for alpha chain variable domain of TCR clone 10877 (TRAV8-4, TRAJ42)
CAVSDDRGSQGNLIF

SEQ ID NO: 21754 - protein, 17 aa, Homo sapiens
  CDR3 for beta chain variable domain of TCR clone 10877 (TRBV11-2, TRBJ2-1)
CASSLYPPGVEYNEQFF

SEQ ID NO: 21755 - protein, 12 aa, Homo sapiens
  CDR3 for alpha chain variable domain of TCR clone 10878 (TRAV27, TRAJ20)
CAGASNDYKLSF

SEQ ID NO: 21756 - protein, 15 aa, Homo sapiens
  CDR3 for beta chain variable domain of TCR clone 10878 (TRBV5-4, TRBJ1-2)
CASRGSRGTSGGYTF

SEQ ID NO: 21757 - protein, 15 aa, Homo sapiens
  CDR3 for alpha chain variable domain of TCR clone 10879 (TRAV13-1, TRAJ48)
CAPLGSNFGNEKLTF

SEQ ID NO: 21758 - protein, 14 aa, Homo sapiens
  CDR3 for beta chain variable domain of TCR clone 10879 (TRBV27, TRBJ2-3)
CATWTSGRPWGQYF

SEQ ID NO: 21759 - protein, 15 aa, Homo sapiens
  CDR3 for alpha chain variable domain of TCR clone 10880 (TRAV4, TRAJ39)
CLVGPNNNAGSMLTF

SEQ ID NO: 21760 - protein, 13 aa, Homo sapiens
  CDR3 for beta chain variable domain of TCR clone 10880 (TRBV11-2, TRBJ2-5)
CASSSTGEETQYF

SEQ ID NO: 21761 - protein, 13 aa, Homo sapiens
  CDR3 for alpha chain variable domain of TCR clone 10881 (TRAV23/DV6, TRAJ49)
CAASHSTGNQFYF

SEQ ID NO: 21762 - protein, 15 aa, Homo sapiens
  CDR3 for beta chain variable domain of TCR clone 10881 (TRBV6-5, TRBJ2-1)
CASSYDAGAGNEQFF

SEQ ID NO: 21763 - protein, 17 aa, Homo sapiens
  CDR3 for alpha chain variable domain of TCR clone 10882 (TRAV13-2, TRAJ43)
CAENEDMRFGAGTRLTV

SEQ ID NO: 21764 - protein, 15 aa, Homo sapiens
  CDR3 for beta chain variable domain of TCR clone 10882 (TRBV20-1, TRBJ2-7)
CSARREAGAPREQYF

SEQ ID NO: 21765 - protein, 13 aa, Homo sapiens
  CDR3 for alpha chain variable domain of TCR clone 10883 (TRAV2, TRAJ40)
CAVVTTGTYKYIF

SEQ ID NO: 21766 - protein, 14 aa, Homo sapiens
  CDR3 for beta chain variable domain of TCR clone 10883 (TRBV19, TRBJ2-1)
CASPTFVLSGEQFF

SEQ ID NO: 21767 - protein, 17 aa, Homo sapiens
  CDR3 for alpha chain variable domain of TCR clone 10884 (TRAV26-1, TRAJ37)
CIVRVITVSSNTGKLIF

SEQ ID NO: 21768 - protein, 13 aa, Homo sapiens
  CDR3 for beta chain variable domain of TCR clone 10884 (TRBV2, TRBJ1-4)
CASSERAGEKLFF

SEQ ID NO: 21769 - protein, 14 aa, Homo sapiens
  CDR3 for alpha chain variable domain of TCR clone 10885 (TRAV12-2, TRAJ40)
CAVKIPSGTYKYIF

SEQ ID NO: 21770 - protein, 15 aa, Homo sapiens
  CDR3 for beta chain variable domain of TCR clone 10885 (TRBV27, TRBJ2-7)
CASSTAGTGSYEQYF

SEQ ID NO: 21771 - protein, 15 aa, Homo sapiens
  CDR3 for alpha chain variable domain of TCR clone 10886 (TRAV21, TRAJ40)
CAVRPQTSGTYKYIF

SEQ ID NO: 21772 - protein, 13 aa, Homo sapiens
  CDR3 for beta chain variable domain of TCR clone 10886 (TRBV7-2, TRBJ2-2)
CASSSVRARELFF

SEQ ID NO: 21773 - protein, 14 aa, Homo sapiens
  CDR3 for alpha chain variable domain of TCR clone 10887 (TRAV26-2, TRAJ26)
CILRELFYGQNFVF

SEQ ID NO: 21774 - protein, 16 aa, Homo sapiens
  CDR3 for beta chain variable domain of TCR clone 10887 (TRBV9, TRBJ2-1)
CASSRFSGGAYNEQFF

SEQ ID NO: 21775 - protein, 16 aa, Homo sapiens
  CDR3 for alpha chain variable domain of TCR clone 10888 (TRAV21, TRAJ37)
CAVRTAGSSNPGKLIF

SEQ ID NO: 21776 - protein, 13 aa, Homo sapiens
  CDR3 for beta chain variable domain of TCR clone 10888 (TRBV7-9, TRBJ2-5)
CASLPSGRETQYF

SEQ ID NO: 21777 - protein, 14 aa, Homo sapiens
  CDR3 for alpha chain variable domain of TCR clone 10889 (TRAV17, TRAJ57)
CAKDPQGGSEKLVF

SEQ ID NO: 21778 - protein, 18 aa, Homo sapiens
  CDR3 for beta chain variable domain of TCR clone 10889 (TRBV6-6, TRBJ1-3)
CASSYSKWDSISGNTIYF

SEQ ID NO: 21779 - protein, 17 aa, Homo sapiens
  CDR3 for alpha chain variable domain of TCR clone 10890 (TRAV36/DV7, TRAJ42)
CAGGGMNYGGSQGNLIF

SEQ ID NO: 21780 - protein, 13 aa, Homo sapiens
  CDR3 for beta chain variable domain of TCR clone 10890 (TRBV19, TRBJ2-5)
CASSIHSQETQYF

SEQ ID NO: 21781 - protein, 15 aa, Homo sapiens
  CDR3 for alpha chain variable domain of TCR clone 10891 (TRAV12-2, TRAJ53)
CAVNGGGGSNYKLTF

SEQ ID NO: 21782 - protein, 13 aa, Homo sapiens
  CDR3 for beta chain variable domain of TCR clone 10891 (TRBV3-1, TRBJ1-1)
RASSPGVITEAFF

SEQ ID NO: 21783 - protein, 15 aa, Homo sapiens
  CDR3 for alpha chain variable domain of TCR clone 10892 (TRAV27, TRAJ38)
CAARRNAGNNRKLIW

SEQ ID NO: 21784 - protein, 16 aa, Homo sapiens
  CDR3 for beta chain variable domain of TCR clone 10892 (TRBV7-2, TRBJ2-1)
CASSPRLAGSNNEQFF

SEQ ID NO: 21785 - protein, 12 aa, Homo sapiens
  CDR3 for alpha chain variable domain of TCR clone 10893 (TRAV27, TRAJ34)
CAGAKNTDKLIF

SEQ ID NO: 21786 - protein, 13 aa, Homo sapiens
  CDR3 for beta chain variable domain of TCR clone 10893 (TRBV4-1, TRBJ2-1)
CASSQEVQYKQFF

SEQ ID NO: 21787 - protein, 14 aa, Homo sapiens
  CDR3 for alpha chain variable domain of TCR clone 10894 (TRAV14/DV4, TRAJ49)
CAMREGVNGNQFYF

SEQ ID NO: 21788 - protein, 14 aa, Homo sapiens
  CDR3 for beta chain variable domain of TCR clone 10894 (TRBV5-5, TRBJ2-7)
CASSLGLAVYEQYF

SEQ ID NO: 21789 - protein, 14 aa, Homo sapiens
  CDR3 for alpha chain variable domain of TCR clone 10895 (TRAV1-2, TRAJ8)
CAVREDTGFQKLVF

SEQ ID NO: 21790 - protein, 15 aa, Homo sapiens
  CDR3 for beta chain variable domain of TCR clone 10895 (TRBV7-2, TRBJ2-1)
CASSSGLAGGNEQFF

SEQ ID NO: 21791 - protein, 15 aa, Homo sapiens
  CDR3 for alpha chain variable domain of TCR clone 10896 (TRAV8-3, TRAJ45)
CASSYSGGGADGLTF

SEQ ID NO: 21792 - protein, 13 aa, Homo sapiens
  CDR3 for beta chain variable domain of TCR clone 10896 (TRBV7-9, TRBJ1-2)
CASSLKQNYGYTF

SEQ ID NO: 21793 - protein, 15 aa, Homo sapiens
  CDR3 for alpha chain variable domain of TCR clone 10897 (TRAV23/DV6, TRAJ18)
CAARYRGSTLGRLYF

SEQ ID NO: 21794 - protein, 13 aa, Homo sapiens
  CDR3 for beta chain variable domain of TCR clone 10897 (TRBV7-2, TRBJ2-7)
CASSAPSGSEQYF

SEQ ID NO: 21795 - protein, 10 aa, Homo sapiens
  CDR3 for alpha chain variable domain of TCR clone 10898 (TRAV23/DV6, TRAJ57)
CAASSTLSQG

SEQ ID NO: 21796 - protein, 14 aa, Homo sapiens
  CDR3 for beta chain variable domain of TCR clone 10898 (TRBV25-1, TRBJ1-1)
CASTHLGGNTEAVF

SEQ ID NO: 21797 - protein, 11 aa, Homo sapiens
  CDR3 for alpha chain variable domain of TCR clone 10899 (TRAV1-1, TRAJ23)
CAVRQGGKLIF

SEQ ID NO: 21798 - protein, 15 aa, Homo sapiens
  CDR3 for beta chain variable domain of TCR clone 10899 (TRBV27, TRBJ2-7)
CASSTAGTGSYEQYF

SEQ ID NO: 21799 - protein, 14 aa, Homo sapiens
  CDR3 for alpha chain variable domain of TCR clone 10900 (TRAV12-3, TRAJ42)
CAMNYGGSQGNLIF

SEQ ID NO: 21800 - protein, 15 aa, Homo sapiens
  CDR3 for beta chain variable domain of TCR clone 10900 (TRBV9, TRBJ2-1)
CASSLAGSSYNEQFF

SEQ ID NO: 21801 - protein, 14 aa, Homo sapiens
  CDR3 for alpha chain variable domain of TCR clone 10901 (TRAV1-2, TRAJ16)
CAVNRFSDGQKLLF

SEQ ID NO: 21802 - protein, 13 aa, Homo sapiens
  CDR3 for beta chain variable domain of TCR clone 10901 (TRBV20-1, TRBJ1-6)
CSAPLGVGSPLHF

SEQ ID NO: 21803 - protein, 14 aa, Homo sapiens
  CDR3 for alpha chain variable domain of TCR clone 10902 (TRAV1-2, TRAJ8)
CAVREDTGFQKLVF

SEQ ID NO: 21804 - protein, 16 aa, Homo sapiens
  CDR3 for beta chain variable domain of TCR clone 10902 (TRBV19, TRBJ1-1)
CASSPTRFWPGTEAFF

SEQ ID NO: 21805 - protein, 11 aa, Homo sapiens
  CDR3 for alpha chain variable domain of TCR clone 10903 (TRAV21, TRAJ31)
CAVRNNARLMF

SEQ ID NO: 21806 - protein, 17 aa, Homo sapiens
  CDR3 for beta chain variable domain of TCR clone 10903 (TRBV28, TRBJ1-5)
CASSLSWLVSSNQPLHF

SEQ ID NO: 21807 - protein, 15 aa, Homo sapiens
  CDR3 for alpha chain variable domain of TCR clone 10904 (TRAV12-1, TRAJ44)
CVADLPTGTTSKLTF

SEQ ID NO: 21808 - protein, 13 aa, Homo sapiens
  CDR3 for beta chain variable domain of TCR clone 10904 (TRBV6-5, TRBJ2-5)
CASSPQGGETQYF

SEQ ID NO: 21809 - protein, 14 aa, Homo sapiens
  CDR3 for alpha chain variable domain of TCR clone 10905 (TRAV9-2, TRAJ39)
CALYIYNAGNMLTF

SEQ ID NO: 21810 - protein, 17 aa, Homo sapiens
  CDR3 for beta chain variable domain of TCR clone 10905 (TRBV13, TRBJ2-3)
CASSLSRVAGGRNTQYF

SEQ ID NO: 21811 - protein, 12 aa, Homo sapiens
  CDR3 for alpha chain variable domain of TCR clone 10906 (TRAV16, TRAJ10)
CSRTGGGNKLTL

SEQ ID NO: 21812 - protein, 15 aa, Homo sapiens
  CDR3 for beta chain variable domain of TCR clone 10906 (TRBV6-3, TRBJ2-7)
CASSSPGTVFYEQYF

SEQ ID NO: 21813 - protein, 12 aa, Homo sapiens
  CDR3 for alpha chain variable domain of TCR clone 10907 (TRAV2, TRAJ9)
CAVGAGGFKTIF

SEQ ID NO: 21814 - protein, 17 aa, Homo sapiens
  CDR3 for beta chain variable domain of TCR clone 10907 (TRBV11-2, TRBJ2-1)
CASSLYPPGVEYNEQFF

SEQ ID NO: 21815 - protein, 14 aa, Homo sapiens
  CDR3 for alpha chain variable domain of TCR clone 10908 (TRAV1-2, TRAJ16)
CAVNRFSDGQKLLF

SEQ ID NO: 21816 - protein, 15 aa, Homo sapiens
  CDR3 for beta chain variable domain of TCR clone 10908 (TRBV6-6, TRBJ1-5)
CASSSIQGTNQPQHF

SEQ ID NO: 21817 - protein, 12 aa, Homo sapiens
  CDR3 for alpha chain variable domain of TCR clone 10909 (TRAV13-2, TRAJ32)
RVYGGATNKLIF

SEQ ID NO: 21818 - protein, 15 aa, Homo sapiens
  CDR3 for beta chain variable domain of TCR clone 10909 (TRBV27, TRBJ1-6)
CASSFDRGLGSPLHF

SEQ ID NO: 21819 - protein, 14 aa, Homo sapiens
  CDR3 for alpha chain variable domain of TCR clone 10910 (TRAV13-2, TRAJ43)
CAEIPTYNNNDMRF

SEQ ID NO: 21820 - protein, 13 aa, Homo sapiens
  CDR3 for beta chain variable domain of TCR clone 10910 (TRBV28, TRBJ2-7)
CASTPGLAGEQYF

SEQ ID NO: 21821 - protein, 18 aa, Homo sapiens
  CDR3 for alpha chain variable domain of TCR clone 10911 (TRAV9-2, TRAJ52)
CALSRHNAGGTSYGKLTF

SEQ ID NO: 21822 - protein, 15 aa, Homo sapiens
  CDR3 for beta chain variable domain of TCR clone 10911 (TRBV27, TRBJ2-1)
CASSNGGGSSNEQFF

SEQ ID NO: 21823 - protein, 14 aa, Homo sapiens
  CDR3 for alpha chain variable domain of TCR clone 10912 (TRAV1-2, TRAJ6)
CAVSLSGGSYIPAF

SEQ ID NO: 21824 - protein, 15 aa, Homo sapiens
  CDR3 for beta chain variable domain of TCR clone 10912 (TRBV28, TRBJ2-7)
CASSPGGRGFYEQYF

SEQ ID NO: 21825 - protein, 17 aa, Homo sapiens
  CDR3 for alpha chain variable domain of TCR clone 10913 (TRAV23/DV6, TRAJ10)
CSKPPFILTGGGNKLTF

SEQ ID NO: 21826 - protein, 15 aa, Homo sapiens
  CDR3 for beta chain variable domain of TCR clone 10913 (TRBV20-1, TRBJ2-1)
CSAEGGLLAGDEQFF

SEQ ID NO: 21827 - protein, 18 aa, Homo sapiens
  CDR3 for alpha chain variable domain of TCR clone 10914 (TRAV21, TRAJ52)
CAVRPSPAGVTSYGKLTF

SEQ ID NO: 21828 - protein, 17 aa, Homo sapiens
  CDR3 for beta chain variable domain of TCR clone 10914 (TRBV13, TRBJ2-3)
CASSLSRVAGGRNTQYF

SEQ ID NO: 21829 - protein, 14 aa, Homo sapiens
  CDR3 for alpha chain variable domain of TCR clone 10915 (TRAV16, TRAJ17)
CALSGRAAGNKLTF

SEQ ID NO: 21830 - protein, 13 aa, Homo sapiens
  CDR3 for beta chain variable domain of TCR clone 10915 (TRBV5-1, TRBJ2-5)
CASSSPPQETQYF

SEQ ID NO: 21831 - protein, 14 aa, Homo sapiens
  CDR3 for alpha chain variable domain of TCR clone 10916 (TRAV1-2, TRAJ8)
CAVREDTGFQKIVF

SEQ ID NO: 21832 - protein, 15 aa, Homo sapiens
  CDR3 for beta chain variable domain of TCR clone 10916 (TRBV6-3, TRBJ2-7)
CASSSPGTVFYEQYF

SEQ ID NO: 21833 - protein, 21 aa, Homo sapiens
  CDR3 for alpha chain variable domain of TCR clone 10917 (TRAV1-1, TRAJ6)
CLLLLRCERLERTGGSYIPTF

SEQ ID NO: 21834 - protein, 15 aa, Homo sapiens
  CDR3 for beta chain variable domain of TCR clone 10917 (TRBV20-1, TRBJ1-5)
CSATSDRGLGQPQHF

SEQ ID NO: 21835 - protein, 16 aa, Homo sapiens
  CDR3 for alpha chain variable domain of TCR clone 10918 (TRAV30, TRAJ24)
CGTEIVDADSWGKFQF

SEQ ID NO: 21836 - protein, 16 aa, Homo sapiens
  CDR3 for beta chain variable domain of TCR clone 10918 (TRBV12-4, TRBJ1-5)
CASSRPVGGSNQPQHF

SEQ ID NO: 21837 - protein, 14 aa, Homo sapiens
  CDR3 for alpha chain variable domain of TCR clone 10919 (TRAV12-3, TRAJ10)
SHLPLTGGGNKLTF

SEQ ID NO: 21838 - protein, 18 aa, Homo sapiens
  CDR3 for beta chain variable domain of TCR clone 10919 (TRBV11-2, TRBJ2-6)
CASSLNPFLGTGANVLTF

SEQ ID NO: 21839 - protein, 13 aa, Homo sapiens
  CDR3 for alpha chain variable domain of TCR clone 10920 (TRAV21, TRAJ27)
CAARPGNAGKLTF

SEQ ID NO: 21840 - protein, 14 aa, Homo sapiens
  CDR3 for beta chain variable domain of TCR clone 10920 (TRBV7-6, TRBJ2-3)
CASSLGTVTDTQYF

SEQ ID NO: 21841 - protein, 14 aa, Homo sapiens
  CDR3 for alpha chain variable domain of TCR clone 10921 (TRAV29/DV5, TRAJ32)
CAAAYGGATNKLIF

SEQ ID NO: 21842 - protein, 13 aa, Homo sapiens
  CDR3 for beta chain variable domain of TCR clone 10921 (TRBV20-1, TRBJ1-1)
CSARVGGNTEAFF

SEQ ID NO: 21843 - protein, 16 aa, Homo sapiens
  CDR3 for alpha chain variable domain of TCR clone 10922 (TRAV12-3, TRAJ53)
CAMSPGSGGSNYKLTF

SEQ ID NO: 21844 - protein, 11 aa, Homo sapiens
  CDR3 for beta chain variable domain of TCR clone 10922 (TRBV29-1, TRBJ2-5)
CREDRTGTQYF

SEQ ID NO: 21845 - protein, 16 aa, Homo sapiens
  CDR3 for alpha chain variable domain of TCR clone 10923 (TRAV12-3, TRAJ53)
CAMSPGSGGSNYKLTF

SEQ ID NO: 21846 - protein, 11 aa, Homo sapiens
  CDR3 for beta chain variable domain of TCR clone 10923 (TRBV29-1, TRBJ2-5)
CSEDRTGAQYF

SEQ ID NO: 21847 - protein, 14 aa, Homo sapiens
  CDR3 for alpha chain variable domain of TCR clone 10924 (TRAV13-1, TRAJ35)
CAASKGGFGNVLHC

SEQ ID NO: 21848 - protein, 13 aa, Homo sapiens
  CDR3 for beta chain variable domain of TCR clone 10924 (TRBV7-3, TRBJ1-1)
CASSQDWGAGAFF

SEQ ID NO: 21849 - protein, 14 aa, Homo sapiens
  CDR3 for alpha chain variable domain of TCR clone 10925 (TRAV23/DV6, TRAJ22)
CAASRSGSARQLTF

SEQ ID NO: 21850 - protein, 13 aa, Homo sapiens
  CDR3 for beta chain variable domain of TCR clone 10925 (TRBV15, TRBJ1-6)
CATSGGLNSPLHF

SEQ ID NO: 21851 - protein, 13 aa, Homo sapiens
  CDR3 for alpha chain variable domain of TCR clone 10926 (TRAV2, TRAJ21)
CAVPFYNFNKFYF

SEQ ID NO: 21852 - protein, 16 aa, Homo sapiens
  CDR3 for beta chain variable domain of TCR clone 10926 (TRBV29-1, TRBJ1-2)
CSVEANRDIANYGYTF

SEQ ID NO: 21853 - protein, 12 aa, Homo sapiens
  CDR3 for alpha chain variable domain of TCR clone 10927 (TRAV12-2, TRAJ40)
CAGASGTYKYIF

SEQ ID NO: 21854 - protein, 14 aa, Homo sapiens
  CDR3 for beta chain variable domain of TCR clone 10927 (TRBV6-6, TRBJ2-7)
CASQGQGLAVEQYF

SEQ ID NO: 21855 - protein, 13 aa, Homo sapiens
  CDR3 for alpha chain variable domain of TCR clone 10928 (TRAV27, TRAJ41)
CAGDGNSGYALNF

SEQ ID NO: 21856 - protein, 14 aa, Homo sapiens
  CDR3 for beta chain variable domain of TCR clone 10928 (TRBV7-2, TRBJ1-1)
CASSFLTGTTEAFF

SEQ ID NO: 21857 - protein, 15 aa, Homo sapiens
  CDR3 for alpha chain variable domain of TCR clone 10929 (TRAV27, TRAJ28)
CAGAYSGAGSYQLTF

SEQ ID NO: 21858 - protein, 12 aa, Homo sapiens
  CDR3 for beta chain variable domain of TCR clone 10929 (TRBV7-2, TRBJ2-2)
CASSLNLRELFF

SEQ ID NO: 21859 - protein, 12 aa, Homo sapiens
  CDR3 for alpha chain variable domain of TCR clone 10930 (TRAV2, TRAJ9)
CAVGAGGFTTIF

SEQ ID NO: 21860 - protein, 16 aa, Homo sapiens
  CDR3 for beta chain variable domain of TCR clone 10930 (TRBV13, TRBJ2-2)
CASSPRTGEHTGELFF

SEQ ID NO: 21861 - protein, 14 aa, Homo sapiens
  CDR3 for alpha chain variable domain of TCR clone 10931 (TRAV27, TRAJ45)
CAGAQEEVLTDSPF

SEQ ID NO: 21862 - protein, 17 aa, Homo sapiens
  CDR3 for beta chain variable domain of TCR clone 10931 (TRBV11-2, TRBJ2-1)
CASSLYPPGVEYNEQFF

SEQ ID NO: 21863 - protein, 11 aa, Homo sapiens
  CDR3 for alpha chain variable domain of TCR clone 10932 (TRAV2, TRAJ21)
CAVFNFNKFCF

SEQ ID NO: 21864 - protein, 14 aa, Homo sapiens
  CDR3 for beta chain variable domain of TCR clone 10932 (TRBV15, TRBJ2-3)
CATRSGTSTDTQYF

SEQ ID NO: 21865 - protein, 15 aa, Homo sapiens
  CDR3 for alpha chain variable domain of TCR clone 10933 (TRAV8-6, TRAJ4)
CAVRSFSGGYNKLIF

SEQ ID NO: 21866 - protein, 13 aa, Homo sapiens
  CDR3 for beta chain variable domain of TCR clone 10933 (TRBV7-2, TRBJ2-3)
CASSTDNLDTQYF

SEQ ID NO: 21867 - protein, 17 aa, Homo sapiens
  CDR3 for alpha chain variable domain of TCR clone 10934 (TRAV3, TRAJ42)
CAVRDRDYGGSQGNLIF

SEQ ID NO: 21868 - protein, 15 aa, Homo sapiens
  CDR3 for beta chain variable domain of TCR clone 10934 (TRBV4-1, TRBJ1-4)
CASSDTGGTNEKLFF

SEQ ID NO: 21869 - protein, 13 aa, Homo sapiens
  CDR3 for alpha chain variable domain of TCR clone 10935 (TRAV8-6, TRAJ15)
CCDFNQAGTALIF

SEQ ID NO: 21870 - protein, 14 aa, Homo sapiens
  CDR3 for beta chain variable domain of TCR clone 10935 (TRBV6-5, TRBJ2-7)
CAASRSGGSYEQYF

SEQ ID NO: 21871 - protein, 15 aa, Homo sapiens
  CDR3 for alpha chain variable domain of TCR clone 10936 (TRAV8-3, TRAJ11)
CAVGLLNSGYSTLPF

SEQ ID NO: 21872 - protein, 16 aa, Homo sapiens
  CDR3 for beta chain variable domain of TCR clone 10936 (TRBV7-9, TRBJ1-2)
CASSLGFSSGEDGYTF

SEQ ID NO: 21873 - protein, 11 aa, Homo sapiens
  CDR3 for alpha chain variable domain of TCR clone 10937 (TRAV1-2, TRAJ31)
CAVNNNARLMF

SEQ ID NO: 21874 - protein, 15 aa, Homo sapiens
  CDR3 for beta chain variable domain of TCR clone 10937 (TRBV28, TRBJ2-1)
CASSIIAGGRSEQLF

SEQ ID NO: 21875 - protein, 14 aa, Homo sapiens
  CDR3 for alpha chain variable domain of TCR clone 10938 (TRAV12-2, TRAJ13)
CAVKKTGGYQKVTF

SEQ ID NO: 21876 - protein, 15 aa, Homo sapiens
  CDR3 for beta chain variable domain of TCR clone 10938 (TRBV27, TRBJ2-1)
CVSSNGGGSSNEQFF

SEQ ID NO: 21877 - protein, 16 aa, Homo sapiens
  CDR3 for alpha chain variable domain of TCR clone 10939 (TRAV3, TRAJ21)
CAVRGIERGNFNKFYF

SEQ ID NO: 21878 - protein, 13 aa, Homo sapiens
  CDR3 for beta chain variable domain of TCR clone 10939 (TRBV27, TRBJ2-7)
CASSLTTGYEQYF

SEQ ID NO: 21879 - protein, 17 aa, Homo sapiens
  CDR3 for alpha chain variable domain of TCR clone 10940 (TRAV3, TRAJ6)
CAVRDGPRAGGSYIPTL

SEQ ID NO: 21880 - protein, 20 aa, Homo sapiens
  CDR3 for beta chain variable domain of TCR clone 10940 (TRBV28, TRBJ2-1)
CASTPIGRSPGLAGGNEQFF

SEQ ID NO: 21881 - protein, 14 aa, Homo sapiens
  CDR3 for alpha chain variable domain of TCR clone 10941 (TRAV12-2, TRAJ13)
CAVNKTGGYQKVTF

SEQ ID NO: 21882 - protein, 15 aa, Homo sapiens
  CDR3 for beta chain variable domain of TCR clone 10941 (TRBV27, TRBJ2-1)
CASSNGGGSSNEQFF

SEQ ID NO: 21883 - protein, 12 aa, Homo sapiens
  CDR3 for alpha chain variable domain of TCR clone 10942 (TRAV23/DV6, TRAJ27)
CAASKSAGKSTF

SEQ ID NO: 21884 - protein, 13 aa, Homo sapiens
  CDR3 for beta chain variable domain of TCR clone 10942 (TRBV6-3, TRBJ1-2)
CASSRQGGYGYTF

SEQ ID NO: 21885 - protein, 13 aa, Homo sapiens
  CDR3 for alpha chain variable domain of TCR clone 10943 (TRAV1-2, TRAJ9)
CSALNTGGFKTIF

SEQ ID NO: 21886 - protein, 13 aa, Homo sapiens
  CDR3 for beta chain variable domain of TCR clone 10943 (TRBV19, TRBJ1-2)
CASSVPGQDGYTF

SEQ ID NO: 21887 - protein, 14 aa, Homo sapiens
  CDR3 for alpha chain variable domain of TCR clone 10944 (TRAV4, TRAJ26)
CLVGPHNYGQNFVF

SEQ ID NO: 21888 - protein, 17 aa, Homo sapiens
  CDR3 for beta chain variable domain of TCR clone 10944 (TRBV24-1, TRBJ2-1)
CAASDVSTSGTYNEQFF

SEQ ID NO: 21889 - protein, 14 aa, Homo sapiens
  CDR3 for alpha chain variable domain of TCR clone 10945 (TRAV1-2, TRAJ8)
CAVREDTGFQKLVF

SEQ ID NO: 21890 - protein, 18 aa, Homo sapiens
  CDR3 for beta chain variable domain of TCR clone 10945 (TRBV6-6, TRBJ1-3)
CASSYSKWDSISGNTIYF

SEQ ID NO: 21891 - protein, 14 aa, Homo sapiens
  CDR3 for alpha chain variable domain of TCR clone 10946 (TRAV12-1, TRAJ17)
CVVNYKAAGSKLTF

SEQ ID NO: 21892 - protein, 17 aa, Homo sapiens
  CDR3 for beta chain variable domain of TCR clone 10946 (TRBV20-1, TRBJ2-1)
CSASSSGLAGSYNEQFF

SEQ ID NO: 21893 - protein, 17 aa, Homo sapiens
  CDR3 for alpha chain variable domain of TCR clone 10947 (TRAV3, TRAJ12)
CAVRDGGRVDSSYKLIF

SEQ ID NO: 21894 - protein, 15 aa, Homo sapiens
  CDR3 for beta chain variable domain of TCR clone 10947 (TRBV20-1, TRBJ2-5)
CSAEGTGGLQETQYF

SEQ ID NO: 21895 - protein, 12 aa, Homo sapiens
  CDR3 for alpha chain variable domain of TCR clone 10948 (TRAV30, TRAJ31)
CGTAKHNARLMF

SEQ ID NO: 21896 - protein, 17 aa, Homo sapiens
  CDR3 for beta chain variable domain of TCR clone 10948 (TRBV13, TRBJ2-3)
CASSLSRVAGGRNTQYF

SEQ ID NO: 21897 - protein, 12 aa, Homo sapiens
  CDR3 for alpha chain variable domain of TCR clone 10949 (TRAV3, TRAJ26)
CAVRDYGQNFFF

SEQ ID NO: 21898 - protein, 16 aa, Homo sapiens
  CDR3 for beta chain variable domain of TCR clone 10949 (TRBV11-2, TRBJ1-2)
CASSPSGREANYGYTF

SEQ ID NO: 21899 - protein, 13 aa, Homo sapiens
  CDR3 for alpha chain variable domain of TCR clone 10950 (TRAV8-4, TRAJ30)
CAASVNRDDKIIF

SEQ ID NO: 21900 - protein, 13 aa, Homo sapiens
  CDR3 for beta chain variable domain of TCR clone 10950 (TRBV3-1, TRBJ2-2)
CASLARGSGELFF

SEQ ID NO: 21901 - protein, 16 aa, Homo sapiens
  CDR3 for alpha chain variable domain of TCR clone 10951 (TRAV3, TRAJ37)
CAVRPHGSGNTGKLIF

SEQ ID NO: 21902 - protein, 14 aa, Homo sapiens
  CDR3 for beta chain variable domain of TCR clone 10951 (TRBV2, TRBJ2-1)
CASSDRAYYKEQFF

SEQ ID NO: 21903 - protein, 12 aa, Homo sapiens
  CDR3 for alpha chain variable domain of TCR clone 10952 (TRAV2, TRAJ31)
CAVEDNNARLMF

SEQ ID NO: 21904 - protein, 15 aa, Homo sapiens
  CDR3 for beta chain variable domain of TCR clone 10952 (TRBV5-1, TRBJ2-3)
CASSVTSGSTDTQYF

SEQ ID NO: 21905 - protein, 11 aa, Homo sapiens
  CDR3 for alpha chain variable domain of TCR clone 10953 (TRAV1-2, TRAJ40)
CAVPGTYKYTF

SEQ ID NO: 21906 - protein, 16 aa, Homo sapiens
  CDR3 for beta chain variable domain of TCR clone 10953 (TRBV29-1, TRBJ2-7)
CSVEVVGTSGSYEQYF

SEQ ID NO: 21907 - protein, 14 aa, Homo sapiens
  CDR3 for alpha chain variable domain of TCR clone 10954 (TRAV21, TRAJ35)
CAVMPIGFGNVLHC

SEQ ID NO: 21908 - protein, 12 aa, Homo sapiens
  CDR3 for beta chain variable domain of TCR clone 10954 (TRBV7-9, TRBJ2-7)
RASSIKREEQYF

SEQ ID NO: 21909 - protein, 13 aa, Homo sapiens
  CDR3 for alpha chain variable domain of TCR clone 10955 (TRAV13-2, TRAJ48)
CAEMDFGNEKLTF

SEQ ID NO: 21910 - protein, 15 aa, Homo sapiens
  CDR3 for beta chain variable domain of TCR clone 10955 (TRBV7-9, TRBJ1-6)
CASSSPGRGNPPLHF

SEQ ID NO: 21911 - protein, 16 aa, Homo sapiens
  CDR3 for alpha chain variable domain of TCR clone 10956 (TRAV30, TRAJ24)
CGTEIVDADSWGKFQF

SEQ ID NO: 21912 - protein, 14 aa, Homo sapiens
  CDR3 for beta chain variable domain of TCR clone 10956 (TRBV12-5, TRBJ2-5)
CASGSRTHHETQYF

SEQ ID NO: 21913 - protein, 14 aa, Homo sapiens
  CDR3 for alpha chain variable domain of TCR clone 10957 (TRAV9-2, TRAJ39)
CALYIYNAGNMLTF

SEQ ID NO: 21914 - protein, 15 aa, Homo sapiens
  CDR3 for beta chain variable domain of TCR clone 10957 (TRBV7-6, TRBJ2-5)
CASSKPTGPQETQYF

SEQ ID NO: 21915 - protein, 14 aa, Homo sapiens
  CDR3 for alpha chain variable domain of TCR clone 10958 (TRAV1-1, TRAJ27)
CAVIYNTNAGKSTF

SEQ ID NO: 21916 - protein, 15 aa, Homo sapiens
  CDR3 for beta chain variable domain of TCR clone 10958 (TRBV27, TRBJ2-1)
CASSNGGGSSNEQFF

SEQ ID NO: 21917 - protein, 14 aa, Homo sapiens
  CDR3 for alpha chain variable domain of TCR clone 10959 (TRAV8-6, TRAJ10)
CAVTSTGGGNKLTF

SEQ ID NO: 21918 - protein, 13 aa, Homo sapiens
  CDR3 for beta chain variable domain of TCR clone 10959 (TRBV5-7, TRBJ2-5)
CASRSSGGGTQYF

SEQ ID NO: 21919 - protein, 12 aa, Homo sapiens
  CDR3 for alpha chain variable domain of TCR clone 10960 (TRAV8-3, TRAJ15)
CAGNQAGTALIF

SEQ ID NO: 21920 - protein, 15 aa, Homo sapiens
  CDR3 for beta chain variable domain of TCR clone 10960 (TRBV7-9, TRBJ2-7)
CASSLALAEAYEQYF

SEQ ID NO: 21921 - protein, 21 aa, Homo sapiens
  CDR3 for alpha chain variable domain of TCR clone 10961 (TRAV23/DV6, TRAJ30)
PSLETQPPTSVQQARDDKIIF

SEQ ID NO: 21922 - protein, 17 aa, Homo sapiens
  CDR3 for beta chain variable domain of TCR clone 10961 (TRBV10-3, TRBJ1-2)
CAISETRDRGLEYGYTF

SEQ ID NO: 21923 - protein, 15 aa, Homo sapiens
  CDR3 for alpha chain variable domain of TCR clone 10962 (TRAV17, TRAJ57)
CATGPSQGGAEKLVF

SEQ ID NO: 21924 - protein, 16 aa, Homo sapiens
  CDR3 for beta chain variable domain of TCR clone 10962 (TRBV12-4, TRBJ1-5)
CASSRPVGGSNQPQHF

SEQ ID NO: 21925 - protein, 14 aa, Homo sapiens
  CDR3 for alpha chain variable domain of TCR clone 10963 (TRAV26-1, TRAJ39)
CIVRGSRAGNMLTF

SEQ ID NO: 21926 - protein, 15 aa, Homo sapiens
  CDR3 for beta chain variable domain of TCR clone 10963 (TRBV7-9, TRBJ1-5)
CASSQGRQPNQPQHF

SEQ ID NO: 21927 - protein, 18 aa, Homo sapiens
  CDR3 for alpha chain variable domain of TCR clone 10964 (TRAV21, TRAJ52)
CAVRHSPAGGTSYGKLTF

SEQ ID NO: 21928 - protein, 17 aa, Homo sapiens
  CDR3 for beta chain variable domain of TCR clone 10964 (TRBV13, TRBJ2-3)
CASSLSRVAGGRNTQYF

SEQ ID NO: 21929 - protein, 15 aa, Homo sapiens
  CDR3 for alpha chain variable domain of TCR clone 10965 (TRAV14/DV4, TRAJ12)
CAMREERDSSYKLIF

SEQ ID NO: 21930 - protein, 14 aa, Homo sapiens
  CDR3 for beta chain variable domain of TCR clone 10965 (TRBV12-5, TRBJ2-5)
CASGSRTHQETQYF

SEQ ID NO: 21931 - protein, 13 aa, Homo sapiens
  CDR3 for alpha chain variable domain of TCR clone 10966 (TRAV8-2, TRAJ10)
CVVSSYPGNKLTF

SEQ ID NO: 21932 - protein, 14 aa, Homo sapiens
  CDR3 for beta chain variable domain of TCR clone 10966 (TRBV7-9, TRBJ2-5)
CASSLAFGQETQYF

SEQ ID NO: 21933 - protein, 16 aa, Homo sapiens
  CDR3 for alpha chain variable domain of TCR clone 10967 (TRAV1-2, TRAJ10)
CAVRGVLTGGGNKLTF

SEQ ID NO: 21934 - protein, 19 aa, Homo sapiens
  CDR3 for beta chain variable domain of TCR clone 10967 (TRBV4-3, TRBJ2-7)
CISAPAAKQPSGTPYEQYF

SEQ ID NO: 21935 - protein, 19 aa, Homo sapiens
  CDR3 for alpha chain variable domain of TCR clone 10968 (TRAV10, TRAJ45)
PTSVWCGGYSGGGADGLTF

SEQ ID NO: 21936 - protein, 14 aa, Homo sapiens
  CDR3 for beta chain variable domain of TCR clone 10968 (TRBV7-8, TRBJ2-3)
CASSLEAGTDTQYF

SEQ ID NO: 21937 - protein, 14 aa, Homo sapiens
  CDR3 for alpha chain variable domain of TCR clone 10969 (TRAV1-2, TRAJ8)
CAVREDTGFQKLVC

SEQ ID NO: 21938 - protein, 15 aa, Homo sapiens
  CDR3 for beta chain variable domain of TCR clone 10969 (TRBV6-3, TRBJ2-7)
CASSSPGTVFYEQYF

SEQ ID NO: 21939 - protein, 18 aa, Homo sapiens
  CDR3 for alpha chain variable domain of TCR clone 10970 (TRAV21, TRAJ52)
CAVRPSPAGGTSYGKLTF

SEQ ID NO: 21940 - protein, 14 aa, Homo sapiens
  CDR3 for beta chain variable domain of TCR clone 10970 (TRBV4-1, TRBJ2-2)
CASSQAVNTGGLFF

SEQ ID NO: 21941 - protein, 12 aa, Homo sapiens
  CDR3 for alpha chain variable domain of TCR clone 10971 (TRAV12-1, TRAJ40)
CVVYSGTYKYIF

SEQ ID NO: 21942 - protein, 18 aa, Homo sapiens
  CDR3 for beta chain variable domain of TCR clone 10971 (TRBV11-2, TRBJ2-3)
CAGSLGGASRGAPNTQYF

SEQ ID NO: 21943 - protein, 16 aa, Homo sapiens
  CDR3 for alpha chain variable domain of TCR clone 10972 (TRAV27, TRAJ48)
TAAQPGDTGLYLPLTF

SEQ ID NO: 21944 - protein, 16 aa, Homo sapiens
  CDR3 for beta chain variable domain of TCR clone 10972 (TRBV27, TRBJ2-2)
CASSFRGLVRTGELFF

SEQ ID NO: 21945 - protein, 14 aa, Homo sapiens
  CDR3 for alpha chain variable domain of TCR clone 10973 (TRAV12-2, TRAJ21)
CAVNKANNFNKFYF

SEQ ID NO: 21946 - protein, 14 aa, Homo sapiens
  CDR3 for beta chain variable domain of TCR clone 10973 (TRBV19, TRBJ2-1)
CASPTFVLSGEQFF

SEQ ID NO: 21947 - protein, 15 aa, Homo sapiens
  CDR3 for alpha chain variable domain of TCR clone 10974 (TRAV4, TRAJ5)
CLVGAMDTGRRALTF

SEQ ID NO: 21948 - protein, 16 aa, Homo sapiens
  CDR3 for beta chain variable domain of TCR clone 10974 (TRBV12-5, TRBJ2-5)
CASGPRTSGNQETQYF

SEQ ID NO: 21949 - protein, 13 aa, Homo sapiens
  CDR3 for alpha chain variable domain of TCR clone 10975 (TRAV10, TRAJ40)
CVVSALGTYKYIF

SEQ ID NO: 21950 - protein, 15 aa, Homo sapiens
  CDR3 for beta chain variable domain of TCR clone 10975 (TRBV27, TRBJ2-1)
CASSNGGGSSNEQFF

SEQ ID NO: 21951 - protein, 14 aa, Homo sapiens
  CDR3 for alpha chain variable domain of TCR clone 10976 (TRAV1-2, TRAJ8)
CAVREDTGFQKLVF

SEQ ID NO: 21952 - protein, 16 aa, Homo sapiens
  CDR3 for beta chain variable domain of TCR clone 10976 (TRBV13, TRBJ2-2)
CASSPRTGEHTGELFF

SEQ ID NO: 21953 - protein, 13 aa, Homo sapiens
  CDR3 for alpha chain variable domain of TCR clone 10977 (TRAV17, TRAJ9)
CATDGTGGFKTIF

SEQ ID NO: 21954 - protein, 20 aa, Homo sapiens
  CDR3 for beta chain variable domain of TCR clone 10977 (TRBV7-8, TRBJ2-2)
CASSHLFPGPTIHITGELFF

SEQ ID NO: 21955 - protein, 13 aa, Homo sapiens
  CDR3 for alpha chain variable domain of TCR clone 10978 (TRAV8-3, TRAJ43)
CAVVPYNNNDMRF

SEQ ID NO: 21956 - protein, 15 aa, Homo sapiens
  CDR3 for beta chain variable domain of TCR clone 10978 (TRBV5-1, TRBJ2-1)
CASSPPRAPYNEQFF

SEQ ID NO: 21957 - protein, 12 aa, Homo sapiens
  CDR3 for alpha chain variable domain of TCR clone 10979 (TRAV12-3, TRAJ40)
CAMSAGTYKYIF

SEQ ID NO: 21958 - protein, 15 aa, Homo sapiens
  CDR3 for beta chain variable domain of TCR clone 10979 (TRBV24-1, TRBJ2-5)
CATSDRRQEQETQYF

SEQ ID NO: 21959 - protein, 13 aa, Homo sapiens
  CDR3 for alpha chain variable domain of TCR clone 10980 (TRAV1-2, TRAJ9)
CAALNTGGSKTIF

SEQ ID NO: 21960 - protein, 13 aa, Homo sapiens
  CDR3 for beta chain variable domain of TCR clone 10980 (TRBV19, TRBJ1-2)
CASSVPGQDGYTF

SEQ ID NO: 21961 - protein, 13 aa, Homo sapiens
  CDR3 for alpha chain variable domain of TCR clone 10981 (TRAV12-1, TRAJ16)
CVVNGPDGQKLPF

SEQ ID NO: 21962 - protein, 13 aa, Homo sapiens
  CDR3 for beta chain variable domain of TCR clone 10981 (TRBV2, TRBJ1-1)
CARNPTGGFHAFF

SEQ ID NO: 21963 - protein, 14 aa, Homo sapiens
  CDR3 for alpha chain variable domain of TCR clone 10982 (TRAV29/DV5, TRAJ45)
CAASFRGDADGLTF

SEQ ID NO: 21964 - protein, 11 aa, Homo sapiens
  CDR3 for beta chain variable domain of TCR clone 10982 (TRBV11-2, TRBJ2-2)
CASSLPGELFF

SEQ ID NO: 21965 - protein, 16 aa, Homo sapiens
  CDR3 for alpha chain variable domain of TCR clone 10983 (TRAV1-1, TRAJ29)
CAVRSTRNSGNTPLVF

SEQ ID NO: 21966 - protein, 14 aa, Homo sapiens
  CDR3 for beta chain variable domain of TCR clone 10983 (TRBV7-8, TRBJ2-3)
CASSLEAGTDTQYF

SEQ ID NO: 21967 - protein, 11 aa, Homo sapiens
  CDR3 for alpha chain variable domain of TCR clone 10984 (TRAV3, TRAJ21)
CAVANFNKFYF

SEQ ID NO: 21968 - protein, 16 aa, Homo sapiens
  CDR3 for beta chain variable domain of TCR clone 10984 (TRBV19, TRBJ2-1)
CASSKAGPSSYNEQFF

SEQ ID NO: 21969 - protein, 14 aa, Homo sapiens
  CDR3 for alpha chain variable domain of TCR clone 10985 (TRAV12-2, TRAJ13)
CAVKKTGGYQKVTF

SEQ ID NO: 21970 - protein, 14 aa, Homo sapiens
  CDR3 for beta chain variable domain of TCR clone 10985 (TRBV18, TRBJ2-5)
CASSPGVSQETQYF

SEQ ID NO: 21971 - protein, 16 aa, Homo sapiens
  CDR3 for alpha chain variable domain of TCR clone 10986 (TRAV3, TRAJ37)
CAVRGKGSGNTGKLIF

SEQ ID NO: 21972 - protein, 13 aa, Homo sapiens
  CDR3 for beta chain variable domain of TCR clone 10986 (TRBV14, TRBJ2-7)
SASSQDRRYEQYF

SEQ ID NO: 21973 - protein, 14 aa, Homo sapiens
  CDR3 for alpha chain variable domain of TCR clone 10987 (TRAV12-3, TRAJ13)
CAVKKTGGYQKVTF

SEQ ID NO: 21974 - protein, 15 aa, Homo sapiens
  CDR3 for beta chain variable domain of TCR clone 10987 (TRBV27, TRBJ2-1)
CASSNGGGSSNEQFF

SEQ ID NO: 21975 - protein, 14 aa, Homo sapiens
  CDR3 for alpha chain variable domain of TCR clone 10988 (TRAV13-1, TRAJ45)
VSVPEGGGADGLTF

SEQ ID NO: 21976 - protein, 12 aa, Homo sapiens
  CDR3 for beta chain variable domain of TCR clone 10988 (TRBV24-1, TRBJ1-1)
CATSDSDRGAFF

SEQ ID NO: 21977 - protein, 13 aa, Homo sapiens
  CDR3 for alpha chain variable domain of TCR clone 10989 (TRAV2, TRAJ40)
CAVVTSGTYKYIF

SEQ ID NO: 21978 - protein, 13 aa, Homo sapiens
  CDR3 for beta chain variable domain of TCR clone 10989 (TRBV7-3, TRBJ1-1)
CASSQDWGAEAFF

SEQ ID NO: 21979 - protein, 17 aa, Homo sapiens
  CDR3 for alpha chain variable domain of TCR clone 10990 (TRAV3, TRAJ6)
CAVRDGPRAGGSYIPTF

SEQ ID NO: 21980 - protein, 16 aa, Homo sapiens
  CDR3 for beta chain variable domain of TCR clone 10990 (TRBV12-5, TRBJ2-5)
CASGPRTSGNQETQYF

SEQ ID NO: 21981 - protein, 12 aa, Homo sapiens
  CDR3 for alpha chain variable domain of TCR clone 10991 (TRAV12-2, TRAJ8)
CAVATGFQKLVF

SEQ ID NO: 21982 - protein, 12 aa, Homo sapiens
  CDR3 for beta chain variable domain of TCR clone 10991 (TRBV14, TRBJ1-1)
CASSQLKGLAFF

SEQ ID NO: 21983 - protein, 17 aa, Homo sapiens
  CDR3 for alpha chain variable domain of TCR clone 10992 (TRAV8-6, TRAJ58)
CAVSSWVGETSGSRLTF

SEQ ID NO: 21984 - protein, 14 aa, Homo sapiens
  CDR3 for beta chain variable domain of TCR clone 10992 (TRBV6-1, TRBJ1-3)
CASVQGGGGNTIYF

SEQ ID NO: 21985 - protein, 21 aa, Homo sapiens
  CDR3 for alpha chain variable domain of TCR clone 10993 (TRAV1-1, TRAJ6)
CLLLLRCERLERTGGSYIPTF

SEQ ID NO: 21986 - protein, 13 aa, Homo sapiens
  CDR3 for beta chain variable domain of TCR clone 10993 (TRBV7-2, TRBJ2-5)
CQQLVRGGETQYF

SEQ ID NO: 21987 - protein, 12 aa, Homo sapiens
  CDR3 for alpha chain variable domain of TCR clone 10994 (TRAV8-3, TRAJ20)
CAVGANDYKLSF

SEQ ID NO: 21988 - protein, 16 aa, Homo sapiens
  CDR3 for beta chain variable domain of TCR clone 10994 (TRBV19, TRBJ2-2)
CASRSPGTGATGEPFF

SEQ ID NO: 21989 - protein, 14 aa, Homo sapiens
  CDR3 for alpha chain variable domain of TCR clone 10995 (TRAV38-1, TRAJ45)
CAYYSGGGAAGLTF

SEQ ID NO: 21990 - protein, 20 aa, Homo sapiens
  CDR3 for beta chain variable domain of TCR clone 10995 (TRBV28, TRBJ2-1)
CASTPIGRSPGLAGGNEQFF

SEQ ID NO: 21991 - protein, 13 aa, Homo sapiens
  CDR3 for alpha chain variable domain of TCR clone 10996 (TRAV3, TRAJ27)
CAVRPLGAGNSTF

SEQ ID NO: 21992 - protein, 13 aa, Homo sapiens
  CDR3 for beta chain variable domain of TCR clone 10996 (TRBV7-9, TRBJ2-3)
CASSPGSTDTQYF

SEQ ID NO: 21993 - protein, 13 aa, Homo sapiens
  CDR3 for alpha chain variable domain of TCR clone 10997 (TRAV12-2, TRAJ35)
CAVSAGFGNVLHC

SEQ ID NO: 21994 - protein, 14 aa, Homo sapiens
  CDR3 for beta chain variable domain of TCR clone 10997 (TRBV28, TRBJ2-5)
CASSLRGLEETQYF

SEQ ID NO: 21995 - protein, 17 aa, Homo sapiens
  CDR3 for alpha chain variable domain of TCR clone 10998 (TRAV16, TRAJ58)
CITVLSNGETSGSRLTF

SEQ ID NO: 21996 - protein, 16 aa, Homo sapiens
  CDR3 for beta chain variable domain of TCR clone 10998 (TRBV19, TRBJ2-5)
CASSIDGTGLEETQYF

SEQ ID NO: 21997 - protein, 14 aa, Homo sapiens
  CDR3 for alpha chain variable domain of TCR clone 10999 (TRAV2, TRAJ9)
CAVEDRSGGFKTIF

SEQ ID NO: 21998 - protein, 14 aa, Homo sapiens
  CDR3 for beta chain variable domain of TCR clone 10999 (TRBV7-2, TRBJ2-7)
CASRSQGAAYEQYF

SEQ ID NO: 21999 - protein, 13 aa, Homo sapiens
  CDR3 for alpha chain variable domain of TCR clone 11000 (TRAV2, TRAJ40)
CAVVTSGTYKYIF

SEQ ID NO: 22000 - protein, 14 aa, Homo sapiens
  CDR3 for beta chain variable domain of TCR clone 11000 (TRBV19, TRBJ2-1)
CANPTFVLSGEQFF

SEQ ID NO: 22001 - protein, 18 aa, Homo sapiens
  CDR3 for alpha chain variable domain of TCR clone 11001 (TRAV21, TRAJ52)
CAVRPSPAGCTSYGKLTF

SEQ ID NO: 22002 - protein, 17 aa, Homo sapiens
  CDR3 for beta chain variable domain of TCR clone 11001 (TRBV13, TRBJ2-3)
CASSLSRVAGGRNTQYF

SEQ ID NO: 22003 - protein, 18 aa, Homo sapiens
  CDR3 for alpha chain variable domain of TCR clone 11002 (TRAV29/DV5, TRAJ52)
CAAGFRDAGGTSYGKLTF

SEQ ID NO: 22004 - protein, 16 aa, Homo sapiens
  CDR3 for beta chain variable domain of TCR clone 11002 (TRBV7-3, TRBJ2-2)
CASSLKRGTLSGELFF

SEQ ID NO: 22005 - protein, 14 aa, Homo sapiens
  CDR3 for alpha chain variable domain of TCR clone 11003 (TRAV13-1, TRAJ35)
CAASKGGFGHVLHC

SEQ ID NO: 22006 - protein, 13 aa, Homo sapiens
  CDR3 for beta chain variable domain of TCR clone 11003 (TRBV7-3, TRBJ1-1)
CASSQDWGAEAFF

SEQ ID NO: 22007 - protein, 14 aa, Homo sapiens
  CDR3 for alpha chain variable domain of TCR clone 11004 (TRAV13-1, TRAJ24)
CAARRTDSWGKLQF

SEQ ID NO: 22008 - protein, 15 aa, Homo sapiens
  CDR3 for beta chain variable domain of TCR clone 11004 (TRBV6-1, TRBJ2-1)
CASSAAVAGSVEQFF

SEQ ID NO: 22009 - protein, 14 aa, Homo sapiens
  CDR3 for alpha chain variable domain of TCR clone 11005 (TRAV8-3, TRAJ4)
CAVGAAGSYNKLIF

SEQ ID NO: 22010 - protein, 15 aa, Homo sapiens
  CDR3 for beta chain variable domain of TCR clone 11005 (TRBV6-5, TRBJ2-1)
CASSYDAGAGNEQFF

SEQ ID NO: 22011 - protein, 13 aa, Homo sapiens
  CDR3 for alpha chain variable domain of TCR clone 11006 (TRAV1-2, TRAJ9)
CAALNTGGFKTIF

SEQ ID NO: 22012 - protein, 12 aa, Homo sapiens
  CDR3 for beta chain variable domain of TCR clone 11006 (TRBV7-9, TRBJ2-7)
CASSLEGYEQYF

SEQ ID NO: 22013 - protein, 13 aa, Homo sapiens
  CDR3 for alpha chain variable domain of TCR clone 11007 (TRAV23/DV6, TRAJ27)
CAASNTNAGKSTF

SEQ ID NO: 22014 - protein, 14 aa, Homo sapiens
  CDR3 for beta chain variable domain of TCR clone 11007 (TRBV20-1, TRBJ2-5)
CSASGLAVQETQYF

SEQ ID NO: 22015 - protein, 15 aa, Homo sapiens
  CDR3 for alpha chain variable domain of TCR clone 11008 (TRAV25, TRAJ28)
CAGAYSGAGSYQLTF

SEQ ID NO: 22016 - protein, 16 aa, Homo sapiens
  CDR3 for beta chain variable domain of TCR clone 11008 (TRBV19, TRBJ2-3)
CASSILWGVRTDTQYF

SEQ ID NO: 22017 - protein, 18 aa, Homo sapiens
  CDR3 for alpha chain variable domain of TCR clone 11009 (TRAV12-3, TRAJ52)
CAMSVGGAGGTSYGKLTF

SEQ ID NO: 22018 - protein, 19 aa, Homo sapiens
  CDR3 for beta chain variable domain of TCR clone 11009 (TRBV6-3, TRBJ1-2)
CASSYSKGRTGPPNYGYTF

SEQ ID NO: 22019 - protein, 14 aa, Homo sapiens
  CDR3 for alpha chain variable domain of TCR clone 11010 (TRAV10, TRAJ15)
CVVSASQAGTALIF

SEQ ID NO: 22020 - protein, 12 aa, Homo sapiens
  CDR3 for beta chain variable domain of TCR clone 11010 (TRBV29-1, TRBJ2-3)
CSVTGGADTQYF

SEQ ID NO: 22021 - protein, 10 aa, Homo sapiens
  CDR3 for alpha chain variable domain of TCR clone 11011 (TRAV39, TRAJ49)
CAVAGNQFYF

SEQ ID NO: 22022 - protein, 14 aa, Homo sapiens
  CDR3 for beta chain variable domain of TCR clone 11011 (TRBV7-2, TRBJ2-7)
CASSPKTSFYEQYF

SEQ ID NO: 22023 - protein, 14 aa, Homo sapiens
  CDR3 for alpha chain variable domain of TCR clone 11012 (TRAV12-3, TRAJ10)
SHLPLTGGGNKLTF

SEQ ID NO: 22024 - protein, 15 aa, Homo sapiens
  CDR3 for beta chain variable domain of TCR clone 11012 (TRBV7-6, TRBJ1-5)
CASSQSSGINQPQHF

SEQ ID NO: 22025 - protein, 16 aa, Homo sapiens
  CDR3 for alpha chain variable domain of TCR clone 11013 (TRAV26-1, TRAJ36)
CIVRVPDQTGANNLFF

SEQ ID NO: 22026 - protein, 14 aa, Homo sapiens
  CDR3 for beta chain variable domain of TCR clone 11013 (TRBV7-2, TRBJ2-7)
CASSLYPGRYEQYF

SEQ ID NO: 22027 - protein, 15 aa, Homo sapiens
  CDR3 for alpha chain variable domain of TCR clone 11014 (TRAV17, TRAJ4)
CATGTWSGGYNKLIF

SEQ ID NO: 22028 - protein, 13 aa, Homo sapiens
  CDR3 for beta chain variable domain of TCR clone 11014 (TRBV6-6, TRBJ2-7)
CASSPKRLAEQYF

SEQ ID NO: 22029 - protein, 14 aa, Homo sapiens
  CDR3 for alpha chain variable domain of TCR clone 11015 (TRAV13-1, TRAJ44)
CAAKATGTASKLTF

SEQ ID NO: 22030 - protein, 14 aa, Homo sapiens
  CDR3 for beta chain variable domain of TCR clone 11015 (TRBV7-3, TRBJ1-1)
CASSLKGGNTEAFF

SEQ ID NO: 22031 - protein, 10 aa, Homo sapiens
  CDR3 for alpha chain variable domain of TCR clone 11016 (TRAV23/DV6, TRAJ57)
CAASSTLSQG

SEQ ID NO: 22032 - protein, 14 aa, Homo sapiens
  CDR3 for beta chain variable domain of TCR clone 11016 (TRBV25-1, TRBJ1-1)
CASTHLGGNTEALF

SEQ ID NO: 22033 - protein, 17 aa, Homo sapiens
  CDR3 for alpha chain variable domain of TCR clone 11017 (TRAV3, TRAJ6)
CAVRDGPRAGVSYIPTF

SEQ ID NO: 22034 - protein, 14 aa, Homo sapiens
  CDR3 for beta chain variable domain of TCR clone 11017 (TRBV7-2, TRBJ2-7)
CASSPKTSFYEQYF

SEQ ID NO: 22035 - protein, 10 aa, Homo sapiens
  CDR3 for alpha chain variable domain of TCR clone 11018 (TRAV23/DV6, TRAJ57)
CAASSTLSQG

SEQ ID NO: 22036 - protein, 14 aa, Homo sapiens
  CDR3 for beta chain variable domain of TCR clone 11018 (TRBV25-1, TRBJ1-1)
CASTHLGGNTEAFS

SEQ ID NO: 22037 - protein, 13 aa, Homo sapiens
  CDR3 for alpha chain variable domain of TCR clone 11019 (TRAV13-2, TRAJ48)
CAEMDFGNEKLAF

SEQ ID NO: 22038 - protein, 15 aa, Homo sapiens
  CDR3 for beta chain variable domain of TCR clone 11019 (TRBV7-9, TRBJ1-6)
CASSSPGRGNSPLHF

SEQ ID NO: 22039 - protein, 15 aa, Homo sapiens
  CDR3 for alpha chain variable domain of TCR clone 11020 (TRAV26-1, TRAJ29)
CIVRVEGSGNTPLVF

SEQ ID NO: 22040 - protein, 14 aa, Homo sapiens
  CDR3 for beta chain variable domain of TCR clone 11020 (TRBV18, TRBJ2-5)
CASSPGVSQEAQYF

SEQ ID NO: 22041 - protein, 11 aa, Homo sapiens
  CDR3 for alpha chain variable domain of TCR clone 11021 (TRAV2, TRAJ13)
CASGGYQKVTF

SEQ ID NO: 22042 - protein, 13 aa, Homo sapiens
  CDR3 for beta chain variable domain of TCR clone 11021 (TRBV7-3, TRBJ1-1)
CASSQDWGAEAFF

SEQ ID NO: 22043 - protein, 11 aa, Homo sapiens
  CDR3 for alpha chain variable domain of TCR clone 11022 (TRAV16, TRAJ33)
CALHSNYPLIW

SEQ ID NO: 22044 - protein, 15 aa, Homo sapiens
  CDR3 for beta chain variable domain of TCR clone 11022 (TRBV4-1, TRBJ2-7)
CASSQQGQGFDEQYF

SEQ ID NO: 22045 - protein, 14 aa, Homo sapiens
  CDR3 for alpha chain variable domain of TCR clone 11023 (TRAV1-2, TRAJ28)
CAVPSGAGSYQLTF

SEQ ID NO: 22046 - protein, 12 aa, Homo sapiens
  CDR3 for beta chain variable domain of TCR clone 11023 (TRBV20-1, TRBJ1-2)
CSAPPRQGPDTF

SEQ ID NO: 22047 - protein, 11 aa, Homo sapiens
  CDR3 for alpha chain variable domain of TCR clone 11024 (TRAV16, TRAJ33)
CALHSNYQLIW

SEQ ID NO: 22048 - protein, 15 aa, Homo sapiens
  CDR3 for beta chain variable domain of TCR clone 11024 (TRBV4-1, TRBJ2-7)
CASSQRGQGFDEQYF

SEQ ID NO: 22049 - protein, 13 aa, Homo sapiens
  CDR3 for alpha chain variable domain of TCR clone 11025 (TRAV5, TRAJ11)
CAETTSGYSTLTF

SEQ ID NO: 22050 - protein, 13 aa, Homo sapiens
  CDR3 for beta chain variable domain of TCR clone 11025 (TRBV12-4, TRBJ1-5)
CASSPDRAQPQHF

SEQ ID NO: 22051 - protein, 15 aa, Homo sapiens
  CDR3 for alpha chain variable domain of TCR clone 11026 (TRAV12-1, TRAJ44)
CVVFVNTGTASKLTF

SEQ ID NO: 22052 - protein, 17 aa, Homo sapiens
  CDR3 for beta chain variable domain of TCR clone 11026 (TRBV7-8, TRBJ2-6)
CASSAGTGGAGANDLTF

SEQ ID NO: 22053 - protein, 16 aa, Homo sapiens
  CDR3 for alpha chain variable domain of TCR clone 11027 (TRAV30, TRAJ24)
CGTEIVDADSWGEFQF

SEQ ID NO: 22054 - protein, 13 aa, Homo sapiens
  CDR3 for beta chain variable domain of TCR clone 11027 (TRBV7-3, TRBJ1-1)
CASSQDWGAEAFF

SEQ ID NO: 22055 - protein, 11 aa, Homo sapiens
  CDR3 for alpha chain variable domain of TCR clone 11028 (TRAV12-3, TRAJ26)
CAMSHGQNFVF

SEQ ID NO: 22056 - protein, 15 aa, Homo sapiens
  CDR3 for beta chain variable domain of TCR clone 11028 (TRBV6-3, TRBJ2-7)
CASSSPGTVFYEQYF

SEQ ID NO: 22057 - protein, 13 aa, Homo sapiens
  CDR3 for alpha chain variable domain of TCR clone 11029 (TRAV13-2, TRAJ48)
CAEMDFGNEKLTL

SEQ ID NO: 22058 - protein, 15 aa, Homo sapiens
  CDR3 for beta chain variable domain of TCR clone 11029 (TRBV7-9, TRBJ1-6)
CASSSPGRGNSPLHF

SEQ ID NO: 22059 - protein, 18 aa, Homo sapiens
  CDR3 for alpha chain variable domain of TCR clone 11030 (TRAV21, TRAJ52)
CAVRTSPAGGTSYGKLTF

SEQ ID NO: 22060 - protein, 17 aa, Homo sapiens
  CDR3 for beta chain variable domain of TCR clone 11030 (TRBV13, TRBJ2-3)
CASSLSRVAGGRNTQYF

SEQ ID NO: 22061 - protein, 18 aa, Homo sapiens
  CDR3 for alpha chain variable domain of TCR clone 11031 (TRAV29/DV5, TRAJ52)
CAAGFRGAGGTNYGKLTF

SEQ ID NO: 22062 - protein, 16 aa, Homo sapiens
  CDR3 for beta chain variable domain of TCR clone 11031 (TRBV7-3, TRBJ2-2)
CASSLKRGTLSGELFF

SEQ ID NO: 22063 - protein, 20 aa, Homo sapiens
  CDR3 for alpha chain variable domain of TCR clone 11032 (TRAV4, TRAJ29)
CCVLLPRGRHPYSGNTPLVF

SEQ ID NO: 22064 - protein, 14 aa, Homo sapiens
  CDR3 for beta chain variable domain of TCR clone 11032 (TRBV5-1, TRBJ2-3)
CASSFPGNTDTQYF

SEQ ID NO: 22065 - protein, 10 aa, Homo sapiens
  CDR3 for alpha chain variable domain of TCR clone 11033 (TRAV12-3, TRAJ49)
CAMNDDQFYF

SEQ ID NO: 22066 - protein, 13 aa, Homo sapiens
  CDR3 for beta chain variable domain of TCR clone 11033 (TRBV12-4, TRBJ1-1)
CASSPGTGFEAFL

SEQ ID NO: 22067 - protein, 11 aa, Homo sapiens
  CDR3 for alpha chain variable domain of TCR clone 11034 (TRAV17, TRAJ31)
CATSNNARLMF

SEQ ID NO: 22068 - protein, 16 aa, Homo sapiens
  CDR3 for beta chain variable domain of TCR clone 11034 (TRBV7-8, TRBJ2-4)
CASSAERTLAKNMQYF

SEQ ID NO: 22069 - protein, 16 aa, Homo sapiens
  CDR3 for alpha chain variable domain of TCR clone 11035 (TRAV12-3, TRAJ53)
CAMSPGSRGSNYKLTF

SEQ ID NO: 22070 - protein, 11 aa, Homo sapiens
  CDR3 for beta chain variable domain of TCR clone 11035 (TRBV29-1, TRBJ2-5)
CSEDRTGTQYF

SEQ ID NO: 22071 - protein, 14 aa, Homo sapiens
  CDR3 for alpha chain variable domain of TCR clone 11036 (TRAV38-1, TRAJ40)
CSLRPTSGTYKYIF

SEQ ID NO: 22072 - protein, 14 aa, Homo sapiens
  CDR3 for beta chain variable domain of TCR clone 11036 (TRBV25-1, TRBJ1-1)
CASTHLGGNTEAFF

SEQ ID NO: 22073 - protein, 17 aa, Homo sapiens
  CDR3 for alpha chain variable domain of TCR clone 11037 (TRAV23/DV6, TRAJ57)
CSASSTLSQGGSEKLVF

SEQ ID NO: 22074 - protein, 14 aa, Homo sapiens
  CDR3 for beta chain variable domain of TCR clone 11037 (TRBV25-1, TRBJ1-1)
CASTHLGGNTEAFF

SEQ ID NO: 22075 - protein, 13 aa, Homo sapiens
  CDR3 for alpha chain variable domain of TCR clone 11038 (TRAV3, TRAJ21)
CAVREPDFNKFYF

SEQ ID NO: 22076 - protein, 19 aa, Homo sapiens
  CDR3 for beta chain variable domain of TCR clone 11038 (TRBV7-2, TRBJ2-3)
CASSFLSRNWGGGTDTQYF

SEQ ID NO: 22077 - protein, 13 aa, Homo sapiens
  CDR3 for alpha chain variable domain of TCR clone 11039 (TRAV12-1, TRAJ29)
CVVVVSGNTPLVF

SEQ ID NO: 22078 - protein, 15 aa, Homo sapiens
  CDR3 for beta chain variable domain of TCR clone 11039 (TRBV20-1, TRBJ1-1)
CSASRGVTGNTEAFF

SEQ ID NO: 22079 - protein, 15 aa, Homo sapiens
  CDR3 for alpha chain variable domain of TCR clone 11040 (TRAV26-1, TRAJ29)
CIVRVEGSGNTPLVF

SEQ ID NO: 22080 - protein, 14 aa, Homo sapiens
  CDR3 for beta chain variable domain of TCR clone 11040 (TRBV18, TRBJ2-5)
CASSPGVSQETQYL

SEQ ID NO: 22081 - protein, 11 aa, Homo sapiens
  CDR3 for alpha chain variable domain of TCR clone 11041 (TRAV1-1, TRAJ23)
CAVRQGGKLIF

SEQ ID NO: 22082 - protein, 20 aa, Homo sapiens
  CDR3 for beta chain variable domain of TCR clone 11041 (TRBV7-8, TRBJ2-2)
CASSHLFPGPTIHITGELVF

SEQ ID NO: 22083 - protein, 17 aa, Homo sapiens
  CDR3 for alpha chain variable domain of TCR clone 11042 (TRAV9-2, TRAJ10)
CALTVTILTGGGNKLTF

SEQ ID NO: 22084 - protein, 17 aa, Homo sapiens
  CDR3 for beta chain variable domain of TCR clone 11042 (TRBV6-3, TRBJ1-1)
CASSYSGRGRRNTEAFF

SEQ ID NO: 22085 - protein, 13 aa, Homo sapiens
  CDR3 for alpha chain variable domain of TCR clone 11043 (TRAV1-1, TRAJ9)
CAAKNTGGFKTIF

SEQ ID NO: 22086 - protein, 15 aa, Homo sapiens
  CDR3 for beta chain variable domain of TCR clone 11043 (TRBV20-1, TRBJ2-7)
CSAESGTSGAYEQYF

SEQ ID NO: 22087 - protein, 12 aa, Homo sapiens
  CDR3 for alpha chain variable domain of TCR clone 11044 (TRAV8-3, TRAJ20)
CAVGANDYKLSF

SEQ ID NO: 22088 - protein, 16 aa, Homo sapiens
  CDR3 for beta chain variable domain of TCR clone 11044 (TRBV19, TRBJ2-2)
CASRSPGAGATGELFF

SEQ ID NO: 22089 - protein, 13 aa, Homo sapiens
  CDR3 for alpha chain variable domain of TCR clone 11045 (TRAV1-2, TRAJ9)
CAALNTGGFKTIF

SEQ ID NO: 22090 - protein, 13 aa, Homo sapiens
  CDR3 for beta chain variable domain of TCR clone 11045 (TRBV19, TRBJ1-2)
CASSVPGQDGYTS

SEQ ID NO: 22091 - protein, 13 aa, Homo sapiens
  CDR3 for alpha chain variable domain of TCR clone 11046 (TRAV19, TRAJ57)
CALLQGGSEKLVF

SEQ ID NO: 22092 - protein, 13 aa, Homo sapiens
  CDR3 for beta chain variable domain of TCR clone 11046 (TRBV28, TRBJ2-1)
CASRSGGLNEQFF

SEQ ID NO: 22093 - protein, 14 aa, Homo sapiens
  CDR3 for alpha chain variable domain of TCR clone 11047 (TRAV26-1, TRAJ34)
CIVRVAYNTDKLIF

SEQ ID NO: 22094 - protein, 15 aa, Homo sapiens
  CDR3 for beta chain variable domain of TCR clone 11047 (TRBV20-1, TRBJ2-7)
CSARVPAAYFHEQYF

SEQ ID NO: 22095 - protein, 21 aa, Homo sapiens
  CDR3 for alpha chain variable domain of TCR clone 11048 (TRAV1-1, TRAJ6)
CLLLLRCERLERTGGSYIPTF

SEQ ID NO: 22096 - protein, 12 aa, Homo sapiens
  CDR3 for beta chain variable domain of TCR clone 11048 (TRBV11-2, TRBJ2-2)
CASSLGGGELFF

SEQ ID NO: 22097 - protein, 14 aa, Homo sapiens
  CDR3 for alpha chain variable domain of TCR clone 11049 (TRAV12-2, TRAJ13)
CAVKKTGGYQKVTF

SEQ ID NO: 22098 - protein, 15 aa, Homo sapiens
  CDR3 for beta chain variable domain of TCR clone 11049 (TRBV27, TRBJ2-1)
CASSDGGGSSNEQFF

SEQ ID NO: 22099 - protein, 15 aa, Homo sapiens
  CDR3 for alpha chain variable domain of TCR clone 11050 (TRAV8-3, TRAJ45)
CASSYSGGGADGLIF

SEQ ID NO: 22100 - protein, 13 aa, Homo sapiens
  CDR3 for beta chain variable domain of TCR clone 11050 (TRBV10-3, TRBJ2-7)
CASKLAVNYEQYF

SEQ ID NO: 22101 - protein, 15 aa, Homo sapiens
  CDR3 for alpha chain variable domain of TCR clone 11051 (TRAV26-1, TRAJ29)
CIVRVEGSGNTPLVV

SEQ ID NO: 22102 - protein, 14 aa, Homo sapiens
  CDR3 for beta chain variable domain of TCR clone 11051 (TRBV18, TRBJ2-5)
CASSPGVSQETQYF

SEQ ID NO: 22103 - protein, 16 aa, Homo sapiens
  CDR3 for alpha chain variable domain of TCR clone 11052 (TRAV30, TRAJ24)
CGTEIVDADSWGKSQF

SEQ ID NO: 22104 - protein, 15 aa, Homo sapiens
  CDR3 for beta chain variable domain of TCR clone 11052 (TRBV7-9, TRBJ1-4)
CASSARTGGNEKLFF

SEQ ID NO: 22105 - protein, 13 aa, Homo sapiens
  CDR3 for alpha chain variable domain of TCR clone 11053 (TRAV2, TRAJ40)
CAVVTSGTYKYIF

SEQ ID NO: 22106 - protein, 14 aa, Homo sapiens
  CDR3 for beta chain variable domain of TCR clone 11053 (TRBV19, TRBJ2-1)
CASPTFVLSGEQYF

SEQ ID NO: 22107 - protein, 16 aa, Homo sapiens
  CDR3 for alpha chain variable domain of TCR clone 11054 (TRAV30, TRAJ24)
CGTEIVDADSWGKFQF

SEQ ID NO: 22108 - protein, 14 aa, Homo sapiens
  CDR3 for beta chain variable domain of TCR clone 11054 (TRBV12-5, TRBJ2-5)
CASVSRTHQETQYF

SEQ ID NO: 22109 - protein, 12 aa, Homo sapiens
  CDR3 for alpha chain variable domain of TCR clone 11055 (TRAV8-3, TRAJ41)
CAVGALGYALNF

SEQ ID NO: 22110 - protein, 16 aa, Homo sapiens
  CDR3 for beta chain variable domain of TCR clone 11055 (TRBV7-6, TRBJ2-3)
CASSDSRGEGADTQYF

SEQ ID NO: 22111 - protein, 14 aa, Homo sapiens
  CDR3 for alpha chain variable domain of TCR clone 11056 (TRAV21, TRAJ35)
CAVMPIGFGNVLHC

SEQ ID NO: 22112 - protein, 12 aa, Homo sapiens
  CDR3 for beta chain variable domain of TCR clone 11056 (TRBV7-9, TRBJ2-7)
CASSIKREGQYF

SEQ ID NO: 22113 - protein, 15 aa, Homo sapiens
  CDR3 for alpha chain variable domain of TCR clone 11057 (TRAV25, TRAJ52)
CAGRPGGTSYGKLTF

SEQ ID NO: 22114 - protein, 17 aa, Homo sapiens
  CDR3 for beta chain variable domain of TCR clone 11057 (TRBV7-8, TRBJ2-6)
CASSAGTGGAGANVLTL

SEQ ID NO: 22115 - protein, 12 aa, Homo sapiens
  CDR3 for alpha chain variable domain of TCR clone 11058 (TRAV17, TRAJ15)
CATGGTGTALIF

SEQ ID NO: 22116 - protein, 15 aa, Homo sapiens
  CDR3 for beta chain variable domain of TCR clone 11058 (TRBV2, TRBJ2-5)
CASSGGLAGQETQYF

SEQ ID NO: 22117 - protein, 14 aa, Homo sapiens
  CDR3 for alpha chain variable domain of TCR clone 11059 (TRAV1-2, TRAJ16)
CAVNRFSDGQQLLF

SEQ ID NO: 22118 - protein, 15 aa, Homo sapiens
  CDR3 for beta chain variable domain of TCR clone 11059 (TRBV9, TRBJ1-6)
CASSVAGTGDSPLHF

SEQ ID NO: 22119 - protein, 13 aa, Homo sapiens
  CDR3 for alpha chain variable domain of TCR clone 11060 (TRAV6, TRAJ16)
CALDDSDGQKLLF

SEQ ID NO: 22120 - protein, 13 aa, Homo sapiens
  CDR3 for beta chain variable domain of TCR clone 11060 (TRBV10-3, TRBJ2-7)
CASKLAVNYEQYF

SEQ ID NO: 22121 - protein, 18 aa, Homo sapiens
  CDR3 for alpha chain variable domain of TCR clone 11061 (TRAV21, TRAJ52)
CAVRPSPAGGTSYGKLTF

SEQ ID NO: 22122 - protein, 17 aa, Homo sapiens
  CDR3 for beta chain variable domain of TCR clone 11061 (TRBV13, TRBJ2-3)
CASSLSRAAGGRNTQYF

SEQ ID NO: 22123 - protein, 13 aa, Homo sapiens
  CDR3 for alpha chain variable domain of TCR clone 11062 (TRAV23/DV6, TRAJ22)
CAPYSGSARQLTF

SEQ ID NO: 22124 - protein, 14 aa, Homo sapiens
  CDR3 for beta chain variable domain of TCR clone 11062 (TRBV12-5, TRBJ2-5)
CASGSRTHQETQYF

SEQ ID NO: 22125 - protein, 13 aa, Homo sapiens
  CDR3 for alpha chain variable domain of TCR clone 11063 (TRAV2, TRAJ40)
CAVVTSGTYKYIF

SEQ ID NO: 22126 - protein, 14 aa, Homo sapiens
  CDR3 for beta chain variable domain of TCR clone 11063 (TRBV19, TRBJ2-1)
CASPTFFLSGEQFF

SEQ ID NO: 22127 - protein, 14 aa, Homo sapiens
  CDR3 for alpha chain variable domain of TCR clone 11064 (TRAV1-2, TRAJ16)
CAVNRFSDGQKLLF

SEQ ID NO: 22128 - protein, 15 aa, Homo sapiens
  CDR3 for beta chain variable domain of TCR clone 11064 (TRBV9, TRBJ1-6)
CASSVAGTGDSPLHS

SEQ ID NO: 22129 - protein, 10 aa, Homo sapiens
  CDR3 for alpha chain variable domain of TCR clone 11065 (TRAV8-4, TRAJ43)
CAVSADDMRF

SEQ ID NO: 22130 - protein, 15 aa, Homo sapiens
  CDR3 for beta chain variable domain of TCR clone 11065 (TRBV7-2, TRBJ1-2)
CASSLVSGGDYGYTF

SEQ ID NO: 22131 - protein, 14 aa, Homo sapiens
  CDR3 for alpha chain variable domain of TCR clone 11066 (TRAV12-3, TRAJ42)
CAMNYGGSQGSLIF

SEQ ID NO: 22132 - protein, 15 aa, Homo sapiens
  CDR3 for beta chain variable domain of TCR clone 11066 (TRBV5-7, TRBJ1-5)
CASSYGKLWDQPQHF

SEQ ID NO: 22133 - protein, 14 aa, Homo sapiens
  CDR3 for alpha chain variable domain of TCR clone 11067 (TRAV1-2, TRAJ16)
CAVNRFSDGQKLLF

SEQ ID NO: 22134 - protein, 13 aa, Homo sapiens
  CDR3 for beta chain variable domain of TCR clone 11067 (TRBV19, TRBJ1-2)
CASSQGQVYGYTF

SEQ ID NO: 22135 - protein, 12 aa, Homo sapiens
  CDR3 for alpha chain variable domain of TCR clone 11068 (TRAV13-2, TRAJ23)
CAERHRGGKLIF

SEQ ID NO: 22136 - protein, 16 aa, Homo sapiens
  CDR3 for beta chain variable domain of TCR clone 11068 (TRBV20-1, TRBJ1-4)
CSAPGQGLLTNERLFF

SEQ ID NO: 22137 - protein, 17 aa, Homo sapiens
  CDR3 for alpha chain variable domain of TCR clone 11069 (TRAV3, TRAJ6)
CAVRDGPRAGGSFIPTF

SEQ ID NO: 22138 - protein, 14 aa, Homo sapiens
  CDR3 for beta chain variable domain of TCR clone 11069 (TRBV7-2, TRBJ2-7)
CASSPKTSFYEQYF

SEQ ID NO: 22139 - protein, 11 aa, Homo sapiens
  CDR3 for alpha chain variable domain of TCR clone 11070 (TRAV1-2, TRAJ40)
CAVPGTYKYIF

SEQ ID NO: 22140 - protein, 13 aa, Homo sapiens
  CDR3 for beta chain variable domain of TCR clone 11070 (TRBV7-3, TRBJ1-1)
CASSQDWGAEAFF

SEQ ID NO: 22141 - protein, 14 aa, Homo sapiens
  CDR3 for alpha chain variable domain of TCR clone 11071 (TRAV20, TRAJ56)
CAVQFGGANSKLTF

SEQ ID NO: 22142 - protein, 14 aa, Homo sapiens
  CDR3 for beta chain variable domain of TCR clone 11071 (TRBV20-1, TRBJ2-7)
CSAKRGRSSYEQYV

SEQ ID NO: 22143 - protein, 14 aa, Homo sapiens
  CDR3 for alpha chain variable domain of TCR clone 11072 (TRAV35, TRAJ22)
CAGLRPGSTRQLTF

SEQ ID NO: 22144 - protein, 15 aa, Homo sapiens
  CDR3 for beta chain variable domain of TCR clone 11072 (TRBV12-4, TRBJ2-5)
CASSPPTGLQETQYF

SEQ ID NO: 22145 - protein, 14 aa, Homo sapiens
  CDR3 for alpha chain variable domain of TCR clone 11073 (TRAV2, TRAJ37)
CAVDFTSNTGKLIF

SEQ ID NO: 22146 - protein, 15 aa, Homo sapiens
  CDR3 for beta chain variable domain of TCR clone 11073 (TRBV20-1, TRBJ1-1)
CSASRGATGNTEAFF

SEQ ID NO: 22147 - protein, 10 aa, Homo sapiens
  CDR3 for alpha chain variable domain of TCR clone 11074 (TRAV38-1, TRAJ34)
CALYTDKLIF

SEQ ID NO: 22148 - protein, 15 aa, Homo sapiens
  CDR3 for beta chain variable domain of TCR clone 11074 (TRBV28, TRBJ2-5)
CASSPPWSYQETQYF

SEQ ID NO: 22149 - protein, 16 aa, Homo sapiens
  CDR3 for alpha chain variable domain of TCR clone 11075 (TRAV1-2, TRAJ10)
CAVRGVLTGGGNKLTF

SEQ ID NO: 22150 - protein, 14 aa, Homo sapiens
  CDR3 for beta chain variable domain of TCR clone 11075 (TRBV11-2, TRBJ2-1)
CASSLSGPYNEQFF

SEQ ID NO: 22151 - protein, 14 aa, Homo sapiens
  CDR3 for alpha chain variable domain of TCR clone 11076 (TRAV1-2, TRAJ8)
CAVSEDTGFQKLVF

SEQ ID NO: 22152 - protein, 15 aa, Homo sapiens
  CDR3 for beta chain variable domain of TCR clone 11076 (TRBV6-3, TRBJ2-7)
CASSSPGTVFYEQYF

SEQ ID NO: 22153 - protein, 18 aa, Homo sapiens
  CDR3 for alpha chain variable domain of TCR clone 11077 (TRAV8-6, TRAJ52)
CAVSRANAGGTSYGKLTF

SEQ ID NO: 22154 - protein, 19 aa, Homo sapiens
  CDR3 for beta chain variable domain of TCR clone 11077 (TRBV7-2, TRBJ2-3)
CASSSQGGPRLAGADTQYF

SEQ ID NO: 22155 - protein, 14 aa, Homo sapiens
  CDR3 for alpha chain variable domain of TCR clone 11078 (TRAV1-2, TRAJ8)
CAVREDTGFQKLVF

SEQ ID NO: 22156 - protein, 15 aa, Homo sapiens
  CDR3 for beta chain variable domain of TCR clone 11078 (TRBV4-1, TRBJ2-7)
CASSQQGQGFDEQYF

SEQ ID NO: 22157 - protein, 13 aa, Homo sapiens
  CDR3 for alpha chain variable domain of TCR clone 11079 (TRAV21, TRAJ57)
CTVTQGGSEKLVF

SEQ ID NO: 22158 - protein, 16 aa, Homo sapiens
  CDR3 for beta chain variable domain of TCR clone 11079 (TRBV29-1, TRBJ2-7)
CSVEDAEDGTAYEQYF

SEQ ID NO: 22159 - protein, 15 aa, Homo sapiens
  CDR3 for alpha chain variable domain of TCR clone 11080 (TRAV38-2/DV8, TRAJ43)
CAYRSWGAMPNDMRF

SEQ ID NO: 22160 - protein, 12 aa, Homo sapiens
  CDR3 for beta chain variable domain of TCR clone 11080 (TRBV28, TRBJ1-1)
CASNSGDTEAFF

SEQ ID NO: 22161 - protein, 17 aa, Homo sapiens
  CDR3 for alpha chain variable domain of TCR clone 11081 (TRAV3, TRAJ42)
CAVRDRDYGGSQGNLTF

SEQ ID NO: 22162 - protein, 15 aa, Homo sapiens
  CDR3 for beta chain variable domain of TCR clone 11081 (TRBV6-6, TRBJ2-7)
CASSYSYGGSYEQYF

SEQ ID NO: 22163 - protein, 17 aa, Homo sapiens
  CDR3 for alpha chain variable domain of TCR clone 11082 (TRAV3, TRAJ42)
CAVRDRDYGGSQGNLIL

SEQ ID NO: 22164 - protein, 15 aa, Homo sapiens
  CDR3 for beta chain variable domain of TCR clone 11082 (TRBV6-6, TRBJ2-7)
CASSYSYGGSYEQYF

SEQ ID NO: 22165 - protein, 14 aa, Homo sapiens
  CDR3 for alpha chain variable domain of TCR clone 11083 (TRAV9-2, TRAJ38)
CALSNAGNNRKLIW

SEQ ID NO: 22166 - protein, 17 aa, Homo sapiens
  CDR3 for beta chain variable domain of TCR clone 11083 (TRBV20-1, TRBJ2-1)
CSARDPLAGVWDNEQFF

SEQ ID NO: 22167 - protein, 13 aa, Homo sapiens
  CDR3 for alpha chain variable domain of TCR clone 11084 (TRAV20, TRAJ37)
CAGCSSNTGKLIF

SEQ ID NO: 22168 - protein, 11 aa, Homo sapiens
  CDR3 for beta chain variable domain of TCR clone 11084 (TRBV12-4, TRBJ2-3)
CASTAADTQYF

SEQ ID NO: 22169 - protein, 11 aa, Homo sapiens
  CDR3 for alpha chain variable domain of TCR clone 11085 (TRAV8-4, TRAJ11)
CAVSDDSTLTF

SEQ ID NO: 22170 - protein, 14 aa, Homo sapiens
  CDR3 for beta chain variable domain of TCR clone 11085 (TRBV6-3, TRBJ1-5)
CASSYSRFAQPQHF

SEQ ID NO: 22171 - protein, 14 aa, Homo sapiens
  CDR3 for alpha chain variable domain of TCR clone 11086 (TRAV12-2, TRAJ40)
CAVKIPSGTYKYIF

SEQ ID NO: 22172 - protein, 14 aa, Homo sapiens
  CDR3 for beta chain variable domain of TCR clone 11086 (TRBV20-1, TRBJ1-1)
CSAQTQIGGTEAFF

SEQ ID NO: 22173 - protein, 15 aa, Homo sapiens
  CDR3 for alpha chain variable domain of TCR clone 11087 (TRAV14/DV4, TRAJ10)
CAMRELTGGGNKLTF

SEQ ID NO: 22174 - protein, 15 aa, Homo sapiens
  CDR3 for beta chain variable domain of TCR clone 11087 (TRBV7-9, TRBJ1-4)
CASSRTGGFNEKLFF

SEQ ID NO: 22175 - protein, 15 aa, Homo sapiens
  CDR3 for alpha chain variable domain of TCR clone 11088 (TRAV25, TRAJ53)
CPTSNSGGSNYKLTF

SEQ ID NO: 22176 - protein, 17 aa, Homo sapiens
  CDR3 for beta chain variable domain of TCR clone 11088 (TRBV11-2, TRBJ2-1)
CASSLYPPGVEYNEQFF

SEQ ID NO: 22177 - protein, 16 aa, Homo sapiens
  CDR3 for alpha chain variable domain of TCR clone 11089 (TRAV30, TRAJ24)
CGTEIVDADCWGKFQF

SEQ ID NO: 22178 - protein, 14 aa, Homo sapiens
  CDR3 for beta chain variable domain of TCR clone 11089 (TRBV12-5, TRBJ2-5)
CASGSRTHQETQYF

SEQ ID NO: 22179 - protein, 12 aa, Homo sapiens
  CDR3 for alpha chain variable domain of TCR clone 11090 (TRAV12-1, TRAJ40)
CVVYSGTYKYIF

SEQ ID NO: 22180 - protein, 18 aa, Homo sapiens
  CDR3 for beta chain variable domain of TCR clone 11090 (TRBV11-2, TRBJ2-3)
CASRLGGASRGAPNTQYF

SEQ ID NO: 22181 - protein, 14 aa, Homo sapiens
  CDR3 for alpha chain variable domain of TCR clone 11091 (TRAV2, TRAJ37)
CAVDFTSNTGKLIF

SEQ ID NO: 22182 - protein, 15 aa, Homo sapiens
  CDR3 for beta chain variable domain of TCR clone 11091 (TRBV20-1, TRBJ1-1)
CSASRGVTGNTGAFF

SEQ ID NO: 22183 - protein, 14 aa, Homo sapiens
  CDR3 for alpha chain variable domain of TCR clone 11092 (TRAV14/DV4, TRAJ9)
CAMRESTGGFKTIF

SEQ ID NO: 22184 - protein, 15 aa, Homo sapiens
  CDR3 for beta chain variable domain of TCR clone 11092 (TRBV10-3, TRBJ1-5)
CAISDTGLGGQPQHF

SEQ ID NO: 22185 - protein, 14 aa, Homo sapiens
  CDR3 for alpha chain variable domain of TCR clone 11093 (TRAV13-2, TRAJ32)
CAENYGGATNKLIF

SEQ ID NO: 22186 - protein, 15 aa, Homo sapiens
  CDR3 for beta chain variable domain of TCR clone 11093 (TRBV12-4, TRBJ2-5)
CANTLNSGRGETQYF

SEQ ID NO: 22187 - protein, 13 aa, Homo sapiens
  CDR3 for alpha chain variable domain of TCR clone 11094 (TRAV39, TRAJ17)
CAAQFTAGNKLTF

SEQ ID NO: 22188 - protein, 13 aa, Homo sapiens
  CDR3 for beta chain variable domain of TCR clone 11094 (TRBV3-1, TRBJ1-5)
CAITRRDGQPQHF

SEQ ID NO: 22189 - protein, 12 aa, Homo sapiens
  CDR3 for alpha chain variable domain of TCR clone 11095 (TRAV8-3, TRAJ26)
CAGDNYGQNFVF

SEQ ID NO: 22190 - protein, 12 aa, Homo sapiens
  CDR3 for beta chain variable domain of TCR clone 11095 (TRBV11-2, TRBJ2-2)
CASSLGGGELFI

SEQ ID NO: 22191 - protein, 23 aa, Homo sapiens
  CDR3 for alpha chain variable domain of TCR clone 11096 (TRAV21, )
CAVMGAGNNHIQNPDPAVYQLRD

SEQ ID NO: 22192 - protein, 13 aa, Homo sapiens
  CDR3 for beta chain variable domain of TCR clone 11096 (TRBV7-3, TRBJ2-5)
CASSIGFFETQYF

SEQ ID NO: 22193 - protein, 13 aa, Homo sapiens
  CDR3 for alpha chain variable domain of TCR clone 11097 (TRAV12-3, TRAJ33)
CAMSVSSNYQLIW

SEQ ID NO: 22194 - protein, 13 aa, Homo sapiens
  CDR3 for beta chain variable domain of TCR clone 11097 (TRBV7-2, TRBJ2-2)
CASSLAVTGELFF

SEQ ID NO: 22195 - protein, 12 aa, Homo sapiens
  CDR3 for alpha chain variable domain of TCR clone 11098 (TRAV9-2, TRAJ3)
CALYSSASKIIF

SEQ ID NO: 22196 - protein, 16 aa, Homo sapiens
  CDR3 for beta chain variable domain of TCR clone 11098 (TRBV10-2, TRBJ1-5)
CASSVRDRASNQPQHF

SEQ ID NO: 22197 - protein, 13 aa, Homo sapiens
  CDR3 for alpha chain variable domain of TCR clone 11099 (TRAV26-1, TRAJ48)
CIVRVVGDEKLTF

SEQ ID NO: 22198 - protein, 16 aa, Homo sapiens
  CDR3 for beta chain variable domain of TCR clone 11099 (TRBV5-1, TRBJ2-2)
CASSSRTGGRTGELFF

SEQ ID NO: 22199 - protein, 11 aa, Homo sapiens
  CDR3 for alpha chain variable domain of TCR clone 11100 (TRAV1-1, TRAJ23)
CAVRQGGKLIF

SEQ ID NO: 22200 - protein, 14 aa, Homo sapiens
  CDR3 for beta chain variable domain of TCR clone 11100 (TRBV12-4, TRBJ1-1)
CASSLGTGGTEAFF

SEQ ID NO: 22201 - protein, 11 aa, Homo sapiens
  CDR3 for alpha chain variable domain of TCR clone 11101 (TRAV21, TRAJ39)
LLVNAGNMLTF

SEQ ID NO: 22202 - protein, 16 aa, Homo sapiens
  CDR3 for beta chain variable domain of TCR clone 11101 (TRBV7-3, TRBJ2-2)
CASSLKRGTLSGELFF

SEQ ID NO: 22203 - protein, 14 aa, Homo sapiens
  CDR3 for alpha chain variable domain of TCR clone 11102 (TRAV13-1, TRAJ5)
CAASGGTGRRALTF

SEQ ID NO: 22204 - protein, 16 aa, Homo sapiens
  CDR3 for beta chain variable domain of TCR clone 11102 (TRBV6-1, TRBJ1-6)
CASSSDGSPRNSPLHF

SEQ ID NO: 22205 - protein, 11 aa, Homo sapiens
  CDR3 for alpha chain variable domain of TCR clone 11103 (TRAV21, TRAJ11)
CAVNGYSTLTF

SEQ ID NO: 22206 - protein, 11 aa, Homo sapiens
  CDR3 for beta chain variable domain of TCR clone 11103 (TRBV19, TRBJ1-1)
CASSIGSEAFL

SEQ ID NO: 22207 - protein, 14 aa, Homo sapiens
  CDR3 for alpha chain variable domain of TCR clone 11104 (TRAV17, TRAJ57)
CATDPQGGSEKLVF

SEQ ID NO: 22208 - protein, 14 aa, Homo sapiens
  CDR3 for beta chain variable domain of TCR clone 11104 (TRBV2, TRBJ2-1)
CASRTGSSYNEQFF

SEQ ID NO: 22209 - protein, 13 aa, Homo sapiens
  CDR3 for alpha chain variable domain of TCR clone 11105 (TRAV1-2, TRAJ24)
CAVTGDSWGKLQF

SEQ ID NO: 22210 - protein, 15 aa, Homo sapiens
  CDR3 for beta chain variable domain of TCR clone 11105 (TRBV7-2, TRBJ2-7)
CASSLGGAKSGEQYF

SEQ ID NO: 22211 - protein, 14 aa, Homo sapiens
  CDR3 for alpha chain variable domain of TCR clone 11106 (TRAV14/DV4, TRAJ57)
CAMREEGGSEKLVF

SEQ ID NO: 22212 - protein, 13 aa, Homo sapiens
  CDR3 for beta chain variable domain of TCR clone 11106 (TRBV15, TRBJ1-6)
CATSGGLNSPLHF

SEQ ID NO: 22213 - protein, 15 aa, Homo sapiens
  CDR3 for alpha chain variable domain of TCR clone 11107 (TRAV17, TRAJ57)
CATGPSQGGSERLVF

SEQ ID NO: 22214 - protein, 16 aa, Homo sapiens
  CDR3 for beta chain variable domain of TCR clone 11107 (TRBV12-4, TRBJ1-5)
CASSRPVGGSNQPQHF

SEQ ID NO: 22215 - protein, 14 aa, Homo sapiens
  CDR3 for alpha chain variable domain of TCR clone 11108 (TRAV2, TRAJ37)
CAVDFTSNTGRLIF

SEQ ID NO: 22216 - protein, 15 aa, Homo sapiens
  CDR3 for beta chain variable domain of TCR clone 11108 (TRBV20-1, TRBJ1-1)
CSASRGVTGNTEAFF

SEQ ID NO: 22217 - protein, 12 aa, Homo sapiens
  CDR3 for alpha chain variable domain of TCR clone 11109 (TRAV8-3, TRAJ20)
CAVGANDYKLGF

SEQ ID NO: 22218 - protein, 16 aa, Homo sapiens
  CDR3 for beta chain variable domain of TCR clone 11109 (TRBV19, TRBJ2-2)
CASRSPGTGATGELFF

SEQ ID NO: 22219 - protein, 13 aa, Homo sapiens
  CDR3 for alpha chain variable domain of TCR clone 11110 (TRAV8-4, TRAJ49)
CAVSDPGGNQFYF

SEQ ID NO: 22220 - protein, 15 aa, Homo sapiens
  CDR3 for beta chain variable domain of TCR clone 11110 (TRBV12-4, TRBJ1-3)
CASSLGLQKGNTIYF

SEQ ID NO: 22221 - protein, 16 aa, Homo sapiens
  CDR3 for alpha chain variable domain of TCR clone 11111 (TRAV1-2, TRAJ10)
CAVRGVLTGGGNKRTF

SEQ ID NO: 22222 - protein, 12 aa, Homo sapiens
  CDR3 for beta chain variable domain of TCR clone 11111 (TRBV7-8, TRBJ2-7)
CASSLGDREQYF

SEQ ID NO: 22223 - protein, 14 aa, Homo sapiens
  CDR3 for alpha chain variable domain of TCR clone 11112 (TRAV35, TRAJ22)
CAVLRPGSARQLTF

SEQ ID NO: 22224 - protein, 15 aa, Homo sapiens
  CDR3 for beta chain variable domain of TCR clone 11112 (TRBV12-4, TRBJ2-5)
CASSPPTGLQETQYF

SEQ ID NO: 22225 - protein, 14 aa, Homo sapiens
  CDR3 for alpha chain variable domain of TCR clone 11113 (TRAV34, TRAJ44)
CGADGTGTASKLTF

SEQ ID NO: 22226 - protein, 16 aa, Homo sapiens
  CDR3 for beta chain variable domain of TCR clone 11113 (TRBV2, TRBJ2-5)
CASSETQGVGEETQYF

SEQ ID NO: 22227 - protein, 12 aa, Homo sapiens
  CDR3 for alpha chain variable domain of TCR clone 11114 (TRAV1-1, TRAJ39)
CAVPVVGNMLTF

SEQ ID NO: 22228 - protein, 18 aa, Homo sapiens
  CDR3 for beta chain variable domain of TCR clone 11114 (TRBV6-3, TRBJ2-5)
CTSVPAVTGDSSGETQYF

SEQ ID NO: 22229 - protein, 15 aa, Homo sapiens
  CDR3 for alpha chain variable domain of TCR clone 11115 (TRAV26-1, TRAJ20)
CIVRVAGSNDYKLSF

SEQ ID NO: 22230 - protein, 17 aa, Homo sapiens
  CDR3 for beta chain variable domain of TCR clone 11115 (TRBV11-2, TRBJ2-1)
CASSLYPPGVEYNEQFF

SEQ ID NO: 22231 - protein, 14 aa, Homo sapiens
  CDR3 for alpha chain variable domain of TCR clone 11116 (TRAV20, TRAJ29)
CAVQAWVGNTPLVL

SEQ ID NO: 22232 - protein, 15 aa, Homo sapiens
  CDR3 for beta chain variable domain of TCR clone 11116 (TRBV29-1, TRBJ2-7)
CSVEFFDRGSYEQYF

SEQ ID NO: 22233 - protein, 14 aa, Homo sapiens
  CDR3 for alpha chain variable domain of TCR clone 11117 (TRAV12-2, TRAJ17)
CAMLFKAAGNKLTF

SEQ ID NO: 22234 - protein, 17 aa, Homo sapiens
  CDR3 for beta chain variable domain of TCR clone 11117 (TRBV20-1, TRBJ2-2)
CSASGSGQGGLTGELFF

SEQ ID NO: 22235 - protein, 12 aa, Homo sapiens
  CDR3 for alpha chain variable domain of TCR clone 11118 (TRAV12-3, TRAJ17)
CAMTLTGNKLTF

SEQ ID NO: 22236 - protein, 14 aa, Homo sapiens
  CDR3 for beta chain variable domain of TCR clone 11118 (TRBV7-6, TRBJ2-3)
CASSLGTVTDTQYF

SEQ ID NO: 22237 - protein, 12 aa, Homo sapiens
  CDR3 for alpha chain variable domain of TCR clone 11119 (TRAV12-3, TRAJ17)
CAMTLTGNKLTF

SEQ ID NO: 22238 - protein, 15 aa, Homo sapiens
  CDR3 for beta chain variable domain of TCR clone 11119 (TRBV20-1, TRBJ2-7)
CSARDRVCGMDEQYF

SEQ ID NO: 22239 - protein, 14 aa, Homo sapiens
  CDR3 for alpha chain variable domain of TCR clone 11120 (TRAV2, TRAJ37)
RAVDFTSNTGKLIF

SEQ ID NO: 22240 - protein, 15 aa, Homo sapiens
  CDR3 for beta chain variable domain of TCR clone 11120 (TRBV20-1, TRBJ1-1)
CSASRGVTGNTEAFF

SEQ ID NO: 22241 - protein, 12 aa, Homo sapiens
  CDR3 for alpha chain variable domain of TCR clone 11121 (TRAV8-3, TRAJ20)
CAVGADDYKLSF

SEQ ID NO: 22242 - protein, 16 aa, Homo sapiens
  CDR3 for beta chain variable domain of TCR clone 11121 (TRBV19, TRBJ2-2)
CASRSPGTGATGELFF

SEQ ID NO: 22243 - protein, 11 aa, Homo sapiens
  CDR3 for alpha chain variable domain of TCR clone 11122 (TRAV2, TRAJ13)
CASGGYRKVTF

SEQ ID NO: 22244 - protein, 16 aa, Homo sapiens
  CDR3 for beta chain variable domain of TCR clone 11122 (TRBV6-1, TRBJ2-5)
CASSETLDRGAETQYF

SEQ ID NO: 22245 - protein, 14 aa, Homo sapiens
  CDR3 for alpha chain variable domain of TCR clone 11123 (TRAV12-2, TRAJ40)
CAVKIPSGTYKSIF

SEQ ID NO: 22246 - protein, 14 aa, Homo sapiens
  CDR3 for beta chain variable domain of TCR clone 11123 (TRBV20-1, TRBJ1-1)
CSAQTRIGGTEAFF

SEQ ID NO: 22247 - protein, 13 aa, Homo sapiens
  CDR3 for alpha chain variable domain of TCR clone 11124 (TRAV25, TRAJ48)
CAGPKGGNEKLTF

SEQ ID NO: 22248 - protein, 15 aa, Homo sapiens
  CDR3 for beta chain variable domain of TCR clone 11124 (TRBV9, TRBJ2-6)
CASSVLWNGANVLTF

SEQ ID NO: 22249 - protein, 14 aa, Homo sapiens
  CDR3 for alpha chain variable domain of TCR clone 11125 (TRAV9-2, TRAJ39)
CALYIYNAGNMLTF

SEQ ID NO: 22250 - protein, 15 aa, Homo sapiens
  CDR3 for beta chain variable domain of TCR clone 11125 (TRBV29-1, TRBJ2-6)
CSVGDRGSGANVLTF

SEQ ID NO: 22251 - protein, 15 aa, Homo sapiens
  CDR3 for alpha chain variable domain of TCR clone 11126 (TRAV21, TRAJ24)
CAARSSTDSWGKLPF

SEQ ID NO: 22252 - protein, 13 aa, Homo sapiens
  CDR3 for beta chain variable domain of TCR clone 11126 (TRBV11-2, TRBJ2-5)
CASSSTGEETQYF

SEQ ID NO: 22253 - protein, 11 aa, Homo sapiens
  CDR3 for alpha chain variable domain of TCR clone 11127 (TRAV3, TRAJ21)
CAVSNFNKFYF

SEQ ID NO: 22254 - protein, 16 aa, Homo sapiens
  CDR3 for beta chain variable domain of TCR clone 11127 (TRBV19, TRBJ2-1)
CASSKAGPSSYNEQFF

SEQ ID NO: 22255 - protein, 11 aa, Homo sapiens
  CDR3 for alpha chain variable domain of TCR clone 11128 (TRAV27, TRAJ57)
CAGVRRADLKS

SEQ ID NO: 22256 - protein, 11 aa, Homo sapiens
  CDR3 for beta chain variable domain of TCR clone 11128 (TRBV11-2, TRBJ1-1)
CASSINTEAFF

SEQ ID NO: 22257 - protein, 14 aa, Homo sapiens
  CDR3 for alpha chain variable domain of TCR clone 11129 (TRAV21, TRAJ35)
CAVMPIGVGNVLHC

SEQ ID NO: 22258 - protein, 12 aa, Homo sapiens
  CDR3 for beta chain variable domain of TCR clone 11129 (TRBV7-9, TRBJ2-7)
CASSIKREEQYF

SEQ ID NO: 22259 - protein, 14 aa, Homo sapiens
  CDR3 for alpha chain variable domain of TCR clone 11130 (TRAV1-2, TRAJ8)
CAAREDTGFQKLVF

SEQ ID NO: 22260 - protein, 13 aa, Homo sapiens
  CDR3 for beta chain variable domain of TCR clone 11130 (TRBV6-4, TRBJ2-3)
CASSVSWADTQYF

SEQ ID NO: 22261 - protein, 15 aa, Homo sapiens
  CDR3 for alpha chain variable domain of TCR clone 11131 (TRAV26-1, TRAJ29)
CIVRVEGSGNTPLVF

SEQ ID NO: 22262 - protein, 13 aa, Homo sapiens
  CDR3 for beta chain variable domain of TCR clone 11131 (TRBV7-9, TRBJ1-2)
CASSLKQNYGYTF

SEQ ID NO: 22263 - protein, 14 aa, Homo sapiens
  CDR3 for alpha chain variable domain of TCR clone 11132 (TRAV13-1, TRAJ28)
CAASPGAGSYQLTF

SEQ ID NO: 22264 - protein, 14 aa, Homo sapiens
  CDR3 for beta chain variable domain of TCR clone 11132 (TRBV27, TRBJ2-3)
CASSWAGTTDTQYF

SEQ ID NO: 22265 - protein, 15 aa, Homo sapiens
  CDR3 for alpha chain variable domain of TCR clone 11133 (TRAV38-1, TRAJ57)
CAFMDSQGGSEKLVF

SEQ ID NO: 22266 - protein, 16 aa, Homo sapiens
  CDR3 for beta chain variable domain of TCR clone 11133 (TRBV10-3, TRBJ2-1)
CASRGGGRGDYNEQFF

SEQ ID NO: 22267 - protein, 15 aa, Homo sapiens
  CDR3 for alpha chain variable domain of TCR clone 11134 (TRAV3, TRAJ5)
CSVRDLDTGRRALTF

SEQ ID NO: 22268 - protein, 13 aa, Homo sapiens
  CDR3 for beta chain variable domain of TCR clone 11134 (TRBV12-4, TRBJ2-7)
CASSPTETYEQYF

SEQ ID NO: 22269 - protein, 13 aa, Homo sapiens
  CDR3 for alpha chain variable domain of TCR clone 11135 (TRAV17, TRAJ9)
CATDYTGGFKTTF

SEQ ID NO: 22270 - protein, 16 aa, Homo sapiens
  CDR3 for beta chain variable domain of TCR clone 11135 (TRBV7-7, TRBJ2-1)
CASSLASGTSYNEQFF

SEQ ID NO: 22271 - protein, 14 aa, Homo sapiens
  CDR3 for alpha chain variable domain of TCR clone 11136 (TRAV2, TRAJ9)
CAVEDRSGGFKTIF

SEQ ID NO: 22272 - protein, 14 aa, Homo sapiens
  CDR3 for beta chain variable domain of TCR clone 11136 (TRBV7-2, TRBJ2-7)
CASSPKTSFYEQYF

SEQ ID NO: 22273 - protein, 18 aa, Homo sapiens
  CDR3 for alpha chain variable domain of TCR clone 11137 (TRAV21, TRAJ52)
CAVRPSPAGGNSYGKLTF

SEQ ID NO: 22274 - protein, 17 aa, Homo sapiens
  CDR3 for beta chain variable domain of TCR clone 11137 (TRBV13, TRBJ2-3)
CASSLSRVAGGRNTQYF

SEQ ID NO: 22275 - protein, 11 aa, Homo sapiens
  CDR3 for alpha chain variable domain of TCR clone 11138 (TRAV23/DV6, TRAJ11)
CAVGGYSTLTF

SEQ ID NO: 22276 - protein, 15 aa, Homo sapiens
  CDR3 for beta chain variable domain of TCR clone 11138 (TRBV7-8, TRBJ2-5)
CASSFQSSGEETQYF

SEQ ID NO: 22277 - protein, 13 aa, Homo sapiens
  CDR3 for alpha chain variable domain of TCR clone 11139 (TRAV12-2, TRAJ4)
CAVRSGGYNKLIF

SEQ ID NO: 22278 - protein, 15 aa, Homo sapiens
  CDR3 for beta chain variable domain of TCR clone 11139 (TRBV10-3, TRBJ2-1)
CAISDVQDRAYEQLF

SEQ ID NO: 22279 - protein, 18 aa, Homo sapiens
  CDR3 for alpha chain variable domain of TCR clone 11140 (TRAV21, TRAJ52)
CAVRPSPAGGTIYGKLTF

SEQ ID NO: 22280 - protein, 17 aa, Homo sapiens
  CDR3 for beta chain variable domain of TCR clone 11140 (TRBV13, TRBJ2-3)
CASSLSRVAGGRNTQYF

SEQ ID NO: 22281 - protein, 13 aa, Homo sapiens
  CDR3 for alpha chain variable domain of TCR clone 11141 (TRAV4, TRAJ40)
CLVEGSGTYKYIF

SEQ ID NO: 22282 - protein, 16 aa, Homo sapiens
  CDR3 for beta chain variable domain of TCR clone 11141 (TRBV20-1, TRBJ2-1)
CSASQHLAGDNNEQFF

SEQ ID NO: 22283 - protein, 15 aa, Homo sapiens
  CDR3 for alpha chain variable domain of TCR clone 11142 (TRAV10, TRAJ36)
CVVSALGEGANNLFF

SEQ ID NO: 22284 - protein, 17 aa, Homo sapiens
  CDR3 for beta chain variable domain of TCR clone 11142 (TRBV6-5, TRBJ2-7)
CASSLLPQDRGPYEQYF

SEQ ID NO: 22285 - protein, 14 aa, Homo sapiens
  CDR3 for alpha chain variable domain of TCR clone 11143 (TRAV1-2, TRAJ16)
CAVNRFSDGQKLLF

SEQ ID NO: 22286 - protein, 13 aa, Homo sapiens
  CDR3 for beta chain variable domain of TCR clone 11143 (TRBV12-4, TRBJ2-5)
CASSPGTEETQYF

SEQ ID NO: 22287 - protein, 14 aa, Homo sapiens
  CDR3 for alpha chain variable domain of TCR clone 11144 (TRAV29/DV5, TRAJ36)
CAARRKTGANNLFL

SEQ ID NO: 22288 - protein, 14 aa, Homo sapiens
  CDR3 for beta chain variable domain of TCR clone 11144 (TRBV12-5, TRBJ2-5)
CASGSRTHQETQYF

SEQ ID NO: 22289 - protein, 16 aa, Homo sapiens
  CDR3 for alpha chain variable domain of TCR clone 11145 (TRAV12-3, TRAJ53)
CAMSPGSGGSNYELTF

SEQ ID NO: 22290 - protein, 11 aa, Homo sapiens
  CDR3 for beta chain variable domain of TCR clone 11145 (TRBV29-1, TRBJ2-5)
CSEDRTGTQYF

SEQ ID NO: 22291 - protein, 15 aa, Homo sapiens
  CDR3 for alpha chain variable domain of TCR clone 11146 (TRAV1-2, TRAJ28)
CAVQYSGAGSYQLTL

SEQ ID NO: 22292 - protein, 13 aa, Homo sapiens
  CDR3 for beta chain variable domain of TCR clone 11146 (TRBV20-1, TRBJ2-7)
CSATHTSGYEQYF

SEQ ID NO: 22293 - protein, 13 aa, Homo sapiens
  CDR3 for alpha chain variable domain of TCR clone 11147 (TRAV16, TRAJ54)
CALAKGGAQKLVF

SEQ ID NO: 22294 - protein, 12 aa, Homo sapiens
  CDR3 for beta chain variable domain of TCR clone 11147 (TRBV11-3, TRBJ1-1)
CASSHRQGEAFF

SEQ ID NO: 22295 - protein, 15 aa, Homo sapiens
  CDR3 for alpha chain variable domain of TCR clone 11148 (TRAV8-2, TRAJ24)
CVVSDRTDSWGKLQF

SEQ ID NO: 22296 - protein, 15 aa, Homo sapiens
  CDR3 for beta chain variable domain of TCR clone 11148 (TRBV29-1, TRBJ2-7)
CSVEFFDRGSYEQYF

SEQ ID NO: 22297 - protein, 15 aa, Homo sapiens
  CDR3 for alpha chain variable domain of TCR clone 11149 (TRAV27, TRAJ38)
CAARRNAGNDRKLIW

SEQ ID NO: 22298 - protein, 13 aa, Homo sapiens
  CDR3 for beta chain variable domain of TCR clone 11149 (TRBV12-5, TRBJ2-3)
CASGDRQSDTQYF

SEQ ID NO: 22299 - protein, 14 aa, Homo sapiens
  CDR3 for alpha chain variable domain of TCR clone 11150 (TRAV26-1, TRAJ24)
CIVRRVGGWGKFQF

SEQ ID NO: 22300 - protein, 16 aa, Homo sapiens
  CDR3 for beta chain variable domain of TCR clone 11150 (TRBV6-3, TRBJ2-1)
CASSYRRGDSYNEQFF

SEQ ID NO: 22301 - protein, 12 aa, Homo sapiens
  CDR3 for alpha chain variable domain of TCR clone 11151 (TRAV1-1, TRAJ39)
CAVPVVGNMLTF

SEQ ID NO: 22302 - protein, 14 aa, Homo sapiens
  CDR3 for beta chain variable domain of TCR clone 11151 (TRBV11-2, TRBJ2-3)
CASSRLARTDTQYF

SEQ ID NO: 22303 - protein, 14 aa, Homo sapiens
  CDR3 for alpha chain variable domain of TCR clone 11152 (TRAV1-2, TRAJ16)
CAVNRFSDGQKLLF

SEQ ID NO: 22304 - protein, 12 aa, Homo sapiens
  CDR3 for beta chain variable domain of TCR clone 11152 (TRBV5-7, TRBJ1-1)
CASSLGRGKAFF

SEQ ID NO: 22305 - protein, 12 aa, Homo sapiens
  CDR3 for alpha chain variable domain of TCR clone 11153 (TRAV1-2, TRAJ29)
CAVPSGNTPLVF

SEQ ID NO: 22306 - protein, 12 aa, Homo sapiens
  CDR3 for beta chain variable domain of TCR clone 11153 (TRBV5-5, TRBJ2-5)
CASSYFGETQYF

SEQ ID NO: 22307 - protein, 12 aa, Homo sapiens
  CDR3 for alpha chain variable domain of TCR clone 11154 (TRAV12-1, TRAJ40)
CVAYSGTYKYIF

SEQ ID NO: 22308 - protein, 18 aa, Homo sapiens
  CDR3 for beta chain variable domain of TCR clone 11154 (TRBV11-2, TRBJ2-3)
CASSLGGASRGAPNTQYF

SEQ ID NO: 22309 - protein, 14 aa, Homo sapiens
  CDR3 for alpha chain variable domain of TCR clone 11155 (TRAV12-2, TRAJ40)
CAVKIPSGTYKYIF

SEQ ID NO: 22310 - protein, 14 aa, Homo sapiens
  CDR3 for beta chain variable domain of TCR clone 11155 (TRBV25-1, TRBJ1-1)
CASTHLGGNTEAFF

SEQ ID NO: 22311 - protein, 14 aa, Homo sapiens
  CDR3 for alpha chain variable domain of TCR clone 11156 (TRAV9-2, TRAJ39)
CALYIYNAGNMLTF

SEQ ID NO: 22312 - protein, 15 aa, Homo sapiens
  CDR3 for beta chain variable domain of TCR clone 11156 (TRBV5-5, TRBJ1-5)
CASSSTPGSNQPQHF

SEQ ID NO: 22313 - protein, 13 aa, Homo sapiens
  CDR3 for alpha chain variable domain of TCR clone 11157 (TRAV12-3, TRAJ33)
CAMSVNSNYQLIW

SEQ ID NO: 22314 - protein, 13 aa, Homo sapiens
  CDR3 for beta chain variable domain of TCR clone 11157 (TRBV7-2, TRBJ2-2)
RASSLAVTGELFF

SEQ ID NO: 22315 - protein, 14 aa, Homo sapiens
  CDR3 for alpha chain variable domain of TCR clone 11158 (TRAV13-1, TRAJ35)
CAASKGGFGNVLHC

SEQ ID NO: 22316 - protein, 14 aa, Homo sapiens
  CDR3 for beta chain variable domain of TCR clone 11158 (TRBV20-1, TRBJ2-2)
CSAPDTANTGELFF

SEQ ID NO: 22317 - protein, 17 aa, Homo sapiens
  CDR3 for alpha chain variable domain of TCR clone 11159 (TRAV3, TRAJ6)
CAVRDGPRAGGSYIPTF

SEQ ID NO: 22318 - protein, 14 aa, Homo sapiens
  CDR3 for beta chain variable domain of TCR clone 11159 (TRBV7-2, TRBJ2-7)
CASSPKTSFYEQFF

SEQ ID NO: 22319 - protein, 16 aa, Homo sapiens
  CDR3 for alpha chain variable domain of TCR clone 11160 (TRAV30, TRAJ24)
CGTEIVDADSWGKFQF

SEQ ID NO: 22320 - protein, 17 aa, Homo sapiens
  CDR3 for beta chain variable domain of TCR clone 11160 (TRBV7-8, TRBJ2-6)
CASSAGTGGAGANVLTF

SEQ ID NO: 22321 - protein, 17 aa, Homo sapiens
  CDR3 for alpha chain variable domain of TCR clone 11161 (TRAV3, TRAJ6)
CAVKDGPRAGGSYIPTF

SEQ ID NO: 22322 - protein, 14 aa, Homo sapiens
  CDR3 for beta chain variable domain of TCR clone 11161 (TRBV7-2, TRBJ2-7)
CASSPKTSFYEQYF

SEQ ID NO: 22323 - protein, 12 aa, Homo sapiens
  CDR3 for alpha chain variable domain of TCR clone 11162 (TRAV12-3, TRAJ17)
CAMTLTGNKLTF

SEQ ID NO: 22324 - protein, 18 aa, Homo sapiens
  CDR3 for beta chain variable domain of TCR clone 11162 (TRBV11-2, TRBJ2-3)
CASSLGGASRGAPNTQYF

SEQ ID NO: 22325 - protein, 11 aa, Homo sapiens
  CDR3 for alpha chain variable domain of TCR clone 11163 (TRAV2, TRAJ13)
CASGGYQKVTF

SEQ ID NO: 22326 - protein, 13 aa, Homo sapiens
  CDR3 for beta chain variable domain of TCR clone 11163 (TRBV7-2, TRBJ2-2)
CASSSVRAGELFF

SEQ ID NO: 22327 - protein, 14 aa, Homo sapiens
  CDR3 for alpha chain variable domain of TCR clone 11164 (TRAV17, TRAJ39)
CATDPVRAGNMPTF

SEQ ID NO: 22328 - protein, 15 aa, Homo sapiens
  CDR3 for beta chain variable domain of TCR clone 11164 (TRBV13, TRBJ1-5)
CASSFGQGGVQPQHF

SEQ ID NO: 22329 - protein, 13 aa, Homo sapiens
  CDR3 for alpha chain variable domain of TCR clone 11165 (TRAV38-1, TRAJ42)
CARWGGSQGNLIF

SEQ ID NO: 22330 - protein, 18 aa, Homo sapiens
  CDR3 for beta chain variable domain of TCR clone 11165 (TRBV11-2, TRBJ2-3)
CASSLGGASRGAPNTQYF

SEQ ID NO: 22331 - protein, 14 aa, Homo sapiens
  CDR3 for alpha chain variable domain of TCR clone 11166 (TRAV13-1, TRAJ35)
CAASKGGFGNLLHC

SEQ ID NO: 22332 - protein, 13 aa, Homo sapiens
  CDR3 for beta chain variable domain of TCR clone 11166 (TRBV7-3, TRBJ1-1)
CASSQDWGAEAFF

SEQ ID NO: 22333 - protein, 12 aa, Homo sapiens
  CDR3 for alpha chain variable domain of TCR clone 11167 (TRAV20, TRAJ23)
CAVHNQGGKLIF

SEQ ID NO: 22334 - protein, 12 aa, Homo sapiens
  CDR3 for beta chain variable domain of TCR clone 11167 (TRBV7-8, TRBJ2-7)
CASSLGDREQYF

SEQ ID NO: 22335 - protein, 15 aa, Homo sapiens
  CDR3 for alpha chain variable domain of TCR clone 11168 (TRAV29/DV5, TRAJ48)
CAASLGGLGNEKLTF

SEQ ID NO: 22336 - protein, 11 aa, Homo sapiens
  CDR3 for beta chain variable domain of TCR clone 11168 (TRBV20-1, TRBJ2-3)
CSGTSSTTQYF

SEQ ID NO: 22337 - protein, 15 aa, Homo sapiens
  CDR3 for alpha chain variable domain of TCR clone 11169 (TRAV2, TRAJ15)
CAVEDWGQAGTALIF

SEQ ID NO: 22338 - protein, 13 aa, Homo sapiens
  CDR3 for beta chain variable domain of TCR clone 11169 (TRBV10-2, TRBJ2-7)
CASGASGGYEQYF

SEQ ID NO: 22339 - protein, 15 aa, Homo sapiens
  CDR3 for alpha chain variable domain of TCR clone 11170 (TRAV27, TRAJ38)
CAARRNAGNNRKLIC

SEQ ID NO: 22340 - protein, 13 aa, Homo sapiens
  CDR3 for beta chain variable domain of TCR clone 11170 (TRBV12-5, TRBJ2-3)
CASGDRQSDTQYF

SEQ ID NO: 22341 - protein, 11 aa, Homo sapiens
  CDR3 for alpha chain variable domain of TCR clone 11171 (TRAV1-2, TRAJ40)
CAVPGTYKYIF

SEQ ID NO: 22342 - protein, 16 aa, Homo sapiens
  CDR3 for beta chain variable domain of TCR clone 11171 (TRBV7-8, TRBJ2-4)
CASSAERTLAKNIQYF

SEQ ID NO: 22343 - protein, 13 aa, Homo sapiens
  CDR3 for alpha chain variable domain of TCR clone 11172 (TRAV2, TRAJ40)
CAVVTSGTYKYIF

SEQ ID NO: 22344 - protein, 15 aa, Homo sapiens
  CDR3 for beta chain variable domain of TCR clone 11172 (TRBV11-3, TRBJ2-3)
CASLKDGREGDTQYL

SEQ ID NO: 22345 - protein, 13 aa, Homo sapiens
  CDR3 for alpha chain variable domain of TCR clone 11173 (TRAV21, TRAJ33)
CAVAGDSNYQLIW

SEQ ID NO: 22346 - protein, 15 aa, Homo sapiens
  CDR3 for beta chain variable domain of TCR clone 11173 (TRBV19, TRBJ1-2)
CASSVGQVLNYGYTF

SEQ ID NO: 22347 - protein, 13 aa, Homo sapiens
  CDR3 for alpha chain variable domain of TCR clone 11174 (TRAV1-2, TRAJ9)
CAALNTGGFKTIF

SEQ ID NO: 22348 - protein, 13 aa, Homo sapiens
  CDR3 for beta chain variable domain of TCR clone 11174 (TRBV19, TRBJ1-2)
CAGSVPGQDGYTF

SEQ ID NO: 22349 - protein, 17 aa, Homo sapiens
  CDR3 for alpha chain variable domain of TCR clone 11175 (TRAV8-6, TRAJ58)
CAVSSWVGETSGSRLTF

SEQ ID NO: 22350 - protein, 13 aa, Homo sapiens
  CDR3 for beta chain variable domain of TCR clone 11175 (TRBV14, TRBJ2-7)
CASSQDRRYEQYF

SEQ ID NO: 22351 - protein, 14 aa, Homo sapiens
  CDR3 for alpha chain variable domain of TCR clone 11176 (TRAV13-1, TRAJ44)
CAAKATGTASKLTF

SEQ ID NO: 22352 - protein, 15 aa, Homo sapiens
  CDR3 for beta chain variable domain of TCR clone 11176 (TRBV6-1, TRBJ2-1)
CASSELRGQYNEQFF

SEQ ID NO: 22353 - protein, 15 aa, Homo sapiens
  CDR3 for alpha chain variable domain of TCR clone 11177 (TRAV12-3, TRAJ6)
CAMSATTGGSYVPTF

SEQ ID NO: 22354 - protein, 16 aa, Homo sapiens
  CDR3 for beta chain variable domain of TCR clone 11177 (TRBV20-1, TRBJ1-2)
CSASMGQGVANYGYTF

SEQ ID NO: 22355 - protein, 15 aa, Homo sapiens
  CDR3 for alpha chain variable domain of TCR clone 11178 (TRAV12-2, TRAJ56)
CAVNPFTGANSKLTF

SEQ ID NO: 22356 - protein, 13 aa, Homo sapiens
  CDR3 for beta chain variable domain of TCR clone 11178 (TRBV20-1, TRBJ1-2)
RSARDRVYGGYTF

SEQ ID NO: 22357 - protein, 14 aa, Homo sapiens
  CDR3 for alpha chain variable domain of TCR clone 11179 (TRAV26-1, TRAJ49)
CIVRLTSTGNQFYF

SEQ ID NO: 22358 - protein, 13 aa, Homo sapiens
  CDR3 for beta chain variable domain of TCR clone 11179 (TRBV4-1, TRBJ2-7)
CASSQGQAYEQYF

SEQ ID NO: 22359 - protein, 18 aa, Homo sapiens
  CDR3 for alpha chain variable domain of TCR clone 11180 (TRAV21, TRAJ52)
CAVRPSPASGTSYGKLTF

SEQ ID NO: 22360 - protein, 17 aa, Homo sapiens
  CDR3 for beta chain variable domain of TCR clone 11180 (TRBV13, TRBJ2-3)
CASSLSRVAGGRNTQYF

SEQ ID NO: 22361 - protein, 12 aa, Homo sapiens
  CDR3 for alpha chain variable domain of TCR clone 11181 (TRAV17, TRAJ12)
CATLRSSYKLIL

SEQ ID NO: 22362 - protein, 16 aa, Homo sapiens
  CDR3 for beta chain variable domain of TCR clone 11181 (TRBV28, TRBJ2-7)
CASSLFFETGGPEQYF

SEQ ID NO: 22363 - protein, 14 aa, Homo sapiens
  CDR3 for alpha chain variable domain of TCR clone 11182 (TRAV13-1, TRAJ40)
CAASMTSGTYKYIF

SEQ ID NO: 22364 - protein, 14 aa, Homo sapiens
  CDR3 for beta chain variable domain of TCR clone 11182 (TRBV4-2, TRBJ2-5)
CASSQDRGRETQYF

SEQ ID NO: 22365 - protein, 15 aa, Homo sapiens
  CDR3 for alpha chain variable domain of TCR clone 11183 (TRAV26-1, TRAJ29)
CIVRVEGSGNTPLVF

SEQ ID NO: 22366 - protein, 14 aa, Homo sapiens
  CDR3 for beta chain variable domain of TCR clone 11183 (TRBV6-1, TRBJ1-3)
CASVQGGGGNTIYF

SEQ ID NO: 22367 - protein, 13 aa, Homo sapiens
  CDR3 for alpha chain variable domain of TCR clone 11184 (TRAV21, TRAJ27)
CAARTGNAGKSTF

SEQ ID NO: 22368 - protein, 14 aa, Homo sapiens
  CDR3 for beta chain variable domain of TCR clone 11184 (TRBV7-6, TRBJ2-3)
CASSLGTVTDTQYF

SEQ ID NO: 22369 - protein, 16 aa, Homo sapiens
  CDR3 for alpha chain variable domain of TCR clone 11185 (TRAV8-3, TRAJ10)
CAVGPILTGGGNKLTF

SEQ ID NO: 22370 - protein, 11 aa, Homo sapiens
  CDR3 for beta chain variable domain of TCR clone 11185 (TRBV29-1, TRBJ2-5)
CSEDRTGTQYF

SEQ ID NO: 22371 - protein, 14 aa, Homo sapiens
  CDR3 for alpha chain variable domain of TCR clone 11186 (TRAV38-1, TRAJ40)
CALRPTSGTYTYIF

SEQ ID NO: 22372 - protein, 14 aa, Homo sapiens
  CDR3 for beta chain variable domain of TCR clone 11186 (TRBV25-1, TRBJ1-1)
CASTHLGGNTEAFF

SEQ ID NO: 22373 - protein, 14 aa, Homo sapiens
  CDR3 for alpha chain variable domain of TCR clone 11187 (TRAV21, TRAJ23)
CAIMIYNQGGKLIF

SEQ ID NO: 22374 - protein, 13 aa, Homo sapiens
  CDR3 for beta chain variable domain of TCR clone 11187 (TRBV29-1, TRBJ2-1)
CSVEGGRVNEQFF

SEQ ID NO: 22375 - protein, 12 aa, Homo sapiens
  CDR3 for alpha chain variable domain of TCR clone 11188 (TRAV13-1, TRAJ53)
AASGGSNYKLTF

SEQ ID NO: 22376 - protein, 15 aa, Homo sapiens
  CDR3 for beta chain variable domain of TCR clone 11188 (TRBV5-1, TRBJ2-1)
CASSPPRAPYNEQSF

SEQ ID NO: 22377 - protein, 16 aa, Homo sapiens
  CDR3 for alpha chain variable domain of TCR clone 11189 (TRAV1-2, TRAJ10)
CAVRGVLTGGGNKLTS

SEQ ID NO: 22378 - protein, 12 aa, Homo sapiens
  CDR3 for beta chain variable domain of TCR clone 11189 (TRBV7-8, TRBJ2-7)
CASSLGDREQYF

SEQ ID NO: 22379 - protein, 17 aa, Homo sapiens
  CDR3 for alpha chain variable domain of TCR clone 11190 (TRAV8-6, TRAJ58)
CAVSSWVGETSGSRLTF

SEQ ID NO: 22380 - protein, 16 aa, Homo sapiens
  CDR3 for beta chain variable domain of TCR clone 11190 (TRBV12-4, TRBJ2-5)
CASSFFVRGRQETQYF

SEQ ID NO: 22381 - protein, 15 aa, Homo sapiens
  CDR3 for alpha chain variable domain of TCR clone 11191 (TRAV8-3, TRAJ45)
CASSYSGGGADGLTF

SEQ ID NO: 22382 - protein, 17 aa, Homo sapiens
  CDR3 for beta chain variable domain of TCR clone 11191 (TRBV11-2, TRBJ2-1)
CASSLYPPGVEYNEQFF

SEQ ID NO: 22383 - protein, 13 aa, Homo sapiens
  CDR3 for alpha chain variable domain of TCR clone 11192 (TRAV14/DV4, TRAJ44)
CAMETGTASKLTF

SEQ ID NO: 22384 - protein, 15 aa, Homo sapiens
  CDR3 for beta chain variable domain of TCR clone 11192 (TRBV20-1, TRBJ1-6)
CSARAGGTFNSPLHF

SEQ ID NO: 22385 - protein, 18 aa, Homo sapiens
  CDR3 for alpha chain variable domain of TCR clone 11193 (TRAV21, TRAJ52)
CAVRPSPAGGTSYGKRTF

SEQ ID NO: 22386 - protein, 17 aa, Homo sapiens
  CDR3 for beta chain variable domain of TCR clone 11193 (TRBV13, TRBJ2-3)
CASSLSRVAGGRNTQYF

SEQ ID NO: 22387 - protein, 13 aa, Homo sapiens
  CDR3 for alpha chain variable domain of TCR clone 11194 (TRAV2, TRAJ15)
CAVASQAGTALIF

SEQ ID NO: 22388 - protein, 13 aa, Homo sapiens
  CDR3 for beta chain variable domain of TCR clone 11194 (TRBV7-9, TRBJ1-2)
CASSLKQNYGYTF

SEQ ID NO: 22389 - protein, 14 aa, Homo sapiens
  CDR3 for alpha chain variable domain of TCR clone 11195 (TRAV38-1, TRAJ40)
CALRPTSGTYKYIF

SEQ ID NO: 22390 - protein, 14 aa, Homo sapiens
  CDR3 for beta chain variable domain of TCR clone 11195 (TRBV25-1, TRBJ1-1)
CASTHLGGNTEALF

SEQ ID NO: 22391 - protein, 13 aa, Homo sapiens
  CDR3 for alpha chain variable domain of TCR clone 11196 (TRAV1-2, TRAJ39)
CAVKDNAGNMLTF

SEQ ID NO: 22392 - protein, 14 aa, Homo sapiens
  CDR3 for beta chain variable domain of TCR clone 11196 (TRBV9, TRBJ2-1)
CASSPRTSFHEQFF

SEQ ID NO: 22393 - protein, 13 aa, Homo sapiens
  CDR3 for alpha chain variable domain of TCR clone 11197 (TRAV12-3, TRAJ33)
CAMSVDSNYQLIW

SEQ ID NO: 22394 - protein, 13 aa, Homo sapiens
  CDR3 for beta chain variable domain of TCR clone 11197 (TRBV7-2, TRBJ2-2)
CASSLAVTGELFF

SEQ ID NO: 22395 - protein, 14 aa, Homo sapiens
  CDR3 for alpha chain variable domain of TCR clone 11198 (TRAV1-2, TRAJ8)
CAVREDTGFQKLVF

SEQ ID NO: 22396 - protein, 15 aa, Homo sapiens
  CDR3 for beta chain variable domain of TCR clone 11198 (TRBV27, TRBJ1-6)
CASSFDRGLGSPLHF

SEQ ID NO: 22397 - protein, 13 aa, Homo sapiens
  CDR3 for alpha chain variable domain of TCR clone 11199 (TRAV8-6, TRAJ24)
CAVSSDSWGKLQF

SEQ ID NO: 22398 - protein, 15 aa, Homo sapiens
  CDR3 for beta chain variable domain of TCR clone 11199 (TRBV5-1, TRBJ2-1)
CASSPPRAPYNEQFF

SEQ ID NO: 22399 - protein, 11 aa, Homo sapiens
  CDR3 for alpha chain variable domain of TCR clone 11200 (TRAV1-2, TRAJ40)
CAVPGTYKYIF

SEQ ID NO: 22400 - protein, 16 aa, Homo sapiens
  CDR3 for beta chain variable domain of TCR clone 11200 (TRBV29-1, TRBJ2-7)
CSVEVVGTSGSCEQYF

SEQ ID NO: 22401 - protein, 15 aa, Homo sapiens
  CDR3 for alpha chain variable domain of TCR clone 11201 (TRAV26-1, TRAJ44)
CIVRANTGTASKLTF

SEQ ID NO: 22402 - protein, 16 aa, Homo sapiens
  CDR3 for beta chain variable domain of TCR clone 11201 (TRBV7-7, TRBJ2-1)
CASSLASGASYNEQFF

SEQ ID NO: 22403 - protein, 16 aa, Homo sapiens
  CDR3 for alpha chain variable domain of TCR clone 11202 (TRAV3, TRAJ21)
CAVRDIERGNLNKFYF

SEQ ID NO: 22404 - protein, 13 aa, Homo sapiens
  CDR3 for beta chain variable domain of TCR clone 11202 (TRBV27, TRBJ2-7)
CASSLTTGYEQYF

SEQ ID NO: 22405 - protein, 11 aa, Homo sapiens
  CDR3 for alpha chain variable domain of TCR clone 11203 (TRAV21, TRAJ34)
RAVTNTDKLIF

SEQ ID NO: 22406 - protein, 17 aa, Homo sapiens
  CDR3 for beta chain variable domain of TCR clone 11203 (TRBV20-1, TRBJ2-1)
CSARSPSGGPPTMSSSS

SEQ ID NO: 22407 - protein, 12 aa, Homo sapiens
  CDR3 for alpha chain variable domain of TCR clone 11204 (TRAV4, TRAJ21)
RLVGDNFNKFYF

SEQ ID NO: 22408 - protein, 17 aa, Homo sapiens
  CDR3 for beta chain variable domain of TCR clone 11204 (TRBV3-1, TRBJ2-7)
CASSQDLTGLSSYEQYF

SEQ ID NO: 22409 - protein, 14 aa, Homo sapiens
  CDR3 for alpha chain variable domain of TCR clone 11205 (TRAV8-6, TRAJ48)
CAVSESFGNEKLTF

SEQ ID NO: 22410 - protein, 15 aa, Homo sapiens
  CDR3 for beta chain variable domain of TCR clone 11205 (TRBV7-9, TRBJ2-5)
CASSRRTGGGETQYF

SEQ ID NO: 22411 - protein, 19 aa, Homo sapiens
  CDR3 for alpha chain variable domain of TCR clone 11206 (TRAV29/DV5, TRAJ49)
CSVLLCSKLTVDTGNQFYF

SEQ ID NO: 22412 - protein, 15 aa, Homo sapiens
  CDR3 for beta chain variable domain of TCR clone 11206 (TRBV9, TRBJ1-6)
CASSVAGTGDSPLHF

SEQ ID NO: 22413 - protein, 11 aa, Homo sapiens
  CDR3 for alpha chain variable domain of TCR clone 11207 (TRAV21, TRAJ41)
CAVRSGYALNF

SEQ ID NO: 22414 - protein, 11 aa, Homo sapiens
  CDR3 for beta chain variable domain of TCR clone 11207 (TRBV12-4, TRBJ2-3)
CASTATDTQYF

SEQ ID NO: 22415 - protein, 14 aa, Homo sapiens
  CDR3 for alpha chain variable domain of TCR clone 11208 (TRAV9-2, TRAJ39)
CALYIYNAGNMLTF

SEQ ID NO: 22416 - protein, 14 aa, Homo sapiens
  CDR3 for beta chain variable domain of TCR clone 11208 (TRBV4-2, TRBJ1-2)
CASSQVGQNYGYTF

SEQ ID NO: 22417 - protein, 14 aa, Homo sapiens
  CDR3 for alpha chain variable domain of TCR clone 11209 (TRAV1-2, TRAJ8)
CAVREDTGFQKLVF

SEQ ID NO: 22418 - protein, 15 aa, Homo sapiens
  CDR3 for beta chain variable domain of TCR clone 11209 (TRBV6-3, TRBJ2-7)
CASSSPGTVVYEQYF

SEQ ID NO: 22419 - protein, 13 aa, Homo sapiens
  CDR3 for alpha chain variable domain of TCR clone 11210 (TRAV2, TRAJ40)
CAVVTSGTYKYIF

SEQ ID NO: 22420 - protein, 14 aa, Homo sapiens
  CDR3 for beta chain variable domain of TCR clone 11210 (TRBV19, TRBJ2-1)
CSSPTFVLSGEQFF

SEQ ID NO: 22421 - protein, 10 aa, Homo sapiens
  CDR3 for alpha chain variable domain of TCR clone 11211 (TRAV6, TRAJ13)
CVRTGTKLQV

SEQ ID NO: 22422 - protein, 14 aa, Homo sapiens
  CDR3 for beta chain variable domain of TCR clone 11211 (TRBV6-3, TRBJ2-7)
CASSYSGDHYEQYF

SEQ ID NO: 22423 - protein, 15 aa, Homo sapiens
  CDR3 for alpha chain variable domain of TCR clone 11212 (TRAV22, TRAJ45)
CAAKYSGGGADGLTF

SEQ ID NO: 22424 - protein, 18 aa, Homo sapiens
  CDR3 for beta chain variable domain of TCR clone 11212 (TRBV11-2, TRBJ2-3)
CASSLGGASRGAPNTQYF

SEQ ID NO: 22425 - protein, 13 aa, Homo sapiens
  CDR3 for alpha chain variable domain of TCR clone 11213 (TRAV23/DV6, TRAJ24)
CSGSACSWGKLQF

SEQ ID NO: 22426 - protein, 15 aa, Homo sapiens
  CDR3 for beta chain variable domain of TCR clone 11213 (TRBV7-2, TRBJ1-2)
CASSPRAGWNYGYTF

SEQ ID NO: 22427 - protein, 14 aa, Homo sapiens
  CDR3 for alpha chain variable domain of TCR clone 11214 (TRAV2, TRAJ9)
CAVEDRSGGFKTIF

SEQ ID NO: 22428 - protein, 14 aa, Homo sapiens
  CDR3 for beta chain variable domain of TCR clone 11214 (TRBV7-6, TRBJ2-3)
CASSLGTVTDTQYF

SEQ ID NO: 22429 - protein, 16 aa, Homo sapiens
  CDR3 for alpha chain variable domain of TCR clone 11215 (TRAV23/DV6, TRAJ9)
CAASIGGNTGGFKTIF

SEQ ID NO: 22430 - protein, 11 aa, Homo sapiens
  CDR3 for beta chain variable domain of TCR clone 11215 (TRBV20-1, TRBJ2-1)
CSLSSGSEQFF

SEQ ID NO: 22431 - protein, 14 aa, Homo sapiens
  CDR3 for alpha chain variable domain of TCR clone 11216 (TRAV12-2, TRAJ13)
CAVKKTGGYQKVTF

SEQ ID NO: 22432 - protein, 16 aa, Homo sapiens
  CDR3 for beta chain variable domain of TCR clone 11216 (TRBV19, TRBJ2-1)
CASSKAGPSSYNEQFF

SEQ ID NO: 22433 - protein, 12 aa, Homo sapiens
  CDR3 for alpha chain variable domain of TCR clone 11217 (TRAV12-3, TRAJ17)
CAMTLTGNKLTF

SEQ ID NO: 22434 - protein, 15 aa, Homo sapiens
  CDR3 for beta chain variable domain of TCR clone 11217 (TRBV27, TRBJ1-5)
CASSLGTGFDQPQHF

SEQ ID NO: 22435 - protein, 11 aa, Homo sapiens
  CDR3 for alpha chain variable domain of TCR clone 11218 (TRAV21, TRAJ34)
CAVTNTDKLIF

SEQ ID NO: 22436 - protein, 19 aa, Homo sapiens
  CDR3 for beta chain variable domain of TCR clone 11218 (TRBV7-2, TRBJ2-3)
CASSFLSRNWGGGTDTQYF

SEQ ID NO: 22437 - protein, 16 aa, Homo sapiens
  CDR3 for alpha chain variable domain of TCR clone 11219 (TRAV39, TRAJ53)
CAVDAGSGGSNYKLTF

SEQ ID NO: 22438 - protein, 16 aa, Homo sapiens
  CDR3 for beta chain variable domain of TCR clone 11219 (TRBV12-4, TRBJ2-2)
CASSFWIVGNTGELFF

SEQ ID NO: 22439 - protein, 14 aa, Homo sapiens
  CDR3 for alpha chain variable domain of TCR clone 11220 (TRAV12-3, TRAJ10)
SHLPLTGGGNKLTF

SEQ ID NO: 22440 - protein, 15 aa, Homo sapiens
  CDR3 for beta chain variable domain of TCR clone 11220 (TRBV27, TRBJ2-1)
CASSLSKGFYNEQFF

SEQ ID NO: 22441 - protein, 10 aa, Homo sapiens
  CDR3 for alpha chain variable domain of TCR clone 11221 (TRAV16, TRAJ39)
CSSAGNMLTF

SEQ ID NO: 22442 - protein, 14 aa, Homo sapiens
  CDR3 for beta chain variable domain of TCR clone 11221 (TRBV27, TRBJ1-4)
CASSLDGGWEKLFF

SEQ ID NO: 22443 - protein, 13 aa, Homo sapiens
  CDR3 for alpha chain variable domain of TCR clone 11222 (TRAV1-2, TRAJ9)
CAALNTGCFKTIF

SEQ ID NO: 22444 - protein, 13 aa, Homo sapiens
  CDR3 for beta chain variable domain of TCR clone 11222 (TRBV19, TRBJ1-2)
CASSVPGQDGYTF

SEQ ID NO: 22445 - protein, 12 aa, Homo sapiens
  CDR3 for alpha chain variable domain of TCR clone 11223 (TRAV5, TRAJ3)
CAEDSSASKIIF

SEQ ID NO: 22446 - protein, 15 aa, Homo sapiens
  CDR3 for beta chain variable domain of TCR clone 11223 (TRBV6-5, TRBJ2-1)
CASSYDAGAGNEQFF

SEQ ID NO: 22447 - protein, 17 aa, Homo sapiens
  CDR3 for alpha chain variable domain of TCR clone 11224 (TRAV12-3, TRAJ26)
CAMSGGRWGNYGQNFVF

SEQ ID NO: 22448 - protein, 12 aa, Homo sapiens
  CDR3 for beta chain variable domain of TCR clone 11224 (TRBV19, TRBJ1-1)
CASSTTGIEAFF

SEQ ID NO: 22449 - protein, 13 aa, Homo sapiens
  CDR3 for alpha chain variable domain of TCR clone 11225 (TRAV23/DV6, TRAJ36)
CAAGQTGANNLFF

SEQ ID NO: 22450 - protein, 13 aa, Homo sapiens
  CDR3 for beta chain variable domain of TCR clone 11225 (TRBV7-8, TRBJ1-5)
CASSLGGDQPQHF

SEQ ID NO: 22451 - protein, 15 aa, Homo sapiens
  CDR3 for alpha chain variable domain of TCR clone 11226 (TRAV2, TRAJ15)
CAVEDRNQAGTALIF

SEQ ID NO: 22452 - protein, 13 aa, Homo sapiens
  CDR3 for beta chain variable domain of TCR clone 11226 (TRBV10-3, TRBJ2-7)
CASKLAVNYEQYF

SEQ ID NO: 22453 - protein, 16 aa, Homo sapiens
  CDR3 for alpha chain variable domain of TCR clone 11227 (TRAV30, TRAJ24)
CGTEIVDADSWGKFQF

SEQ ID NO: 22454 - protein, 16 aa, Homo sapiens
  CDR3 for beta chain variable domain of TCR clone 11227 (TRBV12-4, TRBJ2-5)
CASSFFVRGRQETQYF

SEQ ID NO: 22455 - protein, 21 aa, Homo sapiens
  CDR3 for alpha chain variable domain of TCR clone 11228 (TRAV8-6, TRAJ38)
CAVRNAGNNHIQNPDPAVYQL

SEQ ID NO: 22456 - protein, 15 aa, Homo sapiens
  CDR3 for beta chain variable domain of TCR clone 11228 (TRBV4-1, TRBJ2-2)
CASSEGQGITGELFF

SEQ ID NO: 22457 - protein, 11 aa, Homo sapiens
  CDR3 for alpha chain variable domain of TCR clone 11229 (TRAV1-2, TRAJ20)
CAVANDYKLSF

SEQ ID NO: 22458 - protein, 18 aa, Homo sapiens
  CDR3 for beta chain variable domain of TCR clone 11229 (TRBV20-1, TRBJ2-6)
CSAETTTTHGSGANVLTF

SEQ ID NO: 22459 - protein, 12 aa, Homo sapiens
  CDR3 for alpha chain variable domain of TCR clone 11230 (TRAV8-3, TRAJ26)
CAGDNYGQNSVF

SEQ ID NO: 22460 - protein, 13 aa, Homo sapiens
  CDR3 for beta chain variable domain of TCR clone 11230 (TRBV27, TRBJ1-1)
CASSLSIGAEAFF

SEQ ID NO: 22461 - protein, 16 aa, Homo sapiens
  CDR3 for alpha chain variable domain of TCR clone 11231 (TRAV3, TRAJ21)
CAVRDIERGNFNKFYF

SEQ ID NO: 22462 - protein, 16 aa, Homo sapiens
  CDR3 for beta chain variable domain of TCR clone 11231 (TRBV11-2, TRBJ1-1)
CASSLRQGGEHSKAFF

SEQ ID NO: 22463 - protein, 12 aa, Homo sapiens
  CDR3 for alpha chain variable domain of TCR clone 11232 (TRAV21, TRAJ33)
CAKMDSNYQLIW

SEQ ID NO: 22464 - protein, 14 aa, Homo sapiens
  CDR3 for beta chain variable domain of TCR clone 11232 (TRBV2, TRBJ2-7)
CASSLTPGGYEQYF

SEQ ID NO: 22465 - protein, 13 aa, Homo sapiens
  CDR3 for alpha chain variable domain of TCR clone 11233 (TRAV13-1, TRAJ5)
CAASDTGRRALTF

SEQ ID NO: 22466 - protein, 12 aa, Homo sapiens
  CDR3 for beta chain variable domain of TCR clone 11233 (TRBV28, TRBJ2-3)
CASRLYRDTQYF

SEQ ID NO: 22467 - protein, 15 aa, Homo sapiens
  CDR3 for alpha chain variable domain of TCR clone 11234 (TRAV2, TRAJ40)
CAVVTSGTYKYILEQ

SEQ ID NO: 22468 - protein, 14 aa, Homo sapiens
  CDR3 for beta chain variable domain of TCR clone 11234 (TRBV19, TRBJ2-1)
CASPTFVLSGEQFF

SEQ ID NO: 22469 - protein, 12 aa, Homo sapiens
  CDR3 for alpha chain variable domain of TCR clone 11235 (TRAV24, TRAJ26)
CALDNYGQNFVF

SEQ ID NO: 22470 - protein, 15 aa, Homo sapiens
  CDR3 for beta chain variable domain of TCR clone 11235 (TRBV7-2, TRBJ1-1)
CASSFAGDRDTEAFF

SEQ ID NO: 22471 - protein, 13 aa, Homo sapiens
  CDR3 for alpha chain variable domain of TCR clone 11236 (TRAV12-2, TRAJ52)
CAVRGTSYGKLTF

SEQ ID NO: 22472 - protein, 17 aa, Homo sapiens
  CDR3 for beta chain variable domain of TCR clone 11236 (TRBV11-2, TRBJ2-1)
CASSLYPPGVEYNEQFF

SEQ ID NO: 22473 - protein, 13 aa, Homo sapiens
  CDR3 for alpha chain variable domain of TCR clone 11237 (TRAV12-2, TRAJ4)
CAGFSGGYNKLIF

SEQ ID NO: 22474 - protein, 16 aa, Homo sapiens
  CDR3 for beta chain variable domain of TCR clone 11237 (TRBV4-1, TRBJ1-5)
CASSQGGHTTNQPQHF

SEQ ID NO: 22475 - protein, 14 aa, Homo sapiens
  CDR3 for alpha chain variable domain of TCR clone 11238 (TRAV21, TRAJ37)
CPRPGSGNTGKLIF

SEQ ID NO: 22476 - protein, 16 aa, Homo sapiens
  CDR3 for beta chain variable domain of TCR clone 11238 (TRBV6-6, TRBJ2-3)
CASSYSHAGSTDTQYF

SEQ ID NO: 22477 - protein, 14 aa, Homo sapiens
  CDR3 for alpha chain variable domain of TCR clone 11239 (TRAV1-2, TRAJ16)
CAVNRFSDGQKLLF

SEQ ID NO: 22478 - protein, 15 aa, Homo sapiens
  CDR3 for beta chain variable domain of TCR clone 11239 (TRBV9, TRBJ1-6)
CASSVAGTGDSPLYF

SEQ ID NO: 22479 - protein, 14 aa, Homo sapiens
  CDR3 for alpha chain variable domain of TCR clone 11240 (TRAV8-2, TRAJ4)
CVVSPSGGYNKLIF

SEQ ID NO: 22480 - protein, 11 aa, Homo sapiens
  CDR3 for beta chain variable domain of TCR clone 11240 (TRBV12-4, TRBJ2-2)
CASSSAGELFF

SEQ ID NO: 22481 - protein, 14 aa, Homo sapiens
  CDR3 for alpha chain variable domain of TCR clone 11241 (TRAV19, TRAJ6)
CALSATGGSYIPTF

SEQ ID NO: 22482 - protein, 17 aa, Homo sapiens
  CDR3 for beta chain variable domain of TCR clone 11241 (TRBV7-2, TRBJ2-3)
CASSLEARGTSTDTQYF

SEQ ID NO: 22483 - protein, 23 aa, Homo sapiens
  CDR3 for alpha chain variable domain of TCR clone 11242 (TRAV26-1, TRAJ38)
CIADNAGNNHIQNPDPAVYQLRD

SEQ ID NO: 22484 - protein, 20 aa, Homo sapiens
  CDR3 for beta chain variable domain of TCR clone 11242 (TRBV28, TRBJ2-1)
CASTPIGRSPGLAGGNEQFF

SEQ ID NO: 22485 - protein, 13 aa, Homo sapiens
  CDR3 for alpha chain variable domain of TCR clone 11243 (TRAV3, TRAJ29)
CAVRDIIGTPLVF

SEQ ID NO: 22486 - protein, 14 aa, Homo sapiens
  CDR3 for beta chain variable domain of TCR clone 11243 (TRBV27, TRBJ2-1)
CASSATGGYNEQFF

SEQ ID NO: 22487 - protein, 14 aa, Homo sapiens
  CDR3 for alpha chain variable domain of TCR clone 11244 (TRAV12-3, TRAJ10)
SHLPLTGGGNKLTF

SEQ ID NO: 22488 - protein, 15 aa, Homo sapiens
  CDR3 for beta chain variable domain of TCR clone 11244 (TRBV18, TRBJ2-1)
CASSPPSASYNEQFF

SEQ ID NO: 22489 - protein, 12 aa, Homo sapiens
  CDR3 for alpha chain variable domain of TCR clone 11245 (TRAV17, TRAJ12)
CATLRSSYKLIF

SEQ ID NO: 22490 - protein, 16 aa, Homo sapiens
  CDR3 for beta chain variable domain of TCR clone 11245 (TRBV28, TRBJ2-7)
CASSLLFETGGPEQYF

SEQ ID NO: 22491 - protein, 14 aa, Homo sapiens
  CDR3 for alpha chain variable domain of TCR clone 11246 (TRAV17, TRAJ39)
CATDPVRAGNMLTF

SEQ ID NO: 22492 - protein, 15 aa, Homo sapiens
  CDR3 for beta chain variable domain of TCR clone 11246 (TRBV13, TRBJ1-5)
CASSFRQGGVQPQHF

SEQ ID NO: 22493 - protein, 12 aa, Homo sapiens
  CDR3 for alpha chain variable domain of TCR clone 11247 (TRAV12-3, TRAJ20)
CAMVRGDYKLSF

SEQ ID NO: 22494 - protein, 12 aa, Homo sapiens
  CDR3 for beta chain variable domain of TCR clone 11247 (TRBV11-2, TRBJ2-7)
CASSLPTYEQYF

SEQ ID NO: 22495 - protein, 14 aa, Homo sapiens
  CDR3 for alpha chain variable domain of TCR clone 11248 (TRAV13-2, TRAJ41)
CAERPDWAGYALNF

SEQ ID NO: 22496 - protein, 16 aa, Homo sapiens
  CDR3 for beta chain variable domain of TCR clone 11248 (TRBV9, TRBJ2-3)
CASSGTSGKDTDTQYF

SEQ ID NO: 22497 - protein, 14 aa, Homo sapiens
  CDR3 for alpha chain variable domain of TCR clone 11249 (TRAV12-2, TRAJ40)
CAVKIPSGTYKYIF

SEQ ID NO: 22498 - protein, 14 aa, Homo sapiens
  CDR3 for beta chain variable domain of TCR clone 11249 (TRBV20-1, TRBJ1-1)
RSAQTRIGGTEAFF

SEQ ID NO: 22499 - protein, 14 aa, Homo sapiens
  CDR3 for alpha chain variable domain of TCR clone 11250 (TRAV12-2, TRAJ5)
CAVNRSTGRRALTF

SEQ ID NO: 22500 - protein, 12 aa, Homo sapiens
  CDR3 for beta chain variable domain of TCR clone 11250 (TRBV19, TRBJ1-5)
CASSIAQQTQHF

SEQ ID NO: 22501 - protein, 15 aa, Homo sapiens
  CDR3 for alpha chain variable domain of TCR clone 11251 (TRAV29/DV5, TRAJ24)
CAASGATDSWGKFQF

SEQ ID NO: 22502 - protein, 15 aa, Homo sapiens
  CDR3 for beta chain variable domain of TCR clone 11251 (TRBV27, TRBJ2-1)
CASSNGGGSSNEQFF

SEQ ID NO: 22503 - protein, 12 aa, Homo sapiens
  CDR3 for alpha chain variable domain of TCR clone 11252 (TRAV14/DV4, TRAJ11)
CAMSLYDSTLTF

SEQ ID NO: 22504 - protein, 15 aa, Homo sapiens
  CDR3 for beta chain variable domain of TCR clone 11252 (TRBV19, TRBJ2-1)
CASSRPGQNYNEQFF

SEQ ID NO: 22505 - protein, 10 aa, Homo sapiens
  CDR3 for alpha chain variable domain of TCR clone 11253 (TRAV1-2, TRAJ31)
CAFFDARLMF

SEQ ID NO: 22506 - protein, 14 aa, Homo sapiens
  CDR3 for beta chain variable domain of TCR clone 11253 (TRBV12-4, TRBJ1-3)
CASTLTGAGNTIYF

SEQ ID NO: 22507 - protein, 14 aa, Homo sapiens
  CDR3 for alpha chain variable domain of TCR clone 11254 (TRAV1-2, TRAJ8)
FAVREDTGFQKLVF

SEQ ID NO: 22508 - protein, 15 aa, Homo sapiens
  CDR3 for beta chain variable domain of TCR clone 11254 (TRBV6-3, TRBJ2-7)
CASSSPGTVFYEQYF

SEQ ID NO: 22509 - protein, 19 aa, Homo sapiens
  CDR3 for alpha chain variable domain of TCR clone 11255 (TRAV26-1, TRAJ38)
CIADNAGNNHIQNPDPAVY

SEQ ID NO: 22510 - protein, 13 aa, Homo sapiens
  CDR3 for beta chain variable domain of TCR clone 11255 (TRBV20-1, TRBJ1-1)
CSARGGGNTEAFF

SEQ ID NO: 22511 - protein, 14 aa, Homo sapiens
  CDR3 for alpha chain variable domain of TCR clone 11256 (TRAV17, TRAJ16)
CATADFSDGQKLLF

SEQ ID NO: 22512 - protein, 15 aa, Homo sapiens
  CDR3 for beta chain variable domain of TCR clone 11256 (TRBV18, TRBJ2-1)
CASSSPSASYNEQFF

SEQ ID NO: 22513 - protein, 13 aa, Homo sapiens
  CDR3 for alpha chain variable domain of TCR clone 11257 (TRAV2, TRAJ40)
CAVITSGTYKYIF

SEQ ID NO: 22514 - protein, 14 aa, Homo sapiens
  CDR3 for beta chain variable domain of TCR clone 11257 (TRBV19, TRBJ2-1)
CASPTFVLSGEQFF

SEQ ID NO: 22515 - protein, 15 aa, Homo sapiens
  CDR3 for alpha chain variable domain of TCR clone 11258 (TRAV17, TRAJ35)
CATAFVIGFGNVLHC

SEQ ID NO: 22516 - protein, 15 aa, Homo sapiens
  CDR3 for beta chain variable domain of TCR clone 11258 (TRBV7-9, TRBJ2-7)
CASSLALAEAYEQYF

SEQ ID NO: 22517 - protein, 12 aa, Homo sapiens
  CDR3 for alpha chain variable domain of TCR clone 11259 (TRAV12-3, TRAJ17)
CAMTLTGNKLTF

SEQ ID NO: 22518 - protein, 14 aa, Homo sapiens
  CDR3 for beta chain variable domain of TCR clone 11259 (TRBV7-2, TRBJ1-2)
CASSQTGSTYGYTF

SEQ ID NO: 22519 - protein, 12 aa, Homo sapiens
  CDR3 for alpha chain variable domain of TCR clone 11260 (TRAV17, TRAJ20)
CATDGDDYKLSF

SEQ ID NO: 22520 - protein, 16 aa, Homo sapiens
  CDR3 for beta chain variable domain of TCR clone 11260 (TRBV20-1, TRBJ1-4)
CSAPGQGLLTNEKLFF

SEQ ID NO: 22521 - protein, 10 aa, Homo sapiens
  CDR3 for alpha chain variable domain of TCR clone 11261 (TRAV8-6, TRAJ26)
CGGDGQNFVF

SEQ ID NO: 22522 - protein, 14 aa, Homo sapiens
  CDR3 for beta chain variable domain of TCR clone 11261 (TRBV20-1, TRBJ2-4)
CSAVAGGPGNIQYF

SEQ ID NO: 22523 - protein, 15 aa, Homo sapiens
  CDR3 for alpha chain variable domain of TCR clone 11262 (TRAV26-1, TRAJ29)
CIVRVEGLGNTPLVF

SEQ ID NO: 22524 - protein, 14 aa, Homo sapiens
  CDR3 for beta chain variable domain of TCR clone 11262 (TRBV18, TRBJ2-5)
CASSPGVSQETQYF

SEQ ID NO: 22525 - protein, 16 aa, Homo sapiens
  CDR3 for alpha chain variable domain of TCR clone 11263 (TRAV25, TRAJ45)
CAGPGRSGGGADGLTF

SEQ ID NO: 22526 - protein, 17 aa, Homo sapiens
  CDR3 for beta chain variable domain of TCR clone 11263 (TRBV11-2, TRBJ2-1)
CASSLYPPGVEYNEQFF

SEQ ID NO: 22527 - protein, 14 aa, Homo sapiens
  CDR3 for alpha chain variable domain of TCR clone 11264 (TRAV12-2, TRAJ44)
CAVNIAGTASKLTF

SEQ ID NO: 22528 - protein, 17 aa, Homo sapiens
  CDR3 for beta chain variable domain of TCR clone 11264 (TRBV10-3, TRBJ1-2)
CAISESTTALANYGYTF

SEQ ID NO: 22529 - protein, 14 aa, Homo sapiens
  CDR3 for alpha chain variable domain of TCR clone 11265 (TRAV13-1, TRAJ35)
CAASKGGFGNVMHC

SEQ ID NO: 22530 - protein, 13 aa, Homo sapiens
  CDR3 for beta chain variable domain of TCR clone 11265 (TRBV7-3, TRBJ1-1)
CASSQDWGAEAFF

SEQ ID NO: 22531 - protein, 14 aa, Homo sapiens
  CDR3 for alpha chain variable domain of TCR clone 11266 (TRAV20, TRAJ56)
CAVQFGGANSKLTF

SEQ ID NO: 22532 - protein, 14 aa, Homo sapiens
  CDR3 for beta chain variable domain of TCR clone 11266 (TRBV20-1, TRBJ2-7)
CSANRGRSSYEQYF

SEQ ID NO: 22533 - protein, 11 aa, Homo sapiens
  CDR3 for alpha chain variable domain of TCR clone 11267 (TRAV1-2, TRAJ20)
CAVANDYKLSF

SEQ ID NO: 22534 - protein, 18 aa, Homo sapiens
  CDR3 for beta chain variable domain of TCR clone 11267 (TRBV20-1, TRBJ2-6)
CSAETTPTHGSGANGLTF

SEQ ID NO: 22535 - protein, 15 aa, Homo sapiens
  CDR3 for alpha chain variable domain of TCR clone 11268 (TRAV14/DV4, TRAJ21)
CAMREGVYNFNKFYF

SEQ ID NO: 22536 - protein, 13 aa, Homo sapiens
  CDR3 for beta chain variable domain of TCR clone 11268 (TRBV6-1, TRBJ2-1)
CASREDGGHEQFF

SEQ ID NO: 22537 - protein, 15 aa, Homo sapiens
  CDR3 for alpha chain variable domain of TCR clone 11269 (TRAV8-3, TRAJ27)
CAVGPSKTNAGKSTF

SEQ ID NO: 22538 - protein, 15 aa, Homo sapiens
  CDR3 for beta chain variable domain of TCR clone 11269 (TRBV7-2, TRBJ2-1)
CASSSGLAGGNERFF

SEQ ID NO: 22539 - protein, 14 aa, Homo sapiens
  CDR3 for alpha chain variable domain of TCR clone 11270 (TRAV20, TRAJ42)
CAVQAGGRQGNLIF

SEQ ID NO: 22540 - protein, 14 aa, Homo sapiens
  CDR3 for beta chain variable domain of TCR clone 11270 (TRBV28, TRBJ1-2)
CASRIQGANYGYTF

SEQ ID NO: 22541 - protein, 14 aa, Homo sapiens
  CDR3 for alpha chain variable domain of TCR clone 11271 (TRAV12-2, TRAJ13)
FAVKKTGGYQKVTF

SEQ ID NO: 22542 - protein, 15 aa, Homo sapiens
  CDR3 for beta chain variable domain of TCR clone 11271 (TRBV27, TRBJ2-1)
CASSNGGGSSNEQFF

SEQ ID NO: 22543 - protein, 14 aa, Homo sapiens
  CDR3 for alpha chain variable domain of TCR clone 11272 (TRAV1-2, TRAJ16)
CAVNRFSDGRKLLF

SEQ ID NO: 22544 - protein, 15 aa, Homo sapiens
  CDR3 for beta chain variable domain of TCR clone 11272 (TRBV9, TRBJ1-6)
CASSVAGTGDSPLHF

SEQ ID NO: 22545 - protein, 11 aa, Homo sapiens
  CDR3 for alpha chain variable domain of TCR clone 11273 (TRAV8-2, TRAJ45)
CTGGGADGLTF

SEQ ID NO: 22546 - protein, 16 aa, Homo sapiens
  CDR3 for beta chain variable domain of TCR clone 11273 (TRBV19, TRBJ2-2)
CASSLQRGGNTGELFF

SEQ ID NO: 22547 - protein, 14 aa, Homo sapiens
  CDR3 for alpha chain variable domain of TCR clone 11274 (TRAV17, TRAJ22)
CATSPSGSARQLTF

SEQ ID NO: 22548 - protein, 15 aa, Homo sapiens
  CDR3 for beta chain variable domain of TCR clone 11274 (TRBV4-1, TRBJ2-5)
CASSQWDPYQETQYF

SEQ ID NO: 22549 - protein, 14 aa, Homo sapiens
  CDR3 for alpha chain variable domain of TCR clone 11275 (TRAV29/DV5, TRAJ36)
CAARRKTGANNLFF

SEQ ID NO: 22550 - protein, 15 aa, Homo sapiens
  CDR3 for beta chain variable domain of TCR clone 11275 (TRBV6-3, TRBJ2-7)
CASSSPGTVFYEQYF

SEQ ID NO: 22551 - protein, 13 aa, Homo sapiens
  CDR3 for alpha chain variable domain of TCR clone 11276 (TRAV27, TRAJ45)
CRSSGGGADGLTF

SEQ ID NO: 22552 - protein, 17 aa, Homo sapiens
  CDR3 for beta chain variable domain of TCR clone 11276 (TRBV11-2, TRBJ2-1)
CASSLYPPGVEYNERFF

SEQ ID NO: 22553 - protein, 14 aa, Homo sapiens
  CDR3 for alpha chain variable domain of TCR clone 11277 (TRAV2, TRAJ23)
CAVGLRNQGGELIF

SEQ ID NO: 22554 - protein, 15 aa, Homo sapiens
  CDR3 for beta chain variable domain of TCR clone 11277 (TRBV6-5, TRBJ2-5)
CASSPLAGGIETQYF

SEQ ID NO: 22555 - protein, 14 aa, Homo sapiens
  CDR3 for alpha chain variable domain of TCR clone 11278 (TRAV12-2, TRAJ17)
CAVLFKAAGNKLTS

SEQ ID NO: 22556 - protein, 17 aa, Homo sapiens
  CDR3 for beta chain variable domain of TCR clone 11278 (TRBV20-1, TRBJ2-2)
CSASGSGQGGLTGELFF

SEQ ID NO: 22557 - protein, 16 aa, Homo sapiens
  CDR3 for alpha chain variable domain of TCR clone 11279 (TRAV12-3, TRAJ28)
CAMRANSGAGSYQLTF

SEQ ID NO: 22558 - protein, 15 aa, Homo sapiens
  CDR3 for beta chain variable domain of TCR clone 11279 (TRBV6-3, TRBJ2-7)
CASSSPGTVFYEQYF

SEQ ID NO: 22559 - protein, 14 aa, Homo sapiens
  CDR3 for alpha chain variable domain of TCR clone 11280 (TRAV23/DV6, TRAJ5)
CAAKRPAGRRALTF

SEQ ID NO: 22560 - protein, 15 aa, Homo sapiens
  CDR3 for beta chain variable domain of TCR clone 11280 (TRBV27, TRBJ1-5)
CASSSSGTGNQPQHF

SEQ ID NO: 22561 - protein, 12 aa, Homo sapiens
  CDR3 for alpha chain variable domain of TCR clone 11281 (TRAV13-1, TRAJ48)
CAANFGNEKLTF

SEQ ID NO: 22562 - protein, 17 aa, Homo sapiens
  CDR3 for beta chain variable domain of TCR clone 11281 (TRBV13, TRBJ2-3)
CASSLSRVAGGRNTQYF

SEQ ID NO: 22563 - protein, 13 aa, Homo sapiens
  CDR3 for alpha chain variable domain of TCR clone 11282 (TRAV8-4, TRAJ4)
CAVISGGYNKLIF

SEQ ID NO: 22564 - protein, 11 aa, Homo sapiens
  CDR3 for beta chain variable domain of TCR clone 11282 (TRBV12-4, TRBJ1-1)
CASNQGSEAFF

SEQ ID NO: 22565 - protein, 14 aa, Homo sapiens
  CDR3 for alpha chain variable domain of TCR clone 11283 (TRAV8-3, TRAJ4)
CAVPLGGGYNKLIF

SEQ ID NO: 22566 - protein, 15 aa, Homo sapiens
  CDR3 for beta chain variable domain of TCR clone 11283 (TRBV6-3, TRBJ2-7)
CASSSPGTVFYEQYF

SEQ ID NO: 22567 - protein, 11 aa, Homo sapiens
  CDR3 for alpha chain variable domain of TCR clone 11284 (TRAV3, TRAJ21)
CAVGNFYKFYF

SEQ ID NO: 22568 - protein, 16 aa, Homo sapiens
  CDR3 for beta chain variable domain of TCR clone 11284 (TRBV19, TRBJ2-1)
CASSKAGPSSYNEQFF

SEQ ID NO: 22569 - protein, 15 aa, Homo sapiens
  CDR3 for alpha chain variable domain of TCR clone 11285 (TRAV25, TRAJ53)
CPTSNSGGSNYKLTF

SEQ ID NO: 22570 - protein, 15 aa, Homo sapiens
  CDR3 for beta chain variable domain of TCR clone 11285 (TRBV6-4, TRBJ2-7)
CASSDQGPPNYEQYF

SEQ ID NO: 22571 - protein, 11 aa, Homo sapiens
  CDR3 for alpha chain variable domain of TCR clone 11286 (TRAV35, TRAJ34)
CWARNTDKLIF

SEQ ID NO: 22572 - protein, 12 aa, Homo sapiens
  CDR3 for beta chain variable domain of TCR clone 11286 (TRBV11-2, TRBJ2-2)
CASSLGGGELFF

SEQ ID NO: 22573 - protein, 15 aa, Homo sapiens
  CDR3 for alpha chain variable domain of TCR clone 11287 (TRAV12-2, TRAJ53)
CAVNGGGGSNYKLTF

SEQ ID NO: 22574 - protein, 12 aa, Homo sapiens
  CDR3 for beta chain variable domain of TCR clone 11287 (TRBV27, TRBJ1-6)
CASKLFQGPLHF

SEQ ID NO: 22575 - protein, 14 aa, Homo sapiens
  CDR3 for alpha chain variable domain of TCR clone 11288 (TRAV1-2, TRAJ16)
CAVNQFSDGQKLLF

SEQ ID NO: 22576 - protein, 15 aa, Homo sapiens
  CDR3 for beta chain variable domain of TCR clone 11288 (TRBV9, TRBJ1-6)
CASSVAGTGDSPLHF

SEQ ID NO: 22577 - protein, 14 aa, Homo sapiens
  CDR3 for alpha chain variable domain of TCR clone 11289 (TRAV12-2, TRAJ17)
CAVLFKAAGNTLTF

SEQ ID NO: 22578 - protein, 17 aa, Homo sapiens
  CDR3 for beta chain variable domain of TCR clone 11289 (TRBV20-1, TRBJ2-2)
CSASGSGQGGLTGELFF

SEQ ID NO: 22579 - protein, 14 aa, Homo sapiens
  CDR3 for alpha chain variable domain of TCR clone 11290 (TRAV35, TRAJ22)
CAGLRPGSARQLTF

SEQ ID NO: 22580 - protein, 15 aa, Homo sapiens
  CDR3 for beta chain variable domain of TCR clone 11290 (TRBV12-4, TRBJ2-5)
CASSPPTGRQETQYF

SEQ ID NO: 22581 - protein, 13 aa, Homo sapiens
  CDR3 for alpha chain variable domain of TCR clone 11291 (TRAV23/DV6, TRAJ21)
CAASIGNFNKFYF

SEQ ID NO: 22582 - protein, 17 aa, Homo sapiens
  CDR3 for beta chain variable domain of TCR clone 11291 (TRBV6-5, TRBJ2-1)
CASRKNPRTGGHNEQFF

SEQ ID NO: 22583 - protein, 15 aa, Homo sapiens
  CDR3 for alpha chain variable domain of TCR clone 11292 (TRAV25, TRAJ52)
CAGTSGGTSYGKLTF

SEQ ID NO: 22584 - protein, 12 aa, Homo sapiens
  CDR3 for beta chain variable domain of TCR clone 11292 (TRBV11-2, TRBJ2-2)
CASSLGGGELFF

SEQ ID NO: 22585 - protein, 15 aa, Homo sapiens
  CDR3 for alpha chain variable domain of TCR clone 11293 (TRAV26-1, TRAJ29)
CIVRVEGSGNTPLVF

SEQ ID NO: 22586 - protein, 15 aa, Homo sapiens
  CDR3 for beta chain variable domain of TCR clone 11293 (TRBV20-1, TRBJ2-7)
CSARDRVSGMDEQYF

SEQ ID NO: 22587 - protein, 15 aa, Homo sapiens
  CDR3 for alpha chain variable domain of TCR clone 11294 (TRAV8-3, TRAJ45)
CASSYSGGGADELTF

SEQ ID NO: 22588 - protein, 13 aa, Homo sapiens
  CDR3 for beta chain variable domain of TCR clone 11294 (TRBV10-3, TRBJ2-7)
CASKLAVNYEQYF

SEQ ID NO: 22589 - protein, 16 aa, Homo sapiens
  CDR3 for alpha chain variable domain of TCR clone 11295 (TRAV1-2, TRAJ10)
CAVRGVLTGGGNKLTF

SEQ ID NO: 22590 - protein, 12 aa, Homo sapiens
  CDR3 for beta chain variable domain of TCR clone 11295 (TRBV7-8, TRBJ2-7)
CASSLGDREQYL

SEQ ID NO: 22591 - protein, 15 aa, Homo sapiens
  CDR3 for alpha chain variable domain of TCR clone 11296 (TRAV3, TRAJ24)
CAVRDKMTAGGNCSL

SEQ ID NO: 22592 - protein, 14 aa, Homo sapiens
  CDR3 for beta chain variable domain of TCR clone 11296 (TRBV7-2, TRBJ2-3)
RASSQTGSSYTQYF

SEQ ID NO: 22593 - protein, 15 aa, Homo sapiens
  CDR3 for alpha chain variable domain of TCR clone 11297 (TRAV8-3, TRAJ45)
CAPSYSGGGADGLTF

SEQ ID NO: 22594 - protein, 17 aa, Homo sapiens
  CDR3 for beta chain variable domain of TCR clone 11297 (TRBV7-8, TRBJ1-2)
CASSLRPLQGHLYGYTF

SEQ ID NO: 22595 - protein, 11 aa, Homo sapiens
  CDR3 for alpha chain variable domain of TCR clone 11298 (TRAV17, TRAJ31)
CATSNNARLMF

SEQ ID NO: 22596 - protein, 16 aa, Homo sapiens
  CDR3 for beta chain variable domain of TCR clone 11298 (TRBV7-8, TRBJ2-4)
CASSAERTLAKDIQYF

SEQ ID NO: 22597 - protein, 13 aa, Homo sapiens
  CDR3 for alpha chain variable domain of TCR clone 11299 (TRAV29/DV5, TRAJ27)
CAAMRSNAGKSTF

SEQ ID NO: 22598 - protein, 13 aa, Homo sapiens
  CDR3 for beta chain variable domain of TCR clone 11299 (TRBV18, TRBJ1-1)
CASSPETKPEAFF

SEQ ID NO: 22599 - protein, 14 aa, Homo sapiens
  CDR3 for alpha chain variable domain of TCR clone 11300 (TRAV1-2, TRAJ6)
CAVRSSGGSYIPTF

SEQ ID NO: 22600 - protein, 18 aa, Homo sapiens
  CDR3 for beta chain variable domain of TCR clone 11300 (TRBV20-1, TRBJ2-3)
CSASGLAGGPGTTDTQYF

SEQ ID NO: 22601 - protein, 16 aa, Homo sapiens
  CDR3 for alpha chain variable domain of TCR clone 11301 (TRAV12-3, TRAJ53)
CAMSPGSGGGNYKLTF

SEQ ID NO: 22602 - protein, 17 aa, Homo sapiens
  CDR3 for beta chain variable domain of TCR clone 11301 (TRBV11-2, TRBJ2-1)
CASSLYPPGVEYNEQFF

SEQ ID NO: 22603 - protein, 15 aa, Homo sapiens
  CDR3 for alpha chain variable domain of TCR clone 11302 (TRAV3, TRAJ22)
CAVRDRGGSARQLPF

SEQ ID NO: 22604 - protein, 16 aa, Homo sapiens
  CDR3 for beta chain variable domain of TCR clone 11302 (TRBV5-4, TRBJ2-3)
CASQQPGAGGADTQYF

SEQ ID NO: 22605 - protein, 14 aa, Homo sapiens
  CDR3 for alpha chain variable domain of TCR clone 11303 (TRAV17, TRAJ16)
CATADFSDGQKLPF

SEQ ID NO: 22606 - protein, 12 aa, Homo sapiens
  CDR3 for beta chain variable domain of TCR clone 11303 (TRBV24-1, TRBJ1-1)
CATLYPDTEAFF

SEQ ID NO: 22607 - protein, 14 aa, Homo sapiens
  CDR3 for alpha chain variable domain of TCR clone 11304 (TRAV26-1, TRAJ39)
CVVRANNAGNMLTF

SEQ ID NO: 22608 - protein, 15 aa, Homo sapiens
  CDR3 for beta chain variable domain of TCR clone 11304 (TRBV28, TRBJ1-2)
CASSLMGGRRDGYTF

SEQ ID NO: 22609 - protein, 17 aa, Homo sapiens
  CDR3 for alpha chain variable domain of TCR clone 11305 (TRAV38-2/DV8, TRAJ54)
CAYRRGWGSQGAQKLVF

SEQ ID NO: 22610 - protein, 14 aa, Homo sapiens
  CDR3 for beta chain variable domain of TCR clone 11305 (TRBV20-1, TRBJ2-3)
CSARDGVGTDTQYF

SEQ ID NO: 22611 - protein, 14 aa, Homo sapiens
  CDR3 for alpha chain variable domain of TCR clone 11306 (TRAV1-2, TRAJ16)
CAVNRFSDGQKLLF

SEQ ID NO: 22612 - protein, 17 aa, Homo sapiens
  CDR3 for beta chain variable domain of TCR clone 11306 (TRBV6-5, TRBJ2-1)
CASRLSGRFESYNEQFF

SEQ ID NO: 22613 - protein, 15 aa, Homo sapiens
  CDR3 for alpha chain variable domain of TCR clone 11307 (TRAV26-1, TRAJ22)
CIVRVSFWFCKATDL

SEQ ID NO: 22614 - protein, 15 aa, Homo sapiens
  CDR3 for beta chain variable domain of TCR clone 11307 (TRBV9, TRBJ1-6)
CASSVAGTGDSPLHF

SEQ ID NO: 22615 - protein, 13 aa, Homo sapiens
  CDR3 for alpha chain variable domain of TCR clone 11308 (TRAV29/DV5, TRAJ39)
CAASDNAGNMLTF

SEQ ID NO: 22616 - protein, 17 aa, Homo sapiens
  CDR3 for beta chain variable domain of TCR clone 11308 (TRBV7-9, TRBJ2-3)
CASSLEEAGAYPDTQYF

SEQ ID NO: 22617 - protein, 13 aa, Homo sapiens
  CDR3 for alpha chain variable domain of TCR clone 11309 (TRAV21, TRAJ27)
CAARPGNAGKSTF

SEQ ID NO: 22618 - protein, 15 aa, Homo sapiens
  CDR3 for beta chain variable domain of TCR clone 11309 (TRBV11-2, TRBJ2-2)
CASSSDRVNAGELFF

SEQ ID NO: 22619 - protein, 12 aa, Homo sapiens
  CDR3 for alpha chain variable domain of TCR clone 11310 (TRAV13-1, TRAJ17)
CAAPRCRQQANF

SEQ ID NO: 22620 - protein, 13 aa, Homo sapiens
  CDR3 for beta chain variable domain of TCR clone 11310 (TRBV20-1, TRBJ2-5)
CSARYTGEETQYF

SEQ ID NO: 22621 - protein, 12 aa, Homo sapiens
  CDR3 for alpha chain variable domain of TCR clone 11311 (TRAV6, TRAJ40)
CARTSGTYKYIF

SEQ ID NO: 22622 - protein, 12 aa, Homo sapiens
  CDR3 for beta chain variable domain of TCR clone 11311 (TRBV27, TRBJ2-5)
CASSPTGETQYF

SEQ ID NO: 22623 - protein, 17 aa, Homo sapiens
  CDR3 for alpha chain variable domain of TCR clone 11312 (TRAV23/DV6, TRAJ57)
CAASSTLSQGGSEKLVF

SEQ ID NO: 22624 - protein, 13 aa, Homo sapiens
  CDR3 for beta chain variable domain of TCR clone 11312 (TRBV25-1, TRBJ1-1)
CQHPPGGNTEAFF

SEQ ID NO: 22625 - protein, 15 aa, Homo sapiens
  CDR3 for alpha chain variable domain of TCR clone 11313 (TRAV27, TRAJ38)
CAARRNAGNNRKLIR

SEQ ID NO: 22626 - protein, 13 aa, Homo sapiens
  CDR3 for beta chain variable domain of TCR clone 11313 (TRBV12-5, TRBJ2-3)
CASGDRQSDTQYF

SEQ ID NO: 22627 - protein, 13 aa, Homo sapiens
  CDR3 for alpha chain variable domain of TCR clone 11314 (TRAV12-2, TRAJ20)
CAVYPSNDYKLSF

SEQ ID NO: 22628 - protein, 13 aa, Homo sapiens
  CDR3 for beta chain variable domain of TCR clone 11314 (TRBV19, TRBJ1-2)
CASSVPGQDGYTF

SEQ ID NO: 22629 - protein, 11 aa, Homo sapiens
  CDR3 for alpha chain variable domain of TCR clone 11315 (TRAV2, TRAJ3)
CAVRKEQCFQD

SEQ ID NO: 22630 - protein, 17 aa, Homo sapiens
  CDR3 for beta chain variable domain of TCR clone 11315 (TRBV7-2, TRBJ2-2)
CASSPRGAGEGTGELFF

SEQ ID NO: 22631 - protein, 15 aa, Homo sapiens
  CDR3 for alpha chain variable domain of TCR clone 11316 (TRAV26-1, TRAJ29)
CTVRVEGSGNTPLVF

SEQ ID NO: 22632 - protein, 14 aa, Homo sapiens
  CDR3 for beta chain variable domain of TCR clone 11316 (TRBV18, TRBJ2-5)
CASSPGVSQETQYF

SEQ ID NO: 22633 - protein, 14 aa, Homo sapiens
  CDR3 for alpha chain variable domain of TCR clone 11317 (TRAV13-1, TRAJ26)
CAASSAHYGQDFVF

SEQ ID NO: 22634 - protein, 17 aa, Homo sapiens
  CDR3 for beta chain variable domain of TCR clone 11317 (TRBV25-1, TRBJ2-5)
CASSRRGGRGGQETQYF

SEQ ID NO: 22635 - protein, 17 aa, Homo sapiens
  CDR3 for alpha chain variable domain of TCR clone 11318 (TRAV8-6, TRAJ8)
CAVKEGIENTGLQKLVF

SEQ ID NO: 22636 - protein, 12 aa, Homo sapiens
  CDR3 for beta chain variable domain of TCR clone 11318 (TRBV19, TRBJ1-4)
CASKDWPGGLFF

SEQ ID NO: 22637 - protein, 13 aa, Homo sapiens
  CDR3 for alpha chain variable domain of TCR clone 11319 (TRAV21, TRAJ15)
CAVANQAGTALIF

SEQ ID NO: 22638 - protein, 13 aa, Homo sapiens
  CDR3 for beta chain variable domain of TCR clone 11319 (TRBV11-2, TRBJ2-5)
CASSSTGEETQYF

SEQ ID NO: 22639 - protein, 11 aa, Homo sapiens
  CDR3 for alpha chain variable domain of TCR clone 11320 (TRAV2, TRAJ13)
CASGGCQKVTF

SEQ ID NO: 22640 - protein, 16 aa, Homo sapiens
  CDR3 for beta chain variable domain of TCR clone 11320 (TRBV6-1, TRBJ2-5)
CASSETLDRGAETQYF

SEQ ID NO: 22641 - protein, 14 aa, Homo sapiens
  CDR3 for alpha chain variable domain of TCR clone 11321 (TRAV12-2, TRAJ17)
CAALFKAAGNKLTF

SEQ ID NO: 22642 - protein, 16 aa, Homo sapiens
  CDR3 for beta chain variable domain of TCR clone 11321 (TRBV20-1, TRBJ2-2)
CSASASGTPGAGELFF

SEQ ID NO: 22643 - protein, 16 aa, Homo sapiens
  CDR3 for alpha chain variable domain of TCR clone 11322 (TRAV12-3, TRAJ53)
CAMSPGSGGSNYKLTF

SEQ ID NO: 22644 - protein, 11 aa, Homo sapiens
  CDR3 for beta chain variable domain of TCR clone 11322 (TRBV29-1, TRBJ2-5)
CSEDRTGTRYF

SEQ ID NO: 22645 - protein, 14 aa, Homo sapiens
  CDR3 for alpha chain variable domain of TCR clone 11323 (TRAV9-2, TRAJ39)
CALYIYNAGNMLTF

SEQ ID NO: 22646 - protein, 14 aa, Homo sapiens
  CDR3 for beta chain variable domain of TCR clone 11323 (TRBV7-2, TRBJ2-7)
CASSPKTSFYEQYF

SEQ ID NO: 22647 - protein, 13 aa, Homo sapiens
  CDR3 for alpha chain variable domain of TCR clone 11324 (TRAV21, TRAJ27)
CAARPGNAVKSTF

SEQ ID NO: 22648 - protein, 14 aa, Homo sapiens
  CDR3 for beta chain variable domain of TCR clone 11324 (TRBV7-6, TRBJ2-3)
CASSLGTVTDTQYF

SEQ ID NO: 22649 - protein, 14 aa, Homo sapiens
  CDR3 for alpha chain variable domain of TCR clone 11325 (TRAV30, TRAJ33)
CGTVTPRSNYQLIW

SEQ ID NO: 22650 - protein, 16 aa, Homo sapiens
  CDR3 for beta chain variable domain of TCR clone 11325 (TRBV3-1, TRBJ2-5)
CASSPGQFNGFGTQYF

SEQ ID NO: 22651 - protein, 13 aa, Homo sapiens
  CDR3 for alpha chain variable domain of TCR clone 11326 (TRAV26-2, TRAJ43)
CILRAGNNNDMRF

SEQ ID NO: 22652 - protein, 15 aa, Homo sapiens
  CDR3 for beta chain variable domain of TCR clone 11326 (TRBV7-2, TRBJ2-1)
CASTHGTGIYNEQFF

SEQ ID NO: 22653 - protein, 16 aa, Homo sapiens
  CDR3 for alpha chain variable domain of TCR clone 11327 (TRAV12-3, TRAJ53)
CAMSPGSGGSNYKLTF

SEQ ID NO: 22654 - protein, 11 aa, Homo sapiens
  CDR3 for beta chain variable domain of TCR clone 11327 (TRBV29-1, TRBJ2-5)
CSEDRTGTQCF

SEQ ID NO: 22655 - protein, 15 aa, Homo sapiens
  CDR3 for alpha chain variable domain of TCR clone 11328 (TRAV26-1, TRAJ22)
CIVRVSFWFCKATDL

SEQ ID NO: 22656 - protein, 13 aa, Homo sapiens
  CDR3 for beta chain variable domain of TCR clone 11328 (TRBV7-9, TRBJ1-2)
RASSLKQNYGYTF

SEQ ID NO: 22657 - protein, 11 aa, Homo sapiens
  CDR3 for alpha chain variable domain of TCR clone 11329 (TRAV26-1, TRAJ37)
CIVRVGRKLIF

SEQ ID NO: 22658 - protein, 13 aa, Homo sapiens
  CDR3 for beta chain variable domain of TCR clone 11329 (TRBV7-3, TRBJ1-1)
CASSQDWGAEAFF

SEQ ID NO: 22659 - protein, 12 aa, Homo sapiens
  CDR3 for alpha chain variable domain of TCR clone 11330 (TRAV30, TRAJ52)
CGTETSYGKLTF

SEQ ID NO: 22660 - protein, 14 aa, Homo sapiens
  CDR3 for beta chain variable domain of TCR clone 11330 (TRBV7-2, TRBJ2-7)
CASRSQGAAYEQYF

SEQ ID NO: 22661 - protein, 13 aa, Homo sapiens
  CDR3 for alpha chain variable domain of TCR clone 11331 (TRAV2, TRAJ40)
CAVVTSGTYKYIF

SEQ ID NO: 22662 - protein, 14 aa, Homo sapiens
  CDR3 for beta chain variable domain of TCR clone 11331 (TRBV19, TRBJ2-1)
CASPNFVLSGEQFF

SEQ ID NO: 22663 - protein, 15 aa, Homo sapiens
  CDR3 for alpha chain variable domain of TCR clone 11332 (TRAV4, TRAJ3)
CLVGDSDSSASKIIF

SEQ ID NO: 22664 - protein, 14 aa, Homo sapiens
  CDR3 for beta chain variable domain of TCR clone 11332 (TRBV7-9, TRBJ2-7)
CASSLQQGGYEQYF

SEQ ID NO: 22665 - protein, 14 aa, Homo sapiens
  CDR3 for alpha chain variable domain of TCR clone 11333 (TRAV29/DV5, TRAJ36)
CAARRKTGANNLFF

SEQ ID NO: 22666 - protein, 17 aa, Homo sapiens
  CDR3 for beta chain variable domain of TCR clone 11333 (TRBV20-1, TRBJ2-2)
CSASGSGQGGLTGELFF

SEQ ID NO: 22667 - protein, 11 aa, Homo sapiens
  CDR3 for alpha chain variable domain of TCR clone 11334 (TRAV2, TRAJ13)
CASGGYQKVTF

SEQ ID NO: 22668 - protein, 15 aa, Homo sapiens
  CDR3 for beta chain variable domain of TCR clone 11334 (TRBV27, TRBJ2-1)
CASSNGGGSSNEQFF

SEQ ID NO: 22669 - protein, 15 aa, Homo sapiens
  CDR3 for alpha chain variable domain of TCR clone 11335 (TRAV23/DV6, TRAJ57)
CAASSTLSQGGSEKL

SEQ ID NO: 22670 - protein, 14 aa, Homo sapiens
  CDR3 for beta chain variable domain of TCR clone 11335 (TRBV25-1, TRBJ1-1)
CASTHLGGNTEAFF

SEQ ID NO: 22671 - protein, 13 aa, Homo sapiens
  CDR3 for alpha chain variable domain of TCR clone 11336 (TRAV2, TRAJ40)
CAVVTSGTYKYIF

SEQ ID NO: 22672 - protein, 16 aa, Homo sapiens
  CDR3 for beta chain variable domain of TCR clone 11336 (TRBV4-2, TRBJ2-5)
CASSQELVGSQETQYF

SEQ ID NO: 22673 - protein, 14 aa, Homo sapiens
  CDR3 for alpha chain variable domain of TCR clone 11337 (TRAV20, TRAJ42)
CAVQAGGSPGNLIF

SEQ ID NO: 22674 - protein, 14 aa, Homo sapiens
  CDR3 for beta chain variable domain of TCR clone 11337 (TRBV28, TRBJ1-2)
CASRIQGANYGYTF

SEQ ID NO: 22675 - protein, 12 aa, Homo sapiens
  CDR3 for alpha chain variable domain of TCR clone 11338 (TRAV17, TRAJ20)
CATQSNDYKLSF

SEQ ID NO: 22676 - protein, 15 aa, Homo sapiens
  CDR3 for beta chain variable domain of TCR clone 11338 (TRBV20-1, TRBJ2-7)
CSARDRVSGMDEQYF

SEQ ID NO: 22677 - protein, 15 aa, Homo sapiens
  CDR3 for alpha chain variable domain of TCR clone 11339 (TRAV8-3, TRAJ45)
CASSYSGGGADGLTF

SEQ ID NO: 22678 - protein, 13 aa, Homo sapiens
  CDR3 for beta chain variable domain of TCR clone 11339 (TRBV10-3, TRBJ2-7)
CAAKLAVNYEQYF

SEQ ID NO: 22679 - protein, 13 aa, Homo sapiens
  CDR3 for alpha chain variable domain of TCR clone 11340 (TRAV2, TRAJ29)
CAAGNSGKHTSCL

SEQ ID NO: 22680 - protein, 15 aa, Homo sapiens
  CDR3 for beta chain variable domain of TCR clone 11340 (TRBV6-3, TRBJ2-7)
CASSSPGTVFYEQYF

SEQ ID NO: 22681 - protein, 14 aa, Homo sapiens
  CDR3 for alpha chain variable domain of TCR clone 11341 (TRAV38-2/DV8, TRAJ23)
CAYRKPNQGGKLIF

SEQ ID NO: 22682 - protein, 16 aa, Homo sapiens
  CDR3 for beta chain variable domain of TCR clone 11341 (TRBV12-5, TRBJ2-5)
CASGPRTSGNQETQYF

SEQ ID NO: 22683 - protein, 15 aa, Homo sapiens
  CDR3 for alpha chain variable domain of TCR clone 11342 (TRAV38-2/DV8, TRAJ48)
CAYRSPESGNEKLTF

SEQ ID NO: 22684 - protein, 17 aa, Homo sapiens
  CDR3 for beta chain variable domain of TCR clone 11342 (TRBV20-1, TRBJ2-1)
CSASSSGLAGSYNEQFF

SEQ ID NO: 22685 - protein, 15 aa, Homo sapiens
  CDR3 for alpha chain variable domain of TCR clone 11343 (TRAV8-6, TRAJ6)
CAVSFTSGGSYIPTF

SEQ ID NO: 22686 - protein, 14 aa, Homo sapiens
  CDR3 for beta chain variable domain of TCR clone 11343 (TRBV6-1, TRBJ1-3)
CASSEDRGIDTIYF

SEQ ID NO: 22687 - protein, 16 aa, Homo sapiens
  CDR3 for alpha chain variable domain of TCR clone 11344 (TRAV17, TRAJ35)
CATAEGGIGFGNVLHC

SEQ ID NO: 22688 - protein, 19 aa, Homo sapiens
  CDR3 for beta chain variable domain of TCR clone 11344 (TRBV19, TRBJ2-5)
CASSIGQVTDFFLGETQYF

SEQ ID NO: 22689 - protein, 14 aa, Homo sapiens
  CDR3 for alpha chain variable domain of TCR clone 11345 (TRAV38-1, TRAJ40)
CALRPTSGTYKYTF

SEQ ID NO: 22690 - protein, 14 aa, Homo sapiens
  CDR3 for beta chain variable domain of TCR clone 11345 (TRBV25-1, TRBJ1-1)
CASTHLGGNTEAFF

SEQ ID NO: 22691 - protein, 16 aa, Homo sapiens
  CDR3 for alpha chain variable domain of TCR clone 11346 (TRAV4, TRAJ5)
CLVGPDHGHGQESTYF

SEQ ID NO: 22692 - protein, 15 aa, Homo sapiens
  CDR3 for beta chain variable domain of TCR clone 11346 (TRBV27, TRBJ2-5)
CASSLIPSGGETQYF

SEQ ID NO: 22693 - protein, 14 aa, Homo sapiens
  CDR3 for alpha chain variable domain of TCR clone 11347 (TRAV17, TRAJ6)
CATNPAGGSYIPTF

SEQ ID NO: 22694 - protein, 16 aa, Homo sapiens
  CDR3 for beta chain variable domain of TCR clone 11347 (TRBV5-1, TRBJ2-2)
CASSLWDTTNTGELFF

SEQ ID NO: 22695 - protein, 14 aa, Homo sapiens
  CDR3 for alpha chain variable domain of TCR clone 11348 (TRAV26-1, TRAJ39)
CIVRGSRAGNMLTF

SEQ ID NO: 22696 - protein, 15 aa, Homo sapiens
  CDR3 for beta chain variable domain of TCR clone 11348 (TRBV7-9, TRBJ1-5)
RASSQGHQPNQPQHF

SEQ ID NO: 22697 - protein, 16 aa, Homo sapiens
  CDR3 for alpha chain variable domain of TCR clone 11349 (TRAV14/DV4, TRAJ54)
CAMREGRIQGAQKLVF

SEQ ID NO: 22698 - protein, 16 aa, Homo sapiens
  CDR3 for beta chain variable domain of TCR clone 11349 (TRBV7-3, TRBJ2-2)
CASSLKRGTLSGELFF

SEQ ID NO: 22699 - protein, 14 aa, Homo sapiens
  CDR3 for alpha chain variable domain of TCR clone 11350 (TRAV2, TRAJ9)
CAVEDRSGGFKTIF

SEQ ID NO: 22700 - protein, 17 aa, Homo sapiens
  CDR3 for beta chain variable domain of TCR clone 11350 (TRBV4-1, TRBJ2-5)
CASSSRSGSGGQETQYF

SEQ ID NO: 22701 - protein, 19 aa, Homo sapiens
  CDR3 for alpha chain variable domain of TCR clone 11351 (TRAV10, TRAJ43)
TASQLSDSASYPAPNDMRF

SEQ ID NO: 22702 - protein, 13 aa, Homo sapiens
  CDR3 for beta chain variable domain of TCR clone 11351 (TRBV20-1, TRBJ2-7)
CSARPSTNYEQYF

SEQ ID NO: 22703 - protein, 14 aa, Homo sapiens
  CDR3 for alpha chain variable domain of TCR clone 11352 (TRAV13-1, TRAJ35)
CAASKGGFWNVLHC

SEQ ID NO: 22704 - protein, 13 aa, Homo sapiens
  CDR3 for beta chain variable domain of TCR clone 11352 (TRBV7-3, TRBJ1-1)
CASSQDWGAEAFF

SEQ ID NO: 22705 - protein, 14 aa, Homo sapiens
  CDR3 for alpha chain variable domain of TCR clone 11353 (TRAV2, TRAJ37)
CAVDFTSNTGKLIF

SEQ ID NO: 22706 - protein, 15 aa, Homo sapiens
  CDR3 for beta chain variable domain of TCR clone 11353 (TRBV20-1, TRBJ1-1)
CSASRGVAGNTEAFF

SEQ ID NO: 22707 - protein, 14 aa, Homo sapiens
  CDR3 for alpha chain variable domain of TCR clone 11354 (TRAV12-2, TRAJ40)
CAVKIPSGTYKYVF

SEQ ID NO: 22708 - protein, 14 aa, Homo sapiens
  CDR3 for beta chain variable domain of TCR clone 11354 (TRBV20-1, TRBJ1-1)
CSAQTRIGGTEAFF

SEQ ID NO: 22709 - protein, 14 aa, Homo sapiens
  CDR3 for alpha chain variable domain of TCR clone 11355 (TRAV8-4, TRAJ17)
CAVSSPAAGNKLTF

SEQ ID NO: 22710 - protein, 14 aa, Homo sapiens
  CDR3 for beta chain variable domain of TCR clone 11355 (TRBV10-3, TRBJ2-5)
CAISVGGVYETQYF

SEQ ID NO: 22711 - protein, 17 aa, Homo sapiens
  CDR3 for alpha chain variable domain of TCR clone 11356 (TRAV3, TRAJ6)
CAVRDGPRAGGSYIPTF

SEQ ID NO: 22712 - protein, 20 aa, Homo sapiens
  CDR3 for beta chain variable domain of TCR clone 11356 (TRBV28, TRBJ2-1)
CASTPIGRSPGLAGGNEQFF

SEQ ID NO: 22713 - protein, 17 aa, Homo sapiens
  CDR3 for alpha chain variable domain of TCR clone 11357 (TRAV23/DV6, TRAJ57)
CAASSTLSQGGSEKLVF

SEQ ID NO: 22714 - protein, 15 aa, Homo sapiens
  CDR3 for beta chain variable domain of TCR clone 11357 (TRBV11-2, TRBJ2-1)
CASSLGTSGLNEQFF

SEQ ID NO: 22715 - protein, 14 aa, Homo sapiens
  CDR3 for alpha chain variable domain of TCR clone 11358 (TRAV1-2, TRAJ16)
CAVNRFSDGQKLLF

SEQ ID NO: 22716 - protein, 15 aa, Homo sapiens
  CDR3 for beta chain variable domain of TCR clone 11358 (TRBV5-5, TRBJ1-4)
CASSLVVRSNEKLFF

SEQ ID NO: 22717 - protein, 12 aa, Homo sapiens
  CDR3 for alpha chain variable domain of TCR clone 11359 (TRAV12-2, TRAJ10)
WGVTGGGNKLTF

SEQ ID NO: 22718 - protein, 11 aa, Homo sapiens
  CDR3 for beta chain variable domain of TCR clone 11359 (TRBV29-1, TRBJ2-5)
CSEDRTGTQYF

SEQ ID NO: 22719 - protein, 18 aa, Homo sapiens
  CDR3 for alpha chain variable domain of TCR clone 11360 (TRAV13-1, TRAJ52)
CAAKNPNAGGTSYGKLTF

SEQ ID NO: 22720 - protein, 14 aa, Homo sapiens
  CDR3 for beta chain variable domain of TCR clone 11360 (TRBV7-2, TRBJ2-7)
CASSPKTSFYEQYF

SEQ ID NO: 22721 - protein, 15 aa, Homo sapiens
  CDR3 for alpha chain variable domain of TCR clone 11361 (TRAV3, TRAJ22)
CAVRDRGGSARPLTF

SEQ ID NO: 22722 - protein, 16 aa, Homo sapiens
  CDR3 for beta chain variable domain of TCR clone 11361 (TRBV5-4, TRBJ2-3)
CASQQPGAGGADTQYF

SEQ ID NO: 22723 - protein, 13 aa, Homo sapiens
  CDR3 for alpha chain variable domain of TCR clone 11362 (TRAV26-2, TRAJ43)
CILRAVNNNDMRF

SEQ ID NO: 22724 - protein, 12 aa, Homo sapiens
  CDR3 for beta chain variable domain of TCR clone 11362 (TRBV7-8, TRBJ2-7)
CASSLGDREQYF

SEQ ID NO: 22725 - protein, 18 aa, Homo sapiens
  CDR3 for alpha chain variable domain of TCR clone 11363 (TRAV26-1, TRAJ52)
CIVRGRNAGGTSYGKLTF

SEQ ID NO: 22726 - protein, 14 aa, Homo sapiens
  CDR3 for beta chain variable domain of TCR clone 11363 (TRBV6-6, TRBJ1-3)
CASVAGDSGNTIYF

SEQ ID NO: 22727 - protein, 14 aa, Homo sapiens
  CDR3 for alpha chain variable domain of TCR clone 11364 (TRAV12-2, TRAJ40)
CAVKIPSGTYKYIF

SEQ ID NO: 22728 - protein, 14 aa, Homo sapiens
  CDR3 for beta chain variable domain of TCR clone 11364 (TRBV20-1, TRBJ1-1)
CSAQTRSGGTEAFF

SEQ ID NO: 22729 - protein, 14 aa, Homo sapiens
  CDR3 for alpha chain variable domain of TCR clone 11365 (TRAV1-2, TRAJ8)
CAVREDTGFQKLVF

SEQ ID NO: 22730 - protein, 14 aa, Homo sapiens
  CDR3 for beta chain variable domain of TCR clone 11365 (TRBV28, TRBJ1-1)
CASSPRTRWAEAFF

SEQ ID NO: 22731 - protein, 14 aa, Homo sapiens
  CDR3 for alpha chain variable domain of TCR clone 11366 (TRAV38-1, TRAJ45)
CASHSGGGADGLTS

SEQ ID NO: 22732 - protein, 13 aa, Homo sapiens
  CDR3 for beta chain variable domain of TCR clone 11366 (TRBV10-3, TRBJ1-2)
CAISERDSYGYTF

SEQ ID NO: 22733 - protein, 15 aa, Homo sapiens
  CDR3 for alpha chain variable domain of TCR clone 11367 (TRAV8-3, TRAJ27)
CAVGPSKTNAGKSTF

SEQ ID NO: 22734 - protein, 15 aa, Homo sapiens
  CDR3 for beta chain variable domain of TCR clone 11367 (TRBV7-2, TRBJ2-1)
CASSSGLAGGNEQSF

SEQ ID NO: 22735 - protein, 14 aa, Homo sapiens
  CDR3 for alpha chain variable domain of TCR clone 11368 (TRAV12-2, TRAJ13)
CAVKKTGGYQKVTF

SEQ ID NO: 22736 - protein, 15 aa, Homo sapiens
  CDR3 for beta chain variable domain of TCR clone 11368 (TRBV3-1, TRBJ2-7)
CASSQAPSGSYEQYF

SEQ ID NO: 22737 - protein, 10 aa, Homo sapiens
  CDR3 for alpha chain variable domain of TCR clone 11369 (TRAV1-2, TRAJ23)
CAAWAGKLIF

SEQ ID NO: 22738 - protein, 16 aa, Homo sapiens
  CDR3 for beta chain variable domain of TCR clone 11369 (TRBV6-5, TRBJ2-3)
CASRFHRGGGSDTQYF

SEQ ID NO: 22739 - protein, 13 aa, Homo sapiens
  CDR3 for alpha chain variable domain of TCR clone 11370 (TRAV16, TRAJ34)
CALISYNTDKLIF

SEQ ID NO: 22740 - protein, 15 aa, Homo sapiens
  CDR3 for beta chain variable domain of TCR clone 11370 (TRBV6-3, TRBJ2-7)
CASSSPGTVFYEQYF

SEQ ID NO: 22741 - protein, 14 aa, Homo sapiens
  CDR3 for alpha chain variable domain of TCR clone 11371 (TRAV12-2, TRAJ17)
RAVLFKAAGNKLTF

SEQ ID NO: 22742 - protein, 17 aa, Homo sapiens
  CDR3 for beta chain variable domain of TCR clone 11371 (TRBV20-1, TRBJ2-2)
CSASGSGQGGLTGELFF

SEQ ID NO: 22743 - protein, 15 aa, Homo sapiens
  CDR3 for alpha chain variable domain of TCR clone 11372 (TRAV23/DV6, TRAJ37)
CAAGEGSGNTGKLIF

SEQ ID NO: 22744 - protein, 17 aa, Homo sapiens
  CDR3 for beta chain variable domain of TCR clone 11372 (TRBV20-1, TRBJ2-7)
CSATRAGGVAGVEEQYF

SEQ ID NO: 22745 - protein, 13 aa, Homo sapiens
  CDR3 for alpha chain variable domain of TCR clone 11373 (TRAV27, TRAJ45)
CRSSGGGADGLTF

SEQ ID NO: 22746 - protein, 15 aa, Homo sapiens
  CDR3 for beta chain variable domain of TCR clone 11373 (TRBV9, TRBJ1-6)
CASSVAGTGDSPLHF

SEQ ID NO: 22747 - protein, 15 aa, Homo sapiens
  CDR3 for alpha chain variable domain of TCR clone 11374 (TRAV26-1, TRAJ29)
CIVRALNSGNTPLVF

SEQ ID NO: 22748 - protein, 14 aa, Homo sapiens
  CDR3 for beta chain variable domain of TCR clone 11374 (TRBV5-4, TRBJ1-2)
CASSLLGVTYGYTF

SEQ ID NO: 22749 - protein, 15 aa, Homo sapiens
  CDR3 for alpha chain variable domain of TCR clone 11375 (TRAV8-3, TRAJ45)
CASSYSGGGADGLNF

SEQ ID NO: 22750 - protein, 13 aa, Homo sapiens
  CDR3 for beta chain variable domain of TCR clone 11375 (TRBV10-3, TRBJ2-7)
CASKLAVNYEQYF

SEQ ID NO: 22751 - protein, 13 aa, Homo sapiens
  CDR3 for alpha chain variable domain of TCR clone 11376 (TRAV2, TRAJ40)
CAVVTSGTYKYTF

SEQ ID NO: 22752 - protein, 15 aa, Homo sapiens
  CDR3 for beta chain variable domain of TCR clone 11376 (TRBV11-3, TRBJ2-3)
CASLKDGREGDTQYF

SEQ ID NO: 22753 - protein, 12 aa, Homo sapiens
  CDR3 for alpha chain variable domain of TCR clone 11377 (TRAV12-3, TRAJ42)
CAPGGSQGNLIF

SEQ ID NO: 22754 - protein, 13 aa, Homo sapiens
  CDR3 for beta chain variable domain of TCR clone 11377 (TRBV5-6, TRBJ2-6)
CASTSSGANVLTF

SEQ ID NO: 22755 - protein, 16 aa, Homo sapiens
  CDR3 for alpha chain variable domain of TCR clone 11378 (TRAV30, TRAJ24)
CGTEIVDAHSWGKFQF

SEQ ID NO: 22756 - protein, 14 aa, Homo sapiens
  CDR3 for beta chain variable domain of TCR clone 11378 (TRBV12-5, TRBJ2-5)
CASGSRTHQETQYF

SEQ ID NO: 22757 - protein, 17 aa, Homo sapiens
  CDR3 for alpha chain variable domain of TCR clone 11379 (TRAV3, TRAJ42)
CAVRDRDYGGSQGNLIF

SEQ ID NO: 22758 - protein, 15 aa, Homo sapiens
  CDR3 for beta chain variable domain of TCR clone 11379 (TRBV9, TRBJ1-6)
CASSVAGTGDSPLHF

SEQ ID NO: 22759 - protein, 13 aa, Homo sapiens
  CDR3 for alpha chain variable domain of TCR clone 11380 (TRAV13-1, TRAJ39)
CSKYSNAGNMLTF

SEQ ID NO: 22760 - protein, 13 aa, Homo sapiens
  CDR3 for beta chain variable domain of TCR clone 11380 (TRBV7-9, TRBJ1-2)
CASSLKQNYGYTF

SEQ ID NO: 22761 - protein, 13 aa, Homo sapiens
  CDR3 for alpha chain variable domain of TCR clone 11381 (TRAV21, TRAJ57)
CAVTQGGSEKLFF

SEQ ID NO: 22762 - protein, 16 aa, Homo sapiens
  CDR3 for beta chain variable domain of TCR clone 11381 (TRBV29-1, TRBJ2-7)
CSVEDAEDGTAYEQYF

SEQ ID NO: 22763 - protein, 14 aa, Homo sapiens
  CDR3 for alpha chain variable domain of TCR clone 11382 (TRAV29/DV5, TRAJ36)
CAARRKTGANNLFF

SEQ ID NO: 22764 - protein, 13 aa, Homo sapiens
  CDR3 for beta chain variable domain of TCR clone 11382 (TRBV7-3, TRBJ1-1)
CASSQDWGAEAFF

SEQ ID NO: 22765 - protein, 12 aa, Homo sapiens
  CDR3 for alpha chain variable domain of TCR clone 11383 (TRAV23/DV6, TRAJ16)
CAARGRGQKLLF

SEQ ID NO: 22766 - protein, 19 aa, Homo sapiens
  CDR3 for beta chain variable domain of TCR clone 11383 (TRBV7-2, TRBJ2-3)
CASSFLSRNWGGGTDTQYF

SEQ ID NO: 22767 - protein, 13 aa, Homo sapiens
  CDR3 for alpha chain variable domain of TCR clone 11384 (TRAV21, TRAJ27)
CAAHPGNAGKSTF

SEQ ID NO: 22768 - protein, 14 aa, Homo sapiens
  CDR3 for beta chain variable domain of TCR clone 11384 (TRBV7-6, TRBJ2-3)
CASSLGTVTDTQYF

SEQ ID NO: 22769 - protein, 14 aa, Homo sapiens
  CDR3 for alpha chain variable domain of TCR clone 11385 (TRAV12-2, TRAJ40)
CAVKIPSGTYKYIF

SEQ ID NO: 22770 - protein, 16 aa, Homo sapiens
  CDR3 for beta chain variable domain of TCR clone 11385 (TRBV28, TRBJ2-7)
CASSPWVATGDLSQYF

SEQ ID NO: 22771 - protein, 13 aa, Homo sapiens
  CDR3 for alpha chain variable domain of TCR clone 11386 (TRAV2, TRAJ40)
CAVVTSGTYKYIF

SEQ ID NO: 22772 - protein, 15 aa, Homo sapiens
  CDR3 for beta chain variable domain of TCR clone 11386 (TRBV11-3, TRBJ2-3)
CASLKGGREGDTQYF

SEQ ID NO: 22773 - protein, 15 aa, Homo sapiens
  CDR3 for alpha chain variable domain of TCR clone 11387 (TRAV12-2, TRAJ43)
CAFDMRFGAGTRLTV

SEQ ID NO: 22774 - protein, 15 aa, Homo sapiens
  CDR3 for beta chain variable domain of TCR clone 11387 (TRBV7-3, TRBJ2-2)
CASSETGQGTGELFF

SEQ ID NO: 22775 - protein, 13 aa, Homo sapiens
  CDR3 for alpha chain variable domain of TCR clone 11388 (TRAV13-1, TRAJ39)
CSKYSNAGNMLTF

SEQ ID NO: 22776 - protein, 16 aa, Homo sapiens
  CDR3 for beta chain variable domain of TCR clone 11388 (TRBV20-1, TRBJ1-4)
CSVPGQGLLTNEKLFF

SEQ ID NO: 22777 - protein, 14 aa, Homo sapiens
  CDR3 for alpha chain variable domain of TCR clone 11389 (TRAV17, TRAJ15)
CATDAWQAGTALIF

SEQ ID NO: 22778 - protein, 17 aa, Homo sapiens
  CDR3 for beta chain variable domain of TCR clone 11389 (TRBV6-6, TRBJ2-6)
CASSYSMEGAGANVLTF

SEQ ID NO: 22779 - protein, 14 aa, Homo sapiens
  CDR3 for alpha chain variable domain of TCR clone 11390 (TRAV1-2, TRAJ8)
CAVREDTGFQKLVF

SEQ ID NO: 22780 - protein, 14 aa, Homo sapiens
  CDR3 for beta chain variable domain of TCR clone 11390 (TRBV12-5, TRBJ2-7)
CASGQTGNSYEQYF

SEQ ID NO: 22781 - protein, 11 aa, Homo sapiens
  CDR3 for alpha chain variable domain of TCR clone 11391 (TRAV2, TRAJ33)
CAVESNYQLTW

SEQ ID NO: 22782 - protein, 15 aa, Homo sapiens
  CDR3 for beta chain variable domain of TCR clone 11391 (TRBV19, TRBJ1-1)
CASTSGQIQNTEAFF

SEQ ID NO: 22783 - protein, 13 aa, Homo sapiens
  CDR3 for alpha chain variable domain of TCR clone 11392 (TRAV12-3, TRAJ7)
CAMTPYGNNRLAF

SEQ ID NO: 22784 - protein, 13 aa, Homo sapiens
  CDR3 for beta chain variable domain of TCR clone 11392 (TRBV20-1, TRBJ1-1)
CSARVGGNTEAFF

SEQ ID NO: 22785 - protein, 13 aa, Homo sapiens
  CDR3 for alpha chain variable domain of TCR clone 11393 (TRAV2, TRAJ15)
CAVASQAGTALIF

SEQ ID NO: 22786 - protein, 15 aa, Homo sapiens
  CDR3 for beta chain variable domain of TCR clone 11393 (TRBV11-2, TRBJ2-1)
CASSLGTSGLNEQFF

SEQ ID NO: 22787 - protein, 14 aa, Homo sapiens
  CDR3 for alpha chain variable domain of TCR clone 11394 (TRAV17, TRAJ4)
CATVPSGGYNKLIF

SEQ ID NO: 22788 - protein, 15 aa, Homo sapiens
  CDR3 for beta chain variable domain of TCR clone 11394 (TRBV7-8, TRBJ1-6)
CASSLVEGAYSPLHF

SEQ ID NO: 22789 - protein, 13 aa, Homo sapiens
  CDR3 for alpha chain variable domain of TCR clone 11395 (TRAV13-2, TRAJ48)
CAEMDFGSEKLTF

SEQ ID NO: 22790 - protein, 15 aa, Homo sapiens
  CDR3 for beta chain variable domain of TCR clone 11395 (TRBV7-9, TRBJ1-6)
CASSSPGRGNSPLHF

SEQ ID NO: 22791 - protein, 14 aa, Homo sapiens
  CDR3 for alpha chain variable domain of TCR clone 11396 (TRAV17, TRAJ35)
CATDRLGFGNVLHC

SEQ ID NO: 22792 - protein, 14 aa, Homo sapiens
  CDR3 for beta chain variable domain of TCR clone 11396 (TRBV7-8, TRBJ2-3)
CASSLEAGTDTQYF

SEQ ID NO: 22793 - protein, 14 aa, Homo sapiens
  CDR3 for alpha chain variable domain of TCR clone 11397 (TRAV12-2, TRAJ13)
CAVKKTGGYQKVTF

SEQ ID NO: 22794 - protein, 15 aa, Homo sapiens
  CDR3 for beta chain variable domain of TCR clone 11397 (TRBV27, TRBJ2-1)
CASSNGGGSSNEQFV

SEQ ID NO: 22795 - protein, 12 aa, Homo sapiens
  CDR3 for alpha chain variable domain of TCR clone 11398 (TRAV12-3, TRAJ17)
CAMTLTGNKLTF

SEQ ID NO: 22796 - protein, 13 aa, Homo sapiens
  CDR3 for beta chain variable domain of TCR clone 11398 (TRBV19, TRBJ1-2)
CASSVPGQDGYTF

SEQ ID NO: 22797 - protein, 12 aa, Homo sapiens
  CDR3 for alpha chain variable domain of TCR clone 11399 (TRAV1-1, TRAJ43)
CAPRVSSNDMRF

SEQ ID NO: 22798 - protein, 14 aa, Homo sapiens
  CDR3 for beta chain variable domain of TCR clone 11399 (TRBV6-1, TRBJ1-3)
CASVQGGGGNTIYF

SEQ ID NO: 22799 - protein, 13 aa, Homo sapiens
  CDR3 for alpha chain variable domain of TCR clone 11400 (TRAV13-1, TRAJ10)
CAALEGGGNKLTF

SEQ ID NO: 22800 - protein, 11 aa, Homo sapiens
  CDR3 for beta chain variable domain of TCR clone 11400 (TRBV6-3, TRBJ2-7)
CASSFSYEQYF

SEQ ID NO: 22801 - protein, 14 aa, Homo sapiens
  CDR3 for alpha chain variable domain of TCR clone 11401 (TRAV12-2, TRAJ13)
CAVKKTGGYQKVTF

SEQ ID NO: 22802 - protein, 17 aa, Homo sapiens
  CDR3 for beta chain variable domain of TCR clone 11401 (TRBV11-2, TRBJ2-1)
CASSLYPPGVEYNEQFF

SEQ ID NO: 22803 - protein, 14 aa, Homo sapiens
  CDR3 for alpha chain variable domain of TCR clone 11402 (TRAV13-2, TRAJ45)
CAEMPGGGADGLTF

SEQ ID NO: 22804 - protein, 11 aa, Homo sapiens
  CDR3 for beta chain variable domain of TCR clone 11402 (TRBV7-3, TRBJ2-5)
CVSSLSETQYF

SEQ ID NO: 22805 - protein, 14 aa, Homo sapiens
  CDR3 for alpha chain variable domain of TCR clone 11403 (TRAV1-2, TRAJ8)
CAVREDTGFQKLVF

SEQ ID NO: 22806 - protein, 10 aa, Homo sapiens
  CDR3 for beta chain variable domain of TCR clone 11403 (TRBV6-3, TRBJ2-7)
CASSSPGQFS

SEQ ID NO: 22807 - protein, 14 aa, Homo sapiens
  CDR3 for alpha chain variable domain of TCR clone 11404 (TRAV2, TRAJ20)
CAVELTPNDYELSF

SEQ ID NO: 22808 - protein, 14 aa, Homo sapiens
  CDR3 for beta chain variable domain of TCR clone 11404 (TRBV4-2, TRBJ1-2)
CASSQVGQNYGYTF

SEQ ID NO: 22809 - protein, 12 aa, Homo sapiens
  CDR3 for alpha chain variable domain of TCR clone 11405 (TRAV21, TRAJ49)
CAVNDGGNQFYF

SEQ ID NO: 22810 - protein, 14 aa, Homo sapiens
  CDR3 for beta chain variable domain of TCR clone 11405 (TRBV18, TRBJ2-7)
CAGSPRGGSYEQYF

SEQ ID NO: 22811 - protein, 11 aa, Homo sapiens
  CDR3 for alpha chain variable domain of TCR clone 11406 (TRAV2, TRAJ13)
CASGGYQKVTF

SEQ ID NO: 22812 - protein, 16 aa, Homo sapiens
  CDR3 for beta chain variable domain of TCR clone 11406 (TRBV6-1, TRBJ2-5)
CASGETLDRGAETQYF

SEQ ID NO: 22813 - protein, 15 aa, Homo sapiens
  CDR3 for alpha chain variable domain of TCR clone 11407 (TRAV8-4, TRAJ3)
CAVSPGYSSASKIIF

SEQ ID NO: 22814 - protein, 13 aa, Homo sapiens
  CDR3 for beta chain variable domain of TCR clone 11407 (TRBV12-4, TRBJ1-1)
CASITGLNTEAFF

SEQ ID NO: 22815 - protein, 13 aa, Homo sapiens
  CDR3 for alpha chain variable domain of TCR clone 11408 (TRAV1-2, TRAJ31)
CAVRPNNNARLMF

SEQ ID NO: 22816 - protein, 14 aa, Homo sapiens
  CDR3 for beta chain variable domain of TCR clone 11408 (TRBV25-1, TRBJ1-1)
CASTHLGGNTEAFF

SEQ ID NO: 22817 - protein, 14 aa, Homo sapiens
  CDR3 for alpha chain variable domain of TCR clone 11409 (TRAV21, TRAJ21)
CAVRPRDNFNKFYF

SEQ ID NO: 22818 - protein, 15 aa, Homo sapiens
  CDR3 for beta chain variable domain of TCR clone 11409 (TRBV6-1, TRBJ2-3)
CASSERGGITDTQYF

SEQ ID NO: 22819 - protein, 12 aa, Homo sapiens
  CDR3 for alpha chain variable domain of TCR clone 11410 (TRAV25, TRAJ30)
CAGKNRDDKIIF

SEQ ID NO: 22820 - protein, 12 aa, Homo sapiens
  CDR3 for beta chain variable domain of TCR clone 11410 (TRBV11-2, TRBJ2-2)
CASSLGGGELFF

SEQ ID NO: 22821 - protein, 14 aa, Homo sapiens
  CDR3 for alpha chain variable domain of TCR clone 11411 (TRAV35, TRAJ22)
CAGLGPGSARQLTF

SEQ ID NO: 22822 - protein, 15 aa, Homo sapiens
  CDR3 for beta chain variable domain of TCR clone 11411 (TRBV12-4, TRBJ2-5)
CASSPPTGLQETQYF

SEQ ID NO: 22823 - protein, 14 aa, Homo sapiens
  CDR3 for alpha chain variable domain of TCR clone 11412 (TRAV8-3, TRAJ35)
CAVVPQGFGNVLHC

SEQ ID NO: 22824 - protein, 15 aa, Homo sapiens
  CDR3 for beta chain variable domain of TCR clone 11412 (TRBV6-1, TRBJ2-2)
CASSAGQGYTGELFF

SEQ ID NO: 22825 - protein, 15 aa, Homo sapiens
  CDR3 for alpha chain variable domain of TCR clone 11413 (TRAV26-1, TRAJ29)
CIVRVEGSGNTPLVF

SEQ ID NO: 22826 - protein, 12 aa, Homo sapiens
  CDR3 for beta chain variable domain of TCR clone 11413 (TRBV11-2, TRBJ2-2)
CASSLGGGELFF

SEQ ID NO: 22827 - protein, 16 aa, Homo sapiens
  CDR3 for alpha chain variable domain of TCR clone 11414 (TRAV30, TRAJ24)
CGTEIVDADSWGKFQF

SEQ ID NO: 22828 - protein, 13 aa, Homo sapiens
  CDR3 for beta chain variable domain of TCR clone 11414 (TRBV6-1, TRBJ2-2)
CANSGHNTGELFF

SEQ ID NO: 22829 - protein, 14 aa, Homo sapiens
  CDR3 for alpha chain variable domain of TCR clone 11415 (TRAV12-3, TRAJ10)
SHLPLTGGGNKLTF

SEQ ID NO: 22830 - protein, 18 aa, Homo sapiens
  CDR3 for beta chain variable domain of TCR clone 11415 (TRBV11-2, TRBJ2-3)
CASSLGGASRGAPNTQYF

SEQ ID NO: 22831 - protein, 14 aa, Homo sapiens
  CDR3 for alpha chain variable domain of TCR clone 11416 (TRAV1-2, TRAJ16)
CAVNRFSDGQKLLF

SEQ ID NO: 22832 - protein, 15 aa, Homo sapiens
  CDR3 for beta chain variable domain of TCR clone 11416 (TRBV10-1, TRBJ2-3)
CASSRAGTLGDTQYF

SEQ ID NO: 22833 - protein, 14 aa, Homo sapiens
  CDR3 for alpha chain variable domain of TCR clone 11417 (TRAV8-4, TRAJ13)
CAVTLSGGYQKVTF

SEQ ID NO: 22834 - protein, 14 aa, Homo sapiens
  CDR3 for beta chain variable domain of TCR clone 11417 (TRBV7-2, TRBJ1-2)
CASSQTGSTYGCTF

SEQ ID NO: 22835 - protein, 14 aa, Homo sapiens
  CDR3 for alpha chain variable domain of TCR clone 11418 (TRAV13-1, TRAJ35)
CAASKGGFGNVLHC

SEQ ID NO: 22836 - protein, 13 aa, Homo sapiens
  CDR3 for beta chain variable domain of TCR clone 11418 (TRBV7-3, TRBJ1-1)
CASSQDWGDEAFF

SEQ ID NO: 22837 - protein, 16 aa, Homo sapiens
  CDR3 for alpha chain variable domain of TCR clone 11419 (TRAV12-3, TRAJ53)
CAMSPGSGGSNYKLTF

SEQ ID NO: 22838 - protein, 14 aa, Homo sapiens
  CDR3 for beta chain variable domain of TCR clone 11419 (TRBV4-1, TRBJ2-2)
CASSQAVNTGELFF

SEQ ID NO: 22839 - protein, 13 aa, Homo sapiens
  CDR3 for alpha chain variable domain of TCR clone 11420 (TRAV9-2, TRAJ53)
CALSGGSNYKLTF

SEQ ID NO: 22840 - protein, 10 aa, Homo sapiens
  CDR3 for beta chain variable domain of TCR clone 11420 (TRBV7-9, TRBJ1-1)
CASSFTEAFF

SEQ ID NO: 22841 - protein, 14 aa, Homo sapiens
  CDR3 for alpha chain variable domain of TCR clone 11421 (TRAV17, TRAJ57)
CATDPQGGSEKLVF

SEQ ID NO: 22842 - protein, 18 aa, Homo sapiens
  CDR3 for beta chain variable domain of TCR clone 11421 (TRBV6-6, TRBJ1-3)
CASSYSKWDSISGNTMYF

SEQ ID NO: 22843 - protein, 15 aa, Homo sapiens
  CDR3 for alpha chain variable domain of TCR clone 11422 (TRAV13-1, TRAJ18)
CAASGGGSTLGRLYF

SEQ ID NO: 22844 - protein, 13 aa, Homo sapiens
  CDR3 for beta chain variable domain of TCR clone 11422 (TRBV10-3, TRBJ2-7)
CASKLAVNYEQYF

SEQ ID NO: 22845 - protein, 17 aa, Homo sapiens
  CDR3 for alpha chain variable domain of TCR clone 11423 (TRAV3, TRAJ6)
CAVRDGPRAGGSYIPTF

SEQ ID NO: 22846 - protein, 14 aa, Homo sapiens
  CDR3 for beta chain variable domain of TCR clone 11423 (TRBV4-1, TRBJ2-2)
CASSQAVNTGELFF

SEQ ID NO: 22847 - protein, 17 aa, Homo sapiens
  CDR3 for alpha chain variable domain of TCR clone 11424 (TRAV3, TRAJ38)
CAVRDCLNAGNNRKLIW

SEQ ID NO: 22848 - protein, 15 aa, Homo sapiens
  CDR3 for beta chain variable domain of TCR clone 11424 (TRBV20-1, TRBJ2-7)
CSARDRVSGMDEQYF

SEQ ID NO: 22849 - protein, 13 aa, Homo sapiens
  CDR3 for alpha chain variable domain of TCR clone 11425 (TRAV21, TRAJ57)
CAVTQGGSAKLVF

SEQ ID NO: 22850 - protein, 16 aa, Homo sapiens
  CDR3 for beta chain variable domain of TCR clone 11425 (TRBV29-1, TRBJ2-7)
CSVEDAEDGTAYEQYF

SEQ ID NO: 22851 - protein, 11 aa, Homo sapiens
  CDR3 for alpha chain variable domain of TCR clone 11426 (TRAV4, TRAJ39)
CLVGLIGNAHL

SEQ ID NO: 22852 - protein, 15 aa, Homo sapiens
  CDR3 for beta chain variable domain of TCR clone 11426 (TRBV7-3, TRBJ2-2)
CASSLYGGDTGELFF

SEQ ID NO: 22853 - protein, 13 aa, Homo sapiens
  CDR3 for alpha chain variable domain of TCR clone 11427 (TRAV13-2, TRAJ48)
CAEMDFGNEKLTF

SEQ ID NO: 22854 - protein, 12 aa, Homo sapiens
  CDR3 for beta chain variable domain of TCR clone 11427 (TRBV29-1, TRBJ2-3)
CSVTGGADTQYF

SEQ ID NO: 22855 - protein, 15 aa, Homo sapiens
  CDR3 for alpha chain variable domain of TCR clone 11428 (TRAV25, TRAJ52)
CAGRPGGTSYGKLTF

SEQ ID NO: 22856 - protein, 17 aa, Homo sapiens
  CDR3 for beta chain variable domain of TCR clone 11428 (TRBV7-8, TRBJ2-6)
CASSAGTGGAGANVLSF

SEQ ID NO: 22857 - protein, 16 aa, Homo sapiens
  CDR3 for alpha chain variable domain of TCR clone 11429 (TRAV12-2, TRAJ45)
CAVNRGSGGGADGLTF

SEQ ID NO: 22858 - protein, 15 aa, Homo sapiens
  CDR3 for beta chain variable domain of TCR clone 11429 (TRBV9, TRBJ1-4)
CASSGTGGAYEKLLF

SEQ ID NO: 22859 - protein, 11 aa, Homo sapiens
  CDR3 for alpha chain variable domain of TCR clone 11430 (TRAV1-1, TRAJ23)
CAVRQGGKLIF

SEQ ID NO: 22860 - protein, 20 aa, Homo sapiens
  CDR3 for beta chain variable domain of TCR clone 11430 (TRBV7-8, TRBJ2-2)
CASSHLFPGPTIHITGELFS

SEQ ID NO: 22861 - protein, 18 aa, Homo sapiens
  CDR3 for alpha chain variable domain of TCR clone 11431 (TRAV21, TRAJ52)
CAVRPSPVGGTSYGKLTF

SEQ ID NO: 22862 - protein, 17 aa, Homo sapiens
  CDR3 for beta chain variable domain of TCR clone 11431 (TRBV13, TRBJ2-3)
CASSLSRVAGGRNTQYF

SEQ ID NO: 22863 - protein, 15 aa, Homo sapiens
  CDR3 for alpha chain variable domain of TCR clone 11432 (TRAV27, TRAJ38)
CAARRNAGNNRKLIW

SEQ ID NO: 22864 - protein, 13 aa, Homo sapiens
  CDR3 for beta chain variable domain of TCR clone 11432 (TRBV12-5, TRBJ2-3)
CASGDRQSDTRYF

SEQ ID NO: 22865 - protein, 18 aa, Homo sapiens
  CDR3 for alpha chain variable domain of TCR clone 11433 (TRAV21, TRAJ52)
CALRPSPAGGTSYGKLTF

SEQ ID NO: 22866 - protein, 17 aa, Homo sapiens
  CDR3 for beta chain variable domain of TCR clone 11433 (TRBV13, TRBJ2-3)
CASSLSRVAGGRNTQYF

SEQ ID NO: 22867 - protein, 13 aa, Homo sapiens
  CDR3 for alpha chain variable domain of TCR clone 11434 (TRAV20, TRAJ37)
CAGCSSNTGKLIF

SEQ ID NO: 22868 - protein, 11 aa, Homo sapiens
  CDR3 for beta chain variable domain of TCR clone 11434 (TRBV12-4, TRBJ2-3)
RASTATDTQYF

SEQ ID NO: 22869 - protein, 22 aa, Homo sapiens
  CDR3 for alpha chain variable domain of TCR clone 11435 (TRAV2, TRAJ9)
CAVRIGVEASKLSLEQEQDYLL

SEQ ID NO: 22870 - protein, 15 aa, Homo sapiens
  CDR3 for beta chain variable domain of TCR clone 11435 (TRBV19, TRBJ2-1)
CASSSPGVPLDEQFF

SEQ ID NO: 22871 - protein, 14 aa, Homo sapiens
  CDR3 for alpha chain variable domain of TCR clone 11436 (TRAV1-2, TRAJ16)
CAVNRFSDGQKLLF

SEQ ID NO: 22872 - protein, 15 aa, Homo sapiens
  CDR3 for beta chain variable domain of TCR clone 11436 (TRBV7-2, TRBJ2-1)
CASTHGTGIYNEQFF

SEQ ID NO: 22873 - protein, 14 aa, Homo sapiens
  CDR3 for alpha chain variable domain of TCR clone 11437 (TRAV13-1, TRAJ44)
CAAKATGTASKLTF

SEQ ID NO: 22874 - protein, 14 aa, Homo sapiens
  CDR3 for beta chain variable domain of TCR clone 11437 (TRBV7-8, TRBJ2-3)
CASSLEAGTDTQYF

SEQ ID NO: 22875 - protein, 12 aa, Homo sapiens
  CDR3 for alpha chain variable domain of TCR clone 11438 (TRAV12-3, TRAJ17)
CAMTRTGNKLTF

SEQ ID NO: 22876 - protein, 15 aa, Homo sapiens
  CDR3 for beta chain variable domain of TCR clone 11438 (TRBV20-1, TRBJ2-7)
CSARDRVSGMDEQYF

SEQ ID NO: 22877 - protein, 12 aa, Homo sapiens
  CDR3 for alpha chain variable domain of TCR clone 11439 (TRAV16, TRAJ12)
CAHGDSSYKLIF

SEQ ID NO: 22878 - protein, 12 aa, Homo sapiens
  CDR3 for beta chain variable domain of TCR clone 11439 (TRBV28, TRBJ2-1)
CASSRLFGEQFF

SEQ ID NO: 22879 - protein, 15 aa, Homo sapiens
  CDR3 for alpha chain variable domain of TCR clone 11440 (TRAV6, TRAJ4)
CALGGFSGGYNKLIF

SEQ ID NO: 22880 - protein, 14 aa, Homo sapiens
  CDR3 for beta chain variable domain of TCR clone 11440 (TRBV2, TRBJ2-1)
CASSVGRSGNEQFF

SEQ ID NO: 22881 - protein, 14 aa, Homo sapiens
  CDR3 for alpha chain variable domain of TCR clone 11441 (TRAV23/DV6, TRAJ10)
CAASIGTHGRRKQT

SEQ ID NO: 22882 - protein, 13 aa, Homo sapiens
  CDR3 for beta chain variable domain of TCR clone 11441 (TRBV11-1, TRBJ1-2)
CASVGSWGYGYTF

SEQ ID NO: 22883 - protein, 14 aa, Homo sapiens
  CDR3 for alpha chain variable domain of TCR clone 11442 (TRAV26-1, TRAJ38)
CIADNAGNNRKLIW

SEQ ID NO: 22884 - protein, 13 aa, Homo sapiens
  CDR3 for beta chain variable domain of TCR clone 11442 (TRBV20-1, TRBJ1-1)
YSARGGGNTEAFF

SEQ ID NO: 22885 - protein, 13 aa, Homo sapiens
  CDR3 for alpha chain variable domain of TCR clone 11443 (TRAV13-1, TRAJ10)
CAAAEGGGNKLTF

SEQ ID NO: 22886 - protein, 15 aa, Homo sapiens
  CDR3 for beta chain variable domain of TCR clone 11443 (TRBV7-8, TRBJ2-2)
CASSLDQGWAGELFF

SEQ ID NO: 22887 - protein, 15 aa, Homo sapiens
  CDR3 for alpha chain variable domain of TCR clone 11444 (TRAV27, TRAJ38)
CAARRNAGTNRKLIW

SEQ ID NO: 22888 - protein, 13 aa, Homo sapiens
  CDR3 for beta chain variable domain of TCR clone 11444 (TRBV12-5, TRBJ2-3)
CASGDRQSDTQYF

SEQ ID NO: 22889 - protein, 17 aa, Homo sapiens
  CDR3 for alpha chain variable domain of TCR clone 11445 (TRAV26-1, TRAJ53)
CIVRVDDSGGSNYKLTF

SEQ ID NO: 22890 - protein, 12 aa, Homo sapiens
  CDR3 for beta chain variable domain of TCR clone 11445 (TRBV12-4, TRBJ2-7)
CASSLGGYEQYF

SEQ ID NO: 22891 - protein, 14 aa, Homo sapiens
  CDR3 for alpha chain variable domain of TCR clone 11446 (TRAV2, TRAJ37)
CAVDFTSNTGELIF

SEQ ID NO: 22892 - protein, 15 aa, Homo sapiens
  CDR3 for beta chain variable domain of TCR clone 11446 (TRBV20-1, TRBJ1-1)
CSASRGVTGNTEAFF

SEQ ID NO: 22893 - protein, 16 aa, Homo sapiens
  CDR3 for alpha chain variable domain of TCR clone 11447 (TRAV3, TRAJ21)
CAVRDIERGNFNKFYF

SEQ ID NO: 22894 - protein, 13 aa, Homo sapiens
  CDR3 for beta chain variable domain of TCR clone 11447 (TRBV27, TRBJ2-7)
CASSLTTGYEQYF

SEQ ID NO: 22895 - protein, 12 aa, Homo sapiens
  CDR3 for alpha chain variable domain of TCR clone 11448 (TRAV13-2, TRAJ23)
CAERHRGGKLIF

SEQ ID NO: 22896 - protein, 15 aa, Homo sapiens
  CDR3 for beta chain variable domain of TCR clone 11448 (TRBV7-2, TRBJ1-1)
CASSFAGDRDTEAFF

SEQ ID NO: 22897 - protein, 16 aa, Homo sapiens
  CDR3 for alpha chain variable domain of TCR clone 11449 (TRAV1-2, TRAJ10)
CAVRGVLTGGGNKLTF

SEQ ID NO: 22898 - protein, 15 aa, Homo sapiens
  CDR3 for beta chain variable domain of TCR clone 11449 (TRBV7-2, TRBJ2-1)
CASTHGTGIYNEQFF

SEQ ID NO: 22899 - protein, 15 aa, Homo sapiens
  CDR3 for alpha chain variable domain of TCR clone 11450 (TRAV8-3, TRAJ11)
CAVGLLNSGYSALTF

SEQ ID NO: 22900 - protein, 16 aa, Homo sapiens
  CDR3 for beta chain variable domain of TCR clone 11450 (TRBV7-9, TRBJ1-2)
CASSLGFSSGEDGYTF

SEQ ID NO: 22901 - protein, 13 aa, Homo sapiens
  CDR3 for alpha chain variable domain of TCR clone 11451 (TRAV17, TRAJ7)
CATDNYGNNRLAF

SEQ ID NO: 22902 - protein, 13 aa, Homo sapiens
  CDR3 for beta chain variable domain of TCR clone 11451 (TRBV7-2, TRBJ1-1)
CASNLKGAKVAFF

SEQ ID NO: 22903 - protein, 15 aa, Homo sapiens
  CDR3 for alpha chain variable domain of TCR clone 11452 (TRAV2, TRAJ9)
CAVEDRGTGGFKTIF

SEQ ID NO: 22904 - protein, 16 aa, Homo sapiens
  CDR3 for beta chain variable domain of TCR clone 11452 (TRBV24-1, TRBJ2-3)
CATSDPGAGATDTQYF

SEQ ID NO: 22905 - protein, 18 aa, Homo sapiens
  CDR3 for alpha chain variable domain of TCR clone 11453 (TRAV8-3, TRAJ34)
LGTSVLWASGYNTDKLIF

SEQ ID NO: 22906 - protein, 13 aa, Homo sapiens
  CDR3 for beta chain variable domain of TCR clone 11453 (TRBV6-4, TRBJ2-3)
CASSVSWADTQYF

SEQ ID NO: 22907 - protein, 13 aa, Homo sapiens
  CDR3 for alpha chain variable domain of TCR clone 11454 (TRAV13-1, TRAJ40)
CAARTSGTYKYIF

SEQ ID NO: 22908 - protein, 17 aa, Homo sapiens
  CDR3 for beta chain variable domain of TCR clone 11454 (TRBV20-1, TRBJ2-1)
CSARDPLAGVWDNEQFF

SEQ ID NO: 22909 - protein, 10 aa, Homo sapiens
  CDR3 for alpha chain variable domain of TCR clone 11455 (TRAV30, TRAJ48)
CGIGNEKLTF

SEQ ID NO: 22910 - protein, 16 aa, Homo sapiens
  CDR3 for beta chain variable domain of TCR clone 11455 (TRBV20-1, TRBJ1-2)
CSASMGQGVANYGYTF

SEQ ID NO: 22911 - protein, 17 aa, Homo sapiens
  CDR3 for alpha chain variable domain of TCR clone 11456 (TRAV23/DV6, TRAJ57)
CAASSTLSQGGSEKLVF

SEQ ID NO: 22912 - protein, 14 aa, Homo sapiens
  CDR3 for beta chain variable domain of TCR clone 11456 (TRBV25-1, TRBJ1-1)
RASTHLGGNTEAFF

SEQ ID NO: 22913 - protein, 17 aa, Homo sapiens
  CDR3 for alpha chain variable domain of TCR clone 11457 (TRAV3, TRAJ6)
YAVRDGPRAGGSYIPTF

SEQ ID NO: 22914 - protein, 14 aa, Homo sapiens
  CDR3 for beta chain variable domain of TCR clone 11457 (TRBV7-2, TRBJ2-7)
CASSPKTSFYEQYF

SEQ ID NO: 22915 - protein, 12 aa, Homo sapiens
  CDR3 for alpha chain variable domain of TCR clone 11458 (TRAV25, TRAJ35)
CAGIGFGNVLHC

SEQ ID NO: 22916 - protein, 12 aa, Homo sapiens
  CDR3 for beta chain variable domain of TCR clone 11458 (TRBV2, TRBJ2-1)
CAYGPPGNEQFF

SEQ ID NO: 22917 - protein, 14 aa, Homo sapiens
  CDR3 for alpha chain variable domain of TCR clone 11459 (TRAV8-1, TRAJ22)
CAAPSSGSARQLTF

SEQ ID NO: 22918 - protein, 15 aa, Homo sapiens
  CDR3 for beta chain variable domain of TCR clone 11459 (TRBV5-1, TRBJ2-1)
CASSPPRAPYNEQFF

SEQ ID NO: 22919 - protein, 11 aa, Homo sapiens
  CDR3 for alpha chain variable domain of TCR clone 11460 (TRAV17, TRAJ9)
CATTGGFKTIF

SEQ ID NO: 22920 - protein, 17 aa, Homo sapiens
  CDR3 for beta chain variable domain of TCR clone 11460 (TRBV20-1, TRBJ2-2)
CSASGSGQGGLTGELFF

SEQ ID NO: 22921 - protein, 16 aa, Homo sapiens
  CDR3 for alpha chain variable domain of TCR clone 11461 (TRAV12-2, TRAJ40)
CAVIRGGTSGTYKYIF

SEQ ID NO: 22922 - protein, 12 aa, Homo sapiens
  CDR3 for beta chain variable domain of TCR clone 11461 (TRBV6-3, TRBJ2-7)
CASSLTPYEQYF

SEQ ID NO: 22923 - protein, 16 aa, Homo sapiens
  CDR3 for alpha chain variable domain of TCR clone 11462 (TRAV8-3, TRAJ13)
CAVGAYPSGGYQKVTF

SEQ ID NO: 22924 - protein, 15 aa, Homo sapiens
  CDR3 for beta chain variable domain of TCR clone 11462 (TRBV19, TRBJ1-5)
CASSIVWADNQHQHF

SEQ ID NO: 22925 - protein, 13 aa, Homo sapiens
  CDR3 for alpha chain variable domain of TCR clone 11463 (TRAV38-1, TRAJ42)
CARWGGSQGNLIF

SEQ ID NO: 22926 - protein, 16 aa, Homo sapiens
  CDR3 for beta chain variable domain of TCR clone 11463 (TRBV4-2, TRBJ2-3)
CASSQELAGDTDTQYF

SEQ ID NO: 22927 - protein, 12 aa, Homo sapiens
  CDR3 for alpha chain variable domain of TCR clone 11464 (TRAV13-1, TRAJ29)
CAARSRKHTSCL

SEQ ID NO: 22928 - protein, 17 aa, Homo sapiens
  CDR3 for beta chain variable domain of TCR clone 11464 (TRBV4-1, TRBJ2-1)
CASSHRDSGSSYNEQFF

SEQ ID NO: 22929 - protein, 15 aa, Homo sapiens
  CDR3 for alpha chain variable domain of TCR clone 11465 (TRAV12-2, TRAJ43)
CAFDMRFGAGTSLTV

SEQ ID NO: 22930 - protein, 18 aa, Homo sapiens
  CDR3 for beta chain variable domain of TCR clone 11465 (TRBV20-1, TRBJ2-3)
CSASGLAGGPGTTDTQYF

SEQ ID NO: 22931 - protein, 10 aa, Homo sapiens
  CDR3 for alpha chain variable domain of TCR clone 11466 (TRAV1-2, TRAJ20)
CACNDYKLSF

SEQ ID NO: 22932 - protein, 16 aa, Homo sapiens
  CDR3 for beta chain variable domain of TCR clone 11466 (TRBV20-1, TRBJ2-1)
CGARDLKQGMNNEQFF

SEQ ID NO: 22933 - protein, 14 aa, Homo sapiens
  CDR3 for alpha chain variable domain of TCR clone 11467 (TRAV13-1, TRAJ35)
CAASKGGFGNVLHC

SEQ ID NO: 22934 - protein, 13 aa, Homo sapiens
  CDR3 for beta chain variable domain of TCR clone 11467 (TRBV7-3, TRBJ1-1)
CASSQDWGAEAFV

SEQ ID NO: 22935 - protein, 13 aa, Homo sapiens
  CDR3 for alpha chain variable domain of TCR clone 11468 (TRAV21, TRAJ57)
CAVTQGGSEKPVF

SEQ ID NO: 22936 - protein, 16 aa, Homo sapiens
  CDR3 for beta chain variable domain of TCR clone 11468 (TRBV29-1, TRBJ2-7)
CSVEDAEDGTAYEQYF

SEQ ID NO: 22937 - protein, 11 aa, Homo sapiens
  CDR3 for alpha chain variable domain of TCR clone 11469 (TRAV1-2, TRAJ31)
CAVNNNARLMF

SEQ ID NO: 22938 - protein, 15 aa, Homo sapiens
  CDR3 for beta chain variable domain of TCR clone 11469 (TRBV28, TRBJ2-1)
CASSIIAGGRSEQSF

SEQ ID NO: 22939 - protein, 15 aa, Homo sapiens
  CDR3 for alpha chain variable domain of TCR clone 11470 (TRAV34, TRAJ38)
CGADFTPGNNRKLIW

SEQ ID NO: 22940 - protein, 14 aa, Homo sapiens
  CDR3 for beta chain variable domain of TCR clone 11470 (TRBV25-1, TRBJ1-1)
CASTHLGGNTEAFF

SEQ ID NO: 22941 - protein, 14 aa, Homo sapiens
  CDR3 for alpha chain variable domain of TCR clone 11471 (TRAV13-1, TRAJ35)
FAASKGGFGNVLHC

SEQ ID NO: 22942 - protein, 13 aa, Homo sapiens
  CDR3 for beta chain variable domain of TCR clone 11471 (TRBV7-3, TRBJ1-1)
CASSQDWGAEAFF

SEQ ID NO: 22943 - protein, 16 aa, Homo sapiens
  CDR3 for alpha chain variable domain of TCR clone 11472 (TRAV20, TRAJ10)
CAVRFFLTGGGNKLTF

SEQ ID NO: 22944 - protein, 15 aa, Homo sapiens
  CDR3 for beta chain variable domain of TCR clone 11472 (TRBV7-8, TRBJ1-1)
CASSLGSGFDTEAFF

SEQ ID NO: 22945 - protein, 12 aa, Homo sapiens
  CDR3 for alpha chain variable domain of TCR clone 11473 (TRAV25, TRAJ16)
CAGNRDGQKLLF

SEQ ID NO: 22946 - protein, 15 aa, Homo sapiens
  CDR3 for beta chain variable domain of TCR clone 11473 (TRBV5-1, TRBJ2-7)
CASSLYPDGGYEQYF

SEQ ID NO: 22947 - protein, 14 aa, Homo sapiens
  CDR3 for alpha chain variable domain of TCR clone 11474 (TRAV29/DV5, TRAJ36)
CAARRKTGANNLLG

SEQ ID NO: 22948 - protein, 13 aa, Homo sapiens
  CDR3 for beta chain variable domain of TCR clone 11474 (TRBV24-1, TRBJ2-2)
CATSDWSTGELFF

SEQ ID NO: 22949 - protein, 14 aa, Homo sapiens
  CDR3 for alpha chain variable domain of TCR clone 11475 (TRAV12-1, TRAJ17)
CVVNYKAAGNKLTF

SEQ ID NO: 22950 - protein, 17 aa, Homo sapiens
  CDR3 for beta chain variable domain of TCR clone 11475 (TRBV20-1, TRBJ2-1)
CSASFSGLAGSYNEQFF

SEQ ID NO: 22951 - protein, 11 aa, Homo sapiens
  CDR3 for alpha chain variable domain of TCR clone 11476 (TRAV2, TRAJ27)
CAVSNAGKSTF

SEQ ID NO: 22952 - protein, 14 aa, Homo sapiens
  CDR3 for beta chain variable domain of TCR clone 11476 (TRBV9, TRBJ2-7)
CASSVGVGSYEQYF

SEQ ID NO: 22953 - protein, 11 aa, Homo sapiens
  CDR3 for alpha chain variable domain of TCR clone 11477 (TRAV1-1, TRAJ23)
CAVRQGGKLIF

SEQ ID NO: 22954 - protein, 20 aa, Homo sapiens
  CDR3 for beta chain variable domain of TCR clone 11477 (TRBV7-8, TRBJ2-2)
CASSHLFPGTTIHITGELFF

SEQ ID NO: 22955 - protein, 14 aa, Homo sapiens
  CDR3 for alpha chain variable domain of TCR clone 11478 (TRAV1-2, TRAJ16)
CAVNRFSDGQKLLF

SEQ ID NO: 22956 - protein, 14 aa, Homo sapiens
  CDR3 for beta chain variable domain of TCR clone 11478 (TRBV5-1, TRBJ2-7)
CASSRGESLYEQYF

SEQ ID NO: 22957 - protein, 17 aa, Homo sapiens
  CDR3 for alpha chain variable domain of TCR clone 11479 (TRAV23/DV6, TRAJ57)
CAASSTLSQGGSEKLVF

SEQ ID NO: 22958 - protein, 14 aa, Homo sapiens
  CDR3 for beta chain variable domain of TCR clone 11479 (TRBV7-8, TRBJ2-1)
CASSSQGTYNEQFF

SEQ ID NO: 22959 - protein, 13 aa, Homo sapiens
  CDR3 for alpha chain variable domain of TCR clone 11480 (TRAV21, TRAJ27)
CAALNTNAGKSTF

SEQ ID NO: 22960 - protein, 20 aa, Homo sapiens
  CDR3 for beta chain variable domain of TCR clone 11480 (TRBV7-8, TRBJ2-2)
CASSHLFPGPTIHITGELFF

SEQ ID NO: 22961 - protein, 17 aa, Homo sapiens
  CDR3 for alpha chain variable domain of TCR clone 11481 (TRAV3, TRAJ12)
CAVRDGGRMDSSYKLIF

SEQ ID NO: 22962 - protein, 15 aa, Homo sapiens
  CDR3 for beta chain variable domain of TCR clone 11481 (TRBV5-1, TRBJ2-3)
CASSVTSGSTDTQYF

SEQ ID NO: 22963 - protein, 12 aa, Homo sapiens
  CDR3 for alpha chain variable domain of TCR clone 11482 (TRAV17, TRAJ4)
CATDGGYNKLIF

SEQ ID NO: 22964 - protein, 14 aa, Homo sapiens
  CDR3 for beta chain variable domain of TCR clone 11482 (TRBV7-2, TRBJ2-7)
CASSPKTSFYEQYF

SEQ ID NO: 22965 - protein, 18 aa, Homo sapiens
  CDR3 for alpha chain variable domain of TCR clone 11483 (TRAV21, TRAJ52)
CAVRPSPAGGTSYGKLTF

SEQ ID NO: 22966 - protein, 16 aa, Homo sapiens
  CDR3 for beta chain variable domain of TCR clone 11483 (TRBV12-5, TRBJ2-5)
CASGPRTSGNQETQYF

SEQ ID NO: 22967 - protein, 13 aa, Homo sapiens
  CDR3 for alpha chain variable domain of TCR clone 11484 (TRAV17, TRAJ5)
CAPMDTGRRALAF

SEQ ID NO: 22968 - protein, 15 aa, Homo sapiens
  CDR3 for beta chain variable domain of TCR clone 11484 (TRBV6-6, TRBJ2-5)
CASSPGGGLEETQYF

SEQ ID NO: 22969 - protein, 14 aa, Homo sapiens
  CDR3 for alpha chain variable domain of TCR clone 11485 (TRAV25, TRAJ21)
CADYTTSTNFTLDL

SEQ ID NO: 22970 - protein, 16 aa, Homo sapiens
  CDR3 for beta chain variable domain of TCR clone 11485 (TRBV9, TRBJ2-2)
CASSGPSGTGIGELFF

SEQ ID NO: 22971 - protein, 14 aa, Homo sapiens
  CDR3 for alpha chain variable domain of TCR clone 11486 (TRAV1-2, TRAJ16)
CAVNRFSDGQKLLF

SEQ ID NO: 22972 - protein, 16 aa, Homo sapiens
  CDR3 for beta chain variable domain of TCR clone 11486 (TRBV2, TRBJ2-1)
CASRSPAGGKYNEQFF

SEQ ID NO: 22973 - protein, 14 aa, Homo sapiens
  CDR3 for alpha chain variable domain of TCR clone 11487 (TRAV26-1, TRAJ38)
CIADNAGNNRKLIW

SEQ ID NO: 22974 - protein, 13 aa, Homo sapiens
  CDR3 for beta chain variable domain of TCR clone 11487 (TRBV20-1, TRBJ1-1)
CSARGGGNAEAFF

SEQ ID NO: 22975 - protein, 14 aa, Homo sapiens
  CDR3 for alpha chain variable domain of TCR clone 11488 (TRAV12-3, TRAJ10)
SHLPLTGGGNKLTF

SEQ ID NO: 22976 - protein, 20 aa, Homo sapiens
  CDR3 for beta chain variable domain of TCR clone 11488 (TRBV28, TRBJ2-1)
CASTPIGRSPGLAGGNEQFF

SEQ ID NO: 22977 - protein, 13 aa, Homo sapiens
  CDR3 for alpha chain variable domain of TCR clone 11489 (TRAV21, TRAJ27)
CAVRPGNAGKSTF

SEQ ID NO: 22978 - protein, 14 aa, Homo sapiens
  CDR3 for beta chain variable domain of TCR clone 11489 (TRBV7-6, TRBJ2-3)
CASSLGTVTDTQYF

SEQ ID NO: 22979 - protein, 15 aa, Homo sapiens
  CDR3 for alpha chain variable domain of TCR clone 11490 (TRAV26-1, TRAJ29)
CIVRVEGSGNTPLVS

SEQ ID NO: 22980 - protein, 14 aa, Homo sapiens
  CDR3 for beta chain variable domain of TCR clone 11490 (TRBV18, TRBJ2-5)
CASSPGVSQETQYF

SEQ ID NO: 22981 - protein, 14 aa, Homo sapiens
  CDR3 for alpha chain variable domain of TCR clone 11491 (TRAV1-2, TRAJ16)
CAVNRFSNGQKLLF

SEQ ID NO: 22982 - protein, 15 aa, Homo sapiens
  CDR3 for beta chain variable domain of TCR clone 11491 (TRBV9, TRBJ1-6)
CASSVAGTGDSPLHF

SEQ ID NO: 22983 - protein, 17 aa, Homo sapiens
  CDR3 for alpha chain variable domain of TCR clone 11492 (TRAV4, TRAJ18)
CLVGERSVGSTLGRLYF

SEQ ID NO: 22984 - protein, 15 aa, Homo sapiens
  CDR3 for beta chain variable domain of TCR clone 11492 (TRBV10-3, TRBJ2-3)
CAISLTSGGTDTQYF

SEQ ID NO: 22985 - protein, 16 aa, Homo sapiens
  CDR3 for alpha chain variable domain of TCR clone 11493 (TRAV21, TRAJ37)
CAVRTAGSGNTGKLIF

SEQ ID NO: 22986 - protein, 13 aa, Homo sapiens
  CDR3 for beta chain variable domain of TCR clone 11493 (TRBV7-9, TRBJ2-5)
CASLPSGRETQYF

SEQ ID NO: 22987 - protein, 13 aa, Homo sapiens
  CDR3 for alpha chain variable domain of TCR clone 11494 (TRAV13-1, TRAJ54)
CAASSQGAQKLVF

SEQ ID NO: 22988 - protein, 14 aa, Homo sapiens
  CDR3 for beta chain variable domain of TCR clone 11494 (TRBV12-4, TRBJ1-1)
CASSLGAGFTEAFF

SEQ ID NO: 22989 - protein, 12 aa, Homo sapiens
  CDR3 for alpha chain variable domain of TCR clone 11495 (TRAV2, TRAJ3)
CAVRSSASKIIF

SEQ ID NO: 22990 - protein, 15 aa, Homo sapiens
  CDR3 for beta chain variable domain of TCR clone 11495 (TRBV5-1, TRBJ2-5)
CASSFKGGDQETQYF

SEQ ID NO: 22991 - protein, 16 aa, Homo sapiens
  CDR3 for alpha chain variable domain of TCR clone 11496 (TRAV30, TRAJ24)
CGTEIVDADSWGKFQF

SEQ ID NO: 22992 - protein, 15 aa, Homo sapiens
  CDR3 for beta chain variable domain of TCR clone 11496 (TRBV7-2, TRBJ2-1)
CASSSGLAGGNEQFF

SEQ ID NO: 22993 - protein, 12 aa, Homo sapiens
  CDR3 for alpha chain variable domain of TCR clone 11497 (TRAV21, TRAJ33)
CAKMDSNYQLIW

SEQ ID NO: 22994 - protein, 14 aa, Homo sapiens
  CDR3 for beta chain variable domain of TCR clone 11497 (TRBV2, TRBJ2-7)
CASSLTSGGYEQYL

SEQ ID NO: 22995 - protein, 14 aa, Homo sapiens
  CDR3 for alpha chain variable domain of TCR clone 11498 (TRAV12-1, TRAJ17)
CVVNYRAAGNKLTF

SEQ ID NO: 22996 - protein, 17 aa, Homo sapiens
  CDR3 for beta chain variable domain of TCR clone 11498 (TRBV20-1, TRBJ2-1)
CSASSSGLAGSYNEQFF

SEQ ID NO: 22997 - protein, 13 aa, Homo sapiens
  CDR3 for alpha chain variable domain of TCR clone 11499 (TRAV1-2, TRAJ12)
CAVSMDSSYKLIF

SEQ ID NO: 22998 - protein, 14 aa, Homo sapiens
  CDR3 for beta chain variable domain of TCR clone 11499 (TRBV7-8, TRBJ1-2)
CASSPDSLSYGYTF

SEQ ID NO: 22999 - protein, 15 aa, Homo sapiens
  CDR3 for alpha chain variable domain of TCR clone 11500 (TRAV21, TRAJ53)
CATLNSGGSNYKLTF

SEQ ID NO: 23000 - protein, 13 aa, Homo sapiens
  CDR3 for beta chain variable domain of TCR clone 11500 (TRBV11-2, TRBJ2-7)
CASSGTRPYEQYF

SEQ ID NO: 23001 - protein, 17 aa, Homo sapiens
  CDR3 for alpha chain variable domain of TCR clone 11501 (TRAV23/DV6, TRAJ9)
CAASLSPPNTGGFKTIF

SEQ ID NO: 23002 - protein, 18 aa, Homo sapiens
  CDR3 for beta chain variable domain of TCR clone 11501 (TRBV4-1, TRBJ2-7)
CASSQDTGAGSGLNEQYF

SEQ ID NO: 23003 - protein, 12 aa, Homo sapiens
  CDR3 for alpha chain variable domain of TCR clone 11502 (TRAV13-1, TRAJ3)
CAPRGDASKIIF

SEQ ID NO: 23004 - protein, 13 aa, Homo sapiens
  CDR3 for beta chain variable domain of TCR clone 11502 (TRBV5-7, TRBJ1-2)
CASSLGTGYGYTF

SEQ ID NO: 23005 - protein, 14 aa, Homo sapiens
  CDR3 for alpha chain variable domain of TCR clone 11503 (TRAV1-2, TRAJ15)
CAVRDRQAGTALIF

SEQ ID NO: 23006 - protein, 14 aa, Homo sapiens
  CDR3 for beta chain variable domain of TCR clone 11503 (TRBV7-2, TRBJ2-7)
CASSPKTSFYEQYF

SEQ ID NO: 23007 - protein, 13 aa, Homo sapiens
  CDR3 for alpha chain variable domain of TCR clone 11504 (TRAV12-2, TRAJ20)
CAVNRLDDYKLSF

SEQ ID NO: 23008 - protein, 12 aa, Homo sapiens
  CDR3 for beta chain variable domain of TCR clone 11504 (TRBV28, TRBJ2-3)
CASSLYRDTQYF

SEQ ID NO: 23009 - protein, 13 aa, Homo sapiens
  CDR3 for alpha chain variable domain of TCR clone 11505 (TRAV21, TRAJ27)
CAARPGNEGKSTF

SEQ ID NO: 23010 - protein, 14 aa, Homo sapiens
  CDR3 for beta chain variable domain of TCR clone 11505 (TRBV7-6, TRBJ2-3)
CASSLGTVTDTQYF

SEQ ID NO: 23011 - protein, 17 aa, Homo sapiens
  CDR3 for alpha chain variable domain of TCR clone 11506 (TRAV3, TRAJ38)
CAVRDCLNAGNNRKLIW

SEQ ID NO: 23012 - protein, 14 aa, Homo sapiens
  CDR3 for beta chain variable domain of TCR clone 11506 (TRBV5-5, TRBJ1-5)
CASSGQGVDQPQHF

SEQ ID NO: 23013 - protein, 22 aa, Homo sapiens
  CDR3 for alpha chain variable domain of TCR clone 11507 (TRAV25, TRAJ13)
TATQTTDVGTFLDSGGYQKVTF

SEQ ID NO: 23014 - protein, 17 aa, Homo sapiens
  CDR3 for beta chain variable domain of TCR clone 11507 (TRBV2, TRBJ1-6)
CASSLRSGGLMTSPLHF

SEQ ID NO: 23015 - protein, 14 aa, Homo sapiens
  CDR3 for alpha chain variable domain of TCR clone 11508 (TRAV8-2, TRAJ4)
CVVGPSGGYNKLIF

SEQ ID NO: 23016 - protein, 15 aa, Homo sapiens
  CDR3 for beta chain variable domain of TCR clone 11508 (TRBV4-1, TRBJ1-4)
CASSDTGGTNEKLFF

SEQ ID NO: 23017 - protein, 11 aa, Homo sapiens
  CDR3 for alpha chain variable domain of TCR clone 11509 (TRAV17, TRAJ43)
CATPRSNGMRF

SEQ ID NO: 23018 - protein, 15 aa, Homo sapiens
  CDR3 for beta chain variable domain of TCR clone 11509 (TRBV11-2, TRBJ2-1)
CASSLGTSGLNEQFF

SEQ ID NO: 23019 - protein, 12 aa, Homo sapiens
  CDR3 for alpha chain variable domain of TCR clone 11510 (TRAV12-1, TRAJ20)
CVVNIDDYKLSF

SEQ ID NO: 23020 - protein, 13 aa, Homo sapiens
  CDR3 for beta chain variable domain of TCR clone 11510 (TRBV7-3, TRBJ2-5)
CASSFRGGETQYF

SEQ ID NO: 23021 - protein, 13 aa, Homo sapiens
  CDR3 for alpha chain variable domain of TCR clone 11511 (TRAV20, TRAJ17)
CAVLRDAGNKLTF

SEQ ID NO: 23022 - protein, 12 aa, Homo sapiens
  CDR3 for beta chain variable domain of TCR clone 11511 (TRBV5-7, TRBJ2-7)
CASSLGRYEQYF

SEQ ID NO: 23023 - protein, 12 aa, Homo sapiens
  CDR3 for alpha chain variable domain of TCR clone 11512 (TRAV14/DV4, TRAJ47)
CAIPGDGNKLVF

SEQ ID NO: 23024 - protein, 14 aa, Homo sapiens
  CDR3 for beta chain variable domain of TCR clone 11512 (TRBV12-5, TRBJ1-3)
CASGPAGSGNTIYF

SEQ ID NO: 23025 - protein, 13 aa, Homo sapiens
  CDR3 for alpha chain variable domain of TCR clone 11513 (TRAV8-4, TRAJ29)
CAVSATGNTPLVF

SEQ ID NO: 23026 - protein, 20 aa, Homo sapiens
  CDR3 for beta chain variable domain of TCR clone 11513 (TRBV11-3, TRBJ2-3)
LGTRPCISVPAAPITDTQYF

SEQ ID NO: 23027 - protein, 12 aa, Homo sapiens
  CDR3 for alpha chain variable domain of TCR clone 11514 (TRAV21, TRAJ33)
CAKMDSNYQLIC

SEQ ID NO: 23028 - protein, 14 aa, Homo sapiens
  CDR3 for beta chain variable domain of TCR clone 11514 (TRBV2, TRBJ2-7)
CASSLTSGGYEQYF

SEQ ID NO: 23029 - protein, 14 aa, Homo sapiens
  CDR3 for alpha chain variable domain of TCR clone 11515 (TRAV17, TRAJ35)
CATDRPGFGNVLHC

SEQ ID NO: 23030 - protein, 18 aa, Homo sapiens
  CDR3 for beta chain variable domain of TCR clone 11515 (TRBV4-3, TRBJ1-6)
CASSQETPASSYNSPLHF

SEQ ID NO: 23031 - protein, 14 aa, Homo sapiens
  CDR3 for alpha chain variable domain of TCR clone 11516 (TRAV29/DV5, TRAJ36)
CAARRKTGANNLFF

SEQ ID NO: 23032 - protein, 13 aa, Homo sapiens
  CDR3 for beta chain variable domain of TCR clone 11516 (TRBV15, TRBJ1-6)
CATSGGLNSPLHF

SEQ ID NO: 23033 - protein, 15 aa, Homo sapiens
  CDR3 for alpha chain variable domain of TCR clone 11517 (TRAV8-2, TRAJ17)
CVVSPFKAAGNKLTF

SEQ ID NO: 23034 - protein, 18 aa, Homo sapiens
  CDR3 for beta chain variable domain of TCR clone 11517 (TRBV28, TRBJ2-5)
CASSFPNFGTGGGETQYF

SEQ ID NO: 23035 - protein, 15 aa, Homo sapiens
  CDR3 for alpha chain variable domain of TCR clone 11518 (TRAV26-1, TRAJ29)
CIVRVEGSGNTPLVF

SEQ ID NO: 23036 - protein, 14 aa, Homo sapiens
  CDR3 for beta chain variable domain of TCR clone 11518 (TRBV18, TRBJ2-5)
CASSPGVSQGTQYF

SEQ ID NO: 23037 - protein, 14 aa, Homo sapiens
  CDR3 for alpha chain variable domain of TCR clone 11519 (TRAV12-3, TRAJ10)
SHLPLTGGGNKLTF

SEQ ID NO: 23038 - protein, 15 aa, Homo sapiens
  CDR3 for beta chain variable domain of TCR clone 11519 (TRBV28, TRBJ2-1)
CASSIIAGGRSEQFF

SEQ ID NO: 23039 - protein, 12 aa, Homo sapiens
  CDR3 for alpha chain variable domain of TCR clone 11520 (TRAV17, TRAJ57)
CATDGGSEKLVL

SEQ ID NO: 23040 - protein, 13 aa, Homo sapiens
  CDR3 for beta chain variable domain of TCR clone 11520 (TRBV7-9, TRBJ2-7)
CASSFAGAYEQYF

SEQ ID NO: 23041 - protein, 14 aa, Homo sapiens
  CDR3 for alpha chain variable domain of TCR clone 11521 (TRAV12-2, TRAJ13)
CAVKKTGGYQKVTF

SEQ ID NO: 23042 - protein, 14 aa, Homo sapiens
  CDR3 for beta chain variable domain of TCR clone 11521 (TRBV7-2, TRBJ2-7)
CASRSQGAAYEQYF

SEQ ID NO: 23043 - protein, 19 aa, Homo sapiens
  CDR3 for alpha chain variable domain of TCR clone 11522 (TRAV1-2, TRAJ26)
CLLPLCCERPDNYGQNFVF

SEQ ID NO: 23044 - protein, 14 aa, Homo sapiens
  CDR3 for beta chain variable domain of TCR clone 11522 (TRBV27, TRBJ2-1)
CASSATGGYNEQFF

SEQ ID NO: 23045 - protein, 13 aa, Homo sapiens
  CDR3 for alpha chain variable domain of TCR clone 11523 (TRAV12-2, TRAJ30)
RAVNLNRDDKIIF

SEQ ID NO: 23046 - protein, 12 aa, Homo sapiens
  CDR3 for beta chain variable domain of TCR clone 11523 (TRBV11-2, TRBJ2-2)
CASSLGGGELFF

SEQ ID NO: 23047 - protein, 13 aa, Homo sapiens
  CDR3 for alpha chain variable domain of TCR clone 11524 (TRAV39, TRAJ58)
CAGEETSGSRLTF

SEQ ID NO: 23048 - protein, 15 aa, Homo sapiens
  CDR3 for beta chain variable domain of TCR clone 11524 (TRBV20-1, TRBJ2-7)
CSARDRVSGMDEQYF

SEQ ID NO: 23049 - protein, 15 aa, Homo sapiens
  CDR3 for alpha chain variable domain of TCR clone 11525 (TRAV27, TRAJ38)
CAARRNAGNNRKLIW

SEQ ID NO: 23050 - protein, 13 aa, Homo sapiens
  CDR3 for beta chain variable domain of TCR clone 11525 (TRBV12-5, TRBJ2-3)
CASGGRQSDTQYF

SEQ ID NO: 23051 - protein, 16 aa, Homo sapiens
  CDR3 for alpha chain variable domain of TCR clone 11526 (TRAV16, TRAJ4)
CALSRMFSGGYNKLIF

SEQ ID NO: 23052 - protein, 16 aa, Homo sapiens
  CDR3 for beta chain variable domain of TCR clone 11526 (TRBV24-1, TRBJ2-3)
CATSGPGTGATDTQYF

SEQ ID NO: 23053 - protein, 15 aa, Homo sapiens
  CDR3 for alpha chain variable domain of TCR clone 11527 (TRAV12-2, TRAJ53)
CAVNGGGGGNYKLTF

SEQ ID NO: 23054 - protein, 14 aa, Homo sapiens
  CDR3 for beta chain variable domain of TCR clone 11527 (TRBV19, TRBJ2-2)
CASSTLHRSGELFF

SEQ ID NO: 23055 - protein, 16 aa, Homo sapiens
  CDR3 for alpha chain variable domain of TCR clone 11528 (TRAV12-3, TRAJ53)
CAMSPVSGGSNYKLTF

SEQ ID NO: 23056 - protein, 11 aa, Homo sapiens
  CDR3 for beta chain variable domain of TCR clone 11528 (TRBV29-1, TRBJ2-5)
CSEDRTGTQYF

SEQ ID NO: 23057 - protein, 12 aa, Homo sapiens
  CDR3 for alpha chain variable domain of TCR clone 11529 (TRAV13-2, TRAJ42)
CAEGGSQGNLIF

SEQ ID NO: 23058 - protein, 13 aa, Homo sapiens
  CDR3 for beta chain variable domain of TCR clone 11529 (TRBV27, TRBJ2-1)
CASSLSRSHEQFF

SEQ ID NO: 23059 - protein, 14 aa, Homo sapiens
  CDR3 for alpha chain variable domain of TCR clone 11530 (TRAV12-2, TRAJ40)
CSVKIPSGTYKYIF

SEQ ID NO: 23060 - protein, 14 aa, Homo sapiens
  CDR3 for beta chain variable domain of TCR clone 11530 (TRBV20-1, TRBJ1-1)
CSAQTRIGGTEAFF

SEQ ID NO: 23061 - protein, 16 aa, Homo sapiens
  CDR3 for alpha chain variable domain of TCR clone 11531 (TRAV26-1, TRAJ53)
CIVRVAMGGSNYKLAF

SEQ ID NO: 23062 - protein, 12 aa, Homo sapiens
  CDR3 for beta chain variable domain of TCR clone 11531 (TRBV7-9, TRBJ1-5)
CASSPQGQPQHF

SEQ ID NO: 23063 - protein, 13 aa, Homo sapiens
  CDR3 for alpha chain variable domain of TCR clone 11532 (TRAV8-3, TRAJ28)
CAVGSVGSYQLTF

SEQ ID NO: 23064 - protein, 14 aa, Homo sapiens
  CDR3 for beta chain variable domain of TCR clone 11532 (TRBV7-2, TRBJ2-7)
CASRSQGAAYEQYF

SEQ ID NO: 23065 - protein, 14 aa, Homo sapiens
  CDR3 for alpha chain variable domain of TCR clone 11533 (TRAV13-1, TRAJ53)
CAASTGGSNYKLTF

SEQ ID NO: 23066 - protein, 14 aa, Homo sapiens
  CDR3 for beta chain variable domain of TCR clone 11533 (TRBV5-4, TRBJ1-4)
CASSFSGGAEKLFF

SEQ ID NO: 23067 - protein, 11 aa, Homo sapiens
  CDR3 for alpha chain variable domain of TCR clone 11534 (TRAV1-2, TRAJ40)
CAVPGTYKYIF

SEQ ID NO: 23068 - protein, 16 aa, Homo sapiens
  CDR3 for beta chain variable domain of TCR clone 11534 (TRBV12-4, TRBJ2-5)
CASSFFVRGRQETQYF

SEQ ID NO: 23069 - protein, 16 aa, Homo sapiens
  CDR3 for alpha chain variable domain of TCR clone 11535 (TRAV30, TRAJ24)
CGTEIVDADIWGKFQF

SEQ ID NO: 23070 - protein, 14 aa, Homo sapiens
  CDR3 for beta chain variable domain of TCR clone 11535 (TRBV12-5, TRBJ2-5)
CASGSRTHQETQYF

SEQ ID NO: 23071 - protein, 15 aa, Homo sapiens
  CDR3 for alpha chain variable domain of TCR clone 11536 (TRAV17, TRAJ57)
CATGPSQGGSEKLVF

SEQ ID NO: 23072 - protein, 15 aa, Homo sapiens
  CDR3 for beta chain variable domain of TCR clone 11536 (TRBV12-4, TRBJ1-5)
CQQPTGRGSNQPQHF

SEQ ID NO: 23073 - protein, 11 aa, Homo sapiens
  CDR3 for alpha chain variable domain of TCR clone 11537 (TRAV26-1, TRAJ37)
CIVRVGRKLIF

SEQ ID NO: 23074 - protein, 16 aa, Homo sapiens
  CDR3 for beta chain variable domain of TCR clone 11537 (TRBV6-6, TRBJ2-3)
CASSYSHAGSTDTQYF

SEQ ID NO: 23075 - protein, 14 aa, Homo sapiens
  CDR3 for alpha chain variable domain of TCR clone 11538 (TRAV12-2, TRAJ13)
CAVRKTGGYQKVTF

SEQ ID NO: 23076 - protein, 14 aa, Homo sapiens
  CDR3 for beta chain variable domain of TCR clone 11538 (TRBV7-3, TRBJ1-1)
CASSLGTGYTEAFF

SEQ ID NO: 23077 - protein, 13 aa, Homo sapiens
  CDR3 for alpha chain variable domain of TCR clone 11539 (TRAV9-2, TRAJ53)
CALRGGSNYKLTF

SEQ ID NO: 23078 - protein, 17 aa, Homo sapiens
  CDR3 for beta chain variable domain of TCR clone 11539 (TRBV11-2, TRBJ2-1)
CASSLYPPGVEYNEQFF

SEQ ID NO: 23079 - protein, 12 aa, Homo sapiens
  CDR3 for alpha chain variable domain of TCR clone 11540 (TRAV12-3, TRAJ17)
CAMTLTGDKLTF

SEQ ID NO: 23080 - protein, 13 aa, Homo sapiens
  CDR3 for beta chain variable domain of TCR clone 11540 (TRBV27, TRBJ2-1)
CASRTLGVGEQFF

SEQ ID NO: 23081 - protein, 12 aa, Homo sapiens
  CDR3 for alpha chain variable domain of TCR clone 11541 (TRAV13-1, TRAJ40)
CAANSGTYKYIF

SEQ ID NO: 23082 - protein, 12 aa, Homo sapiens
  CDR3 for beta chain variable domain of TCR clone 11541 (TRBV12-4, TRBJ2-7)
CASSLGGYEQYF

SEQ ID NO: 23083 - protein, 14 aa, Homo sapiens
  CDR3 for alpha chain variable domain of TCR clone 11542 (TRAV12-2, TRAJ17)
CAVLFKAAGNKLTF

SEQ ID NO: 23084 - protein, 17 aa, Homo sapiens
  CDR3 for beta chain variable domain of TCR clone 11542 (TRBV20-1, TRBJ2-2)
CSVSGSGQGGLTGELFF

SEQ ID NO: 23085 - protein, 13 aa, Homo sapiens
  CDR3 for alpha chain variable domain of TCR clone 11543 (TRAV21, TRAJ57)
CAVTQGGSERLVF

SEQ ID NO: 23086 - protein, 16 aa, Homo sapiens
  CDR3 for beta chain variable domain of TCR clone 11543 (TRBV29-1, TRBJ2-7)
CSVEDAEDGTAYEQYF

SEQ ID NO: 23087 - protein, 18 aa, Homo sapiens
  CDR3 for alpha chain variable domain of TCR clone 11544 (TRAV13-1, TRAJ52)
CAARKRSAGGTSYGKLTF

SEQ ID NO: 23088 - protein, 13 aa, Homo sapiens
  CDR3 for beta chain variable domain of TCR clone 11544 (TRBV12-4, TRBJ1-2)
CASSLRQGKGYTF

SEQ ID NO: 23089 - protein, 15 aa, Homo sapiens
  CDR3 for alpha chain variable domain of TCR clone 11545 (TRAV12-3, TRAJ44)
CAMSGLTGTASKLTF

SEQ ID NO: 23090 - protein, 15 aa, Homo sapiens
  CDR3 for beta chain variable domain of TCR clone 11545 (TRBV20-1, TRBJ2-7)
CSARTPGTITYEQYF

SEQ ID NO: 23091 - protein, 13 aa, Homo sapiens
  CDR3 for alpha chain variable domain of TCR clone 11546 (TRAV2, TRAJ40)
CAVVTSGTYKYIF

SEQ ID NO: 23092 - protein, 14 aa, Homo sapiens
  CDR3 for beta chain variable domain of TCR clone 11546 (TRBV19, TRBJ2-1)
CASPTFVFSGEQFF

SEQ ID NO: 23093 - protein, 17 aa, Homo sapiens
  CDR3 for alpha chain variable domain of TCR clone 11547 (TRAV3, TRAJ6)
CAVRDGPRAGGSYIPTF

SEQ ID NO: 23094 - protein, 14 aa, Homo sapiens
  CDR3 for beta chain variable domain of TCR clone 11547 (TRBV7-2, TRBJ2-7)
CASSPKTSFYEQYC

SEQ ID NO: 23095 - protein, 16 aa, Homo sapiens
  CDR3 for alpha chain variable domain of TCR clone 11548 (TRAV16, TRAJ4)
FALSRMFSGGYNKLIF

SEQ ID NO: 23096 - protein, 16 aa, Homo sapiens
  CDR3 for beta chain variable domain of TCR clone 11548 (TRBV24-1, TRBJ2-3)
CATSDPGTGATDTQYF

SEQ ID NO: 23097 - protein, 14 aa, Homo sapiens
  CDR3 for alpha chain variable domain of TCR clone 11549 (TRAV12-2, TRAJ13)
CAVKKTGGYQKVTF

SEQ ID NO: 23098 - protein, 15 aa, Homo sapiens
  CDR3 for beta chain variable domain of TCR clone 11549 (TRBV5-1, TRBJ2-3)
CASSVTSGSTDTQYF

SEQ ID NO: 23099 - protein, 11 aa, Homo sapiens
  CDR3 for alpha chain variable domain of TCR clone 11550 (TRAV1-2, TRAJ31)
CAVNNNARLMF

SEQ ID NO: 23100 - protein, 15 aa, Homo sapiens
  CDR3 for beta chain variable domain of TCR clone 11550 (TRBV28, TRBJ2-1)
CAGSIIAGGRSEQFF

SEQ ID NO: 23101 - protein, 13 aa, Homo sapiens
  CDR3 for alpha chain variable domain of TCR clone 11551 (TRAV8-3, TRAJ28)
CAVGAVGGYQLTF

SEQ ID NO: 23102 - protein, 15 aa, Homo sapiens
  CDR3 for beta chain variable domain of TCR clone 11551 (TRBV7-9, TRBJ1-5)
CASSQGHQPNQPQHF

SEQ ID NO: 23103 - protein, 14 aa, Homo sapiens
  CDR3 for alpha chain variable domain of TCR clone 11552 (TRAV1-2, TRAJ16)
CAVNRFSDGQKLLF

SEQ ID NO: 23104 - protein, 15 aa, Homo sapiens
  CDR3 for beta chain variable domain of TCR clone 11552 (TRBV7-9, TRBJ1-6)
CASSSPGRGNSPLHY

SEQ ID NO: 23105 - protein, 13 aa, Homo sapiens
  CDR3 for alpha chain variable domain of TCR clone 11553 (TRAV21, TRAJ57)
CAVTQGGSEELVF

SEQ ID NO: 23106 - protein, 16 aa, Homo sapiens
  CDR3 for beta chain variable domain of TCR clone 11553 (TRBV29-1, TRBJ2-7)
CSVEDAEDGTAYEQYF

SEQ ID NO: 23107 - protein, 12 aa, Homo sapiens
  CDR3 for alpha chain variable domain of TCR clone 11554 (TRAV21, TRAJ31)
CVLAGNNARLML

SEQ ID NO: 23108 - protein, 16 aa, Homo sapiens
  CDR3 for beta chain variable domain of TCR clone 11554 (TRBV27, TRBJ2-5)
CASSFGPGGTKETQYF

SEQ ID NO: 23109 - protein, 14 aa, Homo sapiens
  CDR3 for alpha chain variable domain of TCR clone 11555 (TRAV26-1, TRAJ38)
CIADNAGNNRKLIW

SEQ ID NO: 23110 - protein, 16 aa, Homo sapiens
  CDR3 for beta chain variable domain of TCR clone 11555 (TRBV13, TRBJ2-2)
CASSPRTGEHTGELFF

SEQ ID NO: 23111 - protein, 17 aa, Homo sapiens
  CDR3 for alpha chain variable domain of TCR clone 11556 (TRAV3, TRAJ6)
CAVRDGPRAGGSYISTF

SEQ ID NO: 23112 - protein, 14 aa, Homo sapiens
  CDR3 for beta chain variable domain of TCR clone 11556 (TRBV7-2, TRBJ2-7)
CASSPKTSFYEQYF

SEQ ID NO: 23113 - protein, 12 aa, Homo sapiens
  CDR3 for alpha chain variable domain of TCR clone 11557 (TRAV13-2, TRAJ23)
CAERHRGGKLIL

SEQ ID NO: 23114 - protein, 16 aa, Homo sapiens
  CDR3 for beta chain variable domain of TCR clone 11557 (TRBV20-1, TRBJ1-4)
CSAPGQGLLTNEKLFF

SEQ ID NO: 23115 - protein, 14 aa, Homo sapiens
  CDR3 for alpha chain variable domain of TCR clone 11558 (TRAV1-2, TRAJ16)
CAVNRFSDGQKLLF

SEQ ID NO: 23116 - protein, 14 aa, Homo sapiens
  CDR3 for beta chain variable domain of TCR clone 11558 (TRBV6-6, TRBJ1-5)
CASSYGPANQPQHF

SEQ ID NO: 23117 - protein, 15 aa, Homo sapiens
  CDR3 for alpha chain variable domain of TCR clone 11559 (TRAV3, TRAJ22)
CAVRDRGGSARQLTF

SEQ ID NO: 23118 - protein, 12 aa, Homo sapiens
  CDR3 for beta chain variable domain of TCR clone 11559 (TRBV11-2, TRBJ2-2)
CASSLGGGELFF

SEQ ID NO: 23119 - protein, 14 aa, Homo sapiens
  CDR3 for alpha chain variable domain of TCR clone 11560 (TRAV12-2, TRAJ40)
CAVKIPSGTYKYIF

SEQ ID NO: 23120 - protein, 14 aa, Homo sapiens
  CDR3 for beta chain variable domain of TCR clone 11560 (TRBV20-1, TRBJ1-1)
CSAQARIGGTEAFF

SEQ ID NO: 23121 - protein, 14 aa, Homo sapiens
  CDR3 for alpha chain variable domain of TCR clone 11561 (TRAV1-2, TRAJ8)
CAVREDTGFQKLVF

SEQ ID NO: 23122 - protein, 15 aa, Homo sapiens
  CDR3 for beta chain variable domain of TCR clone 11561 (TRBV6-3, TRBJ2-7)
CASSSPGTVFYEQYV

SEQ ID NO: 23123 - protein, 17 aa, Homo sapiens
  CDR3 for alpha chain variable domain of TCR clone 11562 (TRAV14/DV4, TRAJ4)
CAMREASGRGGYNKLIF

SEQ ID NO: 23124 - protein, 12 aa, Homo sapiens
  CDR3 for beta chain variable domain of TCR clone 11562 (TRBV12-4, TRBJ2-7)
CASSLGGYEQYF

SEQ ID NO: 23125 - protein, 15 aa, Homo sapiens
  CDR3 for alpha chain variable domain of TCR clone 11563 (TRAV26-1, TRAJ29)
CIVRVEGSGNTPLVC

SEQ ID NO: 23126 - protein, 15 aa, Homo sapiens
  CDR3 for beta chain variable domain of TCR clone 11563 (TRBV7-9, TRBJ1-5)
CASSQGHQPNQPQHF

SEQ ID NO: 23127 - protein, 15 aa, Homo sapiens
  CDR3 for alpha chain variable domain of TCR clone 11564 (TRAV25, TRAJ52)
CAGTSGGTSYGKLTF

SEQ ID NO: 23128 - protein, 16 aa, Homo sapiens
  CDR3 for beta chain variable domain of TCR clone 11564 (TRBV15, TRBJ1-2)
CATSRGPKTGGGGYTF

SEQ ID NO: 23129 - protein, 11 aa, Homo sapiens
  CDR3 for alpha chain variable domain of TCR clone 11565 (TRAV12-1, TRAJ16)
CVALDGQKLLF

SEQ ID NO: 23130 - protein, 15 aa, Homo sapiens
  CDR3 for beta chain variable domain of TCR clone 11565 (TRBV18, TRBJ1-2)
CASSPPQGLLGGYTF

SEQ ID NO: 23131 - protein, 14 aa, Homo sapiens
  CDR3 for alpha chain variable domain of TCR clone 11566 (TRAV29/DV5, TRAJ36)
CAARRKTGANNLSF

SEQ ID NO: 23132 - protein, 14 aa, Homo sapiens
  CDR3 for beta chain variable domain of TCR clone 11566 (TRBV12-5, TRBJ2-5)
CASGSRTHQETQYF

SEQ ID NO: 23133 - protein, 12 aa, Homo sapiens
  CDR3 for alpha chain variable domain of TCR clone 11567 (TRAV2, TRAJ9)
CAVGAGGFNTIF

SEQ ID NO: 23134 - protein, 16 aa, Homo sapiens
  CDR3 for beta chain variable domain of TCR clone 11567 (TRBV13, TRBJ2-2)
CASSPRTGEHTGELFF

SEQ ID NO: 23135 - protein, 18 aa, Homo sapiens
  CDR3 for alpha chain variable domain of TCR clone 11568 (TRAV21, TRAJ52)
CAVRPSPAGGTSYGKLTF

SEQ ID NO: 23136 - protein, 17 aa, Homo sapiens
  CDR3 for beta chain variable domain of TCR clone 11568 (TRBV13, TRBJ2-3)
CASSLSRVAGGRNTQCF

SEQ ID NO: 23137 - protein, 12 aa, Homo sapiens
  CDR3 for alpha chain variable domain of TCR clone 11569 (TRAV8-3, TRAJ20)
CAVGANDYKLSF

SEQ ID NO: 23138 - protein, 16 aa, Homo sapiens
  CDR3 for beta chain variable domain of TCR clone 11569 (TRBV19, TRBJ2-2)
CASRPPGTGATGELFF

SEQ ID NO: 23139 - protein, 13 aa, Homo sapiens
  CDR3 for alpha chain variable domain of TCR clone 11570 (TRAV22, TRAJ44)
CALNPGTASKLTF

SEQ ID NO: 23140 - protein, 14 aa, Homo sapiens
  CDR3 for beta chain variable domain of TCR clone 11570 (TRBV4-2, TRBJ2-5)
CASSQDRGRETQYF

SEQ ID NO: 23141 - protein, 14 aa, Homo sapiens
  CDR3 for alpha chain variable domain of TCR clone 11571 (TRAV13-1, TRAJ35)
CAASKGGFGNALHC

SEQ ID NO: 23142 - protein, 13 aa, Homo sapiens
  CDR3 for beta chain variable domain of TCR clone 11571 (TRBV7-3, TRBJ1-1)
CASSQDWGAEAFF

SEQ ID NO: 23143 - protein, 12 aa, Homo sapiens
  CDR3 for alpha chain variable domain of TCR clone 11572 (TRAV16, TRAJ8)
CALDKGFQKLVF

SEQ ID NO: 23144 - protein, 15 aa, Homo sapiens
  CDR3 for beta chain variable domain of TCR clone 11572 (TRBV2, TRBJ1-2)
CASRNRESGNYGYTF

SEQ ID NO: 23145 - protein, 12 aa, Homo sapiens
  CDR3 for alpha chain variable domain of TCR clone 11573 (TRAV12-3, TRAJ17)
CAMTLTGNKLTF

SEQ ID NO: 23146 - protein, 17 aa, Homo sapiens
  CDR3 for beta chain variable domain of TCR clone 11573 (TRBV20-1, TRBJ2-2)
CSASGSGQGGLTGELFF

SEQ ID NO: 23147 - protein, 14 aa, Homo sapiens
  CDR3 for alpha chain variable domain of TCR clone 11574 (TRAV4, TRAJ17)
CLVGDMAAGNKLTF

SEQ ID NO: 23148 - protein, 19 aa, Homo sapiens
  CDR3 for beta chain variable domain of TCR clone 11574 (TRBV4-1, TRBJ2-7)
CASSPVAGGGRAVLRAGHQ

SEQ ID NO: 23149 - protein, 13 aa, Homo sapiens
  CDR3 for alpha chain variable domain of TCR clone 11575 (TRAV20, TRAJ37)
CAGCSSNTGKLIF

SEQ ID NO: 23150 - protein, 11 aa, Homo sapiens
  CDR3 for beta chain variable domain of TCR clone 11575 (TRBV12-4, TRBJ2-3)
CASAATDTQYF

SEQ ID NO: 23151 - protein, 16 aa, Homo sapiens
  CDR3 for alpha chain variable domain of TCR clone 11576 (TRAV30, TRAJ24)
CGTEIVDADSWGKFQF

SEQ ID NO: 23152 - protein, 14 aa, Homo sapiens
  CDR3 for beta chain variable domain of TCR clone 11576 (TRBV12-5, TRBJ2-5)
CASGSRTHQETQYC

SEQ ID NO: 23153 - protein, 12 aa, Homo sapiens
  CDR3 for alpha chain variable domain of TCR clone 11577 (TRAV26-2, TRAJ21)
CILKGSFNKFYF

SEQ ID NO: 23154 - protein, 14 aa, Homo sapiens
  CDR3 for beta chain variable domain of TCR clone 11577 (TRBV7-9, TRBJ1-1)
CASTPLQSYTEAFF

SEQ ID NO: 23155 - protein, 15 aa, Homo sapiens
  CDR3 for alpha chain variable domain of TCR clone 11578 (TRAV3, TRAJ5)
FAVRDLDTGRRALTF

SEQ ID NO: 23156 - protein, 13 aa, Homo sapiens
  CDR3 for beta chain variable domain of TCR clone 11578 (TRBV12-4, TRBJ2-7)
CASSPTETYEQYF

SEQ ID NO: 23157 - protein, 12 aa, Homo sapiens
  CDR3 for alpha chain variable domain of TCR clone 11579 (TRAV12-1, TRAJ40)
CVVYSGAYKYIF

SEQ ID NO: 23158 - protein, 18 aa, Homo sapiens
  CDR3 for beta chain variable domain of TCR clone 11579 (TRBV11-2, TRBJ2-3)
CASSLGGASRGAPNTQYF

SEQ ID NO: 23159 - protein, 11 aa, Homo sapiens
  CDR3 for alpha chain variable domain of TCR clone 11580 (TRAV1-2, TRAJ31)
CAVNNNARLVF

SEQ ID NO: 23160 - protein, 15 aa, Homo sapiens
  CDR3 for beta chain variable domain of TCR clone 11580 (TRBV28, TRBJ2-1)
CASSIIAGGRSEQFF

SEQ ID NO: 23161 - protein, 17 aa, Homo sapiens
  CDR3 for alpha chain variable domain of TCR clone 11581 (TRAV26-2, TRAJ42)
CILRDVGYGGSQGNLIF

SEQ ID NO: 23162 - protein, 16 aa, Homo sapiens
  CDR3 for beta chain variable domain of TCR clone 11581 (TRBV6-3, TRBJ2-2)
CASSFSGTDNTGELFF

SEQ ID NO: 23163 - protein, 16 aa, Homo sapiens
  CDR3 for alpha chain variable domain of TCR clone 11582 (TRAV8-2, TRAJ7)
CVVSEGPYYGNNRLAF

SEQ ID NO: 23164 - protein, 16 aa, Homo sapiens
  CDR3 for beta chain variable domain of TCR clone 11582 (TRBV20-1, TRBJ1-4)
CSAPGQGLLTNEKLFF

SEQ ID NO: 23165 - protein, 15 aa, Homo sapiens
  CDR3 for alpha chain variable domain of TCR clone 11583 (TRAV8-4, TRAJ9)
CAVSDLEGGGFKTIF

SEQ ID NO: 23166 - protein, 14 aa, Homo sapiens
  CDR3 for beta chain variable domain of TCR clone 11583 (TRBV7-2, TRBJ2-7)
CASSGLAGRGEQYF

SEQ ID NO: 23167 - protein, 15 aa, Homo sapiens
  CDR3 for alpha chain variable domain of TCR clone 11584 (TRAV26-1, TRAJ29)
RIVRVEGSGNTPLVF

SEQ ID NO: 23168 - protein, 15 aa, Homo sapiens
  CDR3 for beta chain variable domain of TCR clone 11584 (TRBV7-9, TRBJ1-5)
CASSQGHQPNQPQHF

SEQ ID NO: 23169 - protein, 17 aa, Homo sapiens
  CDR3 for alpha chain variable domain of TCR clone 11585 (TRAV17, TRAJ52)
CATDRNAGGTSYGKLTF

SEQ ID NO: 23170 - protein, 16 aa, Homo sapiens
  CDR3 for beta chain variable domain of TCR clone 11585 (TRBV6-1, TRBJ2-5)
CASSETLDRGAETQYF

SEQ ID NO: 23171 - protein, 15 aa, Homo sapiens
  CDR3 for alpha chain variable domain of TCR clone 11586 (TRAV3, TRAJ5)
CAVRDLDTGRRALTF

SEQ ID NO: 23172 - protein, 13 aa, Homo sapiens
  CDR3 for beta chain variable domain of TCR clone 11586 (TRBV12-4, TRBJ2-7)
CASSPTETYERYF

SEQ ID NO: 23173 - protein, 17 aa, Homo sapiens
  CDR3 for alpha chain variable domain of TCR clone 11587 (TRAV26-2, TRAJ42)
CILRDVGYGGSQGNLIF

SEQ ID NO: 23174 - protein, 16 aa, Homo sapiens
  CDR3 for beta chain variable domain of TCR clone 11587 (TRBV12-4, TRBJ2-7)
CASSWIGGTGTYEQYF

SEQ ID NO: 23175 - protein, 13 aa, Homo sapiens
  CDR3 for alpha chain variable domain of TCR clone 11588 (TRAV21, TRAJ57)
CAVTQGGSEKLVF

SEQ ID NO: 23176 - protein, 16 aa, Homo sapiens
  CDR3 for beta chain variable domain of TCR clone 11588 (TRBV29-1, TRBJ2-7)
CSVGDAEDGTAYEQYF

SEQ ID NO: 23177 - protein, 15 aa, Homo sapiens
  CDR3 for alpha chain variable domain of TCR clone 11589 (TRAV29/DV5, TRAJ13)
CAASLNSGGYQKVTF

SEQ ID NO: 23178 - protein, 16 aa, Homo sapiens
  CDR3 for beta chain variable domain of TCR clone 11589 (TRBV28, TRBJ2-7)
CASSSSGTSGSYEQYF

SEQ ID NO: 23179 - protein, 14 aa, Homo sapiens
  CDR3 for alpha chain variable domain of TCR clone 11590 (TRAV12-3, TRAJ10)
SHLPLTGGGNKLTF

SEQ ID NO: 23180 - protein, 12 aa, Homo sapiens
  CDR3 for beta chain variable domain of TCR clone 11590 (TRBV11-2, TRBJ2-2)
CASSLPTGELFF

SEQ ID NO: 23181 - protein, 11 aa, Homo sapiens
  CDR3 for alpha chain variable domain of TCR clone 11591 (TRAV39, TRAJ49)
CAVDISTQFYF

SEQ ID NO: 23182 - protein, 11 aa, Homo sapiens
  CDR3 for beta chain variable domain of TCR clone 11591 (TRBV7-8, TRBJ2-7)
CASSLSREQYF

SEQ ID NO: 23183 - protein, 13 aa, Homo sapiens
  CDR3 for alpha chain variable domain of TCR clone 11592 (TRAV23/DV6, TRAJ17)
CAAAKAAGNKLTF

SEQ ID NO: 23184 - protein, 16 aa, Homo sapiens
  CDR3 for beta chain variable domain of TCR clone 11592 (TRBV5-1, TRBJ2-2)
CASSSRTGGRTGELFF

SEQ ID NO: 23185 - protein, 12 aa, Homo sapiens
  CDR3 for alpha chain variable domain of TCR clone 11593 (TRAV1-1, TRAJ8)
CAGGTGLQKLVF

SEQ ID NO: 23186 - protein, 15 aa, Homo sapiens
  CDR3 for beta chain variable domain of TCR clone 11593 (TRBV7-9, TRBJ1-4)
CASSRTGGFNEKLFF

SEQ ID NO: 23187 - protein, 11 aa, Homo sapiens
  CDR3 for alpha chain variable domain of TCR clone 11594 (TRAV2, TRAJ23)
CAVDTRGKLIF

SEQ ID NO: 23188 - protein, 14 aa, Homo sapiens
  CDR3 for beta chain variable domain of TCR clone 11594 (TRBV2, TRBJ2-3)
CASSEGQNTDTQYF

SEQ ID NO: 23189 - protein, 14 aa, Homo sapiens
  CDR3 for alpha chain variable domain of TCR clone 11595 (TRAV4, TRAJ10)
CTTASCKGGNKLTF

SEQ ID NO: 23190 - protein, 16 aa, Homo sapiens
  CDR3 for beta chain variable domain of TCR clone 11595 (TRBV6-1, TRBJ2-1)
CASILRQGSSYNEQFF

SEQ ID NO: 23191 - protein, 14 aa, Homo sapiens
  CDR3 for alpha chain variable domain of TCR clone 11596 (TRAV29/DV5, TRAJ36)
CAARRKTGANNLFF

SEQ ID NO: 23192 - protein, 17 aa, Homo sapiens
  CDR3 for beta chain variable domain of TCR clone 11596 (TRBV13, TRBJ2-3)
CASSLSRVAGGRNTQYF

SEQ ID NO: 23193 - protein, 10 aa, Homo sapiens
  CDR3 for alpha chain variable domain of TCR clone 11597 (TRAV1-2, TRAJ31)
CAFFDARLMF

SEQ ID NO: 23194 - protein, 12 aa, Homo sapiens
  CDR3 for beta chain variable domain of TCR clone 11597 (TRBV11-2, TRBJ2-2)
CASSLGGGELFF

SEQ ID NO: 23195 - protein, 14 aa, Homo sapiens
  CDR3 for alpha chain variable domain of TCR clone 11598 (TRAV9-2, TRAJ39)
CALYIYNAGNMLTF

SEQ ID NO: 23196 - protein, 15 aa, Homo sapiens
  CDR3 for beta chain variable domain of TCR clone 11598 (TRBV28, TRBJ2-1)
CASSIIAGGRSEQFF

SEQ ID NO: 23197 - protein, 15 aa, Homo sapiens
  CDR3 for alpha chain variable domain of TCR clone 11599 (TRAV26-1, TRAJ29)
CIVRVEGSGNTPLVF

SEQ ID NO: 23198 - protein, 15 aa, Homo sapiens
  CDR3 for beta chain variable domain of TCR clone 11599 (TRBV7-9, TRBJ1-5)
CASSRGHQPNQPQHF

SEQ ID NO: 23199 - protein, 15 aa, Homo sapiens
  CDR3 for alpha chain variable domain of TCR clone 11600 (TRAV27, TRAJ38)
CAARRNAGNNRKLIW

SEQ ID NO: 23200 - protein, 13 aa, Homo sapiens
  CDR3 for beta chain variable domain of TCR clone 11600 (TRBV7-9, TRBJ1-2)
CASSLKQNYGYTF

SEQ ID NO: 23201 - protein, 18 aa, Homo sapiens
  CDR3 for alpha chain variable domain of TCR clone 11601 (TRAV21, TRAJ52)
CAVRPSPAGGTSYGKLTF

SEQ ID NO: 23202 - protein, 17 aa, Homo sapiens
  CDR3 for beta chain variable domain of TCR clone 11601 (TRBV13, TRBJ2-3)
CASSLSRVAGGRNAQYF

SEQ ID NO: 23203 - protein, 15 aa, Homo sapiens
  CDR3 for alpha chain variable domain of TCR clone 11602 (TRAV21, TRAJ24)
CAARSSTDSWGKLQL

SEQ ID NO: 23204 - protein, 13 aa, Homo sapiens
  CDR3 for beta chain variable domain of TCR clone 11602 (TRBV11-2, TRBJ2-5)
CASSSTGEETQYF

SEQ ID NO: 23205 - protein, 16 aa, Homo sapiens
  CDR3 for alpha chain variable domain of TCR clone 11603 (TRAV12-3, TRAJ53)
CALSPGSGGSNYKLTF

SEQ ID NO: 23206 - protein, 11 aa, Homo sapiens
  CDR3 for beta chain variable domain of TCR clone 11603 (TRBV29-1, TRBJ2-5)
CSEDRTGTQYF

SEQ ID NO: 23207 - protein, 14 aa, Homo sapiens
  CDR3 for alpha chain variable domain of TCR clone 11604 (TRAV26-1, TRAJ38)
CIADDAGNNRKLIW

SEQ ID NO: 23208 - protein, 13 aa, Homo sapiens
  CDR3 for beta chain variable domain of TCR clone 11604 (TRBV20-1, TRBJ1-1)
CSARGGGNTEAFF

SEQ ID NO: 23209 - protein, 13 aa, Homo sapiens
  CDR3 for alpha chain variable domain of TCR clone 11605 (TRAV19, TRAJ57)
CALLQGGSEKLVF

SEQ ID NO: 23210 - protein, 14 aa, Homo sapiens
  CDR3 for beta chain variable domain of TCR clone 11605 (TRBV11-1, TRBJ2-7)
CASTFAVPSYEQYF

SEQ ID NO: 23211 - protein, 14 aa, Homo sapiens
  CDR3 for alpha chain variable domain of TCR clone 11606 (TRAV12-3, TRAJ10)
SHLPLTGGGNKLTF

SEQ ID NO: 23212 - protein, 15 aa, Homo sapiens
  CDR3 for beta chain variable domain of TCR clone 11606 (TRBV11-2, TRBJ2-2)
CASSSDRVNAGELFF

SEQ ID NO: 23213 - protein, 13 aa, Homo sapiens
  CDR3 for alpha chain variable domain of TCR clone 11607 (TRAV38-2/DV8, TRAJ34)
CAYRTWNTDKLIF

SEQ ID NO: 23214 - protein, 16 aa, Homo sapiens
  CDR3 for beta chain variable domain of TCR clone 11607 (TRBV20-1, TRBJ1-2)
CSASMGQGVANYGYTF

SEQ ID NO: 23215 - protein, 16 aa, Homo sapiens
  CDR3 for alpha chain variable domain of TCR clone 11608 (TRAV14/DV4, TRAJ53)
CAMREGGGGSNYKLTF

SEQ ID NO: 23216 - protein, 13 aa, Homo sapiens
  CDR3 for beta chain variable domain of TCR clone 11608 (TRBV14, TRBJ1-1)
CASSQEAGTEAFF

SEQ ID NO: 23217 - protein, 13 aa, Homo sapiens
  CDR3 for alpha chain variable domain of TCR clone 11609 (TRAV20, TRAJ42)
CAVQGGSQGNLIF

SEQ ID NO: 23218 - protein, 15 aa, Homo sapiens
  CDR3 for beta chain variable domain of TCR clone 11609 (TRBV9, TRBJ1-6)
CASSVAGTGDSPLHF

SEQ ID NO: 23219 - protein, 16 aa, Homo sapiens
  CDR3 for alpha chain variable domain of TCR clone 11610 (TRAV12-3, TRAJ53)
CAMSPWSGGSNYKLTF

SEQ ID NO: 23220 - protein, 11 aa, Homo sapiens
  CDR3 for beta chain variable domain of TCR clone 11610 (TRBV29-1, TRBJ2-5)
CSEDRTGTQYF

SEQ ID NO: 23221 - protein, 14 aa, Homo sapiens
  CDR3 for alpha chain variable domain of TCR clone 11611 (TRAV16, TRAJ49)
CALSGQSTGNQFYF

SEQ ID NO: 23222 - protein, 15 aa, Homo sapiens
  CDR3 for beta chain variable domain of TCR clone 11611 (TRBV11-1, TRBJ2-1)
CASSLFRDTYNEQFF

SEQ ID NO: 23223 - protein, 12 aa, Homo sapiens
  CDR3 for alpha chain variable domain of TCR clone 11612 (TRAV8-3, TRAJ26)
CAGDNYGQNFVF

SEQ ID NO: 23224 - protein, 14 aa, Homo sapiens
  CDR3 for beta chain variable domain of TCR clone 11612 (TRBV11-2, TRBJ2-3)
CASSRLARTDTQYF

SEQ ID NO: 23225 - protein, 14 aa, Homo sapiens
  CDR3 for alpha chain variable domain of TCR clone 11613 (TRAV12-2, TRAJ4)
CAVSSSGGYNKLIF

SEQ ID NO: 23226 - protein, 14 aa, Homo sapiens
  CDR3 for beta chain variable domain of TCR clone 11613 (TRBV6-1, TRBJ2-7)
CASSERQTTGEQYF

SEQ ID NO: 23227 - protein, 13 aa, Homo sapiens
  CDR3 for alpha chain variable domain of TCR clone 11614 (TRAV20, TRAJ37)
CAGCSSDTGKLIF

SEQ ID NO: 23228 - protein, 11 aa, Homo sapiens
  CDR3 for beta chain variable domain of TCR clone 11614 (TRBV12-4, TRBJ2-3)
CASTATDTQYF

SEQ ID NO: 23229 - protein, 17 aa, Homo sapiens
  CDR3 for alpha chain variable domain of TCR clone 11615 (TRAV3, TRAJ38)
CAVRDCLNAGNNRKLIL

SEQ ID NO: 23230 - protein, 14 aa, Homo sapiens
  CDR3 for beta chain variable domain of TCR clone 11615 (TRBV5-5, TRBJ1-5)
CASSGQGVDQPQHF

SEQ ID NO: 23231 - protein, 14 aa, Homo sapiens
  CDR3 for alpha chain variable domain of TCR clone 11616 (TRAV35, TRAJ33)
CAGSSQDSNYQLIW

SEQ ID NO: 23232 - protein, 15 aa, Homo sapiens
  CDR3 for beta chain variable domain of TCR clone 11616 (TRBV20-1, TRBJ2-7)
CSAESGTSGAYEQYF

SEQ ID NO: 23233 - protein, 10 aa, Homo sapiens
  CDR3 for alpha chain variable domain of TCR clone 11617 (TRAV12-3, TRAJ50)
CAMSAMGNLL

SEQ ID NO: 23234 - protein, 12 aa, Homo sapiens
  CDR3 for beta chain variable domain of TCR clone 11617 (TRBV14, TRBJ2-7)
CASSRLKGEQYF

SEQ ID NO: 23235 - protein, 15 aa, Homo sapiens
  CDR3 for alpha chain variable domain of TCR clone 11618 (TRAV26-1, TRAJ29)
CIVRVEGSGNTPLVF

SEQ ID NO: 23236 - protein, 15 aa, Homo sapiens
  CDR3 for beta chain variable domain of TCR clone 11618 (TRBV7-9, TRBJ1-5)
CASSQGNQPNQPQHF

SEQ ID NO: 23237 - protein, 16 aa, Homo sapiens
  CDR3 for alpha chain variable domain of TCR clone 11619 (TRAV20, TRAJ10)
CAVLRGLTGGGNKLTF

SEQ ID NO: 23238 - protein, 14 aa, Homo sapiens
  CDR3 for beta chain variable domain of TCR clone 11619 (TRBV19, TRBJ1-5)
CASRAPDSFLAQHF

SEQ ID NO: 23239 - protein, 14 aa, Homo sapiens
  CDR3 for alpha chain variable domain of TCR clone 11620 (TRAV20, TRAJ42)
CAVQAGGSQGNPIF

SEQ ID NO: 23240 - protein, 14 aa, Homo sapiens
  CDR3 for beta chain variable domain of TCR clone 11620 (TRBV28, TRBJ1-2)
CASRIQGANYGYTF

SEQ ID NO: 23241 - protein, 11 aa, Homo sapiens
  CDR3 for alpha chain variable domain of TCR clone 11621 (TRAV1-2, TRAJ20)
CAVSNDYKLSF

SEQ ID NO: 23242 - protein, 16 aa, Homo sapiens
  CDR3 for beta chain variable domain of TCR clone 11621 (TRBV27, TRBJ1-1)
CASSLLAGTGETEAFF

SEQ ID NO: 23243 - protein, 16 aa, Homo sapiens
  CDR3 for alpha chain variable domain of TCR clone 11622 (TRAV30, TRAJ24)
CGTEILDADSWGKFQF

SEQ ID NO: 23244 - protein, 14 aa, Homo sapiens
  CDR3 for beta chain variable domain of TCR clone 11622 (TRBV12-5, TRBJ2-5)
CASGSRTHQETQYF

SEQ ID NO: 23245 - protein, 11 aa, Homo sapiens
  CDR3 for alpha chain variable domain of TCR clone 11623 (TRAV12-2, TRAJ26)
CPSQGGQNFVF

SEQ ID NO: 23246 - protein, 11 aa, Homo sapiens
  CDR3 for beta chain variable domain of TCR clone 11623 (TRBV12-4, TRBJ2-3)
CASTATDTQYF

SEQ ID NO: 23247 - protein, 16 aa, Homo sapiens
  CDR3 for alpha chain variable domain of TCR clone 11624 (TRAV8-3, TRAJ8)
CAVPRDGNTGFQKLVF

SEQ ID NO: 23248 - protein, 14 aa, Homo sapiens
  CDR3 for beta chain variable domain of TCR clone 11624 (TRBV11-2, TRBJ2-7)
CASSSTGEGYEQYF

SEQ ID NO: 23249 - protein, 14 aa, Homo sapiens
  CDR3 for alpha chain variable domain of TCR clone 11625 (TRAV2, TRAJ37)
CAVGFTSNTGKLIF

SEQ ID NO: 23250 - protein, 15 aa, Homo sapiens
  CDR3 for beta chain variable domain of TCR clone 11625 (TRBV20-1, TRBJ1-1)
CSASRGVTGNTEAFF

SEQ ID NO: 23251 - protein, 14 aa, Homo sapiens
  CDR3 for alpha chain variable domain of TCR clone 11626 (TRAV13-1, TRAJ40)
CAASMTSGTYKYIF

SEQ ID NO: 23252 - protein, 15 aa, Homo sapiens
  CDR3 for beta chain variable domain of TCR clone 11626 (TRBV28, TRBJ2-1)
CASSIIAGGRSEQFF

SEQ ID NO: 23253 - protein, 15 aa, Homo sapiens
  CDR3 for alpha chain variable domain of TCR clone 11627 (TRAV8-2, TRAJ8)
CVVTDFPTGFQKLVF

SEQ ID NO: 23254 - protein, 16 aa, Homo sapiens
  CDR3 for beta chain variable domain of TCR clone 11627 (TRBV20-1, TRBJ2-4)
CSARAILAGQGDIQYF

SEQ ID NO: 23255 - protein, 15 aa, Homo sapiens
  CDR3 for alpha chain variable domain of TCR clone 11628 (TRAV3, TRAJ5)
CAVRDLDTGRIALTF

SEQ ID NO: 23256 - protein, 13 aa, Homo sapiens
  CDR3 for beta chain variable domain of TCR clone 11628 (TRBV12-4, TRBJ2-7)
CASSPTETYEQYF

SEQ ID NO: 23257 - protein, 14 aa, Homo sapiens
  CDR3 for alpha chain variable domain of TCR clone 11629 (TRAV8-3, TRAJ4)
CAVGAAGGYNKLIL

SEQ ID NO: 23258 - protein, 15 aa, Homo sapiens
  CDR3 for beta chain variable domain of TCR clone 11629 (TRBV6-5, TRBJ2-1)
CASSYDAGAGNEQFF

SEQ ID NO: 23259 - protein, 15 aa, Homo sapiens
  CDR3 for alpha chain variable domain of TCR clone 11630 (TRAV4, TRAJ15)
CLVGDIRRAGTALIF

SEQ ID NO: 23260 - protein, 16 aa, Homo sapiens
  CDR3 for beta chain variable domain of TCR clone 11630 (TRBV12-5, TRBJ2-5)
CASGPRTSGNQETQYF

SEQ ID NO: 23261 - protein, 12 aa, Homo sapiens
  CDR3 for alpha chain variable domain of TCR clone 11631 (TRAV12-1, TRAJ40)
CVVYSGTYKYIF

SEQ ID NO: 23262 - protein, 18 aa, Homo sapiens
  CDR3 for beta chain variable domain of TCR clone 11631 (TRBV11-2, TRBJ2-3)
CASSLEGASRGAPNTQYF

SEQ ID NO: 23263 - protein, 12 aa, Homo sapiens
  CDR3 for alpha chain variable domain of TCR clone 11632 (TRAV13-2, TRAJ8)
CAPWLGFQKLVF

SEQ ID NO: 23264 - protein, 15 aa, Homo sapiens
  CDR3 for beta chain variable domain of TCR clone 11632 (TRBV29-1, TRBJ2-1)
CSGRDRKSSYNEQFF

SEQ ID NO: 23265 - protein, 14 aa, Homo sapiens
  CDR3 for alpha chain variable domain of TCR clone 11633 (TRAV12-2, TRAJ17)
CAVLFKAAGNKLTF

SEQ ID NO: 23266 - protein, 16 aa, Homo sapiens
  CDR3 for beta chain variable domain of TCR clone 11633 (TRBV20-1, TRBJ1-4)
CSAPRQGLLTNEKLFF

SEQ ID NO: 23267 - protein, 14 aa, Homo sapiens
  CDR3 for alpha chain variable domain of TCR clone 11634 (TRAV12-3, TRAJ10)
SHLPLTGGGNKLTF

SEQ ID NO: 23268 - protein, 11 aa, Homo sapiens
  CDR3 for beta chain variable domain of TCR clone 11634 (TRBV12-4, TRBJ2-3)
CASTATDTQYF

SEQ ID NO: 23269 - protein, 14 aa, Homo sapiens
  CDR3 for alpha chain variable domain of TCR clone 11635 (TRAV38-1, TRAJ45)
CAYYSGGGSDGLTF

SEQ ID NO: 23270 - protein, 20 aa, Homo sapiens
  CDR3 for beta chain variable domain of TCR clone 11635 (TRBV28, TRBJ2-1)
CASTPIGRSPGLAGGNEQFF

SEQ ID NO: 23271 - protein, 14 aa, Homo sapiens
  CDR3 for alpha chain variable domain of TCR clone 11636 (TRAV12-3, TRAJ42)
CAMNYGGSQGNLIF

SEQ ID NO: 23272 - protein, 15 aa, Homo sapiens
  CDR3 for beta chain variable domain of TCR clone 11636 (TRBV5-1, TRBJ2-1)
CASSPPRAPYNEQFF

SEQ ID NO: 23273 - protein, 18 aa, Homo sapiens
  CDR3 for alpha chain variable domain of TCR clone 11637 (TRAV13-1, TRAJ52)
CAAKNPNAGGTSYGKLTF

SEQ ID NO: 23274 - protein, 15 aa, Homo sapiens
  CDR3 for beta chain variable domain of TCR clone 11637 (TRBV20-1, TRBJ2-7)
CSAGAGTSGVYEQYF

SEQ ID NO: 23275 - protein, 15 aa, Homo sapiens
  CDR3 for alpha chain variable domain of TCR clone 11638 (TRAV3, TRAJ20)
CAVRDIKLSDYKLRF

SEQ ID NO: 23276 - protein, 15 aa, Homo sapiens
  CDR3 for beta chain variable domain of TCR clone 11638 (TRBV7-9, TRBJ1-6)
CASSSPGRGNSPLHF

SEQ ID NO: 23277 - protein, 13 aa, Homo sapiens
  CDR3 for alpha chain variable domain of TCR clone 11639 (TRAV36/DV7, TRAJ54)
CAVLIQGAQKLVF

SEQ ID NO: 23278 - protein, 12 aa, Homo sapiens
  CDR3 for beta chain variable domain of TCR clone 11639 (TRBV23-1, TRBJ2-1)
MPSGGGGNEQFF

SEQ ID NO: 23279 - protein, 15 aa, Homo sapiens
  CDR3 for alpha chain variable domain of TCR clone 11640 (TRAV3, TRAJ5)
CAVRDLDTGRRALNF

SEQ ID NO: 23280 - protein, 13 aa, Homo sapiens
  CDR3 for beta chain variable domain of TCR clone 11640 (TRBV12-4, TRBJ2-7)
CASSPTETYEQYF

SEQ ID NO: 23281 - protein, 13 aa, Homo sapiens
  CDR3 for alpha chain variable domain of TCR clone 11641 (TRAV17, TRAJ30)
CATDADRDDKIIF

SEQ ID NO: 23282 - protein, 16 aa, Homo sapiens
  CDR3 for beta chain variable domain of TCR clone 11641 (TRBV7-3, TRBJ2-3)
CASSRTASLSTDTQYF

SEQ ID NO: 23283 - protein, 14 aa, Homo sapiens
  CDR3 for alpha chain variable domain of TCR clone 11642 (TRAV25, TRAJ35)
CARRMEGFGNVLHC

SEQ ID NO: 23284 - protein, 13 aa, Homo sapiens
  CDR3 for beta chain variable domain of TCR clone 11642 (TRBV7-2, TRBJ1-4)
CASSLAGLEKLFF

SEQ ID NO: 23285 - protein, 12 aa, Homo sapiens
  CDR3 for alpha chain variable domain of TCR clone 11643 (TRAV12-3, TRAJ17)
CAMTLTGNKLTF

SEQ ID NO: 23286 - protein, 15 aa, Homo sapiens
  CDR3 for beta chain variable domain of TCR clone 11643 (TRBV28, TRBJ2-1)
CASSIIAGGRSEQFF

SEQ ID NO: 23287 - protein, 14 aa, Homo sapiens
  CDR3 for alpha chain variable domain of TCR clone 11644 (TRAV12-2, TRAJ45)
CAVYSGGGADGLTF

SEQ ID NO: 23288 - protein, 17 aa, Homo sapiens
  CDR3 for beta chain variable domain of TCR clone 11644 (TRBV3-1, TRBJ2-2)
CASSQFRDKVDTGELFF

SEQ ID NO: 23289 - protein, 13 aa, Homo sapiens
  CDR3 for alpha chain variable domain of TCR clone 11645 (TRAV8-3, TRAJ28)
CAVGAVGSYQLTF

SEQ ID NO: 23290 - protein, 14 aa, Homo sapiens
  CDR3 for beta chain variable domain of TCR clone 11645 (TRBV7-2, TRBJ2-7)
CASGSQGAAYEQYF

SEQ ID NO: 23291 - protein, 14 aa, Homo sapiens
  CDR3 for alpha chain variable domain of TCR clone 11646 (TRAV1-2, TRAJ8)
CAVREDTGFQKLVF

SEQ ID NO: 23292 - protein, 13 aa, Homo sapiens
  CDR3 for beta chain variable domain of TCR clone 11646 (TRBV12-4, TRBJ2-5)
CASSPGTEETQYF

SEQ ID NO: 23293 - protein, 14 aa, Homo sapiens
  CDR3 for alpha chain variable domain of TCR clone 11647 (TRAV9-2, TRAJ39)
CALYIYNAGNMLTF

SEQ ID NO: 23294 - protein, 11 aa, Homo sapiens
  CDR3 for beta chain variable domain of TCR clone 11647 (TRBV6-3, TRBJ2-3)
CATGQADTQYF

SEQ ID NO: 23295 - protein, 15 aa, Homo sapiens
  CDR3 for alpha chain variable domain of TCR clone 11648 (TRAV3, TRAJ5)
CAVRDLDTGRRALTF

SEQ ID NO: 23296 - protein, 13 aa, Homo sapiens
  CDR3 for beta chain variable domain of TCR clone 11648 (TRBV12-4, TRBJ2-7)
CASSLTETYEQYF

SEQ ID NO: 23297 - protein, 15 aa, Homo sapiens
  CDR3 for alpha chain variable domain of TCR clone 11649 (TRAV17, TRAJ57)
CATGPPQGGSEKLVF

SEQ ID NO: 23298 - protein, 16 aa, Homo sapiens
  CDR3 for beta chain variable domain of TCR clone 11649 (TRBV12-4, TRBJ1-5)
CASSRPVGGSNQPQHF

SEQ ID NO: 23299 - protein, 13 aa, Homo sapiens
  CDR3 for alpha chain variable domain of TCR clone 11650 (TRAV2, TRAJ40)
CAVVTSGTYKYIF

SEQ ID NO: 23300 - protein, 14 aa, Homo sapiens
  CDR3 for beta chain variable domain of TCR clone 11650 (TRBV19, TRBJ2-1)
CASPTFVLSGEQVF

SEQ ID NO: 23301 - protein, 12 aa, Homo sapiens
  CDR3 for alpha chain variable domain of TCR clone 11651 (TRAV13-2, TRAJ23)
CAERHRGGKLIF

SEQ ID NO: 23302 - protein, 15 aa, Homo sapiens
  CDR3 for beta chain variable domain of TCR clone 11651 (TRBV12-4, TRBJ2-5)
CASSPPAGLQETQYF

SEQ ID NO: 23303 - protein, 11 aa, Homo sapiens
  CDR3 for alpha chain variable domain of TCR clone 11652 (TRAV3, TRAJ21)
CAVGNFNKFYF

SEQ ID NO: 23304 - protein, 16 aa, Homo sapiens
  CDR3 for beta chain variable domain of TCR clone 11652 (TRBV19, TRBJ2-1)
CAISKAGPSSYNEQFF

SEQ ID NO: 23305 - protein, 14 aa, Homo sapiens
  CDR3 for alpha chain variable domain of TCR clone 11653 (TRAV1-2, TRAJ16)
CAVNRFSDGKKLLF

SEQ ID NO: 23306 - protein, 15 aa, Homo sapiens
  CDR3 for beta chain variable domain of TCR clone 11653 (TRBV7-9, TRBJ1-6)
CASSSPGRGNSPLHF

SEQ ID NO: 23307 - protein, 14 aa, Homo sapiens
  CDR3 for alpha chain variable domain of TCR clone 11654 (TRAV1-1, TRAJ28)
CAAPSGAGSYQLTF

SEQ ID NO: 23308 - protein, 12 aa, Homo sapiens
  CDR3 for beta chain variable domain of TCR clone 11654 (TRBV7-3, TRBJ2-1)
CASSFINNEQFF

SEQ ID NO: 23309 - protein, 14 aa, Homo sapiens
  CDR3 for alpha chain variable domain of TCR clone 11655 (TRAV1-2, TRAJ16)
CAVNRFSDGQKLLF

SEQ ID NO: 23310 - protein, 15 aa, Homo sapiens
  CDR3 for beta chain variable domain of TCR clone 11655 (TRBV7-3, TRBJ2-1)
CASSPTGGGEVEQFF

SEQ ID NO: 23311 - protein, 12 aa, Homo sapiens
  CDR3 for alpha chain variable domain of TCR clone 11656 (TRAV8-3, TRAJ26)
CAGDNYGQNFVF

SEQ ID NO: 23312 - protein, 13 aa, Homo sapiens
  CDR3 for beta chain variable domain of TCR clone 11656 (TRBV27, TRBJ1-1)
CASSLSIGAEAFF

SEQ ID NO: 23313 - protein, 13 aa, Homo sapiens
  CDR3 for alpha chain variable domain of TCR clone 11657 (TRAV3, TRAJ21)
CAVREPDFNKFYF

SEQ ID NO: 23314 - protein, 13 aa, Homo sapiens
  CDR3 for beta chain variable domain of TCR clone 11657 (TRBV7-2, TRBJ2-5)
CASSQTSVETQYF

SEQ ID NO: 23315 - protein, 13 aa, Homo sapiens
  CDR3 for alpha chain variable domain of TCR clone 11658 (TRAV24, TRAJ5)
CACCGAGRRALTF

SEQ ID NO: 23316 - protein, 18 aa, Homo sapiens
  CDR3 for beta chain variable domain of TCR clone 11658 (TRBV4-3, TRBJ2-6)
CASSQDIQGGPGANVLTF

SEQ ID NO: 23317 - protein, 11 aa, Homo sapiens
  CDR3 for alpha chain variable domain of TCR clone 11659 (TRAV2, TRAJ13)
CASGGYQEVTF

SEQ ID NO: 23318 - protein, 16 aa, Homo sapiens
  CDR3 for beta chain variable domain of TCR clone 11659 (TRBV6-1, TRBJ2-5)
CASSETLDRGAETQYF

SEQ ID NO: 23319 - protein, 15 aa, Homo sapiens
  CDR3 for alpha chain variable domain of TCR clone 11660 (TRAV1-2, TRAJ3)
CAVRGGYSSASKIIF

SEQ ID NO: 23320 - protein, 16 aa, Homo sapiens
  CDR3 for beta chain variable domain of TCR clone 11660 (TRBV5-1, TRBJ2-5)
CASSLSLAGAQETQYF

SEQ ID NO: 23321 - protein, 11 aa, Homo sapiens
  CDR3 for alpha chain variable domain of TCR clone 11661 (TRAV23/DV6, TRAJ58)
CAARLLRGETS

SEQ ID NO: 23322 - protein, 13 aa, Homo sapiens
  CDR3 for beta chain variable domain of TCR clone 11661 (TRBV11-2, TRBJ2-5)
CASSRGPSETQYF

SEQ ID NO: 23323 - protein, 14 aa, Homo sapiens
  CDR3 for alpha chain variable domain of TCR clone 11662 (TRAV1-2, TRAJ16)
CAVNRFSDGQKLLF

SEQ ID NO: 23324 - protein, 15 aa, Homo sapiens
  CDR3 for beta chain variable domain of TCR clone 11662 (TRBV9, TRBJ1-6)
CASSVAGTGDSPLHC

SEQ ID NO: 23325 - protein, 11 aa, Homo sapiens
  CDR3 for alpha chain variable domain of TCR clone 11663 (TRAV17, TRAJ31)
CATSNNARLMF

SEQ ID NO: 23326 - protein, 15 aa, Homo sapiens
  CDR3 for beta chain variable domain of TCR clone 11663 (TRBV5-1, TRBJ2-3)
CASSVTSGSTDTQYF

SEQ ID NO: 23327 - protein, 19 aa, Homo sapiens
  CDR3 for alpha chain variable domain of TCR clone 11664 (TRAV29/DV5, TRAJ49)
CSVLLCSKLTVDTGNQFYF

SEQ ID NO: 23328 - protein, 16 aa, Homo sapiens
  CDR3 for beta chain variable domain of TCR clone 11664 (TRBV7-3, TRBJ2-2)
CASSLKRGTLSGELFF

SEQ ID NO: 23329 - protein, 17 aa, Homo sapiens
  CDR3 for alpha chain variable domain of TCR clone 11665 (TRAV3, TRAJ12)
CAVRDGGRMDSSYKLIF

SEQ ID NO: 23330 - protein, 17 aa, Homo sapiens
  CDR3 for beta chain variable domain of TCR clone 11665 (TRBV11-2, TRBJ2-1)
CASSLYPPGVEYNEQFF

SEQ ID NO: 23331 - protein, 13 aa, Homo sapiens
  CDR3 for alpha chain variable domain of TCR clone 11666 (TRAV21, TRAJ57)
CAVTQGGSEKLVL

SEQ ID NO: 23332 - protein, 11 aa, Homo sapiens
  CDR3 for beta chain variable domain of TCR clone 11666 (TRBV11-2, TRBJ2-2)
CASSLPGELFF

SEQ ID NO: 23333 - protein, 15 aa, Homo sapiens
  CDR3 for alpha chain variable domain of TCR clone 11667 (TRAV17, TRAJ57)
CATGPSQGGSEKLVL

SEQ ID NO: 23334 - protein, 14 aa, Homo sapiens
  CDR3 for beta chain variable domain of TCR clone 11667 (TRBV12-5, TRBJ2-5)
CASGSRTHQETQYF

SEQ ID NO: 23335 - protein, 14 aa, Homo sapiens
  CDR3 for alpha chain variable domain of TCR clone 11668 (TRAV12-3, TRAJ10)
SHLPPTGGGNKLTF

SEQ ID NO: 23336 - protein, 17 aa, Homo sapiens
  CDR3 for beta chain variable domain of TCR clone 11668 (TRBV28, TRBJ2-5)
CASSTPEGDALQETQYF

SEQ ID NO: 23337 - protein, 17 aa, Homo sapiens
  CDR3 for alpha chain variable domain of TCR clone 11669 (TRAV8-6, TRAJ58)
CAVSSWVGETSGSRLTF

SEQ ID NO: 23338 - protein, 14 aa, Homo sapiens
  CDR3 for beta chain variable domain of TCR clone 11669 (TRBV19, TRBJ1-4)
CASSMGRHNEKLFF

SEQ ID NO: 23339 - protein, 13 aa, Homo sapiens
  CDR3 for alpha chain variable domain of TCR clone 11670 (TRAV13-2, TRAJ48)
CAEMDFGNEKLTF

SEQ ID NO: 23340 - protein, 16 aa, Homo sapiens
  CDR3 for beta chain variable domain of TCR clone 11670 (TRBV7-9, TRBJ2-1)
CASSDVAGGSYNEQFF

SEQ ID NO: 23341 - protein, 14 aa, Homo sapiens
  CDR3 for alpha chain variable domain of TCR clone 11671 (TRAV29/DV5, TRAJ36)
CAARRKTGANSLFF

SEQ ID NO: 23342 - protein, 14 aa, Homo sapiens
  CDR3 for beta chain variable domain of TCR clone 11671 (TRBV12-5, TRBJ2-5)
CASGSRTHQETQYF

SEQ ID NO: 23343 - protein, 16 aa, Homo sapiens
  CDR3 for alpha chain variable domain of TCR clone 11672 (TRAV12-2, TRAJ32)
CAVNLGQGGATNKPIF

SEQ ID NO: 23344 - protein, 15 aa, Homo sapiens
  CDR3 for beta chain variable domain of TCR clone 11672 (TRBV20-1, TRBJ2-7)
CSARGPLAGGREQYF

SEQ ID NO: 23345 - protein, 14 aa, Homo sapiens
  CDR3 for alpha chain variable domain of TCR clone 11673 (TRAV8-2, TRAJ4)
CVVSPSGGYNKLIF

SEQ ID NO: 23346 - protein, 16 aa, Homo sapiens
  CDR3 for beta chain variable domain of TCR clone 11673 (TRBV15, TRBJ2-7)
CATSARQARSSYEQYF

SEQ ID NO: 23347 - protein, 14 aa, Homo sapiens
  CDR3 for alpha chain variable domain of TCR clone 11674 (TRAV1-2, TRAJ8)
CAVREDTGFQKLVF

SEQ ID NO: 23348 - protein, 14 aa, Homo sapiens
  CDR3 for beta chain variable domain of TCR clone 11674 (TRBV4-2, TRBJ2-1)
CASGLDRAYNEQFF

SEQ ID NO: 23349 - protein, 21 aa, Homo sapiens
  CDR3 for alpha chain variable domain of TCR clone 11675 (TRAV1-1, TRAJ6)
CLLLLRCERLERTGGSYIPTF

SEQ ID NO: 23350 - protein, 17 aa, Homo sapiens
  CDR3 for beta chain variable domain of TCR clone 11675 (TRBV20-1, TRBJ2-3)
CSARGTGGPTGTDTQYF

SEQ ID NO: 23351 - protein, 15 aa, Homo sapiens
  CDR3 for alpha chain variable domain of TCR clone 11676 (TRAV34, TRAJ38)
CGADFTPGNNRKLIW

SEQ ID NO: 23352 - protein, 19 aa, Homo sapiens
  CDR3 for beta chain variable domain of TCR clone 11676 (TRBV2, TRBJ2-7)
CASSDDETSGRANDYEQYF

SEQ ID NO: 23353 - protein, 14 aa, Homo sapiens
  CDR3 for alpha chain variable domain of TCR clone 11677 (TRAV12-3, TRAJ9)
CAMSPNTGGFKTIF

SEQ ID NO: 23354 - protein, 13 aa, Homo sapiens
  CDR3 for beta chain variable domain of TCR clone 11677 (TRBV4-2, TRBJ1-1)
CASSQAGNTEAFF

SEQ ID NO: 23355 - protein, 15 aa, Homo sapiens
  CDR3 for alpha chain variable domain of TCR clone 11678 (TRAV26-1, TRAJ22)
CIVRVSFWFCKAADL

SEQ ID NO: 23356 - protein, 13 aa, Homo sapiens
  CDR3 for beta chain variable domain of TCR clone 11678 (TRBV7-9, TRBJ1-2)
CASSLKQNYGYTF

SEQ ID NO: 23357 - protein, 10 aa, Homo sapiens
  CDR3 for alpha chain variable domain of TCR clone 11679 (TRAV23/DV6, TRAJ57)
CAASSTLSQG

SEQ ID NO: 23358 - protein, 16 aa, Homo sapiens
  CDR3 for beta chain variable domain of TCR clone 11679 (TRBV12-4, TRBJ1-5)
CASSRPVGGSNQPQHF

SEQ ID NO: 23359 - protein, 16 aa, Homo sapiens
  CDR3 for alpha chain variable domain of TCR clone 11680 (TRAV30, TRAJ24)
CGTEIVDADSWGKFQF

SEQ ID NO: 23360 - protein, 14 aa, Homo sapiens
  CDR3 for beta chain variable domain of TCR clone 11680 (TRBV12-5, TRBJ2-5)
CASGSRTHQKTQYF

SEQ ID NO: 23361 - protein, 15 aa, Homo sapiens
  CDR3 for alpha chain variable domain of TCR clone 11681 (TRAV14/DV4, TRAJ28)
CAKLFSGAGSYQLTF

SEQ ID NO: 23362 - protein, 13 aa, Homo sapiens
  CDR3 for beta chain variable domain of TCR clone 11681 (TRBV12-4, TRBJ2-7)
CASSFVPTAEQYF

SEQ ID NO: 23363 - protein, 13 aa, Homo sapiens
  CDR3 for alpha chain variable domain of TCR clone 11682 (TRAV17, TRAJ54)
CATDLWGAQKLVF

SEQ ID NO: 23364 - protein, 12 aa, Homo sapiens
  CDR3 for beta chain variable domain of TCR clone 11682 (TRBV7-2, TRBJ2-1)
CASSLRQNEQFF

SEQ ID NO: 23365 - protein, 14 aa, Homo sapiens
  CDR3 for alpha chain variable domain of TCR clone 11683 (TRAV38-1, TRAJ40)
CALRPTSGTYKYIF

SEQ ID NO: 23366 - protein, 14 aa, Homo sapiens
  CDR3 for beta chain variable domain of TCR clone 11683 (TRBV25-1, TRBJ1-1)
CASTHLGGNTEAFL

SEQ ID NO: 23367 - protein, 15 aa, Homo sapiens
  CDR3 for alpha chain variable domain of TCR clone 11684 (TRAV12-2, TRAJ53)
CAVNGGGGSNYKLTF

SEQ ID NO: 23368 - protein, 16 aa, Homo sapiens
  CDR3 for beta chain variable domain of TCR clone 11684 (TRBV4-1, TRBJ1-2)
CASSQDAGQVLYGYTF

SEQ ID NO: 23369 - protein, 12 aa, Homo sapiens
  CDR3 for alpha chain variable domain of TCR clone 11685 (TRAV12-1, TRAJ40)
CVVYSGTYKYIF

SEQ ID NO: 23370 - protein, 18 aa, Homo sapiens
  CDR3 for beta chain variable domain of TCR clone 11685 (TRBV11-2, TRBJ2-3)
CACSLGGASRGAPNTQYF

SEQ ID NO: 23371 - protein, 15 aa, Homo sapiens
  CDR3 for alpha chain variable domain of TCR clone 11686 (TRAV8-3, TRAJ23)
CAVGDRYNQGGKLIF

SEQ ID NO: 23372 - protein, 13 aa, Homo sapiens
  CDR3 for beta chain variable domain of TCR clone 11686 (TRBV20-1, TRBJ2-1)
CSARPPPGNEQFF

SEQ ID NO: 23373 - protein, 12 aa, Homo sapiens
  CDR3 for alpha chain variable domain of TCR clone 11687 (TRAV12-3, TRAJ17)
CAMTLTGNKPTF

SEQ ID NO: 23374 - protein, 15 aa, Homo sapiens
  CDR3 for beta chain variable domain of TCR clone 11687 (TRBV20-1, TRBJ2-7)
CSARDWVSGMDEQYF

SEQ ID NO: 23375 - protein, 15 aa, Homo sapiens
  CDR3 for alpha chain variable domain of TCR clone 11688 (TRAV27, TRAJ38)
CTARRNAGNNRKLIW

SEQ ID NO: 23376 - protein, 13 aa, Homo sapiens
  CDR3 for beta chain variable domain of TCR clone 11688 (TRBV12-5, TRBJ2-3)
CASGDRQSDTQYF

SEQ ID NO: 23377 - protein, 13 aa, Homo sapiens
  CDR3 for alpha chain variable domain of TCR clone 11689 (TRAV1-1, TRAJ21)
CAVAGIQLQQILL

SEQ ID NO: 23378 - protein, 14 aa, Homo sapiens
  CDR3 for beta chain variable domain of TCR clone 11689 (TRBV7-2, TRBJ2-3)
CASSLEGRTDTQYF

SEQ ID NO: 23379 - protein, 15 aa, Homo sapiens
  CDR3 for alpha chain variable domain of TCR clone 11690 (TRAV34, TRAJ38)
CGADFTPGNNRKLIW

SEQ ID NO: 23380 - protein, 15 aa, Homo sapiens
  CDR3 for beta chain variable domain of TCR clone 11690 (TRBV5-5, TRBJ1-5)
CASSLKGGGEQPQHF

SEQ ID NO: 23381 - protein, 14 aa, Homo sapiens
  CDR3 for alpha chain variable domain of TCR clone 11691 (TRAV21, TRAJ35)
CAAMPIGFGNVLHC

SEQ ID NO: 23382 - protein, 12 aa, Homo sapiens
  CDR3 for beta chain variable domain of TCR clone 11691 (TRBV7-9, TRBJ2-7)
CASSIKREEQYF

SEQ ID NO: 23383 - protein, 12 aa, Homo sapiens
  CDR3 for alpha chain variable domain of TCR clone 11692 (TRAV12-3, TRAJ17)
CAMTLTGNKLTF

SEQ ID NO: 23384 - protein, 15 aa, Homo sapiens
  CDR3 for beta chain variable domain of TCR clone 11692 (TRBV20-1, TRBJ2-7)
CSARDRVSGMDEQSF

SEQ ID NO: 23385 - protein, 13 aa, Homo sapiens
  CDR3 for alpha chain variable domain of TCR clone 11693 (TRAV1-2, TRAJ9)
CAALNTGGFKTIF

SEQ ID NO: 23386 - protein, 13 aa, Homo sapiens
  CDR3 for beta chain variable domain of TCR clone 11693 (TRBV19, TRBJ1-2)
CASSAPGQDGYTF

SEQ ID NO: 23387 - protein, 14 aa, Homo sapiens
  CDR3 for alpha chain variable domain of TCR clone 11694 (TRAV12-2, TRAJ4)
CAEDLSGGYNKLIF

SEQ ID NO: 23388 - protein, 10 aa, Homo sapiens
  CDR3 for beta chain variable domain of TCR clone 11694 (TRBV7-9, TRBJ1-2)
CASSLKQNYG

SEQ ID NO: 23389 - protein, 13 aa, Homo sapiens
  CDR3 for alpha chain variable domain of TCR clone 11695 (TRAV35, TRAJ43)
CAGYPYNNNDIRF

SEQ ID NO: 23390 - protein, 15 aa, Homo sapiens
  CDR3 for beta chain variable domain of TCR clone 11695 (TRBV25-1, TRBJ1-4)
CASSKRIATNEKLFF

SEQ ID NO: 23391 - protein, 13 aa, Homo sapiens
  CDR3 for alpha chain variable domain of TCR clone 11696 (TRAV3, TRAJ27)
CAVRPLGAGKSTF

SEQ ID NO: 23392 - protein, 13 aa, Homo sapiens
  CDR3 for beta chain variable domain of TCR clone 11696 (TRBV7-9, TRBJ2-3)
CASSPGSTDTQYL

SEQ ID NO: 23393 - protein, 15 aa, Homo sapiens
  CDR3 for alpha chain variable domain of TCR clone 11697 (TRAV12-2, TRAJ43)
CAFDMRFGAGTRLTV

SEQ ID NO: 23394 - protein, 14 aa, Homo sapiens
  CDR3 for beta chain variable domain of TCR clone 11697 (TRBV20-1, TRBJ2-3)
RTSGGPGTTDTQYF

SEQ ID NO: 23395 - protein, 14 aa, Homo sapiens
  CDR3 for alpha chain variable domain of TCR clone 11698 (TRAV1-2, TRAJ16)
CAVNRFSDGQKLLF

SEQ ID NO: 23396 - protein, 13 aa, Homo sapiens
  CDR3 for beta chain variable domain of TCR clone 11698 (TRBV7-3, TRBJ2-1)
CASSPGSYNEQFF

SEQ ID NO: 23397 - protein, 14 aa, Homo sapiens
  CDR3 for alpha chain variable domain of TCR clone 11699 (TRAV12-2, TRAJ17)
CAVLFNAAGNKLTF

SEQ ID NO: 23398 - protein, 17 aa, Homo sapiens
  CDR3 for beta chain variable domain of TCR clone 11699 (TRBV20-1, TRBJ2-2)
CSASGSGQGGLTGELFF

SEQ ID NO: 23399 - protein, 11 aa, Homo sapiens
  CDR3 for alpha chain variable domain of TCR clone 11700 (TRAV2, TRAJ33)
CAVESNYQLIW

SEQ ID NO: 23400 - protein, 15 aa, Homo sapiens
  CDR3 for beta chain variable domain of TCR clone 11700 (TRBV19, TRBJ1-1)
CASTSGQIQSTEAFF

SEQ ID NO: 23401 - protein, 12 aa, Homo sapiens
  CDR3 for alpha chain variable domain of TCR clone 11701 (TRAV12-3, TRAJ17)
CAMTLTGNKLTL

SEQ ID NO: 23402 - protein, 15 aa, Homo sapiens
  CDR3 for beta chain variable domain of TCR clone 11701 (TRBV5-7, TRBJ2-7)
CASSPYFEGSYEQYF

SEQ ID NO: 23403 - protein, 15 aa, Homo sapiens
  CDR3 for alpha chain variable domain of TCR clone 11702 (TRAV12-1, TRAJ45)
CVVLSGGGGADGLTV

SEQ ID NO: 23404 - protein, 12 aa, Homo sapiens
  CDR3 for beta chain variable domain of TCR clone 11702 (TRBV12-5, TRBJ2-5)
CASGQGVETQYF

SEQ ID NO: 23405 - protein, 15 aa, Homo sapiens
  CDR3 for alpha chain variable domain of TCR clone 11703 (TRAV8-4, TRAJ13)
CAVSDRGGGYQKVTF

SEQ ID NO: 23406 - protein, 16 aa, Homo sapiens
  CDR3 for beta chain variable domain of TCR clone 11703 (TRBV6-4, TRBJ1-2)
CASSEAVGDPNYGYTF

SEQ ID NO: 23407 - protein, 14 aa, Homo sapiens
  CDR3 for alpha chain variable domain of TCR clone 11704 (TRAV26-1, TRAJ38)
CIADNAGNNRKLIW

SEQ ID NO: 23408 - protein, 13 aa, Homo sapiens
  CDR3 for beta chain variable domain of TCR clone 11704 (TRBV20-1, TRBJ1-1)
CSARGGGNTEDFF

SEQ ID NO: 23409 - protein, 14 aa, Homo sapiens
  CDR3 for alpha chain variable domain of TCR clone 11705 (TRAV26-1, TRAJ38)
CIADNAGDNRKLIW

SEQ ID NO: 23410 - protein, 13 aa, Homo sapiens
  CDR3 for beta chain variable domain of TCR clone 11705 (TRBV20-1, TRBJ1-1)
CSARGGGNTEAFF

SEQ ID NO: 23411 - protein, 15 aa, Homo sapiens
  CDR3 for alpha chain variable domain of TCR clone 11706 (TRAV3, TRAJ4)
CAVRDGTGGYNKLIF

SEQ ID NO: 23412 - protein, 15 aa, Homo sapiens
  CDR3 for beta chain variable domain of TCR clone 11706 (TRBV5-1, TRBJ2-7)
CASSLDLTSSYEQYF

SEQ ID NO: 23413 - protein, 14 aa, Homo sapiens
  CDR3 for alpha chain variable domain of TCR clone 11707 (TRAV35, TRAJ13)
CAGSPSGGYQKVTF

SEQ ID NO: 23414 - protein, 13 aa, Homo sapiens
  CDR3 for beta chain variable domain of TCR clone 11707 (TRBV29-1, TRBJ1-1)
CSVGDSRNTEAFS

SEQ ID NO: 23415 - protein, 13 aa, Homo sapiens
  CDR3 for alpha chain variable domain of TCR clone 11708 (TRAV3, TRAJ27)
CAVRPLGTGKSTF

SEQ ID NO: 23416 - protein, 13 aa, Homo sapiens
  CDR3 for beta chain variable domain of TCR clone 11708 (TRBV7-9, TRBJ2-3)
CASSPGSTDTQYF

SEQ ID NO: 23417 - protein, 15 aa, Homo sapiens
  CDR3 for alpha chain variable domain of TCR clone 11709 (TRAV34, TRAJ38)
CGADFTPGNNRKLIW

SEQ ID NO: 23418 - protein, 16 aa, Homo sapiens
  CDR3 for beta chain variable domain of TCR clone 11709 (TRBV12-5, TRBJ2-5)
CASGPRTSGNQESQYF

SEQ ID NO: 23419 - protein, 15 aa, Homo sapiens
  CDR3 for alpha chain variable domain of TCR clone 11710 (TRAV19, TRAJ53)
CALSSSGGSNYKLTF

SEQ ID NO: 23420 - protein, 14 aa, Homo sapiens
  CDR3 for beta chain variable domain of TCR clone 11710 (TRBV6-1, TRBJ1-3)
CASVQGGGGNTIYF

SEQ ID NO: 23421 - protein, 19 aa, Homo sapiens
  CDR3 for alpha chain variable domain of TCR clone 11711 (TRAV1-1, TRAJ30)
CAGSEMTRSSLEKGHDFIF

SEQ ID NO: 23422 - protein, 14 aa, Homo sapiens
  CDR3 for beta chain variable domain of TCR clone 11711 (TRBV11-3, TRBJ1-6)
CASSFSGGDSPLHF

SEQ ID NO: 23423 - protein, 14 aa, Homo sapiens
  CDR3 for alpha chain variable domain of TCR clone 11712 (TRAV21, TRAJ35)
CAVMLIGFGNVLHC

SEQ ID NO: 23424 - protein, 12 aa, Homo sapiens
  CDR3 for beta chain variable domain of TCR clone 11712 (TRBV7-9, TRBJ2-7)
CASSIKREEQYF

SEQ ID NO: 23425 - protein, 12 aa, Homo sapiens
  CDR3 for alpha chain variable domain of TCR clone 11713 (TRAV29/DV5, TRAJ41)
CAASDSGYALNF

SEQ ID NO: 23426 - protein, 14 aa, Homo sapiens
  CDR3 for beta chain variable domain of TCR clone 11713 (TRBV2, TRBJ1-5)
CASHAGEGDQPQHF

SEQ ID NO: 23427 - protein, 13 aa, Homo sapiens
  CDR3 for alpha chain variable domain of TCR clone 11714 (TRAV12-1, TRAJ34)
CVVTGYNTDKLIF

SEQ ID NO: 23428 - protein, 16 aa, Homo sapiens
  CDR3 for beta chain variable domain of TCR clone 11714 (TRBV28, TRBJ2-7)
CTSVPAKRGGVYEQYF

SEQ ID NO: 23429 - protein, 11 aa, Homo sapiens
  CDR3 for alpha chain variable domain of TCR clone 11715 (TRAV3, TRAJ21)
CAVGNFNKFYF

SEQ ID NO: 23430 - protein, 16 aa, Homo sapiens
  CDR3 for beta chain variable domain of TCR clone 11715 (TRBV19, TRBJ2-1)
CACSKAGPSSYNEQFF

SEQ ID NO: 23431 - protein, 13 aa, Homo sapiens
  CDR3 for alpha chain variable domain of TCR clone 11716 (TRAV25, TRAJ10)
CAGRTGRGNKLTF

SEQ ID NO: 23432 - protein, 15 aa, Homo sapiens
  CDR3 for beta chain variable domain of TCR clone 11716 (TRBV19, TRBJ2-1)
CASSSPGVPLDEQFF

SEQ ID NO: 23433 - protein, 14 aa, Homo sapiens
  CDR3 for alpha chain variable domain of TCR clone 11717 (TRAV26-1, TRAJ38)
CIADNAGNNRKLIW

SEQ ID NO: 23434 - protein, 13 aa, Homo sapiens
  CDR3 for beta chain variable domain of TCR clone 11717 (TRBV20-1, TRBJ1-1)
CSARSGGNTEAFF

SEQ ID NO: 23435 - protein, 14 aa, Homo sapiens
  CDR3 for alpha chain variable domain of TCR clone 11718 (TRAV12-2, TRAJ13)
CAVKKTGGYQKVTF

SEQ ID NO: 23436 - protein, 13 aa, Homo sapiens
  CDR3 for beta chain variable domain of TCR clone 11718 (TRBV12-4, TRBJ1-2)
CTSVPAVSYGYTF

SEQ ID NO: 23437 - protein, 14 aa, Homo sapiens
  CDR3 for alpha chain variable domain of TCR clone 11719 (TRAV2, TRAJ37)
CAVDCTSNTGKLIF

SEQ ID NO: 23438 - protein, 15 aa, Homo sapiens
  CDR3 for beta chain variable domain of TCR clone 11719 (TRBV20-1, TRBJ1-1)
CSASRGVTGNTEAFF

SEQ ID NO: 23439 - protein, 13 aa, Homo sapiens
  CDR3 for alpha chain variable domain of TCR clone 11720 (TRAV1-2, TRAJ9)
CAALHTGGFKTIF

SEQ ID NO: 23440 - protein, 13 aa, Homo sapiens
  CDR3 for beta chain variable domain of TCR clone 11720 (TRBV19, TRBJ1-2)
CASSVPGQDGYTF

SEQ ID NO: 23441 - protein, 13 aa, Homo sapiens
  CDR3 for alpha chain variable domain of TCR clone 11721 (TRAV2, TRAJ40)
CAVVTSGTYKYIF

SEQ ID NO: 23442 - protein, 13 aa, Homo sapiens
  CDR3 for beta chain variable domain of TCR clone 11721 (TRBV10-3, TRBJ2-7)
CASKLAVNYEQYF

SEQ ID NO: 23443 - protein, 14 aa, Homo sapiens
  CDR3 for alpha chain variable domain of TCR clone 11722 (TRAV2, TRAJ9)
CAVEDRSGGFKTIF

SEQ ID NO: 23444 - protein, 14 aa, Homo sapiens
  CDR3 for beta chain variable domain of TCR clone 11722 (TRBV9, TRBJ2-1)
CASSVAGTFDEQFF

SEQ ID NO: 23445 - protein, 10 aa, Homo sapiens
  CDR3 for alpha chain variable domain of TCR clone 11723 (TRAV23/DV6, TRAJ57)
CAASSTLSQG

SEQ ID NO: 23446 - protein, 14 aa, Homo sapiens
  CDR3 for beta chain variable domain of TCR clone 11723 (TRBV11-2, TRBJ2-1)
CASSLSGPYNEQFF

SEQ ID NO: 23447 - protein, 11 aa, Homo sapiens
  CDR3 for alpha chain variable domain of TCR clone 11724 (TRAV12-3, TRAJ43)
CAMSVSNDMRL

SEQ ID NO: 23448 - protein, 13 aa, Homo sapiens
  CDR3 for beta chain variable domain of TCR clone 11724 (TRBV20-1, TRBJ1-1)
CSAPLGGGTEAFF

SEQ ID NO: 23449 - protein, 13 aa, Homo sapiens
  CDR3 for alpha chain variable domain of TCR clone 11725 (TRAV26-1, )
CIVSHRVEGVWNQ

SEQ ID NO: 23450 - protein, 14 aa, Homo sapiens
  CDR3 for beta chain variable domain of TCR clone 11725 (TRBV20-1, TRBJ2-7)
CSAWTALSSYEQYF

SEQ ID NO: 23451 - protein, 17 aa, Homo sapiens
  CDR3 for alpha chain variable domain of TCR clone 11726 (TRAV3, TRAJ6)
CAVRDGPKAGGSYIPTF

SEQ ID NO: 23452 - protein, 14 aa, Homo sapiens
  CDR3 for beta chain variable domain of TCR clone 11726 (TRBV7-2, TRBJ2-7)
CASSPKTSFYEQYF

SEQ ID NO: 23453 - protein, 13 aa, Homo sapiens
  CDR3 for alpha chain variable domain of TCR clone 11727 (TRAV12-2, TRAJ52)
CAVSGTSYGKLTF

SEQ ID NO: 23454 - protein, 16 aa, Homo sapiens
  CDR3 for beta chain variable domain of TCR clone 11727 (TRBV7-2, TRBJ2-7)
CASTSQAASGGYEQYF

SEQ ID NO: 23455 - protein, 14 aa, Homo sapiens
  CDR3 for alpha chain variable domain of TCR clone 11728 (TRAV1-2, TRAJ8)
CAVREDTGFQKLVF

SEQ ID NO: 23456 - protein, 13 aa, Homo sapiens
  CDR3 for beta chain variable domain of TCR clone 11728 (TRBV7-2, TRBJ2-5)
CASSRGGLETQYF

SEQ ID NO: 23457 - protein, 17 aa, Homo sapiens
  CDR3 for alpha chain variable domain of TCR clone 11729 (TRAV3, TRAJ6)
CAVRDGPRAGGSYIPTF

SEQ ID NO: 23458 - protein, 14 aa, Homo sapiens
  CDR3 for beta chain variable domain of TCR clone 11729 (TRBV7-2, TRBJ2-7)
CASSPKTSFYEHYF

SEQ ID NO: 23459 - protein, 17 aa, Homo sapiens
  CDR3 for alpha chain variable domain of TCR clone 11730 (TRAV8-6, TRAJ58)
CAVSSWVGETSGSRLTF

SEQ ID NO: 23460 - protein, 18 aa, Homo sapiens
  CDR3 for beta chain variable domain of TCR clone 11730 (TRBV20-1, TRBJ2-6)
CSAETTPTHGSGANVLTF

SEQ ID NO: 23461 - protein, 15 aa, Homo sapiens
  CDR3 for alpha chain variable domain of TCR clone 11731 (TRAV3, TRAJ4)
CAVRDGTGGYNKLIF

SEQ ID NO: 23462 - protein, 16 aa, Homo sapiens
  CDR3 for beta chain variable domain of TCR clone 11731 (TRBV27, TRBJ2-2)
CASSPSGVSNTGELFF

SEQ ID NO: 23463 - protein, 15 aa, Homo sapiens
  CDR3 for alpha chain variable domain of TCR clone 11732 (TRAV8-3, TRAJ27)
CAVGPSKTTAGKSTF

SEQ ID NO: 23464 - protein, 15 aa, Homo sapiens
  CDR3 for beta chain variable domain of TCR clone 11732 (TRBV7-2, TRBJ2-1)
CASSSGLAGGNEQFF

SEQ ID NO: 23465 - protein, 13 aa, Homo sapiens
  CDR3 for alpha chain variable domain of TCR clone 11733 (TRAV13-1, TRAJ5)
CAAEHTGRRALTF

SEQ ID NO: 23466 - protein, 13 aa, Homo sapiens
  CDR3 for beta chain variable domain of TCR clone 11733 (TRBV10-2, TRBJ2-1)
CASGASGDAKQFF

SEQ ID NO: 23467 - protein, 16 aa, Homo sapiens
  CDR3 for alpha chain variable domain of TCR clone 11734 (TRAV12-3, TRAJ53)
CAMSPGSGGSNYKLTF

SEQ ID NO: 23468 - protein, 11 aa, Homo sapiens
  CDR3 for beta chain variable domain of TCR clone 11734 (TRBV29-1, TRBJ2-5)
CSKDRTGTQYF

SEQ ID NO: 23469 - protein, 17 aa, Homo sapiens
  CDR3 for alpha chain variable domain of TCR clone 11735 (TRAV3, TRAJ6)
CAVRDGPRAGGSYIPTF

SEQ ID NO: 23470 - protein, 14 aa, Homo sapiens
  CDR3 for beta chain variable domain of TCR clone 11735 (TRBV7-2, TRBJ2-7)
YASSPKTSFYEQYF

SEQ ID NO: 23471 - protein, 14 aa, Homo sapiens
  CDR3 for alpha chain variable domain of TCR clone 11736 (TRAV12-1, TRAJ30)
CVVNIGGRDDKIIF

SEQ ID NO: 23472 - protein, 14 aa, Homo sapiens
  CDR3 for beta chain variable domain of TCR clone 11736 (TRBV7-6, TRBJ2-3)
CVSSLGTVTDTQYF

SEQ ID NO: 23473 - protein, 13 aa, Homo sapiens
  CDR3 for alpha chain variable domain of TCR clone 11737 (TRAV2, TRAJ40)
CAVVTSGTYKYVF

SEQ ID NO: 23474 - protein, 15 aa, Homo sapiens
  CDR3 for beta chain variable domain of TCR clone 11737 (TRBV11-3, TRBJ2-3)
CASLKDGREGDTQYF

SEQ ID NO: 23475 - protein, 18 aa, Homo sapiens
  CDR3 for alpha chain variable domain of TCR clone 11738 (TRAV26-1, TRAJ56)
CIVRVASRVTGANSKLTF

SEQ ID NO: 23476 - protein, 15 aa, Homo sapiens
  CDR3 for beta chain variable domain of TCR clone 11738 (TRBV7-9, TRBJ2-5)
RASSDTGRGRETQYF

SEQ ID NO: 23477 - protein, 20 aa, Homo sapiens
  CDR3 for alpha chain variable domain of TCR clone 11739 (TRAV26-1, TRAJ57)
CCVLLHRQIETQGGSEKLVF

SEQ ID NO: 23478 - protein, 16 aa, Homo sapiens
  CDR3 for beta chain variable domain of TCR clone 11739 (TRBV4-2, TRBJ2-7)
CASSQEELAGTYEQYF

SEQ ID NO: 23479 - protein, 16 aa, Homo sapiens
  CDR3 for alpha chain variable domain of TCR clone 11740 (TRAV30, TRAJ24)
CGTEIVDADSWGKFQF

SEQ ID NO: 23480 - protein, 14 aa, Homo sapiens
  CDR3 for beta chain variable domain of TCR clone 11740 (TRBV12-5, TRBJ2-5)
CASGSRRHQETQYF

SEQ ID NO: 23481 - protein, 18 aa, Homo sapiens
  CDR3 for alpha chain variable domain of TCR clone 11741 (TRAV13-1, TRAJ52)
CAAKNPNAGGTSYGKLTF

SEQ ID NO: 23482 - protein, 16 aa, Homo sapiens
  CDR3 for beta chain variable domain of TCR clone 11741 (TRBV28, TRBJ2-7)
CASSPWVATGDLSQYF

SEQ ID NO: 23483 - protein, 15 aa, Homo sapiens
  CDR3 for alpha chain variable domain of TCR clone 11742 (TRAV26-1, TRAJ29)
CIVRVEGSGNTPPVF

SEQ ID NO: 23484 - protein, 14 aa, Homo sapiens
  CDR3 for beta chain variable domain of TCR clone 11742 (TRBV18, TRBJ2-5)
CASSPGVSQETQYF

SEQ ID NO: 23485 - protein, 11 aa, Homo sapiens
  CDR3 for alpha chain variable domain of TCR clone 11743 (TRAV3, TRAJ21)
CAVGNFNKFYF

SEQ ID NO: 23486 - protein, 16 aa, Homo sapiens
  CDR3 for beta chain variable domain of TCR clone 11743 (TRBV19, TRBJ2-1)
CASSKAGPSSYNDQFF

SEQ ID NO: 23487 - protein, 14 aa, Homo sapiens
  CDR3 for alpha chain variable domain of TCR clone 11744 (TRAV1-2, TRAJ8)
CAVREDTGFQKLVF

SEQ ID NO: 23488 - protein, 18 aa, Homo sapiens
  CDR3 for beta chain variable domain of TCR clone 11744 (TRBV4-1, TRBJ2-7)
CASSQDVQGLPTSSTSGR

SEQ ID NO: 23489 - protein, 12 aa, Homo sapiens
  CDR3 for alpha chain variable domain of TCR clone 11745 (TRAV13-1, TRAJ21)
CAAKEGFNKFYF

SEQ ID NO: 23490 - protein, 14 aa, Homo sapiens
  CDR3 for beta chain variable domain of TCR clone 11745 (TRBV6-1, TRBJ1-3)
CASVQGGGGNTIYF

SEQ ID NO: 23491 - protein, 14 aa, Homo sapiens
  CDR3 for alpha chain variable domain of TCR clone 11746 (TRAV26-1, TRAJ38)
CIADNAGNNRKLIW

SEQ ID NO: 23492 - protein, 13 aa, Homo sapiens
  CDR3 for beta chain variable domain of TCR clone 11746 (TRBV20-1, TRBJ1-1)
CSARGGGNTEALF

SEQ ID NO: 23493 - protein, 11 aa, Homo sapiens
  CDR3 for alpha chain variable domain of TCR clone 11747 (TRAV5, TRAJ3)
CGGSSASKIIF

SEQ ID NO: 23494 - protein, 13 aa, Homo sapiens
  CDR3 for beta chain variable domain of TCR clone 11747 (TRBV27, TRBJ2-1)
CASRTLGVGEQFF

SEQ ID NO: 23495 - protein, 17 aa, Homo sapiens
  CDR3 for alpha chain variable domain of TCR clone 11748 (TRAV3, TRAJ6)
CAVRDGPRAGGSYIPTF

SEQ ID NO: 23496 - protein, 13 aa, Homo sapiens
  CDR3 for beta chain variable domain of TCR clone 11748 (TRBV10-3, TRBJ2-7)
CASKLAVNYEQYF

SEQ ID NO: 23497 - protein, 16 aa, Homo sapiens
  CDR3 for alpha chain variable domain of TCR clone 11749 (TRAV3, TRAJ18)
CAVRDGRGSTLGGLYF

SEQ ID NO: 23498 - protein, 15 aa, Homo sapiens
  CDR3 for beta chain variable domain of TCR clone 11749 (TRBV7-9, TRBJ1-6)
CASSSPGRGNSPLHF

SEQ ID NO: 23499 - protein, 16 aa, Homo sapiens
  CDR3 for alpha chain variable domain of TCR clone 11750 (TRAV3, TRAJ37)
CAVRPHGSGNTGKLIF

SEQ ID NO: 23500 - protein, 16 aa, Homo sapiens
  CDR3 for beta chain variable domain of TCR clone 11750 (TRBV9, TRBJ1-2)
CASSVEEKVSPYGDTF

SEQ ID NO: 23501 - protein, 15 aa, Homo sapiens
  CDR3 for alpha chain variable domain of TCR clone 11751 (TRAV8-4, TRAJ37)
CAVSTRSGNTGKLIF

SEQ ID NO: 23502 - protein, 14 aa, Homo sapiens
  CDR3 for beta chain variable domain of TCR clone 11751 (TRBV7-3, TRBJ2-2)
CASSSGGYTGELFF

SEQ ID NO: 23503 - protein, 12 aa, Homo sapiens
  CDR3 for alpha chain variable domain of TCR clone 11752 (TRAV12-3, TRAJ40)
CAMSTGTYKYIF

SEQ ID NO: 23504 - protein, 15 aa, Homo sapiens
  CDR3 for beta chain variable domain of TCR clone 11752 (TRBV11-2, TRBJ2-3)
CASSPRSGGTDTQYF

SEQ ID NO: 23505 - protein, 13 aa, Homo sapiens
  CDR3 for alpha chain variable domain of TCR clone 11753 (TRAV27, TRAJ56)
CAGKPGANSKLTF

SEQ ID NO: 23506 - protein, 14 aa, Homo sapiens
  CDR3 for beta chain variable domain of TCR clone 11753 (TRBV7-2, TRBJ2-7)
CASSPKTSFYEQYF

SEQ ID NO: 23507 - protein, 11 aa, Homo sapiens
  CDR3 for alpha chain variable domain of TCR clone 11754 (TRAV21, TRAJ31)
CAVRNNARLMF

SEQ ID NO: 23508 - protein, 11 aa, Homo sapiens
  CDR3 for beta chain variable domain of TCR clone 11754 (TRBV29-1, TRBJ2-5)
CSEDRTGTQYF

SEQ ID NO: 23509 - protein, 15 aa, Homo sapiens
  CDR3 for alpha chain variable domain of TCR clone 11755 (TRAV21, TRAJ24)
CAARSSTDSWGKLQV

SEQ ID NO: 23510 - protein, 13 aa, Homo sapiens
  CDR3 for beta chain variable domain of TCR clone 11755 (TRBV11-2, TRBJ2-5)
CASSSTGEETQYF

SEQ ID NO: 23511 - protein, 12 aa, Homo sapiens
  CDR3 for alpha chain variable domain of TCR clone 11756 (TRAV12-3, TRAJ17)
CAMTLTGNKLTF

SEQ ID NO: 23512 - protein, 10 aa, Homo sapiens
  CDR3 for beta chain variable domain of TCR clone 11756 (TRBV20-1, TRBJ2-7)
IGSGMDEQYF

SEQ ID NO: 23513 - protein, 13 aa, Homo sapiens
  CDR3 for alpha chain variable domain of TCR clone 11757 (TRAV21, TRAJ27)
CAARPDNAGKSTF

SEQ ID NO: 23514 - protein, 14 aa, Homo sapiens
  CDR3 for beta chain variable domain of TCR clone 11757 (TRBV7-6, TRBJ2-3)
CASSLGTVTDTQYF

SEQ ID NO: 23515 - protein, 14 aa, Homo sapiens
  CDR3 for alpha chain variable domain of TCR clone 11758 (TRAV17, TRAJ22)
CATVLSGSARQLTF

SEQ ID NO: 23516 - protein, 11 aa, Homo sapiens
  CDR3 for beta chain variable domain of TCR clone 11758 (TRBV12-4, TRBJ2-3)
CASTATDTQYF

SEQ ID NO: 23517 - protein, 15 aa, Homo sapiens
  CDR3 for alpha chain variable domain of TCR clone 11759 (TRAV25, TRAJ53)
CAATGGGGSNYKLTF

SEQ ID NO: 23518 - protein, 15 aa, Homo sapiens
  CDR3 for beta chain variable domain of TCR clone 11759 (TRBV5-1, TRBJ1-1)
CASSWTGRGNTEAFF

SEQ ID NO: 23519 - protein, 15 aa, Homo sapiens
  CDR3 for alpha chain variable domain of TCR clone 11760 (TRAV40, TRAJ45)
CLLGDLGGGADGLTF

SEQ ID NO: 23520 - protein, 13 aa, Homo sapiens
  CDR3 for beta chain variable domain of TCR clone 11760 (TRBV7-9, TRBJ1-2)
CASSLKQNYGYTL

SEQ ID NO: 23521 - protein, 12 aa, Homo sapiens
  CDR3 for alpha chain variable domain of TCR clone 11761 (TRAV12-3, TRAJ17)
CAMTLTGNKLTF

SEQ ID NO: 23522 - protein, 15 aa, Homo sapiens
  CDR3 for beta chain variable domain of TCR clone 11761 (TRBV7-2, TRBJ2-3)
CASSLRGGSTDTQYF

SEQ ID NO: 23523 - protein, 12 aa, Homo sapiens
  CDR3 for alpha chain variable domain of TCR clone 11762 (TRAV13-1, TRAJ21)
CAAKEGFNKFYF

SEQ ID NO: 23524 - protein, 17 aa, Homo sapiens
  CDR3 for beta chain variable domain of TCR clone 11762 (TRBV20-1, TRBJ2-7)
CSATRAGGVAGVEEQYF

SEQ ID NO: 23525 - protein, 13 aa, Homo sapiens
  CDR3 for alpha chain variable domain of TCR clone 11763 (TRAV21, TRAJ33)
CAVAGDSNYQLIW

SEQ ID NO: 23526 - protein, 13 aa, Homo sapiens
  CDR3 for beta chain variable domain of TCR clone 11763 (TRBV6-4, TRBJ2-3)
CASSVSWADTQYF

SEQ ID NO: 23527 - protein, 14 aa, Homo sapiens
  CDR3 for alpha chain variable domain of TCR clone 11764 (TRAV38-1, TRAJ40)
CALRPTSGTYKYIF

SEQ ID NO: 23528 - protein, 14 aa, Homo sapiens
  CDR3 for beta chain variable domain of TCR clone 11764 (TRBV25-1, TRBJ1-1)
CASTHLVGNTEAFF

SEQ ID NO: 23529 - protein, 18 aa, Homo sapiens
  CDR3 for alpha chain variable domain of TCR clone 11765 (TRAV40, TRAJ42)
SSGSRLLNYGGSQGNLIF

SEQ ID NO: 23530 - protein, 15 aa, Homo sapiens
  CDR3 for beta chain variable domain of TCR clone 11765 (TRBV11-3, TRBJ2-7)
CASSPGPASSYEQYF

SEQ ID NO: 23531 - protein, 14 aa, Homo sapiens
  CDR3 for alpha chain variable domain of TCR clone 11766 (TRAV1-2, TRAJ16)
CAVNRFSDGQKPLF

SEQ ID NO: 23532 - protein, 15 aa, Homo sapiens
  CDR3 for beta chain variable domain of TCR clone 11766 (TRBV9, TRBJ1-6)
CASSVAGTGDSPLHF

SEQ ID NO: 23533 - protein, 11 aa, Homo sapiens
  CDR3 for alpha chain variable domain of TCR clone 11767 (TRAV4, TRAJ31)
CLVGDNARLMF

SEQ ID NO: 23534 - protein, 15 aa, Homo sapiens
  CDR3 for beta chain variable domain of TCR clone 11767 (TRBV10-2, TRBJ2-6)
CASSEQGTGANALTF

SEQ ID NO: 23535 - protein, 15 aa, Homo sapiens
  CDR3 for alpha chain variable domain of TCR clone 11768 (TRAV3, TRAJ5)
CAVRDLDTGRRARTF

SEQ ID NO: 23536 - protein, 13 aa, Homo sapiens
  CDR3 for beta chain variable domain of TCR clone 11768 (TRBV12-4, TRBJ2-7)
CASSPTETYEQYF

SEQ ID NO: 23537 - protein, 15 aa, Homo sapiens
  CDR3 for alpha chain variable domain of TCR clone 11769 (TRAV21, TRAJ53)
CAVRQSGGSNYKLTF

SEQ ID NO: 23538 - protein, 16 aa, Homo sapiens
  CDR3 for beta chain variable domain of TCR clone 11769 (TRBV19, TRBJ2-1)
CASSKAGPSSYNEQFF

SEQ ID NO: 23539 - protein, 13 aa, Homo sapiens
  CDR3 for alpha chain variable domain of TCR clone 11770 (TRAV13-1, TRAJ21)
CAASIYNFNKFYF

SEQ ID NO: 23540 - protein, 12 aa, Homo sapiens
  CDR3 for beta chain variable domain of TCR clone 11770 (TRBV19, TRBJ2-1)
CASSMQDTEQFF

SEQ ID NO: 23541 - protein, 13 aa, Homo sapiens
  CDR3 for alpha chain variable domain of TCR clone 11771 (TRAV38-1, TRAJ48)
CAFMKQGNEKLTF

SEQ ID NO: 23542 - protein, 18 aa, Homo sapiens
  CDR3 for beta chain variable domain of TCR clone 11771 (TRBV12-4, TRBJ1-3)
CASSLSRGGAFSGNTIYF

SEQ ID NO: 23543 - protein, 14 aa, Homo sapiens
  CDR3 for alpha chain variable domain of TCR clone 11772 (TRAV13-1, TRAJ35)
CVASKGGFGNVLHC

SEQ ID NO: 23544 - protein, 13 aa, Homo sapiens
  CDR3 for beta chain variable domain of TCR clone 11772 (TRBV7-3, TRBJ1-1)
CASSQDWGAEAFF

SEQ ID NO: 23545 - protein, 12 aa, Homo sapiens
  CDR3 for alpha chain variable domain of TCR clone 11773 (TRAV8-3, TRAJ20)
CAVGANDYKLSF

SEQ ID NO: 23546 - protein, 16 aa, Homo sapiens
  CDR3 for beta chain variable domain of TCR clone 11773 (TRBV19, TRBJ2-2)
CVSRSPGTGATGELFF

SEQ ID NO: 23547 - protein, 13 aa, Homo sapiens
  CDR3 for alpha chain variable domain of TCR clone 11774 (TRAV1-1, )
CAVRDRWLATTIS

SEQ ID NO: 23548 - protein, 12 aa, Homo sapiens
  CDR3 for beta chain variable domain of TCR clone 11774 (TRBV14, TRBJ1-1)
CASRPYETEAFF

SEQ ID NO: 23549 - protein, 18 aa, Homo sapiens
  CDR3 for alpha chain variable domain of TCR clone 11775 (TRAV21, TRAJ52)
CAVRPSPAGGTSYGKLTF

SEQ ID NO: 23550 - protein, 17 aa, Homo sapiens
  CDR3 for beta chain variable domain of TCR clone 11775 (TRBV13, TRBJ2-3)
CASSLSRVAEGRNTQYF

SEQ ID NO: 23551 - protein, 10 aa, Homo sapiens
  CDR3 for alpha chain variable domain of TCR clone 11776 (TRAV30, TRAJ48)
CGIGNEKLTF

SEQ ID NO: 23552 - protein, 17 aa, Homo sapiens
  CDR3 for beta chain variable domain of TCR clone 11776 (TRBV28, TRBJ2-5)
CASSTPEGDALQETQYF

SEQ ID NO: 23553 - protein, 12 aa, Homo sapiens
  CDR3 for alpha chain variable domain of TCR clone 11777 (TRAV35, TRAJ49)
CAGWNTGNQFYF

SEQ ID NO: 23554 - protein, 16 aa, Homo sapiens
  CDR3 for beta chain variable domain of TCR clone 11777 (TRBV5-1, TRBJ2-2)
CASSRWDTTNTGELFF

SEQ ID NO: 23555 - protein, 15 aa, Homo sapiens
  CDR3 for alpha chain variable domain of TCR clone 11778 (TRAV26-1, TRAJ29)
CIVRVEGSGNTPLVV

SEQ ID NO: 23556 - protein, 15 aa, Homo sapiens
  CDR3 for beta chain variable domain of TCR clone 11778 (TRBV7-9, TRBJ1-5)
CASSQGHQPNQPQHF

SEQ ID NO: 23557 - protein, 14 aa, Homo sapiens
  CDR3 for alpha chain variable domain of TCR clone 11779 (TRAV8-4, TRAJ9)
CAVRINTGGFKTIF

SEQ ID NO: 23558 - protein, 16 aa, Homo sapiens
  CDR3 for beta chain variable domain of TCR clone 11779 (TRBV20-1, TRBJ1-4)
CSAPGQGLLTNEKLFF

SEQ ID NO: 23559 - protein, 15 aa, Homo sapiens
  CDR3 for alpha chain variable domain of TCR clone 11780 (TRAV3, TRAJ5)
CAVRDLDTGRRALTF

SEQ ID NO: 23560 - protein, 13 aa, Homo sapiens
  CDR3 for beta chain variable domain of TCR clone 11780 (TRBV12-4, TRBJ2-7)
CASSPTGTYEQYF

SEQ ID NO: 23561 - protein, 11 aa, Homo sapiens
  CDR3 for alpha chain variable domain of TCR clone 11781 (TRAV4, TRAJ23)
CLLDQGGKLIF

SEQ ID NO: 23562 - protein, 15 aa, Homo sapiens
  CDR3 for beta chain variable domain of TCR clone 11781 (TRBV12-4, TRBJ2-7)
CASSTGTGEPYEQYF

SEQ ID NO: 23563 - protein, 12 aa, Homo sapiens
  CDR3 for alpha chain variable domain of TCR clone 11782 (TRAV8-3, TRAJ20)
RAVGANDYKLSF

SEQ ID NO: 23564 - protein, 16 aa, Homo sapiens
  CDR3 for beta chain variable domain of TCR clone 11782 (TRBV19, TRBJ2-2)
CASRSPGTGATGELFF

SEQ ID NO: 23565 - protein, 11 aa, Homo sapiens
  CDR3 for alpha chain variable domain of TCR clone 11783 (TRAV1-1, TRAJ23)
CAVRQGGKLIF

SEQ ID NO: 23566 - protein, 20 aa, Homo sapiens
  CDR3 for beta chain variable domain of TCR clone 11783 (TRBV7-8, TRBJ2-2)
CASSHLFPGPTIHLTGELFF

SEQ ID NO: 23567 - protein, 17 aa, Homo sapiens
  CDR3 for alpha chain variable domain of TCR clone 11784 (TRAV8-6, TRAJ58)
CAVSSWVGETSGSRLTF

SEQ ID NO: 23568 - protein, 14 aa, Homo sapiens
  CDR3 for beta chain variable domain of TCR clone 11784 (TRBV4-2, TRBJ2-1)
CASGLDRAYNEQLF

SEQ ID NO: 23569 - protein, 14 aa, Homo sapiens
  CDR3 for alpha chain variable domain of TCR clone 11785 (TRAV12-3, TRAJ10)
SHLPLTGGGNKLTF

SEQ ID NO: 23570 - protein, 17 aa, Homo sapiens
  CDR3 for beta chain variable domain of TCR clone 11785 (TRBV15, TRBJ1-2)
CATSGREIDVVNYGYTF

SEQ ID NO: 23571 - protein, 12 aa, Homo sapiens
  CDR3 for alpha chain variable domain of TCR clone 11786 (TRAV13-1, TRAJ15)
CAASQAGTALIF

SEQ ID NO: 23572 - protein, 14 aa, Homo sapiens
  CDR3 for beta chain variable domain of TCR clone 11786 (TRBV25-1, TRBJ1-1)
CASTHLGGNTEAFF

SEQ ID NO: 23573 - protein, 16 aa, Homo sapiens
  CDR3 for alpha chain variable domain of TCR clone 11787 (TRAV1-2, TRAJ10)
CAVRGVPTGGGNKLTF

SEQ ID NO: 23574 - protein, 12 aa, Homo sapiens
  CDR3 for beta chain variable domain of TCR clone 11787 (TRBV7-8, TRBJ2-7)
CASSLGDREQYF

SEQ ID NO: 23575 - protein, 14 aa, Homo sapiens
  CDR3 for alpha chain variable domain of TCR clone 11788 (TRAV1-2, TRAJ16)
CAVNRFSDGQKLLF

SEQ ID NO: 23576 - protein, 13 aa, Homo sapiens
  CDR3 for beta chain variable domain of TCR clone 11788 (TRBV15, TRBJ2-7)
CATSTTGHYEQYF

SEQ ID NO: 23577 - protein, 16 aa, Homo sapiens
  CDR3 for alpha chain variable domain of TCR clone 11789 (TRAV17, TRAJ52)
CATSNAGGTSYGKLAF

SEQ ID NO: 23578 - protein, 13 aa, Homo sapiens
  CDR3 for beta chain variable domain of TCR clone 11789 (TRBV27, TRBJ1-6)
CASSLVLVSPLHF

SEQ ID NO: 23579 - protein, 13 aa, Homo sapiens
  CDR3 for alpha chain variable domain of TCR clone 11790 (TRAV8-6, TRAJ7)
CAVSEYGNNRLAF

SEQ ID NO: 23580 - protein, 15 aa, Homo sapiens
  CDR3 for beta chain variable domain of TCR clone 11790 (TRBV6-1, TRBJ2-5)
CASGLTSGGAETQYF

SEQ ID NO: 23581 - protein, 11 aa, Homo sapiens
  CDR3 for alpha chain variable domain of TCR clone 11791 (TRAV3, TRAJ21)
CAVGNFNKFYF

SEQ ID NO: 23582 - protein, 16 aa, Homo sapiens
  CDR3 for beta chain variable domain of TCR clone 11791 (TRBV19, TRBJ2-1)
CASSKAGQSSYNEQFF

SEQ ID NO: 23583 - protein, 12 aa, Homo sapiens
  CDR3 for alpha chain variable domain of TCR clone 11792 (TRAV30, TRAJ43)
CGTEERGNDMRF

SEQ ID NO: 23584 - protein, 13 aa, Homo sapiens
  CDR3 for beta chain variable domain of TCR clone 11792 (TRBV27, TRBJ2-7)
CASSVSQGYEQYF

SEQ ID NO: 23585 - protein, 12 aa, Homo sapiens
  CDR3 for alpha chain variable domain of TCR clone 11793 (TRAV13-2, TRAJ23)
CAERHRGGKLIF

SEQ ID NO: 23586 - protein, 15 aa, Homo sapiens
  CDR3 for beta chain variable domain of TCR clone 11793 (TRBV19, TRBJ1-1)
CASTSGQIQNTEAFF

SEQ ID NO: 23587 - protein, 17 aa, Homo sapiens
  CDR3 for alpha chain variable domain of TCR clone 11794 (TRAV8-6, TRAJ58)
CAVSSWVGETSGARLTF

SEQ ID NO: 23588 - protein, 14 aa, Homo sapiens
  CDR3 for beta chain variable domain of TCR clone 11794 (TRBV4-2, TRBJ2-1)
CASGLDRAYNEQFF

SEQ ID NO: 23589 - protein, 14 aa, Homo sapiens
  CDR3 for alpha chain variable domain of TCR clone 11795 (TRAV12-2, TRAJ13)
CAVKKTWGYQKVTF

SEQ ID NO: 23590 - protein, 15 aa, Homo sapiens
  CDR3 for beta chain variable domain of TCR clone 11795 (TRBV27, TRBJ2-1)
CASSNGGGSSNEQFF

SEQ ID NO: 23591 - protein, 13 aa, Homo sapiens
  CDR3 for alpha chain variable domain of TCR clone 11796 (TRAV13-1, TRAJ39)
CAASIWAGNMLTF

SEQ ID NO: 23592 - protein, 12 aa, Homo sapiens
  CDR3 for beta chain variable domain of TCR clone 11796 (TRBV7-9, TRBJ1-1)
AYSNRGGTEAFF

SEQ ID NO: 23593 - protein, 15 aa, Homo sapiens
  CDR3 for alpha chain variable domain of TCR clone 11797 (TRAV12-3, TRAJ6)
CAMSATTGGSYIPTF

SEQ ID NO: 23594 - protein, 16 aa, Homo sapiens
  CDR3 for beta chain variable domain of TCR clone 11797 (TRBV20-1, TRBJ1-2)
CGASMGQGVANYGYTF

SEQ ID NO: 23595 - protein, 14 aa, Homo sapiens
  CDR3 for alpha chain variable domain of TCR clone 11798 (TRAV17, TRAJ22)
CATSPSGSARQLTF

SEQ ID NO: 23596 - protein, 20 aa, Homo sapiens
  CDR3 for beta chain variable domain of TCR clone 11798 (TRBV7-8, TRBJ2-2)
CASSHLFPGPTIHITGELFF

SEQ ID NO: 23597 - protein, 15 aa, Homo sapiens
  CDR3 for alpha chain variable domain of TCR clone 11799 (TRAV26-1, TRAJ29)
CIVRVEGSGNTPLFF

SEQ ID NO: 23598 - protein, 14 aa, Homo sapiens
  CDR3 for beta chain variable domain of TCR clone 11799 (TRBV18, TRBJ2-5)
CASSPGVSQETQYF

SEQ ID NO: 23599 - protein, 17 aa, Homo sapiens
  CDR3 for alpha chain variable domain of TCR clone 11800 (TRAV3, TRAJ6)
CAVRDGPRAGGSYIPTF

SEQ ID NO: 23600 - protein, 14 aa, Homo sapiens
  CDR3 for beta chain variable domain of TCR clone 11800 (TRBV7-2, TRBJ2-7)
CASSLKTSFYEQYF

SEQ ID NO: 23601 - protein, 14 aa, Homo sapiens
  CDR3 for alpha chain variable domain of TCR clone 11801 (TRAV38-2/DV8, TRAJ47)
CAYRTLEYGNKLVF

SEQ ID NO: 23602 - protein, 16 aa, Homo sapiens
  CDR3 for beta chain variable domain of TCR clone 11801 (TRBV15, TRBJ2-7)
CATSRDGGIPSYEQYF

SEQ ID NO: 23603 - protein, 11 aa, Homo sapiens
  CDR3 for alpha chain variable domain of TCR clone 11802 (TRAV2, TRAJ33)
CAVESNYQLIW

SEQ ID NO: 23604 - protein, 15 aa, Homo sapiens
  CDR3 for beta chain variable domain of TCR clone 11802 (TRBV19, TRBJ1-1)
CASTSGQIRNTEAFF

SEQ ID NO: 23605 - protein, 14 aa, Homo sapiens
  CDR3 for alpha chain variable domain of TCR clone 11803 (TRAV1-1, TRAJ27)
CAVIYNTNAGKSTF

SEQ ID NO: 23606 - protein, 15 aa, Homo sapiens
  CDR3 for beta chain variable domain of TCR clone 11803 (TRBV7-2, TRBJ2-1)
RASSSGLAGGNEQFF

SEQ ID NO: 23607 - protein, 15 aa, Homo sapiens
  CDR3 for alpha chain variable domain of TCR clone 11804 (TRAV21, TRAJ40)
CAVRPQTSGTYKYIF

SEQ ID NO: 23608 - protein, 15 aa, Homo sapiens
  CDR3 for beta chain variable domain of TCR clone 11804 (TRBV9, TRBJ1-6)
CASSVAGTGDSPLHF

SEQ ID NO: 23609 - protein, 15 aa, Homo sapiens
  CDR3 for alpha chain variable domain of TCR clone 11805 (TRAV13-1, TRAJ32)
CAASNGWWCYKQAHL

SEQ ID NO: 23610 - protein, 15 aa, Homo sapiens
  CDR3 for beta chain variable domain of TCR clone 11805 (TRBV18, TRBJ2-1)
CASSPPSASYNEQFF

SEQ ID NO: 23611 - protein, 15 aa, Homo sapiens
  CDR3 for alpha chain variable domain of TCR clone 11806 (TRAV8-4, TRAJ37)
CAVSRGSGNTGKLIF

SEQ ID NO: 23612 - protein, 13 aa, Homo sapiens
  CDR3 for beta chain variable domain of TCR clone 11806 (TRBV20-1, TRBJ2-7)
CSATHTSGYEQYF

SEQ ID NO: 23613 - protein, 14 aa, Homo sapiens
  CDR3 for alpha chain variable domain of TCR clone 11807 (TRAV8-6, TRAJ36)
CAVSGKTGANNLFF

SEQ ID NO: 23614 - protein, 15 aa, Homo sapiens
  CDR3 for beta chain variable domain of TCR clone 11807 (TRBV6-6, TRBJ2-7)
CASSYSYGGSYEQYF

SEQ ID NO: 23615 - protein, 14 aa, Homo sapiens
  CDR3 for alpha chain variable domain of TCR clone 11808 (TRAV29/DV5, TRAJ20)
CAASAPIEDYKLSF

SEQ ID NO: 23616 - protein, 15 aa, Homo sapiens
  CDR3 for beta chain variable domain of TCR clone 11808 (TRBV20-1, TRBJ2-5)
CSAPPRTGFGETQYF

SEQ ID NO: 23617 - protein, 11 aa, Homo sapiens
  CDR3 for alpha chain variable domain of TCR clone 11809 (TRAV4, TRAJ31)
CLVGDNARLMF

SEQ ID NO: 23618 - protein, 16 aa, Homo sapiens
  CDR3 for beta chain variable domain of TCR clone 11809 (TRBV7-2, TRBJ2-5)
CASSSKWLGGQETQYF

SEQ ID NO: 23619 - protein, 15 aa, Homo sapiens
  CDR3 for alpha chain variable domain of TCR clone 11810 (TRAV8-3, TRAJ45)
CASSYSGGGADGLTF

SEQ ID NO: 23620 - protein, 13 aa, Homo sapiens
  CDR3 for beta chain variable domain of TCR clone 11810 (TRBV10-3, TRBJ2-7)
CASKLAVNHEQYF

SEQ ID NO: 23621 - protein, 14 aa, Homo sapiens
  CDR3 for alpha chain variable domain of TCR clone 11811 (TRAV26-1, TRAJ38)
CIADNAGNNRKLIW

SEQ ID NO: 23622 - protein, 14 aa, Homo sapiens
  CDR3 for beta chain variable domain of TCR clone 11811 (TRBV19, TRBJ2-1)
CASPTFVLSGEQFF

SEQ ID NO: 23623 - protein, 15 aa, Homo sapiens
  CDR3 for alpha chain variable domain of TCR clone 11812 (TRAV21, TRAJ53)
CATLNSGGSNYKLTF

SEQ ID NO: 23624 - protein, 16 aa, Homo sapiens
  CDR3 for beta chain variable domain of TCR clone 11812 (TRBV9, TRBJ2-1)
CASSVGGGGSYNEQFF

SEQ ID NO: 23625 - protein, 14 aa, Homo sapiens
  CDR3 for alpha chain variable domain of TCR clone 11813 (TRAV26-1, TRAJ45)
CIEVTGGGADGLTF

SEQ ID NO: 23626 - protein, 13 aa, Homo sapiens
  CDR3 for beta chain variable domain of TCR clone 11813 (TRBV7-6, TRBJ1-2)
CASSLVADYGYAF

SEQ ID NO: 23627 - protein, 15 aa, Homo sapiens
  CDR3 for alpha chain variable domain of TCR clone 11814 (TRAV29/DV5, TRAJ24)
CAASGATDSWGKFQL

SEQ ID NO: 23628 - protein, 12 aa, Homo sapiens
  CDR3 for beta chain variable domain of TCR clone 11814 (TRBV11-2, TRBJ2-2)
CASSLPTGELFF

SEQ ID NO: 23629 - protein, 15 aa, Homo sapiens
  CDR3 for alpha chain variable domain of TCR clone 11815 (TRAV17, TRAJ57)
CATGPSQGGSEKLVF

SEQ ID NO: 23630 - protein, 14 aa, Homo sapiens
  CDR3 for beta chain variable domain of TCR clone 11815 (TRBV13, TRBJ2-5)
CASSLERVGETQYF

SEQ ID NO: 23631 - protein, 13 aa, Homo sapiens
  CDR3 for alpha chain variable domain of TCR clone 11816 (TRAV2, TRAJ15)
CAVASQAGTALIF

SEQ ID NO: 23632 - protein, 12 aa, Homo sapiens
  CDR3 for beta chain variable domain of TCR clone 11816 (TRBV24-1, TRBJ1-1)
CATSDSDRGAFF

SEQ ID NO: 23633 - protein, 15 aa, Homo sapiens
  CDR3 for alpha chain variable domain of TCR clone 11817 (TRAV22, TRAJ45)
CAAKYSGGGADGLTF

SEQ ID NO: 23634 - protein, 14 aa, Homo sapiens
  CDR3 for beta chain variable domain of TCR clone 11817 (TRBV5-1, TRBJ2-3)
CASSLFGPTDTQYF

SEQ ID NO: 23635 - protein, 15 aa, Homo sapiens
  CDR3 for alpha chain variable domain of TCR clone 11818 (TRAV12-3, TRAJ11)
CAMSEENSGYSTLTF

SEQ ID NO: 23636 - protein, 14 aa, Homo sapiens
  CDR3 for beta chain variable domain of TCR clone 11818 (TRBV18, TRBJ2-5)
CVSSPGVSQETQYF

SEQ ID NO: 23637 - protein, 15 aa, Homo sapiens
  CDR3 for alpha chain variable domain of TCR clone 11819 (TRAV26-1, TRAJ23)
CIVRVAGYQGGKLIF

SEQ ID NO: 23638 - protein, 15 aa, Homo sapiens
  CDR3 for beta chain variable domain of TCR clone 11819 (TRBV9, TRBJ1-6)
CASSVAGTGDSPLHF

SEQ ID NO: 23639 - protein, 16 aa, Homo sapiens
  CDR3 for alpha chain variable domain of TCR clone 11820 (TRAV30, TRAJ24)
CGTEIVDADSWGKFQF

SEQ ID NO: 23640 - protein, 12 aa, Homo sapiens
  CDR3 for beta chain variable domain of TCR clone 11820 (TRBV29-1, TRBJ2-3)
CSVTGGADTQYF

SEQ ID NO: 23641 - protein, 10 aa, Homo sapiens
  CDR3 for alpha chain variable domain of TCR clone 11821 (TRAV3, TRAJ12)
CAVRDEMVRW

SEQ ID NO: 23642 - protein, 15 aa, Homo sapiens
  CDR3 for beta chain variable domain of TCR clone 11821 (TRBV5-5, TRBJ1-5)
CASSLKGGGEQPQHF

SEQ ID NO: 23643 - protein, 12 aa, Homo sapiens
  CDR3 for alpha chain variable domain of TCR clone 11822 (TRAV2, TRAJ40)
CCGTSGTYKYIF

SEQ ID NO: 23644 - protein, 14 aa, Homo sapiens
  CDR3 for beta chain variable domain of TCR clone 11822 (TRBV19, TRBJ2-1)
CASPTFVLSGEQFF

SEQ ID NO: 23645 - protein, 14 aa, Homo sapiens
  CDR3 for alpha chain variable domain of TCR clone 11823 (TRAV13-1, TRAJ28)
CAASKGAGSYQLTF

SEQ ID NO: 23646 - protein, 16 aa, Homo sapiens
  CDR3 for beta chain variable domain of TCR clone 11823 (TRBV4-2, TRBJ2-3)
CASSQDGARGGVKQYF

SEQ ID NO: 23647 - protein, 14 aa, Homo sapiens
  CDR3 for alpha chain variable domain of TCR clone 11824 (TRAV1-2, TRAJ16)
CAVNRFSDGPKLLF

SEQ ID NO: 23648 - protein, 15 aa, Homo sapiens
  CDR3 for beta chain variable domain of TCR clone 11824 (TRBV9, TRBJ1-6)
CASSVAGTGDSPLHF

SEQ ID NO: 23649 - protein, 13 aa, Homo sapiens
  CDR3 for alpha chain variable domain of TCR clone 11825 (TRAV8-3, TRAJ28)
CAVGAGGSYQLTF

SEQ ID NO: 23650 - protein, 15 aa, Homo sapiens
  CDR3 for beta chain variable domain of TCR clone 11825 (TRBV7-9, TRBJ1-5)
CASSQGHQPNQPQHF

SEQ ID NO: 23651 - protein, 11 aa, Homo sapiens
  CDR3 for alpha chain variable domain of TCR clone 11826 (TRAV3, TRAJ21)
CAVGNFNKFYF

SEQ ID NO: 23652 - protein, 15 aa, Homo sapiens
  CDR3 for beta chain variable domain of TCR clone 11826 (TRBV9, TRBJ1-6)
CASSVAGTGDSPLHF

SEQ ID NO: 23653 - protein, 15 aa, Homo sapiens
  CDR3 for alpha chain variable domain of TCR clone 11827 (TRAV26-1, TRAJ29)
CIVRFEGSGNTPLVF

SEQ ID NO: 23654 - protein, 15 aa, Homo sapiens
  CDR3 for beta chain variable domain of TCR clone 11827 (TRBV7-9, TRBJ1-5)
CASSQGHQPNQPQHF

SEQ ID NO: 23655 - protein, 12 aa, Homo sapiens
  CDR3 for alpha chain variable domain of TCR clone 11828 (TRAV13-1, TRAJ15)
CAASKPGTALIF

SEQ ID NO: 23656 - protein, 16 aa, Homo sapiens
  CDR3 for beta chain variable domain of TCR clone 11828 (TRBV18, TRBJ2-7)
CASSPRVLGTDSEQYF

SEQ ID NO: 23657 - protein, 14 aa, Homo sapiens
  CDR3 for alpha chain variable domain of TCR clone 11829 (TRAV9-2, TRAJ39)
CALYIYNAGNMLTF

SEQ ID NO: 23658 - protein, 15 aa, Homo sapiens
  CDR3 for beta chain variable domain of TCR clone 11829 (TRBV6-3, TRBJ2-7)
CASSSPGTVFYEQYF

SEQ ID NO: 23659 - protein, 15 aa, Homo sapiens
  CDR3 for alpha chain variable domain of TCR clone 11830 (TRAV26-1, TRAJ29)
CIIRVEGSGNTPLVF

SEQ ID NO: 23660 - protein, 14 aa, Homo sapiens
  CDR3 for beta chain variable domain of TCR clone 11830 (TRBV18, TRBJ2-5)
CASSPGVSQETQYF

SEQ ID NO: 23661 - protein, 15 aa, Homo sapiens
  CDR3 for alpha chain variable domain of TCR clone 11831 (TRAV8-3, TRAJ45)
CASSYSGGGANGLTF

SEQ ID NO: 23662 - protein, 13 aa, Homo sapiens
  CDR3 for beta chain variable domain of TCR clone 11831 (TRBV10-3, TRBJ2-7)
CASKLAVNYEQYF

SEQ ID NO: 23663 - protein, 14 aa, Homo sapiens
  CDR3 for alpha chain variable domain of TCR clone 11832 (TRAV14/DV4, TRAJ32)
SNVLPLTPTNKLIF

SEQ ID NO: 23664 - protein, 13 aa, Homo sapiens
  CDR3 for beta chain variable domain of TCR clone 11832 (TRBV9, TRBJ2-1)
CASSPSGGSEQFF

SEQ ID NO: 23665 - protein, 14 aa, Homo sapiens
  CDR3 for alpha chain variable domain of TCR clone 11833 (TRAV9-2, TRAJ39)
CALYIYNAGNMLTF

SEQ ID NO: 23666 - protein, 12 aa, Homo sapiens
  CDR3 for beta chain variable domain of TCR clone 11833 (TRBV14, TRBJ2-7)
CASSLYKDEQYF

SEQ ID NO: 23667 - protein, 15 aa, Homo sapiens
  CDR3 for alpha chain variable domain of TCR clone 11834 (TRAV26-1, TRAJ22)
CIVRVSFWFCKATYL

SEQ ID NO: 23668 - protein, 13 aa, Homo sapiens
  CDR3 for beta chain variable domain of TCR clone 11834 (TRBV7-9, TRBJ1-2)
CASSLKQNYGYTF

SEQ ID NO: 23669 - protein, 12 aa, Homo sapiens
  CDR3 for alpha chain variable domain of TCR clone 11835 (TRAV21, TRAJ11)
CAATSGYSTPTF

SEQ ID NO: 23670 - protein, 14 aa, Homo sapiens
  CDR3 for beta chain variable domain of TCR clone 11835 (TRBV20-1, TRBJ2-7)
CSAPELAGVGEQYF

SEQ ID NO: 23671 - protein, 13 aa, Homo sapiens
  CDR3 for alpha chain variable domain of TCR clone 11836 (TRAV1-1, TRAJ9)
RAAKNTGGFKTIF

SEQ ID NO: 23672 - protein, 14 aa, Homo sapiens
  CDR3 for beta chain variable domain of TCR clone 11836 (TRBV20-1, TRBJ2-1)
CSAQIGGSANEQFF

SEQ ID NO: 23673 - protein, 16 aa, Homo sapiens
  CDR3 for alpha chain variable domain of TCR clone 11837 (TRAV12-3, TRAJ53)
CTMSPGSGGSNYKLTF

SEQ ID NO: 23674 - protein, 11 aa, Homo sapiens
  CDR3 for beta chain variable domain of TCR clone 11837 (TRBV29-1, TRBJ2-5)
CSEDRTGTQYF

SEQ ID NO: 23675 - protein, 18 aa, Homo sapiens
  CDR3 for alpha chain variable domain of TCR clone 11838 (TRAV21, TRAJ52)
CAVRPSTAGGTSYGKLTF

SEQ ID NO: 23676 - protein, 17 aa, Homo sapiens
  CDR3 for beta chain variable domain of TCR clone 11838 (TRBV13, TRBJ2-3)
CASSLSRVAGGRNTQYF

SEQ ID NO: 23677 - protein, 13 aa, Homo sapiens
  CDR3 for alpha chain variable domain of TCR clone 11839 (TRAV2, TRAJ40)
CAVVTSGTYKYIF

SEQ ID NO: 23678 - protein, 15 aa, Homo sapiens
  CDR3 for beta chain variable domain of TCR clone 11839 (TRBV11-3, TRBJ2-3)
CASLKDGREGGTQYF

SEQ ID NO: 23679 - protein, 14 aa, Homo sapiens
  CDR3 for alpha chain variable domain of TCR clone 11840 (TRAV23/DV6, TRAJ49)
CAASKSFVGNQFYF

SEQ ID NO: 23680 - protein, 13 aa, Homo sapiens
  CDR3 for beta chain variable domain of TCR clone 11840 (TRBV6-3, TRBJ2-1)
CASSWEGSDEQFF

SEQ ID NO: 23681 - protein, 14 aa, Homo sapiens
  CDR3 for alpha chain variable domain of TCR clone 11841 (TRAV12-2, TRAJ13)
CAVKKTGVYQKVTF

SEQ ID NO: 23682 - protein, 15 aa, Homo sapiens
  CDR3 for beta chain variable domain of TCR clone 11841 (TRBV27, TRBJ2-1)
CASSNGGGSSNEQFF

SEQ ID NO: 23683 - protein, 15 aa, Homo sapiens
  CDR3 for alpha chain variable domain of TCR clone 11842 (TRAV8-3, TRAJ45)
CASSYSGGCADGLTF

SEQ ID NO: 23684 - protein, 13 aa, Homo sapiens
  CDR3 for beta chain variable domain of TCR clone 11842 (TRBV10-3, TRBJ2-7)
CASKLAVNYEQYF

SEQ ID NO: 23685 - protein, 17 aa, Homo sapiens
  CDR3 for alpha chain variable domain of TCR clone 11843 (TRAV13-1, TRAJ28)
CAASPPYSGAGSYQLTF

SEQ ID NO: 23686 - protein, 14 aa, Homo sapiens
  CDR3 for beta chain variable domain of TCR clone 11843 (TRBV7-6, TRBJ2-3)
CASSVAGGTDTQYF

SEQ ID NO: 23687 - protein, 13 aa, Homo sapiens
  CDR3 for alpha chain variable domain of TCR clone 11844 (TRAV26-2, TRAJ43)
CILRAVNNNGMRF

SEQ ID NO: 23688 - protein, 15 aa, Homo sapiens
  CDR3 for beta chain variable domain of TCR clone 11844 (TRBV7-2, TRBJ2-1)
CASTHGTGIYNEQFF

SEQ ID NO: 23689 - protein, 13 aa, Homo sapiens
  CDR3 for alpha chain variable domain of TCR clone 11845 (TRAV27, TRAJ41)
CAGEGNSGYALNF

SEQ ID NO: 23690 - protein, 13 aa, Homo sapiens
  CDR3 for beta chain variable domain of TCR clone 11845 (TRBV19, TRBJ1-2)
CASSAPGQDGYTF

SEQ ID NO: 23691 - protein, 13 aa, Homo sapiens
  CDR3 for alpha chain variable domain of TCR clone 11846 (TRAV20, TRAJ21)
CAVEGYNFNKFYF

SEQ ID NO: 23692 - protein, 15 aa, Homo sapiens
  CDR3 for beta chain variable domain of TCR clone 11846 (TRBV7-2, TRBJ2-3)
CASSLAGAFIDTQYF

SEQ ID NO: 23693 - protein, 12 aa, Homo sapiens
  CDR3 for alpha chain variable domain of TCR clone 11847 (TRAV13-2, TRAJ23)
CAERHRGGKLIF

SEQ ID NO: 23694 - protein, 16 aa, Homo sapiens
  CDR3 for beta chain variable domain of TCR clone 11847 (TRBV20-1, TRBJ1-4)
CSAPGQGLLTNDKLFF

SEQ ID NO: 23695 - protein, 12 aa, Homo sapiens
  CDR3 for alpha chain variable domain of TCR clone 11848 (TRAV6, TRAJ10)
CALERGGNKLTF

SEQ ID NO: 23696 - protein, 15 aa, Homo sapiens
  CDR3 for beta chain variable domain of TCR clone 11848 (TRBV20-1, TRBJ2-7)
CSARDRVSGMDEQYF

SEQ ID NO: 23697 - protein, 15 aa, Homo sapiens
  CDR3 for alpha chain variable domain of TCR clone 11849 (TRAV2, TRAJ11)
CAVEDPNSGYSTLTF

SEQ ID NO: 23698 - protein, 15 aa, Homo sapiens
  CDR3 for beta chain variable domain of TCR clone 11849 (TRBV7-2, TRBJ1-2)
CASSPRAGWNYGYTF

SEQ ID NO: 23699 - protein, 15 aa, Homo sapiens
  CDR3 for alpha chain variable domain of TCR clone 11850 (TRAV20, TRAJ58)
CAVQDLETSGSRLTF

SEQ ID NO: 23700 - protein, 13 aa, Homo sapiens
  CDR3 for beta chain variable domain of TCR clone 11850 (TRBV20-1, TRBJ1-1)
CSAGGGGNTEAFF

SEQ ID NO: 23701 - protein, 13 aa, Homo sapiens
  CDR3 for alpha chain variable domain of TCR clone 11851 (TRAV17, TRAJ7)
CATDNYGNNRLAF

SEQ ID NO: 23702 - protein, 13 aa, Homo sapiens
  CDR3 for beta chain variable domain of TCR clone 11851 (TRBV7-9, TRBJ1-2)
CASSLKQNYGYTF

SEQ ID NO: 23703 - protein, 12 aa, Homo sapiens
  CDR3 for alpha chain variable domain of TCR clone 11852 (TRAV2, TRAJ10)
CASTGGGNKLTF

SEQ ID NO: 23704 - protein, 16 aa, Homo sapiens
  CDR3 for beta chain variable domain of TCR clone 11852 (TRBV7-3, TRBJ2-2)
CASSLKRGTLSGELFF

SEQ ID NO: 23705 - protein, 14 aa, Homo sapiens
  CDR3 for alpha chain variable domain of TCR clone 11853 (TRAV12-3, TRAJ15)
CAMIPPQAGTALIF

SEQ ID NO: 23706 - protein, 14 aa, Homo sapiens
  CDR3 for beta chain variable domain of TCR clone 11853 (TRBV20-1, TRBJ2-2)
CSARKRLTTGELFF

SEQ ID NO: 23707 - protein, 15 aa, Homo sapiens
  CDR3 for alpha chain variable domain of TCR clone 11854 (TRAV12-3, TRAJ6)
CAMSATTGGSYIPTF

SEQ ID NO: 23708 - protein, 16 aa, Homo sapiens
  CDR3 for beta chain variable domain of TCR clone 11854 (TRBV20-1, TRBJ1-2)
CSASMGQGVANYGYTL

SEQ ID NO: 23709 - protein, 17 aa, Homo sapiens
  CDR3 for alpha chain variable domain of TCR clone 11855 (TRAV12-2, TRAJ48)
CASNEKLTFGTGTRLTI

SEQ ID NO: 23710 - protein, 15 aa, Homo sapiens
  CDR3 for beta chain variable domain of TCR clone 11855 (TRBV5-1, TRBJ2-1)
YASSQAGYWWNEQFF

SEQ ID NO: 23711 - protein, 13 aa, Homo sapiens
  CDR3 for alpha chain variable domain of TCR clone 11856 (TRAV13-1, TRAJ47)
CAATLTGGNKLVF

SEQ ID NO: 23712 - protein, 14 aa, Homo sapiens
  CDR3 for beta chain variable domain of TCR clone 11856 (TRBV12-4, TRBJ1-2)
CASSNLRGNYGYTF

SEQ ID NO: 23713 - protein, 21 aa, Homo sapiens
  CDR3 for alpha chain variable domain of TCR clone 11857 (TRAV1-1, TRAJ30)
CLLLLRCEREGGENRDDKIIF

SEQ ID NO: 23714 - protein, 12 aa, Homo sapiens
  CDR3 for beta chain variable domain of TCR clone 11857 (TRBV12-4, TRBJ2-7)
CASSLGGYEQYF

SEQ ID NO: 23715 - protein, 14 aa, Homo sapiens
  CDR3 for alpha chain variable domain of TCR clone 11858 (TRAV12-2, TRAJ17)
CAVLFKAACNKLTF

SEQ ID NO: 23716 - protein, 17 aa, Homo sapiens
  CDR3 for beta chain variable domain of TCR clone 11858 (TRBV20-1, TRBJ2-2)
CSASGSGQGGLTGELFF

SEQ ID NO: 23717 - protein, 15 aa, Homo sapiens
  CDR3 for alpha chain variable domain of TCR clone 11859 (TRAV26-1, TRAJ29)
CIVRVEGSGNTPLVF

SEQ ID NO: 23718 - protein, 15 aa, Homo sapiens
  CDR3 for beta chain variable domain of TCR clone 11859 (TRBV7-9, TRBJ1-5)
CASRQGHQPNQPQHF

SEQ ID NO: 23719 - protein, 16 aa, Homo sapiens
  CDR3 for alpha chain variable domain of TCR clone 11860 (TRAV1-2, TRAJ10)
CAVRGVLTGGGNKLTF

SEQ ID NO: 23720 - protein, 12 aa, Homo sapiens
  CDR3 for beta chain variable domain of TCR clone 11860 (TRBV7-8, TRBJ2-7)
CASSLGGREQYF

SEQ ID NO: 23721 - protein, 11 aa, Homo sapiens
  CDR3 for alpha chain variable domain of TCR clone 11861 (TRAV3, TRAJ21)
CAVGNFNKFYF

SEQ ID NO: 23722 - protein, 16 aa, Homo sapiens
  CDR3 for beta chain variable domain of TCR clone 11861 (TRBV19, TRBJ2-1)
CASSKAGSSSYNEQFF

SEQ ID NO: 23723 - protein, 19 aa, Homo sapiens
  CDR3 for alpha chain variable domain of TCR clone 11862 (TRAV1-2, TRAJ26)
CLLPLCCERPDNYGQNFVF

SEQ ID NO: 23724 - protein, 14 aa, Homo sapiens
  CDR3 for beta chain variable domain of TCR clone 11862 (TRBV12-4, TRBJ1-6)
CASNLQGKGSPLHF

SEQ ID NO: 23725 - protein, 14 aa, Homo sapiens
  CDR3 for alpha chain variable domain of TCR clone 11863 (TRAV13-2, TRAJ20)
CAESPAKDDYKLSF

SEQ ID NO: 23726 - protein, 12 aa, Homo sapiens
  CDR3 for beta chain variable domain of TCR clone 11863 (TRBV7-8, TRBJ2-5)
CASSPRVETQYF

SEQ ID NO: 23727 - protein, 17 aa, Homo sapiens
  CDR3 for alpha chain variable domain of TCR clone 11864 (TRAV3, TRAJ28)
CAVRPLYSGAGSYQLTF

SEQ ID NO: 23728 - protein, 16 aa, Homo sapiens
  CDR3 for beta chain variable domain of TCR clone 11864 (TRBV4-2, TRBJ1-4)
CASSQARGPTNEKLFF

SEQ ID NO: 23729 - protein, 16 aa, Homo sapiens
  CDR3 for alpha chain variable domain of TCR clone 11865 (TRAV30, TRAJ24)
CGTEIVDADSWGKFQF

SEQ ID NO: 23730 - protein, 15 aa, Homo sapiens
  CDR3 for beta chain variable domain of TCR clone 11865 (TRBV7-9, TRBJ1-5)
CASSQGHQPNQPQHF

SEQ ID NO: 23731 - protein, 14 aa, Homo sapiens
  CDR3 for alpha chain variable domain of TCR clone 11866 (TRAV12-1, TRAJ17)
CVVNYKAAGNKLTF

SEQ ID NO: 23732 - protein, 17 aa, Homo sapiens
  CDR3 for beta chain variable domain of TCR clone 11866 (TRBV20-1, TRBJ2-1)
CSASPSGLAGSYNEQFF

SEQ ID NO: 23733 - protein, 14 aa, Homo sapiens
  CDR3 for alpha chain variable domain of TCR clone 11867 (TRAV8-3, TRAJ30)
CAVGDMNRDDKIIF

SEQ ID NO: 23734 - protein, 16 aa, Homo sapiens
  CDR3 for beta chain variable domain of TCR clone 11867 (TRBV29-1, TRBJ2-7)
CSVEDAEDGTAYEQYF

SEQ ID NO: 23735 - protein, 16 aa, Homo sapiens
  CDR3 for alpha chain variable domain of TCR clone 11868 (TRAV30, TRAJ24)
CGTEIVDAVSWGKFQF

SEQ ID NO: 23736 - protein, 14 aa, Homo sapiens
  CDR3 for beta chain variable domain of TCR clone 11868 (TRBV12-5, TRBJ2-5)
CASGSRTHQETQYF

SEQ ID NO: 23737 - protein, 14 aa, Homo sapiens
  CDR3 for alpha chain variable domain of TCR clone 11869 (TRAV38-1, TRAJ40)
CALRPTSGTYKYIL

SEQ ID NO: 23738 - protein, 14 aa, Homo sapiens
  CDR3 for beta chain variable domain of TCR clone 11869 (TRBV25-1, TRBJ1-1)
CASTHLGGNTEAFF

SEQ ID NO: 23739 - protein, 13 aa, Homo sapiens
  CDR3 for alpha chain variable domain of TCR clone 11870 (TRAV13-1, TRAJ21)
CAASIYNFNKFYF

SEQ ID NO: 23740 - protein, 13 aa, Homo sapiens
  CDR3 for beta chain variable domain of TCR clone 11870 (TRBV27, TRBJ1-4)
CASSLMGDEKLFF

SEQ ID NO: 23741 - protein, 12 aa, Homo sapiens
  CDR3 for alpha chain variable domain of TCR clone 11871 (TRAV12-1, TRAJ20)
CVVNPDGYKLSF

SEQ ID NO: 23742 - protein, 12 aa, Homo sapiens
  CDR3 for beta chain variable domain of TCR clone 11871 (TRBV11-2, TRBJ2-2)
CASSLGGGELFF

SEQ ID NO: 23743 - protein, 13 aa, Homo sapiens
  CDR3 for alpha chain variable domain of TCR clone 11872 (TRAV21, TRAJ27)
CAARPGNAGKSTF

SEQ ID NO: 23744 - protein, 14 aa, Homo sapiens
  CDR3 for beta chain variable domain of TCR clone 11872 (TRBV7-6, TRBJ2-3)
CVSSLGTVTDTQYF

SEQ ID NO: 23745 - protein, 10 aa, Homo sapiens
  CDR3 for alpha chain variable domain of TCR clone 11873 (TRAV1-1, TRAJ30)
CAVRDDKIIF

SEQ ID NO: 23746 - protein, 15 aa, Homo sapiens
  CDR3 for beta chain variable domain of TCR clone 11873 (TRBV5-1, TRBJ1-1)
CASSLAAGTETEAFF

SEQ ID NO: 23747 - protein, 15 aa, Homo sapiens
  CDR3 for alpha chain variable domain of TCR clone 11874 (TRAV26-1, TRAJ29)
CIVRVKGSGNTPLVF

SEQ ID NO: 23748 - protein, 15 aa, Homo sapiens
  CDR3 for beta chain variable domain of TCR clone 11874 (TRBV7-9, TRBJ1-5)
CASSQGHQPNQPQHF

SEQ ID NO: 23749 - protein, 13 aa, Homo sapiens
  CDR3 for alpha chain variable domain of TCR clone 11875 (TRAV1-2, TRAJ12)
CAVSMDSSYKLIF

SEQ ID NO: 23750 - protein, 15 aa, Homo sapiens
  CDR3 for beta chain variable domain of TCR clone 11875 (TRBV6-1, TRBJ2-1)
CASSELRGQYNEQFF

SEQ ID NO: 23751 - protein, 14 aa, Homo sapiens
  CDR3 for alpha chain variable domain of TCR clone 11876 (TRAV26-1, TRAJ38)
CIADNACNNRKLIW

SEQ ID NO: 23752 - protein, 13 aa, Homo sapiens
  CDR3 for beta chain variable domain of TCR clone 11876 (TRBV20-1, TRBJ1-1)
CSARGGGNTEAFF

SEQ ID NO: 23753 - protein, 12 aa, Homo sapiens
  CDR3 for alpha chain variable domain of TCR clone 11877 (TRAV13-2, TRAJ23)
CVERHRGGKLIF

SEQ ID NO: 23754 - protein, 16 aa, Homo sapiens
  CDR3 for beta chain variable domain of TCR clone 11877 (TRBV20-1, TRBJ1-4)
CSAPGQGLLTNEKLFF

SEQ ID NO: 23755 - protein, 14 aa, Homo sapiens
  CDR3 for alpha chain variable domain of TCR clone 11878 (TRAV13-1, TRAJ35)
CAASKGGFRNVLHC

SEQ ID NO: 23756 - protein, 13 aa, Homo sapiens
  CDR3 for beta chain variable domain of TCR clone 11878 (TRBV7-3, TRBJ1-1)
CASSQDWGAEAFF

SEQ ID NO: 23757 - protein, 14 aa, Homo sapiens
  CDR3 for alpha chain variable domain of TCR clone 11879 (TRAV2, TRAJ37)
CAVDFTSNTGKLIF

SEQ ID NO: 23758 - protein, 15 aa, Homo sapiens
  CDR3 for beta chain variable domain of TCR clone 11879 (TRBV20-1, TRBJ1-1)
RSASRGVTGNTEAFF

SEQ ID NO: 23759 - protein, 15 aa, Homo sapiens
  CDR3 for alpha chain variable domain of TCR clone 11880 (TRAV27, TRAJ38)
CAARRNAGNNRKLIW

SEQ ID NO: 23760 - protein, 17 aa, Homo sapiens
  CDR3 for beta chain variable domain of TCR clone 11880 (TRBV5-8, TRBJ1-5)
CASSSRLQLYSNQPQHF

SEQ ID NO: 23761 - protein, 17 aa, Homo sapiens
  CDR3 for alpha chain variable domain of TCR clone 11881 (TRAV26-1, TRAJ53)
CIVRVDDSGGSNYKLKF

SEQ ID NO: 23762 - protein, 15 aa, Homo sapiens
  CDR3 for beta chain variable domain of TCR clone 11881 (TRBV20-1, TRBJ2-7)
CSARVPAAYFYEQYF

SEQ ID NO: 23763 - protein, 14 aa, Homo sapiens
  CDR3 for alpha chain variable domain of TCR clone 11882 (TRAV8-3, TRAJ10)
CAVDAGGGGNKLTF

SEQ ID NO: 23764 - protein, 15 aa, Homo sapiens
  CDR3 for beta chain variable domain of TCR clone 11882 (TRBV7-3, TRBJ2-3)
CASSRTGVSTDTQYF

SEQ ID NO: 23765 - protein, 12 aa, Homo sapiens
  CDR3 for alpha chain variable domain of TCR clone 11883 (TRAV12-3, TRAJ17)
CAMTLSGNKLTF

SEQ ID NO: 23766 - protein, 15 aa, Homo sapiens
  CDR3 for beta chain variable domain of TCR clone 11883 (TRBV20-1, TRBJ2-7)
CSARDRVSGMDEQYF

SEQ ID NO: 23767 - protein, 13 aa, Homo sapiens
  CDR3 for alpha chain variable domain of TCR clone 11884 (TRAV8-3, TRAJ43)
CAVGPDNNNDMRF

SEQ ID NO: 23768 - protein, 15 aa, Homo sapiens
  CDR3 for beta chain variable domain of TCR clone 11884 (TRBV11-3, TRBJ2-3)
CASLKDGREGDTQYF

SEQ ID NO: 23769 - protein, 17 aa, Homo sapiens
  CDR3 for alpha chain variable domain of TCR clone 11885 (TRAV2, TRAJ32)
CCLLLWGGGGATNKLIF

SEQ ID NO: 23770 - protein, 15 aa, Homo sapiens
  CDR3 for beta chain variable domain of TCR clone 11885 (TRBV20-1, TRBJ1-1)
CSARGGGTLKLSLDK

SEQ ID NO: 23771 - protein, 14 aa, Homo sapiens
  CDR3 for alpha chain variable domain of TCR clone 11886 (TRAV12-1, TRAJ17)
CVVNYKAAGNKLTF

SEQ ID NO: 23772 - protein, 16 aa, Homo sapiens
  CDR3 for beta chain variable domain of TCR clone 11886 (TRBV7-3, TRBJ2-2)
CASSLKRGTLSGELFF

SEQ ID NO: 23773 - protein, 13 aa, Homo sapiens
  CDR3 for alpha chain variable domain of TCR clone 11887 (TRAV3, TRAJ27)
CAVRPLGAGKPTF

SEQ ID NO: 23774 - protein, 13 aa, Homo sapiens
  CDR3 for beta chain variable domain of TCR clone 11887 (TRBV7-9, TRBJ2-3)
CASSPGSTDTQYF

SEQ ID NO: 23775 - protein, 14 aa, Homo sapiens
  CDR3 for alpha chain variable domain of TCR clone 11888 (TRAV1-2, TRAJ8)
CAVREDPGFQKLVF

SEQ ID NO: 23776 - protein, 15 aa, Homo sapiens
  CDR3 for beta chain variable domain of TCR clone 11888 (TRBV6-3, TRBJ2-7)
CASSSPGTVFYEQYF

SEQ ID NO: 23777 - protein, 17 aa, Homo sapiens
  CDR3 for alpha chain variable domain of TCR clone 11889 (TRAV3, TRAJ6)
CAVRDGPRAGGSYIPTF

SEQ ID NO: 23778 - protein, 14 aa, Homo sapiens
  CDR3 for beta chain variable domain of TCR clone 11889 (TRBV7-2, TRBJ2-7)
CVSSPKTSFYEQYF

SEQ ID NO: 23779 - protein, 14 aa, Homo sapiens
  CDR3 for alpha chain variable domain of TCR clone 11890 (TRAV2, TRAJ37)
CAVDFTSNTGKLIF

SEQ ID NO: 23780 - protein, 15 aa, Homo sapiens
  CDR3 for beta chain variable domain of TCR clone 11890 (TRBV28, TRBJ2-1)
CASSIIAGGRSEQFF

SEQ ID NO: 23781 - protein, 16 aa, Homo sapiens
  CDR3 for alpha chain variable domain of TCR clone 11891 (TRAV12-3, TRAJ53)
CAMSPGSGGSNYKLTF

SEQ ID NO: 23782 - protein, 11 aa, Homo sapiens
  CDR3 for beta chain variable domain of TCR clone 11891 (TRBV29-1, TRBJ2-5)
CSEDRKGTQYF

SEQ ID NO: 23783 - protein, 13 aa, Homo sapiens
  CDR3 for alpha chain variable domain of TCR clone 11892 (TRAV13-2, TRAJ48)
CVEMDFGNEKLTF

SEQ ID NO: 23784 - protein, 15 aa, Homo sapiens
  CDR3 for beta chain variable domain of TCR clone 11892 (TRBV7-9, TRBJ1-6)
CASSSPGRGNSPLHF

SEQ ID NO: 23785 - protein, 11 aa, Homo sapiens
  CDR3 for alpha chain variable domain of TCR clone 11893 (TRAV1-2, TRAJ31)
RAVNNNARLMF

SEQ ID NO: 23786 - protein, 15 aa, Homo sapiens
  CDR3 for beta chain variable domain of TCR clone 11893 (TRBV28, TRBJ2-1)
CASSIIAGGRSEQFF

SEQ ID NO: 23787 - protein, 13 aa, Homo sapiens
  CDR3 for alpha chain variable domain of TCR clone 11894 (TRAV13-2, TRAJ48)
CAEMDFGNEKLTF

SEQ ID NO: 23788 - protein, 13 aa, Homo sapiens
  CDR3 for beta chain variable domain of TCR clone 11894 (TRBV12-4, TRBJ1-2)
CASSLRQGKGYTF

SEQ ID NO: 23789 - protein, 11 aa, Homo sapiens
  CDR3 for alpha chain variable domain of TCR clone 11895 (TRAV2, TRAJ13)
CASGGYQKVTF

SEQ ID NO: 23790 - protein, 14 aa, Homo sapiens
  CDR3 for beta chain variable domain of TCR clone 11895 (TRBV25-1, TRBJ1-1)
CASTHLGGNTEAFF

SEQ ID NO: 23791 - protein, 18 aa, Homo sapiens
  CDR3 for alpha chain variable domain of TCR clone 11896 (TRAV21, TRAJ52)
CAVRPSPAGGTSYGKLIF

SEQ ID NO: 23792 - protein, 17 aa, Homo sapiens
  CDR3 for beta chain variable domain of TCR clone 11896 (TRBV13, TRBJ2-3)
CASSLSRVAGGRNTQYF

SEQ ID NO: 23793 - protein, 14 aa, Homo sapiens
  CDR3 for alpha chain variable domain of TCR clone 11897 (TRAV12-3, TRAJ10)
SHLPLTGGGNKLTF

SEQ ID NO: 23794 - protein, 16 aa, Homo sapiens
  CDR3 for beta chain variable domain of TCR clone 11897 (TRBV20-1, TRBJ1-4)
CSAPGQGLLTNEKLFF

SEQ ID NO: 23795 - protein, 14 aa, Homo sapiens
  CDR3 for alpha chain variable domain of TCR clone 11898 (TRAV17, TRAJ39)
CATDPVRAGNMLTL

SEQ ID NO: 23796 - protein, 15 aa, Homo sapiens
  CDR3 for beta chain variable domain of TCR clone 11898 (TRBV13, TRBJ1-5)
CASSFGQGGVQPQHF

SEQ ID NO: 23797 - protein, 18 aa, Homo sapiens
  CDR3 for alpha chain variable domain of TCR clone 11899 (TRAV21, TRAJ52)
CAVRPYPAGGTSYGKLTF

SEQ ID NO: 23798 - protein, 17 aa, Homo sapiens
  CDR3 for beta chain variable domain of TCR clone 11899 (TRBV13, TRBJ2-3)
CASSLSRVAGGRNTQYF

SEQ ID NO: 23799 - protein, 12 aa, Homo sapiens
  CDR3 for alpha chain variable domain of TCR clone 11900 (TRAV13-2, TRAJ23)
CAERHRGGKLIF

SEQ ID NO: 23800 - protein, 11 aa, Homo sapiens
  CDR3 for beta chain variable domain of TCR clone 11900 (TRBV12-4, TRBJ2-3)
CASTATDTQYF

SEQ ID NO: 23801 - protein, 10 aa, Homo sapiens
  CDR3 for alpha chain variable domain of TCR clone 11901 (TRAV23/DV6, TRAJ57)
CAASSTLSQG

SEQ ID NO: 23802 - protein, 14 aa, Homo sapiens
  CDR3 for beta chain variable domain of TCR clone 11901 (TRBV25-1, TRBJ1-1)
CASTHLGGNTEASF

SEQ ID NO: 23803 - protein, 15 aa, Homo sapiens
  CDR3 for alpha chain variable domain of TCR clone 11902 (TRAV2, TRAJ9)
CAVDDRGTGGFKTIF

SEQ ID NO: 23804 - protein, 16 aa, Homo sapiens
  CDR3 for beta chain variable domain of TCR clone 11902 (TRBV24-1, TRBJ2-3)
CATSDPGTGATDTQYF

SEQ ID NO: 23805 - protein, 14 aa, Homo sapiens
  CDR3 for alpha chain variable domain of TCR clone 11903 (TRAV26-1, TRAJ45)
CIEVTGGGADGLTL

SEQ ID NO: 23806 - protein, 13 aa, Homo sapiens
  CDR3 for beta chain variable domain of TCR clone 11903 (TRBV7-6, TRBJ1-2)
CASSLVADYGYTF

SEQ ID NO: 23807 - protein, 12 aa, Homo sapiens
  CDR3 for alpha chain variable domain of TCR clone 11904 (TRAV2, TRAJ33)
CAFMDSNYQLIW

SEQ ID NO: 23808 - protein, 14 aa, Homo sapiens
  CDR3 for beta chain variable domain of TCR clone 11904 (TRBV6-1, TRBJ1-3)
CASVQGGGGNTIYF

SEQ ID NO: 23809 - protein, 14 aa, Homo sapiens
  CDR3 for alpha chain variable domain of TCR clone 11905 (TRAV12-2, TRAJ40)
CAVKIPSGTYKYLF

SEQ ID NO: 23810 - protein, 14 aa, Homo sapiens
  CDR3 for beta chain variable domain of TCR clone 11905 (TRBV20-1, TRBJ1-1)
CSAQTRIGGTEAFF

SEQ ID NO: 23811 - protein, 15 aa, Homo sapiens
  CDR3 for alpha chain variable domain of TCR clone 11906 (TRAV29/DV5, TRAJ45)
CAALRGGGGADGLTF

SEQ ID NO: 23812 - protein, 15 aa, Homo sapiens
  CDR3 for beta chain variable domain of TCR clone 11906 (TRBV13, TRBJ1-2)
CASSLGRQPGYGYTF

SEQ ID NO: 23813 - protein, 17 aa, Homo sapiens
  CDR3 for alpha chain variable domain of TCR clone 11907 (TRAV3, TRAJ6)
CDVRDGPRAGGSYIPTF

SEQ ID NO: 23814 - protein, 14 aa, Homo sapiens
  CDR3 for beta chain variable domain of TCR clone 11907 (TRBV7-2, TRBJ2-7)
CASSPKTSFYEQYF

SEQ ID NO: 23815 - protein, 13 aa, Homo sapiens
  CDR3 for alpha chain variable domain of TCR clone 11908 (TRAV2, TRAJ15)
CAVASQAGTALIF

SEQ ID NO: 23816 - protein, 16 aa, Homo sapiens
  CDR3 for beta chain variable domain of TCR clone 11908 (TRBV5-1, TRBJ1-1)
RASSSGGNSLNTEAFF

SEQ ID NO: 23817 - protein, 15 aa, Homo sapiens
  CDR3 for alpha chain variable domain of TCR clone 11909 (TRAV8-4, TRAJ3)
CAVSEPYSSASKIIF

SEQ ID NO: 23818 - protein, 18 aa, Homo sapiens
  CDR3 for beta chain variable domain of TCR clone 11909 (TRBV6-1, TRBJ1-6)
CASSGSDGRRINNSPLHF

SEQ ID NO: 23819 - protein, 16 aa, Homo sapiens
  CDR3 for alpha chain variable domain of TCR clone 11910 (TRAV30, TRAJ24)
CGTEIVDADSWGKFQF

SEQ ID NO: 23820 - protein, 14 aa, Homo sapiens
  CDR3 for beta chain variable domain of TCR clone 11910 (TRBV12-5, TRBJ2-5)
CGSGSRTHQETQYF

SEQ ID NO: 23821 - protein, 12 aa, Homo sapiens
  CDR3 for alpha chain variable domain of TCR clone 11911 (TRAV8-3, TRAJ26)
CAGDNYGQNFVF

SEQ ID NO: 23822 - protein, 15 aa, Homo sapiens
  CDR3 for beta chain variable domain of TCR clone 11911 (TRBV9, TRBJ2-1)
CASSLAGSAYNEQFF

SEQ ID NO: 23823 - protein, 15 aa, Homo sapiens
  CDR3 for alpha chain variable domain of TCR clone 11912 (TRAV26-1, TRAJ29)
CIVRVEGSGNTPIVF

SEQ ID NO: 23824 - protein, 14 aa, Homo sapiens
  CDR3 for beta chain variable domain of TCR clone 11912 (TRBV18, TRBJ2-5)
CASSPGVSQETQYF

SEQ ID NO: 23825 - protein, 13 aa, Homo sapiens
  CDR3 for alpha chain variable domain of TCR clone 11913 (TRAV3, TRAJ27)
CAVRPLGAGKSTF

SEQ ID NO: 23826 - protein, 13 aa, Homo sapiens
  CDR3 for beta chain variable domain of TCR clone 11913 (TRBV7-9, TRBJ2-3)
RASSPGSTDTQYF

SEQ ID NO: 23827 - protein, 13 aa, Homo sapiens
  CDR3 for alpha chain variable domain of TCR clone 11914 (TRAV2, TRAJ40)
CAAVTSGTYKYIF

SEQ ID NO: 23828 - protein, 15 aa, Homo sapiens
  CDR3 for beta chain variable domain of TCR clone 11914 (TRBV11-3, TRBJ2-3)
CASLKDGREGDTQYF

SEQ ID NO: 23829 - protein, 13 aa, Homo sapiens
  CDR3 for alpha chain variable domain of TCR clone 11915 (TRAV21, TRAJ57)
CAVTQGGYEKLVF

SEQ ID NO: 23830 - protein, 16 aa, Homo sapiens
  CDR3 for beta chain variable domain of TCR clone 11915 (TRBV29-1, TRBJ2-7)
CSVEDAEDGTAYEQYF

SEQ ID NO: 23831 - protein, 20 aa, Homo sapiens
  CDR3 for alpha chain variable domain of TCR clone 11916 (TRAV2, TRAJ15)
ILQVREADAAVFSPRTALIF

SEQ ID NO: 23832 - protein, 15 aa, Homo sapiens
  CDR3 for beta chain variable domain of TCR clone 11916 (TRBV7-6, TRBJ2-3)
CASSSEGGLAHTQYF

SEQ ID NO: 23833 - protein, 13 aa, Homo sapiens
  CDR3 for alpha chain variable domain of TCR clone 11917 (TRAV36/DV7, TRAJ54)
CAVDIQGAQKLVF

SEQ ID NO: 23834 - protein, 15 aa, Homo sapiens
  CDR3 for beta chain variable domain of TCR clone 11917 (TRBV7-9, TRBJ1-4)
CASSATGGNNEKLFF

SEQ ID NO: 23835 - protein, 18 aa, Homo sapiens
  CDR3 for alpha chain variable domain of TCR clone 11918 (TRAV13-1, TRAJ52)
CAASKRSAGGTSYGKLTF

SEQ ID NO: 23836 - protein, 14 aa, Homo sapiens
  CDR3 for beta chain variable domain of TCR clone 11918 (TRBV6-1, TRBJ1-3)
CASVQGGGGNTIYF

SEQ ID NO: 23837 - protein, 14 aa, Homo sapiens
  CDR3 for alpha chain variable domain of TCR clone 11919 (TRAV1-2, TRAJ8)
CAVREDTGFQKLVF

SEQ ID NO: 23838 - protein, 16 aa, Homo sapiens
  CDR3 for beta chain variable domain of TCR clone 11919 (TRBV7-3, TRBJ2-1)
CASSLEGYRSYNEQFF

SEQ ID NO: 23839 - protein, 14 aa, Homo sapiens
  CDR3 for alpha chain variable domain of TCR clone 11920 (TRAV12-3, TRAJ10)
SHLPLTGGGNKLTF

SEQ ID NO: 23840 - protein, 14 aa, Homo sapiens
  CDR3 for beta chain variable domain of TCR clone 11920 (TRBV9, TRBJ2-7)
CASSVGVGSYEQYF

SEQ ID NO: 23841 - protein, 11 aa, Homo sapiens
  CDR3 for alpha chain variable domain of TCR clone 11921 (TRAV13-1, TRAJ34)
CAASPTDKLIF

SEQ ID NO: 23842 - protein, 15 aa, Homo sapiens
  CDR3 for beta chain variable domain of TCR clone 11921 (TRBV10-2, TRBJ2-6)
CASSTQSPGANVLTF

SEQ ID NO: 23843 - protein, 14 aa, Homo sapiens
  CDR3 for alpha chain variable domain of TCR clone 11922 (TRAV2, TRAJ9)
CAVEDRSGGFKTIF

SEQ ID NO: 23844 - protein, 13 aa, Homo sapiens
  CDR3 for beta chain variable domain of TCR clone 11922 (TRBV7-3, TRBJ2-5)
CAGSFRGGETQYF

SEQ ID NO: 23845 - protein, 12 aa, Homo sapiens
  CDR3 for alpha chain variable domain of TCR clone 11923 (TRAV3, TRAJ31)
CAVRDGNARLMF

SEQ ID NO: 23846 - protein, 14 aa, Homo sapiens
  CDR3 for beta chain variable domain of TCR clone 11923 (TRBV6-3, TRBJ1-1)
CASSYGGQHTEAFF

SEQ ID NO: 23847 - protein, 12 aa, Homo sapiens
  CDR3 for alpha chain variable domain of TCR clone 11924 (TRAV10, TRAJ20)
CVVSASDYKLSF

SEQ ID NO: 23848 - protein, 15 aa, Homo sapiens
  CDR3 for beta chain variable domain of TCR clone 11924 (TRBV3-1, TRBJ2-1)
CASSQDYTPRGEQFF

SEQ ID NO: 23849 - protein, 18 aa, Homo sapiens
  CDR3 for alpha chain variable domain of TCR clone 11925 (TRAV8-4, TRAJ52)
CAVTRANAGGTSYGKLTF

SEQ ID NO: 23850 - protein, 16 aa, Homo sapiens
  CDR3 for beta chain variable domain of TCR clone 11925 (TRBV6-4, TRBJ1-2)
CASSEAVGDPNYGYTF

SEQ ID NO: 23851 - protein, 12 aa, Homo sapiens
  CDR3 for alpha chain variable domain of TCR clone 11926 (TRAV8-3, TRAJ20)
CAVGANDYKLSF

SEQ ID NO: 23852 - protein, 16 aa, Homo sapiens
  CDR3 for beta chain variable domain of TCR clone 11926 (TRBV19, TRBJ2-2)
CASRSPGTGATGELLF

SEQ ID NO: 23853 - protein, 14 aa, Homo sapiens
  CDR3 for alpha chain variable domain of TCR clone 11927 (TRAV17, TRAJ45)
CATDARGGADGLTL

SEQ ID NO: 23854 - protein, 11 aa, Homo sapiens
  CDR3 for beta chain variable domain of TCR clone 11927 (TRBV28, TRBJ2-5)
CATGNQETQYF

SEQ ID NO: 23855 - protein, 14 aa, Homo sapiens
  CDR3 for alpha chain variable domain of TCR clone 11928 (TRAV12-2, TRAJ40)
CAVKIPSGTYKYIF

SEQ ID NO: 23856 - protein, 14 aa, Homo sapiens
  CDR3 for beta chain variable domain of TCR clone 11928 (TRBV20-1, TRBJ1-1)
CSAQTRIGGIEAFF

SEQ ID NO: 23857 - protein, 17 aa, Homo sapiens
  CDR3 for alpha chain variable domain of TCR clone 11929 (TRAV1-2, TRAJ23)
CAVRPHSIYNQGGKLIF

SEQ ID NO: 23858 - protein, 15 aa, Homo sapiens
  CDR3 for beta chain variable domain of TCR clone 11929 (TRBV25-1, TRBJ1-4)
CASSGSGTGIEKLFF

SEQ ID NO: 23859 - protein, 14 aa, Homo sapiens
  CDR3 for alpha chain variable domain of TCR clone 11930 (TRAV1-2, TRAJ8)
CAVREDTGFQKLVF

SEQ ID NO: 23860 - protein, 14 aa, Homo sapiens
  CDR3 for beta chain variable domain of TCR clone 11930 (TRBV4-1, TRBJ2-7)
CASSPVAGGDEQYF

SEQ ID NO: 23861 - protein, 13 aa, Homo sapiens
  CDR3 for alpha chain variable domain of TCR clone 11931 (TRAV10, TRAJ34)
CVVSGENTDKLIF

SEQ ID NO: 23862 - protein, 14 aa, Homo sapiens
  CDR3 for beta chain variable domain of TCR clone 11931 (TRBV19, TRBJ2-7)
CASSTTRSSYEQYF

SEQ ID NO: 23863 - protein, 14 aa, Homo sapiens
  CDR3 for alpha chain variable domain of TCR clone 11932 (TRAV8-3, TRAJ47)
CAVGAQGRGNKLVF

SEQ ID NO: 23864 - protein, 15 aa, Homo sapiens
  CDR3 for beta chain variable domain of TCR clone 11932 (TRBV7-8, TRBJ2-3)
CASSPRTGSTDTQYF

SEQ ID NO: 23865 - protein, 12 aa, Homo sapiens
  CDR3 for alpha chain variable domain of TCR clone 11933 (TRAV17, TRAJ12)
CATLRSSYKLIF

SEQ ID NO: 23866 - protein, 16 aa, Homo sapiens
  CDR3 for beta chain variable domain of TCR clone 11933 (TRBV28, TRBJ2-7)
CASSLFLETGGPEQYF

SEQ ID NO: 23867 - protein, 15 aa, Homo sapiens
  CDR3 for alpha chain variable domain of TCR clone 11934 (TRAV8-3, TRAJ27)
CAVCPSKTNAGKSTF

SEQ ID NO: 23868 - protein, 15 aa, Homo sapiens
  CDR3 for beta chain variable domain of TCR clone 11934 (TRBV7-2, TRBJ2-1)
CASSSGLAGGNEQFF

SEQ ID NO: 23869 - protein, 14 aa, Homo sapiens
  CDR3 for alpha chain variable domain of TCR clone 11935 (TRAV12-1, TRAJ12)
CVVTRMDSSYKLIF

SEQ ID NO: 23870 - protein, 14 aa, Homo sapiens
  CDR3 for beta chain variable domain of TCR clone 11935 (TRBV4-1, TRBJ2-2)
CASSQAVNTGELFF

SEQ ID NO: 23871 - protein, 15 aa, Homo sapiens
  CDR3 for alpha chain variable domain of TCR clone 11936 (TRAV10, TRAJ3)
CVVSVRYSSASKIIF

SEQ ID NO: 23872 - protein, 14 aa, Homo sapiens
  CDR3 for beta chain variable domain of TCR clone 11936 (TRBV11-1, TRBJ2-7)
CASSFRQGSYEQYF

SEQ ID NO: 23873 - protein, 15 aa, Homo sapiens
  CDR3 for alpha chain variable domain of TCR clone 11937 (TRAV3, TRAJ5)
CAVRDLDTVRRALTF

SEQ ID NO: 23874 - protein, 13 aa, Homo sapiens
  CDR3 for beta chain variable domain of TCR clone 11937 (TRBV12-4, TRBJ2-7)
CASSPTETYEQYF

SEQ ID NO: 23875 - protein, 14 aa, Homo sapiens
  CDR3 for alpha chain variable domain of TCR clone 11938 (TRAV12-2, TRAJ13)
CAVKKTEGYQKVTF

SEQ ID NO: 23876 - protein, 15 aa, Homo sapiens
  CDR3 for beta chain variable domain of TCR clone 11938 (TRBV27, TRBJ2-1)
CASSNGGGSSNEQFF

SEQ ID NO: 23877 - protein, 15 aa, Homo sapiens
  CDR3 for alpha chain variable domain of TCR clone 11939 (TRAV12-3, TRAJ6)
CAMSATTGGSYIPPF

SEQ ID NO: 23878 - protein, 16 aa, Homo sapiens
  CDR3 for beta chain variable domain of TCR clone 11939 (TRBV20-1, TRBJ1-2)
CSASMGQGVANYGYTF

SEQ ID NO: 23879 - protein, 14 aa, Homo sapiens
  CDR3 for alpha chain variable domain of TCR clone 11940 (TRAV16, TRAJ57)
CALPTQGGSEKLVF

SEQ ID NO: 23880 - protein, 23 aa, Homo sapiens
  CDR3 for beta chain variable domain of TCR clone 11940 (TRBV28, TRBJ1-3)
CASWGGASLWKHHIFWRGKLAHC

SEQ ID NO: 23881 - protein, 14 aa, Homo sapiens
  CDR3 for alpha chain variable domain of TCR clone 11941 (TRAV26-1, TRAJ38)
CIADNAGNNRKLIW

SEQ ID NO: 23882 - protein, 13 aa, Homo sapiens
  CDR3 for beta chain variable domain of TCR clone 11941 (TRBV20-1, TRBJ1-1)
CSARGGGSTEAFF

SEQ ID NO: 23883 - protein, 11 aa, Homo sapiens
  CDR3 for alpha chain variable domain of TCR clone 11942 (TRAV12-3, TRAJ49)
CAANTGNQFYF

SEQ ID NO: 23884 - protein, 16 aa, Homo sapiens
  CDR3 for beta chain variable domain of TCR clone 11942 (TRBV7-9, TRBJ2-1)
CASSDVAGGSYNEQFF

SEQ ID NO: 23885 - protein, 15 aa, Homo sapiens
  CDR3 for alpha chain variable domain of TCR clone 11943 (TRAV12-3, TRAJ52)
CNGGAGGTSYGRLTF

SEQ ID NO: 23886 - protein, 13 aa, Homo sapiens
  CDR3 for beta chain variable domain of TCR clone 11943 (TRBV20-1, TRBJ2-5)
CSARGDYQETQYF

SEQ ID NO: 23887 - protein, 16 aa, Homo sapiens
  CDR3 for alpha chain variable domain of TCR clone 11944 (TRAV12-3, TRAJ53)
CAMSPGSGGSNYKLTF

SEQ ID NO: 23888 - protein, 16 aa, Homo sapiens
  CDR3 for beta chain variable domain of TCR clone 11944 (TRBV7-2, TRBJ2-6)
CAILSGVSSGANVLTF

SEQ ID NO: 23889 - protein, 20 aa, Homo sapiens
  CDR3 for alpha chain variable domain of TCR clone 11945 (TRAV23/DV6, )
CAATALIPDIQNPDPAVYQL

SEQ ID NO: 23890 - protein, 16 aa, Homo sapiens
  CDR3 for beta chain variable domain of TCR clone 11945 (TRBV10-3, TRBJ2-7)
CAISPRGQEQTYEQYF

SEQ ID NO: 23891 - protein, 14 aa, Homo sapiens
  CDR3 for alpha chain variable domain of TCR clone 11946 (TRAV1-2, TRAJ16)
CAVNRFSDGQKLLF

SEQ ID NO: 23892 - protein, 13 aa, Homo sapiens
  CDR3 for beta chain variable domain of TCR clone 11946 (TRBV12-4, TRBJ1-2)
CASSLRQGKGYTF

SEQ ID NO: 23893 - protein, 14 aa, Homo sapiens
  CDR3 for alpha chain variable domain of TCR clone 11947 (TRAV12-2, TRAJ40)
CAVKIPSGTYKYIF

SEQ ID NO: 23894 - protein, 14 aa, Homo sapiens
  CDR3 for beta chain variable domain of TCR clone 11947 (TRBV20-1, TRBJ1-1)
CSAQTRIGGTEAFC

SEQ ID NO: 23895 - protein, 17 aa, Homo sapiens
  CDR3 for alpha chain variable domain of TCR clone 11948 (TRAV3, TRAJ6)
CAVRDGPRAGGSYIPTF

SEQ ID NO: 23896 - protein, 17 aa, Homo sapiens
  CDR3 for beta chain variable domain of TCR clone 11948 (TRBV11-2, TRBJ2-1)
CASSLYPPGVEYNEQFF

SEQ ID NO: 23897 - protein, 14 aa, Homo sapiens
  CDR3 for alpha chain variable domain of TCR clone 11949 (TRAV2, TRAJ37)
CAVDFTSSTGKLIF

SEQ ID NO: 23898 - protein, 15 aa, Homo sapiens
  CDR3 for beta chain variable domain of TCR clone 11949 (TRBV20-1, TRBJ1-1)
CSASRGVTGNTEAFF

SEQ ID NO: 23899 - protein, 17 aa, Homo sapiens
  CDR3 for alpha chain variable domain of TCR clone 11950 (TRAV36/DV7, TRAJ52)
CAVAQRAGGTSYGKLTF

SEQ ID NO: 23900 - protein, 15 aa, Homo sapiens
  CDR3 for beta chain variable domain of TCR clone 11950 (TRBV9, TRBJ1-6)
CASSVAGTGDSPLHF

SEQ ID NO: 23901 - protein, 14 aa, Homo sapiens
  CDR3 for alpha chain variable domain of TCR clone 11951 (TRAV13-1, TRAJ42)
CAGYYGGSQGNLIF

SEQ ID NO: 23902 - protein, 14 aa, Homo sapiens
  CDR3 for beta chain variable domain of TCR clone 11951 (TRBV5-1, TRBJ2-5)
CASSLGQGRETQYF

SEQ ID NO: 23903 - protein, 11 aa, Homo sapiens
  CDR3 for alpha chain variable domain of TCR clone 11952 (TRAV2, TRAJ13)
CASGGYQKVTF

SEQ ID NO: 23904 - protein, 14 aa, Homo sapiens
  CDR3 for beta chain variable domain of TCR clone 11952 (TRBV7-3, TRBJ2-7)
CANSYDQDYYEQYF

SEQ ID NO: 23905 - protein, 15 aa, Homo sapiens
  CDR3 for alpha chain variable domain of TCR clone 11953 (TRAV3, TRAJ22)
CAVRDRGGSARQLTF

SEQ ID NO: 23906 - protein, 14 aa, Homo sapiens
  CDR3 for beta chain variable domain of TCR clone 11953 (TRBV19, TRBJ2-1)
CASPTFVLSGEQFF

SEQ ID NO: 23907 - protein, 18 aa, Homo sapiens
  CDR3 for alpha chain variable domain of TCR clone 11954 (TRAV12-3, TRAJ52)
CAMSVGGAGGTSYGKLTF

SEQ ID NO: 23908 - protein, 15 aa, Homo sapiens
  CDR3 for beta chain variable domain of TCR clone 11954 (TRBV27, TRBJ1-6)
CASSFDRGLGSPLLF

SEQ ID NO: 23909 - protein, 13 aa, Homo sapiens
  CDR3 for alpha chain variable domain of TCR clone 11955 (TRAV20, TRAJ37)
RAGCSSNTGKLIF

SEQ ID NO: 23910 - protein, 11 aa, Homo sapiens
  CDR3 for beta chain variable domain of TCR clone 11955 (TRBV12-4, TRBJ2-3)
CASTATDTQYF

SEQ ID NO: 23911 - protein, 15 aa, Homo sapiens
  CDR3 for alpha chain variable domain of TCR clone 11956 (TRAV2, TRAJ9)
CAVEDRGTGGFNTIF

SEQ ID NO: 23912 - protein, 16 aa, Homo sapiens
  CDR3 for beta chain variable domain of TCR clone 11956 (TRBV24-1, TRBJ2-3)
CATSDPGTGATDTQYF

SEQ ID NO: 23913 - protein, 14 aa, Homo sapiens
  CDR3 for alpha chain variable domain of TCR clone 11957 (TRAV9-2, TRAJ39)
CALYIYNAGNMLTF

SEQ ID NO: 23914 - protein, 11 aa, Homo sapiens
  CDR3 for beta chain variable domain of TCR clone 11957 (TRBV29-1, TRBJ2-5)
CSVASGETQYF

SEQ ID NO: 23915 - protein, 12 aa, Homo sapiens
  CDR3 for alpha chain variable domain of TCR clone 11958 (TRAV12-1, TRAJ40)
CVVYSGTYKYIF

SEQ ID NO: 23916 - protein, 18 aa, Homo sapiens
  CDR3 for beta chain variable domain of TCR clone 11958 (TRBV11-2, TRBJ2-3)
CSSSLGGASRGAPNTQYF

SEQ ID NO: 23917 - protein, 11 aa, Homo sapiens
  CDR3 for alpha chain variable domain of TCR clone 11959 (TRAV23/DV6, TRAJ49)
CAAETGNQFYF

SEQ ID NO: 23918 - protein, 14 aa, Homo sapiens
  CDR3 for beta chain variable domain of TCR clone 11959 (TRBV4-1, TRBJ2-7)
CASSRLSGSYEQYF

SEQ ID NO: 23919 - protein, 13 aa, Homo sapiens
  CDR3 for alpha chain variable domain of TCR clone 11960 (TRAV21, TRAJ36)
CAVIKTGANNFFF

SEQ ID NO: 23920 - protein, 13 aa, Homo sapiens
  CDR3 for beta chain variable domain of TCR clone 11960 (TRBV29-1, TRBJ2-3)
CSATRGGRDTQYF

SEQ ID NO: 23921 - protein, 15 aa, Homo sapiens
  CDR3 for alpha chain variable domain of TCR clone 11961 (TRAV26-1, TRAJ44)
CIVRANTGTASKLTF

SEQ ID NO: 23922 - protein, 16 aa, Homo sapiens
  CDR3 for beta chain variable domain of TCR clone 11961 (TRBV7-7, TRBJ2-1)
CASSLASGTAYNEQFF

SEQ ID NO: 23923 - protein, 15 aa, Homo sapiens
  CDR3 for alpha chain variable domain of TCR clone 11962 (TRAV17, TRAJ23)
CATDAEDNQGGKLIL

SEQ ID NO: 23924 - protein, 12 aa, Homo sapiens
  CDR3 for beta chain variable domain of TCR clone 11962 (TRBV2, TRBJ2-1)
CAKREGYNEQFF

SEQ ID NO: 23925 - protein, 13 aa, Homo sapiens
  CDR3 for alpha chain variable domain of TCR clone 11963 (TRAV2, TRAJ40)
CAVVTSGTYKYIF

SEQ ID NO: 23926 - protein, 14 aa, Homo sapiens
  CDR3 for beta chain variable domain of TCR clone 11963 (TRBV19, TRBJ2-1)
CASPTFVLSGEQFV

SEQ ID NO: 23927 - protein, 14 aa, Homo sapiens
  CDR3 for alpha chain variable domain of TCR clone 11964 (TRAV29/DV5, TRAJ36)
CAARRKTGANNLFF

SEQ ID NO: 23928 - protein, 14 aa, Homo sapiens
  CDR3 for beta chain variable domain of TCR clone 11964 (TRBV19, TRBJ2-1)
CASPTFVLSGEQFF

SEQ ID NO: 23929 - protein, 14 aa, Homo sapiens
  CDR3 for alpha chain variable domain of TCR clone 11965 (TRAV9-2, TRAJ39)
CALYIYNAGNMLTF

SEQ ID NO: 23930 - protein, 14 aa, Homo sapiens
  CDR3 for beta chain variable domain of TCR clone 11965 (TRBV4-1, TRBJ2-2)
CASSQAVNTGELFF

SEQ ID NO: 23931 - protein, 13 aa, Homo sapiens
  CDR3 for alpha chain variable domain of TCR clone 11966 (TRAV12-3, TRAJ33)
CAMSVNSNYQLIW

SEQ ID NO: 23932 - protein, 14 aa, Homo sapiens
  CDR3 for beta chain variable domain of TCR clone 11966 (TRBV27, TRBJ2-7)
CASSLAGLSYEQYF

SEQ ID NO: 23933 - protein, 11 aa, Homo sapiens
  CDR3 for alpha chain variable domain of TCR clone 11967 (TRAV13-1, TRAJ16)
CAALDGQKLLF

SEQ ID NO: 23934 - protein, 16 aa, Homo sapiens
  CDR3 for beta chain variable domain of TCR clone 11967 (TRBV28, TRBJ1-4)
CASRPGQGTTREKLFF

SEQ ID NO: 23935 - protein, 15 aa, Homo sapiens
  CDR3 for alpha chain variable domain of TCR clone 11968 (TRAV26-1, TRAJ29)
CIVRVQGSGNTPLVF

SEQ ID NO: 23936 - protein, 15 aa, Homo sapiens
  CDR3 for beta chain variable domain of TCR clone 11968 (TRBV7-9, TRBJ1-5)
CASSQGHQPNQPQHF

SEQ ID NO: 23937 - protein, 11 aa, Homo sapiens
  CDR3 for alpha chain variable domain of TCR clone 11969 (TRAV3, TRAJ21)
CAVGNFNKFYF

SEQ ID NO: 23938 - protein, 16 aa, Homo sapiens
  CDR3 for beta chain variable domain of TCR clone 11969 (TRBV19, TRBJ2-1)
CASSKAGPSSYNEQFV

SEQ ID NO: 23939 - protein, 12 aa, Homo sapiens
  CDR3 for alpha chain variable domain of TCR clone 11970 (TRAV12-3, TRAJ41)
CAMSYSGYALNF

SEQ ID NO: 23940 - protein, 13 aa, Homo sapiens
  CDR3 for beta chain variable domain of TCR clone 11970 (TRBV7-3, TRBJ2-1)
CASSVDSYNEQFF

SEQ ID NO: 23941 - protein, 11 aa, Homo sapiens
  CDR3 for alpha chain variable domain of TCR clone 11971 (TRAV1-2, TRAJ20)
CAVANDYKLSF

SEQ ID NO: 23942 - protein, 18 aa, Homo sapiens
  CDR3 for beta chain variable domain of TCR clone 11971 (TRBV20-1, TRBJ2-6)
CSAETTPTRGSGANVLTF

SEQ ID NO: 23943 - protein, 10 aa, Homo sapiens
  CDR3 for alpha chain variable domain of TCR clone 11972 (TRAV23/DV6, TRAJ31)
CARGGARLMF

SEQ ID NO: 23944 - protein, 13 aa, Homo sapiens
  CDR3 for beta chain variable domain of TCR clone 11972 (TRBV10-3, TRBJ2-7)
CASKLAVNYEQYF

SEQ ID NO: 23945 - protein, 14 aa, Homo sapiens
  CDR3 for alpha chain variable domain of TCR clone 11973 (TRAV3, TRAJ20)
CAVRDSFNDYKLSF

SEQ ID NO: 23946 - protein, 14 aa, Homo sapiens
  CDR3 for beta chain variable domain of TCR clone 11973 (TRBV12-4, TRBJ2-5)
CASSYSGYFETQYF

SEQ ID NO: 23947 - protein, 15 aa, Homo sapiens
  CDR3 for alpha chain variable domain of TCR clone 11974 (TRAV14/DV4, TRAJ10)
CAMRELTGGGNKLTF

SEQ ID NO: 23948 - protein, 16 aa, Homo sapiens
  CDR3 for beta chain variable domain of TCR clone 11974 (TRBV7-3, TRBJ2-2)
CASSLKRGTLSGELFF

SEQ ID NO: 23949 - protein, 15 aa, Homo sapiens
  CDR3 for alpha chain variable domain of TCR clone 11975 (TRAV27, TRAJ53)
CAGVVGGGSNYKLTF

SEQ ID NO: 23950 - protein, 14 aa, Homo sapiens
  CDR3 for beta chain variable domain of TCR clone 11975 (TRBV13, TRBJ2-3)
CASSRPSSTDTQYF

SEQ ID NO: 23951 - protein, 17 aa, Homo sapiens
  CDR3 for alpha chain variable domain of TCR clone 11976 (TRAV3, TRAJ38)
CAVRDCLNAGNNRKLIW

SEQ ID NO: 23952 - protein, 13 aa, Homo sapiens
  CDR3 for beta chain variable domain of TCR clone 11976 (TRBV23-1, TRBJ1-4)
CASRGKFNEKLFF

SEQ ID NO: 23953 - protein, 16 aa, Homo sapiens
  CDR3 for alpha chain variable domain of TCR clone 11977 (TRAV30, TRAJ24)
CGTEIVDADSWGKFQF

SEQ ID NO: 23954 - protein, 14 aa, Homo sapiens
  CDR3 for beta chain variable domain of TCR clone 11977 (TRBV4-2, TRBJ2-1)
CASGLDRAYNEQFF

SEQ ID NO: 23955 - protein, 12 aa, Homo sapiens
  CDR3 for alpha chain variable domain of TCR clone 11978 (TRAV26-1, TRAJ48)
CIVSGGNEKLTF

SEQ ID NO: 23956 - protein, 13 aa, Homo sapiens
  CDR3 for beta chain variable domain of TCR clone 11978 (TRBV18, TRBJ2-7)
CASFRDSVYEQYF

SEQ ID NO: 23957 - protein, 13 aa, Homo sapiens
  CDR3 for alpha chain variable domain of TCR clone 11979 (TRAV22, TRAJ7)
CAVEFYGNNRLAF

SEQ ID NO: 23958 - protein, 14 aa, Homo sapiens
  CDR3 for beta chain variable domain of TCR clone 11979 (TRBV19, TRBJ2-1)
CASPTFVLSGEQFF

SEQ ID NO: 23959 - protein, 14 aa, Homo sapiens
  CDR3 for alpha chain variable domain of TCR clone 11980 (TRAV14/DV4, TRAJ7)
CAMSLYYGNNRLAF

SEQ ID NO: 23960 - protein, 13 aa, Homo sapiens
  CDR3 for beta chain variable domain of TCR clone 11980 (TRBV12-4, TRBJ2-2)
CASSITGSGELFF

SEQ ID NO: 23961 - protein, 13 aa, Homo sapiens
  CDR3 for alpha chain variable domain of TCR clone 11981 (TRAV13-2, TRAJ48)
CAEMDFGDEKLTF

SEQ ID NO: 23962 - protein, 15 aa, Homo sapiens
  CDR3 for beta chain variable domain of TCR clone 11981 (TRBV7-9, TRBJ1-6)
CASSSPGRGNSPLHF

SEQ ID NO: 23963 - protein, 11 aa, Homo sapiens
  CDR3 for alpha chain variable domain of TCR clone 11982 (TRAV26-1, TRAJ27)
CIDPNAGKSTF

SEQ ID NO: 23964 - protein, 18 aa, Homo sapiens
  CDR3 for beta chain variable domain of TCR clone 11982 (TRBV7-9, TRBJ2-6)
CASSFPGAGMSGANVLTF

SEQ ID NO: 23965 - protein, 13 aa, Homo sapiens
  CDR3 for alpha chain variable domain of TCR clone 11983 (TRAV12-3, TRAJ7)
CAMTPYGNNRLAF

SEQ ID NO: 23966 - protein, 16 aa, Homo sapiens
  CDR3 for beta chain variable domain of TCR clone 11983 (TRBV20-1, TRBJ1-4)
CSARPYGGGLNEKLFF

SEQ ID NO: 23967 - protein, 13 aa, Homo sapiens
  CDR3 for alpha chain variable domain of TCR clone 11984 (TRAV13-2, TRAJ48)
CAEMDFGNEKLTF

SEQ ID NO: 23968 - protein, 15 aa, Homo sapiens
  CDR3 for beta chain variable domain of TCR clone 11984 (TRBV7-9, TRBJ1-6)
CAGSSPGRGNSPLHF

SEQ ID NO: 23969 - protein, 12 aa, Homo sapiens
  CDR3 for alpha chain variable domain of TCR clone 11985 (TRAV12-3, TRAJ17)
CAMTLTGNKLTF

SEQ ID NO: 23970 - protein, 15 aa, Homo sapiens
  CDR3 for beta chain variable domain of TCR clone 11985 (TRBV20-1, TRBJ2-7)
CSARDRVSGMDEQYY

SEQ ID NO: 23971 - protein, 16 aa, Homo sapiens
  CDR3 for alpha chain variable domain of TCR clone 11986 (TRAV30, TRAJ24)
CGTEIVDADSWGKFQF

SEQ ID NO: 23972 - protein, 13 aa, Homo sapiens
  CDR3 for beta chain variable domain of TCR clone 11986 (TRBV10-3, TRBJ1-2)
CAISERDSYGYTL

SEQ ID NO: 23973 - protein, 11 aa, Homo sapiens
  CDR3 for alpha chain variable domain of TCR clone 11987 (TRAV1-2, TRAJ31)
CSVNNNARLMF

SEQ ID NO: 23974 - protein, 15 aa, Homo sapiens
  CDR3 for beta chain variable domain of TCR clone 11987 (TRBV28, TRBJ2-1)
CASSIIAGGRSEQFF

SEQ ID NO: 23975 - protein, 14 aa, Homo sapiens
  CDR3 for alpha chain variable domain of TCR clone 11988 (TRAV12-2, TRAJ49)
CAVNPRTPVTSSIL

SEQ ID NO: 23976 - protein, 19 aa, Homo sapiens
  CDR3 for beta chain variable domain of TCR clone 11988 (TRBV12-5, TRBJ2-2)
CASGLGQGTMFADTGELFF

SEQ ID NO: 23977 - protein, 11 aa, Homo sapiens
  CDR3 for alpha chain variable domain of TCR clone 11989 (TRAV1-2, TRAJ31)
CAVSNNARLMF

SEQ ID NO: 23978 - protein, 15 aa, Homo sapiens
  CDR3 for beta chain variable domain of TCR clone 11989 (TRBV28, TRBJ2-1)
CASSIIAGGRSEQFF

SEQ ID NO: 23979 - protein, 15 aa, Homo sapiens
  CDR3 for alpha chain variable domain of TCR clone 11990 (TRAV3, TRAJ5)
CAVRDLDTGRRALTF

SEQ ID NO: 23980 - protein, 13 aa, Homo sapiens
  CDR3 for beta chain variable domain of TCR clone 11990 (TRBV12-4, TRBJ2-7)
CASSPTETYGQYF

SEQ ID NO: 23981 - protein, 16 aa, Homo sapiens
  CDR3 for alpha chain variable domain of TCR clone 11991 (TRAV26-1, TRAJ40)
CIVRGYPTSGTYKYIF

SEQ ID NO: 23982 - protein, 16 aa, Homo sapiens
  CDR3 for beta chain variable domain of TCR clone 11991 (TRBV5-1, TRBJ1-4)
CASSSGQGGEKLFLAV

SEQ ID NO: 23983 - protein, 15 aa, Homo sapiens
  CDR3 for alpha chain variable domain of TCR clone 11992 (TRAV4, TRAJ39)
CLVGPNNNAGNMLTF

SEQ ID NO: 23984 - protein, 14 aa, Homo sapiens
  CDR3 for beta chain variable domain of TCR clone 11992 (TRBV27, TRBJ2-2)
CASSLGAATGELFF

SEQ ID NO: 23985 - protein, 14 aa, Homo sapiens
  CDR3 for alpha chain variable domain of TCR clone 11993 (TRAV12-3, TRAJ29)
CAMILLSGNTPLAF

SEQ ID NO: 23986 - protein, 16 aa, Homo sapiens
  CDR3 for beta chain variable domain of TCR clone 11993 (TRBV28, TRBJ2-7)
CASSSGTSGRGYEQYF

SEQ ID NO: 23987 - protein, 11 aa, Homo sapiens
  CDR3 for alpha chain variable domain of TCR clone 11994 (TRAV3, TRAJ21)
CAVGNFNKFYF

SEQ ID NO: 23988 - protein, 14 aa, Homo sapiens
  CDR3 for beta chain variable domain of TCR clone 11994 (TRBV7-2, TRBJ2-7)
CASSPKTSFYEQYF

SEQ ID NO: 23989 - protein, 14 aa, Homo sapiens
  CDR3 for alpha chain variable domain of TCR clone 11995 (TRAV16, TRAJ54)
CALSLIQGAQKLVV

SEQ ID NO: 23990 - protein, 17 aa, Homo sapiens
  CDR3 for beta chain variable domain of TCR clone 11995 (TRBV11-2, TRBJ2-4)
CASSSVGPGGHRNIQYF

SEQ ID NO: 23991 - protein, 15 aa, Homo sapiens
  CDR3 for alpha chain variable domain of TCR clone 11996 (TRAV2, TRAJ15)
CAVEDRGQAGTALIL

SEQ ID NO: 23992 - protein, 13 aa, Homo sapiens
  CDR3 for beta chain variable domain of TCR clone 11996 (TRBV10-2, TRBJ2-7)
CASGASGGYEQYF

SEQ ID NO: 23993 - protein, 15 aa, Homo sapiens
  CDR3 for alpha chain variable domain of TCR clone 11997 (TRAV14/DV4, TRAJ12)
CAMREGRDSSYRLIF

SEQ ID NO: 23994 - protein, 15 aa, Homo sapiens
  CDR3 for beta chain variable domain of TCR clone 11997 (TRBV4-1, TRBJ1-4)
CASSDTGGTNEKLFF

SEQ ID NO: 23995 - protein, 12 aa, Homo sapiens
  CDR3 for alpha chain variable domain of TCR clone 11998 (TRAV2, TRAJ30)
TTVLSKDDKIIF

SEQ ID NO: 23996 - protein, 14 aa, Homo sapiens
  CDR3 for beta chain variable domain of TCR clone 11998 (TRBV12-4, TRBJ2-7)
CASSRQGRSYEQYF

SEQ ID NO: 23997 - protein, 15 aa, Homo sapiens
  CDR3 for alpha chain variable domain of TCR clone 11999 (TRAV3, TRAJ5)
CAVRDFDTGRRALTF

SEQ ID NO: 23998 - protein, 13 aa, Homo sapiens
  CDR3 for beta chain variable domain of TCR clone 11999 (TRBV12-4, TRBJ2-7)
CASSPTETYEQYF

SEQ ID NO: 23999 - protein, 14 aa, Homo sapiens
  CDR3 for alpha chain variable domain of TCR clone 12000 (TRAV12-2, TRAJ13)
CAVKKTGGYQKVTF

SEQ ID NO: 24000 - protein, 13 aa, Homo sapiens
  CDR3 for beta chain variable domain of TCR clone 12000 (TRBV12-4, TRBJ1-1)
CASSPGTGFEAFF

SEQ ID NO: 24001 - protein, 14 aa, Homo sapiens
  CDR3 for alpha chain variable domain of TCR clone 12001 (TRAV12-2, TRAJ13)
CAVKKTGGYQKVTF

SEQ ID NO: 24002 - protein, 12 aa, Homo sapiens
  CDR3 for beta chain variable domain of TCR clone 12001 (TRBV29-1, TRBJ2-3)
CSVTGGADTQYF

SEQ ID NO: 24003 - protein, 14 aa, Homo sapiens
  CDR3 for alpha chain variable domain of TCR clone 12002 (TRAV16, TRAJ33)
CALSAMDSNYQLIW

SEQ ID NO: 24004 - protein, 15 aa, Homo sapiens
  CDR3 for beta chain variable domain of TCR clone 12002 (TRBV19, TRBJ1-1)
CASTSGQIQNTEAFF

SEQ ID NO: 24005 - protein, 13 aa, Homo sapiens
  CDR3 for alpha chain variable domain of TCR clone 12003 (TRAV2, TRAJ40)
CAEVTSGTYKYIF

SEQ ID NO: 24006 - protein, 14 aa, Homo sapiens
  CDR3 for beta chain variable domain of TCR clone 12003 (TRBV19, TRBJ2-1)
CASPTFVLSGEQFF

SEQ ID NO: 24007 - protein, 13 aa, Homo sapiens
  CDR3 for alpha chain variable domain of TCR clone 12004 (TRAV20, TRAJ37)
CAGCSSNTGKLIF

SEQ ID NO: 24008 - protein, 10 aa, Homo sapiens
  CDR3 for beta chain variable domain of TCR clone 12004 (TRBV4-2, TRBJ2-3)
CASSTRYAVF

SEQ ID NO: 24009 - protein, 14 aa, Homo sapiens
  CDR3 for alpha chain variable domain of TCR clone 12005 (TRAV8-2, TRAJ4)
CVVSPSGGYNKLLF

SEQ ID NO: 24010 - protein, 15 aa, Homo sapiens
  CDR3 for beta chain variable domain of TCR clone 12005 (TRBV4-1, TRBJ1-4)
CASSDTGGTNEKLFF

SEQ ID NO: 24011 - protein, 14 aa, Homo sapiens
  CDR3 for alpha chain variable domain of TCR clone 12006 (TRAV29/DV5, TRAJ42)
CAAKGGGSQGNLIF

SEQ ID NO: 24012 - protein, 14 aa, Homo sapiens
  CDR3 for beta chain variable domain of TCR clone 12006 (TRBV2, TRBJ1-5)
CASSEAAGGQPQHF

SEQ ID NO: 24013 - protein, 14 aa, Homo sapiens
  CDR3 for alpha chain variable domain of TCR clone 12007 (TRAV13-1, TRAJ35)
CAASKGGFGNVLHC

SEQ ID NO: 24014 - protein, 15 aa, Homo sapiens
  CDR3 for beta chain variable domain of TCR clone 12007 (TRBV27, TRBJ2-1)
CASSNGGGSSNEQFF

SEQ ID NO: 24015 - protein, 14 aa, Homo sapiens
  CDR3 for alpha chain variable domain of TCR clone 12008 (TRAV12-2, TRAJ17)
CAVLFKAAGNKLTF

SEQ ID NO: 24016 - protein, 17 aa, Homo sapiens
  CDR3 for beta chain variable domain of TCR clone 12008 (TRBV20-1, TRBJ2-2)
CSASGPGQGGLTGELFF

SEQ ID NO: 24017 - protein, 13 aa, Homo sapiens
  CDR3 for alpha chain variable domain of TCR clone 12009 (TRAV12-3, TRAJ33)
CAMSVNSNYQLIW

SEQ ID NO: 24018 - protein, 14 aa, Homo sapiens
  CDR3 for beta chain variable domain of TCR clone 12009 (TRBV5-1, TRBJ1-5)
CASSLGQGAQPQHF

SEQ ID NO: 24019 - protein, 12 aa, Homo sapiens
  CDR3 for alpha chain variable domain of TCR clone 12010 (TRAV8-4, TRAJ37)
CAVRSNTGKLIF

SEQ ID NO: 24020 - protein, 16 aa, Homo sapiens
  CDR3 for beta chain variable domain of TCR clone 12010 (TRBV7-2, TRBJ2-3)
CASSLVGDASTDTRYF

SEQ ID NO: 24021 - protein, 13 aa, Homo sapiens
  CDR3 for alpha chain variable domain of TCR clone 12011 (TRAV27, TRAJ6)
CAGGTRGSYIPTF

SEQ ID NO: 24022 - protein, 12 aa, Homo sapiens
  CDR3 for beta chain variable domain of TCR clone 12011 (TRBV5-1, TRBJ1-2)
CASSQDTYGYTF

SEQ ID NO: 24023 - protein, 14 aa, Homo sapiens
  CDR3 for alpha chain variable domain of TCR clone 12012 (TRAV8-6, TRAJ34)
CAVSDQGNTDKLIF

SEQ ID NO: 24024 - protein, 13 aa, Homo sapiens
  CDR3 for beta chain variable domain of TCR clone 12012 (TRBV27, TRBJ1-1)
CASSLSIGAEAFF

SEQ ID NO: 24025 - protein, 13 aa, Homo sapiens
  CDR3 for alpha chain variable domain of TCR clone 12013 (TRAV1-1, TRAJ9)
CAAKNTGGFKTIF

SEQ ID NO: 24026 - protein, 14 aa, Homo sapiens
  CDR3 for beta chain variable domain of TCR clone 12013 (TRBV20-1, TRBJ2-1)
CSAQIGGSANEQLF

SEQ ID NO: 24027 - protein, 13 aa, Homo sapiens
  CDR3 for alpha chain variable domain of TCR clone 12014 (TRAV3, TRAJ21)
CAVREPDFNKFYF

SEQ ID NO: 24028 - protein, 13 aa, Homo sapiens
  CDR3 for beta chain variable domain of TCR clone 12014 (TRBV9, TRBJ2-1)
CASNPSGGNEQFF

SEQ ID NO: 24029 - protein, 12 aa, Homo sapiens
  CDR3 for alpha chain variable domain of TCR clone 12015 (TRAV1-1, TRAJ30)
CAVRGRDDKIIF

SEQ ID NO: 24030 - protein, 11 aa, Homo sapiens
  CDR3 for beta chain variable domain of TCR clone 12015 (TRBV12-4, TRBJ2-3)
CASTATDTQYF

SEQ ID NO: 24031 - protein, 13 aa, Homo sapiens
  CDR3 for alpha chain variable domain of TCR clone 12016 (TRAV12-2, TRAJ4)
CAVFFGGYNKLIF

SEQ ID NO: 24032 - protein, 16 aa, Homo sapiens
  CDR3 for beta chain variable domain of TCR clone 12016 (TRBV6-1, TRBJ1-2)
CASSEYASGANYGYTF

SEQ ID NO: 24033 - protein, 12 aa, Homo sapiens
  CDR3 for alpha chain variable domain of TCR clone 12017 (TRAV3, TRAJ39)
CAVIEWSNMLTF

SEQ ID NO: 24034 - protein, 14 aa, Homo sapiens
  CDR3 for beta chain variable domain of TCR clone 12017 (TRBV7-8, TRBJ2-3)
CASGFPDGQDTQYF

SEQ ID NO: 24035 - protein, 23 aa, Homo sapiens
  CDR3 for alpha chain variable domain of TCR clone 12018 (TRAV26-1, TRAJ38)
CIADNAGNNHIQNPDPAVYQLRD

SEQ ID NO: 24036 - protein, 15 aa, Homo sapiens
  CDR3 for beta chain variable domain of TCR clone 12018 (TRBV20-1, TRBJ1-1)
CSARGGGTLKLSLDK

SEQ ID NO: 24037 - protein, 12 aa, Homo sapiens
  CDR3 for alpha chain variable domain of TCR clone 12019 (TRAV12-3, TRAJ17)
CAMSLTGNKLTF

SEQ ID NO: 24038 - protein, 15 aa, Homo sapiens
  CDR3 for beta chain variable domain of TCR clone 12019 (TRBV20-1, TRBJ2-7)
CSARDRVSGMDEQYF

SEQ ID NO: 24039 - protein, 14 aa, Homo sapiens
  CDR3 for alpha chain variable domain of TCR clone 12020 (TRAV1-2, TRAJ17)
CAPLPRAAGNKLTF

SEQ ID NO: 24040 - protein, 13 aa, Homo sapiens
  CDR3 for beta chain variable domain of TCR clone 12020 (TRBV20-1, TRBJ2-1)
CSASGPTYSEQFF

SEQ ID NO: 24041 - protein, 14 aa, Homo sapiens
  CDR3 for alpha chain variable domain of TCR clone 12021 (TRAV1-2, TRAJ16)
RAVNRFSDGQKLLF

SEQ ID NO: 24042 - protein, 15 aa, Homo sapiens
  CDR3 for beta chain variable domain of TCR clone 12021 (TRBV9, TRBJ1-6)
CASSVAGTGDSPLHF

SEQ ID NO: 24043 - protein, 14 aa, Homo sapiens
  CDR3 for alpha chain variable domain of TCR clone 12022 (TRAV26-1, TRAJ38)
CIADNAGNNRKLIW

SEQ ID NO: 24044 - protein, 13 aa, Homo sapiens
  CDR3 for beta chain variable domain of TCR clone 12022 (TRBV20-1, TRBJ1-1)
CGARGGGNTEAFF

SEQ ID NO: 24045 - protein, 13 aa, Homo sapiens
  CDR3 for alpha chain variable domain of TCR clone 12023 (TRAV27, TRAJ45)
CRSSGGGADGLTF

SEQ ID NO: 24046 - protein, 17 aa, Homo sapiens
  CDR3 for beta chain variable domain of TCR clone 12023 (TRBV11-2, TRBJ2-1)
RASSLYPPGVEYNEQFF

SEQ ID NO: 24047 - protein, 14 aa, Homo sapiens
  CDR3 for alpha chain variable domain of TCR clone 12024 (TRAV29/DV5, TRAJ36)
CAARRKTGATNLFF

SEQ ID NO: 24048 - protein, 14 aa, Homo sapiens
  CDR3 for beta chain variable domain of TCR clone 12024 (TRBV12-5, TRBJ2-5)
CASGSRTHQETQYF

SEQ ID NO: 24049 - protein, 12 aa, Homo sapiens
  CDR3 for alpha chain variable domain of TCR clone 12025 (TRAV16, TRAJ10)
CSRTGGGNKLTF

SEQ ID NO: 24050 - protein, 15 aa, Homo sapiens
  CDR3 for beta chain variable domain of TCR clone 12025 (TRBV6-3, TRBJ2-7)
CASSSPGTVFYEQYL

SEQ ID NO: 24051 - protein, 15 aa, Homo sapiens
  CDR3 for alpha chain variable domain of TCR clone 12026 (TRAV26-1, TRAJ29)
CIVRVEGSGNTPLVF

SEQ ID NO: 24052 - protein, 15 aa, Homo sapiens
  CDR3 for beta chain variable domain of TCR clone 12026 (TRBV7-9, TRBJ1-5)
CASSQGHQPNQPQHC

SEQ ID NO: 24053 - protein, 14 aa, Homo sapiens
  CDR3 for alpha chain variable domain of TCR clone 12027 (TRAV13-1, TRAJ35)
CAASKGGFGNVLHC

SEQ ID NO: 24054 - protein, 13 aa, Homo sapiens
  CDR3 for beta chain variable domain of TCR clone 12027 (TRBV12-4, TRBJ2-7)
CASSPTETYEQYF

SEQ ID NO: 24055 - protein, 16 aa, Homo sapiens
  CDR3 for alpha chain variable domain of TCR clone 12028 (TRAV1-2, TRAJ10)
CAVRGVLTGGGNKLTF

SEQ ID NO: 24056 - protein, 12 aa, Homo sapiens
  CDR3 for beta chain variable domain of TCR clone 12028 (TRBV7-8, TRBJ2-7)
RASSLGDREQYF

SEQ ID NO: 24057 - protein, 18 aa, Homo sapiens
  CDR3 for alpha chain variable domain of TCR clone 12029 (TRAV29/DV5, TRAJ52)
CAAGFRDAGGTSYGKLTF

SEQ ID NO: 24058 - protein, 16 aa, Homo sapiens
  CDR3 for beta chain variable domain of TCR clone 12029 (TRBV2, TRBJ2-1)
CASSDSPGQPYNEQFF

SEQ ID NO: 24059 - protein, 18 aa, Homo sapiens
  CDR3 for alpha chain variable domain of TCR clone 12030 (TRAV21, TRAJ52)
CAVRPSPAGGTSYGKLTF

SEQ ID NO: 24060 - protein, 17 aa, Homo sapiens
  CDR3 for beta chain variable domain of TCR clone 12030 (TRBV13, TRBJ2-3)
CASSLSRVAGGRNKQYF

SEQ ID NO: 24061 - protein, 14 aa, Homo sapiens
  CDR3 for alpha chain variable domain of TCR clone 12031 (TRAV22, TRAJ40)
CAVGRNSGTYKYIF

SEQ ID NO: 24062 - protein, 16 aa, Homo sapiens
  CDR3 for beta chain variable domain of TCR clone 12031 (TRBV7-3, TRBJ2-3)
CASSPRTFPSTDTQYF

SEQ ID NO: 24063 - protein, 13 aa, Homo sapiens
  CDR3 for alpha chain variable domain of TCR clone 12032 (TRAV13-1, TRAJ43)
CAASLSNNNDMRF

SEQ ID NO: 24064 - protein, 17 aa, Homo sapiens
  CDR3 for beta chain variable domain of TCR clone 12032 (TRBV13, TRBJ2-3)
CASSLSRVAGGRNTQYF

SEQ ID NO: 24065 - protein, 16 aa, Homo sapiens
  CDR3 for alpha chain variable domain of TCR clone 12033 (TRAV12-2, TRAJ52)
CAVNNRGGTSYGKLTF

SEQ ID NO: 24066 - protein, 13 aa, Homo sapiens
  CDR3 for beta chain variable domain of TCR clone 12033 (TRBV19, TRBJ1-5)
CASKVGPWEPQHF

SEQ ID NO: 24067 - protein, 15 aa, Homo sapiens
  CDR3 for alpha chain variable domain of TCR clone 12034 (TRAV14/DV4, TRAJ10)
CAMRELTGGGNKLTF

SEQ ID NO: 24068 - protein, 18 aa, Homo sapiens
  CDR3 for beta chain variable domain of TCR clone 12034 (TRBV7-9, TRBJ2-7)
CASSLTTSGSRAWYEQYF

SEQ ID NO: 24069 - protein, 13 aa, Homo sapiens
  CDR3 for alpha chain variable domain of TCR clone 12035 (TRAV17, TRAJ5)
CALRGTGRRALTF

SEQ ID NO: 24070 - protein, 12 aa, Homo sapiens
  CDR3 for beta chain variable domain of TCR clone 12035 (TRBV7-8, TRBJ2-7)
CASSLGDREQYF

SEQ ID NO: 24071 - protein, 13 aa, Homo sapiens
  CDR3 for alpha chain variable domain of TCR clone 12036 (TRAV26-1, TRAJ48)
CIVRVVGDEKLTF

SEQ ID NO: 24072 - protein, 19 aa, Homo sapiens
  CDR3 for beta chain variable domain of TCR clone 12036 (TRBV11-3, TRBJ2-2)
CASSTRPGAKATNTGELFF

SEQ ID NO: 24073 - protein, 12 aa, Homo sapiens
  CDR3 for alpha chain variable domain of TCR clone 12037 (TRAV22, TRAJ43)
CAVELNNNDMRF

SEQ ID NO: 24074 - protein, 13 aa, Homo sapiens
  CDR3 for beta chain variable domain of TCR clone 12037 (TRBV4-1, TRBJ2-1)
CASSQAGGDEQFF

SEQ ID NO: 24075 - protein, 14 aa, Homo sapiens
  CDR3 for alpha chain variable domain of TCR clone 12038 (TRAV26-1, TRAJ39)
CIVRGSRAGNMLTF

SEQ ID NO: 24076 - protein, 15 aa, Homo sapiens
  CDR3 for beta chain variable domain of TCR clone 12038 (TRBV7-9, TRBJ1-5)
CASSQGHQPNQHQHF

SEQ ID NO: 24077 - protein, 15 aa, Homo sapiens
  CDR3 for alpha chain variable domain of TCR clone 12039 (TRAV35, TRAJ40)
CAGQLGTSGTYKYIL

SEQ ID NO: 24078 - protein, 14 aa, Homo sapiens
  CDR3 for beta chain variable domain of TCR clone 12039 (TRBV7-3, TRBJ2-1)
CASSLAGGTNEQFF

SEQ ID NO: 24079 - protein, 13 aa, Homo sapiens
  CDR3 for alpha chain variable domain of TCR clone 12040 (TRAV2, TRAJ40)
CAVVTSGTYKYIF

SEQ ID NO: 24080 - protein, 14 aa, Homo sapiens
  CDR3 for beta chain variable domain of TCR clone 12040 (TRBV19, TRBJ2-1)
CASPSFVLSGEQFF

SEQ ID NO: 24081 - protein, 16 aa, Homo sapiens
  CDR3 for alpha chain variable domain of TCR clone 12041 (TRAV3, TRAJ10)
CAVRDMRAGGGNKLTF

SEQ ID NO: 24082 - protein, 12 aa, Homo sapiens
  CDR3 for beta chain variable domain of TCR clone 12041 (TRBV11-2, TRBJ2-2)
CASSLGGGELFF

SEQ ID NO: 24083 - protein, 13 aa, Homo sapiens
  CDR3 for alpha chain variable domain of TCR clone 12042 (TRAV13-2, TRAJ40)
CAENTSGTYKYIF

SEQ ID NO: 24084 - protein, 17 aa, Homo sapiens
  CDR3 for beta chain variable domain of TCR clone 12042 (TRBV12-4, TRBJ1-3)
CASRRSGTPSSGNTIYF

SEQ ID NO: 24085 - protein, 12 aa, Homo sapiens
  CDR3 for alpha chain variable domain of TCR clone 12043 (TRAV29/DV5, TRAJ34)
CAASSGTDKLIF

SEQ ID NO: 24086 - protein, 15 aa, Homo sapiens
  CDR3 for beta chain variable domain of TCR clone 12043 (TRBV2, TRBJ2-3)
CASSDAGGPPDTQYF

SEQ ID NO: 24087 - protein, 13 aa, Homo sapiens
  CDR3 for alpha chain variable domain of TCR clone 12044 (TRAV13-1, TRAJ5)
CAASDTGRRALTF

SEQ ID NO: 24088 - protein, 12 aa, Homo sapiens
  CDR3 for beta chain variable domain of TCR clone 12044 (TRBV28, TRBJ2-3)
CASSVYRDTQYF

SEQ ID NO: 24089 - protein, 13 aa, Homo sapiens
  CDR3 for alpha chain variable domain of TCR clone 12045 (TRAV30, TRAJ26)
CGTEIPLGQNFVF

SEQ ID NO: 24090 - protein, 16 aa, Homo sapiens
  CDR3 for beta chain variable domain of TCR clone 12045 (TRBV6-1, TRBJ1-5)
CASSDIAGQINQPQHF

SEQ ID NO: 24091 - protein, 14 aa, Homo sapiens
  CDR3 for alpha chain variable domain of TCR clone 12046 (TRAV8-6, TRAJ49)
CAVSDEDPVTSSIL

SEQ ID NO: 24092 - protein, 13 aa, Homo sapiens
  CDR3 for beta chain variable domain of TCR clone 12046 (TRBV6-3, TRBJ2-2)
CASSLLGTGELFF

SEQ ID NO: 24093 - protein, 13 aa, Homo sapiens
  CDR3 for alpha chain variable domain of TCR clone 12047 (TRAV2, TRAJ40)
CAVVTSGTYKYIF

SEQ ID NO: 24094 - protein, 15 aa, Homo sapiens
  CDR3 for beta chain variable domain of TCR clone 12047 (TRBV11-3, TRBJ2-3)
CASLEDGREGDTQYF

SEQ ID NO: 24095 - protein, 13 aa, Homo sapiens
  CDR3 for alpha chain variable domain of TCR clone 12048 (TRAV12-3, TRAJ13)
CAMSSGGYQKVTF

SEQ ID NO: 24096 - protein, 14 aa, Homo sapiens
  CDR3 for beta chain variable domain of TCR clone 12048 (TRBV20-1, TRBJ2-2)
CSALYRGGTGELFF

SEQ ID NO: 24097 - protein, 14 aa, Homo sapiens
  CDR3 for alpha chain variable domain of TCR clone 12049 (TRAV38-1, TRAJ40)
CALRPTSGTYKYIF

SEQ ID NO: 24098 - protein, 13 aa, Homo sapiens
  CDR3 for beta chain variable domain of TCR clone 12049 (TRBV19, TRBJ1-2)
CASSVPGQDGYTF

SEQ ID NO: 24099 - protein, 13 aa, Homo sapiens
  CDR3 for alpha chain variable domain of TCR clone 12050 (TRAV12-1, TRAJ34)
CGEPLRNTDKLIF

SEQ ID NO: 24100 - protein, 15 aa, Homo sapiens
  CDR3 for beta chain variable domain of TCR clone 12050 (TRBV3-1, TRBJ2-2)
CTSSQDWTRAGELFF

SEQ ID NO: 24101 - protein, 12 aa, Homo sapiens
  CDR3 for alpha chain variable domain of TCR clone 12051 (TRAV29/DV5, TRAJ15)
CASNQAGTALIF

SEQ ID NO: 24102 - protein, 11 aa, Homo sapiens
  CDR3 for beta chain variable domain of TCR clone 12051 (TRBV7-8, TRBJ2-7)
CASSLSLEQYF

SEQ ID NO: 24103 - protein, 15 aa, Homo sapiens
  CDR3 for alpha chain variable domain of TCR clone 12052 (TRAV12-2, TRAJ53)
CAVNGGGGSNYKLTF

SEQ ID NO: 24104 - protein, 12 aa, Homo sapiens
  CDR3 for beta chain variable domain of TCR clone 12052 (TRBV18, TRBJ1-1)
CASSPGQLQAFF

SEQ ID NO: 24105 - protein, 18 aa, Homo sapiens
  CDR3 for alpha chain variable domain of TCR clone 12053 (TRAV29/DV5, TRAJ52)
CAAGFRGAGGTSYGKLTF

SEQ ID NO: 24106 - protein, 16 aa, Homo sapiens
  CDR3 for beta chain variable domain of TCR clone 12053 (TRBV7-3, TRBJ2-2)
CASSLRRGTLSGELFF

SEQ ID NO: 24107 - protein, 14 aa, Homo sapiens
  CDR3 for alpha chain variable domain of TCR clone 12054 (TRAV1-2, TRAJ16)
CAVNRFSDGQKLLF

SEQ ID NO: 24108 - protein, 15 aa, Homo sapiens
  CDR3 for beta chain variable domain of TCR clone 12054 (TRBV7-9, TRBJ1-6)
CARSSPGRGNSPLHF

SEQ ID NO: 24109 - protein, 11 aa, Homo sapiens
  CDR3 for alpha chain variable domain of TCR clone 12055 (TRAV12-3, TRAJ49)
CAANTGNQFYF

SEQ ID NO: 24110 - protein, 15 aa, Homo sapiens
  CDR3 for beta chain variable domain of TCR clone 12055 (TRBV20-1, TRBJ2-7)
CSARVPAAYFYEQYF

SEQ ID NO: 24111 - protein, 15 aa, Homo sapiens
  CDR3 for alpha chain variable domain of TCR clone 12056 (TRAV9-2, TRAJ56)
CALSDVDGANSKLTF

SEQ ID NO: 24112 - protein, 15 aa, Homo sapiens
  CDR3 for beta chain variable domain of TCR clone 12056 (TRBV20-1, TRBJ2-7)
CSARDRVSGMDEQYF

SEQ ID NO: 24113 - protein, 13 aa, Homo sapiens
  CDR3 for alpha chain variable domain of TCR clone 12057 (TRAV17, TRAJ9)
CATDYTGGFKTIF

SEQ ID NO: 24114 - protein, 16 aa, Homo sapiens
  CDR3 for beta chain variable domain of TCR clone 12057 (TRBV7-7, TRBJ2-1)
CASSLASGTAYNEQFF

SEQ ID NO: 24115 - protein, 14 aa, Homo sapiens
  CDR3 for alpha chain variable domain of TCR clone 12058 (TRAV13-1, TRAJ44)
CAAKATGTASKLTS

SEQ ID NO: 24116 - protein, 17 aa, Homo sapiens
  CDR3 for beta chain variable domain of TCR clone 12058 (TRBV7-3, TRBJ2-3)
CASSLMKRMRGADTQYF

SEQ ID NO: 24117 - protein, 15 aa, Homo sapiens
  CDR3 for alpha chain variable domain of TCR clone 12059 (TRAV3, TRAJ5)
CAVRDLDTGRRALTF

SEQ ID NO: 24118 - protein, 15 aa, Homo sapiens
  CDR3 for beta chain variable domain of TCR clone 12059 (TRBV6-3, TRBJ2-2)
CASSFLATLTGELFF

SEQ ID NO: 24119 - protein, 13 aa, Homo sapiens
  CDR3 for alpha chain variable domain of TCR clone 12060 (TRAV2, TRAJ40)
CAVVTSGTYKYIF

SEQ ID NO: 24120 - protein, 14 aa, Homo sapiens
  CDR3 for beta chain variable domain of TCR clone 12060 (TRBV19, TRBJ2-1)
CASQTFVLSGEQFF

SEQ ID NO: 24121 - protein, 13 aa, Homo sapiens
  CDR3 for alpha chain variable domain of TCR clone 12061 (TRAV21, TRAJ27)
CAARPGNAGKSTF

SEQ ID NO: 24122 - protein, 14 aa, Homo sapiens
  CDR3 for beta chain variable domain of TCR clone 12061 (TRBV7-6, TRBJ2-3)
CASSLGTVTETQYF

SEQ ID NO: 24123 - protein, 13 aa, Homo sapiens
  CDR3 for alpha chain variable domain of TCR clone 12062 (TRAV8-3, TRAJ43)
CAVVPYNNNDIRF

SEQ ID NO: 24124 - protein, 17 aa, Homo sapiens
  CDR3 for beta chain variable domain of TCR clone 12062 (TRBV7-7, TRBJ1-1)
CASIGDRPNLGVTEAFF

SEQ ID NO: 24125 - protein, 15 aa, Homo sapiens
  CDR3 for alpha chain variable domain of TCR clone 12063 (TRAV27, TRAJ38)
CAARRNAGNNSKLIW

SEQ ID NO: 24126 - protein, 13 aa, Homo sapiens
  CDR3 for beta chain variable domain of TCR clone 12063 (TRBV12-5, TRBJ2-3)
CASGDRQSDTQYF

SEQ ID NO: 24127 - protein, 15 aa, Homo sapiens
  CDR3 for alpha chain variable domain of TCR clone 12064 (TRAV8-3, TRAJ27)
CAVGPSKTNAGKSTF

SEQ ID NO: 24128 - protein, 15 aa, Homo sapiens
  CDR3 for beta chain variable domain of TCR clone 12064 (TRBV7-2, TRBJ2-1)
CASSSGLAGGNKQFF

SEQ ID NO: 24129 - protein, 16 aa, Homo sapiens
  CDR3 for alpha chain variable domain of TCR clone 12065 (TRAV30, TRAJ24)
CGTEIVDADSWGKFQF

SEQ ID NO: 24130 - protein, 16 aa, Homo sapiens
  CDR3 for beta chain variable domain of TCR clone 12065 (TRBV20-1, TRBJ1-2)
CSASTFGGAENYGYTF

SEQ ID NO: 24131 - protein, 16 aa, Homo sapiens
  CDR3 for alpha chain variable domain of TCR clone 12066 (TRAV16, TRAJ52)
CALSAAGGTGYGKLTF

SEQ ID NO: 24132 - protein, 12 aa, Homo sapiens
  CDR3 for beta chain variable domain of TCR clone 12066 (TRBV12-4, TRBJ1-3)
CASSFSGNTIYF

SEQ ID NO: 24133 - protein, 13 aa, Homo sapiens
  CDR3 for alpha chain variable domain of TCR clone 12067 (TRAV2, TRAJ40)
CAVVTSGIYKYIF

SEQ ID NO: 24134 - protein, 14 aa, Homo sapiens
  CDR3 for beta chain variable domain of TCR clone 12067 (TRBV19, TRBJ2-1)
CASPTFVLSGEQFF

SEQ ID NO: 24135 - protein, 14 aa, Homo sapiens
  CDR3 for alpha chain variable domain of TCR clone 12068 (TRAV1-2, TRAJ16)
CAVNRSSDGQKLLF

SEQ ID NO: 24136 - protein, 17 aa, Homo sapiens
  CDR3 for beta chain variable domain of TCR clone 12068 (TRBV13, TRBJ2-3)
CASSLSRVAGGRNTQYF

SEQ ID NO: 24137 - protein, 11 aa, Homo sapiens
  CDR3 for alpha chain variable domain of TCR clone 12069 (TRAV3, TRAJ21)
CAVGNFNKFYF

SEQ ID NO: 24138 - protein, 17 aa, Homo sapiens
  CDR3 for beta chain variable domain of TCR clone 12069 (TRBV11-2, TRBJ2-1)
CASSLYPPGVEYNEQFF

SEQ ID NO: 24139 - protein, 15 aa, Homo sapiens
  CDR3 for alpha chain variable domain of TCR clone 12070 (TRAV14/DV4, TRAJ12)
CAMREGRDSSYKLIF

SEQ ID NO: 24140 - protein, 16 aa, Homo sapiens
  CDR3 for beta chain variable domain of TCR clone 12070 (TRBV4-2, TRBJ1-5)
CASSQGQGASNQPQHF

SEQ ID NO: 24141 - protein, 11 aa, Homo sapiens
  CDR3 for alpha chain variable domain of TCR clone 12071 (TRAV2, TRAJ33)
CAVESNYQLIW

SEQ ID NO: 24142 - protein, 15 aa, Homo sapiens
  CDR3 for beta chain variable domain of TCR clone 12071 (TRBV19, TRBJ1-1)
RASTSGQIQNTEAFF

SEQ ID NO: 24143 - protein, 12 aa, Homo sapiens
  CDR3 for alpha chain variable domain of TCR clone 12072 (TRAV17, TRAJ12)
CATLRSSYKLTF

SEQ ID NO: 24144 - protein, 16 aa, Homo sapiens
  CDR3 for beta chain variable domain of TCR clone 12072 (TRBV28, TRBJ2-7)
CASSLFFETGGPEQYF

SEQ ID NO: 24145 - protein, 17 aa, Homo sapiens
  CDR3 for alpha chain variable domain of TCR clone 12073 (TRAV13-1, TRAJ31)
CAPRDRLMFGDGTQLVV

SEQ ID NO: 24146 - protein, 15 aa, Homo sapiens
  CDR3 for beta chain variable domain of TCR clone 12073 (TRBV9, TRBJ1-2)
CASSVVGQANYGYTF

SEQ ID NO: 24147 - protein, 10 aa, Homo sapiens
  CDR3 for alpha chain variable domain of TCR clone 12074 (TRAV23/DV6, TRAJ43)
CAAAVAALEQ

SEQ ID NO: 24148 - protein, 15 aa, Homo sapiens
  CDR3 for beta chain variable domain of TCR clone 12074 (TRBV20-1, TRBJ1-1)
CSASRGVTGNTEAFF

SEQ ID NO: 24149 - protein, 17 aa, Homo sapiens
  CDR3 for alpha chain variable domain of TCR clone 12075 (TRAV3, TRAJ6)
CAVRDGPRAGGSYIPTF

SEQ ID NO: 24150 - protein, 14 aa, Homo sapiens
  CDR3 for beta chain variable domain of TCR clone 12075 (TRBV7-2, TRBJ2-7)
CASSSKTSFYEQYF

SEQ ID NO: 24151 - protein, 15 aa, Homo sapiens
  CDR3 for alpha chain variable domain of TCR clone 12076 (TRAV12-3, TRAJ10)
CASYILTGGGNKLTF

SEQ ID NO: 24152 - protein, 14 aa, Homo sapiens
  CDR3 for beta chain variable domain of TCR clone 12076 (TRBV4-1, TRBJ2-2)
CASSQAVNTGELFF

SEQ ID NO: 24153 - protein, 14 aa, Homo sapiens
  CDR3 for alpha chain variable domain of TCR clone 12077 (TRAV23/DV6, TRAJ8)
CAASKATGFQKLVF

SEQ ID NO: 24154 - protein, 17 aa, Homo sapiens
  CDR3 for beta chain variable domain of TCR clone 12077 (TRBV20-1, TRBJ2-7)
CSASGTSGRVGESEQYF

SEQ ID NO: 24155 - protein, 18 aa, Homo sapiens
  CDR3 for alpha chain variable domain of TCR clone 12078 (TRAV13-1, TRAJ52)
CAASKRSAGGTSYGKLTF

SEQ ID NO: 24156 - protein, 16 aa, Homo sapiens
  CDR3 for beta chain variable domain of TCR clone 12078 (TRBV5-1, TRBJ1-1)
CASSSGGNSLNTEAFF

SEQ ID NO: 24157 - protein, 11 aa, Homo sapiens
  CDR3 for alpha chain variable domain of TCR clone 12079 (TRAV2, TRAJ33)
CAVESNYQLIW

SEQ ID NO: 24158 - protein, 15 aa, Homo sapiens
  CDR3 for beta chain variable domain of TCR clone 12079 (TRBV19, TRBJ1-1)
CASTSGQIQNTEALF

SEQ ID NO: 24159 - protein, 13 aa, Homo sapiens
  CDR3 for alpha chain variable domain of TCR clone 12080 (TRAV3, TRAJ21)
CAVGEPDFNKFYF

SEQ ID NO: 24160 - protein, 13 aa, Homo sapiens
  CDR3 for beta chain variable domain of TCR clone 12080 (TRBV9, TRBJ2-1)
CASSPSGGNEQFF

SEQ ID NO: 24161 - protein, 12 aa, Homo sapiens
  CDR3 for alpha chain variable domain of TCR clone 12081 (TRAV13-1, TRAJ21)
CAAKEGFNKFYF

SEQ ID NO: 24162 - protein, 17 aa, Homo sapiens
  CDR3 for beta chain variable domain of TCR clone 12081 (TRBV13, TRBJ2-3)
CASSLSRVAGGRNTQYF

SEQ ID NO: 24163 - protein, 14 aa, Homo sapiens
  CDR3 for alpha chain variable domain of TCR clone 12082 (TRAV38-1, TRAJ45)
CAYYSGGGADGLPF

SEQ ID NO: 24164 - protein, 20 aa, Homo sapiens
  CDR3 for beta chain variable domain of TCR clone 12082 (TRBV28, TRBJ2-1)
CASTPIGRSPGLAGGNEQFF

SEQ ID NO: 24165 - protein, 14 aa, Homo sapiens
  CDR3 for alpha chain variable domain of TCR clone 12083 (TRAV21, TRAJ35)
CAVMPIGFGNVLHC

SEQ ID NO: 24166 - protein, 12 aa, Homo sapiens
  CDR3 for beta chain variable domain of TCR clone 12083 (TRBV7-9, TRBJ2-7)
CASSIKREEQYL

SEQ ID NO: 24167 - protein, 14 aa, Homo sapiens
  CDR3 for alpha chain variable domain of TCR clone 12084 (TRAV12-2, TRAJ40)
CAVKIPSGTYKYIS

SEQ ID NO: 24168 - protein, 14 aa, Homo sapiens
  CDR3 for beta chain variable domain of TCR clone 12084 (TRBV20-1, TRBJ1-1)
CSAQTRIGGTEAFF

SEQ ID NO: 24169 - protein, 12 aa, Homo sapiens
  CDR3 for alpha chain variable domain of TCR clone 12085 (TRAV3, TRAJ20)
CAVRDPDCKLSF

SEQ ID NO: 24170 - protein, 13 aa, Homo sapiens
  CDR3 for beta chain variable domain of TCR clone 12085 (TRBV9, TRBJ2-1)
CASSVGQGGEQFF

SEQ ID NO: 24171 - protein, 12 aa, Homo sapiens
  CDR3 for alpha chain variable domain of TCR clone 12086 (TRAV27, TRAJ13)
CAGAGGYQKVTF

SEQ ID NO: 24172 - protein, 15 aa, Homo sapiens
  CDR3 for beta chain variable domain of TCR clone 12086 (TRBV20-1, TRBJ2-6)
CSVRDRGPGANVLTF

SEQ ID NO: 24173 - protein, 16 aa, Homo sapiens
  CDR3 for alpha chain variable domain of TCR clone 12087 (TRAV12-3, TRAJ53)
CAMSPGSGGGNYKLTF

SEQ ID NO: 24174 - protein, 15 aa, Homo sapiens
  CDR3 for beta chain variable domain of TCR clone 12087 (TRBV25-1, TRBJ1-4)
CASSKRIATNEKLFF

SEQ ID NO: 24175 - protein, 13 aa, Homo sapiens
  CDR3 for alpha chain variable domain of TCR clone 12088 (TRAV17, TRAJ45)
CATPGGGADGLTF

SEQ ID NO: 24176 - protein, 14 aa, Homo sapiens
  CDR3 for beta chain variable domain of TCR clone 12088 (TRBV4-1, TRBJ1-1)
CASSPTGIHTEAFF

SEQ ID NO: 24177 - protein, 11 aa, Homo sapiens
  CDR3 for alpha chain variable domain of TCR clone 12089 (TRAV17, TRAJ9)
CGFTGGFKTIF

SEQ ID NO: 24178 - protein, 14 aa, Homo sapiens
  CDR3 for beta chain variable domain of TCR clone 12089 (TRBV7-9, TRBJ2-2)
SASSLVQDTGELFF

SEQ ID NO: 24179 - protein, 16 aa, Homo sapiens
  CDR3 for alpha chain variable domain of TCR clone 12090 (TRAV1-2, TRAJ10)
CAVRGVLTGGGNKLTF

SEQ ID NO: 24180 - protein, 14 aa, Homo sapiens
  CDR3 for beta chain variable domain of TCR clone 12090 (TRBV19, TRBJ2-1)
CARGARSFQWEQFF

SEQ ID NO: 24181 - protein, 14 aa, Homo sapiens
  CDR3 for alpha chain variable domain of TCR clone 12091 (TRAV8-4, TRAJ13)
CAVTLSGGYQKVTF

SEQ ID NO: 24182 - protein, 14 aa, Homo sapiens
  CDR3 for beta chain variable domain of TCR clone 12091 (TRBV7-2, TRBJ2-7)
CASRSQGAAYEQYF

SEQ ID NO: 24183 - protein, 13 aa, Homo sapiens
  CDR3 for alpha chain variable domain of TCR clone 12092 (TRAV8-4, TRAJ39)
STPPSDAGNMLTF

SEQ ID NO: 24184 - protein, 13 aa, Homo sapiens
  CDR3 for beta chain variable domain of TCR clone 12092 (TRBV6-3, TRBJ2-5)
CASRRGIQETQYF

SEQ ID NO: 24185 - protein, 16 aa, Homo sapiens
  CDR3 for alpha chain variable domain of TCR clone 12093 (TRAV17, TRAJ35)
CATAEGGIGFGNVLHC

SEQ ID NO: 24186 - protein, 16 aa, Homo sapiens
  CDR3 for beta chain variable domain of TCR clone 12093 (TRBV6-5, TRBJ2-7)
CASSSDPTSGFYEQYF

SEQ ID NO: 24187 - protein, 15 aa, Homo sapiens
  CDR3 for alpha chain variable domain of TCR clone 12094 (TRAV12-1, TRAJ37)
CVVNGGLWQHRQTNL

SEQ ID NO: 24188 - protein, 12 aa, Homo sapiens
  CDR3 for beta chain variable domain of TCR clone 12094 (TRBV20-1, TRBJ1-2)
CSAPGFNYGYTF

SEQ ID NO: 24189 - protein, 11 aa, Homo sapiens
  CDR3 for alpha chain variable domain of TCR clone 12095 (TRAV8-3, TRAJ42)
NYGGSQGNLIF

SEQ ID NO: 24190 - protein, 14 aa, Homo sapiens
  CDR3 for beta chain variable domain of TCR clone 12095 (TRBV6-1, TRBJ1-3)
CASVQGGGGNTIYF

SEQ ID NO: 24191 - protein, 14 aa, Homo sapiens
  CDR3 for alpha chain variable domain of TCR clone 12096 (TRAV12-2, TRAJ40)
FAVKIPSGTYKYIF

SEQ ID NO: 24192 - protein, 14 aa, Homo sapiens
  CDR3 for beta chain variable domain of TCR clone 12096 (TRBV20-1, TRBJ1-1)
CSAQTRIGGTEAFF

SEQ ID NO: 24193 - protein, 16 aa, Homo sapiens
  CDR3 for alpha chain variable domain of TCR clone 12097 (TRAV8-4, TRAJ5)
CAVSPLTDTGRRALTF

SEQ ID NO: 24194 - protein, 15 aa, Homo sapiens
  CDR3 for beta chain variable domain of TCR clone 12097 (TRBV20-1, TRBJ1-1)
CSASRGVTGNTEAFF

SEQ ID NO: 24195 - protein, 11 aa, Homo sapiens
  CDR3 for alpha chain variable domain of TCR clone 12098 (TRAV16, TRAJ42)
CALASQGNLIF

SEQ ID NO: 24196 - protein, 18 aa, Homo sapiens
  CDR3 for beta chain variable domain of TCR clone 12098 (TRBV6-4, TRBJ2-1)
CASSPDRMGSGSINEQFF

SEQ ID NO: 24197 - protein, 11 aa, Homo sapiens
  CDR3 for alpha chain variable domain of TCR clone 12099 (TRAV3, TRAJ21)
CAVGNFNKFYF

SEQ ID NO: 24198 - protein, 16 aa, Homo sapiens
  CDR3 for beta chain variable domain of TCR clone 12099 (TRBV19, TRBJ2-1)
CTSSKAGPSSYNEQFF

SEQ ID NO: 24199 - protein, 14 aa, Homo sapiens
  CDR3 for alpha chain variable domain of TCR clone 12100 (TRAV1-2, TRAJ16)
CAVNRFSDCQKLLF

SEQ ID NO: 24200 - protein, 15 aa, Homo sapiens
  CDR3 for beta chain variable domain of TCR clone 12100 (TRBV9, TRBJ1-6)
CASSVAGTGDSPLHF

SEQ ID NO: 24201 - protein, 10 aa, Homo sapiens
  CDR3 for alpha chain variable domain of TCR clone 12101 (TRAV13-1, TRAJ52)
CAATTPMLVV

SEQ ID NO: 24202 - protein, 14 aa, Homo sapiens
  CDR3 for beta chain variable domain of TCR clone 12101 (TRBV6-5, TRBJ1-1)
CASSFGQGLTEAFF

SEQ ID NO: 24203 - protein, 13 aa, Homo sapiens
  CDR3 for alpha chain variable domain of TCR clone 12102 (TRAV2, TRAJ12)
CAVGADSSYKLIF

SEQ ID NO: 24204 - protein, 13 aa, Homo sapiens
  CDR3 for beta chain variable domain of TCR clone 12102 (TRBV20-1, TRBJ1-1)
CSARGGGNTEAFF

SEQ ID NO: 24205 - protein, 17 aa, Homo sapiens
  CDR3 for alpha chain variable domain of TCR clone 12103 (TRAV3, TRAJ6)
CAVRDGPRAGGSYIPTF

SEQ ID NO: 24206 - protein, 20 aa, Homo sapiens
  CDR3 for beta chain variable domain of TCR clone 12103 (TRBV28, TRBJ2-1)
CASTPIGRSPGLAGGNEQLF

SEQ ID NO: 24207 - protein, 14 aa, Homo sapiens
  CDR3 for alpha chain variable domain of TCR clone 12104 (TRAV8-1, TRAJ5)
CAVRTDTGRRALTF

SEQ ID NO: 24208 - protein, 15 aa, Homo sapiens
  CDR3 for beta chain variable domain of TCR clone 12104 (TRBV6-3, TRBJ2-7)
CASSSPGTVFYEQYF

SEQ ID NO: 24209 - protein, 14 aa, Homo sapiens
  CDR3 for alpha chain variable domain of TCR clone 12105 (TRAV27, TRAJ21)
CAGVRQLQQILLWI

SEQ ID NO: 24210 - protein, 14 aa, Homo sapiens
  CDR3 for beta chain variable domain of TCR clone 12105 (TRBV7-9, TRBJ1-4)
CASSLEGQSEKLFF

SEQ ID NO: 24211 - protein, 15 aa, Homo sapiens
  CDR3 for alpha chain variable domain of TCR clone 12106 (TRAV17, TRAJ17)
CATDASIIRRQQANF

SEQ ID NO: 24212 - protein, 12 aa, Homo sapiens
  CDR3 for beta chain variable domain of TCR clone 12106 (TRBV5-4, TRBJ2-5)
CASSSTRETQYF

SEQ ID NO: 24213 - protein, 17 aa, Homo sapiens
  CDR3 for alpha chain variable domain of TCR clone 12107 (TRAV3, TRAJ6)
CAVRDGPRAGGSYIPTF

SEQ ID NO: 24214 - protein, 14 aa, Homo sapiens
  CDR3 for beta chain variable domain of TCR clone 12107 (TRBV7-2, TRBJ2-7)
CASIPKTSFYEQYF

SEQ ID NO: 24215 - protein, 13 aa, Homo sapiens
  CDR3 for alpha chain variable domain of TCR clone 12108 (TRAV3, TRAJ21)
CAVGNFNKFTLDL

SEQ ID NO: 24216 - protein, 16 aa, Homo sapiens
  CDR3 for beta chain variable domain of TCR clone 12108 (TRBV19, TRBJ2-1)
CASSKAGPSSYNEQFF

SEQ ID NO: 24217 - protein, 14 aa, Homo sapiens
  CDR3 for alpha chain variable domain of TCR clone 12109 (TRAV35, TRAJ41)
CAGKTSNSGYALNF

SEQ ID NO: 24218 - protein, 11 aa, Homo sapiens
  CDR3 for beta chain variable domain of TCR clone 12109 (TRBV29-1, TRBJ2-5)
CSEDRTGTQYF

SEQ ID NO: 24219 - protein, 10 aa, Homo sapiens
  CDR3 for alpha chain variable domain of TCR clone 12110 (TRAV16, TRAJ22)
SAMYLRQLTF

SEQ ID NO: 24220 - protein, 15 aa, Homo sapiens
  CDR3 for beta chain variable domain of TCR clone 12110 (TRBV7-9, TRBJ1-6)
CASSSPGRGNSPLLF

SEQ ID NO: 24221 - protein, 14 aa, Homo sapiens
  CDR3 for alpha chain variable domain of TCR clone 12111 (TRAV36/DV7, TRAJ32)
CAVGHVGATNKLIF

SEQ ID NO: 24222 - protein, 11 aa, Homo sapiens
  CDR3 for beta chain variable domain of TCR clone 12111 (TRBV7-8, TRBJ2-7)
CASSLSLEQYF

SEQ ID NO: 24223 - protein, 14 aa, Homo sapiens
  CDR3 for alpha chain variable domain of TCR clone 12112 (TRAV1-2, TRAJ16)
CAVNRFSDGQKLLF

SEQ ID NO: 24224 - protein, 12 aa, Homo sapiens
  CDR3 for beta chain variable domain of TCR clone 12112 (TRBV7-9, TRBJ2-7)
CASSIKREEQYF

SEQ ID NO: 24225 - protein, 11 aa, Homo sapiens
  CDR3 for alpha chain variable domain of TCR clone 12113 (TRAV13-2, TRAJ36)
CAETGANNLFF

SEQ ID NO: 24226 - protein, 13 aa, Homo sapiens
  CDR3 for beta chain variable domain of TCR clone 12113 (TRBV7-9, TRBJ2-4)
RATEGLAGNIQYF

SEQ ID NO: 24227 - protein, 13 aa, Homo sapiens
  CDR3 for alpha chain variable domain of TCR clone 12114 (TRAV1-2, TRAJ9)
CAALNTGGFKTIF

SEQ ID NO: 24228 - protein, 13 aa, Homo sapiens
  CDR3 for beta chain variable domain of TCR clone 12114 (TRBV19, TRBJ1-2)
RASSVPGQDGYTF

SEQ ID NO: 24229 - protein, 18 aa, Homo sapiens
  CDR3 for alpha chain variable domain of TCR clone 12115 (TRAV21, TRAJ52)
FAVRPSPAGGTSYGKLTF

SEQ ID NO: 24230 - protein, 17 aa, Homo sapiens
  CDR3 for beta chain variable domain of TCR clone 12115 (TRBV13, TRBJ2-3)
CASSLSRVAGGRNTQYF

SEQ ID NO: 24231 - protein, 16 aa, Homo sapiens
  CDR3 for alpha chain variable domain of TCR clone 12116 (TRAV8-3, TRAJ42)
CAVGEGNGGSQGNLIL

SEQ ID NO: 24232 - protein, 14 aa, Homo sapiens
  CDR3 for beta chain variable domain of TCR clone 12116 (TRBV7-2, TRBJ2-1)
CASSRGGARNEQFF

SEQ ID NO: 24233 - protein, 14 aa, Homo sapiens
  CDR3 for alpha chain variable domain of TCR clone 12117 (TRAV26-1, TRAJ38)
CIADNAGNNRTLIW

SEQ ID NO: 24234 - protein, 13 aa, Homo sapiens
  CDR3 for beta chain variable domain of TCR clone 12117 (TRBV20-1, TRBJ1-1)
CSARGGGNTEAFF

SEQ ID NO: 24235 - protein, 23 aa, Homo sapiens
  CDR3 for alpha chain variable domain of TCR clone 12118 (TRAV27, TRAJ3)
TSLQPSLVIQASLRGSSASKIIF

SEQ ID NO: 24236 - protein, 15 aa, Homo sapiens
  CDR3 for beta chain variable domain of TCR clone 12118 (TRBV28, TRBJ1-3)
CASSMGWASGNTIYF

SEQ ID NO: 24237 - protein, 11 aa, Homo sapiens
  CDR3 for alpha chain variable domain of TCR clone 12119 (TRAV27, TRAJ45)
CAGAQEEVLTD

SEQ ID NO: 24238 - protein, 15 aa, Homo sapiens
  CDR3 for beta chain variable domain of TCR clone 12119 (TRBV20-1, TRBJ2-7)
CSARDRVSGMDEQYF

SEQ ID NO: 24239 - protein, 13 aa, Homo sapiens
  CDR3 for alpha chain variable domain of TCR clone 12120 (TRAV2, TRAJ40)
CAVVPSGTYKYIF

SEQ ID NO: 24240 - protein, 15 aa, Homo sapiens
  CDR3 for beta chain variable domain of TCR clone 12120 (TRBV11-3, TRBJ2-3)
CASLKDGREGDTQYF

SEQ ID NO: 24241 - protein, 14 aa, Homo sapiens
  CDR3 for alpha chain variable domain of TCR clone 12121 (TRAV1-2, TRAJ8)
CAVREDTGFQKLVF

SEQ ID NO: 24242 - protein, 15 aa, Homo sapiens
  CDR3 for beta chain variable domain of TCR clone 12121 (TRBV6-3, TRBJ2-7)
CASSSPGTVFCEQYF

SEQ ID NO: 24243 - protein, 11 aa, Homo sapiens
  CDR3 for alpha chain variable domain of TCR clone 12122 (TRAV3, TRAJ21)
CAVGNFNKFYF

SEQ ID NO: 24244 - protein, 16 aa, Homo sapiens
  CDR3 for beta chain variable domain of TCR clone 12122 (TRBV19, TRBJ2-1)
CASNKAGPSSYNEQFF

SEQ ID NO: 24245 - protein, 17 aa, Homo sapiens
  CDR3 for alpha chain variable domain of TCR clone 12123 (TRAV13-1, TRAJ52)
CAAGRNAGGTSYGKLTF

SEQ ID NO: 24246 - protein, 14 aa, Homo sapiens
  CDR3 for beta chain variable domain of TCR clone 12123 (TRBV7-2, TRBJ2-7)
CASSPKTSFYEQYF

SEQ ID NO: 24247 - protein, 15 aa, Homo sapiens
  CDR3 for alpha chain variable domain of TCR clone 12124 (TRAV1-2, TRAJ45)
CAVRDSGGGADGLTF

SEQ ID NO: 24248 - protein, 13 aa, Homo sapiens
  CDR3 for beta chain variable domain of TCR clone 12124 (TRBV5-1, TRBJ2-1)
CASRPFGYNEQFF

SEQ ID NO: 24249 - protein, 12 aa, Homo sapiens
  CDR3 for alpha chain variable domain of TCR clone 12125 (TRAV8-3, TRAJ26)
CAGDNYGQNFVF

SEQ ID NO: 24250 - protein, 14 aa, Homo sapiens
  CDR3 for beta chain variable domain of TCR clone 12125 (TRBV15, TRBJ2-5)
CATSGDRGQETQYF

SEQ ID NO: 24251 - protein, 14 aa, Homo sapiens
  CDR3 for alpha chain variable domain of TCR clone 12126 (TRAV2, TRAJ37)
CAVDFTSNTGKIIF

SEQ ID NO: 24252 - protein, 15 aa, Homo sapiens
  CDR3 for beta chain variable domain of TCR clone 12126 (TRBV20-1, TRBJ1-1)
CSASRGVTGNTEAFF

SEQ ID NO: 24253 - protein, 11 aa, Homo sapiens
  CDR3 for alpha chain variable domain of TCR clone 12127 (TRAV1-2, TRAJ20)
CAVANDYKLGF

SEQ ID NO: 24254 - protein, 18 aa, Homo sapiens
  CDR3 for beta chain variable domain of TCR clone 12127 (TRBV20-1, TRBJ2-6)
CSAETTPTHGSGANVLTF

SEQ ID NO: 24255 - protein, 13 aa, Homo sapiens
  CDR3 for alpha chain variable domain of TCR clone 12128 (TRAV3, TRAJ27)
CAVRHLGAGKSTF

SEQ ID NO: 24256 - protein, 13 aa, Homo sapiens
  CDR3 for beta chain variable domain of TCR clone 12128 (TRBV7-9, TRBJ2-3)
CASSPGSTDTQYF

SEQ ID NO: 24257 - protein, 14 aa, Homo sapiens
  CDR3 for alpha chain variable domain of TCR clone 12129 (TRAV21, TRAJ35)
CAVMPIGFGNVLHC

SEQ ID NO: 24258 - protein, 12 aa, Homo sapiens
  CDR3 for beta chain variable domain of TCR clone 12129 (TRBV7-9, TRBJ2-7)
CASSIRREEQYF

SEQ ID NO: 24259 - protein, 12 aa, Homo sapiens
  CDR3 for alpha chain variable domain of TCR clone 12130 (TRAV12-3, TRAJ17)
CATTLTGNKLTF

SEQ ID NO: 24260 - protein, 13 aa, Homo sapiens
  CDR3 for beta chain variable domain of TCR clone 12130 (TRBV7-3, TRBJ1-1)
CASSQDWGAEAFF

SEQ ID NO: 24261 - protein, 14 aa, Homo sapiens
  CDR3 for alpha chain variable domain of TCR clone 12131 (TRAV12-2, TRAJ3)
CAVSPYSSASKIIF

SEQ ID NO: 24262 - protein, 14 aa, Homo sapiens
  CDR3 for beta chain variable domain of TCR clone 12131 (TRBV27, TRBJ2-1)
CAGSIAETYNEQFF

SEQ ID NO: 24263 - protein, 17 aa, Homo sapiens
  CDR3 for alpha chain variable domain of TCR clone 12132 (TRAV3, TRAJ22)
CAVRPFISSGSARQLTF

SEQ ID NO: 24264 - protein, 16 aa, Homo sapiens
  CDR3 for beta chain variable domain of TCR clone 12132 (TRBV7-6, TRBJ2-3)
CASSPLAGGSTDTQYF

SEQ ID NO: 24265 - protein, 13 aa, Homo sapiens
  CDR3 for alpha chain variable domain of TCR clone 12133 (TRAV2, TRAJ40)
CAVVTSGTYKYIF

SEQ ID NO: 24266 - protein, 14 aa, Homo sapiens
  CDR3 for beta chain variable domain of TCR clone 12133 (TRBV19, TRBJ2-1)
CASPTFVLIGEQFF

SEQ ID NO: 24267 - protein, 14 aa, Homo sapiens
  CDR3 for alpha chain variable domain of TCR clone 12134 (TRAV1-2, TRAJ8)
CAVREDTGFEKLVF

SEQ ID NO: 24268 - protein, 15 aa, Homo sapiens
  CDR3 for beta chain variable domain of TCR clone 12134 (TRBV6-3, TRBJ2-7)
CASSSPGTVFYEQYF

SEQ ID NO: 24269 - protein, 15 aa, Homo sapiens
  CDR3 for alpha chain variable domain of TCR clone 12135 (TRAV26-1, TRAJ29)
CIVRVEGSGNTPLVF

SEQ ID NO: 24270 - protein, 14 aa, Homo sapiens
  CDR3 for beta chain variable domain of TCR clone 12135 (TRBV18, TRBJ2-5)
CASSPGVAQETQYF

SEQ ID NO: 24271 - protein, 17 aa, Homo sapiens
  CDR3 for alpha chain variable domain of TCR clone 12136 (TRAV4, TRAJ33)
CCVLLPRGGDSNYQLIW

SEQ ID NO: 24272 - protein, 14 aa, Homo sapiens
  CDR3 for beta chain variable domain of TCR clone 12136 (TRBV5-1, TRBJ2-2)
CASSSGSNTGELFF

SEQ ID NO: 24273 - protein, 13 aa, Homo sapiens
  CDR3 for alpha chain variable domain of TCR clone 12137 (TRAV13-1, TRAJ21)
CAASIYNFNKFYF

SEQ ID NO: 24274 - protein, 13 aa, Homo sapiens
  CDR3 for beta chain variable domain of TCR clone 12137 (TRBV27, TRBJ1-4)
CASSLMGDEKLFL

SEQ ID NO: 24275 - protein, 12 aa, Homo sapiens
  CDR3 for alpha chain variable domain of TCR clone 12138 (TRAV12-3, TRAJ17)
CAMTLTGNKLTF

SEQ ID NO: 24276 - protein, 15 aa, Homo sapiens
  CDR3 for beta chain variable domain of TCR clone 12138 (TRBV20-1, TRBJ2-7)
CSARDRDSGMDEQYF

SEQ ID NO: 24277 - protein, 15 aa, Homo sapiens
  CDR3 for alpha chain variable domain of TCR clone 12139 (TRAV26-1, TRAJ29)
CIVRVEGSGSTPLVF

SEQ ID NO: 24278 - protein, 14 aa, Homo sapiens
  CDR3 for beta chain variable domain of TCR clone 12139 (TRBV18, TRBJ2-5)
CASSPGVSQETQYF

SEQ ID NO: 24279 - protein, 12 aa, Homo sapiens
  CDR3 for alpha chain variable domain of TCR clone 12140 (TRAV21, TRAJ11)
CAATSGYSTLTF

SEQ ID NO: 24280 - protein, 16 aa, Homo sapiens
  CDR3 for beta chain variable domain of TCR clone 12140 (TRBV28, TRBJ2-2)
CASSLEGGSNTGELFL

SEQ ID NO: 24281 - protein, 11 aa, Homo sapiens
  CDR3 for alpha chain variable domain of TCR clone 12141 (TRAV2, TRAJ21)
CAVFNFNKFYF

SEQ ID NO: 24282 - protein, 14 aa, Homo sapiens
  CDR3 for beta chain variable domain of TCR clone 12141 (TRBV15, TRBJ2-3)
CATRSGTSTDTQYF

SEQ ID NO: 24283 - protein, 18 aa, Homo sapiens
  CDR3 for alpha chain variable domain of TCR clone 12142 (TRAV21, TRAJ52)
CAVRPSPAGGTGYGKLTF

SEQ ID NO: 24284 - protein, 17 aa, Homo sapiens
  CDR3 for beta chain variable domain of TCR clone 12142 (TRBV13, TRBJ2-3)
CASSLSRVAGGRNTQYF

SEQ ID NO: 24285 - protein, 14 aa, Homo sapiens
  CDR3 for alpha chain variable domain of TCR clone 12143 (TRAV23/DV6, TRAJ8)
CAASKATGFQKLVF

SEQ ID NO: 24286 - protein, 15 aa, Homo sapiens
  CDR3 for beta chain variable domain of TCR clone 12143 (TRBV28, TRBJ2-3)
CASSPDRRGANTQYF

SEQ ID NO: 24287 - protein, 16 aa, Homo sapiens
  CDR3 for alpha chain variable domain of TCR clone 12144 (TRAV14/DV4, TRAJ53)
CAMREGGGGSNYKLTF

SEQ ID NO: 24288 - protein, 15 aa, Homo sapiens
  CDR3 for beta chain variable domain of TCR clone 12144 (TRBV6-3, TRBJ2-7)
CASSSPGTVFYEQYF

SEQ ID NO: 24289 - protein, 13 aa, Homo sapiens
  CDR3 for alpha chain variable domain of TCR clone 12145 (TRAV12-2, TRAJ7)
RAVNLYGNNRLAF

SEQ ID NO: 24290 - protein, 14 aa, Homo sapiens
  CDR3 for beta chain variable domain of TCR clone 12145 (TRBV25-1, TRBJ1-2)
CASSEATGPYGYTF

SEQ ID NO: 24291 - protein, 16 aa, Homo sapiens
  CDR3 for alpha chain variable domain of TCR clone 12146 (TRAV26-1, TRAJ58)
IASSESGETSGSRLTF

SEQ ID NO: 24292 - protein, 16 aa, Homo sapiens
  CDR3 for beta chain variable domain of TCR clone 12146 (TRBV7-2, TRBJ2-5)
CQQPRQGRKSRETQYF

SEQ ID NO: 24293 - protein, 12 aa, Homo sapiens
  CDR3 for alpha chain variable domain of TCR clone 12147 (TRAV12-3, TRAJ17)
CAMTLTGNKLTF

SEQ ID NO: 24294 - protein, 15 aa, Homo sapiens
  CDR3 for beta chain variable domain of TCR clone 12147 (TRBV20-1, TRBJ2-7)
CSARDRVSGMDAQYF

SEQ ID NO: 24295 - protein, 18 aa, Homo sapiens
  CDR3 for alpha chain variable domain of TCR clone 12148 (TRAV21, TRAJ52)
CAVRPSPAGGTSYGKLTF

SEQ ID NO: 24296 - protein, 17 aa, Homo sapiens
  CDR3 for beta chain variable domain of TCR clone 12148 (TRBV13, TRBJ2-3)
CASSLSKVAGGRNTQYF

SEQ ID NO: 24297 - protein, 14 aa, Homo sapiens
  CDR3 for alpha chain variable domain of TCR clone 12149 (TRAV1-2, TRAJ8)
CAVREDTGFQKLVF

SEQ ID NO: 24298 - protein, 19 aa, Homo sapiens
  CDR3 for beta chain variable domain of TCR clone 12149 (TRBV25-1, TRBJ2-2)
CAILVYRVDRGRKTGELFF

SEQ ID NO: 24299 - protein, 12 aa, Homo sapiens
  CDR3 for alpha chain variable domain of TCR clone 12150 (TRAV12-3, TRAJ17)
CAMTLTGNKLTF

SEQ ID NO: 24300 - protein, 15 aa, Homo sapiens
  CDR3 for beta chain variable domain of TCR clone 12150 (TRBV11-3, TRBJ2-3)
YASLKDGREGDTQYF

SEQ ID NO: 24301 - protein, 15 aa, Homo sapiens
  CDR3 for alpha chain variable domain of TCR clone 12151 (TRAV17, TRAJ57)
CATGPSQGGSDKLVF

SEQ ID NO: 24302 - protein, 16 aa, Homo sapiens
  CDR3 for beta chain variable domain of TCR clone 12151 (TRBV12-4, TRBJ1-5)
CASSRPVGGSNQPQHF

SEQ ID NO: 24303 - protein, 18 aa, Homo sapiens
  CDR3 for alpha chain variable domain of TCR clone 12152 (TRAV26-2, )
CILLDIQNPDPAVYQLRD

SEQ ID NO: 24304 - protein, 13 aa, Homo sapiens
  CDR3 for beta chain variable domain of TCR clone 12152 (TRBV20-1, TRBJ2-7)
CSADPGATYEQYF

SEQ ID NO: 24305 - protein, 17 aa, Homo sapiens
  CDR3 for alpha chain variable domain of TCR clone 12153 (TRAV3, TRAJ6)
SAVRDGPRAGGSYIPTF

SEQ ID NO: 24306 - protein, 14 aa, Homo sapiens
  CDR3 for beta chain variable domain of TCR clone 12153 (TRBV7-2, TRBJ2-7)
CASSPKTSFYEQYF

SEQ ID NO: 24307 - protein, 12 aa, Homo sapiens
  CDR3 for alpha chain variable domain of TCR clone 12154 (TRAV39, TRAJ34)
CAVSYNTDKLIF

SEQ ID NO: 24308 - protein, 10 aa, Homo sapiens
  CDR3 for beta chain variable domain of TCR clone 12154 (TRBV2, TRBJ2-7)
CASSVYEQYF

SEQ ID NO: 24309 - protein, 13 aa, Homo sapiens
  CDR3 for alpha chain variable domain of TCR clone 12155 (TRAV38-1, TRAJ42)
CARWGGSQGNLIF

SEQ ID NO: 24310 - protein, 15 aa, Homo sapiens
  CDR3 for beta chain variable domain of TCR clone 12155 (TRBV6-3, TRBJ2-7)
CASSSPGTVFYEQYF

SEQ ID NO: 24311 - protein, 20 aa, Homo sapiens
  CDR3 for alpha chain variable domain of TCR clone 12156 (TRAV26-1, TRAJ42)
CCVLLRRQTYYGGSQGNLIF

SEQ ID NO: 24312 - protein, 16 aa, Homo sapiens
  CDR3 for beta chain variable domain of TCR clone 12156 (TRBV7-3, TRBJ2-2)
CASSLKRGTLSGELFF

SEQ ID NO: 24313 - protein, 14 aa, Homo sapiens
  CDR3 for alpha chain variable domain of TCR clone 12157 (TRAV1-2, TRAJ8)
CAVREDTGFQKLVF

SEQ ID NO: 24314 - protein, 15 aa, Homo sapiens
  CDR3 for beta chain variable domain of TCR clone 12157 (TRBV5-4, TRBJ2-5)
CASSLAGGAKETQYF

SEQ ID NO: 24315 - protein, 16 aa, Homo sapiens
  CDR3 for alpha chain variable domain of TCR clone 12158 (TRAV8-4, TRAJ13)
CAVTLLGVTRKLPLEL

SEQ ID NO: 24316 - protein, 14 aa, Homo sapiens
  CDR3 for beta chain variable domain of TCR clone 12158 (TRBV7-2, TRBJ1-2)
CASSQTGSTYGYTF

SEQ ID NO: 24317 - protein, 14 aa, Homo sapiens
  CDR3 for alpha chain variable domain of TCR clone 12159 (TRAV17, TRAJ16)
CATADFSDGQKLLF

SEQ ID NO: 24318 - protein, 12 aa, Homo sapiens
  CDR3 for beta chain variable domain of TCR clone 12159 (TRBV5-4, TRBJ2-5)
CASSSTRETQYF

SEQ ID NO: 24319 - protein, 12 aa, Homo sapiens
  CDR3 for alpha chain variable domain of TCR clone 12160 (TRAV12-2, TRAJ31)
CAVNTPDARLMF

SEQ ID NO: 24320 - protein, 17 aa, Homo sapiens
  CDR3 for beta chain variable domain of TCR clone 12160 (TRBV20-1, TRBJ1-6)
CSARGGYTFSYNSPLHL

SEQ ID NO: 24321 - protein, 12 aa, Homo sapiens
  CDR3 for alpha chain variable domain of TCR clone 12161 (TRAV2, TRAJ9)
CAVGAGGFKTIF

SEQ ID NO: 24322 - protein, 16 aa, Homo sapiens
  CDR3 for beta chain variable domain of TCR clone 12161 (TRBV13, TRBJ2-2)
CAGSPRTGEHTGELFF

SEQ ID NO: 24323 - protein, 15 aa, Homo sapiens
  CDR3 for alpha chain variable domain of TCR clone 12162 (TRAV27, TRAJ38)
CAARRNAGNNRKLIW

SEQ ID NO: 24324 - protein, 13 aa, Homo sapiens
  CDR3 for beta chain variable domain of TCR clone 12162 (TRBV12-5, TRBJ2-3)
CAGGDRQSDTQYF

SEQ ID NO: 24325 - protein, 12 aa, Homo sapiens
  CDR3 for alpha chain variable domain of TCR clone 12163 (TRAV25, TRAJ45)
DYSGGGADGLTF

SEQ ID NO: 24326 - protein, 12 aa, Homo sapiens
  CDR3 for beta chain variable domain of TCR clone 12163 (TRBV20-1, TRBJ2-1)
CSAQYTYNEQFF

SEQ ID NO: 24327 - protein, 13 aa, Homo sapiens
  CDR3 for alpha chain variable domain of TCR clone 12164 (TRAV29/DV5, TRAJ44)
CAASTGTASKLTF

SEQ ID NO: 24328 - protein, 13 aa, Homo sapiens
  CDR3 for beta chain variable domain of TCR clone 12164 (TRBV19, TRBJ2-7)
CASRKAGGNEQYF

SEQ ID NO: 24329 - protein, 13 aa, Homo sapiens
  CDR3 for alpha chain variable domain of TCR clone 12165 (TRAV12-2, TRAJ20)
CAVNRLDDYKLSF

SEQ ID NO: 24330 - protein, 12 aa, Homo sapiens
  CDR3 for beta chain variable domain of TCR clone 12165 (TRBV19, TRBJ2-1)
CASSQISNEQFF

SEQ ID NO: 24331 - protein, 14 aa, Homo sapiens
  CDR3 for alpha chain variable domain of TCR clone 12166 (TRAV1-2, TRAJ16)
CAVNRFSDGQKLLF

SEQ ID NO: 24332 - protein, 15 aa, Homo sapiens
  CDR3 for beta chain variable domain of TCR clone 12166 (TRBV9, TRBJ1-6)
CASSVARTGDSPLHF

SEQ ID NO: 24333 - protein, 16 aa, Homo sapiens
  CDR3 for alpha chain variable domain of TCR clone 12167 (TRAV30, TRAJ24)
CGTEIVDADSWGKFQF

SEQ ID NO: 24334 - protein, 12 aa, Homo sapiens
  CDR3 for beta chain variable domain of TCR clone 12167 (TRBV12-4, TRBJ2-7)
CASSLGGYEQYF

SEQ ID NO: 24335 - protein, 16 aa, Homo sapiens
  CDR3 for alpha chain variable domain of TCR clone 12168 (TRAV16, TRAJ4)
CALSRMFSGGYNRLIF

SEQ ID NO: 24336 - protein, 16 aa, Homo sapiens
  CDR3 for beta chain variable domain of TCR clone 12168 (TRBV24-1, TRBJ2-3)
CATSDPGTGATDTQYF

SEQ ID NO: 24337 - protein, 15 aa, Homo sapiens
  CDR3 for alpha chain variable domain of TCR clone 12169 (TRAV26-1, TRAJ22)
CIVRVSFWFCKATDL

SEQ ID NO: 24338 - protein, 13 aa, Homo sapiens
  CDR3 for beta chain variable domain of TCR clone 12169 (TRBV7-9, TRBJ1-2)
CASSLKQNYGCTF

SEQ ID NO: 24339 - protein, 16 aa, Homo sapiens
  CDR3 for alpha chain variable domain of TCR clone 12170 (TRAV30, TRAJ24)
CGTEIVVADSWGKFQF

SEQ ID NO: 24340 - protein, 14 aa, Homo sapiens
  CDR3 for beta chain variable domain of TCR clone 12170 (TRBV12-5, TRBJ2-5)
CASGSRTHQETQYF

SEQ ID NO: 24341 - protein, 15 aa, Homo sapiens
  CDR3 for alpha chain variable domain of TCR clone 12171 (TRAV23/DV6, TRAJ30)
CAASSQESRDDKIIF

SEQ ID NO: 24342 - protein, 12 aa, Homo sapiens
  CDR3 for beta chain variable domain of TCR clone 12171 (TRBV19, TRBJ1-1)
CASGTGWTEAFF

SEQ ID NO: 24343 - protein, 16 aa, Homo sapiens
  CDR3 for alpha chain variable domain of TCR clone 12172 (TRAV3, TRAJ21)
CAVRDIERGNFNKFYF

SEQ ID NO: 24344 - protein, 13 aa, Homo sapiens
  CDR3 for beta chain variable domain of TCR clone 12172 (TRBV27, TRBJ2-7)
CASNLTTGYEQYF

SEQ ID NO: 24345 - protein, 14 aa, Homo sapiens
  CDR3 for alpha chain variable domain of TCR clone 12173 (TRAV13-1, TRAJ35)
CAASKGGFGNVLHC

SEQ ID NO: 24346 - protein, 13 aa, Homo sapiens
  CDR3 for beta chain variable domain of TCR clone 12173 (TRBV7-3, TRBJ1-1)
CDSSQDWGAEAFF

SEQ ID NO: 24347 - protein, 18 aa, Homo sapiens
  CDR3 for alpha chain variable domain of TCR clone 12174 (TRAV21, TRAJ52)
CAVRPSPAGGTSYGKLTF

SEQ ID NO: 24348 - protein, 17 aa, Homo sapiens
  CDR3 for beta chain variable domain of TCR clone 12174 (TRBV7-8, TRBJ2-6)
CASSAGTGGAGANVLTF

SEQ ID NO: 24349 - protein, 13 aa, Homo sapiens
  CDR3 for alpha chain variable domain of TCR clone 12175 (TRAV20, TRAJ50)
CAVQQTSYDKVIF

SEQ ID NO: 24350 - protein, 16 aa, Homo sapiens
  CDR3 for beta chain variable domain of TCR clone 12175 (TRBV27, TRBJ2-1)
CASSSLTSGSGNEQFF

SEQ ID NO: 24351 - protein, 14 aa, Homo sapiens
  CDR3 for alpha chain variable domain of TCR clone 12176 (TRAV1-2, TRAJ16)
CAVNRFSDGQKLLF

SEQ ID NO: 24352 - protein, 13 aa, Homo sapiens
  CDR3 for beta chain variable domain of TCR clone 12176 (TRBV7-7, TRBJ2-2)
CASSLTSAGELFF

SEQ ID NO: 24353 - protein, 14 aa, Homo sapiens
  CDR3 for alpha chain variable domain of TCR clone 12177 (TRAV1-2, TRAJ8)
CAVREDTGFRKLVF

SEQ ID NO: 24354 - protein, 13 aa, Homo sapiens
  CDR3 for beta chain variable domain of TCR clone 12177 (TRBV14, TRBJ2-7)
CASSQDRRYEQYF

SEQ ID NO: 24355 - protein, 11 aa, Homo sapiens
  CDR3 for alpha chain variable domain of TCR clone 12178 (TRAV12-3, TRAJ49)
CAANTGNQFYF

SEQ ID NO: 24356 - protein, 17 aa, Homo sapiens
  CDR3 for beta chain variable domain of TCR clone 12178 (TRBV11-2, TRBJ2-1)
CASSLYPPGVEYNEQFF

SEQ ID NO: 24357 - protein, 15 aa, Homo sapiens
  CDR3 for alpha chain variable domain of TCR clone 12179 (TRAV17, TRAJ57)
CATGPSQGRSEKLVF

SEQ ID NO: 24358 - protein, 14 aa, Homo sapiens
  CDR3 for beta chain variable domain of TCR clone 12179 (TRBV12-5, TRBJ2-5)
CASGSRTHQETQYF

SEQ ID NO: 24359 - protein, 13 aa, Homo sapiens
  CDR3 for alpha chain variable domain of TCR clone 12180 (TRAV29/DV5, TRAJ44)
CAASTGTASKLTF

SEQ ID NO: 24360 - protein, 15 aa, Homo sapiens
  CDR3 for beta chain variable domain of TCR clone 12180 (TRBV7-3, TRBJ2-2)
CASSETGQGTGELFF

SEQ ID NO: 24361 - protein, 10 aa, Homo sapiens
  CDR3 for alpha chain variable domain of TCR clone 12181 (TRAV23/DV6, TRAJ57)
CAASSTLSQG

SEQ ID NO: 24362 - protein, 14 aa, Homo sapiens
  CDR3 for beta chain variable domain of TCR clone 12181 (TRBV25-1, TRBJ1-1)
CASTRLGGNTEAFF

SEQ ID NO: 24363 - protein, 18 aa, Homo sapiens
  CDR3 for alpha chain variable domain of TCR clone 12182 (TRAV21, TRAJ52)
CAVRPSPTGGTSYGKLTF

SEQ ID NO: 24364 - protein, 17 aa, Homo sapiens
  CDR3 for beta chain variable domain of TCR clone 12182 (TRBV13, TRBJ2-3)
CASSLSRVAGGRNTQYF

SEQ ID NO: 24365 - protein, 16 aa, Homo sapiens
  CDR3 for alpha chain variable domain of TCR clone 12183 (TRAV8-4, TRAJ7)
CVVSEGPYYGNNRLAF

SEQ ID NO: 24366 - protein, 13 aa, Homo sapiens
  CDR3 for beta chain variable domain of TCR clone 12183 (TRBV19, TRBJ2-1)
CASSMYRVNEQFF

SEQ ID NO: 24367 - protein, 16 aa, Homo sapiens
  CDR3 for alpha chain variable domain of TCR clone 12184 (TRAV19, TRAJ20)
CALSGWRVPNDYKLSF

SEQ ID NO: 24368 - protein, 14 aa, Homo sapiens
  CDR3 for beta chain variable domain of TCR clone 12184 (TRBV6-3, TRBJ1-1)
CASSYGGQHTEAFF

SEQ ID NO: 24369 - protein, 11 aa, Homo sapiens
  CDR3 for alpha chain variable domain of TCR clone 12185 (TRAV8-3, TRAJ3)
CAATLKQCFQD

SEQ ID NO: 24370 - protein, 16 aa, Homo sapiens
  CDR3 for beta chain variable domain of TCR clone 12185 (TRBV6-5, TRBJ2-3)
CASRFHRGGGSDTQYF

SEQ ID NO: 24371 - protein, 17 aa, Homo sapiens
  CDR3 for alpha chain variable domain of TCR clone 12186 (TRAV16, TRAJ58)
CITVLSNGETSGSRLTF

SEQ ID NO: 24372 - protein, 17 aa, Homo sapiens
  CDR3 for beta chain variable domain of TCR clone 12186 (TRBV18, TRBJ2-1)
CASSKGLSGGADNEQFL

SEQ ID NO: 24373 - protein, 14 aa, Homo sapiens
  CDR3 for alpha chain variable domain of TCR clone 12187 (TRAV29/DV5, TRAJ22)
CAASDSGSARQLTF

SEQ ID NO: 24374 - protein, 15 aa, Homo sapiens
  CDR3 for beta chain variable domain of TCR clone 12187 (TRBV7-9, TRBJ1-1)
CASSLLEQGGTEAFF

SEQ ID NO: 24375 - protein, 14 aa, Homo sapiens
  CDR3 for alpha chain variable domain of TCR clone 12188 (TRAV13-1, TRAJ44)
CAAKATGTASKLTF

SEQ ID NO: 24376 - protein, 13 aa, Homo sapiens
  CDR3 for beta chain variable domain of TCR clone 12188 (TRBV5-5, TRBJ1-2)
CASSFWRGEDYAF

SEQ ID NO: 24377 - protein, 13 aa, Homo sapiens
  CDR3 for alpha chain variable domain of TCR clone 12189 (TRAV36/DV7, TRAJ54)
CAVDRRGAQKLVF

SEQ ID NO: 24378 - protein, 13 aa, Homo sapiens
  CDR3 for beta chain variable domain of TCR clone 12189 (TRBV6-5, TRBJ2-3)
CASRSLVTDTQYF

SEQ ID NO: 24379 - protein, 12 aa, Homo sapiens
  CDR3 for alpha chain variable domain of TCR clone 12190 (TRAV2, TRAJ9)
CAVGAGGFKTIF

SEQ ID NO: 24380 - protein, 13 aa, Homo sapiens
  CDR3 for beta chain variable domain of TCR clone 12190 (TRBV4-1, TRBJ2-7)
CASSQGQAYEQYF

SEQ ID NO: 24381 - protein, 14 aa, Homo sapiens
  CDR3 for alpha chain variable domain of TCR clone 12191 (TRAV12-2, TRAJ17)
CAVLFKAAGNKLTF

SEQ ID NO: 24382 - protein, 17 aa, Homo sapiens
  CDR3 for beta chain variable domain of TCR clone 12191 (TRBV20-1, TRBJ2-2)
CSASGSGQGGITGELFF

SEQ ID NO: 24383 - protein, 13 aa, Homo sapiens
  CDR3 for alpha chain variable domain of TCR clone 12192 (TRAV14/DV4, TRAJ34)
CAMRDYNTDKLIF

SEQ ID NO: 24384 - protein, 13 aa, Homo sapiens
  CDR3 for beta chain variable domain of TCR clone 12192 (TRBV19, TRBJ2-2)
CASKVSAAGELFF

SEQ ID NO: 24385 - protein, 14 aa, Homo sapiens
  CDR3 for alpha chain variable domain of TCR clone 12193 (TRAV9-2, TRAJ28)
CALTLGAGSYQLTF

SEQ ID NO: 24386 - protein, 15 aa, Homo sapiens
  CDR3 for beta chain variable domain of TCR clone 12193 (TRBV7-8, TRBJ2-3)
CASRKLRDHTDTQYF

SEQ ID NO: 24387 - protein, 14 aa, Homo sapiens
  CDR3 for alpha chain variable domain of TCR clone 12194 (TRAV13-1, TRAJ35)
CAASKGGFGNVLHC

SEQ ID NO: 24388 - protein, 15 aa, Homo sapiens
  CDR3 for beta chain variable domain of TCR clone 12194 (TRBV2, TRBJ2-7)
CASTLLGSGATEQYF

SEQ ID NO: 24389 - protein, 13 aa, Homo sapiens
  CDR3 for alpha chain variable domain of TCR clone 12195 (TRAV8-3, TRAJ28)
CAVGAVGSYQLTF

SEQ ID NO: 24390 - protein, 13 aa, Homo sapiens
  CDR3 for beta chain variable domain of TCR clone 12195 (TRBV7-9, TRBJ1-2)
CASSLKQNYGYTF

SEQ ID NO: 24391 - protein, 10 aa, Homo sapiens
  CDR3 for alpha chain variable domain of TCR clone 12196 (TRAV17, TRAJ36)
CAAVAGNLFF

SEQ ID NO: 24392 - protein, 12 aa, Homo sapiens
  CDR3 for beta chain variable domain of TCR clone 12196 (TRBV11-2, TRBJ2-4)
CASSSASGSEYF

SEQ ID NO: 24393 - protein, 13 aa, Homo sapiens
  CDR3 for alpha chain variable domain of TCR clone 12197 (TRAV12-3, TRAJ7)
CAMTPYGNNRLAF

SEQ ID NO: 24394 - protein, 16 aa, Homo sapiens
  CDR3 for beta chain variable domain of TCR clone 12197 (TRBV20-1, TRBJ1-4)
CSASPYGGELNEKLFF

SEQ ID NO: 24395 - protein, 15 aa, Homo sapiens
  CDR3 for alpha chain variable domain of TCR clone 12198 (TRAV2, TRAJ9)
CAVEDRGTGGFKTIF

SEQ ID NO: 24396 - protein, 16 aa, Homo sapiens
  CDR3 for beta chain variable domain of TCR clone 12198 (TRBV24-1, TRBJ2-3)
CATSDPGTGATDTQCF

SEQ ID NO: 24397 - protein, 13 aa, Homo sapiens
  CDR3 for alpha chain variable domain of TCR clone 12199 (TRAV27, TRAJ45)
CRSSGGGADGLTF

SEQ ID NO: 24398 - protein, 17 aa, Homo sapiens
  CDR3 for beta chain variable domain of TCR clone 12199 (TRBV11-2, TRBJ2-1)
CASSLYPPGVECNEQFF

SEQ ID NO: 24399 - protein, 13 aa, Homo sapiens
  CDR3 for alpha chain variable domain of TCR clone 12200 (TRAV13-1, TRAJ5)
CAASDTGRRAPTF

SEQ ID NO: 24400 - protein, 12 aa, Homo sapiens
  CDR3 for beta chain variable domain of TCR clone 12200 (TRBV28, TRBJ2-3)
CASSLYRDTQYF

SEQ ID NO: 24401 - protein, 10 aa, Homo sapiens
  CDR3 for alpha chain variable domain of TCR clone 12201 (TRAV30, TRAJ24)
CAQRLWMLTA

SEQ ID NO: 24402 - protein, 14 aa, Homo sapiens
  CDR3 for beta chain variable domain of TCR clone 12201 (TRBV12-5, TRBJ2-5)
CASGSRTHQETQYF

SEQ ID NO: 24403 - protein, 13 aa, Homo sapiens
  CDR3 for alpha chain variable domain of TCR clone 12202 (TRAV8-4, TRAJ49)
CAVSAPTGNQFYF

SEQ ID NO: 24404 - protein, 15 aa, Homo sapiens
  CDR3 for beta chain variable domain of TCR clone 12202 (TRBV7-2, TRBJ1-1)
CASSLDGTGETEAFF

SEQ ID NO: 24405 - protein, 14 aa, Homo sapiens
  CDR3 for alpha chain variable domain of TCR clone 12203 (TRAV8-3, TRAJ39)
CAVGANNAGNMLTF

SEQ ID NO: 24406 - protein, 15 aa, Homo sapiens
  CDR3 for beta chain variable domain of TCR clone 12203 (TRBV9, TRBJ2-1)
CASSLAGSSYNEQFF

SEQ ID NO: 24407 - protein, 11 aa, Homo sapiens
  CDR3 for alpha chain variable domain of TCR clone 12204 (TRAV1-1, TRAJ23)
CAVRQGGKRIF

SEQ ID NO: 24408 - protein, 20 aa, Homo sapiens
  CDR3 for beta chain variable domain of TCR clone 12204 (TRBV7-8, TRBJ2-2)
CASSHLFPGPTIHITGELFF

SEQ ID NO: 24409 - protein, 15 aa, Homo sapiens
  CDR3 for alpha chain variable domain of TCR clone 12205 (TRAV8-3, TRAJ20)
CAVEAKGSNDYKLSF

SEQ ID NO: 24410 - protein, 15 aa, Homo sapiens
  CDR3 for beta chain variable domain of TCR clone 12205 (TRBV11-3, TRBJ2-1)
CASSLAGQTYNEQFF

SEQ ID NO: 24411 - protein, 14 aa, Homo sapiens
  CDR3 for alpha chain variable domain of TCR clone 12206 (TRAV12-2, TRAJ13)
CAVKKTGGYQKVTF

SEQ ID NO: 24412 - protein, 14 aa, Homo sapiens
  CDR3 for beta chain variable domain of TCR clone 12206 (TRBV11-2, TRBJ1-2)
CASSLYRGNYGYTF

SEQ ID NO: 24413 - protein, 11 aa, Homo sapiens
  CDR3 for alpha chain variable domain of TCR clone 12207 (TRAV1-2, TRAJ20)
CAVSNDYKLSF

SEQ ID NO: 24414 - protein, 17 aa, Homo sapiens
  CDR3 for beta chain variable domain of TCR clone 12207 (TRBV13, TRBJ2-3)
CASSLSRVAGGRNTQYF

SEQ ID NO: 24415 - protein, 14 aa, Homo sapiens
  CDR3 for alpha chain variable domain of TCR clone 12208 (TRAV23/DV6, TRAJ37)
CAASTSSNTGKLIF

SEQ ID NO: 24416 - protein, 17 aa, Homo sapiens
  CDR3 for beta chain variable domain of TCR clone 12208 (TRBV13, TRBJ2-3)
CASSLSRVAGGRNTQYF

SEQ ID NO: 24417 - protein, 13 aa, Homo sapiens
  CDR3 for alpha chain variable domain of TCR clone 12209 (TRAV8-3, TRAJ28)
CAVGAVGSYHLTF

SEQ ID NO: 24418 - protein, 15 aa, Homo sapiens
  CDR3 for beta chain variable domain of TCR clone 12209 (TRBV7-9, TRBJ1-5)
CASSQGHQPNQPQHF

SEQ ID NO: 24419 - protein, 14 aa, Homo sapiens
  CDR3 for alpha chain variable domain of TCR clone 12210 (TRAV12-1, TRAJ17)
CVANYKAAGNKLTF

SEQ ID NO: 24420 - protein, 17 aa, Homo sapiens
  CDR3 for beta chain variable domain of TCR clone 12210 (TRBV20-1, TRBJ2-1)
CSASSSGLAGSYNEQFF

SEQ ID NO: 24421 - protein, 15 aa, Homo sapiens
  CDR3 for alpha chain variable domain of TCR clone 12211 (TRAV8-3, TRAJ45)
CASSYSGGGADGLTF

SEQ ID NO: 24422 - protein, 13 aa, Homo sapiens
  CDR3 for beta chain variable domain of TCR clone 12211 (TRBV10-3, TRBJ2-7)
CATKLAVNYEQYF

SEQ ID NO: 24423 - protein, 14 aa, Homo sapiens
  CDR3 for alpha chain variable domain of TCR clone 12212 (TRAV1-2, TRAJ16)
CAVNRFSDGQKLLF

SEQ ID NO: 24424 - protein, 13 aa, Homo sapiens
  CDR3 for beta chain variable domain of TCR clone 12212 (TRBV20-1, TRBJ1-1)
CSAPLGGGTEAFF

SEQ ID NO: 24425 - protein, 15 aa, Homo sapiens
  CDR3 for alpha chain variable domain of TCR clone 12213 (TRAV26-1, TRAJ29)
CIARVEGSGNTPLVF

SEQ ID NO: 24426 - protein, 14 aa, Homo sapiens
  CDR3 for beta chain variable domain of TCR clone 12213 (TRBV18, TRBJ2-5)
CASSPGVSQETQYF

SEQ ID NO: 24427 - protein, 15 aa, Homo sapiens
  CDR3 for alpha chain variable domain of TCR clone 12214 (TRAV2, TRAJ37)
CAVEDGSSNTGKLIF

SEQ ID NO: 24428 - protein, 18 aa, Homo sapiens
  CDR3 for beta chain variable domain of TCR clone 12214 (TRBV4-1, TRBJ1-5)
CASSQDPRGQGLNQPQHF

SEQ ID NO: 24429 - protein, 13 aa, Homo sapiens
  CDR3 for alpha chain variable domain of TCR clone 12215 (TRAV3, TRAJ21)
CAVREPDFNKFYF

SEQ ID NO: 24430 - protein, 15 aa, Homo sapiens
  CDR3 for beta chain variable domain of TCR clone 12215 (TRBV20-1, TRBJ1-1)
CSAIRGVTGNTEAFF

SEQ ID NO: 24431 - protein, 14 aa, Homo sapiens
  CDR3 for alpha chain variable domain of TCR clone 12216 (TRAV23/DV6, TRAJ27)
CAASRDTSAGKSTF

SEQ ID NO: 24432 - protein, 13 aa, Homo sapiens
  CDR3 for beta chain variable domain of TCR clone 12216 (TRBV20-1, TRBJ1-5)
CSASGRGNQPQHF

SEQ ID NO: 24433 - protein, 18 aa, Homo sapiens
  CDR3 for alpha chain variable domain of TCR clone 12217 (TRAV12-3, TRAJ52)
CAMSVGGAGGTSYGKLTF

SEQ ID NO: 24434 - protein, 15 aa, Homo sapiens
  CDR3 for beta chain variable domain of TCR clone 12217 (TRBV27, TRBJ1-6)
CACSFDRGLGSPLHF

SEQ ID NO: 24435 - protein, 15 aa, Homo sapiens
  CDR3 for alpha chain variable domain of TCR clone 12218 (TRAV3, TRAJ20)
CAVRDIKFSDYKLSF

SEQ ID NO: 24436 - protein, 15 aa, Homo sapiens
  CDR3 for beta chain variable domain of TCR clone 12218 (TRBV7-9, TRBJ1-6)
CASSSPGRGNSPLHF

SEQ ID NO: 24437 - protein, 20 aa, Homo sapiens
  CDR3 for alpha chain variable domain of TCR clone 12219 (TRAV12-1, TRAJ42)
SSVIQPPTSVKGGSQGNPIF

SEQ ID NO: 24438 - protein, 18 aa, Homo sapiens
  CDR3 for beta chain variable domain of TCR clone 12219 (TRBV11-2, TRBJ2-3)
CASSLGGASRGAPNTQYF

SEQ ID NO: 24439 - protein, 14 aa, Homo sapiens
  CDR3 for alpha chain variable domain of TCR clone 12220 (TRAV12-2, TRAJ13)
CAVKKTGGYQKVTF

SEQ ID NO: 24440 - protein, 15 aa, Homo sapiens
  CDR3 for beta chain variable domain of TCR clone 12220 (TRBV27, TRBJ2-1)
YASSNGGGSSNEQFF

SEQ ID NO: 24441 - protein, 12 aa, Homo sapiens
  CDR3 for alpha chain variable domain of TCR clone 12221 (TRAV25, TRAJ35)
CAGIGFGNVLHC

SEQ ID NO: 24442 - protein, 13 aa, Homo sapiens
  CDR3 for beta chain variable domain of TCR clone 12221 (TRBV25-1, TRBJ2-2)
CASRKANTGELFF

SEQ ID NO: 24443 - protein, 15 aa, Homo sapiens
  CDR3 for alpha chain variable domain of TCR clone 12222 (TRAV26-1, TRAJ22)
CVVRVSFWFCKATDL

SEQ ID NO: 24444 - protein, 13 aa, Homo sapiens
  CDR3 for beta chain variable domain of TCR clone 12222 (TRBV7-9, TRBJ1-2)
CASSLKQNYGYTF

SEQ ID NO: 24445 - protein, 12 aa, Homo sapiens
  CDR3 for alpha chain variable domain of TCR clone 12223 (TRAV12-3, TRAJ17)
CAMTLTGNKLTF

SEQ ID NO: 24446 - protein, 16 aa, Homo sapiens
  CDR3 for beta chain variable domain of TCR clone 12223 (TRBV19, TRBJ2-2)
CASRSPGTGATGELFF

SEQ ID NO: 24447 - protein, 14 aa, Homo sapiens
  CDR3 for alpha chain variable domain of TCR clone 12224 (TRAV35, TRAJ22)
CAGLRPGPARQLTF

SEQ ID NO: 24448 - protein, 15 aa, Homo sapiens
  CDR3 for beta chain variable domain of TCR clone 12224 (TRBV12-4, TRBJ2-5)
CASSPPTGLQETQYF

SEQ ID NO: 24449 - protein, 11 aa, Homo sapiens
  CDR3 for alpha chain variable domain of TCR clone 12225 (TRAV12-3, TRAJ27)
CAMANAGKSTF

SEQ ID NO: 24450 - protein, 13 aa, Homo sapiens
  CDR3 for beta chain variable domain of TCR clone 12225 (TRBV20-1, TRBJ1-1)
CSAPLGGGTEAFF

SEQ ID NO: 24451 - protein, 14 aa, Homo sapiens
  CDR3 for alpha chain variable domain of TCR clone 12226 (TRAV12-2, TRAJ17)
CAVLFKAAGNKLTF

SEQ ID NO: 24452 - protein, 13 aa, Homo sapiens
  CDR3 for beta chain variable domain of TCR clone 12226 (TRBV7-9, TRBJ1-2)
CASSLKQNYGYTF

SEQ ID NO: 24453 - protein, 14 aa, Homo sapiens
  CDR3 for alpha chain variable domain of TCR clone 12227 (TRAV8-3, TRAJ4)
CAVGAAGGYNKLIF

SEQ ID NO: 24454 - protein, 15 aa, Homo sapiens
  CDR3 for beta chain variable domain of TCR clone 12227 (TRBV6-5, TRBJ2-1)
CASSYDAGAGDEQFF

SEQ ID NO: 24455 - protein, 17 aa, Homo sapiens
  CDR3 for alpha chain variable domain of TCR clone 12228 (TRAV12-2, TRAJ52)
CAVNPYAGGTSYGKLTF

SEQ ID NO: 24456 - protein, 12 aa, Homo sapiens
  CDR3 for beta chain variable domain of TCR clone 12228 (TRBV7-2, TRBJ2-5)
CASSLYGETQYF

SEQ ID NO: 24457 - protein, 14 aa, Homo sapiens
  CDR3 for alpha chain variable domain of TCR clone 12229 (TRAV1-2, TRAJ8)
CAVREDTGFQKLVF

SEQ ID NO: 24458 - protein, 15 aa, Homo sapiens
  CDR3 for beta chain variable domain of TCR clone 12229 (TRBV6-3, TRBJ2-7)
CASSSPGTVFYERYF

SEQ ID NO: 24459 - protein, 14 aa, Homo sapiens
  CDR3 for alpha chain variable domain of TCR clone 12230 (TRAV12-1, TRAJ17)
CVVNYKAAGNKLTF

SEQ ID NO: 24460 - protein, 17 aa, Homo sapiens
  CDR3 for beta chain variable domain of TCR clone 12230 (TRBV20-1, TRBJ2-1)
CSASSSGLAGSYDEQFF

SEQ ID NO: 24461 - protein, 15 aa, Homo sapiens
  CDR3 for alpha chain variable domain of TCR clone 12231 (TRAV2, TRAJ9)
CAVEDRGTGGFKTTF

SEQ ID NO: 24462 - protein, 16 aa, Homo sapiens
  CDR3 for beta chain variable domain of TCR clone 12231 (TRBV24-1, TRBJ2-3)
CATSDPGTGATDTQYF

SEQ ID NO: 24463 - protein, 14 aa, Homo sapiens
  CDR3 for alpha chain variable domain of TCR clone 12232 (TRAV13-1, TRAJ44)
CAAKATGTASNLTF

SEQ ID NO: 24464 - protein, 16 aa, Homo sapiens
  CDR3 for beta chain variable domain of TCR clone 12232 (TRBV7-9, TRBJ2-6)
CASSLKGPLRANVLTF

SEQ ID NO: 24465 - protein, 15 aa, Homo sapiens
  CDR3 for alpha chain variable domain of TCR clone 12233 (TRAV12-1, TRAJ45)
CVVLSGRGGADGLTF

SEQ ID NO: 24466 - protein, 13 aa, Homo sapiens
  CDR3 for beta chain variable domain of TCR clone 12233 (TRBV7-3, TRBJ1-1)
CASSQDWGAEAFF

SEQ ID NO: 24467 - protein, 13 aa, Homo sapiens
  CDR3 for alpha chain variable domain of TCR clone 12234 (TRAV3, TRAJ15)
CAVGDQAGTALIF

SEQ ID NO: 24468 - protein, 15 aa, Homo sapiens
  CDR3 for beta chain variable domain of TCR clone 12234 (TRBV11-1, TRBJ2-7)
CASSLNYGASYEQYF

SEQ ID NO: 24469 - protein, 12 aa, Homo sapiens
  CDR3 for alpha chain variable domain of TCR clone 12235 (TRAV13-1, TRAJ21)
CAAKEGFNKFYF

SEQ ID NO: 24470 - protein, 13 aa, Homo sapiens
  CDR3 for beta chain variable domain of TCR clone 12235 (TRBV19, TRBJ2-7)
CASSLRQSYEQYF

SEQ ID NO: 24471 - protein, 14 aa, Homo sapiens
  CDR3 for alpha chain variable domain of TCR clone 12236 (TRAV13-1, TRAJ44)
CAAKATGTASKLTF

SEQ ID NO: 24472 - protein, 12 aa, Homo sapiens
  CDR3 for beta chain variable domain of TCR clone 12236 (TRBV11-2, TRBJ2-2)
CASSLGGGELFF

SEQ ID NO: 24473 - protein, 13 aa, Homo sapiens
  CDR3 for alpha chain variable domain of TCR clone 12237 (TRAV13-1, TRAJ10)
CAALEGGGNKLTF

SEQ ID NO: 24474 - protein, 15 aa, Homo sapiens
  CDR3 for beta chain variable domain of TCR clone 12237 (TRBV20-1, TRBJ2-7)
CSARDRVSGMDEQYF

SEQ ID NO: 24475 - protein, 17 aa, Homo sapiens
  CDR3 for alpha chain variable domain of TCR clone 12238 (TRAV3, TRAJ6)
CAVRDGPRAGGRYIPTF

SEQ ID NO: 24476 - protein, 20 aa, Homo sapiens
  CDR3 for beta chain variable domain of TCR clone 12238 (TRBV28, TRBJ2-1)
CASTPIGRSPGLAGGNEQFF

SEQ ID NO: 24477 - protein, 18 aa, Homo sapiens
  CDR3 for alpha chain variable domain of TCR clone 12239 (TRAV21, TRAJ52)
CAVRPSPAGGTSYGKLTF

SEQ ID NO: 24478 - protein, 15 aa, Homo sapiens
  CDR3 for beta chain variable domain of TCR clone 12239 (TRBV11-3, TRBJ2-3)
CASLKDGREGDTQYF

SEQ ID NO: 24479 - protein, 12 aa, Homo sapiens
  CDR3 for alpha chain variable domain of TCR clone 12240 (TRAV12-3, TRAJ17)
CAMTLTGNKLTF

SEQ ID NO: 24480 - protein, 17 aa, Homo sapiens
  CDR3 for beta chain variable domain of TCR clone 12240 (TRBV20-1, TRBJ2-1)
CSASSSGLAGSYNEQFF

SEQ ID NO: 24481 - protein, 13 aa, Homo sapiens
  CDR3 for alpha chain variable domain of TCR clone 12241 (TRAV13-1, TRAJ39)
CAASIWAGNMLTF

SEQ ID NO: 24482 - protein, 15 aa, Homo sapiens
  CDR3 for beta chain variable domain of TCR clone 12241 (TRBV20-1, TRBJ1-1)
CSASRGVTGNTEAFF

SEQ ID NO: 24483 - protein, 14 aa, Homo sapiens
  CDR3 for alpha chain variable domain of TCR clone 12242 (TRAV13-1, TRAJ40)
CAASMTSGTYKYIF

SEQ ID NO: 24484 - protein, 15 aa, Homo sapiens
  CDR3 for beta chain variable domain of TCR clone 12242 (TRBV7-3, TRBJ2-1)
CASSPTGGGEGEQFF

SEQ ID NO: 24485 - protein, 14 aa, Homo sapiens
  CDR3 for alpha chain variable domain of TCR clone 12243 (TRAV12-2, TRAJ40)
CAVKIPSGTYKYIF

SEQ ID NO: 24486 - protein, 14 aa, Homo sapiens
  CDR3 for beta chain variable domain of TCR clone 12243 (TRBV20-1, TRBJ1-1)
CSAQTRIGGTEDFF

SEQ ID NO: 24487 - protein, 14 aa, Homo sapiens
  CDR3 for alpha chain variable domain of TCR clone 12244 (TRAV20, TRAJ42)
CAVQAGGSQGNLIF

SEQ ID NO: 24488 - protein, 14 aa, Homo sapiens
  CDR3 for beta chain variable domain of TCR clone 12244 (TRBV28, TRBJ1-2)
CAGRIQGANYGYTF

SEQ ID NO: 24489 - protein, 14 aa, Homo sapiens
  CDR3 for alpha chain variable domain of TCR clone 12245 (TRAV13-1, TRAJ35)
CAASKGGFGNVLHC

SEQ ID NO: 24490 - protein, 13 aa, Homo sapiens
  CDR3 for beta chain variable domain of TCR clone 12245 (TRBV7-3, TRBJ1-1)
CASSQDWGADAFF

SEQ ID NO: 24491 - protein, 13 aa, Homo sapiens
  CDR3 for alpha chain variable domain of TCR clone 12246 (TRAV2, TRAJ40)
CAVVTSGTYKYIF

SEQ ID NO: 24492 - protein, 15 aa, Homo sapiens
  CDR3 for beta chain variable domain of TCR clone 12246 (TRBV11-3, TRBJ2-3)
CASPKDGREGDTQYF

SEQ ID NO: 24493 - protein, 14 aa, Homo sapiens
  CDR3 for alpha chain variable domain of TCR clone 12247 (TRAV35, TRAJ22)
CAGLRPGSARQLTF

SEQ ID NO: 24494 - protein, 15 aa, Homo sapiens
  CDR3 for beta chain variable domain of TCR clone 12247 (TRBV12-4, TRBJ2-5)
CASSPPTGLQGTQYF

SEQ ID NO: 24495 - protein, 14 aa, Homo sapiens
  CDR3 for alpha chain variable domain of TCR clone 12248 (TRAV1-2, TRAJ8)
CAVREDTGFQKLVF

SEQ ID NO: 24496 - protein, 15 aa, Homo sapiens
  CDR3 for beta chain variable domain of TCR clone 12248 (TRBV6-3, TRBJ2-7)
CASGSPGTVFYEQYF

SEQ ID NO: 24497 - protein, 12 aa, Homo sapiens
  CDR3 for alpha chain variable domain of TCR clone 12249 (TRAV12-1, TRAJ40)
CVVYSGTYKYIF

SEQ ID NO: 24498 - protein, 18 aa, Homo sapiens
  CDR3 for beta chain variable domain of TCR clone 12249 (TRBV11-2, TRBJ2-3)
CASSLGGASRGATNTQYF

SEQ ID NO: 24499 - protein, 14 aa, Homo sapiens
  CDR3 for alpha chain variable domain of TCR clone 12250 (TRAV12-3, TRAJ10)
SHLPLTGGGNKLTF

SEQ ID NO: 24500 - protein, 13 aa, Homo sapiens
  CDR3 for beta chain variable domain of TCR clone 12250 (TRBV9, TRBJ2-1)
CASSVGQGGEQFF

SEQ ID NO: 24501 - protein, 11 aa, Homo sapiens
  CDR3 for alpha chain variable domain of TCR clone 12251 (TRAV2, TRAJ13)
CAPGGYQKVTF

SEQ ID NO: 24502 - protein, 15 aa, Homo sapiens
  CDR3 for beta chain variable domain of TCR clone 12251 (TRBV6-1, TRBJ2-2)
CASSRLRGDTGELFF

SEQ ID NO: 24503 - protein, 17 aa, Homo sapiens
  CDR3 for alpha chain variable domain of TCR clone 12252 (TRAV3, TRAJ6)
CAVRDGPRAGGSYIPTF

SEQ ID NO: 24504 - protein, 16 aa, Homo sapiens
  CDR3 for beta chain variable domain of TCR clone 12252 (TRBV19, TRBJ2-1)
CASSKAGPSSYNEQFF

SEQ ID NO: 24505 - protein, 10 aa, Homo sapiens
  CDR3 for alpha chain variable domain of TCR clone 12253 (TRAV12-2, TRAJ20)
CAVYLYKLSF

SEQ ID NO: 24506 - protein, 14 aa, Homo sapiens
  CDR3 for beta chain variable domain of TCR clone 12253 (TRBV5-1, TRBJ2-2)
CASSLIEGAGELFF

SEQ ID NO: 24507 - protein, 14 aa, Homo sapiens
  CDR3 for alpha chain variable domain of TCR clone 12254 (TRAV26-1, TRAJ48)
CIVKSNFGNEKLTF

SEQ ID NO: 24508 - protein, 13 aa, Homo sapiens
  CDR3 for beta chain variable domain of TCR clone 12254 (TRBV5-1, TRBJ2-5)
CASSVPPAETQYF

SEQ ID NO: 24509 - protein, 10 aa, Homo sapiens
  CDR3 for alpha chain variable domain of TCR clone 12255 (TRAV1-2, TRAJ18)
CAVRGEAQPW

SEQ ID NO: 24510 - protein, 16 aa, Homo sapiens
  CDR3 for beta chain variable domain of TCR clone 12255 (TRBV12-4, TRBJ1-5)
CASSRPVGGSNQPQHF

SEQ ID NO: 24511 - protein, 14 aa, Homo sapiens
  CDR3 for alpha chain variable domain of TCR clone 12256 (TRAV9-2, TRAJ39)
CALYIYNAGNMLTF

SEQ ID NO: 24512 - protein, 13 aa, Homo sapiens
  CDR3 for beta chain variable domain of TCR clone 12256 (TRBV20-1, TRBJ2-7)
CSATHTSGYEQYF

SEQ ID NO: 24513 - protein, 12 aa, Homo sapiens
  CDR3 for alpha chain variable domain of TCR clone 12257 (TRAV16, TRAJ10)
RSRTGGGNKLTF

SEQ ID NO: 24514 - protein, 15 aa, Homo sapiens
  CDR3 for beta chain variable domain of TCR clone 12257 (TRBV6-3, TRBJ2-7)
CASSSPGTVFYEQYF

SEQ ID NO: 24515 - protein, 14 aa, Homo sapiens
  CDR3 for alpha chain variable domain of TCR clone 12258 (TRAV12-2, TRAJ13)
CAVKKTGGYQKVTF

SEQ ID NO: 24516 - protein, 15 aa, Homo sapiens
  CDR3 for beta chain variable domain of TCR clone 12258 (TRBV27, TRBJ2-1)
CASSNVGGSSNEQFF

SEQ ID NO: 24517 - protein, 13 aa, Homo sapiens
  CDR3 for alpha chain variable domain of TCR clone 12259 (TRAV21, TRAJ44)
CAAHTGTASKLTF

SEQ ID NO: 24518 - protein, 18 aa, Homo sapiens
  CDR3 for beta chain variable domain of TCR clone 12259 (TRBV25-1, TRBJ1-2)
CASSGLQNGQGLIFGYTF

SEQ ID NO: 24519 - protein, 18 aa, Homo sapiens
  CDR3 for alpha chain variable domain of TCR clone 12260 (TRAV13-1, TRAJ52)
CAASKRSAGGASYGKLTF

SEQ ID NO: 24520 - protein, 13 aa, Homo sapiens
  CDR3 for beta chain variable domain of TCR clone 12260 (TRBV12-4, TRBJ1-2)
CASSLRQGKGYTF

SEQ ID NO: 24521 - protein, 10 aa, Homo sapiens
  CDR3 for alpha chain variable domain of TCR clone 12261 (TRAV21, TRAJ31)
CAADNARLMF

SEQ ID NO: 24522 - protein, 13 aa, Homo sapiens
  CDR3 for beta chain variable domain of TCR clone 12261 (TRBV4-1, TRBJ1-1)
CASSRKMNTEAFF

SEQ ID NO: 24523 - protein, 15 aa, Homo sapiens
  CDR3 for alpha chain variable domain of TCR clone 12262 (TRAV12-3, TRAJ42)
CAMITSVGSQGNLIF

SEQ ID NO: 24524 - protein, 12 aa, Homo sapiens
  CDR3 for beta chain variable domain of TCR clone 12262 (TRBV29-1, TRBJ2-7)
CSARDRPYEQYF

SEQ ID NO: 24525 - protein, 13 aa, Homo sapiens
  CDR3 for alpha chain variable domain of TCR clone 12263 (TRAV21, TRAJ57)
CAVTQGGSEKLVF

SEQ ID NO: 24526 - protein, 16 aa, Homo sapiens
  CDR3 for beta chain variable domain of TCR clone 12263 (TRBV29-1, TRBJ2-7)
CSVEDAEDGTAYEQYL

SEQ ID NO: 24527 - protein, 11 aa, Homo sapiens
  CDR3 for alpha chain variable domain of TCR clone 12264 (TRAV1-1, TRAJ5)
CAVRVRRALTF

SEQ ID NO: 24528 - protein, 14 aa, Homo sapiens
  CDR3 for beta chain variable domain of TCR clone 12264 (TRBV7-3, TRBJ1-1)
CASSLKGGNTEAFF

SEQ ID NO: 24529 - protein, 15 aa, Homo sapiens
  CDR3 for alpha chain variable domain of TCR clone 12265 (TRAV8-2, TRAJ15)
CVVTMGNQAGTALIF

SEQ ID NO: 24530 - protein, 12 aa, Homo sapiens
  CDR3 for beta chain variable domain of TCR clone 12265 (TRBV6-1, TRBJ2-7)
CAGSDYSYEQYF

SEQ ID NO: 24531 - protein, 12 aa, Homo sapiens
  CDR3 for alpha chain variable domain of TCR clone 12266 (TRAV2, TRAJ31)
CAVEDNNARLMF

SEQ ID NO: 24532 - protein, 15 aa, Homo sapiens
  CDR3 for beta chain variable domain of TCR clone 12266 (TRBV11-2, TRBJ2-1)
CASSLGPDSYNEQFF

SEQ ID NO: 24533 - protein, 14 aa, Homo sapiens
  CDR3 for alpha chain variable domain of TCR clone 12267 (TRAV12-2, TRAJ13)
CAVKKTGGYQKVTF

SEQ ID NO: 24534 - protein, 12 aa, Homo sapiens
  CDR3 for beta chain variable domain of TCR clone 12267 (TRBV14, TRBJ2-5)
CASSQLKETQYF

SEQ ID NO: 24535 - protein, 15 aa, Homo sapiens
  CDR3 for alpha chain variable domain of TCR clone 12268 (TRAV21, TRAJ40)
CAVRPQTSGTYKYVF

SEQ ID NO: 24536 - protein, 13 aa, Homo sapiens
  CDR3 for beta chain variable domain of TCR clone 12268 (TRBV7-2, TRBJ2-2)
CASSSVRAGELFF

SEQ ID NO: 24537 - protein, 12 aa, Homo sapiens
  CDR3 for alpha chain variable domain of TCR clone 12269 (TRAV2, TRAJ10)
CASTGGGNKLTF

SEQ ID NO: 24538 - protein, 14 aa, Homo sapiens
  CDR3 for beta chain variable domain of TCR clone 12269 (TRBV7-2, TRBJ2-5)
CASSLSGGGETQYF

SEQ ID NO: 24539 - protein, 14 aa, Homo sapiens
  CDR3 for alpha chain variable domain of TCR clone 12270 (TRAV1-2, TRAJ16)
CAVNRFSDGQKLLF

SEQ ID NO: 24540 - protein, 15 aa, Homo sapiens
  CDR3 for beta chain variable domain of TCR clone 12270 (TRBV9, TRBJ1-6)
CASRVAGTGDSPLHF

SEQ ID NO: 24541 - protein, 13 aa, Homo sapiens
  CDR3 for alpha chain variable domain of TCR clone 12271 (TRAV17, TRAJ9)
CATDYTGGFKTIF

SEQ ID NO: 24542 - protein, 14 aa, Homo sapiens
  CDR3 for beta chain variable domain of TCR clone 12271 (TRBV19, TRBJ2-5)
CASNMTGQQETQYF

SEQ ID NO: 24543 - protein, 17 aa, Homo sapiens
  CDR3 for alpha chain variable domain of TCR clone 12272 (TRAV3, TRAJ42)
CAVGDRDYGGSQGNLIF

SEQ ID NO: 24544 - protein, 15 aa, Homo sapiens
  CDR3 for beta chain variable domain of TCR clone 12272 (TRBV6-6, TRBJ2-7)
CASSYSYGGSYEQYF

SEQ ID NO: 24545 - protein, 13 aa, Homo sapiens
  CDR3 for alpha chain variable domain of TCR clone 12273 (TRAV4, TRAJ20)
CLVGSSNDYKLSF

SEQ ID NO: 24546 - protein, 15 aa, Homo sapiens
  CDR3 for beta chain variable domain of TCR clone 12273 (TRBV6-5, TRBJ2-3)
CASSYSGSSTDTQYF

SEQ ID NO: 24547 - protein, 14 aa, Homo sapiens
  CDR3 for alpha chain variable domain of TCR clone 12274 (TRAV8-4, TRAJ9)
CAGRINTGGFKTIF

SEQ ID NO: 24548 - protein, 15 aa, Homo sapiens
  CDR3 for beta chain variable domain of TCR clone 12274 (TRBV10-2, TRBJ2-6)
CASSEQGTGANVLTF

SEQ ID NO: 24549 - protein, 17 aa, Homo sapiens
  CDR3 for alpha chain variable domain of TCR clone 12275 (TRAV3, TRAJ6)
CAVRDGPRPGGSYIPTF

SEQ ID NO: 24550 - protein, 14 aa, Homo sapiens
  CDR3 for beta chain variable domain of TCR clone 12275 (TRBV7-2, TRBJ2-7)
CASSPKTSFYEQYF

SEQ ID NO: 24551 - protein, 13 aa, Homo sapiens
  CDR3 for alpha chain variable domain of TCR clone 12276 (TRAV12-2, TRAJ37)
CAGGSGNTGKLIF

SEQ ID NO: 24552 - protein, 17 aa, Homo sapiens
  CDR3 for beta chain variable domain of TCR clone 12276 (TRBV11-2, TRBJ2-1)
CASSLYPPGVEYNGQFF

SEQ ID NO: 24553 - protein, 14 aa, Homo sapiens
  CDR3 for alpha chain variable domain of TCR clone 12277 (TRAV16, TRAJ17)
RALSGRAAGNKLTF

SEQ ID NO: 24554 - protein, 15 aa, Homo sapiens
  CDR3 for beta chain variable domain of TCR clone 12277 (TRBV3-1, TRBJ1-2)
CASSPTRLPEGGYTF

SEQ ID NO: 24555 - protein, 15 aa, Homo sapiens
  CDR3 for alpha chain variable domain of TCR clone 12278 (TRAV17, TRAJ57)
CATGPSQGGSEKLVF

SEQ ID NO: 24556 - protein, 17 aa, Homo sapiens
  CDR3 for beta chain variable domain of TCR clone 12278 (TRBV13, TRBJ2-3)
CASSLSRVAGGRNTQYF

SEQ ID NO: 24557 - protein, 11 aa, Homo sapiens
  CDR3 for alpha chain variable domain of TCR clone 12279 (TRAV3, TRAJ21)
CAVGKFNKFYF

SEQ ID NO: 24558 - protein, 16 aa, Homo sapiens
  CDR3 for beta chain variable domain of TCR clone 12279 (TRBV19, TRBJ2-1)
CASSKAGPSSYNEQFF

SEQ ID NO: 24559 - protein, 19 aa, Homo sapiens
  CDR3 for alpha chain variable domain of TCR clone 12280 (TRAV2, TRAJ20)
ILQVREADAAVYRDCKLSF

SEQ ID NO: 24560 - protein, 12 aa, Homo sapiens
  CDR3 for beta chain variable domain of TCR clone 12280 (TRBV5-1, TRBJ1-2)
CASSQDTYGYTF

SEQ ID NO: 24561 - protein, 16 aa, Homo sapiens
  CDR3 for alpha chain variable domain of TCR clone 12281 (TRAV26-1, TRAJ45)
CIVEKYSGGGADGLTF

SEQ ID NO: 24562 - protein, 16 aa, Homo sapiens
  CDR3 for beta chain variable domain of TCR clone 12281 (TRBV28, TRBJ1-4)
CASSPPYRGRSEKLFF

SEQ ID NO: 24563 - protein, 18 aa, Homo sapiens
  CDR3 for alpha chain variable domain of TCR clone 12282 (TRAV21, TRAJ52)
CAVRPSPAGGTSYGKLTF

SEQ ID NO: 24564 - protein, 17 aa, Homo sapiens
  CDR3 for beta chain variable domain of TCR clone 12282 (TRBV13, TRBJ2-3)
CASSLSRVARGRNTQYF

SEQ ID NO: 24565 - protein, 15 aa, Homo sapiens
  CDR3 for alpha chain variable domain of TCR clone 12283 (TRAV27, TRAJ38)
CAARRNAGNNRRLIW

SEQ ID NO: 24566 - protein, 13 aa, Homo sapiens
  CDR3 for beta chain variable domain of TCR clone 12283 (TRBV12-5, TRBJ2-3)
CASGDRQSDTQYF

SEQ ID NO: 24567 - protein, 16 aa, Homo sapiens
  CDR3 for alpha chain variable domain of TCR clone 12284 (TRAV12-3, TRAJ53)
CAMSPGSGGSNYKLTF

SEQ ID NO: 24568 - protein, 16 aa, Homo sapiens
  CDR3 for beta chain variable domain of TCR clone 12284 (TRBV20-1, TRBJ1-4)
CSAPGQGLLTNEKLFF

SEQ ID NO: 24569 - protein, 14 aa, Homo sapiens
  CDR3 for alpha chain variable domain of TCR clone 12285 (TRAV12-2, TRAJ13)
CAVKKTGGYQKVTF

SEQ ID NO: 24570 - protein, 15 aa, Homo sapiens
  CDR3 for beta chain variable domain of TCR clone 12285 (TRBV27, TRBJ2-1)
CASSKGGGSSNEQFF

SEQ ID NO: 24571 - protein, 12 aa, Homo sapiens
  CDR3 for alpha chain variable domain of TCR clone 12286 (TRAV2, TRAJ31)
CAVEDNNARLMF

SEQ ID NO: 24572 - protein, 16 aa, Homo sapiens
  CDR3 for beta chain variable domain of TCR clone 12286 (TRBV10-3, TRBJ2-1)
CAISGVGDGGGGEQSF

SEQ ID NO: 24573 - protein, 14 aa, Homo sapiens
  CDR3 for alpha chain variable domain of TCR clone 12287 (TRAV26-1, TRAJ38)
CIADNAGNNRKLIW

SEQ ID NO: 24574 - protein, 17 aa, Homo sapiens
  CDR3 for beta chain variable domain of TCR clone 12287 (TRBV7-9, TRBJ2-3)
CASSPTVAGGPHRYAVF

SEQ ID NO: 24575 - protein, 11 aa, Homo sapiens
  CDR3 for alpha chain variable domain of TCR clone 12288 (TRAV1-1, TRAJ23)
CAVRQGGKLIF

SEQ ID NO: 24576 - protein, 20 aa, Homo sapiens
  CDR3 for beta chain variable domain of TCR clone 12288 (TRBV7-8, TRBJ2-2)
CASSHLFPGPTIHVTGELFF

SEQ ID NO: 24577 - protein, 17 aa, Homo sapiens
  CDR3 for alpha chain variable domain of TCR clone 12289 (TRAV3, TRAJ6)
CAVRDGPRAGGSYIPTF

SEQ ID NO: 24578 - protein, 16 aa, Homo sapiens
  CDR3 for beta chain variable domain of TCR clone 12289 (TRBV5-1, TRBJ2-2)
CASSFPAGANTGELFF

SEQ ID NO: 24579 - protein, 13 aa, Homo sapiens
  CDR3 for alpha chain variable domain of TCR clone 12290 (TRAV24, TRAJ9)
CASRNTGGFKTIF

SEQ ID NO: 24580 - protein, 14 aa, Homo sapiens
  CDR3 for beta chain variable domain of TCR clone 12290 (TRBV27, TRBJ1-5)
CASSPSGSNQPQHF

SEQ ID NO: 24581 - protein, 14 aa, Homo sapiens
  CDR3 for alpha chain variable domain of TCR clone 12291 (TRAV12-1, TRAJ17)
CVGNYKAAGNKLTF

SEQ ID NO: 24582 - protein, 17 aa, Homo sapiens
  CDR3 for beta chain variable domain of TCR clone 12291 (TRBV20-1, TRBJ2-1)
CSASSSGLAGSYNEQFF

SEQ ID NO: 24583 - protein, 14 aa, Homo sapiens
  CDR3 for alpha chain variable domain of TCR clone 12292 (TRAV38-1, TRAJ45)
CASHSGGGADGLPF

SEQ ID NO: 24584 - protein, 13 aa, Homo sapiens
  CDR3 for beta chain variable domain of TCR clone 12292 (TRBV10-3, TRBJ1-2)
CAISERDSYGYTF

SEQ ID NO: 24585 - protein, 15 aa, Homo sapiens
  CDR3 for alpha chain variable domain of TCR clone 12293 (TRAV8-6, TRAJ10)
CAVSSKGGGGNKLTF

SEQ ID NO: 24586 - protein, 18 aa, Homo sapiens
  CDR3 for beta chain variable domain of TCR clone 12293 (TRBV12-4, TRBJ2-4)
CASSRTGAVDVAKNIQYF

SEQ ID NO: 24587 - protein, 15 aa, Homo sapiens
  CDR3 for alpha chain variable domain of TCR clone 12294 (TRAV26-1, TRAJ29)
CIVRVEGSGNTPLVF

SEQ ID NO: 24588 - protein, 14 aa, Homo sapiens
  CDR3 for beta chain variable domain of TCR clone 12294 (TRBV19, TRBJ2-1)
CASPTFVLSGEQFF

SEQ ID NO: 24589 - protein, 14 aa, Homo sapiens
  CDR3 for alpha chain variable domain of TCR clone 12295 (TRAV12-2, TRAJ13)
CAVKKTGGYQKVTF

SEQ ID NO: 24590 - protein, 15 aa, Homo sapiens
  CDR3 for beta chain variable domain of TCR clone 12295 (TRBV27, TRBJ2-1)
CDSSNGGGSSNEQFF

SEQ ID NO: 24591 - protein, 11 aa, Homo sapiens
  CDR3 for alpha chain variable domain of TCR clone 12296 (TRAV2, TRAJ13)
CASGGYQKVTL

SEQ ID NO: 24592 - protein, 16 aa, Homo sapiens
  CDR3 for beta chain variable domain of TCR clone 12296 (TRBV6-1, TRBJ2-5)
CASSETLDRGAETQYF

SEQ ID NO: 24593 - protein, 11 aa, Homo sapiens
  CDR3 for alpha chain variable domain of TCR clone 12297 (TRAV1-2, TRAJ31)
CAVNNNARLMF

SEQ ID NO: 24594 - protein, 15 aa, Homo sapiens
  CDR3 for beta chain variable domain of TCR clone 12297 (TRBV28, TRBJ2-1)
CASSIIAGGRSGQFF

SEQ ID NO: 24595 - protein, 13 aa, Homo sapiens
  CDR3 for alpha chain variable domain of TCR clone 12298 (TRAV13-2, TRAJ39)
CAENKNAGNMLTF

SEQ ID NO: 24596 - protein, 14 aa, Homo sapiens
  CDR3 for beta chain variable domain of TCR clone 12298 (TRBV19, TRBJ2-5)
CASSMTGQQETQYF

SEQ ID NO: 24597 - protein, 14 aa, Homo sapiens
  CDR3 for alpha chain variable domain of TCR clone 12299 (TRAV12-2, TRAJ13)
CAVKKTGGYQEVTF

SEQ ID NO: 24598 - protein, 15 aa, Homo sapiens
  CDR3 for beta chain variable domain of TCR clone 12299 (TRBV6-6, TRBJ1-1)
CASSYPTAMNTEAFF

SEQ ID NO: 24599 - protein, 11 aa, Homo sapiens
  CDR3 for alpha chain variable domain of TCR clone 12300 (TRAV23/DV6, TRAJ20)
CAAKDDYKLSF

SEQ ID NO: 24600 - protein, 12 aa, Homo sapiens
  CDR3 for beta chain variable domain of TCR clone 12300 (TRBV3-1, TRBJ2-3)
CASSSGDRAEYF

SEQ ID NO: 24601 - protein, 14 aa, Homo sapiens
  CDR3 for alpha chain variable domain of TCR clone 12301 (TRAV12-2, TRAJ40)
CAVKIPSGTYKYIF

SEQ ID NO: 24602 - protein, 14 aa, Homo sapiens
  CDR3 for beta chain variable domain of TCR clone 12301 (TRBV20-1, TRBJ1-1)
CSAQTRIGGTGAFF

SEQ ID NO: 24603 - protein, 15 aa, Homo sapiens
  CDR3 for alpha chain variable domain of TCR clone 12302 (TRAV26-1, TRAJ29)
CIVRVVPGRNTPLVF

SEQ ID NO: 24604 - protein, 14 aa, Homo sapiens
  CDR3 for beta chain variable domain of TCR clone 12302 (TRBV7-2, TRBJ2-5)
CASSPRGSSETQYF

SEQ ID NO: 24605 - protein, 16 aa, Homo sapiens
  CDR3 for alpha chain variable domain of TCR clone 12303 (TRAV14/DV4, TRAJ12)
CAMREVLMDSSYKLIF

SEQ ID NO: 24606 - protein, 13 aa, Homo sapiens
  CDR3 for beta chain variable domain of TCR clone 12303 (TRBV18, TRBJ1-1)
CASSGGRNTEAFF

SEQ ID NO: 24607 - protein, 14 aa, Homo sapiens
  CDR3 for alpha chain variable domain of TCR clone 12304 (TRAV1-2, TRAJ16)
CAVNRFSDGQKLLF

SEQ ID NO: 24608 - protein, 15 aa, Homo sapiens
  CDR3 for beta chain variable domain of TCR clone 12304 (TRBV11-2, TRBJ1-2)
CASSLEGVQRNGYTF

SEQ ID NO: 24609 - protein, 14 aa, Homo sapiens
  CDR3 for alpha chain variable domain of TCR clone 12305 (TRAV26-1, TRAJ38)
CIADNAGNSRKLIW

SEQ ID NO: 24610 - protein, 13 aa, Homo sapiens
  CDR3 for beta chain variable domain of TCR clone 12305 (TRBV4-1, TRBJ2-7)
CASSQGQAYEQYF

SEQ ID NO: 24611 - protein, 14 aa, Homo sapiens
  CDR3 for alpha chain variable domain of TCR clone 12306 (TRAV35, TRAJ13)
CAGSPSGGYQKVTF

SEQ ID NO: 24612 - protein, 13 aa, Homo sapiens
  CDR3 for beta chain variable domain of TCR clone 12306 (TRBV29-1, TRBJ1-1)
CSVGDSWNTEAFF

SEQ ID NO: 24613 - protein, 13 aa, Homo sapiens
  CDR3 for alpha chain variable domain of TCR clone 12307 (TRAV27, TRAJ57)
CRSAQGGSEKLVF

SEQ ID NO: 24614 - protein, 11 aa, Homo sapiens
  CDR3 for beta chain variable domain of TCR clone 12307 (TRBV11-2, TRBJ1-1)
CAGSINTEAFF

SEQ ID NO: 24615 - protein, 14 aa, Homo sapiens
  CDR3 for alpha chain variable domain of TCR clone 12308 (TRAV12-2, TRAJ8)
CAVKENTGFQKLVF

SEQ ID NO: 24616 - protein, 16 aa, Homo sapiens
  CDR3 for beta chain variable domain of TCR clone 12308 (TRBV7-2, TRBJ2-7)
CASSNRQGATSSTSGR

SEQ ID NO: 24617 - protein, 15 aa, Homo sapiens
  CDR3 for alpha chain variable domain of TCR clone 12309 (TRAV8-3, TRAJ27)
CAVGPSKTNAGKSPF

SEQ ID NO: 24618 - protein, 15 aa, Homo sapiens
  CDR3 for beta chain variable domain of TCR clone 12309 (TRBV7-2, TRBJ2-1)
CASSSGLAGGNEQFF

SEQ ID NO: 24619 - protein, 14 aa, Homo sapiens
  CDR3 for alpha chain variable domain of TCR clone 12310 (TRAV21, TRAJ35)
CAVMPIGFGNVLHC

SEQ ID NO: 24620 - protein, 12 aa, Homo sapiens
  CDR3 for beta chain variable domain of TCR clone 12310 (TRBV7-9, TRBJ2-7)
CASGIKREEQYF

SEQ ID NO: 24621 - protein, 13 aa, Homo sapiens
  CDR3 for alpha chain variable domain of TCR clone 12311 (TRAV21, TRAJ27)
CAARPGNAGKSTF

SEQ ID NO: 24622 - protein, 14 aa, Homo sapiens
  CDR3 for beta chain variable domain of TCR clone 12311 (TRBV7-6, TRBJ2-3)
CASRLGTVTDTQYF

SEQ ID NO: 24623 - protein, 14 aa, Homo sapiens
  CDR3 for alpha chain variable domain of TCR clone 12312 (TRAV12-2, TRAJ40)
CAVKIPSGTYKYIF

SEQ ID NO: 24624 - protein, 14 aa, Homo sapiens
  CDR3 for beta chain variable domain of TCR clone 12312 (TRBV20-1, TRBJ1-1)
YSAQTRIGGTEAFF

SEQ ID NO: 24625 - protein, 14 aa, Homo sapiens
  CDR3 for alpha chain variable domain of TCR clone 12313 (TRAV12-2, TRAJ3)
CAVNGYSSASKIIF

SEQ ID NO: 24626 - protein, 16 aa, Homo sapiens
  CDR3 for beta chain variable domain of TCR clone 12313 (TRBV4-2, TRBJ2-2)
CASSQDPSGREGELFF

SEQ ID NO: 24627 - protein, 18 aa, Homo sapiens
  CDR3 for alpha chain variable domain of TCR clone 12314 (TRAV21, TRAJ52)
CAVRPSPAGGTSYGKLTF

SEQ ID NO: 24628 - protein, 14 aa, Homo sapiens
  CDR3 for beta chain variable domain of TCR clone 12314 (TRBV7-2, TRBJ2-7)
CASRSQGAAYEQYF

SEQ ID NO: 24629 - protein, 12 aa, Homo sapiens
  CDR3 for alpha chain variable domain of TCR clone 12315 (TRAV1-2, TRAJ29)
CAVPSGNTPLVF

SEQ ID NO: 24630 - protein, 14 aa, Homo sapiens
  CDR3 for beta chain variable domain of TCR clone 12315 (TRBV7-6, TRBJ2-1)
CASSLGGGADEQFF

SEQ ID NO: 24631 - protein, 13 aa, Homo sapiens
  CDR3 for alpha chain variable domain of TCR clone 12316 (TRAV21, TRAJ57)
CAVTQGGTEKLVF

SEQ ID NO: 24632 - protein, 16 aa, Homo sapiens
  CDR3 for beta chain variable domain of TCR clone 12316 (TRBV29-1, TRBJ2-7)
CSVEDAEDGTAYEQYF

SEQ ID NO: 24633 - protein, 14 aa, Homo sapiens
  CDR3 for alpha chain variable domain of TCR clone 12317 (TRAV38-1, TRAJ31)
CAFMKHDNNARLMF

SEQ ID NO: 24634 - protein, 18 aa, Homo sapiens
  CDR3 for beta chain variable domain of TCR clone 12317 (TRBV4-2, TRBJ1-5)
CASSQGDRVEWGNQPQHF

SEQ ID NO: 24635 - protein, 15 aa, Homo sapiens
  CDR3 for alpha chain variable domain of TCR clone 12318 (TRAV29/DV5, TRAJ20)
CAASAVRSNDYKLSF

SEQ ID NO: 24636 - protein, 15 aa, Homo sapiens
  CDR3 for beta chain variable domain of TCR clone 12318 (TRBV28, TRBJ2-7)
CASRPWDRFSYEQYF

SEQ ID NO: 24637 - protein, 10 aa, Homo sapiens
  CDR3 for alpha chain variable domain of TCR clone 12319 (TRAV8-2, TRAJ41)
CVVSELRRTQ

SEQ ID NO: 24638 - protein, 14 aa, Homo sapiens
  CDR3 for beta chain variable domain of TCR clone 12319 (TRBV28, TRBJ1-5)
CASSLFPGVQPQHF

SEQ ID NO: 24639 - protein, 13 aa, Homo sapiens
  CDR3 for alpha chain variable domain of TCR clone 12320 (TRAV20, TRAJ37)
CVGCSSNTGKLIF

SEQ ID NO: 24640 - protein, 11 aa, Homo sapiens
  CDR3 for beta chain variable domain of TCR clone 12320 (TRBV12-4, TRBJ2-3)
CASTATDTQYF

SEQ ID NO: 24641 - protein, 14 aa, Homo sapiens
  CDR3 for alpha chain variable domain of TCR clone 12321 (TRAV2, TRAJ37)
CAVDFTSKTGKLIF

SEQ ID NO: 24642 - protein, 15 aa, Homo sapiens
  CDR3 for beta chain variable domain of TCR clone 12321 (TRBV20-1, TRBJ1-1)
CSASRGVTGNTEAFF

SEQ ID NO: 24643 - protein, 11 aa, Homo sapiens
  CDR3 for alpha chain variable domain of TCR clone 12322 (TRAV21, TRAJ34)
CAHYNTDKLVF

SEQ ID NO: 24644 - protein, 13 aa, Homo sapiens
  CDR3 for beta chain variable domain of TCR clone 12322 (TRBV7-6, TRBJ1-2)
CASSLVADYGYTF

SEQ ID NO: 24645 - protein, 11 aa, Homo sapiens
  CDR3 for alpha chain variable domain of TCR clone 12323 (TRAV2, TRAJ20)
CAVPNDYKLSF

SEQ ID NO: 24646 - protein, 15 aa, Homo sapiens
  CDR3 for beta chain variable domain of TCR clone 12323 (TRBV12-4, TRBJ2-2)
CASSLDPGGSGELFF

SEQ ID NO: 24647 - protein, 18 aa, Homo sapiens
  CDR3 for alpha chain variable domain of TCR clone 12324 (TRAV29/DV5, TRAJ26)
CSVLLCSKRKPEGQNFVF

SEQ ID NO: 24648 - protein, 17 aa, Homo sapiens
  CDR3 for beta chain variable domain of TCR clone 12324 (TRBV20-1, TRBJ2-2)
CSASGSGQGGLTGELFL

SEQ ID NO: 24649 - protein, 17 aa, Homo sapiens
  CDR3 for alpha chain variable domain of TCR clone 12325 (TRAV3, TRAJ6)
CAVRDGPRAGGSYIPTF

SEQ ID NO: 24650 - protein, 16 aa, Homo sapiens
  CDR3 for beta chain variable domain of TCR clone 12325 (TRBV12-4, TRBJ1-5)
CASSRPVGGSNQPQHF

SEQ ID NO: 24651 - protein, 14 aa, Homo sapiens
  CDR3 for alpha chain variable domain of TCR clone 12326 (TRAV35, TRAJ33)
CAGSSQDSNYQLIW

SEQ ID NO: 24652 - protein, 17 aa, Homo sapiens
  CDR3 for beta chain variable domain of TCR clone 12326 (TRBV5-1, TRBJ2-5)
CASSPVALGQNQETQYF

SEQ ID NO: 24653 - protein, 14 aa, Homo sapiens
  CDR3 for alpha chain variable domain of TCR clone 12327 (TRAV35, TRAJ22)
CAGLRPGSARQLTL

SEQ ID NO: 24654 - protein, 15 aa, Homo sapiens
  CDR3 for beta chain variable domain of TCR clone 12327 (TRBV12-4, TRBJ2-5)
CASSPPTGLQETQYF

SEQ ID NO: 24655 - protein, 13 aa, Homo sapiens
  CDR3 for alpha chain variable domain of TCR clone 12328 (TRAV8-6, TRAJ49)
CAVITNTGNQFYF

SEQ ID NO: 24656 - protein, 15 aa, Homo sapiens
  CDR3 for beta chain variable domain of TCR clone 12328 (TRBV18, TRBJ2-1)
CASSPPSASYNEQFF

SEQ ID NO: 24657 - protein, 13 aa, Homo sapiens
  CDR3 for alpha chain variable domain of TCR clone 12329 (TRAV21, TRAJ57)
CAVTQGGSDKLVF

SEQ ID NO: 24658 - protein, 16 aa, Homo sapiens
  CDR3 for beta chain variable domain of TCR clone 12329 (TRBV29-1, TRBJ2-7)
CSVEDAEDGTAYEQYF

SEQ ID NO: 24659 - protein, 15 aa, Homo sapiens
  CDR3 for alpha chain variable domain of TCR clone 12330 (TRAV26-1, TRAJ29)
CIVRVEGSGNIPLVF

SEQ ID NO: 24660 - protein, 15 aa, Homo sapiens
  CDR3 for beta chain variable domain of TCR clone 12330 (TRBV7-9, TRBJ1-5)
CASSQGHQPNQPQHF

SEQ ID NO: 24661 - protein, 15 aa, Homo sapiens
  CDR3 for alpha chain variable domain of TCR clone 12331 (TRAV3, TRAJ5)
CAVRDLDTGRRALTF

SEQ ID NO: 24662 - protein, 13 aa, Homo sapiens
  CDR3 for beta chain variable domain of TCR clone 12331 (TRBV12-4, TRBJ2-7)
CASSPTETDEQYF

SEQ ID NO: 24663 - protein, 14 aa, Homo sapiens
  CDR3 for alpha chain variable domain of TCR clone 12332 (TRAV2, TRAJ37)
CAVDFTSNTGKLIF

SEQ ID NO: 24664 - protein, 15 aa, Homo sapiens
  CDR3 for beta chain variable domain of TCR clone 12332 (TRBV20-1, TRBJ1-1)
CSASRGVTGDTEAFF

SEQ ID NO: 24665 - protein, 19 aa, Homo sapiens
  CDR3 for alpha chain variable domain of TCR clone 12333 (TRAV21, TRAJ40)
SLVTQPPTSVISGTYKYIF

SEQ ID NO: 24666 - protein, 16 aa, Homo sapiens
  CDR3 for beta chain variable domain of TCR clone 12333 (TRBV13, TRBJ2-2)
CASSLGRGYGTGELFF

SEQ ID NO: 24667 - protein, 18 aa, Homo sapiens
  CDR3 for alpha chain variable domain of TCR clone 12334 (TRAV29/DV5, TRAJ52)
CAAGFRGAGGTSYGKLTF

SEQ ID NO: 24668 - protein, 16 aa, Homo sapiens
  CDR3 for beta chain variable domain of TCR clone 12334 (TRBV7-3, TRBJ2-2)
CASSLKRGTLSGELSF

SEQ ID NO: 24669 - protein, 14 aa, Homo sapiens
  CDR3 for alpha chain variable domain of TCR clone 12335 (TRAV8-3, TRAJ4)
CAVGAAGGYNKLLF

SEQ ID NO: 24670 - protein, 15 aa, Homo sapiens
  CDR3 for beta chain variable domain of TCR clone 12335 (TRBV6-5, TRBJ2-1)
CASSYDAGAGNEQFF

SEQ ID NO: 24671 - protein, 12 aa, Homo sapiens
  CDR3 for alpha chain variable domain of TCR clone 12336 (TRAV2, TRAJ31)
CAVEDNNARLMF

SEQ ID NO: 24672 - protein, 16 aa, Homo sapiens
  CDR3 for beta chain variable domain of TCR clone 12336 (TRBV10-3, TRBJ2-1)
CATSGVGDGGGGEQFF

SEQ ID NO: 24673 - protein, 13 aa, Homo sapiens
  CDR3 for alpha chain variable domain of TCR clone 12337 (TRAV13-1, TRAJ5)
RAASDTGRRALTF

SEQ ID NO: 24674 - protein, 12 aa, Homo sapiens
  CDR3 for beta chain variable domain of TCR clone 12337 (TRBV28, TRBJ2-3)
CASSLYRDTQYF

SEQ ID NO: 24675 - protein, 18 aa, Homo sapiens
  CDR3 for alpha chain variable domain of TCR clone 12338 (TRAV13-1, TRAJ52)
CAASKRRAGGTSYGKLTF

SEQ ID NO: 24676 - protein, 13 aa, Homo sapiens
  CDR3 for beta chain variable domain of TCR clone 12338 (TRBV12-4, TRBJ1-2)
CASSLRQGKGYTF

SEQ ID NO: 24677 - protein, 14 aa, Homo sapiens
  CDR3 for alpha chain variable domain of TCR clone 12339 (TRAV17, TRAJ37)
CATDAFSNTGKLIF

SEQ ID NO: 24678 - protein, 16 aa, Homo sapiens
  CDR3 for beta chain variable domain of TCR clone 12339 (TRBV5-7, TRBJ2-5)
CASSFGQGGYQETQYF

SEQ ID NO: 24679 - protein, 12 aa, Homo sapiens
  CDR3 for alpha chain variable domain of TCR clone 12340 (TRAV2, TRAJ34)
CAVERNTDKLIF

SEQ ID NO: 24680 - protein, 15 aa, Homo sapiens
  CDR3 for beta chain variable domain of TCR clone 12340 (TRBV7-2, TRBJ2-5)
CASSFLRGGEETQYF

SEQ ID NO: 24681 - protein, 11 aa, Homo sapiens
  CDR3 for alpha chain variable domain of TCR clone 12341 (TRAV3, TRAJ21)
CAVGNFHKFYF

SEQ ID NO: 24682 - protein, 16 aa, Homo sapiens
  CDR3 for beta chain variable domain of TCR clone 12341 (TRBV19, TRBJ2-1)
CASSKAGPSSYNEQFF

SEQ ID NO: 24683 - protein, 15 aa, Homo sapiens
  CDR3 for alpha chain variable domain of TCR clone 12342 (TRAV35, TRAJ52)
CAELAGGTSYGKLTF

SEQ ID NO: 24684 - protein, 15 aa, Homo sapiens
  CDR3 for beta chain variable domain of TCR clone 12342 (TRBV11-3, TRBJ2-3)
CASSLLATYTDTQYF

SEQ ID NO: 24685 - protein, 16 aa, Homo sapiens
  CDR3 for alpha chain variable domain of TCR clone 12343 (TRAV12-3, TRAJ53)
CAMSPGSGVSNYKLTF

SEQ ID NO: 24686 - protein, 11 aa, Homo sapiens
  CDR3 for beta chain variable domain of TCR clone 12343 (TRBV29-1, TRBJ2-5)
CSEDRTGTQYF

SEQ ID NO: 24687 - protein, 18 aa, Homo sapiens
  CDR3 for alpha chain variable domain of TCR clone 12344 (TRAV21, TRAJ52)
CAVRPSPAGGTSYGKLTF

SEQ ID NO: 24688 - protein, 17 aa, Homo sapiens
  CDR3 for beta chain variable domain of TCR clone 12344 (TRBV13, TRBJ2-3)
CVSSLSRVAGGRNTQYF

SEQ ID NO: 24689 - protein, 13 aa, Homo sapiens
  CDR3 for alpha chain variable domain of TCR clone 12345 (TRAV2, TRAJ40)
CAVVTSGTYKYIV

SEQ ID NO: 24690 - protein, 14 aa, Homo sapiens
  CDR3 for beta chain variable domain of TCR clone 12345 (TRBV19, TRBJ2-1)
CASPTFVLSGEQFF

SEQ ID NO: 24691 - protein, 14 aa, Homo sapiens
  CDR3 for alpha chain variable domain of TCR clone 12346 (TRAV17, TRAJ22)
CATSPPGSARQLTF

SEQ ID NO: 24692 - protein, 15 aa, Homo sapiens
  CDR3 for beta chain variable domain of TCR clone 12346 (TRBV4-1, TRBJ2-5)
CASSQWDLYQETQYF

SEQ ID NO: 24693 - protein, 13 aa, Homo sapiens
  CDR3 for alpha chain variable domain of TCR clone 12347 (TRAV13-1, TRAJ53)
QAASGGSNYKLTF

SEQ ID NO: 24694 - protein, 15 aa, Homo sapiens
  CDR3 for beta chain variable domain of TCR clone 12347 (TRBV5-1, TRBJ2-1)
CASSPPRAPYNEQFF

SEQ ID NO: 24695 - protein, 13 aa, Homo sapiens
  CDR3 for alpha chain variable domain of TCR clone 12348 (TRAV2, TRAJ40)
SAVVTSGTYKYIF

SEQ ID NO: 24696 - protein, 14 aa, Homo sapiens
  CDR3 for beta chain variable domain of TCR clone 12348 (TRBV19, TRBJ2-1)
CASPTFVLSGEQFF

SEQ ID NO: 24697 - protein, 11 aa, Homo sapiens
  CDR3 for alpha chain variable domain of TCR clone 12349 (TRAV13-1, TRAJ5)
CAPKGRRALTF

SEQ ID NO: 24698 - protein, 17 aa, Homo sapiens
  CDR3 for beta chain variable domain of TCR clone 12349 (TRBV6-3, TRBJ1-5)
CASSWSGGLYSNQPQHF

SEQ ID NO: 24699 - protein, 14 aa, Homo sapiens
  CDR3 for alpha chain variable domain of TCR clone 12350 (TRAV26-1, TRAJ34)
CIVRVAYNTDKLTF

SEQ ID NO: 24700 - protein, 15 aa, Homo sapiens
  CDR3 for beta chain variable domain of TCR clone 12350 (TRBV20-1, TRBJ2-7)
CSARVPAAYFYEQYF

SEQ ID NO: 24701 - protein, 15 aa, Homo sapiens
  CDR3 for alpha chain variable domain of TCR clone 12351 (TRAV13-1, TRAJ42)
CAASIAGGSQGSLIF

SEQ ID NO: 24702 - protein, 15 aa, Homo sapiens
  CDR3 for beta chain variable domain of TCR clone 12351 (TRBV19, TRBJ2-1)
CASSIVRGEGREQFF

SEQ ID NO: 24703 - protein, 14 aa, Homo sapiens
  CDR3 for alpha chain variable domain of TCR clone 12352 (TRAV1-2, TRAJ16)
CAVNRFSDGQKLLF

SEQ ID NO: 24704 - protein, 15 aa, Homo sapiens
  CDR3 for beta chain variable domain of TCR clone 12352 (TRBV7-9, TRBJ1-6)
CASSPPGRGNSPLHF

SEQ ID NO: 24705 - protein, 12 aa, Homo sapiens
  CDR3 for alpha chain variable domain of TCR clone 12353 (TRAV24, TRAJ47)
CAFGEYGNKLVF

SEQ ID NO: 24706 - protein, 18 aa, Homo sapiens
  CDR3 for beta chain variable domain of TCR clone 12353 (TRBV7-6, TRBJ2-1)
CASSPRTSGMSSYNEQFF

SEQ ID NO: 24707 - protein, 12 aa, Homo sapiens
  CDR3 for alpha chain variable domain of TCR clone 12354 (TRAV13-1, TRAJ48)
CAANFGNEKLTF

SEQ ID NO: 24708 - protein, 13 aa, Homo sapiens
  CDR3 for beta chain variable domain of TCR clone 12354 (TRBV27, TRBJ1-1)
CASSLSIGAEAFF

SEQ ID NO: 24709 - protein, 14 aa, Homo sapiens
  CDR3 for alpha chain variable domain of TCR clone 12355 (TRAV13-2, TRAJ45)
CAEMPGGGADGLTF

SEQ ID NO: 24710 - protein, 14 aa, Homo sapiens
  CDR3 for beta chain variable domain of TCR clone 12355 (TRBV2, TRBJ1-4)
CASNQGGLSLGLFF

SEQ ID NO: 24711 - protein, 14 aa, Homo sapiens
  CDR3 for alpha chain variable domain of TCR clone 12356 (TRAV1-2, TRAJ8)
YAVREDTGFQKLVF

SEQ ID NO: 24712 - protein, 15 aa, Homo sapiens
  CDR3 for beta chain variable domain of TCR clone 12356 (TRBV6-3, TRBJ2-7)
CASSSPGTVFYEQYF

SEQ ID NO: 24713 - protein, 11 aa, Homo sapiens
  CDR3 for alpha chain variable domain of TCR clone 12357 (TRAV12-3, TRAJ43)
CAMSVSNDMRF

SEQ ID NO: 24714 - protein, 13 aa, Homo sapiens
  CDR3 for beta chain variable domain of TCR clone 12357 (TRBV20-1, TRBJ1-1)
CSAPLGGGTEAFS

SEQ ID NO: 24715 - protein, 15 aa, Homo sapiens
  CDR3 for alpha chain variable domain of TCR clone 12358 (TRAV25, TRAJ52)
CAGRPGGTSYGKLTF

SEQ ID NO: 24716 - protein, 15 aa, Homo sapiens
  CDR3 for beta chain variable domain of TCR clone 12358 (TRBV20-1, TRBJ2-7)
CSARDRVSGMDEQYF

SEQ ID NO: 24717 - protein, 15 aa, Homo sapiens
  CDR3 for alpha chain variable domain of TCR clone 12359 (TRAV26-1, TRAJ29)
RIVRVEGSGNTPLVF

SEQ ID NO: 24718 - protein, 14 aa, Homo sapiens
  CDR3 for beta chain variable domain of TCR clone 12359 (TRBV18, TRBJ2-5)
CASSPGVSQETQYF

SEQ ID NO: 24719 - protein, 12 aa, Homo sapiens
  CDR3 for alpha chain variable domain of TCR clone 12360 (TRAV8-3, TRAJ20)
CAVVANDYKLSF

SEQ ID NO: 24720 - protein, 16 aa, Homo sapiens
  CDR3 for beta chain variable domain of TCR clone 12360 (TRBV19, TRBJ2-2)
CASRSPGTGATGELFF

SEQ ID NO: 24721 - protein, 12 aa, Homo sapiens
  CDR3 for alpha chain variable domain of TCR clone 12361 (TRAV10, TRAJ9)
CGAYTGGFKTIF

SEQ ID NO: 24722 - protein, 13 aa, Homo sapiens
  CDR3 for beta chain variable domain of TCR clone 12361 (TRBV9, TRBJ2-1)
CASSPSGGNEQFF

SEQ ID NO: 24723 - protein, 14 aa, Homo sapiens
  CDR3 for alpha chain variable domain of TCR clone 12362 (TRAV2, TRAJ9)
CAVEDRSGGFKTIF

SEQ ID NO: 24724 - protein, 15 aa, Homo sapiens
  CDR3 for beta chain variable domain of TCR clone 12362 (TRBV29-1, TRBJ2-1)
CSGRDRKSSYNEQFF

SEQ ID NO: 24725 - protein, 15 aa, Homo sapiens
  CDR3 for alpha chain variable domain of TCR clone 12363 (TRAV3, TRAJ4)
CAVRGGTGGYNKLIF

SEQ ID NO: 24726 - protein, 16 aa, Homo sapiens
  CDR3 for beta chain variable domain of TCR clone 12363 (TRBV27, TRBJ2-2)
CASSSSGVSNTGELFF

SEQ ID NO: 24727 - protein, 12 aa, Homo sapiens
  CDR3 for alpha chain variable domain of TCR clone 12364 (TRAV2, TRAJ9)
CAVGAGGFKTIF

SEQ ID NO: 24728 - protein, 16 aa, Homo sapiens
  CDR3 for beta chain variable domain of TCR clone 12364 (TRBV13, TRBJ2-2)
CASSPRTGEHTGGLFF

SEQ ID NO: 24729 - protein, 18 aa, Homo sapiens
  CDR3 for alpha chain variable domain of TCR clone 12365 (TRAV12-3, TRAJ52)
CAMSRTNAGGTSYGKLTF

SEQ ID NO: 24730 - protein, 17 aa, Homo sapiens
  CDR3 for beta chain variable domain of TCR clone 12365 (TRBV7-3, TRBJ2-3)
CASSLMKWMRGADTRYF

SEQ ID NO: 24731 - protein, 12 aa, Homo sapiens
  CDR3 for alpha chain variable domain of TCR clone 12366 (TRAV13-1, TRAJ27)
CAATPMQANQPL

SEQ ID NO: 24732 - protein, 11 aa, Homo sapiens
  CDR3 for beta chain variable domain of TCR clone 12366 (TRBV28, TRBJ2-7)
CASSWDYEQYF

SEQ ID NO: 24733 - protein, 14 aa, Homo sapiens
  CDR3 for alpha chain variable domain of TCR clone 12367 (TRAV8-3, TRAJ9)
CAVVYNTGGFKAIF

SEQ ID NO: 24734 - protein, 14 aa, Homo sapiens
  CDR3 for beta chain variable domain of TCR clone 12367 (TRBV7-3, TRBJ2-2)
CASSSGGYTGELFF

SEQ ID NO: 24735 - protein, 14 aa, Homo sapiens
  CDR3 for alpha chain variable domain of TCR clone 12368 (TRAV12-1, TRAJ38)
CVVNNAGNNRKLIW

SEQ ID NO: 24736 - protein, 16 aa, Homo sapiens
  CDR3 for beta chain variable domain of TCR clone 12368 (TRBV7-2, TRBJ1-2)
CASSRQGGGANYGYTF

SEQ ID NO: 24737 - protein, 16 aa, Homo sapiens
  CDR3 for alpha chain variable domain of TCR clone 12369 (TRAV30, TRAJ24)
CGTEIVDADSWGKFQF

SEQ ID NO: 24738 - protein, 13 aa, Homo sapiens
  CDR3 for beta chain variable domain of TCR clone 12369 (TRBV12-4, TRBJ1-2)
CASSLRQGKGYTF

SEQ ID NO: 24739 - protein, 15 aa, Homo sapiens
  CDR3 for alpha chain variable domain of TCR clone 12370 (TRAV12-3, TRAJ53)
CNEPGSGGSNYKLTF

SEQ ID NO: 24740 - protein, 11 aa, Homo sapiens
  CDR3 for beta chain variable domain of TCR clone 12370 (TRBV29-1, TRBJ2-5)
CSEDRTGTQYF

SEQ ID NO: 24741 - protein, 13 aa, Homo sapiens
  CDR3 for alpha chain variable domain of TCR clone 12371 (TRAV12-3, TRAJ33)
CAMSVNSNYRLIW

SEQ ID NO: 24742 - protein, 13 aa, Homo sapiens
  CDR3 for beta chain variable domain of TCR clone 12371 (TRBV7-2, TRBJ2-2)
CASSLAVTGELFF

SEQ ID NO: 24743 - protein, 13 aa, Homo sapiens
  CDR3 for alpha chain variable domain of TCR clone 12372 (TRAV8-6, TRAJ49)
CAVITNTGNQFYF

SEQ ID NO: 24744 - protein, 16 aa, Homo sapiens
  CDR3 for beta chain variable domain of TCR clone 12372 (TRBV20-1, TRBJ2-1)
CSALTWTSGSYNEQFF

SEQ ID NO: 24745 - protein, 16 aa, Homo sapiens
  CDR3 for alpha chain variable domain of TCR clone 12373 (TRAV1-2, TRAJ10)
CAARGVLTGGGNKLTF

SEQ ID NO: 24746 - protein, 12 aa, Homo sapiens
  CDR3 for beta chain variable domain of TCR clone 12373 (TRBV7-8, TRBJ2-7)
CASSLGDREQYF

SEQ ID NO: 24747 - protein, 13 aa, Homo sapiens
  CDR3 for alpha chain variable domain of TCR clone 12374 (TRAV13-1, TRAJ43)
CAASKNNNNDMRF

SEQ ID NO: 24748 - protein, 15 aa, Homo sapiens
  CDR3 for beta chain variable domain of TCR clone 12374 (TRBV19, TRBJ1-1)
CASTSGQIQNTEAFF

SEQ ID NO: 24749 - protein, 12 aa, Homo sapiens
  CDR3 for alpha chain variable domain of TCR clone 12375 (TRAV1-1, TRAJ15)
CAVGQAGTALIF

SEQ ID NO: 24750 - protein, 14 aa, Homo sapiens
  CDR3 for beta chain variable domain of TCR clone 12375 (TRBV12-5, TRBJ2-5)
CASGSRTHQETQYF

SEQ ID NO: 24751 - protein, 15 aa, Homo sapiens
  CDR3 for alpha chain variable domain of TCR clone 12376 (TRAV10, TRAJ22)
CVVRISSGSARQPTF

SEQ ID NO: 24752 - protein, 16 aa, Homo sapiens
  CDR3 for beta chain variable domain of TCR clone 12376 (TRBV12-4, TRBJ2-3)
CASSFISGSGTDTQYF

SEQ ID NO: 24753 - protein, 14 aa, Homo sapiens
  CDR3 for alpha chain variable domain of TCR clone 12377 (TRAV13-1, TRAJ35)
CAASKGSFGNVLHC

SEQ ID NO: 24754 - protein, 13 aa, Homo sapiens
  CDR3 for beta chain variable domain of TCR clone 12377 (TRBV7-3, TRBJ1-1)
CASSQDWGAEAFF

SEQ ID NO: 24755 - protein, 13 aa, Homo sapiens
  CDR3 for alpha chain variable domain of TCR clone 12378 (TRAV27, TRAJ45)
CRRSGGGADGLTF

SEQ ID NO: 24756 - protein, 17 aa, Homo sapiens
  CDR3 for beta chain variable domain of TCR clone 12378 (TRBV11-2, TRBJ2-1)
CASSLYPPGVEYNEQFF

SEQ ID NO: 24757 - protein, 15 aa, Homo sapiens
  CDR3 for alpha chain variable domain of TCR clone 12379 (TRAV25, TRAJ52)
CAGRPGGTSYGKLTF

SEQ ID NO: 24758 - protein, 17 aa, Homo sapiens
  CDR3 for beta chain variable domain of TCR clone 12379 (TRBV7-8, TRBJ2-6)
CASSAGTGGAGANGLTF

SEQ ID NO: 24759 - protein, 13 aa, Homo sapiens
  CDR3 for alpha chain variable domain of TCR clone 12380 (TRAV13-2, TRAJ48)
CAEMDFGNEKLTF

SEQ ID NO: 24760 - protein, 14 aa, Homo sapiens
  CDR3 for beta chain variable domain of TCR clone 12380 (TRBV19, TRBJ2-1)
CASPTFVLSGEQFF

SEQ ID NO: 24761 - protein, 11 aa, Homo sapiens
  CDR3 for alpha chain variable domain of TCR clone 12381 (TRAV2, TRAJ33)
CAVESNYQLIW

SEQ ID NO: 24762 - protein, 15 aa, Homo sapiens
  CDR3 for beta chain variable domain of TCR clone 12381 (TRBV19, TRBJ1-1)
CASTSGQIQNTEAFL

SEQ ID NO: 24763 - protein, 13 aa, Homo sapiens
  CDR3 for alpha chain variable domain of TCR clone 12382 (TRAV2, TRAJ40)
CAVVTSGTYRYIF

SEQ ID NO: 24764 - protein, 15 aa, Homo sapiens
  CDR3 for beta chain variable domain of TCR clone 12382 (TRBV11-3, TRBJ2-3)
CASLKDGREGDTQYF

SEQ ID NO: 24765 - protein, 14 aa, Homo sapiens
  CDR3 for alpha chain variable domain of TCR clone 12383 (TRAV1-2, TRAJ16)
CAVNRFSDGQKLLF

SEQ ID NO: 24766 - protein, 17 aa, Homo sapiens
  CDR3 for beta chain variable domain of TCR clone 12383 (TRBV28, TRBJ2-5)
CASSRQGGLSGAETQYF

SEQ ID NO: 24767 - protein, 15 aa, Homo sapiens
  CDR3 for alpha chain variable domain of TCR clone 12384 (TRAV26-1, TRAJ29)
CIVRVEGSGNTPLVF

SEQ ID NO: 24768 - protein, 15 aa, Homo sapiens
  CDR3 for beta chain variable domain of TCR clone 12384 (TRBV7-9, TRBJ1-5)
CASSQGHQPNQPRHF

SEQ ID NO: 24769 - protein, 14 aa, Homo sapiens
  CDR3 for alpha chain variable domain of TCR clone 12385 (TRAV4, TRAJ26)
CLVGPHNYGQNFFF

SEQ ID NO: 24770 - protein, 17 aa, Homo sapiens
  CDR3 for beta chain variable domain of TCR clone 12385 (TRBV24-1, TRBJ2-1)
CATSDVSTSGTYNEQFF

SEQ ID NO: 24771 - protein, 14 aa, Homo sapiens
  CDR3 for alpha chain variable domain of TCR clone 12386 (TRAV35, TRAJ34)
CAGRGTPTSSSLGL

SEQ ID NO: 24772 - protein, 14 aa, Homo sapiens
  CDR3 for beta chain variable domain of TCR clone 12386 (TRBV5-1, TRBJ2-7)
CASSRGESLYEQYF

SEQ ID NO: 24773 - protein, 14 aa, Homo sapiens
  CDR3 for alpha chain variable domain of TCR clone 12387 (TRAV13-1, TRAJ35)
CAASKGGFGTVLHC

SEQ ID NO: 24774 - protein, 13 aa, Homo sapiens
  CDR3 for beta chain variable domain of TCR clone 12387 (TRBV7-3, TRBJ1-1)
CASSQDWGAEAFF

SEQ ID NO: 24775 - protein, 12 aa, Homo sapiens
  CDR3 for alpha chain variable domain of TCR clone 12388 (TRAV36/DV7, TRAJ54)
CAVVRGAQKLVF

SEQ ID NO: 24776 - protein, 14 aa, Homo sapiens
  CDR3 for beta chain variable domain of TCR clone 12388 (TRBV7-3, TRBJ1-1)
CASSLKGGNTEASF

SEQ ID NO: 24777 - protein, 14 aa, Homo sapiens
  CDR3 for alpha chain variable domain of TCR clone 12389 (TRAV17, TRAJ34)
CAADSLEGTDKLIF

SEQ ID NO: 24778 - protein, 13 aa, Homo sapiens
  CDR3 for beta chain variable domain of TCR clone 12389 (TRBV11-2, TRBJ2-7)
CASSGTRPYEQYF

SEQ ID NO: 24779 - protein, 15 aa, Homo sapiens
  CDR3 for alpha chain variable domain of TCR clone 12390 (TRAV4, TRAJ39)
CLVGPNNNAGNMLTF

SEQ ID NO: 24780 - protein, 15 aa, Homo sapiens
  CDR3 for beta chain variable domain of TCR clone 12390 (TRBV27, TRBJ1-4)
CASSAQQDLNEKLFF

SEQ ID NO: 24781 - protein, 13 aa, Homo sapiens
  CDR3 for alpha chain variable domain of TCR clone 12391 (TRAV2, TRAJ40)
CAVVTSGTYKYII

SEQ ID NO: 24782 - protein, 14 aa, Homo sapiens
  CDR3 for beta chain variable domain of TCR clone 12391 (TRBV19, TRBJ2-1)
CASPTFVLSGEQFF

SEQ ID NO: 24783 - protein, 12 aa, Homo sapiens
  CDR3 for alpha chain variable domain of TCR clone 12392 (TRAV26-1, TRAJ43)
CIVRPRGDDMRF

SEQ ID NO: 24784 - protein, 20 aa, Homo sapiens
  CDR3 for beta chain variable domain of TCR clone 12392 (TRBV7-8, TRBJ2-2)
CASSHLFPGPTIHITGELFF

SEQ ID NO: 24785 - protein, 22 aa, Homo sapiens
  CDR3 for alpha chain variable domain of TCR clone 12393 (TRAV27, TRAJ38)
CAARRNAGNNHIQNPDPAVYQL

SEQ ID NO: 24786 - protein, 12 aa, Homo sapiens
  CDR3 for beta chain variable domain of TCR clone 12393 (TRBV11-2, TRBJ2-2)
CASSLGGGELFF

SEQ ID NO: 24787 - protein, 10 aa, Homo sapiens
  CDR3 for alpha chain variable domain of TCR clone 12394 (TRAV23/DV6, TRAJ57)
CAASSTLSQG

SEQ ID NO: 24788 - protein, 13 aa, Homo sapiens
  CDR3 for beta chain variable domain of TCR clone 12394 (TRBV11-3, TRBJ2-3)
CASSHDTKDTQYF

SEQ ID NO: 24789 - protein, 16 aa, Homo sapiens
  CDR3 for alpha chain variable domain of TCR clone 12395 (TRAV1-2, TRAJ10)
CAVRGVLTGGGNKLNF

SEQ ID NO: 24790 - protein, 12 aa, Homo sapiens
  CDR3 for beta chain variable domain of TCR clone 12395 (TRBV7-8, TRBJ2-7)
CASSLGDREQYF

SEQ ID NO: 24791 - protein, 14 aa, Homo sapiens
  CDR3 for alpha chain variable domain of TCR clone 12396 (TRAV1-1, TRAJ27)
CAVIYNTNAGKSTF

SEQ ID NO: 24792 - protein, 15 aa, Homo sapiens
  CDR3 for beta chain variable domain of TCR clone 12396 (TRBV7-2, TRBJ2-1)
CASSSGLAGGNEQLF

SEQ ID NO: 24793 - protein, 16 aa, Homo sapiens
  CDR3 for alpha chain variable domain of TCR clone 12397 (TRAV12-3, TRAJ53)
CAMSPGSGGNNYKLTF

SEQ ID NO: 24794 - protein, 11 aa, Homo sapiens
  CDR3 for beta chain variable domain of TCR clone 12397 (TRBV29-1, TRBJ2-5)
CSEDRTGTQYF

SEQ ID NO: 24795 - protein, 11 aa, Homo sapiens
  CDR3 for alpha chain variable domain of TCR clone 12398 (TRAV1-2, TRAJ20)
CAVANGYKLSF

SEQ ID NO: 24796 - protein, 18 aa, Homo sapiens
  CDR3 for beta chain variable domain of TCR clone 12398 (TRBV20-1, TRBJ2-6)
CSAETTPTHGSGANVLTF

SEQ ID NO: 24797 - protein, 11 aa, Homo sapiens
  CDR3 for alpha chain variable domain of TCR clone 12399 (TRAV2, TRAJ33)
CAVDSNYQLIW

SEQ ID NO: 24798 - protein, 14 aa, Homo sapiens
  CDR3 for beta chain variable domain of TCR clone 12399 (TRBV11-2, TRBJ2-3)
GASSRLARTDTQYF

SEQ ID NO: 24799 - protein, 16 aa, Homo sapiens
  CDR3 for alpha chain variable domain of TCR clone 12400 (TRAV12-3, TRAJ53)
CAMSPGSGGSNYKLTF

SEQ ID NO: 24800 - protein, 13 aa, Homo sapiens
  CDR3 for beta chain variable domain of TCR clone 12400 (TRBV10-3, TRBJ1-2)
CAISERDSYGYTF

SEQ ID NO: 24801 - protein, 14 aa, Homo sapiens
  CDR3 for alpha chain variable domain of TCR clone 12401 (TRAV12-2, TRAJ40)
CAVKIPSGTYKHIF

SEQ ID NO: 24802 - protein, 14 aa, Homo sapiens
  CDR3 for beta chain variable domain of TCR clone 12401 (TRBV20-1, TRBJ1-1)
CSAQTRIGGTEAFF

SEQ ID NO: 24803 - protein, 11 aa, Homo sapiens
  CDR3 for alpha chain variable domain of TCR clone 12402 (TRAV3, TRAJ20)
CAVRPSVTTTS

SEQ ID NO: 24804 - protein, 15 aa, Homo sapiens
  CDR3 for beta chain variable domain of TCR clone 12402 (TRBV19, TRBJ2-6)
CASVRRDSGANVLTF

SEQ ID NO: 24805 - protein, 16 aa, Homo sapiens
  CDR3 for alpha chain variable domain of TCR clone 12403 (TRAV38-2/DV8, TRAJ45)
CAYTTTSGGDADGLTF

SEQ ID NO: 24806 - protein, 14 aa, Homo sapiens
  CDR3 for beta chain variable domain of TCR clone 12403 (TRBV7-9, TRBJ2-2)
CASSLGHRTGELFF

SEQ ID NO: 24807 - protein, 14 aa, Homo sapiens
  CDR3 for alpha chain variable domain of TCR clone 12404 (TRAV1-2, TRAJ16)
CAVNRFSDGQKLLF

SEQ ID NO: 24808 - protein, 12 aa, Homo sapiens
  CDR3 for beta chain variable domain of TCR clone 12404 (TRBV6-3, TRBJ2-7)
CASSLTPYEQYF

SEQ ID NO: 24809 - protein, 14 aa, Homo sapiens
  CDR3 for alpha chain variable domain of TCR clone 12405 (TRAV8-2, TRAJ37)
CVVSISGNTGKLIF

SEQ ID NO: 24810 - protein, 16 aa, Homo sapiens
  CDR3 for beta chain variable domain of TCR clone 12405 (TRBV5-1, TRBJ1-1)
CASSSGGNSLNTEAFF

SEQ ID NO: 24811 - protein, 14 aa, Homo sapiens
  CDR3 for alpha chain variable domain of TCR clone 12406 (TRAV38-1, TRAJ45)
CAYYSGGGADGLTF

SEQ ID NO: 24812 - protein, 20 aa, Homo sapiens
  CDR3 for beta chain variable domain of TCR clone 12406 (TRBV28, TRBJ2-1)
CASTPIGRSPGLAGGNEQLF

SEQ ID NO: 24813 - protein, 15 aa, Homo sapiens
  CDR3 for alpha chain variable domain of TCR clone 12407 (TRAV17, TRAJ23)
RATDAEDNQGGKLIF

SEQ ID NO: 24814 - protein, 12 aa, Homo sapiens
  CDR3 for beta chain variable domain of TCR clone 12407 (TRBV2, TRBJ2-1)
CAKREGYNEQFF

SEQ ID NO: 24815 - protein, 12 aa, Homo sapiens
  CDR3 for alpha chain variable domain of TCR clone 12408 (TRAV21, TRAJ37)
CAVRGNTGKLIF

SEQ ID NO: 24816 - protein, 13 aa, Homo sapiens
  CDR3 for beta chain variable domain of TCR clone 12408 (TRBV6-1, TRBJ1-1)
CASSRQGNTEAFF

SEQ ID NO: 24817 - protein, 15 aa, Homo sapiens
  CDR3 for alpha chain variable domain of TCR clone 12409 (TRAV27, TRAJ38)
CAARRNACNNRKLIW

SEQ ID NO: 24818 - protein, 13 aa, Homo sapiens
  CDR3 for beta chain variable domain of TCR clone 12409 (TRBV12-5, TRBJ2-3)
CASGDRQSDTQYF

SEQ ID NO: 24819 - protein, 10 aa, Homo sapiens
  CDR3 for alpha chain variable domain of TCR clone 12410 (TRAV23/DV6, TRAJ57)
CAASSTLSQG

SEQ ID NO: 24820 - protein, 13 aa, Homo sapiens
  CDR3 for beta chain variable domain of TCR clone 12410 (TRBV29-1, TRBJ2-3)
CSATRGGRDTQYF

SEQ ID NO: 24821 - protein, 12 aa, Homo sapiens
  CDR3 for alpha chain variable domain of TCR clone 12411 (TRAV12-3, TRAJ17)
CAMTLTGNKLTF

SEQ ID NO: 24822 - protein, 15 aa, Homo sapiens
  CDR3 for beta chain variable domain of TCR clone 12411 (TRBV20-1, TRBJ2-7)
SAVLDRVSGMDEQYF

SEQ ID NO: 24823 - protein, 15 aa, Homo sapiens
  CDR3 for alpha chain variable domain of TCR clone 12412 (TRAV3, TRAJ22)
CAVRDRGGSARQLTF

SEQ ID NO: 24824 - protein, 15 aa, Homo sapiens
  CDR3 for beta chain variable domain of TCR clone 12412 (TRBV20-1, TRBJ2-7)
CSARDRVSGMDEQYF

SEQ ID NO: 24825 - protein, 15 aa, Homo sapiens
  CDR3 for alpha chain variable domain of TCR clone 12413 (TRAV1-2, TRAJ30)
CAVRPHGNRDDKIIF

SEQ ID NO: 24826 - protein, 14 aa, Homo sapiens
  CDR3 for beta chain variable domain of TCR clone 12413 (TRBV25-1, TRBJ1-1)
CASTHLGGNTEAFF

SEQ ID NO: 24827 - protein, 11 aa, Homo sapiens
  CDR3 for alpha chain variable domain of TCR clone 12414 (TRAV17, TRAJ9)
CATTGGFKTIF

SEQ ID NO: 24828 - protein, 14 aa, Homo sapiens
  CDR3 for beta chain variable domain of TCR clone 12414 (TRBV7-9, TRBJ2-2)
CASSGLADAGELFF

SEQ ID NO: 24829 - protein, 16 aa, Homo sapiens
  CDR3 for alpha chain variable domain of TCR clone 12415 (TRAV3, TRAJ37)
CAVRPHGSGNTGKLIF

SEQ ID NO: 24830 - protein, 14 aa, Homo sapiens
  CDR3 for beta chain variable domain of TCR clone 12415 (TRBV23-1, TRBJ2-5)
CASSFLRSQETQYF

SEQ ID NO: 24831 - protein, 14 aa, Homo sapiens
  CDR3 for alpha chain variable domain of TCR clone 12416 (TRAV12-3, TRAJ10)
SHLPLTGGGNKLTF

SEQ ID NO: 24832 - protein, 14 aa, Homo sapiens
  CDR3 for beta chain variable domain of TCR clone 12416 (TRBV7-2, TRBJ2-7)
CASRSQGAAYEQYF

SEQ ID NO: 24833 - protein, 14 aa, Homo sapiens
  CDR3 for alpha chain variable domain of TCR clone 12417 (TRAV26-1, TRAJ38)
CIADNAGNNRKLIW

SEQ ID NO: 24834 - protein, 13 aa, Homo sapiens
  CDR3 for beta chain variable domain of TCR clone 12417 (TRBV20-1, TRBJ1-1)
CSAGGGGNTEAFF

SEQ ID NO: 24835 - protein, 13 aa, Homo sapiens
  CDR3 for alpha chain variable domain of TCR clone 12418 (TRAV27, TRAJ41)
CAGEGSSGYALNF

SEQ ID NO: 24836 - protein, 14 aa, Homo sapiens
  CDR3 for beta chain variable domain of TCR clone 12418 (TRBV7-2, TRBJ1-1)
CASSFLTGTTEAFF

SEQ ID NO: 24837 - protein, 13 aa, Homo sapiens
  CDR3 for alpha chain variable domain of TCR clone 12419 (TRAV13-2, TRAJ13)
CAERPGGYQRVTF

SEQ ID NO: 24838 - protein, 16 aa, Homo sapiens
  CDR3 for beta chain variable domain of TCR clone 12419 (TRBV18, TRBJ2-5)
CASSPPSSGGAKTQYF

SEQ ID NO: 24839 - protein, 11 aa, Homo sapiens
  CDR3 for alpha chain variable domain of TCR clone 12420 (TRAV13-1, TRAJ39)
CASHAGNMLTF

SEQ ID NO: 24840 - protein, 14 aa, Homo sapiens
  CDR3 for beta chain variable domain of TCR clone 12420 (TRBV7-2, TRBJ2-7)
CASSSISGFSEQYF

SEQ ID NO: 24841 - protein, 14 aa, Homo sapiens
  CDR3 for alpha chain variable domain of TCR clone 12421 (TRAV21, TRAJ35)
CAVMPIGFGNVLHC

SEQ ID NO: 24842 - protein, 20 aa, Homo sapiens
  CDR3 for beta chain variable domain of TCR clone 12421 (TRBV7-8, TRBJ2-2)
CASSHLFPGPTIHITGELFF

SEQ ID NO: 24843 - protein, 11 aa, Homo sapiens
  CDR3 for alpha chain variable domain of TCR clone 12422 (TRAV2, TRAJ13)
RASGGYQKVTF

SEQ ID NO: 24844 - protein, 16 aa, Homo sapiens
  CDR3 for beta chain variable domain of TCR clone 12422 (TRBV6-1, TRBJ2-5)
CASSETLDRGAETQYF

SEQ ID NO: 24845 - protein, 23 aa, Homo sapiens
  CDR3 for alpha chain variable domain of TCR clone 12423 (TRAV26-1, TRAJ38)
CIADNAGNNHIQNPDPAVYQLID

SEQ ID NO: 24846 - protein, 13 aa, Homo sapiens
  CDR3 for beta chain variable domain of TCR clone 12423 (TRBV20-1, TRBJ1-1)
CSARGGGNTEAFF

SEQ ID NO: 24847 - protein, 14 aa, Homo sapiens
  CDR3 for alpha chain variable domain of TCR clone 12424 (TRAV29/DV5, TRAJ36)
CAARRKTGANNIFF

SEQ ID NO: 24848 - protein, 14 aa, Homo sapiens
  CDR3 for beta chain variable domain of TCR clone 12424 (TRBV12-5, TRBJ2-5)
CASGSRTHQETQYF

SEQ ID NO: 24849 - protein, 13 aa, Homo sapiens
  CDR3 for alpha chain variable domain of TCR clone 12425 (TRAV21, TRAJ27)
CAARPGNAGKSTF

SEQ ID NO: 24850 - protein, 14 aa, Homo sapiens
  CDR3 for beta chain variable domain of TCR clone 12425 (TRBV7-6, TRBJ2-3)
CASSLGIVTDTQYF

SEQ ID NO: 24851 - protein, 11 aa, Homo sapiens
  CDR3 for alpha chain variable domain of TCR clone 12426 (TRAV1-2, TRAJ40)
CAVPGTYKYIF

SEQ ID NO: 24852 - protein, 13 aa, Homo sapiens
  CDR3 for beta chain variable domain of TCR clone 12426 (TRBV7-2, TRBJ2-2)
CASSSRPTGELFF

SEQ ID NO: 24853 - protein, 21 aa, Homo sapiens
  CDR3 for alpha chain variable domain of TCR clone 12427 (TRAV8-3, )
CAVVTTRIPDIQNPDPAVYQL

SEQ ID NO: 24854 - protein, 14 aa, Homo sapiens
  CDR3 for beta chain variable domain of TCR clone 12427 (TRBV11-2, TRBJ2-7)
CASSPSTTSYEQYF

SEQ ID NO: 24855 - protein, 11 aa, Homo sapiens
  CDR3 for alpha chain variable domain of TCR clone 12428 (TRAV17, TRAJ9)
CATTGGFETIF

SEQ ID NO: 24856 - protein, 14 aa, Homo sapiens
  CDR3 for beta chain variable domain of TCR clone 12428 (TRBV7-9, TRBJ2-2)
CASSGLADTGELFF

SEQ ID NO: 24857 - protein, 17 aa, Homo sapiens
  CDR3 for alpha chain variable domain of TCR clone 12429 (TRAV17, TRAJ7)
CATLGRLAFGKGNQVVG

SEQ ID NO: 24858 - protein, 13 aa, Homo sapiens
  CDR3 for beta chain variable domain of TCR clone 12429 (TRBV12-4, TRBJ2-7)
CASSLERVREQYF

SEQ ID NO: 24859 - protein, 14 aa, Homo sapiens
  CDR3 for alpha chain variable domain of TCR clone 12430 (TRAV12-1, TRAJ32)
CVVRWKGCYKQAHL

SEQ ID NO: 24860 - protein, 13 aa, Homo sapiens
  CDR3 for beta chain variable domain of TCR clone 12430 (TRBV18, TRBJ2-7)
CASSPGRNYEQYF

SEQ ID NO: 24861 - protein, 14 aa, Homo sapiens
  CDR3 for alpha chain variable domain of TCR clone 12431 (TRAV23/DV6, )
CAADIQNPDPAVYQ

SEQ ID NO: 24862 - protein, 14 aa, Homo sapiens
  CDR3 for beta chain variable domain of TCR clone 12431 (TRBV5-7, TRBJ1-6)
CASSFAGHNSPLHF

SEQ ID NO: 24863 - protein, 14 aa, Homo sapiens
  CDR3 for alpha chain variable domain of TCR clone 12432 (TRAV38-2/DV8, TRAJ23)
CAYRKPNQGGKLIF

SEQ ID NO: 24864 - protein, 11 aa, Homo sapiens
  CDR3 for beta chain variable domain of TCR clone 12432 (TRBV19, TRBJ1-1)
CASSIGSEAFF

SEQ ID NO: 24865 - protein, 17 aa, Homo sapiens
  CDR3 for alpha chain variable domain of TCR clone 12433 (TRAV36/DV7, TRAJ52)
CAVAQRAGGTSYGKLTF

SEQ ID NO: 24866 - protein, 14 aa, Homo sapiens
  CDR3 for beta chain variable domain of TCR clone 12433 (TRBV20-1, TRBJ2-3)
CSARGGTSTDTQYF

SEQ ID NO: 24867 - protein, 17 aa, Homo sapiens
  CDR3 for alpha chain variable domain of TCR clone 12434 (TRAV13-1, TRAJ31)
CAPRDRLMFGDGTQLVV

SEQ ID NO: 24868 - protein, 13 aa, Homo sapiens
  CDR3 for beta chain variable domain of TCR clone 12434 (TRBV4-1, TRBJ2-1)
CASSQAGGDEQFF

SEQ ID NO: 24869 - protein, 16 aa, Homo sapiens
  CDR3 for alpha chain variable domain of TCR clone 12435 (TRAV4, TRAJ5)
CLVGPDHGHGQESTYF

SEQ ID NO: 24870 - protein, 17 aa, Homo sapiens
  CDR3 for beta chain variable domain of TCR clone 12435 (TRBV11-3, TRBJ2-1)
CASSLYPPGVEYNEQFF

SEQ ID NO: 24871 - protein, 15 aa, Homo sapiens
  CDR3 for alpha chain variable domain of TCR clone 12436 (TRAV26-1, TRAJ29)
CIVRVEGTGNTPLVF

SEQ ID NO: 24872 - protein, 15 aa, Homo sapiens
  CDR3 for beta chain variable domain of TCR clone 12436 (TRBV7-9, TRBJ1-5)
CASSQGHQPNQPQHF

SEQ ID NO: 24873 - protein, 14 aa, Homo sapiens
  CDR3 for alpha chain variable domain of TCR clone 12437 (TRAV8-2, TRAJ4)
CVLSPSGGYNKLIF

SEQ ID NO: 24874 - protein, 15 aa, Homo sapiens
  CDR3 for beta chain variable domain of TCR clone 12437 (TRBV4-1, TRBJ1-4)
CASSDTGGTNEKLFF

SEQ ID NO: 24875 - protein, 15 aa, Homo sapiens
  CDR3 for alpha chain variable domain of TCR clone 12438 (TRAV14/DV4, TRAJ12)
CAMREERDSSYKSIF

SEQ ID NO: 24876 - protein, 16 aa, Homo sapiens
  CDR3 for beta chain variable domain of TCR clone 12438 (TRBV9, TRBJ1-2)
CASSVELGGTGYGYTF

SEQ ID NO: 24877 - protein, 13 aa, Homo sapiens
  CDR3 for alpha chain variable domain of TCR clone 12439 (TRAV21, TRAJ27)
CAARPGNAGKSTF

SEQ ID NO: 24878 - protein, 14 aa, Homo sapiens
  CDR3 for beta chain variable domain of TCR clone 12439 (TRBV7-6, TRBJ2-3)
CASSLGTVTDTQHF

SEQ ID NO: 24879 - protein, 14 aa, Homo sapiens
  CDR3 for alpha chain variable domain of TCR clone 12440 (TRAV26-1, TRAJ34)
CIVRAAYNTDKLIF

SEQ ID NO: 24880 - protein, 15 aa, Homo sapiens
  CDR3 for beta chain variable domain of TCR clone 12440 (TRBV20-1, TRBJ2-7)
CSARVPAAYFYEQYF

SEQ ID NO: 24881 - protein, 11 aa, Homo sapiens
  CDR3 for alpha chain variable domain of TCR clone 12441 (TRAV2, TRAJ13)
CASGGYQKVTF

SEQ ID NO: 24882 - protein, 19 aa, Homo sapiens
  CDR3 for beta chain variable domain of TCR clone 12441 (TRBV23-1, TRBJ2-7)
CASGDRGLAGAPTSSTSGR

SEQ ID NO: 24883 - protein, 15 aa, Homo sapiens
  CDR3 for alpha chain variable domain of TCR clone 12442 (TRAV26-1, TRAJ29)
CIVRVEGSGNTPLVF

SEQ ID NO: 24884 - protein, 15 aa, Homo sapiens
  CDR3 for beta chain variable domain of TCR clone 12442 (TRBV7-9, TRBJ1-5)
CASSHGHQPNQPQHF

SEQ ID NO: 24885 - protein, 16 aa, Homo sapiens
  CDR3 for alpha chain variable domain of TCR clone 12443 (TRAV16, TRAJ4)
CALSRMFSVGYNKLIF

SEQ ID NO: 24886 - protein, 16 aa, Homo sapiens
  CDR3 for beta chain variable domain of TCR clone 12443 (TRBV24-1, TRBJ2-3)
CATSDPGTGATDTQYF

SEQ ID NO: 24887 - protein, 11 aa, Homo sapiens
  CDR3 for alpha chain variable domain of TCR clone 12444 (TRAV35, TRAJ30)
CAPGGDDKIIF

SEQ ID NO: 24888 - protein, 17 aa, Homo sapiens
  CDR3 for beta chain variable domain of TCR clone 12444 (TRBV7-6, TRBJ2-1)
CIAVPAAWGGGADEQFF

SEQ ID NO: 24889 - protein, 14 aa, Homo sapiens
  CDR3 for alpha chain variable domain of TCR clone 12445 (TRAV13-1, TRAJ44)
CAAKATGTASKLAF

SEQ ID NO: 24890 - protein, 14 aa, Homo sapiens
  CDR3 for beta chain variable domain of TCR clone 12445 (TRBV19, TRBJ2-2)
CASSTLHRSGELFF

SEQ ID NO: 24891 - protein, 14 aa, Homo sapiens
  CDR3 for alpha chain variable domain of TCR clone 12446 (TRAV12-2, TRAJ13)
CAVKKTGGYQKVTL

SEQ ID NO: 24892 - protein, 16 aa, Homo sapiens
  CDR3 for beta chain variable domain of TCR clone 12446 (TRBV2, TRBJ2-1)
CASRSPAGGKYNEQFF

SEQ ID NO: 24893 - protein, 12 aa, Homo sapiens
  CDR3 for alpha chain variable domain of TCR clone 12447 (TRAV12-3, TRAJ17)
CAMTLTGNKLTF

SEQ ID NO: 24894 - protein, 15 aa, Homo sapiens
  CDR3 for beta chain variable domain of TCR clone 12447 (TRBV7-3, TRBJ2-1)
CASSPTGGGEVEQFF

SEQ ID NO: 24895 - protein, 16 aa, Homo sapiens
  CDR3 for alpha chain variable domain of TCR clone 12448 (TRAV3, TRAJ37)
CAVRGKGSGNTGKLIL

SEQ ID NO: 24896 - protein, 13 aa, Homo sapiens
  CDR3 for beta chain variable domain of TCR clone 12448 (TRBV14, TRBJ2-7)
CASSQDRRYEQYF

SEQ ID NO: 24897 - protein, 14 aa, Homo sapiens
  CDR3 for alpha chain variable domain of TCR clone 12449 (TRAV12-1, TRAJ12)
CVVNDRDSSYKLIF

SEQ ID NO: 24898 - protein, 13 aa, Homo sapiens
  CDR3 for beta chain variable domain of TCR clone 12449 (TRBV7-3, TRBJ1-1)
CASSQDWGAEAFF

SEQ ID NO: 24899 - protein, 12 aa, Homo sapiens
  CDR3 for alpha chain variable domain of TCR clone 12450 (TRAV16, TRAJ56)
CAPTGANSKLTF

SEQ ID NO: 24900 - protein, 17 aa, Homo sapiens
  CDR3 for beta chain variable domain of TCR clone 12450 (TRBV27, TRBJ2-6)
CAGSLTGFASGANVLTF

SEQ ID NO: 24901 - protein, 11 aa, Homo sapiens
  CDR3 for alpha chain variable domain of TCR clone 12451 (TRAV21, TRAJ34)
CAVTNTGKLIF

SEQ ID NO: 24902 - protein, 12 aa, Homo sapiens
  CDR3 for beta chain variable domain of TCR clone 12451 (TRBV7-9, TRBJ1-1)
CASSLVRGEAFF

SEQ ID NO: 24903 - protein, 15 aa, Homo sapiens
  CDR3 for alpha chain variable domain of TCR clone 12452 (TRAV4, TRAJ39)
CLVGPNNNAGNMLTL

SEQ ID NO: 24904 - protein, 13 aa, Homo sapiens
  CDR3 for beta chain variable domain of TCR clone 12452 (TRBV11-2, TRBJ2-5)
CASSSTGEETQYF

SEQ ID NO: 24905 - protein, 12 aa, Homo sapiens
  CDR3 for alpha chain variable domain of TCR clone 12453 (TRAV16, TRAJ10)
CSRTGGGNKLTF

SEQ ID NO: 24906 - protein, 12 aa, Homo sapiens
  CDR3 for beta chain variable domain of TCR clone 12453 (TRBV14, TRBJ2-7)
CASSRLKGEQYF

SEQ ID NO: 24907 - protein, 13 aa, Homo sapiens
  CDR3 for alpha chain variable domain of TCR clone 12454 (TRAV24, TRAJ48)
CAFNILGNEKLTF

SEQ ID NO: 24908 - protein, 14 aa, Homo sapiens
  CDR3 for beta chain variable domain of TCR clone 12454 (TRBV5-1, TRBJ1-1)
CASSSTGEDTEAFF

SEQ ID NO: 24909 - protein, 13 aa, Homo sapiens
  CDR3 for alpha chain variable domain of TCR clone 12455 (TRAV1-1, TRAJ9)
CAAKNTGGFKTIF

SEQ ID NO: 24910 - protein, 17 aa, Homo sapiens
  CDR3 for beta chain variable domain of TCR clone 12455 (TRBV20-1, TRBJ2-1)
CSASSSGLAGSYNEQFF

SEQ ID NO: 24911 - protein, 14 aa, Homo sapiens
  CDR3 for alpha chain variable domain of TCR clone 12456 (TRAV14/DV4, TRAJ54)
CAMREAPGAQKLVF

SEQ ID NO: 24912 - protein, 15 aa, Homo sapiens
  CDR3 for beta chain variable domain of TCR clone 12456 (TRBV20-1, TRBJ2-7)
CSARDRVSGMDEQYF

SEQ ID NO: 24913 - protein, 13 aa, Homo sapiens
  CDR3 for alpha chain variable domain of TCR clone 12457 (TRAV21, TRAJ27)
CAARPGNAGKSIF

SEQ ID NO: 24914 - protein, 14 aa, Homo sapiens
  CDR3 for beta chain variable domain of TCR clone 12457 (TRBV7-6, TRBJ2-3)
CASSLGTVTDTQYF

SEQ ID NO: 24915 - protein, 11 aa, Homo sapiens
  CDR3 for alpha chain variable domain of TCR clone 12458 (TRAV2, TRAJ13)
CASGGYQKVTF

SEQ ID NO: 24916 - protein, 15 aa, Homo sapiens
  CDR3 for beta chain variable domain of TCR clone 12458 (TRBV3-1, TRBJ2-7)
CASSQVRQGAYEQYF

SEQ ID NO: 24917 - protein, 14 aa, Homo sapiens
  CDR3 for alpha chain variable domain of TCR clone 12459 (TRAV12-2, TRAJ40)
CAVKIPSGTYKYNF

SEQ ID NO: 24918 - protein, 14 aa, Homo sapiens
  CDR3 for beta chain variable domain of TCR clone 12459 (TRBV20-1, TRBJ1-1)
CSAQTRIGGTEAFF

SEQ ID NO: 24919 - protein, 16 aa, Homo sapiens
  CDR3 for alpha chain variable domain of TCR clone 12460 (TRAV3, TRAJ21)
CAVRDIERGNFNKFYF

SEQ ID NO: 24920 - protein, 15 aa, Homo sapiens
  CDR3 for beta chain variable domain of TCR clone 12460 (TRBV7-6, TRBJ2-5)
CASSKPTGPQETQYF

SEQ ID NO: 24921 - protein, 13 aa, Homo sapiens
  CDR3 for alpha chain variable domain of TCR clone 12461 (TRAV17, TRAJ26)
CATVDNYGQSFVF

SEQ ID NO: 24922 - protein, 16 aa, Homo sapiens
  CDR3 for beta chain variable domain of TCR clone 12461 (TRBV2, TRBJ2-1)
CASSVGGSLSYNEQFF

SEQ ID NO: 24923 - protein, 14 aa, Homo sapiens
  CDR3 for alpha chain variable domain of TCR clone 12462 (TRAV12-2, TRAJ13)
CAVKKTGGYQKVTF

SEQ ID NO: 24924 - protein, 15 aa, Homo sapiens
  CDR3 for beta chain variable domain of TCR clone 12462 (TRBV7-9, TRBJ1-6)
CASSSPGRGNSPLHF

SEQ ID NO: 24925 - protein, 18 aa, Homo sapiens
  CDR3 for alpha chain variable domain of TCR clone 12463 (TRAV21, TRAJ52)
CAVRPSPEGGTSYGKLTF

SEQ ID NO: 24926 - protein, 17 aa, Homo sapiens
  CDR3 for beta chain variable domain of TCR clone 12463 (TRBV13, TRBJ2-3)
CASSLSRVAGGRNTQYF

SEQ ID NO: 24927 - protein, 15 aa, Homo sapiens
  CDR3 for alpha chain variable domain of TCR clone 12464 (TRAV3, TRAJ5)
CAVRDGKTGRRALTF

SEQ ID NO: 24928 - protein, 15 aa, Homo sapiens
  CDR3 for beta chain variable domain of TCR clone 12464 (TRBV7-8, TRBJ2-1)
CASSLADSLYNEQFF

SEQ ID NO: 24929 - protein, 11 aa, Homo sapiens
  CDR3 for alpha chain variable domain of TCR clone 12465 (TRAV1-1, TRAJ23)
CALRQGGKLIF

SEQ ID NO: 24930 - protein, 20 aa, Homo sapiens
  CDR3 for beta chain variable domain of TCR clone 12465 (TRBV7-8, TRBJ2-2)
CASSHLFPGPTIHITGELFF

SEQ ID NO: 24931 - protein, 14 aa, Homo sapiens
  CDR3 for alpha chain variable domain of TCR clone 12466 (TRAV17, TRAJ34)
CATDSLEGTDKPIF

SEQ ID NO: 24932 - protein, 13 aa, Homo sapiens
  CDR3 for beta chain variable domain of TCR clone 12466 (TRBV11-2, TRBJ2-7)
CASSGTRPYEQYF

SEQ ID NO: 24933 - protein, 13 aa, Homo sapiens
  CDR3 for alpha chain variable domain of TCR clone 12467 (TRAV27, TRAJ45)
CRSSGGGDDGLTF

SEQ ID NO: 24934 - protein, 17 aa, Homo sapiens
  CDR3 for beta chain variable domain of TCR clone 12467 (TRBV11-2, TRBJ2-1)
CASSLYPPGVEYNEQFF

SEQ ID NO: 24935 - protein, 14 aa, Homo sapiens
  CDR3 for alpha chain variable domain of TCR clone 12468 (TRAV1-2, TRAJ16)
CAVNRFSDGQKLLF

SEQ ID NO: 24936 - protein, 17 aa, Homo sapiens
  CDR3 for beta chain variable domain of TCR clone 12468 (TRBV4-1, TRBJ1-4)
CASSQEGPRGVEEKLFF

SEQ ID NO: 24937 - protein, 15 aa, Homo sapiens
  CDR3 for alpha chain variable domain of TCR clone 12469 (TRAV29/DV5, TRAJ48)
CAASASNFGNEKLTF

SEQ ID NO: 24938 - protein, 16 aa, Homo sapiens
  CDR3 for beta chain variable domain of TCR clone 12469 (TRBV11-2, TRBJ2-1)
CASARGSYSHHNEQFF

SEQ ID NO: 24939 - protein, 11 aa, Homo sapiens
  CDR3 for alpha chain variable domain of TCR clone 12470 (TRAV3, TRAJ21)
CAVGNFNKFYF

SEQ ID NO: 24940 - protein, 16 aa, Homo sapiens
  CDR3 for beta chain variable domain of TCR clone 12470 (TRBV19, TRBJ2-1)
CDSSKAGPSSYNEQFF

SEQ ID NO: 24941 - protein, 14 aa, Homo sapiens
  CDR3 for alpha chain variable domain of TCR clone 12471 (TRAV26-2, TRAJ38)
CILYNAGNNRKLIW

SEQ ID NO: 24942 - protein, 15 aa, Homo sapiens
  CDR3 for beta chain variable domain of TCR clone 12471 (TRBV11-3, TRBJ2-3)
CASLKDGREGDTQYF

SEQ ID NO: 24943 - protein, 14 aa, Homo sapiens
  CDR3 for alpha chain variable domain of TCR clone 12472 (TRAV9-2, TRAJ39)
CALYIYNAGNMLTF

SEQ ID NO: 24944 - protein, 15 aa, Homo sapiens
  CDR3 for beta chain variable domain of TCR clone 12472 (TRBV5-1, TRBJ2-7)
CASSLDLTSSYEQYF

SEQ ID NO: 24945 - protein, 16 aa, Homo sapiens
  CDR3 for alpha chain variable domain of TCR clone 12473 (TRAV27, TRAJ13)
CAGAKSDSGGYQKVTF

SEQ ID NO: 24946 - protein, 15 aa, Homo sapiens
  CDR3 for beta chain variable domain of TCR clone 12473 (TRBV9, TRBJ1-6)
CASSVAGTGDSPLHF

SEQ ID NO: 24947 - protein, 15 aa, Homo sapiens
  CDR3 for alpha chain variable domain of TCR clone 12474 (TRAV14/DV4, TRAJ12)
CAMREERDSSYKLIF

SEQ ID NO: 24948 - protein, 15 aa, Homo sapiens
  CDR3 for beta chain variable domain of TCR clone 12474 (TRBV7-2, TRBJ2-1)
CASSLVAGGHNEQFF

SEQ ID NO: 24949 - protein, 13 aa, Homo sapiens
  CDR3 for alpha chain variable domain of TCR clone 12475 (TRAV8-2, TRAJ26)
CVVSLGYGQNFVF

SEQ ID NO: 24950 - protein, 15 aa, Homo sapiens
  CDR3 for beta chain variable domain of TCR clone 12475 (TRBV11-2, TRBJ2-3)
CASSPGGGATDTQYF

SEQ ID NO: 24951 - protein, 15 aa, Homo sapiens
  CDR3 for alpha chain variable domain of TCR clone 12476 (TRAV26-1, TRAJ29)
CIVRVEGSGNTPLVF

SEQ ID NO: 24952 - protein, 15 aa, Homo sapiens
  CDR3 for beta chain variable domain of TCR clone 12476 (TRBV7-9, TRBJ1-5)
CASSQGHKPNQPQHF

SEQ ID NO: 24953 - protein, 13 aa, Homo sapiens
  CDR3 for alpha chain variable domain of TCR clone 12477 (TRAV21, TRAJ27)
CAARPGNAGKSAL

SEQ ID NO: 24954 - protein, 14 aa, Homo sapiens
  CDR3 for beta chain variable domain of TCR clone 12477 (TRBV7-6, TRBJ2-3)
CASSLGTVTDTQYF

SEQ ID NO: 24955 - protein, 23 aa, Homo sapiens
  CDR3 for alpha chain variable domain of TCR clone 12478 (TRAV12-2, TRAJ22)
CAVSFRVHPGPPIVSGSARQLTF

SEQ ID NO: 24956 - protein, 13 aa, Homo sapiens
  CDR3 for beta chain variable domain of TCR clone 12478 (TRBV12-4, TRBJ1-2)
CASSLDSNDGYTF

SEQ ID NO: 24957 - protein, 14 aa, Homo sapiens
  CDR3 for alpha chain variable domain of TCR clone 12479 (TRAV1-2, TRAJ8)
CAVREDTGFQKLVF

SEQ ID NO: 24958 - protein, 13 aa, Homo sapiens
  CDR3 for beta chain variable domain of TCR clone 12479 (TRBV3-1, TRBJ2-2)
CASLARGSGELFF

SEQ ID NO: 24959 - protein, 10 aa, Homo sapiens
  CDR3 for alpha chain variable domain of TCR clone 12480 (TRAV8-4, TRAJ43)
CAVSADDMRF

SEQ ID NO: 24960 - protein, 15 aa, Homo sapiens
  CDR3 for beta chain variable domain of TCR clone 12480 (TRBV5-1, TRBJ2-3)
CASSVTAGSTDTQYF

SEQ ID NO: 24961 - protein, 15 aa, Homo sapiens
  CDR3 for alpha chain variable domain of TCR clone 12481 (TRAV25, TRAJ52)
CAGRPGGTSYGKLTF

SEQ ID NO: 24962 - protein, 17 aa, Homo sapiens
  CDR3 for beta chain variable domain of TCR clone 12481 (TRBV7-8, TRBJ2-6)
RASSAGTGGAGANVLTF

SEQ ID NO: 24963 - protein, 13 aa, Homo sapiens
  CDR3 for alpha chain variable domain of TCR clone 12482 (TRAV22, TRAJ29)
CAVGGSGNTPLVF

SEQ ID NO: 24964 - protein, 12 aa, Homo sapiens
  CDR3 for beta chain variable domain of TCR clone 12482 (TRBV11-2, TRBJ2-2)
CASSLGGGELFF

SEQ ID NO: 24965 - protein, 12 aa, Homo sapiens
  CDR3 for alpha chain variable domain of TCR clone 12483 (TRAV36/DV7, TRAJ54)
CAVVRGAQKLVF

SEQ ID NO: 24966 - protein, 14 aa, Homo sapiens
  CDR3 for beta chain variable domain of TCR clone 12483 (TRBV7-3, TRBJ1-1)
CASSLKGGSTEAFF

SEQ ID NO: 24967 - protein, 17 aa, Homo sapiens
  CDR3 for alpha chain variable domain of TCR clone 12484 (TRAV3, TRAJ6)
CAVRDGPWAGGSYIPTF

SEQ ID NO: 24968 - protein, 14 aa, Homo sapiens
  CDR3 for beta chain variable domain of TCR clone 12484 (TRBV7-2, TRBJ2-7)
CASSPKTSFYEQYF

SEQ ID NO: 24969 - protein, 14 aa, Homo sapiens
  CDR3 for alpha chain variable domain of TCR clone 12485 (TRAV38-1, TRAJ35)
CAFLTIGFGNVLHC

SEQ ID NO: 24970 - protein, 17 aa, Homo sapiens
  CDR3 for beta chain variable domain of TCR clone 12485 (TRBV28, TRBJ1-1)
CASSGDLRTESNTEAFF

SEQ ID NO: 24971 - protein, 12 aa, Homo sapiens
  CDR3 for alpha chain variable domain of TCR clone 12486 (TRAV17, TRAJ20)
CATDGDDYKLSF

SEQ ID NO: 24972 - protein, 16 aa, Homo sapiens
  CDR3 for beta chain variable domain of TCR clone 12486 (TRBV20-1, TRBJ2-1)
CSALTWTSGSYNEQFF

SEQ ID NO: 24973 - protein, 11 aa, Homo sapiens
  CDR3 for alpha chain variable domain of TCR clone 12487 (TRAV21, TRAJ11)
CAVNGYSTLAF

SEQ ID NO: 24974 - protein, 11 aa, Homo sapiens
  CDR3 for beta chain variable domain of TCR clone 12487 (TRBV19, TRBJ1-1)
CASSIGSEAFF

SEQ ID NO: 24975 - protein, 15 aa, Homo sapiens
  CDR3 for alpha chain variable domain of TCR clone 12488 (TRAV27, TRAJ38)
CAARSNAGNNRKLIW

SEQ ID NO: 24976 - protein, 13 aa, Homo sapiens
  CDR3 for beta chain variable domain of TCR clone 12488 (TRBV12-5, TRBJ2-3)
CASGDRQSDTQYF

SEQ ID NO: 24977 - protein, 13 aa, Homo sapiens
  CDR3 for alpha chain variable domain of TCR clone 12489 (TRAV21, TRAJ27)
CAARPGNVGKSTF

SEQ ID NO: 24978 - protein, 14 aa, Homo sapiens
  CDR3 for beta chain variable domain of TCR clone 12489 (TRBV7-6, TRBJ2-3)
CASSLGTVTDTQYF

SEQ ID NO: 24979 - protein, 11 aa, Homo sapiens
  CDR3 for alpha chain variable domain of TCR clone 12490 (TRAV2, TRAJ33)
CAVEGNYQLIW

SEQ ID NO: 24980 - protein, 15 aa, Homo sapiens
  CDR3 for beta chain variable domain of TCR clone 12490 (TRBV19, TRBJ1-1)
CASTSGQIQNTEAFF

SEQ ID NO: 24981 - protein, 15 aa, Homo sapiens
  CDR3 for alpha chain variable domain of TCR clone 12491 (TRAV12-3, TRAJ6)
CAMSATTGGSYIHTF

SEQ ID NO: 24982 - protein, 16 aa, Homo sapiens
  CDR3 for beta chain variable domain of TCR clone 12491 (TRBV20-1, TRBJ1-2)
CSASMGQGVANYGYTF

SEQ ID NO: 24983 - protein, 14 aa, Homo sapiens
  CDR3 for alpha chain variable domain of TCR clone 12492 (TRAV8-3, TRAJ15)
CAVGRHQAGTALIF

SEQ ID NO: 24984 - protein, 15 aa, Homo sapiens
  CDR3 for beta chain variable domain of TCR clone 12492 (TRBV27, TRBJ2-1)
CASSNGGGSPNEQFF

SEQ ID NO: 24985 - protein, 13 aa, Homo sapiens
  CDR3 for alpha chain variable domain of TCR clone 12493 (TRAV13-2, TRAJ48)
CAEMDFGNEKLAF

SEQ ID NO: 24986 - protein, 12 aa, Homo sapiens
  CDR3 for beta chain variable domain of TCR clone 12493 (TRBV11-2, TRBJ2-2)
CASSLGGGELFF

SEQ ID NO: 24987 - protein, 14 aa, Homo sapiens
  CDR3 for alpha chain variable domain of TCR clone 12494 (TRAV26-1, TRAJ34)
CIVRVAYNTAKLIF

SEQ ID NO: 24988 - protein, 15 aa, Homo sapiens
  CDR3 for beta chain variable domain of TCR clone 12494 (TRBV20-1, TRBJ2-7)
CSARVPAAYFYEQYF

SEQ ID NO: 24989 - protein, 14 aa, Homo sapiens
  CDR3 for alpha chain variable domain of TCR clone 12495 (TRAV17, TRAJ22)
CATSPSGSARQLTF

SEQ ID NO: 24990 - protein, 15 aa, Homo sapiens
  CDR3 for beta chain variable domain of TCR clone 12495 (TRBV4-1, TRBJ2-5)
CASSQWDLYQGTQYF

SEQ ID NO: 24991 - protein, 16 aa, Homo sapiens
  CDR3 for alpha chain variable domain of TCR clone 12496 (TRAV23/DV6, TRAJ9)
CAASIGGNTGGFKTIF

SEQ ID NO: 24992 - protein, 15 aa, Homo sapiens
  CDR3 for beta chain variable domain of TCR clone 12496 (TRBV20-1, TRBJ2-5)
CSATRTSGSLETQYF

SEQ ID NO: 24993 - protein, 14 aa, Homo sapiens
  CDR3 for alpha chain variable domain of TCR clone 12497 (TRAV26-1, TRAJ38)
CIADNAGNNRKLIG

SEQ ID NO: 24994 - protein, 13 aa, Homo sapiens
  CDR3 for beta chain variable domain of TCR clone 12497 (TRBV20-1, TRBJ1-1)
CSARGGGNTEAFF

SEQ ID NO: 24995 - protein, 15 aa, Homo sapiens
  CDR3 for alpha chain variable domain of TCR clone 12498 (TRAV12-3, TRAJ6)
CAISATTGGSYIPTF

SEQ ID NO: 24996 - protein, 16 aa, Homo sapiens
  CDR3 for beta chain variable domain of TCR clone 12498 (TRBV20-1, TRBJ1-2)
CSASMGQGVANYGYTF

SEQ ID NO: 24997 - protein, 17 aa, Homo sapiens
  CDR3 for alpha chain variable domain of TCR clone 12499 (TRAV26-2, TRAJ28)
CILRPLLIVAGSYQLTF

SEQ ID NO: 24998 - protein, 14 aa, Homo sapiens
  CDR3 for beta chain variable domain of TCR clone 12499 (TRBV7-2, TRBJ2-7)
CASSPKTSFYEQYF

SEQ ID NO: 24999 - protein, 14 aa, Homo sapiens
  CDR3 for alpha chain variable domain of TCR clone 12500 (TRAV2, TRAJ37)
CAVDFTSNTGKLIF

SEQ ID NO: 25000 - protein, 15 aa, Homo sapiens
  CDR3 for beta chain variable domain of TCR clone 12500 (TRBV20-1, TRBJ1-1)
CSAGRGVTGNTEAFF

SEQ ID NO: 25001 - protein, 11 aa, Homo sapiens
  CDR3 for alpha chain variable domain of TCR clone 12501 (TRAV1-2, TRAJ40)
CAVPGTYKYIF

SEQ ID NO: 25002 - protein, 14 aa, Homo sapiens
  CDR3 for beta chain variable domain of TCR clone 12501 (TRBV5-1, TRBJ2-7)
CASSRGESLYEQYF

SEQ ID NO: 25003 - protein, 16 aa, Homo sapiens
  CDR3 for alpha chain variable domain of TCR clone 12502 (TRAV12-3, TRAJ53)
CAMSPGSGGSNCKLTF

SEQ ID NO: 25004 - protein, 11 aa, Homo sapiens
  CDR3 for beta chain variable domain of TCR clone 12502 (TRBV29-1, TRBJ2-5)
CSEDRTGTQYF

SEQ ID NO: 25005 - protein, 10 aa, Homo sapiens
  CDR3 for alpha chain variable domain of TCR clone 12503 (TRAV23/DV6, TRAJ9)
CAASIGGNTG

SEQ ID NO: 25006 - protein, 14 aa, Homo sapiens
  CDR3 for beta chain variable domain of TCR clone 12503 (TRBV9, TRBJ2-7)
CASSVGVGSYEQYF

SEQ ID NO: 25007 - protein, 14 aa, Homo sapiens
  CDR3 for alpha chain variable domain of TCR clone 12504 (TRAV2, TRAJ37)
CAVDFTRNTGKLIF

SEQ ID NO: 25008 - protein, 15 aa, Homo sapiens
  CDR3 for beta chain variable domain of TCR clone 12504 (TRBV20-1, TRBJ1-1)
CSASRGVTGNTEAFF

SEQ ID NO: 25009 - protein, 15 aa, Homo sapiens
  CDR3 for alpha chain variable domain of TCR clone 12505 (TRAV17, TRAJ45)
CATAYSGGGADGLTF

SEQ ID NO: 25010 - protein, 17 aa, Homo sapiens
  CDR3 for beta chain variable domain of TCR clone 12505 (TRBV5-1, TRBJ1-5)
CASSLVGREEGNQPQHF

SEQ ID NO: 25011 - protein, 14 aa, Homo sapiens
  CDR3 for alpha chain variable domain of TCR clone 12506 (TRAV2, TRAJ23)
CAVGLRNQGGKLIF

SEQ ID NO: 25012 - protein, 15 aa, Homo sapiens
  CDR3 for beta chain variable domain of TCR clone 12506 (TRBV10-3, TRBJ2-1)
CAIRNGTSGHNEQFF

SEQ ID NO: 25013 - protein, 13 aa, Homo sapiens
  CDR3 for alpha chain variable domain of TCR clone 12507 (TRAV26-2, TRAJ43)
CILRAVNNNDMRF

SEQ ID NO: 25014 - protein, 15 aa, Homo sapiens
  CDR3 for beta chain variable domain of TCR clone 12507 (TRBV7-2, TRBJ2-1)
CASTHGAGIYNEQFF

SEQ ID NO: 25015 - protein, 12 aa, Homo sapiens
  CDR3 for alpha chain variable domain of TCR clone 12508 (TRAV27, TRAJ35)
CAGADFGNVLHF

SEQ ID NO: 25016 - protein, 16 aa, Homo sapiens
  CDR3 for beta chain variable domain of TCR clone 12508 (TRBV6-1, TRBJ2-1)
CASILRQGSSYNEQFF

SEQ ID NO: 25017 - protein, 14 aa, Homo sapiens
  CDR3 for alpha chain variable domain of TCR clone 12509 (TRAV1-2, TRAJ8)
CAVREDTGFQKLVV

SEQ ID NO: 25018 - protein, 15 aa, Homo sapiens
  CDR3 for beta chain variable domain of TCR clone 12509 (TRBV6-3, TRBJ2-7)
CASSSPGTVFYEQYF

SEQ ID NO: 25019 - protein, 17 aa, Homo sapiens
  CDR3 for alpha chain variable domain of TCR clone 12510 (TRAV3, TRAJ42)
CAVRDRDYGGSQGNLIF

SEQ ID NO: 25020 - protein, 14 aa, Homo sapiens
  CDR3 for beta chain variable domain of TCR clone 12510 (TRBV7-2, TRBJ2-7)
CASSPKTSFYEQYF

SEQ ID NO: 25021 - protein, 14 aa, Homo sapiens
  CDR3 for alpha chain variable domain of TCR clone 12511 (TRAV1-2, TRAJ8)
CAVREDTGFQKLVF

SEQ ID NO: 25022 - protein, 13 aa, Homo sapiens
  CDR3 for beta chain variable domain of TCR clone 12511 (TRBV19, TRBJ1-2)
CASSVPEQDGYTF

SEQ ID NO: 25023 - protein, 14 aa, Homo sapiens
  CDR3 for alpha chain variable domain of TCR clone 12512 (TRAV1-2, TRAJ16)
CAANRFSDGQKLLF

SEQ ID NO: 25024 - protein, 15 aa, Homo sapiens
  CDR3 for beta chain variable domain of TCR clone 12512 (TRBV7-9, TRBJ1-6)
CASSSPGRGNSPLHF

SEQ ID NO: 25025 - protein, 15 aa, Homo sapiens
  CDR3 for alpha chain variable domain of TCR clone 12513 (TRAV26-1, TRAJ29)
CIVRVEGSGTTPLVF

SEQ ID NO: 25026 - protein, 15 aa, Homo sapiens
  CDR3 for beta chain variable domain of TCR clone 12513 (TRBV7-9, TRBJ1-5)
CASSQGHQPNQPQHF

SEQ ID NO: 25027 - protein, 14 aa, Homo sapiens
  CDR3 for alpha chain variable domain of TCR clone 12514 (TRAV35, TRAJ22)
CAGLRPGSASQLTF

SEQ ID NO: 25028 - protein, 15 aa, Homo sapiens
  CDR3 for beta chain variable domain of TCR clone 12514 (TRBV12-4, TRBJ2-5)
CASSPPTGLQETQYF

SEQ ID NO: 25029 - protein, 13 aa, Homo sapiens
  CDR3 for alpha chain variable domain of TCR clone 12515 (TRAV12-2, TRAJ20)
CAVYPSNDYKLSF

SEQ ID NO: 25030 - protein, 15 aa, Homo sapiens
  CDR3 for beta chain variable domain of TCR clone 12515 (TRBV27, TRBJ2-5)
CASSLCPRGGETQYF

SEQ ID NO: 25031 - protein, 13 aa, Homo sapiens
  CDR3 for alpha chain variable domain of TCR clone 12516 (TRAV16, TRAJ54)
CALMVQGAQKLVF

SEQ ID NO: 25032 - protein, 12 aa, Homo sapiens
  CDR3 for beta chain variable domain of TCR clone 12516 (TRBV18, TRBJ2-7)
CASLTAMGEQYF

SEQ ID NO: 25033 - protein, 17 aa, Homo sapiens
  CDR3 for alpha chain variable domain of TCR clone 12517 (TRAV8-6, TRAJ58)
CAVSSWVGETSGSRLTF

SEQ ID NO: 25034 - protein, 14 aa, Homo sapiens
  CDR3 for beta chain variable domain of TCR clone 12517 (TRBV4-2, TRBJ2-1)
CASGLDRAYNEQSF

SEQ ID NO: 25035 - protein, 13 aa, Homo sapiens
  CDR3 for alpha chain variable domain of TCR clone 12518 (TRAV21, TRAJ20)
CAVGLRVDYKLSF

SEQ ID NO: 25036 - protein, 16 aa, Homo sapiens
  CDR3 for beta chain variable domain of TCR clone 12518 (TRBV7-3, TRBJ2-2)
CASSLKRGTLSGELFF

SEQ ID NO: 25037 - protein, 12 aa, Homo sapiens
  CDR3 for alpha chain variable domain of TCR clone 12519 (TRAV2, TRAJ9)
CAVGAGGFKTIF

SEQ ID NO: 25038 - protein, 16 aa, Homo sapiens
  CDR3 for beta chain variable domain of TCR clone 12519 (TRBV13, TRBJ2-2)
CASSPRTGEHTGELSF

SEQ ID NO: 25039 - protein, 14 aa, Homo sapiens
  CDR3 for alpha chain variable domain of TCR clone 12520 (TRAV26-1, TRAJ29)
CIVRVEPGNTPLVF

SEQ ID NO: 25040 - protein, 15 aa, Homo sapiens
  CDR3 for beta chain variable domain of TCR clone 12520 (TRBV7-6, TRBJ1-4)
CASSLGAGAGEKLFF

SEQ ID NO: 25041 - protein, 14 aa, Homo sapiens
  CDR3 for alpha chain variable domain of TCR clone 12521 (TRAV26-1, TRAJ38)
CIADNAGNNRKLVW

SEQ ID NO: 25042 - protein, 13 aa, Homo sapiens
  CDR3 for beta chain variable domain of TCR clone 12521 (TRBV20-1, TRBJ1-1)
CSARGGGNTEAFF

SEQ ID NO: 25043 - protein, 14 aa, Homo sapiens
  CDR3 for alpha chain variable domain of TCR clone 12522 (TRAV1-2, TRAJ16)
CAVNRFSDGQKLLS

SEQ ID NO: 25044 - protein, 15 aa, Homo sapiens
  CDR3 for beta chain variable domain of TCR clone 12522 (TRBV9, TRBJ1-6)
CASSVAGTGDSPLHF

SEQ ID NO: 25045 - protein, 10 aa, Homo sapiens
  CDR3 for alpha chain variable domain of TCR clone 12523 (TRAV23/DV6, TRAJ57)
CAASSTLSQG

SEQ ID NO: 25046 - protein, 11 aa, Homo sapiens
  CDR3 for beta chain variable domain of TCR clone 12523 (TRBV25-1, TRBJ1-1)
PTWGGNTEAFF

SEQ ID NO: 25047 - protein, 14 aa, Homo sapiens
  CDR3 for alpha chain variable domain of TCR clone 12524 (TRAV13-1, TRAJ9)
CAASALTGGFKTIF

SEQ ID NO: 25048 - protein, 14 aa, Homo sapiens
  CDR3 for beta chain variable domain of TCR clone 12524 (TRBV12-5, TRBJ2-5)
CASGSRTHQETQYF

SEQ ID NO: 25049 - protein, 15 aa, Homo sapiens
  CDR3 for alpha chain variable domain of TCR clone 12525 (TRAV3, TRAJ47)
CAVRDIGEYGNKLGF

SEQ ID NO: 25050 - protein, 14 aa, Homo sapiens
  CDR3 for beta chain variable domain of TCR clone 12525 (TRBV13, TRBJ2-5)
CASSLERVGETQYF

SEQ ID NO: 25051 - protein, 14 aa, Homo sapiens
  CDR3 for alpha chain variable domain of TCR clone 12526 (TRAV12-1, TRAJ3)
CVVILYSSASKIIF

SEQ ID NO: 25052 - protein, 12 aa, Homo sapiens
  CDR3 for beta chain variable domain of TCR clone 12526 (TRBV11-2, TRBJ2-2)
CASSLPTGELFF

SEQ ID NO: 25053 - protein, 15 aa, Homo sapiens
  CDR3 for alpha chain variable domain of TCR clone 12527 (TRAV26-2, TRAJ50)
CILRDEETSYDKVIF

SEQ ID NO: 25054 - protein, 13 aa, Homo sapiens
  CDR3 for beta chain variable domain of TCR clone 12527 (TRBV7-3, TRBJ1-1)
CASSQDWGAEAFF

SEQ ID NO: 25055 - protein, 15 aa, Homo sapiens
  CDR3 for alpha chain variable domain of TCR clone 12528 (TRAV3, TRAJ27)
CAVRDPLTNAGKSTF

SEQ ID NO: 25056 - protein, 14 aa, Homo sapiens
  CDR3 for beta chain variable domain of TCR clone 12528 (TRBV5-7, TRBJ1-5)
CASSRTGGGQPQHF

SEQ ID NO: 25057 - protein, 11 aa, Homo sapiens
  CDR3 for alpha chain variable domain of TCR clone 12529 (TRAV17, TRAJ9)
CGFTGGFRTIF

SEQ ID NO: 25058 - protein, 14 aa, Homo sapiens
  CDR3 for beta chain variable domain of TCR clone 12529 (TRBV7-9, TRBJ2-2)
CASSLVQDTGELFF

SEQ ID NO: 25059 - protein, 15 aa, Homo sapiens
  CDR3 for alpha chain variable domain of TCR clone 12530 (TRAV23/DV6, TRAJ39)
CAASMGNNAGNMLTF

SEQ ID NO: 25060 - protein, 17 aa, Homo sapiens
  CDR3 for beta chain variable domain of TCR clone 12530 (TRBV28, TRBJ2-1)
CASSAPWGTPSYNEQFF

SEQ ID NO: 25061 - protein, 12 aa, Homo sapiens
  CDR3 for alpha chain variable domain of TCR clone 12531 (TRAV2, TRAJ9)
CAVWAGGFKTIF

SEQ ID NO: 25062 - protein, 16 aa, Homo sapiens
  CDR3 for beta chain variable domain of TCR clone 12531 (TRBV13, TRBJ2-2)
CASSPRTGEHTGELFF

SEQ ID NO: 25063 - protein, 15 aa, Homo sapiens
  CDR3 for alpha chain variable domain of TCR clone 12532 (TRAV17, TRAJ57)
CATGPSQGGSEQLVF

SEQ ID NO: 25064 - protein, 16 aa, Homo sapiens
  CDR3 for beta chain variable domain of TCR clone 12532 (TRBV12-4, TRBJ1-5)
CASSRPVGGSNQPQHF

SEQ ID NO: 25065 - protein, 15 aa, Homo sapiens
  CDR3 for alpha chain variable domain of TCR clone 12533 (TRAV4, TRAJ39)
CLVGPNNNAGNMPTF

SEQ ID NO: 25066 - protein, 13 aa, Homo sapiens
  CDR3 for beta chain variable domain of TCR clone 12533 (TRBV11-2, TRBJ2-5)
CASSSTGEETQYF

SEQ ID NO: 25067 - protein, 13 aa, Homo sapiens
  CDR3 for alpha chain variable domain of TCR clone 12534 (TRAV1-1, TRAJ11)
CAVLNSGYSTLTF

SEQ ID NO: 25068 - protein, 14 aa, Homo sapiens
  CDR3 for beta chain variable domain of TCR clone 12534 (TRBV4-1, TRBJ2-2)
CASSQAVNTGELFF

SEQ ID NO: 25069 - protein, 10 aa, Homo sapiens
  CDR3 for alpha chain variable domain of TCR clone 12535 (TRAV23/DV6, TRAJ57)
CAASSTLSQG

SEQ ID NO: 25070 - protein, 15 aa, Homo sapiens
  CDR3 for beta chain variable domain of TCR clone 12535 (TRBV11-2, TRBJ2-1)
CASSLGTSGLNEQFF

SEQ ID NO: 25071 - protein, 14 aa, Homo sapiens
  CDR3 for alpha chain variable domain of TCR clone 12536 (TRAV12-2, TRAJ29)
CAVRRNSGNTPLVF

SEQ ID NO: 25072 - protein, 14 aa, Homo sapiens
  CDR3 for beta chain variable domain of TCR clone 12536 (TRBV23-1, TRBJ2-7)
CASSQWGQKYEQYF

SEQ ID NO: 25073 - protein, 15 aa, Homo sapiens
  CDR3 for alpha chain variable domain of TCR clone 12537 (TRAV3, TRAJ3)
CAVRDRDSSASKIIF

SEQ ID NO: 25074 - protein, 18 aa, Homo sapiens
  CDR3 for beta chain variable domain of TCR clone 12537 (TRBV25-1, TRBJ1-2)
CASSGLQNGQGLIFGCTF

SEQ ID NO: 25075 - protein, 14 aa, Homo sapiens
  CDR3 for alpha chain variable domain of TCR clone 12538 (TRAV26-1, TRAJ38)
CIADNAGKNRKLIW

SEQ ID NO: 25076 - protein, 13 aa, Homo sapiens
  CDR3 for beta chain variable domain of TCR clone 12538 (TRBV20-1, TRBJ1-1)
CSARGGGNTEAFF

SEQ ID NO: 25077 - protein, 14 aa, Homo sapiens
  CDR3 for alpha chain variable domain of TCR clone 12539 (TRAV8-2, TRAJ4)
CAVSPSGGYNKLIF

SEQ ID NO: 25078 - protein, 15 aa, Homo sapiens
  CDR3 for beta chain variable domain of TCR clone 12539 (TRBV4-1, TRBJ1-4)
CASSDTGGTNEKLFF

SEQ ID NO: 25079 - protein, 15 aa, Homo sapiens
  CDR3 for alpha chain variable domain of TCR clone 12540 (TRAV2, TRAJ9)
CAVEDRGTGGFKAIF

SEQ ID NO: 25080 - protein, 16 aa, Homo sapiens
  CDR3 for beta chain variable domain of TCR clone 12540 (TRBV24-1, TRBJ2-3)
CATSDPGTGATDTQYF

SEQ ID NO: 25081 - protein, 15 aa, Homo sapiens
  CDR3 for alpha chain variable domain of TCR clone 12541 (TRAV34, TRAJ38)
CGADFTPGDNRKLIW

SEQ ID NO: 25082 - protein, 16 aa, Homo sapiens
  CDR3 for beta chain variable domain of TCR clone 12541 (TRBV12-5, TRBJ2-5)
CASGPRTSGNQETQYF

SEQ ID NO: 25083 - protein, 14 aa, Homo sapiens
  CDR3 for alpha chain variable domain of TCR clone 12542 (TRAV29/DV5, TRAJ36)
CAARRKTGANNLFF

SEQ ID NO: 25084 - protein, 15 aa, Homo sapiens
  CDR3 for beta chain variable domain of TCR clone 12542 (TRBV27, TRBJ2-1)
CASSNGGGSSNEQFF

SEQ ID NO: 25085 - protein, 15 aa, Homo sapiens
  CDR3 for alpha chain variable domain of TCR clone 12543 (TRAV8-1, TRAJ8)
CAVNAMNTGFQKLVF

SEQ ID NO: 25086 - protein, 15 aa, Homo sapiens
  CDR3 for beta chain variable domain of TCR clone 12543 (TRBV5-8, TRBJ1-1)
CASSFSGTSLKGAFF

SEQ ID NO: 25087 - protein, 13 aa, Homo sapiens
  CDR3 for alpha chain variable domain of TCR clone 12544 (TRAV5, TRAJ13)
CAESLGGYQKVTF

SEQ ID NO: 25088 - protein, 16 aa, Homo sapiens
  CDR3 for beta chain variable domain of TCR clone 12544 (TRBV11-2, TRBJ2-3)
CASSSRTSGGAGTQYF

SEQ ID NO: 25089 - protein, 10 aa, Homo sapiens
  CDR3 for alpha chain variable domain of TCR clone 12545 (TRAV36/DV7, TRAJ48)
CAVGNEKLTF

SEQ ID NO: 25090 - protein, 16 aa, Homo sapiens
  CDR3 for beta chain variable domain of TCR clone 12545 (TRBV15, TRBJ2-3)
CATRLSGGRAPGTQYF

SEQ ID NO: 25091 - protein, 15 aa, Homo sapiens
  CDR3 for alpha chain variable domain of TCR clone 12546 (TRAV12-3, TRAJ6)
CAMSATTGGSYIPTF

SEQ ID NO: 25092 - protein, 16 aa, Homo sapiens
  CDR3 for beta chain variable domain of TCR clone 12546 (TRBV20-1, TRBJ1-2)
CSASMGQGVANYGYSF

SEQ ID NO: 25093 - protein, 16 aa, Homo sapiens
  CDR3 for alpha chain variable domain of TCR clone 12547 (TRAV21, TRAJ37)
CAVRTAGSSNTGKLIF

SEQ ID NO: 25094 - protein, 16 aa, Homo sapiens
  CDR3 for beta chain variable domain of TCR clone 12547 (TRBV7-2, TRBJ2-5)
CASSSKWLSGQETQYF

SEQ ID NO: 25095 - protein, 14 aa, Homo sapiens
  CDR3 for alpha chain variable domain of TCR clone 12548 (TRAV8-6, TRAJ35)
CAVSEKALGMCCIA

SEQ ID NO: 25096 - protein, 13 aa, Homo sapiens
  CDR3 for beta chain variable domain of TCR clone 12548 (TRBV11-2, TRBJ1-3)
CASSLEPVNTIYF

SEQ ID NO: 25097 - protein, 16 aa, Homo sapiens
  CDR3 for alpha chain variable domain of TCR clone 12549 (TRAV30, TRAJ24)
CGTEIVDADSWGKFQF

SEQ ID NO: 25098 - protein, 14 aa, Homo sapiens
  CDR3 for beta chain variable domain of TCR clone 12549 (TRBV12-5, TRBJ2-5)
CASGSRTHQETLYF

SEQ ID NO: 25099 - protein, 14 aa, Homo sapiens
  CDR3 for alpha chain variable domain of TCR clone 12550 (TRAV41, TRAJ48)
CAVKDIYGNEKLTF

SEQ ID NO: 25100 - protein, 14 aa, Homo sapiens
  CDR3 for beta chain variable domain of TCR clone 12550 (TRBV7-7, TRBJ2-5)
CASSLRTGQETQYF

SEQ ID NO: 25101 - protein, 14 aa, Homo sapiens
  CDR3 for alpha chain variable domain of TCR clone 12551 (TRAV12-1, TRAJ30)
CVVNIGGRDDKIIF

SEQ ID NO: 25102 - protein, 17 aa, Homo sapiens
  CDR3 for beta chain variable domain of TCR clone 12551 (TRBV20-1, TRBJ2-1)
CSAPPRLAGTRYNEQFF

SEQ ID NO: 25103 - protein, 12 aa, Homo sapiens
  CDR3 for alpha chain variable domain of TCR clone 12552 (TRAV17, TRAJ12)
CATLRSSYKLIF

SEQ ID NO: 25104 - protein, 18 aa, Homo sapiens
  CDR3 for beta chain variable domain of TCR clone 12552 (TRBV28, TRBJ2-7)
CASSLFLRQGAPSSTSGR

SEQ ID NO: 25105 - protein, 15 aa, Homo sapiens
  CDR3 for alpha chain variable domain of TCR clone 12553 (TRAV26-1, TRAJ29)
CIVRVEESGNTPLVF

SEQ ID NO: 25106 - protein, 14 aa, Homo sapiens
  CDR3 for beta chain variable domain of TCR clone 12553 (TRBV18, TRBJ2-5)
CASSPGVSQETQYF

SEQ ID NO: 25107 - protein, 13 aa, Homo sapiens
  CDR3 for alpha chain variable domain of TCR clone 12554 (TRAV1-2, TRAJ9)
CAALNTGGFKTIF

SEQ ID NO: 25108 - protein, 12 aa, Homo sapiens
  CDR3 for beta chain variable domain of TCR clone 12554 (TRBV11-2, TRBJ2-2)
CASSLGGGELFF

SEQ ID NO: 25109 - protein, 13 aa, Homo sapiens
  CDR3 for alpha chain variable domain of TCR clone 12555 (TRAV8-3, TRAJ28)
CAVGAVRSYQLTF

SEQ ID NO: 25110 - protein, 15 aa, Homo sapiens
  CDR3 for beta chain variable domain of TCR clone 12555 (TRBV7-9, TRBJ1-5)
CASSQGHQPNQPQHF

SEQ ID NO: 25111 - protein, 11 aa, Homo sapiens
  CDR3 for alpha chain variable domain of TCR clone 12556 (TRAV2, TRAJ33)
CAVESNYQLIW

SEQ ID NO: 25112 - protein, 15 aa, Homo sapiens
  CDR3 for beta chain variable domain of TCR clone 12556 (TRBV19, TRBJ1-1)
CASTSGQIQNTGAFF

SEQ ID NO: 25113 - protein, 11 aa, Homo sapiens
  CDR3 for alpha chain variable domain of TCR clone 12557 (TRAV3, TRAJ21)
CDVGNFNKFYF

SEQ ID NO: 25114 - protein, 16 aa, Homo sapiens
  CDR3 for beta chain variable domain of TCR clone 12557 (TRBV19, TRBJ2-1)
CASSKAGPSSYNEQFF

SEQ ID NO: 25115 - protein, 15 aa, Homo sapiens
  CDR3 for alpha chain variable domain of TCR clone 12558 (TRAV23/DV6, TRAJ7)
CAASVGRSGNNRLAF

SEQ ID NO: 25116 - protein, 15 aa, Homo sapiens
  CDR3 for beta chain variable domain of TCR clone 12558 (TRBV12-4, TRBJ1-6)
CASSLLGGSNSPLHF

SEQ ID NO: 25117 - protein, 12 aa, Homo sapiens
  CDR3 for alpha chain variable domain of TCR clone 12559 (TRAV1-1, TRAJ8)
CAGGTGFQKLVF

SEQ ID NO: 25118 - protein, 15 aa, Homo sapiens
  CDR3 for beta chain variable domain of TCR clone 12559 (TRBV7-9, TRBJ1-4)
CASSRTGGFNDKLFF

SEQ ID NO: 25119 - protein, 15 aa, Homo sapiens
  CDR3 for alpha chain variable domain of TCR clone 12560 (TRAV3, TRAJ20)
CAVRDIKLSDYKLSF

SEQ ID NO: 25120 - protein, 15 aa, Homo sapiens
  CDR3 for beta chain variable domain of TCR clone 12560 (TRBV7-9, TRBJ1-6)
CASSSPGRGNSPLHL

SEQ ID NO: 25121 - protein, 14 aa, Homo sapiens
  CDR3 for alpha chain variable domain of TCR clone 12561 (TRAV21, TRAJ35)
CAVMPIGCGNVLHC

SEQ ID NO: 25122 - protein, 12 aa, Homo sapiens
  CDR3 for beta chain variable domain of TCR clone 12561 (TRBV7-9, TRBJ2-7)
CASSIKREEQYF

SEQ ID NO: 25123 - protein, 13 aa, Homo sapiens
  CDR3 for alpha chain variable domain of TCR clone 12562 (TRAV21, TRAJ27)
CAARPGNAGKSTH

SEQ ID NO: 25124 - protein, 20 aa, Homo sapiens
  CDR3 for beta chain variable domain of TCR clone 12562 (TRBV7-8, TRBJ2-2)
CASSHLFPGPTIHITGELFF

SEQ ID NO: 25125 - protein, 14 aa, Homo sapiens
  CDR3 for alpha chain variable domain of TCR clone 12563 (TRAV13-1, TRAJ35)
CAASKGGFGNVLHC

SEQ ID NO: 25126 - protein, 13 aa, Homo sapiens
  CDR3 for beta chain variable domain of TCR clone 12563 (TRBV7-3, TRBJ1-1)
YASSQDWGAEAFF

SEQ ID NO: 25127 - protein, 15 aa, Homo sapiens
  CDR3 for alpha chain variable domain of TCR clone 12564 (TRAV8-3, TRAJ45)
CASSYSGGGADGLTF

SEQ ID NO: 25128 - protein, 13 aa, Homo sapiens
  CDR3 for beta chain variable domain of TCR clone 12564 (TRBV10-3, TRBJ2-7)
CASKLAVKYEQYF

SEQ ID NO: 25129 - protein, 14 aa, Homo sapiens
  CDR3 for alpha chain variable domain of TCR clone 12565 (TRAV9-2, TRAJ39)
CALYIYNAGNMLTF

SEQ ID NO: 25130 - protein, 14 aa, Homo sapiens
  CDR3 for beta chain variable domain of TCR clone 12565 (TRBV28, TRBJ1-2)
CASRIQGANYGYTF

SEQ ID NO: 25131 - protein, 22 aa, Homo sapiens
  CDR3 for alpha chain variable domain of TCR clone 12566 (TRAV1-1, TRAJ17)
CLLLLRCESPRGIKAAGNKLTF

SEQ ID NO: 25132 - protein, 17 aa, Homo sapiens
  CDR3 for beta chain variable domain of TCR clone 12566 (TRBV6-1, TRBJ1-1)
CASLARGGGGFNTEAFF

SEQ ID NO: 25133 - protein, 14 aa, Homo sapiens
  CDR3 for alpha chain variable domain of TCR clone 12567 (TRAV35, TRAJ33)
CAGSSQDSNYQLIW

SEQ ID NO: 25134 - protein, 15 aa, Homo sapiens
  CDR3 for beta chain variable domain of TCR clone 12567 (TRBV6-5, TRBJ2-1)
CASSYDAGAGNEQFF

SEQ ID NO: 25135 - protein, 14 aa, Homo sapiens
  CDR3 for alpha chain variable domain of TCR clone 12568 (TRAV10, TRAJ47)
CVVSLMEYGNKLVF

SEQ ID NO: 25136 - protein, 16 aa, Homo sapiens
  CDR3 for beta chain variable domain of TCR clone 12568 (TRBV28, TRBJ2-3)
CASSLFTGVSTDTQYF

SEQ ID NO: 25137 - protein, 13 aa, Homo sapiens
  CDR3 for alpha chain variable domain of TCR clone 12569 (TRAV8-6, TRAJ49)
CAVITNTGNQFYF

SEQ ID NO: 25138 - protein, 16 aa, Homo sapiens
  CDR3 for beta chain variable domain of TCR clone 12569 (TRBV19, TRBJ2-1)
CASSKAGPSSYNEQFF

SEQ ID NO: 25139 - protein, 15 aa, Homo sapiens
  CDR3 for alpha chain variable domain of TCR clone 12570 (TRAV1-1, TRAJ20)
CAVRDNVANDYKLSF

SEQ ID NO: 25140 - protein, 13 aa, Homo sapiens
  CDR3 for beta chain variable domain of TCR clone 12570 (TRBV7-2, TRBJ2-1)
CASSRQGYNEQFF

SEQ ID NO: 25141 - protein, 13 aa, Homo sapiens
  CDR3 for alpha chain variable domain of TCR clone 12571 (TRAV13-2, TRAJ8)
CAFMNTGFQKLVF

SEQ ID NO: 25142 - protein, 15 aa, Homo sapiens
  CDR3 for beta chain variable domain of TCR clone 12571 (TRBV19, TRBJ2-3)
CAAGDTNAPNDTQYS

SEQ ID NO: 25143 - protein, 10 aa, Homo sapiens
  CDR3 for alpha chain variable domain of TCR clone 12572 (TRAV23/DV6, TRAJ57)
CAASSTLSQG

SEQ ID NO: 25144 - protein, 17 aa, Homo sapiens
  CDR3 for beta chain variable domain of TCR clone 12572 (TRBV4-2, TRBJ1-1)
CASTQFGGGSGNTEAFF

SEQ ID NO: 25145 - protein, 16 aa, Homo sapiens
  CDR3 for alpha chain variable domain of TCR clone 12573 (TRAV12-3, TRAJ53)
CAMSPGSGGSNYKLTV

SEQ ID NO: 25146 - protein, 11 aa, Homo sapiens
  CDR3 for beta chain variable domain of TCR clone 12573 (TRBV29-1, TRBJ2-5)
CSEDRTGTQYF

SEQ ID NO: 25147 - protein, 14 aa, Homo sapiens
  CDR3 for alpha chain variable domain of TCR clone 12574 (TRAV12-3, TRAJ42)
CAMNYGGSQGNLIF

SEQ ID NO: 25148 - protein, 15 aa, Homo sapiens
  CDR3 for beta chain variable domain of TCR clone 12574 (TRBV5-6, TRBJ1-5)
CASSYGKLWDQPQHF

SEQ ID NO: 25149 - protein, 15 aa, Homo sapiens
  CDR3 for alpha chain variable domain of TCR clone 12575 (TRAV17, TRAJ57)
CATGPSQGGSEKLVF

SEQ ID NO: 25150 - protein, 13 aa, Homo sapiens
  CDR3 for beta chain variable domain of TCR clone 12575 (TRBV4-2, TRBJ1-1)
CACSQAGNTEAFF

SEQ ID NO: 25151 - protein, 13 aa, Homo sapiens
  CDR3 for alpha chain variable domain of TCR clone 12576 (TRAV36/DV7, TRAJ54)
CAVLIQGAQKLVF

SEQ ID NO: 25152 - protein, 16 aa, Homo sapiens
  CDR3 for beta chain variable domain of TCR clone 12576 (TRBV23-1, TRBJ2-1)
CASSHAQRGGGNEQFF

SEQ ID NO: 25153 - protein, 13 aa, Homo sapiens
  CDR3 for alpha chain variable domain of TCR clone 12577 (TRAV8-3, TRAJ36)
CAVGATGANNLFL

SEQ ID NO: 25154 - protein, 15 aa, Homo sapiens
  CDR3 for beta chain variable domain of TCR clone 12577 (TRBV7-2, TRBJ1-2)
CASSPRAGWNYGYTF

SEQ ID NO: 25155 - protein, 14 aa, Homo sapiens
  CDR3 for alpha chain variable domain of TCR clone 12578 (TRAV12-1, TRAJ13)
CAVKKTGGYQKVTF

SEQ ID NO: 25156 - protein, 15 aa, Homo sapiens
  CDR3 for beta chain variable domain of TCR clone 12578 (TRBV27, TRBJ2-1)
CASSNGGGSSNEQFF

SEQ ID NO: 25157 - protein, 10 aa, Homo sapiens
  CDR3 for alpha chain variable domain of TCR clone 12579 (TRAV23/DV6, TRAJ57)
CAASSTLSQG

SEQ ID NO: 25158 - protein, 14 aa, Homo sapiens
  CDR3 for beta chain variable domain of TCR clone 12579 (TRBV25-1, TRBJ1-1)
CASTHPGGNTEAFF

SEQ ID NO: 25159 - protein, 14 aa, Homo sapiens
  CDR3 for alpha chain variable domain of TCR clone 12580 (TRAV16, TRAJ33)
CALSAMDSNYQLIR

SEQ ID NO: 25160 - protein, 12 aa, Homo sapiens
  CDR3 for beta chain variable domain of TCR clone 12580 (TRBV5-1, TRBJ1-2)
CASSQDTYGYTF

SEQ ID NO: 25161 - protein, 16 aa, Homo sapiens
  CDR3 for alpha chain variable domain of TCR clone 12581 (TRAV14/DV4, TRAJ54)
CAMREGLAWGAQKLVF

SEQ ID NO: 25162 - protein, 19 aa, Homo sapiens
  CDR3 for beta chain variable domain of TCR clone 12581 (TRBV7-9, TRBJ2-6)
CASSLESATVLPGANVLTF

SEQ ID NO: 25163 - protein, 14 aa, Homo sapiens
  CDR3 for alpha chain variable domain of TCR clone 12582 (TRAV35, TRAJ22)
CAGLRPGSARQLTF

SEQ ID NO: 25164 - protein, 15 aa, Homo sapiens
  CDR3 for beta chain variable domain of TCR clone 12582 (TRBV12-4, TRBJ2-5)
CASSPPTGLQETQCF

SEQ ID NO: 25165 - protein, 15 aa, Homo sapiens
  CDR3 for alpha chain variable domain of TCR clone 12583 (TRAV8-3, TRAJ45)
CASSSSGGGADGLTF

SEQ ID NO: 25166 - protein, 13 aa, Homo sapiens
  CDR3 for beta chain variable domain of TCR clone 12583 (TRBV10-3, TRBJ2-7)
CASKLAVNYEQYF

SEQ ID NO: 25167 - protein, 13 aa, Homo sapiens
  CDR3 for alpha chain variable domain of TCR clone 12584 (TRAV21, TRAJ27)
CAARLGNAGKSTF

SEQ ID NO: 25168 - protein, 14 aa, Homo sapiens
  CDR3 for beta chain variable domain of TCR clone 12584 (TRBV7-6, TRBJ2-3)
CASSLGTVTDTQYF

SEQ ID NO: 25169 - protein, 15 aa, Homo sapiens
  CDR3 for alpha chain variable domain of TCR clone 12585 (TRAV8-3, TRAJ45)
CASSYSGGGDDGLTF

SEQ ID NO: 25170 - protein, 13 aa, Homo sapiens
  CDR3 for beta chain variable domain of TCR clone 12585 (TRBV10-3, TRBJ2-7)
CASKLAVNYEQYF

SEQ ID NO: 25171 - protein, 11 aa, Homo sapiens
  CDR3 for alpha chain variable domain of TCR clone 12586 (TRAV1-1, TRAJ23)
CAVRRGGKLIF

SEQ ID NO: 25172 - protein, 20 aa, Homo sapiens
  CDR3 for beta chain variable domain of TCR clone 12586 (TRBV7-8, TRBJ2-2)
CASSHLFPGPTIHITGELFF

SEQ ID NO: 25173 - protein, 11 aa, Homo sapiens
  CDR3 for alpha chain variable domain of TCR clone 12587 (TRAV29/DV5, TRAJ49)
CAAFTGNQFYF

SEQ ID NO: 25174 - protein, 18 aa, Homo sapiens
  CDR3 for beta chain variable domain of TCR clone 12587 (TRBV20-1, TRBJ2-6)
CSAETTPTHGSGANVLTF

SEQ ID NO: 25175 - protein, 12 aa, Homo sapiens
  CDR3 for alpha chain variable domain of TCR clone 12588 (TRAV21, TRAJ13)
PGPSGGYQKVTF

SEQ ID NO: 25176 - protein, 16 aa, Homo sapiens
  CDR3 for beta chain variable domain of TCR clone 12588 (TRBV4-1, TRBJ1-5)
CASSQGGHTTNQPQHF

SEQ ID NO: 25177 - protein, 10 aa, Homo sapiens
  CDR3 for alpha chain variable domain of TCR clone 12589 (TRAV23/DV6, TRAJ57)
CAASSTLSQG

SEQ ID NO: 25178 - protein, 14 aa, Homo sapiens
  CDR3 for beta chain variable domain of TCR clone 12589 (TRBV25-1, TRBJ1-1)
CASTHLGGDTEAFF

SEQ ID NO: 25179 - protein, 14 aa, Homo sapiens
  CDR3 for alpha chain variable domain of TCR clone 12590 (TRAV13-2, TRAJ6)
CAERGSGGSYIPTF

SEQ ID NO: 25180 - protein, 16 aa, Homo sapiens
  CDR3 for beta chain variable domain of TCR clone 12590 (TRBV19, TRBJ1-1)
CASRVDVTGAAWGAFF

SEQ ID NO: 25181 - protein, 12 aa, Homo sapiens
  CDR3 for alpha chain variable domain of TCR clone 12591 (TRAV26-1, TRAJ13)
CIVSRGYRKVTF

SEQ ID NO: 25182 - protein, 14 aa, Homo sapiens
  CDR3 for beta chain variable domain of TCR clone 12591 (TRBV7-2, TRBJ2-7)
CASSPKTSFYEQYF

SEQ ID NO: 25183 - protein, 12 aa, Homo sapiens
  CDR3 for alpha chain variable domain of TCR clone 12592 (TRAV12-3, TRAJ17)
CAMTLTGNKLTF

SEQ ID NO: 25184 - protein, 15 aa, Homo sapiens
  CDR3 for beta chain variable domain of TCR clone 12592 (TRBV20-1, TRBJ2-7)
CSARDPVSGMDEQYF

SEQ ID NO: 25185 - protein, 14 aa, Homo sapiens
  CDR3 for alpha chain variable domain of TCR clone 12593 (TRAV8-4, TRAJ12)
CAVSHGDSSYKLIF

SEQ ID NO: 25186 - protein, 17 aa, Homo sapiens
  CDR3 for beta chain variable domain of TCR clone 12593 (TRBV20-1, TRBJ2-1)
CSARDPRQGVSYNEQFF

SEQ ID NO: 25187 - protein, 11 aa, Homo sapiens
  CDR3 for alpha chain variable domain of TCR clone 12594 (TRAV1-1, TRAJ23)
CAVRQGGTLIF

SEQ ID NO: 25188 - protein, 20 aa, Homo sapiens
  CDR3 for beta chain variable domain of TCR clone 12594 (TRBV7-8, TRBJ2-2)
CASSHLFPGPTIHITGELFF

SEQ ID NO: 25189 - protein, 11 aa, Homo sapiens
  CDR3 for alpha chain variable domain of TCR clone 12595 (TRAV21, TRAJ11)
CAVNGYSTLTF

SEQ ID NO: 25190 - protein, 11 aa, Homo sapiens
  CDR3 for beta chain variable domain of TCR clone 12595 (TRBV19, TRBJ1-1)
CASSIGSEAFS

SEQ ID NO: 25191 - protein, 15 aa, Homo sapiens
  CDR3 for alpha chain variable domain of TCR clone 12596 (TRAV2, TRAJ13)
CCLLLCFRGYQKVTF

SEQ ID NO: 25192 - protein, 16 aa, Homo sapiens
  CDR3 for beta chain variable domain of TCR clone 12596 (TRBV6-1, TRBJ2-5)
CASSETLDRGAETQYF

SEQ ID NO: 25193 - protein, 16 aa, Homo sapiens
  CDR3 for alpha chain variable domain of TCR clone 12597 (TRAV16, TRAJ4)
CALSRMFSGGYNKLIF

SEQ ID NO: 25194 - protein, 16 aa, Homo sapiens
  CDR3 for beta chain variable domain of TCR clone 12597 (TRBV24-1, TRBJ2-3)
CAASDPGTGATDTQYF

SEQ ID NO: 25195 - protein, 14 aa, Homo sapiens
  CDR3 for alpha chain variable domain of TCR clone 12598 (TRAV12-2, TRAJ40)
CAVKIPSGTYKYIF

SEQ ID NO: 25196 - protein, 14 aa, Homo sapiens
  CDR3 for beta chain variable domain of TCR clone 12598 (TRBV20-1, TRBJ1-1)
CSAQTRIGGAEAFF

SEQ ID NO: 25197 - protein, 11 aa, Homo sapiens
  CDR3 for alpha chain variable domain of TCR clone 12599 (TRAV27, TRAJ20)
CAGADDYKLSF

SEQ ID NO: 25198 - protein, 14 aa, Homo sapiens
  CDR3 for beta chain variable domain of TCR clone 12599 (TRBV11-2, TRBJ2-5)
CASSHRTVQETQYF

SEQ ID NO: 25199 - protein, 17 aa, Homo sapiens
  CDR3 for alpha chain variable domain of TCR clone 12600 (TRAV23/DV6, TRAJ57)
CAASSTPSQGGSEKLVF

SEQ ID NO: 25200 - protein, 14 aa, Homo sapiens
  CDR3 for beta chain variable domain of TCR clone 12600 (TRBV25-1, TRBJ1-1)
CASTHLGGNTEAFF

SEQ ID NO: 25201 - protein, 14 aa, Homo sapiens
  CDR3 for alpha chain variable domain of TCR clone 12601 (TRAV1-2, TRAJ16)
CAVNRFSDGQKLLF

SEQ ID NO: 25202 - protein, 12 aa, Homo sapiens
  CDR3 for beta chain variable domain of TCR clone 12601 (TRBV12-5, TRBJ2-5)
CASGQGVETQYF

SEQ ID NO: 25203 - protein, 14 aa, Homo sapiens
  CDR3 for alpha chain variable domain of TCR clone 12602 (TRAV1-2, TRAJ16)
CAVNRFSDGQKLLF

SEQ ID NO: 25204 - protein, 15 aa, Homo sapiens
  CDR3 for beta chain variable domain of TCR clone 12602 (TRBV2, TRBJ2-1)
CASSELAGSYNEQFF

SEQ ID NO: 25205 - protein, 14 aa, Homo sapiens
  CDR3 for alpha chain variable domain of TCR clone 12603 (TRAV1-2, TRAJ16)
CAVNRFSDGQKLLF

SEQ ID NO: 25206 - protein, 13 aa, Homo sapiens
  CDR3 for beta chain variable domain of TCR clone 12603 (TRBV10-3, TRBJ2-7)
CAIKKIQGHEQYF

SEQ ID NO: 25207 - protein, 17 aa, Homo sapiens
  CDR3 for alpha chain variable domain of TCR clone 12604 (TRAV8-6, TRAJ4)
CAVSDLGVAGGYNKLIF

SEQ ID NO: 25208 - protein, 15 aa, Homo sapiens
  CDR3 for beta chain variable domain of TCR clone 12604 (TRBV28, TRBJ1-2)
CASSSPRRGNYGYTF

SEQ ID NO: 25209 - protein, 18 aa, Homo sapiens
  CDR3 for alpha chain variable domain of TCR clone 12605 (TRAV21, TRAJ52)
CAVRPSPAGDTSYGKLTF

SEQ ID NO: 25210 - protein, 17 aa, Homo sapiens
  CDR3 for beta chain variable domain of TCR clone 12605 (TRBV13, TRBJ2-3)
CASSLSRVAGGRNTQYF

SEQ ID NO: 25211 - protein, 12 aa, Homo sapiens
  CDR3 for alpha chain variable domain of TCR clone 12606 (TRAV2, TRAJ10)
CASTGGGNKLTF

SEQ ID NO: 25212 - protein, 15 aa, Homo sapiens
  CDR3 for beta chain variable domain of TCR clone 12606 (TRBV28, TRBJ1-3)
CASSMGWASGNTIYF

SEQ ID NO: 25213 - protein, 19 aa, Homo sapiens
  CDR3 for alpha chain variable domain of TCR clone 12607 (TRAV35, TRAJ22)
CAGQLATVDASGSARQLTF

SEQ ID NO: 25214 - protein, 14 aa, Homo sapiens
  CDR3 for beta chain variable domain of TCR clone 12607 (TRBV2, TRBJ2-2)
CASSLFGGNGELFF

SEQ ID NO: 25215 - protein, 12 aa, Homo sapiens
  CDR3 for alpha chain variable domain of TCR clone 12608 (TRAV21, TRAJ11)
CAATSEYSTLTF

SEQ ID NO: 25216 - protein, 14 aa, Homo sapiens
  CDR3 for beta chain variable domain of TCR clone 12608 (TRBV20-1, TRBJ2-7)
CSAPELAGVGEQYF

SEQ ID NO: 25217 - protein, 14 aa, Homo sapiens
  CDR3 for alpha chain variable domain of TCR clone 12609 (TRAV12-2, TRAJ13)
CAVKKTGGYQKVTF

SEQ ID NO: 25218 - protein, 15 aa, Homo sapiens
  CDR3 for beta chain variable domain of TCR clone 12609 (TRBV27, TRBJ2-1)
CASSNGGGSSNEQVF

SEQ ID NO: 25219 - protein, 12 aa, Homo sapiens
  CDR3 for alpha chain variable domain of TCR clone 12610 (TRAV12-3, TRAJ17)
WAMTLTGNKLTF

SEQ ID NO: 25220 - protein, 15 aa, Homo sapiens
  CDR3 for beta chain variable domain of TCR clone 12610 (TRBV20-1, TRBJ2-7)
CSARDRVSGMDEQYF

SEQ ID NO: 25221 - protein, 14 aa, Homo sapiens
  CDR3 for alpha chain variable domain of TCR clone 12611 (TRAV27, TRAJ22)
CAGLPSGSARQLTF

SEQ ID NO: 25222 - protein, 13 aa, Homo sapiens
  CDR3 for beta chain variable domain of TCR clone 12611 (TRBV11-2, TRBJ2-1)
CASSLRLTHEQFF

SEQ ID NO: 25223 - protein, 18 aa, Homo sapiens
  CDR3 for alpha chain variable domain of TCR clone 12612 (TRAV21, TRAJ52)
CAVRPSPAGGTSYGKLTF

SEQ ID NO: 25224 - protein, 16 aa, Homo sapiens
  CDR3 for beta chain variable domain of TCR clone 12612 (TRBV20-1, TRBJ1-4)
CSAPGQGLLTNEKLFF

SEQ ID NO: 25225 - protein, 14 aa, Homo sapiens
  CDR3 for alpha chain variable domain of TCR clone 12613 (TRAV22, TRAJ24)
CAVDSSNSWGKLQF

SEQ ID NO: 25226 - protein, 11 aa, Homo sapiens
  CDR3 for beta chain variable domain of TCR clone 12613 (TRBV29-1, TRBJ2-3)
CSVEIGDTQYF

SEQ ID NO: 25227 - protein, 11 aa, Homo sapiens
  CDR3 for alpha chain variable domain of TCR clone 12614 (TRAV1-1, TRAJ23)
CAVRQGGKLIF

SEQ ID NO: 25228 - protein, 20 aa, Homo sapiens
  CDR3 for beta chain variable domain of TCR clone 12614 (TRBV7-8, TRBJ2-2)
CAGSHLFPGPTIHITGELFF

SEQ ID NO: 25229 - protein, 12 aa, Homo sapiens
  CDR3 for alpha chain variable domain of TCR clone 12615 (TRAV20, TRAJ26)
CAAYNYGQNFVF

SEQ ID NO: 25230 - protein, 14 aa, Homo sapiens
  CDR3 for beta chain variable domain of TCR clone 12615 (TRBV29-1, TRBJ2-1)
CSVVISGSYNEQFF

SEQ ID NO: 25231 - protein, 12 aa, Homo sapiens
  CDR3 for alpha chain variable domain of TCR clone 12616 (TRAV8-3, TRAJ26)
CAGDNYGQNFVF

SEQ ID NO: 25232 - protein, 15 aa, Homo sapiens
  CDR3 for beta chain variable domain of TCR clone 12616 (TRBV9, TRBJ2-1)
CASSFAGSSYNEQFF

SEQ ID NO: 25233 - protein, 13 aa, Homo sapiens
  CDR3 for alpha chain variable domain of TCR clone 12617 (TRAV2, TRAJ40)
CAVVTSGTYKYIF

SEQ ID NO: 25234 - protein, 14 aa, Homo sapiens
  CDR3 for beta chain variable domain of TCR clone 12617 (TRBV19, TRBJ2-1)
CASPTFVLSGDQFF

SEQ ID NO: 25235 - protein, 14 aa, Homo sapiens
  CDR3 for alpha chain variable domain of TCR clone 12618 (TRAV12-2, TRAJ3)
CAVSLYSSASKITF

SEQ ID NO: 25236 - protein, 14 aa, Homo sapiens
  CDR3 for beta chain variable domain of TCR clone 12618 (TRBV27, TRBJ2-1)
CAGSIAETYNEQFF

SEQ ID NO: 25237 - protein, 14 aa, Homo sapiens
  CDR3 for alpha chain variable domain of TCR clone 12619 (TRAV13-1, TRAJ44)
CAAKATGPASKLTF

SEQ ID NO: 25238 - protein, 17 aa, Homo sapiens
  CDR3 for beta chain variable domain of TCR clone 12619 (TRBV7-3, TRBJ2-3)
CASSLMKRMRGADTQYF

SEQ ID NO: 25239 - protein, 15 aa, Homo sapiens
  CDR3 for alpha chain variable domain of TCR clone 12620 (TRAV8-3, TRAJ45)
CASSCSGGGADGLTF

SEQ ID NO: 25240 - protein, 13 aa, Homo sapiens
  CDR3 for beta chain variable domain of TCR clone 12620 (TRBV10-3, TRBJ2-7)
CASKLAVNYEQYF

SEQ ID NO: 25241 - protein, 14 aa, Homo sapiens
  CDR3 for alpha chain variable domain of TCR clone 12621 (TRAV38-1, TRAJ40)
CALRPTSGAYKYIF

SEQ ID NO: 25242 - protein, 14 aa, Homo sapiens
  CDR3 for beta chain variable domain of TCR clone 12621 (TRBV25-1, TRBJ1-1)
CASTHLGGNTEAFF

SEQ ID NO: 25243 - protein, 14 aa, Homo sapiens
  CDR3 for alpha chain variable domain of TCR clone 12622 (TRAV1-2, TRAJ8)
CAVREDTGFQKLVF

SEQ ID NO: 25244 - protein, 15 aa, Homo sapiens
  CDR3 for beta chain variable domain of TCR clone 12622 (TRBV6-3, TRBJ2-7)
CASSSPETVFYEQYF

SEQ ID NO: 25245 - protein, 13 aa, Homo sapiens
  CDR3 for alpha chain variable domain of TCR clone 12623 (TRAV3, TRAJ21)
CAVREPDFNKFYF

SEQ ID NO: 25246 - protein, 15 aa, Homo sapiens
  CDR3 for beta chain variable domain of TCR clone 12623 (TRBV6-3, TRBJ2-7)
CASSSPGTVFYEQYF

SEQ ID NO: 25247 - protein, 17 aa, Homo sapiens
  CDR3 for alpha chain variable domain of TCR clone 12624 (TRAV8-6, TRAJ58)
CAVSSWVGETSGSRLTF

SEQ ID NO: 25248 - protein, 17 aa, Homo sapiens
  CDR3 for beta chain variable domain of TCR clone 12624 (TRBV11-2, TRBJ2-1)
CASSLYPPGVEYNGQFF

SEQ ID NO: 25249 - protein, 12 aa, Homo sapiens
  CDR3 for alpha chain variable domain of TCR clone 12625 (TRAV12-1, TRAJ40)
CVVYSRTYKYIF

SEQ ID NO: 25250 - protein, 18 aa, Homo sapiens
  CDR3 for beta chain variable domain of TCR clone 12625 (TRBV11-2, TRBJ2-3)
CASSLGGASRGAPNTQYF

SEQ ID NO: 25251 - protein, 14 aa, Homo sapiens
  CDR3 for alpha chain variable domain of TCR clone 12626 (TRAV29/DV5, TRAJ54)
CAARSRGGAQKLVF

SEQ ID NO: 25252 - protein, 13 aa, Homo sapiens
  CDR3 for beta chain variable domain of TCR clone 12626 (TRBV27, TRBJ1-1)
CASSLSIGAEAFF

SEQ ID NO: 25253 - protein, 12 aa, Homo sapiens
  CDR3 for alpha chain variable domain of TCR clone 12627 (TRAV2, TRAJ9)
CAVGAGGVKTIF

SEQ ID NO: 25254 - protein, 16 aa, Homo sapiens
  CDR3 for beta chain variable domain of TCR clone 12627 (TRBV13, TRBJ2-2)
CASSPRTGEHTGELFF

SEQ ID NO: 25255 - protein, 15 aa, Homo sapiens
  CDR3 for alpha chain variable domain of TCR clone 12628 (TRAV12-3, TRAJ6)
CAMSATSGGSYIPTF

SEQ ID NO: 25256 - protein, 15 aa, Homo sapiens
  CDR3 for beta chain variable domain of TCR clone 12628 (TRBV5-1, TRBJ2-6)
CASSLDPSGANVLTF

SEQ ID NO: 25257 - protein, 15 aa, Homo sapiens
  CDR3 for alpha chain variable domain of TCR clone 12629 (TRAV26-1, TRAJ29)
YIVRVEGSGNTPLVF

SEQ ID NO: 25258 - protein, 15 aa, Homo sapiens
  CDR3 for beta chain variable domain of TCR clone 12629 (TRBV7-9, TRBJ1-5)
CASSQGHQPNQPQHF

SEQ ID NO: 25259 - protein, 14 aa, Homo sapiens
  CDR3 for alpha chain variable domain of TCR clone 12630 (TRAV12-2, TRAJ17)
CAVLSKAAGNKLTF

SEQ ID NO: 25260 - protein, 17 aa, Homo sapiens
  CDR3 for beta chain variable domain of TCR clone 12630 (TRBV20-1, TRBJ2-2)
CSASGSGQGGLTGELFF

SEQ ID NO: 25261 - protein, 14 aa, Homo sapiens
  CDR3 for alpha chain variable domain of TCR clone 12631 (TRAV12-2, TRAJ17)
CAVLFKAAGNKLTF

SEQ ID NO: 25262 - protein, 17 aa, Homo sapiens
  CDR3 for beta chain variable domain of TCR clone 12631 (TRBV13, TRBJ2-3)
CASSLSRVAGGRNTQYF

SEQ ID NO: 25263 - protein, 15 aa, Homo sapiens
  CDR3 for alpha chain variable domain of TCR clone 12632 (TRAV17, TRAJ57)
CATGPSQGGSEKRVF

SEQ ID NO: 25264 - protein, 16 aa, Homo sapiens
  CDR3 for beta chain variable domain of TCR clone 12632 (TRBV12-4, TRBJ1-5)
CASSRPVGGSNQPQHF

SEQ ID NO: 25265 - protein, 10 aa, Homo sapiens
  CDR3 for alpha chain variable domain of TCR clone 12633 (TRAV13-1, TRAJ52)
CAAKTPMLVV

SEQ ID NO: 25266 - protein, 15 aa, Homo sapiens
  CDR3 for beta chain variable domain of TCR clone 12633 (TRBV6-1, TRBJ2-3)
CASSERGGITDTQYF

SEQ ID NO: 25267 - protein, 12 aa, Homo sapiens
  CDR3 for alpha chain variable domain of TCR clone 12634 (TRAV1-1, TRAJ9)
CAANTGGFKTIF

SEQ ID NO: 25268 - protein, 14 aa, Homo sapiens
  CDR3 for beta chain variable domain of TCR clone 12634 (TRBV24-1, TRBJ1-1)
CATRGQGTNTEAFF

SEQ ID NO: 25269 - protein, 11 aa, Homo sapiens
  CDR3 for alpha chain variable domain of TCR clone 12635 (TRAV1-1, TRAJ23)
CAVRQGGKLIF

SEQ ID NO: 25270 - protein, 13 aa, Homo sapiens
  CDR3 for beta chain variable domain of TCR clone 12635 (TRBV7-9, TRBJ1-2)
CASSLKQNYGYTF

SEQ ID NO: 25271 - protein, 13 aa, Homo sapiens
  CDR3 for alpha chain variable domain of TCR clone 12636 (TRAV21, TRAJ27)
CVARPGNAGKSTF

SEQ ID NO: 25272 - protein, 14 aa, Homo sapiens
  CDR3 for beta chain variable domain of TCR clone 12636 (TRBV7-6, TRBJ2-3)
CASSLGTVTDTQYF

SEQ ID NO: 25273 - protein, 14 aa, Homo sapiens
  CDR3 for alpha chain variable domain of TCR clone 12637 (TRAV38-1, TRAJ45)
CAYYSGGGADGPTF

SEQ ID NO: 25274 - protein, 20 aa, Homo sapiens
  CDR3 for beta chain variable domain of TCR clone 12637 (TRBV28, TRBJ2-1)
CASTPIGRSPGLAGGNEQFF

SEQ ID NO: 25275 - protein, 13 aa, Homo sapiens
  CDR3 for alpha chain variable domain of TCR clone 12638 (TRAV20, TRAJ20)
CAVQAGSGYKLSL

SEQ ID NO: 25276 - protein, 13 aa, Homo sapiens
  CDR3 for beta chain variable domain of TCR clone 12638 (TRBV3-1, TRBJ2-3)
CASSQGGGDTQYF

SEQ ID NO: 25277 - protein, 14 aa, Homo sapiens
  CDR3 for alpha chain variable domain of TCR clone 12639 (TRAV1-2, TRAJ16)
CAVNRFSDGQKLLF

SEQ ID NO: 25278 - protein, 15 aa, Homo sapiens
  CDR3 for beta chain variable domain of TCR clone 12639 (TRBV28, TRBJ1-3)
CASSMGWASGNTIYF

SEQ ID NO: 25279 - protein, 15 aa, Homo sapiens
  CDR3 for alpha chain variable domain of TCR clone 12640 (TRAV2, TRAJ9)
CAVEDRGTGGFKTIF

SEQ ID NO: 25280 - protein, 16 aa, Homo sapiens
  CDR3 for beta chain variable domain of TCR clone 12640 (TRBV24-1, TRBJ2-3)
CATSDPGTGATGTQYF

SEQ ID NO: 25281 - protein, 14 aa, Homo sapiens
  CDR3 for alpha chain variable domain of TCR clone 12641 (TRAV9-2, TRAJ6)
CALSDPGGSYIPTF

SEQ ID NO: 25282 - protein, 17 aa, Homo sapiens
  CDR3 for beta chain variable domain of TCR clone 12641 (TRBV13, TRBJ2-3)
CASSLSRVAGGRNTQYF

SEQ ID NO: 25283 - protein, 14 aa, Homo sapiens
  CDR3 for alpha chain variable domain of TCR clone 12642 (TRAV12-2, TRAJ40)
CAVKIPSVTYKYIF

SEQ ID NO: 25284 - protein, 14 aa, Homo sapiens
  CDR3 for beta chain variable domain of TCR clone 12642 (TRBV20-1, TRBJ1-1)
CSAQTRIGGTEAFF

SEQ ID NO: 25285 - protein, 15 aa, Homo sapiens
  CDR3 for alpha chain variable domain of TCR clone 12643 (TRAV8-3, TRAJ45)
CASSYSGGGADGLTF

SEQ ID NO: 25286 - protein, 13 aa, Homo sapiens
  CDR3 for beta chain variable domain of TCR clone 12643 (TRBV10-3, TRBJ2-7)
CAYKLAVNYEQYF

SEQ ID NO: 25287 - protein, 15 aa, Homo sapiens
  CDR3 for alpha chain variable domain of TCR clone 12644 (TRAV26-1, TRAJ29)
CIVRVEGSGNTPLVF

SEQ ID NO: 25288 - protein, 14 aa, Homo sapiens
  CDR3 for beta chain variable domain of TCR clone 12644 (TRBV18, TRBJ2-5)
CAGSPGVSQETQYF

SEQ ID NO: 25289 - protein, 12 aa, Homo sapiens
  CDR3 for alpha chain variable domain of TCR clone 12645 (TRAV13-1, TRAJ27)
CSAHTNAGKSTF

SEQ ID NO: 25290 - protein, 14 aa, Homo sapiens
  CDR3 for beta chain variable domain of TCR clone 12645 (TRBV19, TRBJ2-2)
CASSGQGIAGELFF

SEQ ID NO: 25291 - protein, 14 aa, Homo sapiens
  CDR3 for alpha chain variable domain of TCR clone 12646 (TRAV23/DV6, TRAJ9)
CAASKDTGGFKTIF

SEQ ID NO: 25292 - protein, 12 aa, Homo sapiens
  CDR3 for beta chain variable domain of TCR clone 12646 (TRBV20-1, TRBJ2-1)
CSASGGANEQFF

SEQ ID NO: 25293 - protein, 14 aa, Homo sapiens
  CDR3 for alpha chain variable domain of TCR clone 12647 (TRAV26-1, TRAJ48)
CTVRTNFGNEKLTF

SEQ ID NO: 25294 - protein, 12 aa, Homo sapiens
  CDR3 for beta chain variable domain of TCR clone 12647 (TRBV20-1, TRBJ2-7)
CSASSGANEQYF

SEQ ID NO: 25295 - protein, 15 aa, Homo sapiens
  CDR3 for alpha chain variable domain of TCR clone 12648 (TRAV25, TRAJ53)
CAATGGGGSNYKLTF

SEQ ID NO: 25296 - protein, 13 aa, Homo sapiens
  CDR3 for beta chain variable domain of TCR clone 12648 (TRBV4-2, TRBJ1-1)
CASSQAGNTEAFF

SEQ ID NO: 25297 - protein, 15 aa, Homo sapiens
  CDR3 for alpha chain variable domain of TCR clone 12649 (TRAV8-3, TRAJ27)
CAVGSSKTNAGKSTF

SEQ ID NO: 25298 - protein, 15 aa, Homo sapiens
  CDR3 for beta chain variable domain of TCR clone 12649 (TRBV7-2, TRBJ2-1)
CASSSGLAGGNEQFF

SEQ ID NO: 25299 - protein, 13 aa, Homo sapiens
  CDR3 for alpha chain variable domain of TCR clone 12650 (TRAV12-2, TRAJ39)
CAVNNNAGNMLTF

SEQ ID NO: 25300 - protein, 13 aa, Homo sapiens
  CDR3 for beta chain variable domain of TCR clone 12650 (TRBV2, TRBJ1-5)
CATAGPSNQPQHF

SEQ ID NO: 25301 - protein, 14 aa, Homo sapiens
  CDR3 for alpha chain variable domain of TCR clone 12651 (TRAV6, TRAJ6)
CALPTSGGSYIPTF

SEQ ID NO: 25302 - protein, 17 aa, Homo sapiens
  CDR3 for beta chain variable domain of TCR clone 12651 (TRBV7-8, TRBJ2-6)
CASSAGTGGAGANVLTF

SEQ ID NO: 25303 - protein, 11 aa, Homo sapiens
  CDR3 for alpha chain variable domain of TCR clone 12652 (TRAV3, TRAJ21)
CAVGNFNKFYF

SEQ ID NO: 25304 - protein, 16 aa, Homo sapiens
  CDR3 for beta chain variable domain of TCR clone 12652 (TRBV19, TRBJ2-1)
CASSKAGPSSYNEQFC

SEQ ID NO: 25305 - protein, 12 aa, Homo sapiens
  CDR3 for alpha chain variable domain of TCR clone 12653 (TRAV13-2, TRAJ23)
CAERHRGGKLIF

SEQ ID NO: 25306 - protein, 15 aa, Homo sapiens
  CDR3 for beta chain variable domain of TCR clone 12653 (TRBV11-2, TRBJ2-2)
CASSSDRVNAGELFF

SEQ ID NO: 25307 - protein, 14 aa, Homo sapiens
  CDR3 for alpha chain variable domain of TCR clone 12654 (TRAV1-2, TRAJ8)
CAVREDTGFQKLVF

SEQ ID NO: 25308 - protein, 15 aa, Homo sapiens
  CDR3 for beta chain variable domain of TCR clone 12654 (TRBV6-3, TRBJ2-7)
CASSSPGKVFYEQYF

SEQ ID NO: 25309 - protein, 12 aa, Homo sapiens
  CDR3 for alpha chain variable domain of TCR clone 12655 (TRAV12-3, TRAJ17)
CAMTLTGNKLTF

SEQ ID NO: 25310 - protein, 14 aa, Homo sapiens
  CDR3 for beta chain variable domain of TCR clone 12655 (TRBV9, TRBJ2-1)
CASSVDPRGKEQFF

SEQ ID NO: 25311 - protein, 17 aa, Homo sapiens
  CDR3 for alpha chain variable domain of TCR clone 12656 (TRAV3, TRAJ42)
CAVRDRDYGGSQGNRIF

SEQ ID NO: 25312 - protein, 15 aa, Homo sapiens
  CDR3 for beta chain variable domain of TCR clone 12656 (TRBV6-6, TRBJ2-7)
CASSYSYGGSYEQYF

SEQ ID NO: 25313 - protein, 18 aa, Homo sapiens
  CDR3 for alpha chain variable domain of TCR clone 12657 (TRAV21, TRAJ52)
CAVRPSLAGGTSYGKLTF

SEQ ID NO: 25314 - protein, 17 aa, Homo sapiens
  CDR3 for beta chain variable domain of TCR clone 12657 (TRBV13, TRBJ2-3)
CASSLSRVAGGRNTQYF

SEQ ID NO: 25315 - protein, 13 aa, Homo sapiens
  CDR3 for alpha chain variable domain of TCR clone 12658 (TRAV30, TRAJ39)
CGTEKNAGNMLTF

SEQ ID NO: 25316 - protein, 12 aa, Homo sapiens
  CDR3 for beta chain variable domain of TCR clone 12658 (TRBV12-4, TRBJ2-5)
CASGSAQETQYF

SEQ ID NO: 25317 - protein, 11 aa, Homo sapiens
  CDR3 for alpha chain variable domain of TCR clone 12659 (TRAV1-2, TRAJ40)
CAAPGTYKYIF

SEQ ID NO: 25318 - protein, 16 aa, Homo sapiens
  CDR3 for beta chain variable domain of TCR clone 12659 (TRBV29-1, TRBJ2-7)
CSVEVVGTSGSYEQYF

SEQ ID NO: 25319 - protein, 13 aa, Homo sapiens
  CDR3 for alpha chain variable domain of TCR clone 12660 (TRAV21, TRAJ27)
CAARPGNASKSTF

SEQ ID NO: 25320 - protein, 14 aa, Homo sapiens
  CDR3 for beta chain variable domain of TCR clone 12660 (TRBV7-6, TRBJ2-3)
CASSLGTVTDTQYF

SEQ ID NO: 25321 - protein, 12 aa, Homo sapiens
  CDR3 for alpha chain variable domain of TCR clone 12661 (TRAV1-1, TRAJ8)
CAGGTGFQKLVF

SEQ ID NO: 25322 - protein, 15 aa, Homo sapiens
  CDR3 for beta chain variable domain of TCR clone 12661 (TRBV7-9, TRBJ1-4)
CASSRTGGFNEKLFY

SEQ ID NO: 25323 - protein, 15 aa, Homo sapiens
  CDR3 for alpha chain variable domain of TCR clone 12662 (TRAV3, TRAJ5)
CAVRDLDTGRRALTF

SEQ ID NO: 25324 - protein, 13 aa, Homo sapiens
  CDR3 for beta chain variable domain of TCR clone 12662 (TRBV12-4, TRBJ2-7)
CASSPTETYEQHF

SEQ ID NO: 25325 - protein, 17 aa, Homo sapiens
  CDR3 for alpha chain variable domain of TCR clone 12663 (TRAV3, TRAJ4)
CAVRDGTGGYNKLILEQ

SEQ ID NO: 25326 - protein, 13 aa, Homo sapiens
  CDR3 for beta chain variable domain of TCR clone 12663 (TRBV12-5, TRBJ1-2)
CASGVRTGNGYTF

SEQ ID NO: 25327 - protein, 13 aa, Homo sapiens
  CDR3 for alpha chain variable domain of TCR clone 12664 (TRAV17, TRAJ9)
CATDYTGGFKTIF

SEQ ID NO: 25328 - protein, 14 aa, Homo sapiens
  CDR3 for beta chain variable domain of TCR clone 12664 (TRBV19, TRBJ2-5)
CASSMTGQQETRYF

SEQ ID NO: 25329 - protein, 15 aa, Homo sapiens
  CDR3 for alpha chain variable domain of TCR clone 12665 (TRAV26-1, TRAJ29)
CIVRVEGSGNTPLVF

SEQ ID NO: 25330 - protein, 15 aa, Homo sapiens
  CDR3 for beta chain variable domain of TCR clone 12665 (TRBV7-9, TRBJ1-5)
CASSQGHHPNQPQHF

SEQ ID NO: 25331 - protein, 13 aa, Homo sapiens
  CDR3 for alpha chain variable domain of TCR clone 12666 (TRAV1-1, TRAJ39)
CAVRDGAGNMLTF

SEQ ID NO: 25332 - protein, 16 aa, Homo sapiens
  CDR3 for beta chain variable domain of TCR clone 12666 (TRBV5-7, TRBJ1-5)
CASSLQQDREYQPQHF

SEQ ID NO: 25333 - protein, 14 aa, Homo sapiens
  CDR3 for alpha chain variable domain of TCR clone 12667 (TRAV20, TRAJ56)
CAVQFGGANSKLAF

SEQ ID NO: 25334 - protein, 14 aa, Homo sapiens
  CDR3 for beta chain variable domain of TCR clone 12667 (TRBV20-1, TRBJ2-7)
CSAKRGRSSYEQYF

SEQ ID NO: 25335 - protein, 18 aa, Homo sapiens
  CDR3 for alpha chain variable domain of TCR clone 12668 (TRAV1-2, TRAJ18)
CAVRDMGDRGSTLGRLYF

SEQ ID NO: 25336 - protein, 16 aa, Homo sapiens
  CDR3 for beta chain variable domain of TCR clone 12668 (TRBV29-1, TRBJ1-2)
CSVEANRDMANYGYTF

SEQ ID NO: 25337 - protein, 11 aa, Homo sapiens
  CDR3 for alpha chain variable domain of TCR clone 12669 (TRAV1-2, TRAJ31)
CAVNNNARLML

SEQ ID NO: 25338 - protein, 15 aa, Homo sapiens
  CDR3 for beta chain variable domain of TCR clone 12669 (TRBV28, TRBJ2-1)
CASSIIAGGRSEQFF

SEQ ID NO: 25339 - protein, 15 aa, Homo sapiens
  CDR3 for alpha chain variable domain of TCR clone 12670 (TRAV26-1, TRAJ40)
CIVRVTTPGTYKYIF

SEQ ID NO: 25340 - protein, 12 aa, Homo sapiens
  CDR3 for beta chain variable domain of TCR clone 12670 (TRBV7-9, TRBJ1-4)
CASSTDREKLFF

SEQ ID NO: 25341 - protein, 14 aa, Homo sapiens
  CDR3 for alpha chain variable domain of TCR clone 12671 (TRAV12-2, TRAJ40)
CAVKIPSGTHKYIF

SEQ ID NO: 25342 - protein, 14 aa, Homo sapiens
  CDR3 for beta chain variable domain of TCR clone 12671 (TRBV20-1, TRBJ1-1)
CSAQTRIGGTEAFF

SEQ ID NO: 25343 - protein, 17 aa, Homo sapiens
  CDR3 for alpha chain variable domain of TCR clone 12672 (TRAV3, TRAJ6)
CAVRDGTRAGGSYIPTF

SEQ ID NO: 25344 - protein, 20 aa, Homo sapiens
  CDR3 for beta chain variable domain of TCR clone 12672 (TRBV28, TRBJ2-1)
CASTPIGRSPGLAGGNEQFF

SEQ ID NO: 25345 - protein, 13 aa, Homo sapiens
  CDR3 for alpha chain variable domain of TCR clone 12673 (TRAV26-1, TRAJ38)
CIADNAGNNRKLI

SEQ ID NO: 25346 - protein, 13 aa, Homo sapiens
  CDR3 for beta chain variable domain of TCR clone 12673 (TRBV20-1, TRBJ1-1)
CSARGGGNTEAFF

SEQ ID NO: 25347 - protein, 15 aa, Homo sapiens
  CDR3 for alpha chain variable domain of TCR clone 12674 (TRAV22, TRAJ24)
CAVPLSTGSWGKLQF

SEQ ID NO: 25348 - protein, 16 aa, Homo sapiens
  CDR3 for beta chain variable domain of TCR clone 12674 (TRBV28, TRBJ2-7)
CASSFPDRRLTYEQYF

SEQ ID NO: 25349 - protein, 13 aa, Homo sapiens
  CDR3 for alpha chain variable domain of TCR clone 12675 (TRAV20, TRAJ37)
CAGCYSNTGKLIF

SEQ ID NO: 25350 - protein, 11 aa, Homo sapiens
  CDR3 for beta chain variable domain of TCR clone 12675 (TRBV12-4, TRBJ2-3)
CASTATDTQYF

SEQ ID NO: 25351 - protein, 13 aa, Homo sapiens
  CDR3 for alpha chain variable domain of TCR clone 12676 (TRAV21, TRAJ57)
CAVTQGGSEQLVF

SEQ ID NO: 25352 - protein, 16 aa, Homo sapiens
  CDR3 for beta chain variable domain of TCR clone 12676 (TRBV29-1, TRBJ2-7)
CSVEDAEDGTAYEQYF

SEQ ID NO: 25353 - protein, 15 aa, Homo sapiens
  CDR3 for alpha chain variable domain of TCR clone 12677 (TRAV26-1, TRAJ40)
RIVRVTTSGTYKYIF

SEQ ID NO: 25354 - protein, 12 aa, Homo sapiens
  CDR3 for beta chain variable domain of TCR clone 12677 (TRBV7-9, TRBJ1-4)
CASSTDREKLFF

SEQ ID NO: 25355 - protein, 10 aa, Homo sapiens
  CDR3 for alpha chain variable domain of TCR clone 12678 (TRAV12-1, TRAJ37)
GSSNTGKLIF

SEQ ID NO: 25356 - protein, 15 aa, Homo sapiens
  CDR3 for beta chain variable domain of TCR clone 12678 (TRBV19, TRBJ1-6)
CASSTQGAVGSPLHF

SEQ ID NO: 25357 - protein, 15 aa, Homo sapiens
  CDR3 for alpha chain variable domain of TCR clone 12679 (TRAV8-3, TRAJ45)
CALSYSGGGADGLTF

SEQ ID NO: 25358 - protein, 13 aa, Homo sapiens
  CDR3 for beta chain variable domain of TCR clone 12679 (TRBV19, TRBJ1-2)
CASSVPGQDGYTF

SEQ ID NO: 25359 - protein, 13 aa, Homo sapiens
  CDR3 for alpha chain variable domain of TCR clone 12680 (TRAV13-2, TRAJ53)
CAENMGSNYKLTF

SEQ ID NO: 25360 - protein, 13 aa, Homo sapiens
  CDR3 for beta chain variable domain of TCR clone 12680 (TRBV4-1, TRBJ2-2)
CASGQENTGELFF

SEQ ID NO: 25361 - protein, 15 aa, Homo sapiens
  CDR3 for alpha chain variable domain of TCR clone 12681 (TRAV21, TRAJ24)
CAARSSTDSWGTLQF

SEQ ID NO: 25362 - protein, 13 aa, Homo sapiens
  CDR3 for beta chain variable domain of TCR clone 12681 (TRBV11-2, TRBJ2-5)
CASSSTGEETQYF

SEQ ID NO: 25363 - protein, 12 aa, Homo sapiens
  CDR3 for alpha chain variable domain of TCR clone 12682 (TRAV12-3, TRAJ17)
CAMTLTGNKLTF

SEQ ID NO: 25364 - protein, 13 aa, Homo sapiens
  CDR3 for beta chain variable domain of TCR clone 12682 (TRBV19, TRBJ2-7)
CASSIDRTYEQYF

SEQ ID NO: 25365 - protein, 14 aa, Homo sapiens
  CDR3 for alpha chain variable domain of TCR clone 12683 (TRAV13-1, TRAJ35)
CAASKGGFGNVLHS

SEQ ID NO: 25366 - protein, 13 aa, Homo sapiens
  CDR3 for beta chain variable domain of TCR clone 12683 (TRBV7-3, TRBJ1-1)
CASSQDWGAEAFF

SEQ ID NO: 25367 - protein, 13 aa, Homo sapiens
  CDR3 for alpha chain variable domain of TCR clone 12684 (TRAV2, TRAJ40)
CAVVTSGTYKYIF

SEQ ID NO: 25368 - protein, 16 aa, Homo sapiens
  CDR3 for beta chain variable domain of TCR clone 12684 (TRBV7-9, TRBJ1-3)
CASSLGAGSSGNTMYF

SEQ ID NO: 25369 - protein, 13 aa, Homo sapiens
  CDR3 for alpha chain variable domain of TCR clone 12685 (TRAV12-2, TRAJ45)
CAVNRGGADGLTF

SEQ ID NO: 25370 - protein, 16 aa, Homo sapiens
  CDR3 for beta chain variable domain of TCR clone 12685 (TRBV2, TRBJ1-1)
CASSPTLGGASTEAFF

SEQ ID NO: 25371 - protein, 17 aa, Homo sapiens
  CDR3 for alpha chain variable domain of TCR clone 12686 (TRAV3, TRAJ6)
CVVRDGPRAGGSYIPTF

SEQ ID NO: 25372 - protein, 14 aa, Homo sapiens
  CDR3 for beta chain variable domain of TCR clone 12686 (TRBV7-2, TRBJ2-7)
CASSPKTSFYEQYF

SEQ ID NO: 25373 - protein, 13 aa, Homo sapiens
  CDR3 for alpha chain variable domain of TCR clone 12687 (TRAV27, TRAJ45)
CRSSGGGADGLTF

SEQ ID NO: 25374 - protein, 17 aa, Homo sapiens
  CDR3 for beta chain variable domain of TCR clone 12687 (TRBV11-2, TRBJ2-1)
CASSLYPPGAEYNEQFF

SEQ ID NO: 25375 - protein, 12 aa, Homo sapiens
  CDR3 for alpha chain variable domain of TCR clone 12688 (TRAV3, TRAJ43)
CAVRDPNNDMRF

SEQ ID NO: 25376 - protein, 15 aa, Homo sapiens
  CDR3 for beta chain variable domain of TCR clone 12688 (TRBV4-3, TRBJ2-7)
RASSQGDWGDYEQYF

SEQ ID NO: 25377 - protein, 13 aa, Homo sapiens
  CDR3 for alpha chain variable domain of TCR clone 12689 (TRAV21, TRAJ27)
CAARPGNAGKSTF

SEQ ID NO: 25378 - protein, 14 aa, Homo sapiens
  CDR3 for beta chain variable domain of TCR clone 12689 (TRBV7-6, TRBJ2-3)
CASSLGTVTDTQYV

SEQ ID NO: 25379 - protein, 15 aa, Homo sapiens
  CDR3 for alpha chain variable domain of TCR clone 12690 (TRAV3, TRAJ20)
CAVRDIKLSDYRLSF

SEQ ID NO: 25380 - protein, 15 aa, Homo sapiens
  CDR3 for beta chain variable domain of TCR clone 12690 (TRBV7-9, TRBJ1-6)
CASSSPGRGNSPLHF

SEQ ID NO: 25381 - protein, 10 aa, Homo sapiens
  CDR3 for alpha chain variable domain of TCR clone 12691 (TRAV5, TRAJ34)
CAEDTDKLIF

SEQ ID NO: 25382 - protein, 14 aa, Homo sapiens
  CDR3 for beta chain variable domain of TCR clone 12691 (TRBV11-2, TRBJ2-5)
CASSRTGGIETQYF

SEQ ID NO: 25383 - protein, 15 aa, Homo sapiens
  CDR3 for alpha chain variable domain of TCR clone 12692 (TRAV12-2, TRAJ53)
CAVNGGGGSNYKLTF

SEQ ID NO: 25384 - protein, 14 aa, Homo sapiens
  CDR3 for beta chain variable domain of TCR clone 12692 (TRBV4-2, TRBJ2-1)
CASGLDRAYNEQFF

SEQ ID NO: 25385 - protein, 13 aa, Homo sapiens
  CDR3 for alpha chain variable domain of TCR clone 12693 (TRAV21, TRAJ57)
CAVTQGGSEKLVF

SEQ ID NO: 25386 - protein, 16 aa, Homo sapiens
  CDR3 for beta chain variable domain of TCR clone 12693 (TRBV29-1, TRBJ2-7)
CSVEDAEDGMAYEQYF

SEQ ID NO: 25387 - protein, 15 aa, Homo sapiens
  CDR3 for alpha chain variable domain of TCR clone 12694 (TRAV3, TRAJ3)
CAVRDRDSSASKIIF

SEQ ID NO: 25388 - protein, 18 aa, Homo sapiens
  CDR3 for beta chain variable domain of TCR clone 12694 (TRBV25-1, TRBJ1-2)
CASSGLQNGQGLIFGYAF

SEQ ID NO: 25389 - protein, 11 aa, Homo sapiens
  CDR3 for alpha chain variable domain of TCR clone 12695 (TRAV12-1, TRAJ30)
CVVNGQDKIIL

SEQ ID NO: 25390 - protein, 12 aa, Homo sapiens
  CDR3 for beta chain variable domain of TCR clone 12695 (TRBV27, TRBJ2-2)
CASKLFTGELFF

SEQ ID NO: 25391 - protein, 14 aa, Homo sapiens
  CDR3 for alpha chain variable domain of TCR clone 12696 (TRAV9-2, TRAJ39)
CALYIYNAGNMLTF

SEQ ID NO: 25392 - protein, 13 aa, Homo sapiens
  CDR3 for beta chain variable domain of TCR clone 12696 (TRBV29-1, TRBJ2-5)
CSVTIASEETQYF

SEQ ID NO: 25393 - protein, 15 aa, Homo sapiens
  CDR3 for alpha chain variable domain of TCR clone 12697 (TRAV26-1, TRAJ29)
CIVRVEGSGNTPLIF

SEQ ID NO: 25394 - protein, 15 aa, Homo sapiens
  CDR3 for beta chain variable domain of TCR clone 12697 (TRBV7-9, TRBJ1-5)
CASSQGHQPNQPQHF

SEQ ID NO: 25395 - protein, 13 aa, Homo sapiens
  CDR3 for alpha chain variable domain of TCR clone 12698 (TRAV2, TRAJ29)
CAAQNSGNTPLVF

SEQ ID NO: 25396 - protein, 14 aa, Homo sapiens
  CDR3 for beta chain variable domain of TCR clone 12698 (TRBV7-9, TRBJ2-4)
CASSLAMGGNVQYF

SEQ ID NO: 25397 - protein, 14 aa, Homo sapiens
  CDR3 for alpha chain variable domain of TCR clone 12699 (TRAV12-3, TRAJ21)
CAMEGHQGFNKFYF

SEQ ID NO: 25398 - protein, 14 aa, Homo sapiens
  CDR3 for beta chain variable domain of TCR clone 12699 (TRBV5-1, TRBJ1-4)
CASSLGDRNEKLFF

SEQ ID NO: 25399 - protein, 14 aa, Homo sapiens
  CDR3 for alpha chain variable domain of TCR clone 12700 (TRAV13-1, TRAJ35)
CAASKGGCGNVLHC

SEQ ID NO: 25400 - protein, 13 aa, Homo sapiens
  CDR3 for beta chain variable domain of TCR clone 12700 (TRBV7-3, TRBJ1-1)
CASSQDWGAEAFF

SEQ ID NO: 25401 - protein, 17 aa, Homo sapiens
  CDR3 for alpha chain variable domain of TCR clone 12701 (TRAV14/DV4, TRAJ56)
CAMREGSSFGANSKLTF

SEQ ID NO: 25402 - protein, 14 aa, Homo sapiens
  CDR3 for beta chain variable domain of TCR clone 12701 (TRBV7-9, TRBJ2-3)
CASSLEQGTNTQYF

SEQ ID NO: 25403 - protein, 15 aa, Homo sapiens
  CDR3 for alpha chain variable domain of TCR clone 12702 (TRAV26-1, TRAJ22)
CIVRVSFWFCKATDL

SEQ ID NO: 25404 - protein, 13 aa, Homo sapiens
  CDR3 for beta chain variable domain of TCR clone 12702 (TRBV7-9, TRBJ1-2)
CASSLKQNYGYTV

SEQ ID NO: 25405 - protein, 14 aa, Homo sapiens
  CDR3 for alpha chain variable domain of TCR clone 12703 (TRAV13-1, TRAJ5)
CAAHPDTGRRALTF

SEQ ID NO: 25406 - protein, 14 aa, Homo sapiens
  CDR3 for beta chain variable domain of TCR clone 12703 (TRBV6-4, TRBJ1-1)
CASRADREGTEAFF

SEQ ID NO: 25407 - protein, 15 aa, Homo sapiens
  CDR3 for alpha chain variable domain of TCR clone 12704 (TRAV12-3, TRAJ6)
CAMSATTGGSYIPTF

SEQ ID NO: 25408 - protein, 16 aa, Homo sapiens
  CDR3 for beta chain variable domain of TCR clone 12704 (TRBV7-3, TRBJ2-1)
CASSLEGYRSYNEQFF

SEQ ID NO: 25409 - protein, 12 aa, Homo sapiens
  CDR3 for alpha chain variable domain of TCR clone 12705 (TRAV13-2, TRAJ23)
CAERHRGGKLIF

SEQ ID NO: 25410 - protein, 16 aa, Homo sapiens
  CDR3 for beta chain variable domain of TCR clone 12705 (TRBV20-1, TRBJ1-4)
CSAPGQGLLTNENLFF

SEQ ID NO: 25411 - protein, 15 aa, Homo sapiens
  CDR3 for alpha chain variable domain of TCR clone 12706 (TRAV3, TRAJ5)
CAVRDLDTGRRAPTF

SEQ ID NO: 25412 - protein, 13 aa, Homo sapiens
  CDR3 for beta chain variable domain of TCR clone 12706 (TRBV12-4, TRBJ2-7)
CASSPTETYEQYF

SEQ ID NO: 25413 - protein, 13 aa, Homo sapiens
  CDR3 for alpha chain variable domain of TCR clone 12707 (TRAV21, TRAJ57)
CAVTHGGSEKLVF

SEQ ID NO: 25414 - protein, 16 aa, Homo sapiens
  CDR3 for beta chain variable domain of TCR clone 12707 (TRBV29-1, TRBJ2-7)
CSVEDAEDGTAYEQYF

SEQ ID NO: 25415 - protein, 14 aa, Homo sapiens
  CDR3 for alpha chain variable domain of TCR clone 12708 (TRAV1-2, TRAJ16)
CAVNRFSDGQKLLF

SEQ ID NO: 25416 - protein, 14 aa, Homo sapiens
  CDR3 for beta chain variable domain of TCR clone 12708 (TRBV7-3, TRBJ2-2)
CASSSGGYTGELFF

SEQ ID NO: 25417 - protein, 15 aa, Homo sapiens
  CDR3 for alpha chain variable domain of TCR clone 12709 (TRAV3, TRAJ5)
CAVRDLYTGRRALTF

SEQ ID NO: 25418 - protein, 13 aa, Homo sapiens
  CDR3 for beta chain variable domain of TCR clone 12709 (TRBV12-4, TRBJ2-7)
CASSPTETYEQYF

SEQ ID NO: 25419 - protein, 16 aa, Homo sapiens
  CDR3 for alpha chain variable domain of TCR clone 12710 (TRAV12-3, TRAJ53)
CAMSSGSGGSNYKLTF

SEQ ID NO: 25420 - protein, 11 aa, Homo sapiens
  CDR3 for beta chain variable domain of TCR clone 12710 (TRBV29-1, TRBJ2-5)
CSEDRTGTQYF

SEQ ID NO: 25421 - protein, 15 aa, Homo sapiens
  CDR3 for alpha chain variable domain of TCR clone 12711 (TRAV21, TRAJ24)
RAARSSTDSWGKLQF

SEQ ID NO: 25422 - protein, 13 aa, Homo sapiens
  CDR3 for beta chain variable domain of TCR clone 12711 (TRBV11-2, TRBJ2-5)
CASSSTGEETQYF

SEQ ID NO: 25423 - protein, 15 aa, Homo sapiens
  CDR3 for alpha chain variable domain of TCR clone 12712 (TRAV8-3, TRAJ45)
CASSYSGGGADGLTI

SEQ ID NO: 25424 - protein, 13 aa, Homo sapiens
  CDR3 for beta chain variable domain of TCR clone 12712 (TRBV10-3, TRBJ2-7)
CASKLAVNYEQYF

SEQ ID NO: 25425 - protein, 16 aa, Homo sapiens
  CDR3 for alpha chain variable domain of TCR clone 12713 (TRAV17, TRAJ21)
CATDAETTSTNFTLDL

SEQ ID NO: 25426 - protein, 17 aa, Homo sapiens
  CDR3 for beta chain variable domain of TCR clone 12713 (TRBV13, TRBJ2-3)
CASSLSRVAGGRNTQYF

SEQ ID NO: 25427 - protein, 13 aa, Homo sapiens
  CDR3 for alpha chain variable domain of TCR clone 12714 (TRAV21, TRAJ57)
CAVTQGGSEKLVF

SEQ ID NO: 25428 - protein, 13 aa, Homo sapiens
  CDR3 for beta chain variable domain of TCR clone 12714 (TRBV7-9, TRBJ1-2)
CASSLKQNYGYTF

SEQ ID NO: 25429 - protein, 14 aa, Homo sapiens
  CDR3 for alpha chain variable domain of TCR clone 12715 (TRAV12-2, TRAJ13)
CAVKKTGGYQKVTF

SEQ ID NO: 25430 - protein, 14 aa, Homo sapiens
  CDR3 for beta chain variable domain of TCR clone 12715 (TRBV5-5, TRBJ2-7)
CASSLGQGTHEQYF

SEQ ID NO: 25431 - protein, 13 aa, Homo sapiens
  CDR3 for alpha chain variable domain of TCR clone 12716 (TRAV8-3, TRAJ28)
CAVGAVVSYQLTF

SEQ ID NO: 25432 - protein, 15 aa, Homo sapiens
  CDR3 for beta chain variable domain of TCR clone 12716 (TRBV7-9, TRBJ1-5)
CASSQGHQPNQPQHF

SEQ ID NO: 25433 - protein, 15 aa, Homo sapiens
  CDR3 for alpha chain variable domain of TCR clone 12717 (TRAV23/DV6, TRAJ18)
CAARYRGSTLGRLYF

SEQ ID NO: 25434 - protein, 13 aa, Homo sapiens
  CDR3 for beta chain variable domain of TCR clone 12717 (TRBV7-2, TRBJ2-7)
CASSSPSGGEQYF

SEQ ID NO: 25435 - protein, 16 aa, Homo sapiens
  CDR3 for alpha chain variable domain of TCR clone 12718 (TRAV30, TRAJ24)
CGTEIVDADSWGKFQF

SEQ ID NO: 25436 - protein, 13 aa, Homo sapiens
  CDR3 for beta chain variable domain of TCR clone 12718 (TRBV6-5, TRBJ1-5)
CASSLYSNQPQHF

SEQ ID NO: 25437 - protein, 12 aa, Homo sapiens
  CDR3 for alpha chain variable domain of TCR clone 12719 (TRAV17, TRAJ57)
CATDGGSEKLVF

SEQ ID NO: 25438 - protein, 16 aa, Homo sapiens
  CDR3 for beta chain variable domain of TCR clone 12719 (TRBV2, TRBJ2-1)
CASSVGGSLSYNEQFF

SEQ ID NO: 25439 - protein, 14 aa, Homo sapiens
  CDR3 for alpha chain variable domain of TCR clone 12720 (TRAV12-2, TRAJ13)
CAVKKTGGYQKVTV

SEQ ID NO: 25440 - protein, 15 aa, Homo sapiens
  CDR3 for beta chain variable domain of TCR clone 12720 (TRBV27, TRBJ2-1)
CASSNGGGSSNEQFF

SEQ ID NO: 25441 - protein, 13 aa, Homo sapiens
  CDR3 for alpha chain variable domain of TCR clone 12721 (TRAV12-3, TRAJ10)
CAVGTGGGNKLTF

SEQ ID NO: 25442 - protein, 13 aa, Homo sapiens
  CDR3 for beta chain variable domain of TCR clone 12721 (TRBV11-3, TRBJ2-3)
CASSFTGPDTQYF

SEQ ID NO: 25443 - protein, 14 aa, Homo sapiens
  CDR3 for alpha chain variable domain of TCR clone 12722 (TRAV12-2, TRAJ13)
CAVKKTGDYQKVTF

SEQ ID NO: 25444 - protein, 15 aa, Homo sapiens
  CDR3 for beta chain variable domain of TCR clone 12722 (TRBV27, TRBJ2-1)
CASSNGGGSSNEQFF

SEQ ID NO: 25445 - protein, 16 aa, Homo sapiens
  CDR3 for alpha chain variable domain of TCR clone 12723 (TRAV21, TRAJ45)
RAVSWGSGGGADGLTF

SEQ ID NO: 25446 - protein, 14 aa, Homo sapiens
  CDR3 for beta chain variable domain of TCR clone 12723 (TRBV4-2, TRBJ1-2)
CASSPGGSNYGYTF

SEQ ID NO: 25447 - protein, 14 aa, Homo sapiens
  CDR3 for alpha chain variable domain of TCR clone 12724 (TRAV12-2, TRAJ13)
CAVKKTGGYQKVTF

SEQ ID NO: 25448 - protein, 18 aa, Homo sapiens
  CDR3 for beta chain variable domain of TCR clone 12724 (TRBV19, TRBJ1-1)
CASSIDGGDYTGNTEAFF

SEQ ID NO: 25449 - protein, 15 aa, Homo sapiens
  CDR3 for alpha chain variable domain of TCR clone 12725 (TRAV26-1, TRAJ22)
CIVRVSFWFCKATDL

SEQ ID NO: 25450 - protein, 13 aa, Homo sapiens
  CDR3 for beta chain variable domain of TCR clone 12725 (TRBV7-9, TRBJ1-2)
CASSLKRNYGYTF

SEQ ID NO: 25451 - protein, 14 aa, Homo sapiens
  CDR3 for alpha chain variable domain of TCR clone 12726 (TRAV12-2, TRAJ13)
CAVKKTGGYPKVTF

SEQ ID NO: 25452 - protein, 15 aa, Homo sapiens
  CDR3 for beta chain variable domain of TCR clone 12726 (TRBV27, TRBJ2-1)
CASSNGGGSSNEQFF

SEQ ID NO: 25453 - protein, 13 aa, Homo sapiens
  CDR3 for alpha chain variable domain of TCR clone 12727 (TRAV1-1, TRAJ9)
CAAKNTGGLKTIF

SEQ ID NO: 25454 - protein, 14 aa, Homo sapiens
  CDR3 for beta chain variable domain of TCR clone 12727 (TRBV20-1, TRBJ2-1)
CSAQIGGSANEQFF

SEQ ID NO: 25455 - protein, 12 aa, Homo sapiens
  CDR3 for alpha chain variable domain of TCR clone 12728 (TRAV8-3, TRAJ26)
CAGDNYGQNFVF

SEQ ID NO: 25456 - protein, 16 aa, Homo sapiens
  CDR3 for beta chain variable domain of TCR clone 12728 (TRBV6-1, TRBJ2-5)
CASSETLDRGAETQYF

SEQ ID NO: 25457 - protein, 15 aa, Homo sapiens
  CDR3 for alpha chain variable domain of TCR clone 12729 (TRAV20, TRAJ53)
CAVQASGGSNYKLTF

SEQ ID NO: 25458 - protein, 14 aa, Homo sapiens
  CDR3 for beta chain variable domain of TCR clone 12729 (TRBV7-2, TRBJ2-3)
CASSLVGRSRYAVF

SEQ ID NO: 25459 - protein, 14 aa, Homo sapiens
  CDR3 for alpha chain variable domain of TCR clone 12730 (TRAV1-2, TRAJ8)
CAVREDTGCQKLVF

SEQ ID NO: 25460 - protein, 15 aa, Homo sapiens
  CDR3 for beta chain variable domain of TCR clone 12730 (TRBV6-3, TRBJ2-7)
CASSSPGTVFYEQYF

SEQ ID NO: 25461 - protein, 17 aa, Homo sapiens
  CDR3 for alpha chain variable domain of TCR clone 12731 (TRAV3, TRAJ6)
CAVRDGPRAGRSYIPTF

SEQ ID NO: 25462 - protein, 14 aa, Homo sapiens
  CDR3 for beta chain variable domain of TCR clone 12731 (TRBV7-2, TRBJ2-7)
CASSPKTSFYEQYF

SEQ ID NO: 25463 - protein, 13 aa, Homo sapiens
  CDR3 for alpha chain variable domain of TCR clone 12732 (TRAV30, TRAJ34)
CGTVGYNTDKLIF

SEQ ID NO: 25464 - protein, 16 aa, Homo sapiens
  CDR3 for beta chain variable domain of TCR clone 12732 (TRBV7-9, TRBJ1-2)
CASSLGFSAGEDGYTF

SEQ ID NO: 25465 - protein, 17 aa, Homo sapiens
  CDR3 for alpha chain variable domain of TCR clone 12733 (TRAV3, TRAJ6)
CTVRDGPRAGGSYIPTF

SEQ ID NO: 25466 - protein, 14 aa, Homo sapiens
  CDR3 for beta chain variable domain of TCR clone 12733 (TRBV7-2, TRBJ2-7)
CASSPKTSFYEQYF

SEQ ID NO: 25467 - protein, 13 aa, Homo sapiens
  CDR3 for alpha chain variable domain of TCR clone 12734 (TRAV17, TRAJ9)
RATDGTGGFKTIF

SEQ ID NO: 25468 - protein, 20 aa, Homo sapiens
  CDR3 for beta chain variable domain of TCR clone 12734 (TRBV7-8, TRBJ2-2)
CASSHLFPGPTIHITGELFF

SEQ ID NO: 25469 - protein, 18 aa, Homo sapiens
  CDR3 for alpha chain variable domain of TCR clone 12735 (TRAV12-3, TRAJ52)
CAMSVGGAGGTSYGKLTF

SEQ ID NO: 25470 - protein, 15 aa, Homo sapiens
  CDR3 for beta chain variable domain of TCR clone 12735 (TRBV27, TRBJ1-6)
CASSFDRGLGSHLHF

SEQ ID NO: 25471 - protein, 14 aa, Homo sapiens
  CDR3 for alpha chain variable domain of TCR clone 12736 (TRAV1-1, TRAJ27)
CAVIYNTNAGKSTL

SEQ ID NO: 25472 - protein, 15 aa, Homo sapiens
  CDR3 for beta chain variable domain of TCR clone 12736 (TRBV7-2, TRBJ2-1)
CASSSGLAGGNEQFF

SEQ ID NO: 25473 - protein, 16 aa, Homo sapiens
  CDR3 for alpha chain variable domain of TCR clone 12737 (TRAV3, TRAJ23)
CAVKIGIYNQGGKLIF

SEQ ID NO: 25474 - protein, 17 aa, Homo sapiens
  CDR3 for beta chain variable domain of TCR clone 12737 (TRBV10-3, TRBJ2-6)
CAISESTAPSGANDLTF

SEQ ID NO: 25475 - protein, 14 aa, Homo sapiens
  CDR3 for alpha chain variable domain of TCR clone 12738 (TRAV12-3, TRAJ10)
SHLPLTGGGNKLTF

SEQ ID NO: 25476 - protein, 15 aa, Homo sapiens
  CDR3 for beta chain variable domain of TCR clone 12738 (TRBV12-4, TRBJ2-1)
CASSLLGRTYNEQFF

SEQ ID NO: 25477 - protein, 13 aa, Homo sapiens
  CDR3 for alpha chain variable domain of TCR clone 12739 (TRAV8-4, TRAJ10)
CAAFTGGGNKLTF

SEQ ID NO: 25478 - protein, 14 aa, Homo sapiens
  CDR3 for beta chain variable domain of TCR clone 12739 (TRBV7-8, TRBJ2-7)
CASSPRDRVYEQYF

SEQ ID NO: 25479 - protein, 11 aa, Homo sapiens
  CDR3 for alpha chain variable domain of TCR clone 12740 (TRAV12-2, TRAJ3)
CAVKRASKIIF

SEQ ID NO: 25480 - protein, 15 aa, Homo sapiens
  CDR3 for beta chain variable domain of TCR clone 12740 (TRBV5-1, TRBJ2-3)
CASSVTSGSTDTQYF

SEQ ID NO: 25481 - protein, 14 aa, Homo sapiens
  CDR3 for alpha chain variable domain of TCR clone 12741 (TRAV38-1, TRAJ29)
CAFITPSGNTPLVF

SEQ ID NO: 25482 - protein, 12 aa, Homo sapiens
  CDR3 for beta chain variable domain of TCR clone 12741 (TRBV14, TRBJ1-1)
CASSQLKGLAFF

SEQ ID NO: 25483 - protein, 15 aa, Homo sapiens
  CDR3 for alpha chain variable domain of TCR clone 12742 (TRAV12-1, TRAJ42)
CVVTRDGGSQGNPIF

SEQ ID NO: 25484 - protein, 14 aa, Homo sapiens
  CDR3 for beta chain variable domain of TCR clone 12742 (TRBV11-2, TRBJ2-3)
CASSLGGGANTQYF

SEQ ID NO: 25485 - protein, 23 aa, Homo sapiens
  CDR3 for alpha chain variable domain of TCR clone 12743 (TRAV26-1, TRAJ38)
CIADNAGNNHIQNPDPAVYPLRD

SEQ ID NO: 25486 - protein, 13 aa, Homo sapiens
  CDR3 for beta chain variable domain of TCR clone 12743 (TRBV20-1, TRBJ1-1)
CSARGGGNTEAFF

SEQ ID NO: 25487 - protein, 14 aa, Homo sapiens
  CDR3 for alpha chain variable domain of TCR clone 12744 (TRAV12-1, TRAJ17)
CVVNYKASGNKLTF

SEQ ID NO: 25488 - protein, 17 aa, Homo sapiens
  CDR3 for beta chain variable domain of TCR clone 12744 (TRBV20-1, TRBJ2-1)
CSASSSGLAGSYNEQFF

SEQ ID NO: 25489 - protein, 18 aa, Homo sapiens
  CDR3 for alpha chain variable domain of TCR clone 12745 (TRAV26-1, TRAJ23)
CIVRVSLEVWNQGGKLIF

SEQ ID NO: 25490 - protein, 16 aa, Homo sapiens
  CDR3 for beta chain variable domain of TCR clone 12745 (TRBV12-4, TRBJ2-5)
CASSFFVRGRQETQYF

SEQ ID NO: 25491 - protein, 12 aa, Homo sapiens
  CDR3 for alpha chain variable domain of TCR clone 12746 (TRAV25, TRAJ26)
CAGDNYGQNFVF

SEQ ID NO: 25492 - protein, 14 aa, Homo sapiens
  CDR3 for beta chain variable domain of TCR clone 12746 (TRBV5-1, TRBJ2-7)
CASSRGESLYEQYF

SEQ ID NO: 25493 - protein, 13 aa, Homo sapiens
  CDR3 for alpha chain variable domain of TCR clone 12747 (TRAV2, TRAJ40)
CAVVTSGTYKYIF

SEQ ID NO: 25494 - protein, 14 aa, Homo sapiens
  CDR3 for beta chain variable domain of TCR clone 12747 (TRBV4-1, TRBJ2-2)
CASSQAVNTGELFF

SEQ ID NO: 25495 - protein, 23 aa, Homo sapiens
  CDR3 for alpha chain variable domain of TCR clone 12748 (TRAV12-2, TRAJ22)
CAVGFRVHPGPPIVSGSARQLTF

SEQ ID NO: 25496 - protein, 13 aa, Homo sapiens
  CDR3 for beta chain variable domain of TCR clone 12748 (TRBV12-4, TRBJ1-2)
CASSLDSNYGYTF

SEQ ID NO: 25497 - protein, 11 aa, Homo sapiens
  CDR3 for alpha chain variable domain of TCR clone 12749 (TRAV21, TRAJ34)
CAHYNTDKLIF

SEQ ID NO: 25498 - protein, 13 aa, Homo sapiens
  CDR3 for beta chain variable domain of TCR clone 12749 (TRBV7-6, TRBJ1-2)
CASSVVADYGYTF

SEQ ID NO: 25499 - protein, 15 aa, Homo sapiens
  CDR3 for alpha chain variable domain of TCR clone 12750 (TRAV3, TRAJ22)
CAVRDRGGSARQLTF

SEQ ID NO: 25500 - protein, 15 aa, Homo sapiens
  CDR3 for beta chain variable domain of TCR clone 12750 (TRBV27, TRBJ1-4)
CASSAQQDLNEKLFF

SEQ ID NO: 25501 - protein, 14 aa, Homo sapiens
  CDR3 for alpha chain variable domain of TCR clone 12751 (TRAV26-1, TRAJ39)
CIVRGSRAGNMFTF

SEQ ID NO: 25502 - protein, 15 aa, Homo sapiens
  CDR3 for beta chain variable domain of TCR clone 12751 (TRBV7-9, TRBJ1-5)
CASSQGHQPNQPQHF

SEQ ID NO: 25503 - protein, 15 aa, Homo sapiens
  CDR3 for alpha chain variable domain of TCR clone 12752 (TRAV8-3, TRAJ45)
CASSYSGGGADRLTF

SEQ ID NO: 25504 - protein, 13 aa, Homo sapiens
  CDR3 for beta chain variable domain of TCR clone 12752 (TRBV10-3, TRBJ2-7)
CASKLAVNYEQYF

SEQ ID NO: 25505 - protein, 14 aa, Homo sapiens
  CDR3 for alpha chain variable domain of TCR clone 12753 (TRAV13-1, TRAJ44)
CAAKATGTASKLTF

SEQ ID NO: 25506 - protein, 14 aa, Homo sapiens
  CDR3 for beta chain variable domain of TCR clone 12753 (TRBV7-2, TRBJ2-7)
CASSPKTSFYEQYF

SEQ ID NO: 25507 - protein, 16 aa, Homo sapiens
  CDR3 for alpha chain variable domain of TCR clone 12754 (TRAV3, TRAJ37)
CAVRGKGSGNTGNLIF

SEQ ID NO: 25508 - protein, 16 aa, Homo sapiens
  CDR3 for beta chain variable domain of TCR clone 12754 (TRBV12-4, TRBJ1-5)
CASSRPVGGSNQPQHF

SEQ ID NO: 25509 - protein, 14 aa, Homo sapiens
  CDR3 for alpha chain variable domain of TCR clone 12755 (TRAV12-3, TRAJ9)
CAMSPNTGGFKTIF

SEQ ID NO: 25510 - protein, 15 aa, Homo sapiens
  CDR3 for beta chain variable domain of TCR clone 12755 (TRBV15, TRBJ1-5)
CATSREQGGNQPQHF

SEQ ID NO: 25511 - protein, 14 aa, Homo sapiens
  CDR3 for alpha chain variable domain of TCR clone 12756 (TRAV23/DV6, TRAJ36)
CAASRRTGANNLFF

SEQ ID NO: 25512 - protein, 14 aa, Homo sapiens
  CDR3 for beta chain variable domain of TCR clone 12756 (TRBV6-1, TRBJ1-2)
CASSDTGASYGYTF

SEQ ID NO: 25513 - protein, 15 aa, Homo sapiens
  CDR3 for alpha chain variable domain of TCR clone 12757 (TRAV17, TRAJ57)
CATGPSQGGSENLVF

SEQ ID NO: 25514 - protein, 16 aa, Homo sapiens
  CDR3 for beta chain variable domain of TCR clone 12757 (TRBV12-4, TRBJ1-5)
CASSRPVGGSNQPQHF

SEQ ID NO: 25515 - protein, 22 aa, Homo sapiens
  CDR3 for alpha chain variable domain of TCR clone 12758 (TRAV8-3, TRAJ32)
CAVEVVLQTSSSLELALCLLSS

SEQ ID NO: 25516 - protein, 15 aa, Homo sapiens
  CDR3 for beta chain variable domain of TCR clone 12758 (TRBV6-3, TRBJ2-7)
CASSSPGTVFYEQYF

SEQ ID NO: 25517 - protein, 12 aa, Homo sapiens
  CDR3 for alpha chain variable domain of TCR clone 12759 (TRAV12-3, TRAJ17)
CAMTLTGNKLTF

SEQ ID NO: 25518 - protein, 15 aa, Homo sapiens
  CDR3 for beta chain variable domain of TCR clone 12759 (TRBV20-1, TRBJ2-7)
CSARDRVSGMDEPYF

SEQ ID NO: 25519 - protein, 17 aa, Homo sapiens
  CDR3 for alpha chain variable domain of TCR clone 12760 (TRAV3, TRAJ42)
CAVRDRDYGGSQGKLIF

SEQ ID NO: 25520 - protein, 15 aa, Homo sapiens
  CDR3 for beta chain variable domain of TCR clone 12760 (TRBV6-6, TRBJ2-7)
CASSYSYGGSYEQYF

SEQ ID NO: 25521 - protein, 15 aa, Homo sapiens
  CDR3 for alpha chain variable domain of TCR clone 12761 (TRAV9-2, TRAJ10)
CALSDLGGGGNKLTF

SEQ ID NO: 25522 - protein, 15 aa, Homo sapiens
  CDR3 for beta chain variable domain of TCR clone 12761 (TRBV6-6, TRBJ2-1)
CATRQGVSSYNEQFF

SEQ ID NO: 25523 - protein, 18 aa, Homo sapiens
  CDR3 for alpha chain variable domain of TCR clone 12762 (TRAV23/DV6, )
CAEPDIQNPDPAVYQLRD

SEQ ID NO: 25524 - protein, 15 aa, Homo sapiens
  CDR3 for beta chain variable domain of TCR clone 12762 (TRBV12-4, TRBJ2-5)
CASTLNSGRGETQYF

SEQ ID NO: 25525 - protein, 13 aa, Homo sapiens
  CDR3 for alpha chain variable domain of TCR clone 12763 (TRAV20, TRAJ37)
CAGCSSNTGKLIF

SEQ ID NO: 25526 - protein, 11 aa, Homo sapiens
  CDR3 for beta chain variable domain of TCR clone 12763 (TRBV12-4, TRBJ2-3)
CASTATDTRYF

SEQ ID NO: 25527 - protein, 15 aa, Homo sapiens
  CDR3 for alpha chain variable domain of TCR clone 12764 (TRAV26-1, TRAJ29)
CIVRVGGSGNTPLVF

SEQ ID NO: 25528 - protein, 14 aa, Homo sapiens
  CDR3 for beta chain variable domain of TCR clone 12764 (TRBV18, TRBJ2-5)
CASSPGVSQETQYF

SEQ ID NO: 25529 - protein, 12 aa, Homo sapiens
  CDR3 for alpha chain variable domain of TCR clone 12765 (TRAV12-1, TRAJ40)
CVVYSGTHKYIF

SEQ ID NO: 25530 - protein, 18 aa, Homo sapiens
  CDR3 for beta chain variable domain of TCR clone 12765 (TRBV11-2, TRBJ2-3)
CASSLGGASRGAPNTQYF

SEQ ID NO: 25531 - protein, 12 aa, Homo sapiens
  CDR3 for alpha chain variable domain of TCR clone 12766 (TRAV12-1, TRAJ40)
CVVYSGTYNYIF

SEQ ID NO: 25532 - protein, 18 aa, Homo sapiens
  CDR3 for beta chain variable domain of TCR clone 12766 (TRBV11-2, TRBJ2-3)
CASSLGGASRGAPNTQYF

SEQ ID NO: 25533 - protein, 14 aa, Homo sapiens
  CDR3 for alpha chain variable domain of TCR clone 12767 (TRAV12-3, TRAJ10)
SHLPLTGGGNKLTF

SEQ ID NO: 25534 - protein, 15 aa, Homo sapiens
  CDR3 for beta chain variable domain of TCR clone 12767 (TRBV5-1, TRBJ2-7)
CASSLMTSGSNEQYF

SEQ ID NO: 25535 - protein, 21 aa, Homo sapiens
  CDR3 for alpha chain variable domain of TCR clone 12768 (TRAV41, TRAJ45)
TASHPRDSAGASGGGADGLTF

SEQ ID NO: 25536 - protein, 16 aa, Homo sapiens
  CDR3 for beta chain variable domain of TCR clone 12768 (TRBV5-5, TRBJ2-2)
CASSGRREGATGELFF

SEQ ID NO: 25537 - protein, 15 aa, Homo sapiens
  CDR3 for alpha chain variable domain of TCR clone 12769 (TRAV19, TRAJ9)
CALSLPDTGGFKTIF

SEQ ID NO: 25538 - protein, 15 aa, Homo sapiens
  CDR3 for beta chain variable domain of TCR clone 12769 (TRBV9, TRBJ2-1)
CASSLAGSSYNEQFF

SEQ ID NO: 25539 - protein, 14 aa, Homo sapiens
  CDR3 for alpha chain variable domain of TCR clone 12770 (TRAV12-2, TRAJ13)
CAVNPSGGYQKVTF

SEQ ID NO: 25540 - protein, 13 aa, Homo sapiens
  CDR3 for beta chain variable domain of TCR clone 12770 (TRBV20-1, TRBJ1-6)
CSAKLGGTSPLHL

SEQ ID NO: 25541 - protein, 15 aa, Homo sapiens
  CDR3 for alpha chain variable domain of TCR clone 12771 (TRAV27, TRAJ38)
CAARRNAGNNRKLIW

SEQ ID NO: 25542 - protein, 14 aa, Homo sapiens
  CDR3 for beta chain variable domain of TCR clone 12771 (TRBV19, TRBJ2-1)
CASPTFVLSGEQFF

SEQ ID NO: 25543 - protein, 13 aa, Homo sapiens
  CDR3 for alpha chain variable domain of TCR clone 12772 (TRAV3, TRAJ21)
CAVREPDFNKFYF

SEQ ID NO: 25544 - protein, 13 aa, Homo sapiens
  CDR3 for beta chain variable domain of TCR clone 12772 (TRBV9, TRBJ2-1)
CASSPSGGNGQFF

SEQ ID NO: 25545 - protein, 16 aa, Homo sapiens
  CDR3 for alpha chain variable domain of TCR clone 12773 (TRAV12-3, TRAJ53)
CAMSLGSGGSNYKLTF

SEQ ID NO: 25546 - protein, 11 aa, Homo sapiens
  CDR3 for beta chain variable domain of TCR clone 12773 (TRBV29-1, TRBJ2-5)
CSEDRTGTQYF

SEQ ID NO: 25547 - protein, 15 aa, Homo sapiens
  CDR3 for alpha chain variable domain of TCR clone 12774 (TRAV12-1, TRAJ15)
CVVNSYGQAGTALIF

SEQ ID NO: 25548 - protein, 14 aa, Homo sapiens
  CDR3 for beta chain variable domain of TCR clone 12774 (TRBV7-2, TRBJ2-7)
CASSLQGPYGEQYF

SEQ ID NO: 25549 - protein, 14 aa, Homo sapiens
  CDR3 for alpha chain variable domain of TCR clone 12775 (TRAV17, TRAJ31)
CATDAEDNNARLMF

SEQ ID NO: 25550 - protein, 16 aa, Homo sapiens
  CDR3 for beta chain variable domain of TCR clone 12775 (TRBV24-1, TRBJ2-5)
CATRLAEDCWEKTQYF

SEQ ID NO: 25551 - protein, 11 aa, Homo sapiens
  CDR3 for alpha chain variable domain of TCR clone 12776 (TRAV12-3, TRAJ43)
CAMSVSNDMRF

SEQ ID NO: 25552 - protein, 13 aa, Homo sapiens
  CDR3 for beta chain variable domain of TCR clone 12776 (TRBV20-1, TRBJ1-1)
CSAPLGGGTEAVF

SEQ ID NO: 25553 - protein, 10 aa, Homo sapiens
  CDR3 for alpha chain variable domain of TCR clone 12777 (TRAV23/DV6, TRAJ57)
CAASSTLSQG

SEQ ID NO: 25554 - protein, 14 aa, Homo sapiens
  CDR3 for beta chain variable domain of TCR clone 12777 (TRBV25-1, TRBJ1-1)
CASTHLGGNTESFF

SEQ ID NO: 25555 - protein, 18 aa, Homo sapiens
  CDR3 for alpha chain variable domain of TCR clone 12778 (TRAV26-1, TRAJ22)
CIVRVSFWFCKATDLWIW

SEQ ID NO: 25556 - protein, 13 aa, Homo sapiens
  CDR3 for beta chain variable domain of TCR clone 12778 (TRBV7-9, TRBJ1-2)
CASSLKQNYGYTF

SEQ ID NO: 25557 - protein, 18 aa, Homo sapiens
  CDR3 for alpha chain variable domain of TCR clone 12779 (TRAV3, TRAJ17)
CAVRARRGGRSCRQQANF

SEQ ID NO: 25558 - protein, 14 aa, Homo sapiens
  CDR3 for beta chain variable domain of TCR clone 12779 (TRBV4-1, TRBJ2-2)
CASSQAVNTGELFL

SEQ ID NO: 25559 - protein, 16 aa, Homo sapiens
  CDR3 for alpha chain variable domain of TCR clone 12780 (TRAV12-3, TRAJ53)
CAMSPGSGGSNYKLTF

SEQ ID NO: 25560 - protein, 11 aa, Homo sapiens
  CDR3 for beta chain variable domain of TCR clone 12780 (TRBV29-1, TRBJ2-5)
CSENRTGTQYF

SEQ ID NO: 25561 - protein, 13 aa, Homo sapiens
  CDR3 for alpha chain variable domain of TCR clone 12781 (TRAV2, TRAJ40)
CAVVTAGTYKYIF

SEQ ID NO: 25562 - protein, 14 aa, Homo sapiens
  CDR3 for beta chain variable domain of TCR clone 12781 (TRBV19, TRBJ2-1)
CASPTFVLSGEQFF

SEQ ID NO: 25563 - protein, 13 aa, Homo sapiens
  CDR3 for alpha chain variable domain of TCR clone 12782 (TRAV27, TRAJ45)
CRSSGGGADGLTF

SEQ ID NO: 25564 - protein, 17 aa, Homo sapiens
  CDR3 for beta chain variable domain of TCR clone 12782 (TRBV11-2, TRBJ2-1)
CASSLYPPGVGYNEQFF

SEQ ID NO: 25565 - protein, 16 aa, Homo sapiens
  CDR3 for alpha chain variable domain of TCR clone 12783 (TRAV30, TRAJ24)
CGTEIVDADSWGKFQF

SEQ ID NO: 25566 - protein, 14 aa, Homo sapiens
  CDR3 for beta chain variable domain of TCR clone 12783 (TRBV7-3, TRBJ2-1)
CASSLAGGTNEQFF

SEQ ID NO: 25567 - protein, 15 aa, Homo sapiens
  CDR3 for alpha chain variable domain of TCR clone 12784 (TRAV3, TRAJ5)
CAVRALDTGRRALTF

SEQ ID NO: 25568 - protein, 13 aa, Homo sapiens
  CDR3 for beta chain variable domain of TCR clone 12784 (TRBV12-4, TRBJ2-7)
CASSPTETYEQYF

SEQ ID NO: 25569 - protein, 11 aa, Homo sapiens
  CDR3 for alpha chain variable domain of TCR clone 12785 (TRAV3, TRAJ21)
CTVGNFNKFYF

SEQ ID NO: 25570 - protein, 16 aa, Homo sapiens
  CDR3 for beta chain variable domain of TCR clone 12785 (TRBV19, TRBJ2-1)
CASSKAGPSSYNEQFF

SEQ ID NO: 25571 - protein, 12 aa, Homo sapiens
  CDR3 for alpha chain variable domain of TCR clone 12786 (TRAV6, TRAJ36)
CALQTGANNLFF

SEQ ID NO: 25572 - protein, 16 aa, Homo sapiens
  CDR3 for beta chain variable domain of TCR clone 12786 (TRBV11-3, TRBJ2-3)
CASSLGTRGSTDTQYF

SEQ ID NO: 25573 - protein, 14 aa, Homo sapiens
  CDR3 for alpha chain variable domain of TCR clone 12787 (TRAV2, TRAJ37)
CAVDFTSNTGTLIF

SEQ ID NO: 25574 - protein, 15 aa, Homo sapiens
  CDR3 for beta chain variable domain of TCR clone 12787 (TRBV20-1, TRBJ1-1)
CSASRGVTGNTEAFF

SEQ ID NO: 25575 - protein, 14 aa, Homo sapiens
  CDR3 for alpha chain variable domain of TCR clone 12788 (TRAV13-1, TRAJ35)
CAASKGGFGNVLHC

SEQ ID NO: 25576 - protein, 13 aa, Homo sapiens
  CDR3 for beta chain variable domain of TCR clone 12788 (TRBV7-3, TRBJ1-1)
CASSHDWGAEAFF

SEQ ID NO: 25577 - protein, 17 aa, Homo sapiens
  CDR3 for alpha chain variable domain of TCR clone 12789 (TRAV3, TRAJ42)
CAVRDRDYGGSQGNLIF

SEQ ID NO: 25578 - protein, 12 aa, Homo sapiens
  CDR3 for beta chain variable domain of TCR clone 12789 (TRBV11-2, TRBJ2-2)
CASSLGGGELFF

SEQ ID NO: 25579 - protein, 17 aa, Homo sapiens
  CDR3 for alpha chain variable domain of TCR clone 12790 (TRAV17, TRAJ7)
CATLGRLAFGKGNQGVV

SEQ ID NO: 25580 - protein, 13 aa, Homo sapiens
  CDR3 for beta chain variable domain of TCR clone 12790 (TRBV12-4, TRBJ2-7)
CASSLERVREQYF

SEQ ID NO: 25581 - protein, 11 aa, Homo sapiens
  CDR3 for alpha chain variable domain of TCR clone 12791 (TRAV23/DV6, TRAJ48)
CAPRWGERLTF

SEQ ID NO: 25582 - protein, 13 aa, Homo sapiens
  CDR3 for beta chain variable domain of TCR clone 12791 (TRBV12-4, TRBJ2-5)
CASSPGTEETQYF

SEQ ID NO: 25583 - protein, 15 aa, Homo sapiens
  CDR3 for alpha chain variable domain of TCR clone 12792 (TRAV8-2, TRAJ28)
CVVSESGAGSYQLTF

SEQ ID NO: 25584 - protein, 14 aa, Homo sapiens
  CDR3 for beta chain variable domain of TCR clone 12792 (TRBV7-9, TRBJ2-5)
CASSLVGGEETQYF

SEQ ID NO: 25585 - protein, 14 aa, Homo sapiens
  CDR3 for alpha chain variable domain of TCR clone 12793 (TRAV12-3, TRAJ9)
CAMSPNTGGFKAIF

SEQ ID NO: 25586 - protein, 12 aa, Homo sapiens
  CDR3 for beta chain variable domain of TCR clone 12793 (TRBV19, TRBJ1-5)
CASSIAQQPQHF

SEQ ID NO: 25587 - protein, 13 aa, Homo sapiens
  CDR3 for alpha chain variable domain of TCR clone 12794 (TRAV12-3, TRAJ7)
CAMSASGDNRLAF

SEQ ID NO: 25588 - protein, 14 aa, Homo sapiens
  CDR3 for beta chain variable domain of TCR clone 12794 (TRBV13, TRBJ2-5)
CASSLGPRGETQYF

SEQ ID NO: 25589 - protein, 11 aa, Homo sapiens
  CDR3 for alpha chain variable domain of TCR clone 12795 (TRAV1-1, TRAJ23)
CAVRQGGKLIF

SEQ ID NO: 25590 - protein, 20 aa, Homo sapiens
  CDR3 for beta chain variable domain of TCR clone 12795 (TRBV7-8, TRBJ2-2)
CASGHLFPGPTIHITGELFF

SEQ ID NO: 25591 - protein, 13 aa, Homo sapiens
  CDR3 for alpha chain variable domain of TCR clone 12796 (TRAV13-2, TRAJ48)
CAEMDFGNEKLTF

SEQ ID NO: 25592 - protein, 15 aa, Homo sapiens
  CDR3 for beta chain variable domain of TCR clone 12796 (TRBV7-9, TRBJ1-6)
CASSSPGRGDSPLHF

SEQ ID NO: 25593 - protein, 14 aa, Homo sapiens
  CDR3 for alpha chain variable domain of TCR clone 12797 (TRAV8-4, TRAJ3)
CAVIEYSSASKIIF

SEQ ID NO: 25594 - protein, 14 aa, Homo sapiens
  CDR3 for beta chain variable domain of TCR clone 12797 (TRBV6-6, TRBJ1-4)
CASRTDREYEKLFF

SEQ ID NO: 25595 - protein, 14 aa, Homo sapiens
  CDR3 for alpha chain variable domain of TCR clone 12798 (TRAV1-2, TRAJ16)
CAVYRFSDGQKLLF

SEQ ID NO: 25596 - protein, 14 aa, Homo sapiens
  CDR3 for beta chain variable domain of TCR clone 12798 (TRBV7-2, TRBJ2-7)
CASSPKTSFYEQYF

SEQ ID NO: 25597 - protein, 14 aa, Homo sapiens
  CDR3 for alpha chain variable domain of TCR clone 12799 (TRAV8-2, TRAJ13)
CVVSDSGGYQKVTF

SEQ ID NO: 25598 - protein, 14 aa, Homo sapiens
  CDR3 for beta chain variable domain of TCR clone 12799 (TRBV5-5, TRBJ1-4)
CASSPRGYNEKLFF

SEQ ID NO: 25599 - protein, 11 aa, Homo sapiens
  CDR3 for alpha chain variable domain of TCR clone 12800 (TRAV1-1, TRAJ23)
CAVRQGGKLIF

SEQ ID NO: 25600 - protein, 20 aa, Homo sapiens
  CDR3 for beta chain variable domain of TCR clone 12800 (TRBV7-8, TRBJ2-2)
CASSHLFLGPTIHITGELFF

SEQ ID NO: 25601 - protein, 17 aa, Homo sapiens
  CDR3 for alpha chain variable domain of TCR clone 12801 (TRAV26-2, TRAJ42)
CILRDVGYGGSQGNLIF

SEQ ID NO: 25602 - protein, 16 aa, Homo sapiens
  CDR3 for beta chain variable domain of TCR clone 12801 (TRBV12-4, TRBJ2-7)
CASSLIGGTGTYGQYF

SEQ ID NO: 25603 - protein, 13 aa, Homo sapiens
  CDR3 for alpha chain variable domain of TCR clone 12802 (TRAV38-1, TRAJ42)
CARWGGSQGNLIF

SEQ ID NO: 25604 - protein, 13 aa, Homo sapiens
  CDR3 for beta chain variable domain of TCR clone 12802 (TRBV14, TRBJ1-2)
CASSEDRRYGYTF

SEQ ID NO: 25605 - protein, 15 aa, Homo sapiens
  CDR3 for alpha chain variable domain of TCR clone 12803 (TRAV17, TRAJ56)
SATDANTGANSKLTF

SEQ ID NO: 25606 - protein, 12 aa, Homo sapiens
  CDR3 for beta chain variable domain of TCR clone 12803 (TRBV7-8, TRBJ2-7)
CASSLGDREQYF

SEQ ID NO: 25607 - protein, 13 aa, Homo sapiens
  CDR3 for alpha chain variable domain of TCR clone 12804 (TRAV2, TRAJ15)
CAVASQAGTALIF

SEQ ID NO: 25608 - protein, 13 aa, Homo sapiens
  CDR3 for beta chain variable domain of TCR clone 12804 (TRBV10-2, TRBJ2-7)
CASGASGGYEQYF

SEQ ID NO: 25609 - protein, 14 aa, Homo sapiens
  CDR3 for alpha chain variable domain of TCR clone 12805 (TRAV1-1, TRAJ28)
CAVQLWGWELPTHF

SEQ ID NO: 25610 - protein, 14 aa, Homo sapiens
  CDR3 for beta chain variable domain of TCR clone 12805 (TRBV20-1, TRBJ1-1)
CSAQTRIGGTEAFF

SEQ ID NO: 25611 - protein, 13 aa, Homo sapiens
  CDR3 for alpha chain variable domain of TCR clone 12806 (TRAV12-3, TRAJ33)
CAMSVNSNYQLIW

SEQ ID NO: 25612 - protein, 13 aa, Homo sapiens
  CDR3 for beta chain variable domain of TCR clone 12806 (TRBV7-2, TRBJ2-2)
CASSLAVTGELFS

SEQ ID NO: 25613 - protein, 13 aa, Homo sapiens
  CDR3 for alpha chain variable domain of TCR clone 12807 (TRAV3, TRAJ27)
CAVRPLSAGKSTF

SEQ ID NO: 25614 - protein, 13 aa, Homo sapiens
  CDR3 for beta chain variable domain of TCR clone 12807 (TRBV7-9, TRBJ2-3)
CASSPGSTDTQYF

SEQ ID NO: 25615 - protein, 13 aa, Homo sapiens
  CDR3 for alpha chain variable domain of TCR clone 12808 (TRAV1-1, TRAJ9)
CATKNTGGFKTIF

SEQ ID NO: 25616 - protein, 14 aa, Homo sapiens
  CDR3 for beta chain variable domain of TCR clone 12808 (TRBV20-1, TRBJ2-1)
CSAQIGGSANEQFF

SEQ ID NO: 25617 - protein, 14 aa, Homo sapiens
  CDR3 for alpha chain variable domain of TCR clone 12809 (TRAV1-2, TRAJ8)
CAVREDTGFQKLVF

SEQ ID NO: 25618 - protein, 16 aa, Homo sapiens
  CDR3 for beta chain variable domain of TCR clone 12809 (TRBV4-2, TRBJ2-3)
CASSQELAGDTDTQYF

SEQ ID NO: 25619 - protein, 14 aa, Homo sapiens
  CDR3 for alpha chain variable domain of TCR clone 12810 (TRAV3, TRAJ9)
CAVRLNTGGFKTIF

SEQ ID NO: 25620 - protein, 15 aa, Homo sapiens
  CDR3 for beta chain variable domain of TCR clone 12810 (TRBV7-2, TRBJ2-1)
CASSLASGRVNEQLF

SEQ ID NO: 25621 - protein, 18 aa, Homo sapiens
  CDR3 for alpha chain variable domain of TCR clone 12811 (TRAV29/DV5, TRAJ52)
CAAGFRGAGGTSHGKLTF

SEQ ID NO: 25622 - protein, 16 aa, Homo sapiens
  CDR3 for beta chain variable domain of TCR clone 12811 (TRBV7-3, TRBJ2-2)
CASSLKRGTLSGELFF

SEQ ID NO: 25623 - protein, 17 aa, Homo sapiens
  CDR3 for alpha chain variable domain of TCR clone 12812 (TRAV38-2/DV8, TRAJ57)
CAYRSVLTQGGSEKLVF

SEQ ID NO: 25624 - protein, 15 aa, Homo sapiens
  CDR3 for beta chain variable domain of TCR clone 12812 (TRBV5-1, TRBJ1-1)
CASSWTGRGNTEAFF

SEQ ID NO: 25625 - protein, 14 aa, Homo sapiens
  CDR3 for alpha chain variable domain of TCR clone 12813 (TRAV3, TRAJ17)
CAVRDAAAGNKLTF

SEQ ID NO: 25626 - protein, 15 aa, Homo sapiens
  CDR3 for beta chain variable domain of TCR clone 12813 (TRBV6-3, TRBJ2-5)
CASSLLRGDQEPQYF

SEQ ID NO: 25627 - protein, 14 aa, Homo sapiens
  CDR3 for alpha chain variable domain of TCR clone 12814 (TRAV17, TRAJ20)
CATLSGSNDYKLSF

SEQ ID NO: 25628 - protein, 17 aa, Homo sapiens
  CDR3 for beta chain variable domain of TCR clone 12814 (TRBV5-1, TRBJ2-2)
CASSPRTGGMNTGELFF

SEQ ID NO: 25629 - protein, 13 aa, Homo sapiens
  CDR3 for alpha chain variable domain of TCR clone 12815 (TRAV3, TRAJ21)
CAVGNFNKFYFDL

SEQ ID NO: 25630 - protein, 17 aa, Homo sapiens
  CDR3 for beta chain variable domain of TCR clone 12815 (TRBV24-1, TRBJ2-1)
CATSDVSTSGTYNEQFF

SEQ ID NO: 25631 - protein, 18 aa, Homo sapiens
  CDR3 for alpha chain variable domain of TCR clone 12816 (TRAV13-1, TRAJ52)
CAAKNPNAGGTSYGKLTF

SEQ ID NO: 25632 - protein, 16 aa, Homo sapiens
  CDR3 for beta chain variable domain of TCR clone 12816 (TRBV6-1, TRBJ2-1)
CASILRQGSSYNEQFF

SEQ ID NO: 25633 - protein, 14 aa, Homo sapiens
  CDR3 for alpha chain variable domain of TCR clone 12817 (TRAV12-1, TRAJ3)
CVVILYSSASKIIF

SEQ ID NO: 25634 - protein, 16 aa, Homo sapiens
  CDR3 for beta chain variable domain of TCR clone 12817 (TRBV5-1, TRBJ2-5)
CASSLSLAGAQETQYF

SEQ ID NO: 25635 - protein, 14 aa, Homo sapiens
  CDR3 for alpha chain variable domain of TCR clone 12818 (TRAV1-2, TRAJ16)
CAVNRFSDSQKLLF

SEQ ID NO: 25636 - protein, 15 aa, Homo sapiens
  CDR3 for beta chain variable domain of TCR clone 12818 (TRBV9, TRBJ1-6)
CASSVAGTGDSPLHF

SEQ ID NO: 25637 - protein, 13 aa, Homo sapiens
  CDR3 for alpha chain variable domain of TCR clone 12819 (TRAV21, TRAJ57)
CAVTQGGSEKLVF

SEQ ID NO: 25638 - protein, 16 aa, Homo sapiens
  CDR3 for beta chain variable domain of TCR clone 12819 (TRBV29-1, TRBJ2-7)
CSVEDAEDDTAYEQYF

SEQ ID NO: 25639 - protein, 14 aa, Homo sapiens
  CDR3 for alpha chain variable domain of TCR clone 12820 (TRAV13-1, TRAJ10)
CAAKEPGGGNKLTF

SEQ ID NO: 25640 - protein, 12 aa, Homo sapiens
  CDR3 for beta chain variable domain of TCR clone 12820 (TRBV11-2, TRBJ2-2)
CASSLGGGELFF

SEQ ID NO: 25641 - protein, 16 aa, Homo sapiens
  CDR3 for alpha chain variable domain of TCR clone 12821 (TRAV30, TRAJ24)
CGTEIVDADSWGKFQF

SEQ ID NO: 25642 - protein, 14 aa, Homo sapiens
  CDR3 for beta chain variable domain of TCR clone 12821 (TRBV12-5, TRBJ2-5)
CANGSRTHQETQYF

SEQ ID NO: 25643 - protein, 13 aa, Homo sapiens
  CDR3 for alpha chain variable domain of TCR clone 12822 (TRAV29/DV5, TRAJ33)
CAASVESNYQLIW

SEQ ID NO: 25644 - protein, 15 aa, Homo sapiens
  CDR3 for beta chain variable domain of TCR clone 12822 (TRBV18, TRBJ1-1)
CASSDRGTGDTEAFF

SEQ ID NO: 25645 - protein, 18 aa, Homo sapiens
  CDR3 for alpha chain variable domain of TCR clone 12823 (TRAV12-3, TRAJ52)
CAMSRTNAGGTSYGKLTF

SEQ ID NO: 25646 - protein, 13 aa, Homo sapiens
  CDR3 for beta chain variable domain of TCR clone 12823 (TRBV7-9, TRBJ1-2)
CASSLKQNYGYTF

SEQ ID NO: 25647 - protein, 18 aa, Homo sapiens
  CDR3 for alpha chain variable domain of TCR clone 12824 (TRAV21, TRAJ52)
CAVRPSPAGGTSYGKLTF

SEQ ID NO: 25648 - protein, 17 aa, Homo sapiens
  CDR3 for beta chain variable domain of TCR clone 12824 (TRBV13, TRBJ2-3)
CASSLSRVAGGRNTQYV

SEQ ID NO: 25649 - protein, 13 aa, Homo sapiens
  CDR3 for alpha chain variable domain of TCR clone 12825 (TRAV25, TRAJ26)
CAGMDNYGQNFVF

SEQ ID NO: 25650 - protein, 17 aa, Homo sapiens
  CDR3 for beta chain variable domain of TCR clone 12825 (TRBV7-8, TRBJ2-6)
CASSAGTGGAGANVLTF

SEQ ID NO: 25651 - protein, 10 aa, Homo sapiens
  CDR3 for alpha chain variable domain of TCR clone 12826 (TRAV38-2/DV8, TRAJ40)
CASGTYKYIF

SEQ ID NO: 25652 - protein, 14 aa, Homo sapiens
  CDR3 for beta chain variable domain of TCR clone 12826 (TRBV7-9, TRBJ2-1)
CASSPRGSLYEQFF

SEQ ID NO: 25653 - protein, 13 aa, Homo sapiens
  CDR3 for alpha chain variable domain of TCR clone 12827 (TRAV2, TRAJ40)
CAVVTSGTYKYIF

SEQ ID NO: 25654 - protein, 15 aa, Homo sapiens
  CDR3 for beta chain variable domain of TCR clone 12827 (TRBV11-3, TRBJ2-3)
CASLKDGREGDTRYF

SEQ ID NO: 25655 - protein, 13 aa, Homo sapiens
  CDR3 for alpha chain variable domain of TCR clone 12828 (TRAV12-2, TRAJ37)
CAVSSGNTGKLIF

SEQ ID NO: 25656 - protein, 17 aa, Homo sapiens
  CDR3 for beta chain variable domain of TCR clone 12828 (TRBV5-1, TRBJ2-5)
CASSLLGLAANQETQYF

SEQ ID NO: 25657 - protein, 16 aa, Homo sapiens
  CDR3 for alpha chain variable domain of TCR clone 12829 (TRAV12-1, TRAJ48)
CVVNMVPNFGNEKLTF

SEQ ID NO: 25658 - protein, 18 aa, Homo sapiens
  CDR3 for beta chain variable domain of TCR clone 12829 (TRBV11-2, TRBJ2-6)
CASSLNPFLGTGANVLTF

SEQ ID NO: 25659 - protein, 14 aa, Homo sapiens
  CDR3 for alpha chain variable domain of TCR clone 12830 (TRAV9-2, TRAJ39)
CALYIYNAGNMLTF

SEQ ID NO: 25660 - protein, 15 aa, Homo sapiens
  CDR3 for beta chain variable domain of TCR clone 12830 (TRBV7-8, TRBJ2-1)
CASSLAGGLYNEQFF

SEQ ID NO: 25661 - protein, 14 aa, Homo sapiens
  CDR3 for alpha chain variable domain of TCR clone 12831 (TRAV21, TRAJ35)
CAVMPIGFGNVLRC

SEQ ID NO: 25662 - protein, 12 aa, Homo sapiens
  CDR3 for beta chain variable domain of TCR clone 12831 (TRBV7-9, TRBJ2-7)
CASSIKREEQYF

SEQ ID NO: 25663 - protein, 15 aa, Homo sapiens
  CDR3 for alpha chain variable domain of TCR clone 12832 (TRAV17, TRAJ57)
CATGPSQGGSEKLVF

SEQ ID NO: 25664 - protein, 16 aa, Homo sapiens
  CDR3 for beta chain variable domain of TCR clone 12832 (TRBV12-4, TRBJ1-5)
CASSRPVGGSNQPQHL

SEQ ID NO: 25665 - protein, 15 aa, Homo sapiens
  CDR3 for alpha chain variable domain of TCR clone 12833 (TRAV3, TRAJ22)
CAVRDRGGSARQLTF

SEQ ID NO: 25666 - protein, 14 aa, Homo sapiens
  CDR3 for beta chain variable domain of TCR clone 12833 (TRBV12-5, TRBJ2-5)
CASGSRTHQETQYF

SEQ ID NO: 25667 - protein, 12 aa, Homo sapiens
  CDR3 for alpha chain variable domain of TCR clone 12834 (TRAV38-1, TRAJ32)
CAPLGATNKLIF

SEQ ID NO: 25668 - protein, 17 aa, Homo sapiens
  CDR3 for beta chain variable domain of TCR clone 12834 (TRBV13, TRBJ2-3)
CASSLSRVAGGRNTQYF

SEQ ID NO: 25669 - protein, 12 aa, Homo sapiens
  CDR3 for alpha chain variable domain of TCR clone 12835 (TRAV23/DV6, TRAJ27)
CAASKSAGKSTF

SEQ ID NO: 25670 - protein, 15 aa, Homo sapiens
  CDR3 for beta chain variable domain of TCR clone 12835 (TRBV29-1, TRBJ2-1)
CSVRTSLSSYNEQFF

SEQ ID NO: 25671 - protein, 14 aa, Homo sapiens
  CDR3 for alpha chain variable domain of TCR clone 12836 (TRAV26-1, TRAJ39)
FIVRGSRAGNMLTF

SEQ ID NO: 25672 - protein, 15 aa, Homo sapiens
  CDR3 for beta chain variable domain of TCR clone 12836 (TRBV7-9, TRBJ1-5)
CASSQGHQPNQPQHF

SEQ ID NO: 25673 - protein, 17 aa, Homo sapiens
  CDR3 for alpha chain variable domain of TCR clone 12837 (TRAV3, TRAJ42)
CAVRDRDYVGSQGNLIF

SEQ ID NO: 25674 - protein, 15 aa, Homo sapiens
  CDR3 for beta chain variable domain of TCR clone 12837 (TRBV6-6, TRBJ2-7)
CASSYSYGGSYEQYF

SEQ ID NO: 25675 - protein, 12 aa, Homo sapiens
  CDR3 for alpha chain variable domain of TCR clone 12838 (TRAV2, TRAJ31)
CAVEDNNARLMF

SEQ ID NO: 25676 - protein, 15 aa, Homo sapiens
  CDR3 for beta chain variable domain of TCR clone 12838 (TRBV10-3, TRBJ2-1)
CAISGVGDGGGEQFF

SEQ ID NO: 25677 - protein, 14 aa, Homo sapiens
  CDR3 for alpha chain variable domain of TCR clone 12839 (TRAV12-2, TRAJ17)
CAVLFKAAGNNLTF

SEQ ID NO: 25678 - protein, 17 aa, Homo sapiens
  CDR3 for beta chain variable domain of TCR clone 12839 (TRBV20-1, TRBJ2-2)
CSASGSGQGGLTGELFF

SEQ ID NO: 25679 - protein, 15 aa, Homo sapiens
  CDR3 for alpha chain variable domain of TCR clone 12840 (TRAV8-3, TRAJ27)
CAVGPSKTNEGKSTF

SEQ ID NO: 25680 - protein, 15 aa, Homo sapiens
  CDR3 for beta chain variable domain of TCR clone 12840 (TRBV7-2, TRBJ2-1)
CASSSGLAGGNEQFF

SEQ ID NO: 25681 - protein, 15 aa, Homo sapiens
  CDR3 for alpha chain variable domain of TCR clone 12841 (TRAV3, TRAJ20)
CAVRDIKLSDYKLSF

SEQ ID NO: 25682 - protein, 15 aa, Homo sapiens
  CDR3 for beta chain variable domain of TCR clone 12841 (TRBV7-9, TRBJ1-6)
CASSSPGRGNSPLHY

SEQ ID NO: 25683 - protein, 12 aa, Homo sapiens
  CDR3 for alpha chain variable domain of TCR clone 12842 (TRAV1-1, TRAJ20)
CAVREDDYKLSF

SEQ ID NO: 25684 - protein, 14 aa, Homo sapiens
  CDR3 for beta chain variable domain of TCR clone 12842 (TRBV4-1, TRBJ2-2)
CASSQAVNTGELFF

SEQ ID NO: 25685 - protein, 15 aa, Homo sapiens
  CDR3 for alpha chain variable domain of TCR clone 12843 (TRAV8-3, TRAJ45)
CASSYSGGGADGLTF

SEQ ID NO: 25686 - protein, 13 aa, Homo sapiens
  CDR3 for beta chain variable domain of TCR clone 12843 (TRBV10-3, TRBJ2-7)
CASNLAVNYEQYF

SEQ ID NO: 25687 - protein, 15 aa, Homo sapiens
  CDR3 for alpha chain variable domain of TCR clone 12844 (TRAV16, TRAJ16)
CALQGGGSGGQKLLF

SEQ ID NO: 25688 - protein, 15 aa, Homo sapiens
  CDR3 for beta chain variable domain of TCR clone 12844 (TRBV20-1, TRBJ2-7)
CSARDRVSGMDEQYF

SEQ ID NO: 25689 - protein, 14 aa, Homo sapiens
  CDR3 for alpha chain variable domain of TCR clone 12845 (TRAV12-3, TRAJ29)
CAMSPYSGNTPLVF

SEQ ID NO: 25690 - protein, 12 aa, Homo sapiens
  CDR3 for beta chain variable domain of TCR clone 12845 (TRBV12-4, TRBJ2-7)
CASNPGGGEQYF

SEQ ID NO: 25691 - protein, 17 aa, Homo sapiens
  CDR3 for alpha chain variable domain of TCR clone 12846 (TRAV13-1, )
CAANIQNPDPAVYQLRD

SEQ ID NO: 25692 - protein, 16 aa, Homo sapiens
  CDR3 for beta chain variable domain of TCR clone 12846 (TRBV4-2, TRBJ2-3)
CASSQDGARGGVKQYF

SEQ ID NO: 25693 - protein, 12 aa, Homo sapiens
  CDR3 for alpha chain variable domain of TCR clone 12847 (TRAV2, TRAJ31)
CAVGDNNARLMF

SEQ ID NO: 25694 - protein, 16 aa, Homo sapiens
  CDR3 for beta chain variable domain of TCR clone 12847 (TRBV10-3, TRBJ2-1)
CAISGVGDGGGGEQFF

SEQ ID NO: 25695 - protein, 14 aa, Homo sapiens
  CDR3 for alpha chain variable domain of TCR clone 12848 (TRAV3, TRAJ37)
CAVKESGNTGKLIF

SEQ ID NO: 25696 - protein, 12 aa, Homo sapiens
  CDR3 for beta chain variable domain of TCR clone 12848 (TRBV7-8, TRBJ2-7)
CASSLGDREQYF

SEQ ID NO: 25697 - protein, 11 aa, Homo sapiens
  CDR3 for alpha chain variable domain of TCR clone 12849 (TRAV1-1, TRAJ23)
CAVRQGGKLIF

SEQ ID NO: 25698 - protein, 20 aa, Homo sapiens
  CDR3 for beta chain variable domain of TCR clone 12849 (TRBV7-8, TRBJ2-2)
CASSHLFPGPNIHITGELFF

SEQ ID NO: 25699 - protein, 11 aa, Homo sapiens
  CDR3 for alpha chain variable domain of TCR clone 12850 (TRAV27, TRAJ45)
CAGAQEEVLTD

SEQ ID NO: 25700 - protein, 13 aa, Homo sapiens
  CDR3 for beta chain variable domain of TCR clone 12850 (TRBV7-7, TRBJ2-5)
CASSRSGQETQYF

SEQ ID NO: 25701 - protein, 17 aa, Homo sapiens
  CDR3 for alpha chain variable domain of TCR clone 12851 (TRAV3, TRAJ6)
CAVRDGPRAGGSYIPTF

SEQ ID NO: 25702 - protein, 14 aa, Homo sapiens
  CDR3 for beta chain variable domain of TCR clone 12851 (TRBV7-2, TRBJ2-7)
CTSSPKTSFYEQYF

SEQ ID NO: 25703 - protein, 13 aa, Homo sapiens
  CDR3 for alpha chain variable domain of TCR clone 12852 (TRAV13-1, TRAJ5)
CAASGTGRRALTF

SEQ ID NO: 25704 - protein, 12 aa, Homo sapiens
  CDR3 for beta chain variable domain of TCR clone 12852 (TRBV28, TRBJ2-3)
CASSLYRDTQYF

SEQ ID NO: 25705 - protein, 14 aa, Homo sapiens
  CDR3 for alpha chain variable domain of TCR clone 12853 (TRAV1-2, TRAJ16)
CAVNRFSDGQKLLF

SEQ ID NO: 25706 - protein, 15 aa, Homo sapiens
  CDR3 for beta chain variable domain of TCR clone 12853 (TRBV7-9, TRBJ1-6)
CASSSPGRGNSLLHF

SEQ ID NO: 25707 - protein, 15 aa, Homo sapiens
  CDR3 for alpha chain variable domain of TCR clone 12854 (TRAV12-3, TRAJ42)
CAMITSVGSQGNLIF

SEQ ID NO: 25708 - protein, 14 aa, Homo sapiens
  CDR3 for beta chain variable domain of TCR clone 12854 (TRBV12-4, TRBJ2-3)
CASSLGQGTDTQYF

SEQ ID NO: 25709 - protein, 10 aa, Homo sapiens
  CDR3 for alpha chain variable domain of TCR clone 12855 (TRAV26-1, TRAJ40)
CIAGTYKYIF

SEQ ID NO: 25710 - protein, 15 aa, Homo sapiens
  CDR3 for beta chain variable domain of TCR clone 12855 (TRBV19, TRBJ2-1)
CASSSPGVPLGEQFF

SEQ ID NO: 25711 - protein, 15 aa, Homo sapiens
  CDR3 for alpha chain variable domain of TCR clone 12856 (TRAV4, TRAJ39)
CLVGPNNNAGNMLTF

SEQ ID NO: 25712 - protein, 13 aa, Homo sapiens
  CDR3 for beta chain variable domain of TCR clone 12856 (TRBV11-2, TRBJ2-5)
RASSSTGEETQYF

SEQ ID NO: 25713 - protein, 15 aa, Homo sapiens
  CDR3 for alpha chain variable domain of TCR clone 12857 (TRAV13-2, TRAJ50)
CAEEPLKTSYDKVIF

SEQ ID NO: 25714 - protein, 16 aa, Homo sapiens
  CDR3 for beta chain variable domain of TCR clone 12857 (TRBV5-1, TRBJ1-1)
CASSSGGNSLNTEAFF

SEQ ID NO: 25715 - protein, 15 aa, Homo sapiens
  CDR3 for alpha chain variable domain of TCR clone 12858 (TRAV17, TRAJ56)
CATEPFTGANSKLTF

SEQ ID NO: 25716 - protein, 15 aa, Homo sapiens
  CDR3 for beta chain variable domain of TCR clone 12858 (TRBV11-3, TRBJ2-3)
CASLKDGREGDTQYF

SEQ ID NO: 25717 - protein, 15 aa, Homo sapiens
  CDR3 for alpha chain variable domain of TCR clone 12859 (TRAV8-3, TRAJ45)
CASLYSGGGADGLTF

SEQ ID NO: 25718 - protein, 13 aa, Homo sapiens
  CDR3 for beta chain variable domain of TCR clone 12859 (TRBV10-3, TRBJ2-7)
CASKLAVNYEQYF

SEQ ID NO: 25719 - protein, 14 aa, Homo sapiens
  CDR3 for alpha chain variable domain of TCR clone 12860 (TRAV12-2, TRAJ40)
CAVKIPSGTYKYIF

SEQ ID NO: 25720 - protein, 20 aa, Homo sapiens
  CDR3 for beta chain variable domain of TCR clone 12860 (TRBV28, TRBJ2-1)
CASTPTGRSPGLAGGNEQFF

SEQ ID NO: 25721 - protein, 16 aa, Homo sapiens
  CDR3 for alpha chain variable domain of TCR clone 12861 (TRAV30, TRAJ24)
CGTEIVDADSWGKFQF

SEQ ID NO: 25722 - protein, 14 aa, Homo sapiens
  CDR3 for beta chain variable domain of TCR clone 12861 (TRBV12-5, TRBJ2-5)
CASGSRTHQEIQYF

SEQ ID NO: 25723 - protein, 15 aa, Homo sapiens
  CDR3 for alpha chain variable domain of TCR clone 12862 (TRAV26-1, TRAJ29)
CIVRVEGSGNTPLVF

SEQ ID NO: 25724 - protein, 15 aa, Homo sapiens
  CDR3 for beta chain variable domain of TCR clone 12862 (TRBV7-9, TRBJ1-5)
CASSQGHQPNQPQHS

SEQ ID NO: 25725 - protein, 12 aa, Homo sapiens
  CDR3 for alpha chain variable domain of TCR clone 12863 (TRAV8-4, TRAJ33)
CAVSDSNYQLIW

SEQ ID NO: 25726 - protein, 13 aa, Homo sapiens
  CDR3 for beta chain variable domain of TCR clone 12863 (TRBV7-8, TRBJ1-5)
CASSLGGDQPQHF

SEQ ID NO: 25727 - protein, 16 aa, Homo sapiens
  CDR3 for alpha chain variable domain of TCR clone 12864 (TRAV1-2, TRAJ10)
CAVRGVLTGGGNKLTF

SEQ ID NO: 25728 - protein, 12 aa, Homo sapiens
  CDR3 for beta chain variable domain of TCR clone 12864 (TRBV7-8, TRBJ2-7)
CASSLGDRGQYF

SEQ ID NO: 25729 - protein, 15 aa, Homo sapiens
  CDR3 for alpha chain variable domain of TCR clone 12865 (TRAV26-1, TRAJ29)
CIVRVEGSGNTPLVF

SEQ ID NO: 25730 - protein, 15 aa, Homo sapiens
  CDR3 for beta chain variable domain of TCR clone 12865 (TRBV7-9, TRBJ1-5)
CASSQGHQHNQPQHF

SEQ ID NO: 25731 - protein, 11 aa, Homo sapiens
  CDR3 for alpha chain variable domain of TCR clone 12866 (TRAV17, TRAJ9)
CGFTGGFKAIF

SEQ ID NO: 25732 - protein, 14 aa, Homo sapiens
  CDR3 for beta chain variable domain of TCR clone 12866 (TRBV7-9, TRBJ2-2)
CASSLVQDTGELFF

SEQ ID NO: 25733 - protein, 14 aa, Homo sapiens
  CDR3 for alpha chain variable domain of TCR clone 12867 (TRAV20, TRAJ56)
CAVQFGGANSKLTF

SEQ ID NO: 25734 - protein, 14 aa, Homo sapiens
  CDR3 for beta chain variable domain of TCR clone 12867 (TRBV20-1, TRBJ2-7)
CSAKRGRSSYEQYF

SEQ ID NO: 25735 - protein, 15 aa, Homo sapiens
  CDR3 for alpha chain variable domain of TCR clone 12868 (TRAV27, TRAJ38)
CAARRNAGNKRKLIW

SEQ ID NO: 25736 - protein, 13 aa, Homo sapiens
  CDR3 for beta chain variable domain of TCR clone 12868 (TRBV12-5, TRBJ2-3)
CASGDRQSDTQYF

SEQ ID NO: 25737 - protein, 18 aa, Homo sapiens
  CDR3 for alpha chain variable domain of TCR clone 12869 (TRAV12-3, TRAJ52)
CAMSVGGAGGTSYGKLTF

SEQ ID NO: 25738 - protein, 15 aa, Homo sapiens
  CDR3 for beta chain variable domain of TCR clone 12869 (TRBV27, TRBJ1-6)
CAGSFDRGLGSPLHF

SEQ ID NO: 25739 - protein, 13 aa, Homo sapiens
  CDR3 for alpha chain variable domain of TCR clone 12870 (TRAV8-6, TRAJ49)
CAVITNTGNQFYF

SEQ ID NO: 25740 - protein, 14 aa, Homo sapiens
  CDR3 for beta chain variable domain of TCR clone 12870 (TRBV5-1, TRBJ2-7)
RASSRGESLYEQYF

SEQ ID NO: 25741 - protein, 10 aa, Homo sapiens
  CDR3 for alpha chain variable domain of TCR clone 12871 (TRAV12-1, TRAJ37)
ARGNTGKLIF

SEQ ID NO: 25742 - protein, 15 aa, Homo sapiens
  CDR3 for beta chain variable domain of TCR clone 12871 (TRBV7-2, TRBJ2-3)
CASNLEQGGTDTQYF

SEQ ID NO: 25743 - protein, 12 aa, Homo sapiens
  CDR3 for alpha chain variable domain of TCR clone 12872 (TRAV8-3, TRAJ20)
CAVGANDYKLSF

SEQ ID NO: 25744 - protein, 16 aa, Homo sapiens
  CDR3 for beta chain variable domain of TCR clone 12872 (TRBV19, TRBJ2-2)
CASRSPGTGATGELSF

SEQ ID NO: 25745 - protein, 17 aa, Homo sapiens
  CDR3 for alpha chain variable domain of TCR clone 12873 (TRAV23/DV6, TRAJ57)
CAASSTLPQGGSEKLVF

SEQ ID NO: 25746 - protein, 14 aa, Homo sapiens
  CDR3 for beta chain variable domain of TCR clone 12873 (TRBV25-1, TRBJ1-1)
CASTHLGGNTEAFF

SEQ ID NO: 25747 - protein, 11 aa, Homo sapiens
  CDR3 for alpha chain variable domain of TCR clone 12874 (TRAV2, TRAJ33)
CAVESDYQLIW

SEQ ID NO: 25748 - protein, 15 aa, Homo sapiens
  CDR3 for beta chain variable domain of TCR clone 12874 (TRBV19, TRBJ1-1)
CASTSGQIQNTEAFF

SEQ ID NO: 25749 - protein, 15 aa, Homo sapiens
  CDR3 for alpha chain variable domain of TCR clone 12875 (TRAV8-1, TRAJ42)
CAVRSYGGSQGNLIF

SEQ ID NO: 25750 - protein, 15 aa, Homo sapiens
  CDR3 for beta chain variable domain of TCR clone 12875 (TRBV27, TRBJ2-1)
CASSNGGGSSNEQFF

SEQ ID NO: 25751 - protein, 13 aa, Homo sapiens
  CDR3 for alpha chain variable domain of TCR clone 12876 (TRAV38-1, TRAJ42)
CARWGGSQGNLIF

SEQ ID NO: 25752 - protein, 17 aa, Homo sapiens
  CDR3 for beta chain variable domain of TCR clone 12876 (TRBV20-1, TRBJ2-1)
CSARDPLAGVWDNEQSF

SEQ ID NO: 25753 - protein, 11 aa, Homo sapiens
  CDR3 for alpha chain variable domain of TCR clone 12877 (TRAV1-1, TRAJ23)
CAVRQGGKLIF

SEQ ID NO: 25754 - protein, 12 aa, Homo sapiens
  CDR3 for beta chain variable domain of TCR clone 12877 (TRBV7-8, TRBJ2-7)
CASSLGDREQYF

SEQ ID NO: 25755 - protein, 14 aa, Homo sapiens
  CDR3 for alpha chain variable domain of TCR clone 12878 (TRAV26-1, TRAJ39)
CIVRGSRAGSMLTF

SEQ ID NO: 25756 - protein, 15 aa, Homo sapiens
  CDR3 for beta chain variable domain of TCR clone 12878 (TRBV7-9, TRBJ1-5)
CASSQGHQPNQPQHF

SEQ ID NO: 25757 - protein, 15 aa, Homo sapiens
  CDR3 for alpha chain variable domain of TCR clone 12879 (TRAV13-1, TRAJ52)
CAATSPRTSYGKLTF

SEQ ID NO: 25758 - protein, 16 aa, Homo sapiens
  CDR3 for beta chain variable domain of TCR clone 12879 (TRBV7-2, TRBJ2-5)
CASSPGGARRGETQYF

SEQ ID NO: 25759 - protein, 14 aa, Homo sapiens
  CDR3 for alpha chain variable domain of TCR clone 12880 (TRAV26-1, TRAJ38)
CIADNAGNNRKLMW

SEQ ID NO: 25760 - protein, 13 aa, Homo sapiens
  CDR3 for beta chain variable domain of TCR clone 12880 (TRBV20-1, TRBJ1-1)
CSARGGGNTEAFF

SEQ ID NO: 25761 - protein, 15 aa, Homo sapiens
  CDR3 for alpha chain variable domain of TCR clone 12881 (TRAV27, TRAJ38)
CAARRNAGNNHKLIW

SEQ ID NO: 25762 - protein, 15 aa, Homo sapiens
  CDR3 for beta chain variable domain of TCR clone 12881 (TRBV2, TRBJ2-1)
CASSELAGSYNEQFF

SEQ ID NO: 25763 - protein, 13 aa, Homo sapiens
  CDR3 for alpha chain variable domain of TCR clone 12882 (TRAV12-2, TRAJ7)
CAGLIYGNNRLAF

SEQ ID NO: 25764 - protein, 16 aa, Homo sapiens
  CDR3 for beta chain variable domain of TCR clone 12882 (TRBV27, TRBJ2-2)
CASSFRGLVRTGELFF

SEQ ID NO: 25765 - protein, 15 aa, Homo sapiens
  CDR3 for alpha chain variable domain of TCR clone 12883 (TRAV12-3, TRAJ6)
CAMSATTGGSYIPTF

SEQ ID NO: 25766 - protein, 16 aa, Homo sapiens
  CDR3 for beta chain variable domain of TCR clone 12883 (TRBV20-1, TRBJ1-2)
CSASTGQGVANYGYTF

SEQ ID NO: 25767 - protein, 12 aa, Homo sapiens
  CDR3 for alpha chain variable domain of TCR clone 12884 (TRAV29/DV5, TRAJ31)
CVASSHNARLMF

SEQ ID NO: 25768 - protein, 17 aa, Homo sapiens
  CDR3 for beta chain variable domain of TCR clone 12884 (TRBV18, TRBJ2-6)
CASSPRQGAVGANVLTF

SEQ ID NO: 25769 - protein, 12 aa, Homo sapiens
  CDR3 for alpha chain variable domain of TCR clone 12885 (TRAV13-2, TRAJ8)
CAPWLGFQKLVF

SEQ ID NO: 25770 - protein, 14 aa, Homo sapiens
  CDR3 for beta chain variable domain of TCR clone 12885 (TRBV6-1, TRBJ1-3)
CASVQGGGGNTIYF

SEQ ID NO: 25771 - protein, 13 aa, Homo sapiens
  CDR3 for alpha chain variable domain of TCR clone 12886 (TRAV1-1, TRAJ9)
CAAENTGGFKTIF

SEQ ID NO: 25772 - protein, 14 aa, Homo sapiens
  CDR3 for beta chain variable domain of TCR clone 12886 (TRBV20-1, TRBJ2-1)
CSAQIGGSANEQFF

SEQ ID NO: 25773 - protein, 15 aa, Homo sapiens
  CDR3 for alpha chain variable domain of TCR clone 12887 (TRAV8-3, TRAJ11)
CAVGLLNSGYSTLTF

SEQ ID NO: 25774 - protein, 11 aa, Homo sapiens
  CDR3 for beta chain variable domain of TCR clone 12887 (TRBV29-1, TRBJ2-5)
CSEDRTGTQYF

SEQ ID NO: 25775 - protein, 16 aa, Homo sapiens
  CDR3 for alpha chain variable domain of TCR clone 12888 (TRAV30, TRAJ24)
CGTEIVDADSWGKFQF

SEQ ID NO: 25776 - protein, 14 aa, Homo sapiens
  CDR3 for beta chain variable domain of TCR clone 12888 (TRBV12-4, TRBJ1-1)
CASSLGTGGTEAFF

SEQ ID NO: 25777 - protein, 13 aa, Homo sapiens
  CDR3 for alpha chain variable domain of TCR clone 12889 (TRAV21, TRAJ57)
CAVTQGGSEKLVF

SEQ ID NO: 25778 - protein, 16 aa, Homo sapiens
  CDR3 for beta chain variable domain of TCR clone 12889 (TRBV29-1, TRBJ2-7)
CSVEDAEDGTAYGQYF

SEQ ID NO: 25779 - protein, 14 aa, Homo sapiens
  CDR3 for alpha chain variable domain of TCR clone 12890 (TRAV12-2, TRAJ45)
CAVNKGGGADGLTF

SEQ ID NO: 25780 - protein, 15 aa, Homo sapiens
  CDR3 for beta chain variable domain of TCR clone 12890 (TRBV28, TRBJ2-1)
CASSIIAGGRSEQFF

SEQ ID NO: 25781 - protein, 15 aa, Homo sapiens
  CDR3 for alpha chain variable domain of TCR clone 12891 (TRAV26-1, TRAJ37)
CIVKTGSSNTGKLIF

SEQ ID NO: 25782 - protein, 14 aa, Homo sapiens
  CDR3 for beta chain variable domain of TCR clone 12891 (TRBV20-1, TRBJ1-1)
CSARATGVGTEAFF

SEQ ID NO: 25783 - protein, 13 aa, Homo sapiens
  CDR3 for alpha chain variable domain of TCR clone 12892 (TRAV12-2, TRAJ15)
CAVFNQAGTALIF

SEQ ID NO: 25784 - protein, 15 aa, Homo sapiens
  CDR3 for beta chain variable domain of TCR clone 12892 (TRBV7-8, TRBJ1-5)
CASGRGGGADQPQHF

SEQ ID NO: 25785 - protein, 12 aa, Homo sapiens
  CDR3 for alpha chain variable domain of TCR clone 12893 (TRAV14/DV4, TRAJ11)
CAMSLYDSTLTF

SEQ ID NO: 25786 - protein, 19 aa, Homo sapiens
  CDR3 for beta chain variable domain of TCR clone 12893 (TRBV28, TRBJ2-4)
CASSFQPGGPAHSKNIQYF

SEQ ID NO: 25787 - protein, 13 aa, Homo sapiens
  CDR3 for alpha chain variable domain of TCR clone 12894 (TRAV21, TRAJ27)
CAARPGNAGKSTF

SEQ ID NO: 25788 - protein, 14 aa, Homo sapiens
  CDR3 for beta chain variable domain of TCR clone 12894 (TRBV7-6, TRBJ2-3)
CARSLGTVTDTQYF

SEQ ID NO: 25789 - protein, 23 aa, Homo sapiens
  CDR3 for alpha chain variable domain of TCR clone 12895 (TRAV8-4, TRAJ38)
CARPNAGNNHIQNPDPAVYQLRD

SEQ ID NO: 25790 - protein, 14 aa, Homo sapiens
  CDR3 for beta chain variable domain of TCR clone 12895 (TRBV7-8, TRBJ2-3)
CASSLEAGTDTQYF

SEQ ID NO: 25791 - protein, 12 aa, Homo sapiens
  CDR3 for alpha chain variable domain of TCR clone 12896 (TRAV21, TRAJ33)
CAKMDSNYQLIW

SEQ ID NO: 25792 - protein, 14 aa, Homo sapiens
  CDR3 for beta chain variable domain of TCR clone 12896 (TRBV2, TRBJ2-7)
CASSLTSGGYEQYF

SEQ ID NO: 25793 - protein, 12 aa, Homo sapiens
  CDR3 for alpha chain variable domain of TCR clone 12897 (TRAV12-3, TRAJ17)
CAMTLTGNKLTF

SEQ ID NO: 25794 - protein, 12 aa, Homo sapiens
  CDR3 for beta chain variable domain of TCR clone 12897 (TRBV6-3, TRBJ2-7)
CASSLTPYEQYF

SEQ ID NO: 25795 - protein, 13 aa, Homo sapiens
  CDR3 for alpha chain variable domain of TCR clone 12898 (TRAV2, TRAJ40)
CAVVISGTYKYIF

SEQ ID NO: 25796 - protein, 15 aa, Homo sapiens
  CDR3 for beta chain variable domain of TCR clone 12898 (TRBV11-3, TRBJ2-3)
CASLKDGREGDTQYF

SEQ ID NO: 25797 - protein, 11 aa, Homo sapiens
  CDR3 for alpha chain variable domain of TCR clone 12899 (TRAV21, TRAJ39)
LLVNAGNMLTF

SEQ ID NO: 25798 - protein, 15 aa, Homo sapiens
  CDR3 for beta chain variable domain of TCR clone 12899 (TRBV29-1, TRBJ2-1)
CSGRDRKSSYNEPFF

SEQ ID NO: 25799 - protein, 13 aa, Homo sapiens
  CDR3 for alpha chain variable domain of TCR clone 12900 (TRAV1-2, TRAJ9)
CAALNTGGFKTIF

SEQ ID NO: 25800 - protein, 14 aa, Homo sapiens
  CDR3 for beta chain variable domain of TCR clone 12900 (TRBV25-1, TRBJ1-1)
CASTHLGGNTEAFF

SEQ ID NO: 25801 - protein, 14 aa, Homo sapiens
  CDR3 for alpha chain variable domain of TCR clone 12901 (TRAV9-2, TRAJ39)
CALYIYNAGNMLTF

SEQ ID NO: 25802 - protein, 12 aa, Homo sapiens
  CDR3 for beta chain variable domain of TCR clone 12901 (TRBV28, TRBJ2-3)
CASSLYRDTQYF

SEQ ID NO: 25803 - protein, 17 aa, Homo sapiens
  CDR3 for alpha chain variable domain of TCR clone 12902 (TRAV13-1, TRAJ52)
CAASSGAGGTSYGKLTF

SEQ ID NO: 25804 - protein, 15 aa, Homo sapiens
  CDR3 for beta chain variable domain of TCR clone 12902 (TRBV2, TRBJ2-1)
CASSELAGSYNEQSF

SEQ ID NO: 25805 - protein, 15 aa, Homo sapiens
  CDR3 for alpha chain variable domain of TCR clone 12903 (TRAV26-1, TRAJ22)
CIVRVSFWFCKATDL

SEQ ID NO: 25806 - protein, 13 aa, Homo sapiens
  CDR3 for beta chain variable domain of TCR clone 12903 (TRBV7-9, TRBJ1-2)
CASSLKQSYGYTF

SEQ ID NO: 25807 - protein, 18 aa, Homo sapiens
  CDR3 for alpha chain variable domain of TCR clone 12904 (TRAV21, TRAJ52)
CAVRPSPAGGTSYGKLTF

SEQ ID NO: 25808 - protein, 17 aa, Homo sapiens
  CDR3 for beta chain variable domain of TCR clone 12904 (TRBV13, TRBJ2-3)
CDSSLSRVAGGRNTQYF

SEQ ID NO: 25809 - protein, 14 aa, Homo sapiens
  CDR3 for alpha chain variable domain of TCR clone 12905 (TRAV26-1, TRAJ38)
CIADNAGNNRKMIW

SEQ ID NO: 25810 - protein, 13 aa, Homo sapiens
  CDR3 for beta chain variable domain of TCR clone 12905 (TRBV20-1, TRBJ1-1)
CSARGGGNTEAFF

SEQ ID NO: 25811 - protein, 18 aa, Homo sapiens
  CDR3 for alpha chain variable domain of TCR clone 12906 (TRAV21, TRAJ52)
CAVRPSPAGGTSYGKLTF

SEQ ID NO: 25812 - protein, 18 aa, Homo sapiens
  CDR3 for beta chain variable domain of TCR clone 12906 (TRBV11-2, TRBJ2-3)
CASSLGGASRGAPNTQYF

SEQ ID NO: 25813 - protein, 14 aa, Homo sapiens
  CDR3 for alpha chain variable domain of TCR clone 12907 (TRAV13-1, TRAJ35)
CAASKGGFGNVLHC

SEQ ID NO: 25814 - protein, 13 aa, Homo sapiens
  CDR3 for beta chain variable domain of TCR clone 12907 (TRBV7-3, TRBJ1-1)
CASSQDWGVEAFF

SEQ ID NO: 25815 - protein, 14 aa, Homo sapiens
  CDR3 for alpha chain variable domain of TCR clone 12908 (TRAV1-2, TRAJ16)
CAVNRFSDGQKLLL

SEQ ID NO: 25816 - protein, 15 aa, Homo sapiens
  CDR3 for beta chain variable domain of TCR clone 12908 (TRBV7-9, TRBJ1-6)
CASSSPGRGNSPLHF

SEQ ID NO: 25817 - protein, 13 aa, Homo sapiens
  CDR3 for alpha chain variable domain of TCR clone 12909 (TRAV12-3, TRAJ21)
CAPGPHNFNKFYF

SEQ ID NO: 25818 - protein, 15 aa, Homo sapiens
  CDR3 for beta chain variable domain of TCR clone 12909 (TRBV9, TRBJ1-6)
CASSVAGTGDSPLHF

SEQ ID NO: 25819 - protein, 18 aa, Homo sapiens
  CDR3 for alpha chain variable domain of TCR clone 12910 (TRAV21, TRAJ52)
CVVRPSPAGGTSYGKLTF

SEQ ID NO: 25820 - protein, 17 aa, Homo sapiens
  CDR3 for beta chain variable domain of TCR clone 12910 (TRBV13, TRBJ2-3)
CASSLSRVAGGRNTQYF

SEQ ID NO: 25821 - protein, 13 aa, Homo sapiens
  CDR3 for alpha chain variable domain of TCR clone 12911 (TRAV13-1, TRAJ6)
RARGSGGSYIPTF

SEQ ID NO: 25822 - protein, 17 aa, Homo sapiens
  CDR3 for beta chain variable domain of TCR clone 12911 (TRBV7-8, TRBJ2-1)
CASSPPTGTLAYNEQFF

SEQ ID NO: 25823 - protein, 18 aa, Homo sapiens
  CDR3 for alpha chain variable domain of TCR clone 12912 (TRAV26-1, TRAJ23)
CVVRVGLEVWNQGGKLIF

SEQ ID NO: 25824 - protein, 16 aa, Homo sapiens
  CDR3 for beta chain variable domain of TCR clone 12912 (TRBV12-4, TRBJ2-5)
CASSFFVRGRQETQYF

SEQ ID NO: 25825 - protein, 18 aa, Homo sapiens
  CDR3 for alpha chain variable domain of TCR clone 12913 (TRAV21, TRAJ52)
CAVRPSPAGGTSYGKLTF

SEQ ID NO: 25826 - protein, 17 aa, Homo sapiens
  CDR3 for beta chain variable domain of TCR clone 12913 (TRBV13, TRBJ2-3)
CSSSLSRVAGGRNTQYF

SEQ ID NO: 25827 - protein, 18 aa, Homo sapiens
  CDR3 for alpha chain variable domain of TCR clone 12914 (TRAV21, TRAJ52)
CAVRPSPAGGTSYGKLTF

SEQ ID NO: 25828 - protein, 13 aa, Homo sapiens
  CDR3 for beta chain variable domain of TCR clone 12914 (TRBV4-2, TRBJ1-1)
CASSQAGNTEAFF

SEQ ID NO: 25829 - protein, 15 aa, Homo sapiens
  CDR3 for alpha chain variable domain of TCR clone 12915 (TRAV8-3, TRAJ27)
CAVGPSKTSAGKSTF

SEQ ID NO: 25830 - protein, 15 aa, Homo sapiens
  CDR3 for beta chain variable domain of TCR clone 12915 (TRBV7-2, TRBJ2-1)
CASSSGLAGGNEQFF

SEQ ID NO: 25831 - protein, 18 aa, Homo sapiens
  CDR3 for alpha chain variable domain of TCR clone 12916 (TRAV12-3, TRAJ52)
CAMSRTNAGGTSYGKLTF

SEQ ID NO: 25832 - protein, 15 aa, Homo sapiens
  CDR3 for beta chain variable domain of TCR clone 12916 (TRBV20-1, TRBJ2-7)
CSARDRVSGMDEQYF

SEQ ID NO: 25833 - protein, 15 aa, Homo sapiens
  CDR3 for alpha chain variable domain of TCR clone 12917 (TRAV26-1, TRAJ22)
CIVRVSFWFCKATDL

SEQ ID NO: 25834 - protein, 13 aa, Homo sapiens
  CDR3 for beta chain variable domain of TCR clone 12917 (TRBV7-9, TRBJ1-2)
CASSLKQNYGYSF

SEQ ID NO: 25835 - protein, 15 aa, Homo sapiens
  CDR3 for alpha chain variable domain of TCR clone 12918 (TRAV12-3, TRAJ27)
CAMSRLNTNAGKSTF

SEQ ID NO: 25836 - protein, 12 aa, Homo sapiens
  CDR3 for beta chain variable domain of TCR clone 12918 (TRBV7-8, TRBJ1-1)
CASGTATTEAFF

SEQ ID NO: 25837 - protein, 12 aa, Homo sapiens
  CDR3 for alpha chain variable domain of TCR clone 12919 (TRAV12-3, TRAJ17)
CAMTLTGNKLTF

SEQ ID NO: 25838 - protein, 12 aa, Homo sapiens
  CDR3 for beta chain variable domain of TCR clone 12919 (TRBV28, TRBJ2-3)
CASSLYRDTQYF

SEQ ID NO: 25839 - protein, 14 aa, Homo sapiens
  CDR3 for alpha chain variable domain of TCR clone 12920 (TRAV13-2, TRAJ43)
CAEIPTYNNNDMRF

SEQ ID NO: 25840 - protein, 15 aa, Homo sapiens
  CDR3 for beta chain variable domain of TCR clone 12920 (TRBV7-9, TRBJ2-2)
CASGPLDTFPGELFL

SEQ ID NO: 25841 - protein, 14 aa, Homo sapiens
  CDR3 for alpha chain variable domain of TCR clone 12921 (TRAV1-2, TRAJ8)
CAVREDTGFQKLVF

SEQ ID NO: 25842 - protein, 17 aa, Homo sapiens
  CDR3 for beta chain variable domain of TCR clone 12921 (TRBV7-3, TRBJ2-3)
CASSLMKRMRGADTQYF

SEQ ID NO: 25843 - protein, 13 aa, Homo sapiens
  CDR3 for alpha chain variable domain of TCR clone 12922 (TRAV13-2, TRAJ48)
CAEMDFGNEKLTF

SEQ ID NO: 25844 - protein, 15 aa, Homo sapiens
  CDR3 for beta chain variable domain of TCR clone 12922 (TRBV7-9, TRBJ1-6)
CASSSPGRGNSPPHF

SEQ ID NO: 25845 - protein, 17 aa, Homo sapiens
  CDR3 for alpha chain variable domain of TCR clone 12923 (TRAV13-1, TRAJ52)
CAASSGAGGTSYGKLTF

SEQ ID NO: 25846 - protein, 12 aa, Homo sapiens
  CDR3 for beta chain variable domain of TCR clone 12923 (TRBV7-8, TRBJ2-7)
CASSLGDREQYF

SEQ ID NO: 25847 - protein, 15 aa, Homo sapiens
  CDR3 for alpha chain variable domain of TCR clone 12924 (TRAV3, TRAJ22)
CAVRDRGGSARQLTF

SEQ ID NO: 25848 - protein, 14 aa, Homo sapiens
  CDR3 for beta chain variable domain of TCR clone 12924 (TRBV5-1, TRBJ2-7)
CASSRGESLYEQYF

SEQ ID NO: 25849 - protein, 14 aa, Homo sapiens
  CDR3 for alpha chain variable domain of TCR clone 12925 (TRAV30, TRAJ26)
CGTEIVSYGQNFVF

SEQ ID NO: 25850 - protein, 13 aa, Homo sapiens
  CDR3 for beta chain variable domain of TCR clone 12925 (TRBV19, TRBJ1-3)
CVSRLSLGNTIYF

SEQ ID NO: 25851 - protein, 12 aa, Homo sapiens
  CDR3 for alpha chain variable domain of TCR clone 12926 (TRAV13-1, TRAJ21)
CAAKEGFNKFYF

SEQ ID NO: 25852 - protein, 20 aa, Homo sapiens
  CDR3 for beta chain variable domain of TCR clone 12926 (TRBV7-8, TRBJ2-2)
CASSHLLPGPTIHITGELFF

SEQ ID NO: 25853 - protein, 13 aa, Homo sapiens
  CDR3 for alpha chain variable domain of TCR clone 12927 (TRAV1-2, TRAJ9)
CAALNAGGFKTIF

SEQ ID NO: 25854 - protein, 13 aa, Homo sapiens
  CDR3 for beta chain variable domain of TCR clone 12927 (TRBV19, TRBJ1-2)
CASSVPGQDGYTF

SEQ ID NO: 25855 - protein, 18 aa, Homo sapiens
  CDR3 for alpha chain variable domain of TCR clone 12928 (TRAV21, TRAJ52)
CAVRPSPAGGTSYGKLTF

SEQ ID NO: 25856 - protein, 17 aa, Homo sapiens
  CDR3 for beta chain variable domain of TCR clone 12928 (TRBV13, TRBJ2-3)
CASSLSRVAWGRNTQYF

SEQ ID NO: 25857 - protein, 11 aa, Homo sapiens
  CDR3 for alpha chain variable domain of TCR clone 12929 (TRAV1-1, TRAJ23)
CAVRQGGKLIF

SEQ ID NO: 25858 - protein, 20 aa, Homo sapiens
  CDR3 for beta chain variable domain of TCR clone 12929 (TRBV7-8, TRBJ2-2)
CASSHLFPGPTIHITGELFF

SEQ ID NO: 25859 - protein, 14 aa, Homo sapiens
  CDR3 for alpha chain variable domain of TCR clone 12930 (TRAV12-2, TRAJ17)
CAVLFKAAGNQLTF

SEQ ID NO: 25860 - protein, 17 aa, Homo sapiens
  CDR3 for beta chain variable domain of TCR clone 12930 (TRBV20-1, TRBJ2-2)
CSASGSGQGGLTGELFF

SEQ ID NO: 25861 - protein, 12 aa, Homo sapiens
  CDR3 for alpha chain variable domain of TCR clone 12931 (TRAV12-3, TRAJ17)
CAMTLTGNKLSF

SEQ ID NO: 25862 - protein, 15 aa, Homo sapiens
  CDR3 for beta chain variable domain of TCR clone 12931 (TRBV20-1, TRBJ2-7)
CSARDRVSGMDEQYF

SEQ ID NO: 25863 - protein, 14 aa, Homo sapiens
  CDR3 for alpha chain variable domain of TCR clone 12932 (TRAV1-1, TRAJ35)
CAVRSIGFGNVLHC

SEQ ID NO: 25864 - protein, 14 aa, Homo sapiens
  CDR3 for beta chain variable domain of TCR clone 12932 (TRBV5-7, TRBJ2-7)
CASSGGLSSYEQYS

SEQ ID NO: 25865 - protein, 15 aa, Homo sapiens
  CDR3 for alpha chain variable domain of TCR clone 12933 (TRAV8-3, TRAJ45)
CSSSYSGGGADGLTF

SEQ ID NO: 25866 - protein, 13 aa, Homo sapiens
  CDR3 for beta chain variable domain of TCR clone 12933 (TRBV10-3, TRBJ2-7)
CASKLAVNYEQYF

SEQ ID NO: 25867 - protein, 13 aa, Homo sapiens
  CDR3 for alpha chain variable domain of TCR clone 12934 (TRAV35, TRAJ44)
CAGLSGTASKLTF

SEQ ID NO: 25868 - protein, 17 aa, Homo sapiens
  CDR3 for beta chain variable domain of TCR clone 12934 (TRBV7-8, TRBJ1-2)
CASSLRPLQGHLYSYTF

SEQ ID NO: 25869 - protein, 13 aa, Homo sapiens
  CDR3 for alpha chain variable domain of TCR clone 12935 (TRAV2, TRAJ15)
CAVASQAGTALIF

SEQ ID NO: 25870 - protein, 14 aa, Homo sapiens
  CDR3 for beta chain variable domain of TCR clone 12935 (TRBV7-2, TRBJ2-7)
CASRSQGAAYEQYF

SEQ ID NO: 25871 - protein, 14 aa, Homo sapiens
  CDR3 for alpha chain variable domain of TCR clone 12936 (TRAV17, TRAJ54)
CATDANQGAQKLVF

SEQ ID NO: 25872 - protein, 15 aa, Homo sapiens
  CDR3 for beta chain variable domain of TCR clone 12936 (TRBV9, TRBJ2-1)
CASSLAGSSYNEQFF

SEQ ID NO: 25873 - protein, 15 aa, Homo sapiens
  CDR3 for alpha chain variable domain of TCR clone 12937 (TRAV8-3, TRAJ45)
CDSSYSGGGADGLTF

SEQ ID NO: 25874 - protein, 13 aa, Homo sapiens
  CDR3 for beta chain variable domain of TCR clone 12937 (TRBV10-3, TRBJ2-7)
CASKLAVNYEQYF

SEQ ID NO: 25875 - protein, 11 aa, Homo sapiens
  CDR3 for alpha chain variable domain of TCR clone 12938 (TRAV2, TRAJ33)
CAVESNYRLIW

SEQ ID NO: 25876 - protein, 15 aa, Homo sapiens
  CDR3 for beta chain variable domain of TCR clone 12938 (TRBV19, TRBJ1-1)
CASTSGQIQNTEAFF

SEQ ID NO: 25877 - protein, 15 aa, Homo sapiens
  CDR3 for alpha chain variable domain of TCR clone 12939 (TRAV26-1, TRAJ29)
CIVRVEGLGNTPLVF

SEQ ID NO: 25878 - protein, 15 aa, Homo sapiens
  CDR3 for beta chain variable domain of TCR clone 12939 (TRBV7-9, TRBJ1-5)
CASSQGHQPNQPQHF

SEQ ID NO: 25879 - protein, 18 aa, Homo sapiens
  CDR3 for alpha chain variable domain of TCR clone 12940 (TRAV12-3, TRAJ52)
CAMSRTNAGGTSYGKLTF

SEQ ID NO: 25880 - protein, 12 aa, Homo sapiens
  CDR3 for beta chain variable domain of TCR clone 12940 (TRBV7-8, TRBJ2-7)
CASSLGDREQYF

SEQ ID NO: 25881 - protein, 10 aa, Homo sapiens
  CDR3 for alpha chain variable domain of TCR clone 12941 (TRAV12-2, TRAJ10)
CAAWTGVETH

SEQ ID NO: 25882 - protein, 14 aa, Homo sapiens
  CDR3 for beta chain variable domain of TCR clone 12941 (TRBV5-5, TRBJ1-2)
CASSLDPYNYGYTF

SEQ ID NO: 25883 - protein, 14 aa, Homo sapiens
  CDR3 for alpha chain variable domain of TCR clone 12942 (TRAV12-2, TRAJ26)
CAVNDDNYGQNFVF

SEQ ID NO: 25884 - protein, 13 aa, Homo sapiens
  CDR3 for beta chain variable domain of TCR clone 12942 (TRBV3-1, TRBJ2-5)
CASSPVLSETQYF

SEQ ID NO: 25885 - protein, 12 aa, Homo sapiens
  CDR3 for alpha chain variable domain of TCR clone 12943 (TRAV17, TRAJ17)
CATDAESNKLTF

SEQ ID NO: 25886 - protein, 14 aa, Homo sapiens
  CDR3 for beta chain variable domain of TCR clone 12943 (TRBV7-2, TRBJ2-1)
CASSLVAGGNEQFF

SEQ ID NO: 25887 - protein, 13 aa, Homo sapiens
  CDR3 for alpha chain variable domain of TCR clone 12944 (TRAV2, TRAJ40)
CAVVTSGTYKYIF

SEQ ID NO: 25888 - protein, 15 aa, Homo sapiens
  CDR3 for beta chain variable domain of TCR clone 12944 (TRBV29-1, TRBJ2-7)
CSVEFFDRGSYEQYF

SEQ ID NO: 25889 - protein, 14 aa, Homo sapiens
  CDR3 for alpha chain variable domain of TCR clone 12945 (TRAV26-1, TRAJ49)
CIVRPRNTGNQFYF

SEQ ID NO: 25890 - protein, 13 aa, Homo sapiens
  CDR3 for beta chain variable domain of TCR clone 12945 (TRBV12-4, TRBJ2-4)
CASSNLRGNIRYF

SEQ ID NO: 25891 - protein, 12 aa, Homo sapiens
  CDR3 for alpha chain variable domain of TCR clone 12946 (TRAV13-2, TRAJ23)
CAGRHRGGKLIF

SEQ ID NO: 25892 - protein, 16 aa, Homo sapiens
  CDR3 for beta chain variable domain of TCR clone 12946 (TRBV20-1, TRBJ1-4)
CSAPGQGLLTNEKLFF

SEQ ID NO: 25893 - protein, 12 aa, Homo sapiens
  CDR3 for alpha chain variable domain of TCR clone 12947 (TRAV8-3, TRAJ26)
CAGDNYGQNFVF

SEQ ID NO: 25894 - protein, 15 aa, Homo sapiens
  CDR3 for beta chain variable domain of TCR clone 12947 (TRBV20-1, TRBJ2-7)
CSARDRVSGMDEQYF

SEQ ID NO: 25895 - protein, 15 aa, Homo sapiens
  CDR3 for alpha chain variable domain of TCR clone 12948 (TRAV21, TRAJ40)
CAVRPQTSGTYKYIF

SEQ ID NO: 25896 - protein, 13 aa, Homo sapiens
  CDR3 for beta chain variable domain of TCR clone 12948 (TRBV7-2, TRBJ2-2)
CASSAVRAGELFF

SEQ ID NO: 25897 - protein, 15 aa, Homo sapiens
  CDR3 for alpha chain variable domain of TCR clone 12949 (TRAV14/DV4, TRAJ10)
CAMRELTGGGNKLTF

SEQ ID NO: 25898 - protein, 12 aa, Homo sapiens
  CDR3 for beta chain variable domain of TCR clone 12949 (TRBV14, TRBJ2-5)
CASSQLKETQYF

SEQ ID NO: 25899 - protein, 14 aa, Homo sapiens
  CDR3 for alpha chain variable domain of TCR clone 12950 (TRAV1-2, TRAJ8)
CAVREDTGFQKLVF

SEQ ID NO: 25900 - protein, 15 aa, Homo sapiens
  CDR3 for beta chain variable domain of TCR clone 12950 (TRBV6-3, TRBJ2-7)
CASSSPGTVCYEQYF

SEQ ID NO: 25901 - protein, 16 aa, Homo sapiens
  CDR3 for alpha chain variable domain of TCR clone 12951 (TRAV13-1, TRAJ15)
CAADGGPVRAGTALIF

SEQ ID NO: 25902 - protein, 13 aa, Homo sapiens
  CDR3 for beta chain variable domain of TCR clone 12951 (TRBV20-1, TRBJ2-3)
CSATSGSRDTQYF

SEQ ID NO: 25903 - protein, 14 aa, Homo sapiens
  CDR3 for alpha chain variable domain of TCR clone 12952 (TRAV12-1, TRAJ17)
CVVNYKAAGNKRTF

SEQ ID NO: 25904 - protein, 17 aa, Homo sapiens
  CDR3 for beta chain variable domain of TCR clone 12952 (TRBV20-1, TRBJ2-1)
CSASSSGLAGSYNEQFF

SEQ ID NO: 25905 - protein, 14 aa, Homo sapiens
  CDR3 for alpha chain variable domain of TCR clone 12953 (TRAV12-2, TRAJ13)
CAVKKTGGSQKVTF

SEQ ID NO: 25906 - protein, 15 aa, Homo sapiens
  CDR3 for beta chain variable domain of TCR clone 12953 (TRBV27, TRBJ2-1)
CASSNGGGSSNEQFF

SEQ ID NO: 25907 - protein, 12 aa, Homo sapiens
  CDR3 for alpha chain variable domain of TCR clone 12954 (TRAV13-1, TRAJ21)
CAAKEGFNKFYF

SEQ ID NO: 25908 - protein, 16 aa, Homo sapiens
  CDR3 for beta chain variable domain of TCR clone 12954 (TRBV7-3, TRBJ2-2)
CASSLKRGTLSGELFF

SEQ ID NO: 25909 - protein, 14 aa, Homo sapiens
  CDR3 for alpha chain variable domain of TCR clone 12955 (TRAV9-2, TRAJ39)
CALYIYNAGNMLTF

SEQ ID NO: 25910 - protein, 15 aa, Homo sapiens
  CDR3 for beta chain variable domain of TCR clone 12955 (TRBV5-1, TRBJ2-3)
CASSVTSGSTDTQYF

SEQ ID NO: 25911 - protein, 16 aa, Homo sapiens
  CDR3 for alpha chain variable domain of TCR clone 12956 (TRAV23/DV6, TRAJ9)
CAASIGGNTGGFKTIF

SEQ ID NO: 25912 - protein, 14 aa, Homo sapiens
  CDR3 for beta chain variable domain of TCR clone 12956 (TRBV4-1, TRBJ2-2)
CASSQAVNTGELFF

SEQ ID NO: 25913 - protein, 16 aa, Homo sapiens
  CDR3 for alpha chain variable domain of TCR clone 12957 (TRAV12-3, TRAJ53)
CAMSPGSGGINYKLTF

SEQ ID NO: 25914 - protein, 11 aa, Homo sapiens
  CDR3 for beta chain variable domain of TCR clone 12957 (TRBV29-1, TRBJ2-5)
CSEDRTGTQYF

SEQ ID NO: 25915 - protein, 15 aa, Homo sapiens
  CDR3 for alpha chain variable domain of TCR clone 12958 (TRAV27, TRAJ38)
CAARRNAGNNRKLIW

SEQ ID NO: 25916 - protein, 13 aa, Homo sapiens
  CDR3 for beta chain variable domain of TCR clone 12958 (TRBV12-5, TRBJ2-3)
CASGDRQSGTQYF

SEQ ID NO: 25917 - protein, 15 aa, Homo sapiens
  CDR3 for alpha chain variable domain of TCR clone 12959 (TRAV3, TRAJ5)
CAVRDLDTGRKALTF

SEQ ID NO: 25918 - protein, 13 aa, Homo sapiens
  CDR3 for beta chain variable domain of TCR clone 12959 (TRBV12-4, TRBJ2-7)
CASSPTETYEQYF

SEQ ID NO: 25919 - protein, 15 aa, Homo sapiens
  CDR3 for alpha chain variable domain of TCR clone 12960 (TRAV14/DV4, TRAJ15)
CAMREGWQAGTALIF

SEQ ID NO: 25920 - protein, 16 aa, Homo sapiens
  CDR3 for beta chain variable domain of TCR clone 12960 (TRBV18, TRBJ1-5)
CASSPYRVEGNQPQHF

SEQ ID NO: 25921 - protein, 14 aa, Homo sapiens
  CDR3 for alpha chain variable domain of TCR clone 12961 (TRAV1-2, TRAJ16)
CAVNRFSDGQKPLF

SEQ ID NO: 25922 - protein, 15 aa, Homo sapiens
  CDR3 for beta chain variable domain of TCR clone 12961 (TRBV7-9, TRBJ1-6)
CASSSPGRGNSPLHF

SEQ ID NO: 25923 - protein, 16 aa, Homo sapiens
  CDR3 for alpha chain variable domain of TCR clone 12962 (TRAV1-2, TRAJ10)
CAVRGVLTGGGNKLTF

SEQ ID NO: 25924 - protein, 13 aa, Homo sapiens
  CDR3 for beta chain variable domain of TCR clone 12962 (TRBV7-9, TRBJ1-2)
CASSLKQNYGYTF

SEQ ID NO: 25925 - protein, 10 aa, Homo sapiens
  CDR3 for alpha chain variable domain of TCR clone 12963 (TRAV21, TRAJ31)
CAVDNARLMF

SEQ ID NO: 25926 - protein, 14 aa, Homo sapiens
  CDR3 for beta chain variable domain of TCR clone 12963 (TRBV5-5, TRBJ2-2)
CASSLLGDTGELFF

SEQ ID NO: 25927 - protein, 13 aa, Homo sapiens
  CDR3 for alpha chain variable domain of TCR clone 12964 (TRAV8-3, TRAJ40)
CAVGAQYLRNLQI

SEQ ID NO: 25928 - protein, 17 aa, Homo sapiens
  CDR3 for beta chain variable domain of TCR clone 12964 (TRBV5-1, TRBJ2-5)
CASSLLGLAANQETQYF

SEQ ID NO: 25929 - protein, 16 aa, Homo sapiens
  CDR3 for alpha chain variable domain of TCR clone 12965 (TRAV30, TRAJ24)
CGTEIVDADSWGKFQF

SEQ ID NO: 25930 - protein, 12 aa, Homo sapiens
  CDR3 for beta chain variable domain of TCR clone 12965 (TRBV28, TRBJ2-3)
CASSLYRDTQYF

SEQ ID NO: 25931 - protein, 17 aa, Homo sapiens
  CDR3 for alpha chain variable domain of TCR clone 12966 (TRAV8-6, TRAJ58)
CAVSSWVGETSGSRLTF

SEQ ID NO: 25932 - protein, 15 aa, Homo sapiens
  CDR3 for beta chain variable domain of TCR clone 12966 (TRBV6-3, TRBJ2-7)
CASSSPGTVFYEQYF

SEQ ID NO: 25933 - protein, 23 aa, Homo sapiens
  CDR3 for alpha chain variable domain of TCR clone 12967 (TRAV26-1, TRAJ38)
CIADNAGNNHIQNPDPAVYQLRD

SEQ ID NO: 25934 - protein, 12 aa, Homo sapiens
  CDR3 for beta chain variable domain of TCR clone 12967 (TRBV7-8, TRBJ2-7)
CASSLGDREQYF

SEQ ID NO: 25935 - protein, 12 aa, Homo sapiens
  CDR3 for alpha chain variable domain of TCR clone 12968 (TRAV13-1, TRAJ22)
CVPRGFCKATDL

SEQ ID NO: 25936 - protein, 13 aa, Homo sapiens
  CDR3 for beta chain variable domain of TCR clone 12968 (TRBV11-2, TRBJ2-5)
CASSFSSQETQYF

SEQ ID NO: 25937 - protein, 13 aa, Homo sapiens
  CDR3 for alpha chain variable domain of TCR clone 12969 (TRAV13-2, TRAJ40)
CAEFTSGTYKYIF

SEQ ID NO: 25938 - protein, 14 aa, Homo sapiens
  CDR3 for beta chain variable domain of TCR clone 12969 (TRBV10-2, TRBJ1-5)
CASSSTGRNQPQHS

SEQ ID NO: 25939 - protein, 13 aa, Homo sapiens
  CDR3 for alpha chain variable domain of TCR clone 12970 (TRAV1-2, TRAJ9)
CAALNTGGFKTIF

SEQ ID NO: 25940 - protein, 13 aa, Homo sapiens
  CDR3 for beta chain variable domain of TCR clone 12970 (TRBV19, TRBJ1-2)
CASSVPGQDGYSF

SEQ ID NO: 25941 - protein, 11 aa, Homo sapiens
  CDR3 for alpha chain variable domain of TCR clone 12971 (TRAV1-2, TRAJ20)
CAVANDYKLSF

SEQ ID NO: 25942 - protein, 16 aa, Homo sapiens
  CDR3 for beta chain variable domain of TCR clone 12971 (TRBV12-5, TRBJ2-5)
CASGPRTSGNQETQYF

SEQ ID NO: 25943 - protein, 18 aa, Homo sapiens
  CDR3 for alpha chain variable domain of TCR clone 12972 (TRAV13-1, TRAJ52)
CAAKNPNAGGTSYGELTF

SEQ ID NO: 25944 - protein, 15 aa, Homo sapiens
  CDR3 for beta chain variable domain of TCR clone 12972 (TRBV6-1, TRBJ2-3)
CASSERGGITDTQYF

SEQ ID NO: 25945 - protein, 13 aa, Homo sapiens
  CDR3 for alpha chain variable domain of TCR clone 12973 (TRAV1-1, TRAJ9)
CAAKNTGGFKTIF

SEQ ID NO: 25946 - protein, 14 aa, Homo sapiens
  CDR3 for beta chain variable domain of TCR clone 12973 (TRBV20-1, TRBJ2-1)
RSAQIGGSANEQFF

SEQ ID NO: 25947 - protein, 11 aa, Homo sapiens
  CDR3 for alpha chain variable domain of TCR clone 12974 (TRAV1-2, TRAJ31)
CAVNNNARLLF

SEQ ID NO: 25948 - protein, 15 aa, Homo sapiens
  CDR3 for beta chain variable domain of TCR clone 12974 (TRBV28, TRBJ2-1)
CASSIIAGGRSEQFF

SEQ ID NO: 25949 - protein, 12 aa, Homo sapiens
  CDR3 for alpha chain variable domain of TCR clone 12975 (TRAV12-3, TRAJ17)
CAMTLTGNKLTF

SEQ ID NO: 25950 - protein, 16 aa, Homo sapiens
  CDR3 for beta chain variable domain of TCR clone 12975 (TRBV2, TRBJ2-1)
CASRSPAGGKYNEQFF

SEQ ID NO: 25951 - protein, 15 aa, Homo sapiens
  CDR3 for alpha chain variable domain of TCR clone 12976 (TRAV8-3, TRAJ45)
CASSYSGGGADGLTV

SEQ ID NO: 25952 - protein, 13 aa, Homo sapiens
  CDR3 for beta chain variable domain of TCR clone 12976 (TRBV10-3, TRBJ2-7)
CASKLAVNYEQYF

SEQ ID NO: 25953 - protein, 14 aa, Homo sapiens
  CDR3 for alpha chain variable domain of TCR clone 12977 (TRAV2, TRAJ9)
CAVEDRSGGFKTIF

SEQ ID NO: 25954 - protein, 12 aa, Homo sapiens
  CDR3 for beta chain variable domain of TCR clone 12977 (TRBV14, TRBJ2-7)
CASSRLKGEQYF

SEQ ID NO: 25955 - protein, 18 aa, Homo sapiens
  CDR3 for alpha chain variable domain of TCR clone 12978 (TRAV13-2, TRAJ20)
CSYSTWRLSCLLVHKLSF

SEQ ID NO: 25956 - protein, 13 aa, Homo sapiens
  CDR3 for beta chain variable domain of TCR clone 12978 (TRBV2, TRBJ1-4)
CASSERAGEKLFF

SEQ ID NO: 25957 - protein, 17 aa, Homo sapiens
  CDR3 for alpha chain variable domain of TCR clone 12979 (TRAV3, TRAJ6)
CAVRDGPRAGGSYIPTF

SEQ ID NO: 25958 - protein, 13 aa, Homo sapiens
  CDR3 for beta chain variable domain of TCR clone 12979 (TRBV19, TRBJ1-2)
CASSVPGQDGYTF

SEQ ID NO: 25959 - protein, 14 aa, Homo sapiens
  CDR3 for alpha chain variable domain of TCR clone 12980 (TRAV26-1, TRAJ39)
CIVRGSRAVNMLTF

SEQ ID NO: 25960 - protein, 15 aa, Homo sapiens
  CDR3 for beta chain variable domain of TCR clone 12980 (TRBV7-9, TRBJ1-5)
CASSQGHQPNQPQHF

SEQ ID NO: 25961 - protein, 10 aa, Homo sapiens
  CDR3 for alpha chain variable domain of TCR clone 12981 (TRAV1-2, TRAJ31)
CVSEDARLMF

SEQ ID NO: 25962 - protein, 14 aa, Homo sapiens
  CDR3 for beta chain variable domain of TCR clone 12981 (TRBV19, TRBJ2-1)
CASPTFVLSGGQFF

SEQ ID NO: 25963 - protein, 16 aa, Homo sapiens
  CDR3 for alpha chain variable domain of TCR clone 12982 (TRAV30, TRAJ24)
CGTEIVDADSWGKFQF

SEQ ID NO: 25964 - protein, 14 aa, Homo sapiens
  CDR3 for beta chain variable domain of TCR clone 12982 (TRBV12-5, TRBJ2-5)
YASGSRTHQETQYF

SEQ ID NO: 25965 - protein, 15 aa, Homo sapiens
  CDR3 for alpha chain variable domain of TCR clone 12983 (TRAV26-1, TRAJ29)
CIVRVEGSGNTPLVF

SEQ ID NO: 25966 - protein, 15 aa, Homo sapiens
  CDR3 for beta chain variable domain of TCR clone 12983 (TRBV7-9, TRBJ1-5)
CASSQGHQPNQPHHF

SEQ ID NO: 25967 - protein, 15 aa, Homo sapiens
  CDR3 for alpha chain variable domain of TCR clone 12984 (TRAV3, TRAJ5)
CAVRDLDPGRRALTF

SEQ ID NO: 25968 - protein, 13 aa, Homo sapiens
  CDR3 for beta chain variable domain of TCR clone 12984 (TRBV12-4, TRBJ2-7)
CASSPTETYEQYF

SEQ ID NO: 25969 - protein, 15 aa, Homo sapiens
  CDR3 for alpha chain variable domain of TCR clone 12985 (TRAV2, TRAJ9)
CAVEGRGTGGFKTIF

SEQ ID NO: 25970 - protein, 16 aa, Homo sapiens
  CDR3 for beta chain variable domain of TCR clone 12985 (TRBV24-1, TRBJ2-3)
CATSDPGTGATDTQYF

SEQ ID NO: 25971 - protein, 15 aa, Homo sapiens
  CDR3 for alpha chain variable domain of TCR clone 12986 (TRAV20, TRAJ23)
CAVQAVRNQGGKLIF

SEQ ID NO: 25972 - protein, 18 aa, Homo sapiens
  CDR3 for beta chain variable domain of TCR clone 12986 (TRBV4-1, TRBJ1-6)
CASSQWDKKIIHPSTLGT

SEQ ID NO: 25973 - protein, 13 aa, Homo sapiens
  CDR3 for alpha chain variable domain of TCR clone 12987 (TRAV22, TRAJ29)
CSVGGSGNTPLVF

SEQ ID NO: 25974 - protein, 13 aa, Homo sapiens
  CDR3 for beta chain variable domain of TCR clone 12987 (TRBV4-2, TRBJ1-1)
CASSQAGNTEAFF

SEQ ID NO: 25975 - protein, 13 aa, Homo sapiens
  CDR3 for alpha chain variable domain of TCR clone 12988 (TRAV21, TRAJ57)
CAVTQGGSEKLVF

SEQ ID NO: 25976 - protein, 16 aa, Homo sapiens
  CDR3 for beta chain variable domain of TCR clone 12988 (TRBV29-1, TRBJ2-7)
CSVEDAEDGTAYEQCF

SEQ ID NO: 25977 - protein, 13 aa, Homo sapiens
  CDR3 for alpha chain variable domain of TCR clone 12989 (TRAV26-1, TRAJ48)
CIVRVVGGEKLTF

SEQ ID NO: 25978 - protein, 19 aa, Homo sapiens
  CDR3 for beta chain variable domain of TCR clone 12989 (TRBV11-3, TRBJ2-2)
CASSTRPGAKTTNTGELFF

SEQ ID NO: 25979 - protein, 14 aa, Homo sapiens
  CDR3 for alpha chain variable domain of TCR clone 12990 (TRAV8-2, TRAJ37)
CVVSISGNTGKLIF

SEQ ID NO: 25980 - protein, 11 aa, Homo sapiens
  CDR3 for beta chain variable domain of TCR clone 12990 (TRBV12-4, TRBJ2-3)
CASTATDTQYF

SEQ ID NO: 25981 - protein, 16 aa, Homo sapiens
  CDR3 for alpha chain variable domain of TCR clone 12991 (TRAV12-2, TRAJ10)
CAVNRVLTGGGNKLTF

SEQ ID NO: 25982 - protein, 14 aa, Homo sapiens
  CDR3 for beta chain variable domain of TCR clone 12991 (TRBV7-2, TRBJ2-7)
CASSPKTSFYEQYF

SEQ ID NO: 25983 - protein, 13 aa, Homo sapiens
  CDR3 for alpha chain variable domain of TCR clone 12992 (TRAV2, TRAJ40)
CAVVTSGTYKYIF

SEQ ID NO: 25984 - protein, 14 aa, Homo sapiens
  CDR3 for beta chain variable domain of TCR clone 12992 (TRBV7-8, TRBJ2-3)
CASSLEAGTDTQYF

SEQ ID NO: 25985 - protein, 14 aa, Homo sapiens
  CDR3 for alpha chain variable domain of TCR clone 12993 (TRAV1-2, TRAJ8)
CAVREDTGFQKLVF

SEQ ID NO: 25986 - protein, 15 aa, Homo sapiens
  CDR3 for beta chain variable domain of TCR clone 12993 (TRBV10-1, TRBJ2-1)
CASSTGTELYNEQFF

SEQ ID NO: 25987 - protein, 12 aa, Homo sapiens
  CDR3 for alpha chain variable domain of TCR clone 12994 (TRAV12-3, TRAJ17)
CAMTLTGNKLTF

SEQ ID NO: 25988 - protein, 11 aa, Homo sapiens
  CDR3 for beta chain variable domain of TCR clone 12994 (TRBV29-1, TRBJ2-5)
CGEDRTGTQYF

SEQ ID NO: 25989 - protein, 12 aa, Homo sapiens
  CDR3 for alpha chain variable domain of TCR clone 12995 (TRAV17, TRAJ39)
CATGAAGNMLTF

SEQ ID NO: 25990 - protein, 14 aa, Homo sapiens
  CDR3 for beta chain variable domain of TCR clone 12995 (TRBV7-9, TRBJ1-2)
CASSRQGANYGYAF

SEQ ID NO: 25991 - protein, 18 aa, Homo sapiens
  CDR3 for alpha chain variable domain of TCR clone 12996 (TRAV8-1, TRAJ5)
CAVKTEQPGRRAGEHLLL

SEQ ID NO: 25992 - protein, 16 aa, Homo sapiens
  CDR3 for beta chain variable domain of TCR clone 12996 (TRBV12-5, TRBJ2-5)
CASGPRTSGNQETQYF

SEQ ID NO: 25993 - protein, 17 aa, Homo sapiens
  CDR3 for alpha chain variable domain of TCR clone 12997 (TRAV3, TRAJ6)
CAVRDGPRAGGSYIPTF

SEQ ID NO: 25994 - protein, 14 aa, Homo sapiens
  CDR3 for beta chain variable domain of TCR clone 12997 (TRBV7-2, TRBJ2-7)
CASSPKTSFYVQYF

SEQ ID NO: 25995 - protein, 15 aa, Homo sapiens
  CDR3 for alpha chain variable domain of TCR clone 12998 (TRAV29/DV5, TRAJ48)
CAASLGGFGNEKLTF

SEQ ID NO: 25996 - protein, 12 aa, Homo sapiens
  CDR3 for beta chain variable domain of TCR clone 12998 (TRBV7-8, TRBJ2-1)
CASSLGHNEQFF

SEQ ID NO: 25997 - protein, 12 aa, Homo sapiens
  CDR3 for alpha chain variable domain of TCR clone 12999 (TRAV13-2, TRAJ23)
CAERHRGGKLIF

SEQ ID NO: 25998 - protein, 16 aa, Homo sapiens
  CDR3 for beta chain variable domain of TCR clone 12999 (TRBV7-3, TRBJ2-2)
CASSLKRGTLSGELFF

SEQ ID NO: 25999 - protein, 16 aa, Homo sapiens
  CDR3 for alpha chain variable domain of TCR clone 13000 (TRAV12-1, TRAJ48)
CVVNTFREFGNEKLTF

SEQ ID NO: 26000 - protein, 17 aa, Homo sapiens
  CDR3 for beta chain variable domain of TCR clone 13000 (TRBV13, TRBJ2-3)
CASSLSRVAGGRNTQYF

SEQ ID NO: 26001 - protein, 11 aa, Homo sapiens
  CDR3 for alpha chain variable domain of TCR clone 13001 (TRAV2, TRAJ13)
CASGGYQKVTF

SEQ ID NO: 26002 - protein, 15 aa, Homo sapiens
  CDR3 for beta chain variable domain of TCR clone 13001 (TRBV11-3, TRBJ2-3)
CASLKDGREGDTQYF

SEQ ID NO: 26003 - protein, 12 aa, Homo sapiens
  CDR3 for alpha chain variable domain of TCR clone 13002 (TRAV13-1, TRAJ37)
CAAIRNTGKLIF

SEQ ID NO: 26004 - protein, 13 aa, Homo sapiens
  CDR3 for beta chain variable domain of TCR clone 13002 (TRBV19, TRBJ2-5)
CASRLAGHETQYF

SEQ ID NO: 26005 - protein, 12 aa, Homo sapiens
  CDR3 for alpha chain variable domain of TCR clone 13003 (TRAV23/DV6, TRAJ17)
CAAKAAGNKLTF

SEQ ID NO: 26006 - protein, 16 aa, Homo sapiens
  CDR3 for beta chain variable domain of TCR clone 13003 (TRBV5-5, TRBJ1-1)
CSSLRFRGLMNTEAFF

SEQ ID NO: 26007 - protein, 13 aa, Homo sapiens
  CDR3 for alpha chain variable domain of TCR clone 13004 (TRAV27, TRAJ41)
CAGEGNSGYALNL

SEQ ID NO: 26008 - protein, 14 aa, Homo sapiens
  CDR3 for beta chain variable domain of TCR clone 13004 (TRBV7-2, TRBJ1-1)
CASSFLTGTTEAFF

SEQ ID NO: 26009 - protein, 14 aa, Homo sapiens
  CDR3 for alpha chain variable domain of TCR clone 13005 (TRAV13-2, TRAJ17)
CAENGKAAGNKLTF

SEQ ID NO: 26010 - protein, 14 aa, Homo sapiens
  CDR3 for beta chain variable domain of TCR clone 13005 (TRBV5-4, TRBJ1-1)
CASSLDSRRDEAFF

SEQ ID NO: 26011 - protein, 17 aa, Homo sapiens
  CDR3 for alpha chain variable domain of TCR clone 13006 (TRAV24, TRAJ5)
CAPRRALTFGSGTRLQV

SEQ ID NO: 26012 - protein, 12 aa, Homo sapiens
  CDR3 for beta chain variable domain of TCR clone 13006 (TRBV24-1, TRBJ1-2)
CATSDDGGRYTF

SEQ ID NO: 26013 - protein, 14 aa, Homo sapiens
  CDR3 for alpha chain variable domain of TCR clone 13007 (TRAV1-2, TRAJ16)
CAVNRFSDGQKLLF

SEQ ID NO: 26014 - protein, 15 aa, Homo sapiens
  CDR3 for beta chain variable domain of TCR clone 13007 (TRBV11-3, TRBJ1-1)
CASSLGGPGDTEAFF

SEQ ID NO: 26015 - protein, 12 aa, Homo sapiens
  CDR3 for alpha chain variable domain of TCR clone 13008 (TRAV13-2, TRAJ23)
FAERHRGGKLIF

SEQ ID NO: 26016 - protein, 16 aa, Homo sapiens
  CDR3 for beta chain variable domain of TCR clone 13008 (TRBV20-1, TRBJ1-4)
CSAPGQGLLTNEKLFF

SEQ ID NO: 26017 - protein, 16 aa, Homo sapiens
  CDR3 for alpha chain variable domain of TCR clone 13009 (TRAV30, TRAJ24)
SGTEIVDADSWGKFQF

SEQ ID NO: 26018 - protein, 14 aa, Homo sapiens
  CDR3 for beta chain variable domain of TCR clone 13009 (TRBV12-5, TRBJ2-5)
CASGSRTHQETQYF

SEQ ID NO: 26019 - protein, 14 aa, Homo sapiens
  CDR3 for alpha chain variable domain of TCR clone 13010 (TRAV1-2, TRAJ16)
CAVNRFSGGQKLLF

SEQ ID NO: 26020 - protein, 15 aa, Homo sapiens
  CDR3 for beta chain variable domain of TCR clone 13010 (TRBV7-9, TRBJ1-6)
CASSSPGRGNSPLHF

SEQ ID NO: 26021 - protein, 17 aa, Homo sapiens
  CDR3 for alpha chain variable domain of TCR clone 13011 (TRAV8-4, TRAJ45)
CAVSEGGSGGGADGLTF

SEQ ID NO: 26022 - protein, 13 aa, Homo sapiens
  CDR3 for beta chain variable domain of TCR clone 13011 (TRBV20-1, TRBJ1-1)
CSASKRGLTEAFF

SEQ ID NO: 26023 - protein, 14 aa, Homo sapiens
  CDR3 for alpha chain variable domain of TCR clone 13012 (TRAV1-2, TRAJ8)
CAVREDTGFQKLVF

SEQ ID NO: 26024 - protein, 13 aa, Homo sapiens
  CDR3 for beta chain variable domain of TCR clone 13012 (TRBV7-9, TRBJ2-3)
CASSPGSTDTQYF

SEQ ID NO: 26025 - protein, 14 aa, Homo sapiens
  CDR3 for alpha chain variable domain of TCR clone 13013 (TRAV12-2, TRAJ40)
CAVKIPSGTYEYIF

SEQ ID NO: 26026 - protein, 14 aa, Homo sapiens
  CDR3 for beta chain variable domain of TCR clone 13013 (TRBV20-1, TRBJ1-1)
CSAQTRIGGTEAFF

SEQ ID NO: 26027 - protein, 13 aa, Homo sapiens
  CDR3 for alpha chain variable domain of TCR clone 13014 (TRAV8-3, TRAJ28)
CAVGAVGSYQLTS

SEQ ID NO: 26028 - protein, 14 aa, Homo sapiens
  CDR3 for beta chain variable domain of TCR clone 13014 (TRBV7-2, TRBJ2-7)
CASRSQGAAYEQYF

SEQ ID NO: 26029 - protein, 13 aa, Homo sapiens
  CDR3 for alpha chain variable domain of TCR clone 13015 (TRAV8-3, TRAJ48)
CAVVPFGNEKLTF

SEQ ID NO: 26030 - protein, 15 aa, Homo sapiens
  CDR3 for beta chain variable domain of TCR clone 13015 (TRBV11-2, TRBJ2-1)
CASSSPSTRYNEQLF

SEQ ID NO: 26031 - protein, 12 aa, Homo sapiens
  CDR3 for alpha chain variable domain of TCR clone 13016 (TRAV2, TRAJ31)
CAVEDNNARLMF

SEQ ID NO: 26032 - protein, 16 aa, Homo sapiens
  CDR3 for beta chain variable domain of TCR clone 13016 (TRBV10-3, TRBJ2-1)
CAISGVGDGGGGEQFF

SEQ ID NO: 26033 - protein, 11 aa, Homo sapiens
  CDR3 for alpha chain variable domain of TCR clone 13017 (TRAV3, TRAJ21)
CAVGNFNKFYF

SEQ ID NO: 26034 - protein, 16 aa, Homo sapiens
  CDR3 for beta chain variable domain of TCR clone 13017 (TRBV12-5, TRBJ2-5)
CASGPRTSGNQETQYF

SEQ ID NO: 26035 - protein, 14 aa, Homo sapiens
  CDR3 for alpha chain variable domain of TCR clone 13018 (TRAV12-3, TRAJ10)
SHLPLTGGGNKLTF

SEQ ID NO: 26036 - protein, 16 aa, Homo sapiens
  CDR3 for beta chain variable domain of TCR clone 13018 (TRBV12-4, TRBJ1-5)
CASSRPVGGSNQPQHF

SEQ ID NO: 26037 - protein, 12 aa, Homo sapiens
  CDR3 for alpha chain variable domain of TCR clone 13019 (TRAV27, TRAJ36)
ASTPAGANDLFF

SEQ ID NO: 26038 - protein, 13 aa, Homo sapiens
  CDR3 for beta chain variable domain of TCR clone 13019 (TRBV7-9, TRBJ2-3)
CASSPGSTDTQYF

SEQ ID NO: 26039 - protein, 20 aa, Homo sapiens
  CDR3 for alpha chain variable domain of TCR clone 13020 (TRAV12-1, TRAJ42)
NSVIQPPTSVKGGSQGNLIF

SEQ ID NO: 26040 - protein, 18 aa, Homo sapiens
  CDR3 for beta chain variable domain of TCR clone 13020 (TRBV11-2, TRBJ2-3)
CASSLGGASRGAPNTQYF

SEQ ID NO: 26041 - protein, 11 aa, Homo sapiens
  CDR3 for alpha chain variable domain of TCR clone 13021 (TRAV2, TRAJ20)
CAVEYDYKLSF

SEQ ID NO: 26042 - protein, 14 aa, Homo sapiens
  CDR3 for beta chain variable domain of TCR clone 13021 (TRBV27, TRBJ2-2)
CASRPGVNTGELFF

SEQ ID NO: 26043 - protein, 13 aa, Homo sapiens
  CDR3 for alpha chain variable domain of TCR clone 13022 (TRAV1-2, TRAJ9)
CAALNTGGFKTIF

SEQ ID NO: 26044 - protein, 16 aa, Homo sapiens
  CDR3 for beta chain variable domain of TCR clone 13022 (TRBV12-5, TRBJ2-5)
CASGPRTSGNQETQYF

SEQ ID NO: 26045 - protein, 11 aa, Homo sapiens
  CDR3 for alpha chain variable domain of TCR clone 13023 (TRAV1-1, TRAJ23)
CAVHQGGKLIF

SEQ ID NO: 26046 - protein, 20 aa, Homo sapiens
  CDR3 for beta chain variable domain of TCR clone 13023 (TRBV7-8, TRBJ2-2)
CASSHLFPGPTIHITGELFF

SEQ ID NO: 26047 - protein, 11 aa, Homo sapiens
  CDR3 for alpha chain variable domain of TCR clone 13024 (TRAV3, TRAJ21)
CAVGNFNKFYF

SEQ ID NO: 26048 - protein, 16 aa, Homo sapiens
  CDR3 for beta chain variable domain of TCR clone 13024 (TRBV19, TRBJ2-1)
CASSKAGASSYNEQFF

SEQ ID NO: 26049 - protein, 15 aa, Homo sapiens
  CDR3 for alpha chain variable domain of TCR clone 13025 (TRAV1-2, TRAJ12)
CAVIPEVDSSYKLIF

SEQ ID NO: 26050 - protein, 12 aa, Homo sapiens
  CDR3 for beta chain variable domain of TCR clone 13025 (TRBV11-3, TRBJ2-2)
CASSLPTGELFF

SEQ ID NO: 26051 - protein, 14 aa, Homo sapiens
  CDR3 for alpha chain variable domain of TCR clone 13026 (TRAV8-3, TRAJ4)
CAGGAAGGYNKLIF

SEQ ID NO: 26052 - protein, 15 aa, Homo sapiens
  CDR3 for beta chain variable domain of TCR clone 13026 (TRBV6-5, TRBJ2-1)
CASSYDAGAGNEQFF

SEQ ID NO: 26053 - protein, 13 aa, Homo sapiens
  CDR3 for alpha chain variable domain of TCR clone 13027 (TRAV2, TRAJ40)
CAVVTSGTDKYIF

SEQ ID NO: 26054 - protein, 14 aa, Homo sapiens
  CDR3 for beta chain variable domain of TCR clone 13027 (TRBV19, TRBJ2-1)
CASPTFVLSGEQFF

SEQ ID NO: 26055 - protein, 18 aa, Homo sapiens
  CDR3 for alpha chain variable domain of TCR clone 13028 (TRAV21, TRAJ52)
CAVRPSPAGGTSYGKLTF

SEQ ID NO: 26056 - protein, 17 aa, Homo sapiens
  CDR3 for beta chain variable domain of TCR clone 13028 (TRBV13, TRBJ2-3)
CASSLSRVAGGSNTQYF

SEQ ID NO: 26057 - protein, 14 aa, Homo sapiens
  CDR3 for alpha chain variable domain of TCR clone 13029 (TRAV13-1, TRAJ35)
CAASKGGFGNVLHW

SEQ ID NO: 26058 - protein, 13 aa, Homo sapiens
  CDR3 for beta chain variable domain of TCR clone 13029 (TRBV7-3, TRBJ1-1)
CASSQDWGAEAFF

SEQ ID NO: 26059 - protein, 13 aa, Homo sapiens
  CDR3 for alpha chain variable domain of TCR clone 13030 (TRAV1-2, TRAJ9)
CAALNTGGFKTIF

SEQ ID NO: 26060 - protein, 13 aa, Homo sapiens
  CDR3 for beta chain variable domain of TCR clone 13030 (TRBV19, TRBJ1-2)
CASSVPGQDGYTV

SEQ ID NO: 26061 - protein, 14 aa, Homo sapiens
  CDR3 for alpha chain variable domain of TCR clone 13031 (TRAV21, TRAJ45)
CAVSSGGGADGLTF

SEQ ID NO: 26062 - protein, 15 aa, Homo sapiens
  CDR3 for beta chain variable domain of TCR clone 13031 (TRBV9, TRBJ2-3)
CASSAYEAGTDTQYF

SEQ ID NO: 26063 - protein, 13 aa, Homo sapiens
  CDR3 for alpha chain variable domain of TCR clone 13032 (TRAV13-2, TRAJ48)
CAEMDFGNEKLNF

SEQ ID NO: 26064 - protein, 15 aa, Homo sapiens
  CDR3 for beta chain variable domain of TCR clone 13032 (TRBV7-9, TRBJ1-6)
CASSSPGRGNSPLHF

SEQ ID NO: 26065 - protein, 13 aa, Homo sapiens
  CDR3 for alpha chain variable domain of TCR clone 13033 (TRAV2, TRAJ9)
CAVESTGGFKTIF

SEQ ID NO: 26066 - protein, 15 aa, Homo sapiens
  CDR3 for beta chain variable domain of TCR clone 13033 (TRBV10-3, TRBJ2-1)
CAVTFGGGTDNEQFF

SEQ ID NO: 26067 - protein, 12 aa, Homo sapiens
  CDR3 for alpha chain variable domain of TCR clone 13034 (TRAV8-3, TRAJ4)
WVGSGGYNKLIF

SEQ ID NO: 26068 - protein, 16 aa, Homo sapiens
  CDR3 for beta chain variable domain of TCR clone 13034 (TRBV4-1, TRBJ1-5)
CASSQGGHTTNQPQHF

SEQ ID NO: 26069 - protein, 12 aa, Homo sapiens
  CDR3 for alpha chain variable domain of TCR clone 13035 (TRAV2, TRAJ31)
CAVEDNNARLMF

SEQ ID NO: 26070 - protein, 14 aa, Homo sapiens
  CDR3 for beta chain variable domain of TCR clone 13035 (TRBV11-2, TRBJ2-5)
CASSRTGGIETQYF

SEQ ID NO: 26071 - protein, 21 aa, Homo sapiens
  CDR3 for alpha chain variable domain of TCR clone 13036 (TRAV25, TRAJ3)
TATQTTDVGTFAYSSASKIIF

SEQ ID NO: 26072 - protein, 14 aa, Homo sapiens
  CDR3 for beta chain variable domain of TCR clone 13036 (TRBV5-1, TRBJ2-7)
CASSATGGYDEQYF

SEQ ID NO: 26073 - protein, 15 aa, Homo sapiens
  CDR3 for alpha chain variable domain of TCR clone 13037 (TRAV26-1, TRAJ44)
CIARVPFGTASKLTF

SEQ ID NO: 26074 - protein, 17 aa, Homo sapiens
  CDR3 for beta chain variable domain of TCR clone 13037 (TRBV24-1, TRBJ2-4)
CATSDAEARGVRNMQYF

SEQ ID NO: 26075 - protein, 15 aa, Homo sapiens
  CDR3 for alpha chain variable domain of TCR clone 13038 (TRAV26-1, TRAJ22)
CIVRVSFWFCEATDL

SEQ ID NO: 26076 - protein, 13 aa, Homo sapiens
  CDR3 for beta chain variable domain of TCR clone 13038 (TRBV7-9, TRBJ1-2)
CASSLKQNYGYTF

SEQ ID NO: 26077 - protein, 10 aa, Homo sapiens
  CDR3 for alpha chain variable domain of TCR clone 13039 (TRAV13-2, TRAJ43)
CAETSGDMRF

SEQ ID NO: 26078 - protein, 13 aa, Homo sapiens
  CDR3 for beta chain variable domain of TCR clone 13039 (TRBV24-1, TRBJ2-1)
CATRQGAGNEQFF

SEQ ID NO: 26079 - protein, 12 aa, Homo sapiens
  CDR3 for alpha chain variable domain of TCR clone 13040 (TRAV13-1, TRAJ21)
CAAKEGFNKFYF

SEQ ID NO: 26080 - protein, 18 aa, Homo sapiens
  CDR3 for beta chain variable domain of TCR clone 13040 (TRBV6-6, TRBJ1-3)
CASSYSKWDSISGNTIYF

SEQ ID NO: 26081 - protein, 14 aa, Homo sapiens
  CDR3 for alpha chain variable domain of TCR clone 13041 (TRAV23/DV6, TRAJ26)
CAPPCGNCGQNFVF

SEQ ID NO: 26082 - protein, 16 aa, Homo sapiens
  CDR3 for beta chain variable domain of TCR clone 13041 (TRBV7-6, TRBJ2-2)
CASSPGLADYTGELFF

SEQ ID NO: 26083 - protein, 13 aa, Homo sapiens
  CDR3 for alpha chain variable domain of TCR clone 13042 (TRAV8-3, TRAJ37)
SAVPSSNTGKLIF

SEQ ID NO: 26084 - protein, 12 aa, Homo sapiens
  CDR3 for beta chain variable domain of TCR clone 13042 (TRBV11-2, TRBJ2-1)
CASSPGNNEQFF

SEQ ID NO: 26085 - protein, 16 aa, Homo sapiens
  CDR3 for alpha chain variable domain of TCR clone 13043 (TRAV3, TRAJ32)
CCERRNYGGATNKLIF

SEQ ID NO: 26086 - protein, 13 aa, Homo sapiens
  CDR3 for beta chain variable domain of TCR clone 13043 (TRBV2, TRBJ1-1)
CASSEGGNTEAFF

SEQ ID NO: 26087 - protein, 14 aa, Homo sapiens
  CDR3 for alpha chain variable domain of TCR clone 13044 (TRAV12-2, TRAJ13)
CAVKKTGGYQKVTF

SEQ ID NO: 26088 - protein, 15 aa, Homo sapiens
  CDR3 for beta chain variable domain of TCR clone 13044 (TRBV19, TRBJ1-2)
CASSVGQVLNYGYTF

SEQ ID NO: 26089 - protein, 13 aa, Homo sapiens
  CDR3 for alpha chain variable domain of TCR clone 13045 (TRAV21, TRAJ20)
CAVGLRVDYKLSF

SEQ ID NO: 26090 - protein, 13 aa, Homo sapiens
  CDR3 for beta chain variable domain of TCR clone 13045 (TRBV7-3, TRBJ1-1)
CASSQDWGAEAFF

SEQ ID NO: 26091 - protein, 13 aa, Homo sapiens
  CDR3 for alpha chain variable domain of TCR clone 13046 (TRAV17, TRAJ9)
CATDYTGGFKTIL

SEQ ID NO: 26092 - protein, 14 aa, Homo sapiens
  CDR3 for beta chain variable domain of TCR clone 13046 (TRBV19, TRBJ2-5)
CASSMTGQQETQYF

SEQ ID NO: 26093 - protein, 12 aa, Homo sapiens
  CDR3 for alpha chain variable domain of TCR clone 13047 (TRAV21, TRAJ13)
PGPSGGYQKVTF

SEQ ID NO: 26094 - protein, 15 aa, Homo sapiens
  CDR3 for beta chain variable domain of TCR clone 13047 (TRBV6-3, TRBJ2-7)
CASSSPGTVFYEQYF

SEQ ID NO: 26095 - protein, 17 aa, Homo sapiens
  CDR3 for alpha chain variable domain of TCR clone 13048 (TRAV3, TRAJ6)
CAVRDSPRAGGSYIPTF

SEQ ID NO: 26096 - protein, 20 aa, Homo sapiens
  CDR3 for beta chain variable domain of TCR clone 13048 (TRBV28, TRBJ2-1)
CASTPIGRSPGLAGGNEQFF

SEQ ID NO: 26097 - protein, 17 aa, Homo sapiens
  CDR3 for alpha chain variable domain of TCR clone 13049 (TRAV14/DV4, TRAJ28)
CAMREVSSGAGSYQLTF

SEQ ID NO: 26098 - protein, 15 aa, Homo sapiens
  CDR3 for beta chain variable domain of TCR clone 13049 (TRBV11-2, TRBJ1-6)
CASTLRGTGNSPLHF

SEQ ID NO: 26099 - protein, 18 aa, Homo sapiens
  CDR3 for alpha chain variable domain of TCR clone 13050 (TRAV21, TRAJ52)
CAVRPSPAGGTSYGKLTF

SEQ ID NO: 26100 - protein, 17 aa, Homo sapiens
  CDR3 for beta chain variable domain of TCR clone 13050 (TRBV13, TRBJ2-3)
CASSLSRVAGGMNTQYF

SEQ ID NO: 26101 - protein, 14 aa, Homo sapiens
  CDR3 for alpha chain variable domain of TCR clone 13051 (TRAV29/DV5, TRAJ36)
CAARRKTGANNLFF

SEQ ID NO: 26102 - protein, 15 aa, Homo sapiens
  CDR3 for beta chain variable domain of TCR clone 13051 (TRBV18, TRBJ2-7)
CASSPLQGRTYEQYF

SEQ ID NO: 26103 - protein, 13 aa, Homo sapiens
  CDR3 for alpha chain variable domain of TCR clone 13052 (TRAV27, TRAJ45)
CGSSGGGADGLTF

SEQ ID NO: 26104 - protein, 17 aa, Homo sapiens
  CDR3 for beta chain variable domain of TCR clone 13052 (TRBV11-2, TRBJ2-1)
CASSLYPPGVEYNEQFF

SEQ ID NO: 26105 - protein, 13 aa, Homo sapiens
  CDR3 for alpha chain variable domain of TCR clone 13053 (TRAV21, TRAJ27)
CAALPGNAGKSTF

SEQ ID NO: 26106 - protein, 14 aa, Homo sapiens
  CDR3 for beta chain variable domain of TCR clone 13053 (TRBV7-6, TRBJ2-3)
CASSLGTVTDTQYF

SEQ ID NO: 26107 - protein, 14 aa, Homo sapiens
  CDR3 for alpha chain variable domain of TCR clone 13054 (TRAV1-2, TRAJ16)
CAVNRFSDGQKLLF

SEQ ID NO: 26108 - protein, 15 aa, Homo sapiens
  CDR3 for beta chain variable domain of TCR clone 13054 (TRBV7-9, TRBJ1-6)
CASSSPGRGNSPLHS

SEQ ID NO: 26109 - protein, 15 aa, Homo sapiens
  CDR3 for alpha chain variable domain of TCR clone 13055 (TRAV38-1, TRAJ37)
CAFIFSSGNTGKLIF

SEQ ID NO: 26110 - protein, 12 aa, Homo sapiens
  CDR3 for beta chain variable domain of TCR clone 13055 (TRBV7-9, TRBJ2-7)
CASSLEGYEQYF

SEQ ID NO: 26111 - protein, 10 aa, Homo sapiens
  CDR3 for alpha chain variable domain of TCR clone 13056 (TRAV36/DV7, TRAJ48)
CAVGNEKLTF

SEQ ID NO: 26112 - protein, 12 aa, Homo sapiens
  CDR3 for beta chain variable domain of TCR clone 13056 (TRBV29-1, TRBJ2-3)
CSVTGGADTQYF

SEQ ID NO: 26113 - protein, 14 aa, Homo sapiens
  CDR3 for alpha chain variable domain of TCR clone 13057 (TRAV13-1, TRAJ35)
CAASKGGFGNVLHC

SEQ ID NO: 26114 - protein, 16 aa, Homo sapiens
  CDR3 for beta chain variable domain of TCR clone 13057 (TRBV7-3, TRBJ2-2)
CASSLKRGTLSGELFF

SEQ ID NO: 26115 - protein, 14 aa, Homo sapiens
  CDR3 for alpha chain variable domain of TCR clone 13058 (TRAV26-1, TRAJ38)
CVADNAGNNRKLIW

SEQ ID NO: 26116 - protein, 13 aa, Homo sapiens
  CDR3 for beta chain variable domain of TCR clone 13058 (TRBV20-1, TRBJ1-1)
CSARGGGNTEAFF

SEQ ID NO: 26117 - protein, 15 aa, Homo sapiens
  CDR3 for alpha chain variable domain of TCR clone 13059 (TRAV4, TRAJ39)
CLVGPNDNAGNMLTF

SEQ ID NO: 26118 - protein, 13 aa, Homo sapiens
  CDR3 for beta chain variable domain of TCR clone 13059 (TRBV11-2, TRBJ2-5)
CASSSTGEETQYF

SEQ ID NO: 26119 - protein, 16 aa, Homo sapiens
  CDR3 for alpha chain variable domain of TCR clone 13060 (TRAV8-6, TRAJ53)
CAVSENSGGSNYKLTF

SEQ ID NO: 26120 - protein, 15 aa, Homo sapiens
  CDR3 for beta chain variable domain of TCR clone 13060 (TRBV6-3, TRBJ1-5)
CASRTGQLYNQPQHF

SEQ ID NO: 26121 - protein, 15 aa, Homo sapiens
  CDR3 for alpha chain variable domain of TCR clone 13061 (TRAV12-1, TRAJ44)
CVADLPTGTASKLTL

SEQ ID NO: 26122 - protein, 13 aa, Homo sapiens
  CDR3 for beta chain variable domain of TCR clone 13061 (TRBV6-5, TRBJ2-5)
CASSPQGGETQYF

SEQ ID NO: 26123 - protein, 12 aa, Homo sapiens
  CDR3 for alpha chain variable domain of TCR clone 13062 (TRAV12-1, TRAJ40)
CVVCSGTYKYIF

SEQ ID NO: 26124 - protein, 18 aa, Homo sapiens
  CDR3 for beta chain variable domain of TCR clone 13062 (TRBV11-2, TRBJ2-3)
CASSLGGASRGAPNTQYF

SEQ ID NO: 26125 - protein, 14 aa, Homo sapiens
  CDR3 for alpha chain variable domain of TCR clone 13063 (TRAV12-1, TRAJ17)
CVVNYKAAGDKLTF

SEQ ID NO: 26126 - protein, 17 aa, Homo sapiens
  CDR3 for beta chain variable domain of TCR clone 13063 (TRBV20-1, TRBJ2-1)
CSASSSGLAGSYNEQFF

SEQ ID NO: 26127 - protein, 10 aa, Homo sapiens
  CDR3 for alpha chain variable domain of TCR clone 13064 (TRAV12-3, TRAJ49)
CAMNDDQFYF

SEQ ID NO: 26128 - protein, 13 aa, Homo sapiens
  CDR3 for beta chain variable domain of TCR clone 13064 (TRBV12-4, TRBJ1-1)
RASSPGTGFEAFF

SEQ ID NO: 26129 - protein, 13 aa, Homo sapiens
  CDR3 for alpha chain variable domain of TCR clone 13065 (TRAV21, TRAJ27)
CAARPGNAGKSTF

SEQ ID NO: 26130 - protein, 15 aa, Homo sapiens
  CDR3 for beta chain variable domain of TCR clone 13065 (TRBV5-1, TRBJ2-1)
CASSLVANSYNEQFF

SEQ ID NO: 26131 - protein, 13 aa, Homo sapiens
  CDR3 for alpha chain variable domain of TCR clone 13066 (TRAV21, TRAJ27)
CAARPCNAGKSTF

SEQ ID NO: 26132 - protein, 14 aa, Homo sapiens
  CDR3 for beta chain variable domain of TCR clone 13066 (TRBV7-6, TRBJ2-3)
CASSLGTVTDTQYF

SEQ ID NO: 26133 - protein, 16 aa, Homo sapiens
  CDR3 for alpha chain variable domain of TCR clone 13067 (TRAV12-3, TRAJ53)
CAMSPGSGGSNYKLTF

SEQ ID NO: 26134 - protein, 11 aa, Homo sapiens
  CDR3 for beta chain variable domain of TCR clone 13067 (TRBV29-1, TRBJ2-5)
CSEDQTGTQYF

SEQ ID NO: 26135 - protein, 14 aa, Homo sapiens
  CDR3 for alpha chain variable domain of TCR clone 13068 (TRAV12-2, TRAJ13)
CAVKKTGGYQKVTF

SEQ ID NO: 26136 - protein, 15 aa, Homo sapiens
  CDR3 for beta chain variable domain of TCR clone 13068 (TRBV27, TRBJ2-1)
CASSNGGRSSNEQFF

SEQ ID NO: 26137 - protein, 15 aa, Homo sapiens
  CDR3 for alpha chain variable domain of TCR clone 13069 (TRAV17, TRAJ35)
CATAFVIGFGNVLHC

SEQ ID NO: 26138 - protein, 16 aa, Homo sapiens
  CDR3 for beta chain variable domain of TCR clone 13069 (TRBV5-7, TRBJ2-7)
PAANEGGGRGSYEQYF

SEQ ID NO: 26139 - protein, 15 aa, Homo sapiens
  CDR3 for alpha chain variable domain of TCR clone 13070 (TRAV26-1, TRAJ29)
CIVRVEGSGNTPLVF

SEQ ID NO: 26140 - protein, 15 aa, Homo sapiens
  CDR3 for beta chain variable domain of TCR clone 13070 (TRBV7-9, TRBJ1-5)
CASSQGHQPNRPQHF

SEQ ID NO: 26141 - protein, 17 aa, Homo sapiens
  CDR3 for alpha chain variable domain of TCR clone 13071 (TRAV3, TRAJ6)
CAVRDGPRAGGSYIPTF

SEQ ID NO: 26142 - protein, 13 aa, Homo sapiens
  CDR3 for beta chain variable domain of TCR clone 13071 (TRBV7-2, TRBJ2-2)
CASSLAVTGELFF

SEQ ID NO: 26143 - protein, 12 aa, Homo sapiens
  CDR3 for alpha chain variable domain of TCR clone 13072 (TRAV1-1, TRAJ9)
CAVDTGGFKTIF

SEQ ID NO: 26144 - protein, 15 aa, Homo sapiens
  CDR3 for beta chain variable domain of TCR clone 13072 (TRBV6-1, TRBJ2-3)
CASSERGGITDTQYF

SEQ ID NO: 26145 - protein, 15 aa, Homo sapiens
  CDR3 for alpha chain variable domain of TCR clone 13073 (TRAV3, TRAJ5)
CAVRDLDTGRRELTF

SEQ ID NO: 26146 - protein, 13 aa, Homo sapiens
  CDR3 for beta chain variable domain of TCR clone 13073 (TRBV12-4, TRBJ2-7)
CASSPTETYEQYF

SEQ ID NO: 26147 - protein, 15 aa, Homo sapiens
  CDR3 for alpha chain variable domain of TCR clone 13074 (TRAV26-1, TRAJ29)
CIVRVEGSGNTPLVF

SEQ ID NO: 26148 - protein, 15 aa, Homo sapiens
  CDR3 for beta chain variable domain of TCR clone 13074 (TRBV7-9, TRBJ1-5)
CASSQGHQPNQPQHV

SEQ ID NO: 26149 - protein, 17 aa, Homo sapiens
  CDR3 for alpha chain variable domain of TCR clone 13075 (TRAV8-6, TRAJ58)
CAVSSWVGETRGSRLTF

SEQ ID NO: 26150 - protein, 14 aa, Homo sapiens
  CDR3 for beta chain variable domain of TCR clone 13075 (TRBV4-2, TRBJ2-1)
CASGLDRAYNEQFF

SEQ ID NO: 26151 - protein, 13 aa, Homo sapiens
  CDR3 for alpha chain variable domain of TCR clone 13076 (TRAV12-2, TRAJ12)
CAVNGDSSYKLIF

SEQ ID NO: 26152 - protein, 13 aa, Homo sapiens
  CDR3 for beta chain variable domain of TCR clone 13076 (TRBV20-1, TRBJ2-2)
CSALSGGAGELFF

SEQ ID NO: 26153 - protein, 14 aa, Homo sapiens
  CDR3 for alpha chain variable domain of TCR clone 13077 (TRAV12-2, TRAJ44)
CAVNPAGPASKLTF

SEQ ID NO: 26154 - protein, 13 aa, Homo sapiens
  CDR3 for beta chain variable domain of TCR clone 13077 (TRBV20-1, TRBJ1-6)
CSAPLGVGSPLHF

SEQ ID NO: 26155 - protein, 15 aa, Homo sapiens
  CDR3 for alpha chain variable domain of TCR clone 13078 (TRAV2, TRAJ11)
CAVGGRNSGYSTLTF

SEQ ID NO: 26156 - protein, 15 aa, Homo sapiens
  CDR3 for beta chain variable domain of TCR clone 13078 (TRBV4-2, TRBJ1-1)
CASSQEDLPRTEAFF

SEQ ID NO: 26157 - protein, 12 aa, Homo sapiens
  CDR3 for alpha chain variable domain of TCR clone 13079 (TRAV2, TRAJ9)
CAAGAGGFKTIF

SEQ ID NO: 26158 - protein, 16 aa, Homo sapiens
  CDR3 for beta chain variable domain of TCR clone 13079 (TRBV13, TRBJ2-2)
CASSPRTGEHTGELFF

SEQ ID NO: 26159 - protein, 10 aa, Homo sapiens
  CDR3 for alpha chain variable domain of TCR clone 13080 (TRAV23/DV6, TRAJ10)
CAASIGTHGR

SEQ ID NO: 26160 - protein, 13 aa, Homo sapiens
  CDR3 for beta chain variable domain of TCR clone 13080 (TRBV11-1, TRBJ1-2)
CASVGSWGYGYTF

SEQ ID NO: 26161 - protein, 14 aa, Homo sapiens
  CDR3 for alpha chain variable domain of TCR clone 13081 (TRAV13-2, TRAJ57)
CAESTQGGSEKLVF

SEQ ID NO: 26162 - protein, 14 aa, Homo sapiens
  CDR3 for beta chain variable domain of TCR clone 13081 (TRBV5-1, TRBJ2-2)
CASSLIEGAGELFF

SEQ ID NO: 26163 - protein, 10 aa, Homo sapiens
  CDR3 for alpha chain variable domain of TCR clone 13082 (TRAV12-2, TRAJ41)
CAVTGYALNF

SEQ ID NO: 26164 - protein, 15 aa, Homo sapiens
  CDR3 for beta chain variable domain of TCR clone 13082 (TRBV4-2, TRBJ2-1)
CASSQDVGPAGEQFF

SEQ ID NO: 26165 - protein, 14 aa, Homo sapiens
  CDR3 for alpha chain variable domain of TCR clone 13083 (TRAV26-1, TRAJ39)
CIVRGSRAGNMLTF

SEQ ID NO: 26166 - protein, 15 aa, Homo sapiens
  CDR3 for beta chain variable domain of TCR clone 13083 (TRBV7-9, TRBJ1-5)
CASSQGHQPKQPQHF

SEQ ID NO: 26167 - protein, 14 aa, Homo sapiens
  CDR3 for alpha chain variable domain of TCR clone 13084 (TRAV1-2, TRAJ16)
CAVNRFSDGQKLLF

SEQ ID NO: 26168 - protein, 14 aa, Homo sapiens
  CDR3 for beta chain variable domain of TCR clone 13084 (TRBV10-1, TRBJ2-5)
CASSESQGAKTQYF

SEQ ID NO: 26169 - protein, 14 aa, Homo sapiens
  CDR3 for alpha chain variable domain of TCR clone 13085 (TRAV26-1, TRAJ38)
CIADNAGNNRKLTW

SEQ ID NO: 26170 - protein, 13 aa, Homo sapiens
  CDR3 for beta chain variable domain of TCR clone 13085 (TRBV20-1, TRBJ1-1)
CSARGGGNTEAFF

SEQ ID NO: 26171 - protein, 13 aa, Homo sapiens
  CDR3 for alpha chain variable domain of TCR clone 13086 (TRAV22, TRAJ40)
CAVGVSGTYKYIF

SEQ ID NO: 26172 - protein, 10 aa, Homo sapiens
  CDR3 for beta chain variable domain of TCR clone 13086 (TRBV19, TRBJ1-1)
CASRQVEAFF

SEQ ID NO: 26173 - protein, 14 aa, Homo sapiens
  CDR3 for alpha chain variable domain of TCR clone 13087 (TRAV13-1, TRAJ35)
CAASKGGFENVLHC

SEQ ID NO: 26174 - protein, 13 aa, Homo sapiens
  CDR3 for beta chain variable domain of TCR clone 13087 (TRBV7-3, TRBJ1-1)
CASSQDWGAEAFF

SEQ ID NO: 26175 - protein, 14 aa, Homo sapiens
  CDR3 for alpha chain variable domain of TCR clone 13088 (TRAV1-2, TRAJ8)
CAVREDTGFQKLVF

SEQ ID NO: 26176 - protein, 16 aa, Homo sapiens
  CDR3 for beta chain variable domain of TCR clone 13088 (TRBV7-9, TRBJ1-2)
CASSLGFSSGEDGYTF

SEQ ID NO: 26177 - protein, 14 aa, Homo sapiens
  CDR3 for alpha chain variable domain of TCR clone 13089 (TRAV12-1, TRAJ24)
CVVGSTDSWGKFQF

SEQ ID NO: 26178 - protein, 13 aa, Homo sapiens
  CDR3 for beta chain variable domain of TCR clone 13089 (TRBV2, TRBJ2-3)
CASILAGGQGQYF

SEQ ID NO: 26179 - protein, 13 aa, Homo sapiens
  CDR3 for alpha chain variable domain of TCR clone 13090 (TRAV2, TRAJ40)
CAVVTSGTYKYIF

SEQ ID NO: 26180 - protein, 14 aa, Homo sapiens
  CDR3 for beta chain variable domain of TCR clone 13090 (TRBV19, TRBJ2-1)
CASPTFVLSGAQFF

SEQ ID NO: 26181 - protein, 15 aa, Homo sapiens
  CDR3 for alpha chain variable domain of TCR clone 13091 (TRAV26-1, TRAJ29)
CIVRVEGSGNTPLVF

SEQ ID NO: 26182 - protein, 14 aa, Homo sapiens
  CDR3 for beta chain variable domain of TCR clone 13091 (TRBV18, TRBJ2-5)
CASSPGVSQENQYF

SEQ ID NO: 26183 - protein, 13 aa, Homo sapiens
  CDR3 for alpha chain variable domain of TCR clone 13092 (TRAV12-2, TRAJ12)
CAVNGDSSYKLIF

SEQ ID NO: 26184 - protein, 15 aa, Homo sapiens
  CDR3 for beta chain variable domain of TCR clone 13092 (TRBV7-8, TRBJ2-1)
CASSPSGTIYNEQFF

SEQ ID NO: 26185 - protein, 17 aa, Homo sapiens
  CDR3 for alpha chain variable domain of TCR clone 13093 (TRAV23/DV6, TRAJ12)
CAAIDLGAMDSSYKLIF

SEQ ID NO: 26186 - protein, 15 aa, Homo sapiens
  CDR3 for beta chain variable domain of TCR clone 13093 (TRBV12-4, TRBJ2-5)
CASTLNSGRGETQYF

SEQ ID NO: 26187 - protein, 13 aa, Homo sapiens
  CDR3 for alpha chain variable domain of TCR clone 13094 (TRAV3, TRAJ27)
CAVRPLAQANQPL

SEQ ID NO: 26188 - protein, 13 aa, Homo sapiens
  CDR3 for beta chain variable domain of TCR clone 13094 (TRBV7-9, TRBJ2-3)
CASSPGSTDTQYF

SEQ ID NO: 26189 - protein, 18 aa, Homo sapiens
  CDR3 for alpha chain variable domain of TCR clone 13095 (TRAV26-1, TRAJ52)
CIVRVAGAGGTSYGKLTF

SEQ ID NO: 26190 - protein, 13 aa, Homo sapiens
  CDR3 for beta chain variable domain of TCR clone 13095 (TRBV7-8, TRBJ1-2)
CASSAQSYYGYTL

SEQ ID NO: 26191 - protein, 18 aa, Homo sapiens
  CDR3 for alpha chain variable domain of TCR clone 13096 (TRAV21, TRAJ52)
CAVRPSPAGGTSYGKLTF

SEQ ID NO: 26192 - protein, 17 aa, Homo sapiens
  CDR3 for beta chain variable domain of TCR clone 13096 (TRBV13, TRBJ2-3)
CASSLSRVAGGRKTQYF

SEQ ID NO: 26193 - protein, 12 aa, Homo sapiens
  CDR3 for alpha chain variable domain of TCR clone 13097 (TRAV21, TRAJ33)
CAKMDSNYQSIW

SEQ ID NO: 26194 - protein, 14 aa, Homo sapiens
  CDR3 for beta chain variable domain of TCR clone 13097 (TRBV2, TRBJ2-7)
CASSLTSGGYEQYF

SEQ ID NO: 26195 - protein, 14 aa, Homo sapiens
  CDR3 for alpha chain variable domain of TCR clone 13098 (TRAV8-1, TRAJ5)
CAVRTDTGRRALTF

SEQ ID NO: 26196 - protein, 12 aa, Homo sapiens
  CDR3 for beta chain variable domain of TCR clone 13098 (TRBV11-2, TRBJ2-2)
CASSLGGGELFF

SEQ ID NO: 26197 - protein, 14 aa, Homo sapiens
  CDR3 for alpha chain variable domain of TCR clone 13099 (TRAV12-3, TRAJ10)
SHLPLTGGGNKLTF

SEQ ID NO: 26198 - protein, 14 aa, Homo sapiens
  CDR3 for beta chain variable domain of TCR clone 13099 (TRBV5-4, TRBJ1-1)
CASSLDSRRDEAFF

SEQ ID NO: 26199 - protein, 19 aa, Homo sapiens
  CDR3 for alpha chain variable domain of TCR clone 13100 (TRAV38-2/DV8, TRAJ42)
CAYRSAGMNYGGSQGNLIF

SEQ ID NO: 26200 - protein, 13 aa, Homo sapiens
  CDR3 for beta chain variable domain of TCR clone 13100 (TRBV18, TRBJ2-7)
CASSRSGSYEQYF

SEQ ID NO: 26201 - protein, 15 aa, Homo sapiens
  CDR3 for alpha chain variable domain of TCR clone 13101 (TRAV8-4, TRAJ6)
CAVTHASGGSYIPTF

SEQ ID NO: 26202 - protein, 15 aa, Homo sapiens
  CDR3 for beta chain variable domain of TCR clone 13101 (TRBV7-2, TRBJ2-3)
CASSLNGGGTDTQYF

SEQ ID NO: 26203 - protein, 18 aa, Homo sapiens
  CDR3 for alpha chain variable domain of TCR clone 13102 (TRAV29/DV5, TRAJ52)
CAAGFRGAGGTSYGKLTF

SEQ ID NO: 26204 - protein, 14 aa, Homo sapiens
  CDR3 for beta chain variable domain of TCR clone 13102 (TRBV20-1, TRBJ2-7)
CSAKRGRSSYEQYF

SEQ ID NO: 26205 - protein, 14 aa, Homo sapiens
  CDR3 for alpha chain variable domain of TCR clone 13103 (TRAV13-1, TRAJ22)
CAAFPLFFCKATDL

SEQ ID NO: 26206 - protein, 16 aa, Homo sapiens
  CDR3 for beta chain variable domain of TCR clone 13103 (TRBV20-1, TRBJ2-5)
CSASPLFAGEQETQYF

SEQ ID NO: 26207 - protein, 18 aa, Homo sapiens
  CDR3 for alpha chain variable domain of TCR clone 13104 (TRAV21, TRAJ52)
CAVRPSPAGGTSYGKLTF

SEQ ID NO: 26208 - protein, 15 aa, Homo sapiens
  CDR3 for beta chain variable domain of TCR clone 13104 (TRBV7-9, TRBJ1-6)
CASSSPGRGNSPLHF

SEQ ID NO: 26209 - protein, 14 aa, Homo sapiens
  CDR3 for alpha chain variable domain of TCR clone 13105 (TRAV26-1, TRAJ45)
CIEVTGGGADGLTF

SEQ ID NO: 26210 - protein, 13 aa, Homo sapiens
  CDR3 for beta chain variable domain of TCR clone 13105 (TRBV7-6, TRBJ1-2)
CASSLVADYGDTF

SEQ ID NO: 26211 - protein, 11 aa, Homo sapiens
  CDR3 for alpha chain variable domain of TCR clone 13106 (TRAV3, TRAJ21)
CAVGNFNKFYF

SEQ ID NO: 26212 - protein, 16 aa, Homo sapiens
  CDR3 for beta chain variable domain of TCR clone 13106 (TRBV19, TRBJ2-1)
CASSKAGPSFYNEQFF

SEQ ID NO: 26213 - protein, 11 aa, Homo sapiens
  CDR3 for alpha chain variable domain of TCR clone 13107 (TRAV12-3, TRAJ43)
CAMIVSNDMRF

SEQ ID NO: 26214 - protein, 13 aa, Homo sapiens
  CDR3 for beta chain variable domain of TCR clone 13107 (TRBV20-1, TRBJ1-1)
CSAPLGGGTEAFF

SEQ ID NO: 26215 - protein, 11 aa, Homo sapiens
  CDR3 for alpha chain variable domain of TCR clone 13108 (TRAV12-3, TRAJ27)
CAMANAGKSTL

SEQ ID NO: 26216 - protein, 13 aa, Homo sapiens
  CDR3 for beta chain variable domain of TCR clone 13108 (TRBV20-1, TRBJ1-1)
CSARVGGNTEAFF

SEQ ID NO: 26217 - protein, 16 aa, Homo sapiens
  CDR3 for alpha chain variable domain of TCR clone 13109 (TRAV26-1, TRAJ33)
CIVPFWGEDSNYQLIW

SEQ ID NO: 26218 - protein, 17 aa, Homo sapiens
  CDR3 for beta chain variable domain of TCR clone 13109 (TRBV7-8, TRBJ2-6)
CASSAGTGGAGANVLTF

SEQ ID NO: 26219 - protein, 14 aa, Homo sapiens
  CDR3 for alpha chain variable domain of TCR clone 13110 (TRAV1-2, TRAJ16)
CAVNRFSDGQKLLF

SEQ ID NO: 26220 - protein, 16 aa, Homo sapiens
  CDR3 for beta chain variable domain of TCR clone 13110 (TRBV5-1, TRBJ1-1)
CASSSGGNSLNTEAFF

SEQ ID NO: 26221 - protein, 15 aa, Homo sapiens
  CDR3 for alpha chain variable domain of TCR clone 13111 (TRAV2, TRAJ9)
CAVEDRGTGGVKTIF

SEQ ID NO: 26222 - protein, 16 aa, Homo sapiens
  CDR3 for beta chain variable domain of TCR clone 13111 (TRBV24-1, TRBJ2-3)
CATSDPGTGATDTQYF

SEQ ID NO: 26223 - protein, 14 aa, Homo sapiens
  CDR3 for alpha chain variable domain of TCR clone 13112 (TRAV1-1, TRAJ30)
CAVRSLNRDDKIIF

SEQ ID NO: 26224 - protein, 13 aa, Homo sapiens
  CDR3 for beta chain variable domain of TCR clone 13112 (TRBV11-2, TRBJ2-5)
CASSSTGEETQYF

SEQ ID NO: 26225 - protein, 12 aa, Homo sapiens
  CDR3 for alpha chain variable domain of TCR clone 13113 (TRAV2, TRAJ33)
CAVPDSNYQLIW

SEQ ID NO: 26226 - protein, 17 aa, Homo sapiens
  CDR3 for beta chain variable domain of TCR clone 13113 (TRBV6-5, TRBJ2-3)
RASSYGTSLYKSDTQYF

SEQ ID NO: 26227 - protein, 14 aa, Homo sapiens
  CDR3 for alpha chain variable domain of TCR clone 13114 (TRAV12-1, TRAJ17)
CVVNYKAAGNKLTF

SEQ ID NO: 26228 - protein, 17 aa, Homo sapiens
  CDR3 for beta chain variable domain of TCR clone 13114 (TRBV20-1, TRBJ2-1)
CSASSSGLARSYNEQFF

SEQ ID NO: 26229 - protein, 23 aa, Homo sapiens
  CDR3 for alpha chain variable domain of TCR clone 13115 (TRAV26-1, )
CIADSAGNNHIQNPDPAVYQLRD

SEQ ID NO: 26230 - protein, 13 aa, Homo sapiens
  CDR3 for beta chain variable domain of TCR clone 13115 (TRBV20-1, TRBJ1-1)
CSARGGGNTEAFF

SEQ ID NO: 26231 - protein, 16 aa, Homo sapiens
  CDR3 for alpha chain variable domain of TCR clone 13116 (TRAV21, TRAJ37)
CAVRTAGSSNTGKLIF

SEQ ID NO: 26232 - protein, 13 aa, Homo sapiens
  CDR3 for beta chain variable domain of TCR clone 13116 (TRBV7-9, TRBJ2-5)
CAGLPSGRETQYF

SEQ ID NO: 26233 - protein, 15 aa, Homo sapiens
  CDR3 for alpha chain variable domain of TCR clone 13117 (TRAV8-3, TRAJ11)
CAVGLLNSGYSTLTF

SEQ ID NO: 26234 - protein, 16 aa, Homo sapiens
  CDR3 for beta chain variable domain of TCR clone 13117 (TRBV15, TRBJ2-7)
CATSRGRAGGTYEQYF

SEQ ID NO: 26235 - protein, 14 aa, Homo sapiens
  CDR3 for alpha chain variable domain of TCR clone 13118 (TRAV13-1, TRAJ35)
CTASKGGFGNVLHC

SEQ ID NO: 26236 - protein, 13 aa, Homo sapiens
  CDR3 for beta chain variable domain of TCR clone 13118 (TRBV7-3, TRBJ1-1)
CASSQDWGAEAFF

SEQ ID NO: 26237 - protein, 14 aa, Homo sapiens
  CDR3 for alpha chain variable domain of TCR clone 13119 (TRAV13-1, TRAJ35)
CAASKGGFGNVLHC

SEQ ID NO: 26238 - protein, 13 aa, Homo sapiens
  CDR3 for beta chain variable domain of TCR clone 13119 (TRBV7-3, TRBJ1-1)
CASSQDWGAESFF

SEQ ID NO: 26239 - protein, 14 aa, Homo sapiens
  CDR3 for alpha chain variable domain of TCR clone 13120 (TRAV35, TRAJ22)
CAGLRPGSARQLTF

SEQ ID NO: 26240 - protein, 15 aa, Homo sapiens
  CDR3 for beta chain variable domain of TCR clone 13120 (TRBV12-4, TRBJ2-5)
CASSPPTGLQETQYS

SEQ ID NO: 26241 - protein, 13 aa, Homo sapiens
  CDR3 for alpha chain variable domain of TCR clone 13121 (TRAV12-1, TRAJ16)
CVVNGPDGQKLLF

SEQ ID NO: 26242 - protein, 13 aa, Homo sapiens
  CDR3 for beta chain variable domain of TCR clone 13121 (TRBV2, TRBJ1-1)
CARNPTGGCHAFF

SEQ ID NO: 26243 - protein, 17 aa, Homo sapiens
  CDR3 for alpha chain variable domain of TCR clone 13122 (TRAV1-2, TRAJ27)
CAVRDKTGDTNAGKSTF

SEQ ID NO: 26244 - protein, 14 aa, Homo sapiens
  CDR3 for beta chain variable domain of TCR clone 13122 (TRBV6-1, TRBJ1-3)
CASVQGGGGNTIYF

SEQ ID NO: 26245 - protein, 14 aa, Homo sapiens
  CDR3 for alpha chain variable domain of TCR clone 13123 (TRAV12-1, TRAJ41)
CVVLNSNSGYALNF

SEQ ID NO: 26246 - protein, 14 aa, Homo sapiens
  CDR3 for beta chain variable domain of TCR clone 13123 (TRBV5-8, TRBJ1-1)
CASSPRTGFSEAFF

SEQ ID NO: 26247 - protein, 15 aa, Homo sapiens
  CDR3 for alpha chain variable domain of TCR clone 13124 (TRAV8-2, TRAJ16)
CVVSDGFSDGQKLLF

SEQ ID NO: 26248 - protein, 15 aa, Homo sapiens
  CDR3 for beta chain variable domain of TCR clone 13124 (TRBV7-2, TRBJ2-1)
CASSSGLAGGNEQFF

SEQ ID NO: 26249 - protein, 14 aa, Homo sapiens
  CDR3 for alpha chain variable domain of TCR clone 13125 (TRAV13-1, TRAJ48)
CAASRSFGNEKLTF

SEQ ID NO: 26250 - protein, 18 aa, Homo sapiens
  CDR3 for beta chain variable domain of TCR clone 13125 (TRBV25-1, TRBJ1-2)
CASSGLQNGQGLIFGYTF

SEQ ID NO: 26251 - protein, 16 aa, Homo sapiens
  CDR3 for alpha chain variable domain of TCR clone 13126 (TRAV30, TRAJ24)
CGTEIVDADSWGKFQF

SEQ ID NO: 26252 - protein, 16 aa, Homo sapiens
  CDR3 for beta chain variable domain of TCR clone 13126 (TRBV19, TRBJ2-2)
CASRSPGTGATGELFF

SEQ ID NO: 26253 - protein, 14 aa, Homo sapiens
  CDR3 for alpha chain variable domain of TCR clone 13127 (TRAV8-3, TRAJ24)
CAVGSTDSWGKLQF

SEQ ID NO: 26254 - protein, 12 aa, Homo sapiens
  CDR3 for beta chain variable domain of TCR clone 13127 (TRBV7-8, TRBJ2-7)
CASSLGDREQYF

SEQ ID NO: 26255 - protein, 14 aa, Homo sapiens
  CDR3 for alpha chain variable domain of TCR clone 13128 (TRAV4, TRAJ22)
CLARLSGSARQLTF

SEQ ID NO: 26256 - protein, 14 aa, Homo sapiens
  CDR3 for beta chain variable domain of TCR clone 13128 (TRBV7-8, TRBJ2-3)
CASSLEAGTDTQYF

SEQ ID NO: 26257 - protein, 11 aa, Homo sapiens
  CDR3 for alpha chain variable domain of TCR clone 13129 (TRAV17, TRAJ9)
CATTGGFKTIF

SEQ ID NO: 26258 - protein, 14 aa, Homo sapiens
  CDR3 for beta chain variable domain of TCR clone 13129 (TRBV7-9, TRBJ2-2)
CASSGLADTGELFL

SEQ ID NO: 26259 - protein, 14 aa, Homo sapiens
  CDR3 for alpha chain variable domain of TCR clone 13130 (TRAV38-1, TRAJ40)
CALRPTSGTYEYIF

SEQ ID NO: 26260 - protein, 14 aa, Homo sapiens
  CDR3 for beta chain variable domain of TCR clone 13130 (TRBV25-1, TRBJ1-1)
CASTHLGGNTEAFF

SEQ ID NO: 26261 - protein, 13 aa, Homo sapiens
  CDR3 for alpha chain variable domain of TCR clone 13131 (TRAV2, TRAJ40)
CAVVTSGTYKYIF

SEQ ID NO: 26262 - protein, 17 aa, Homo sapiens
  CDR3 for beta chain variable domain of TCR clone 13131 (TRBV7-8, TRBJ2-6)
CASSAGTGGAGANVLTF

SEQ ID NO: 26263 - protein, 13 aa, Homo sapiens
  CDR3 for alpha chain variable domain of TCR clone 13132 (TRAV12-1, TRAJ40)
CVVPTSGTYKYIS

SEQ ID NO: 26264 - protein, 18 aa, Homo sapiens
  CDR3 for beta chain variable domain of TCR clone 13132 (TRBV7-6, TRBJ2-1)
CASSPRTSGMSSYNEQFF

SEQ ID NO: 26265 - protein, 13 aa, Homo sapiens
  CDR3 for alpha chain variable domain of TCR clone 13133 (TRAV21, TRAJ27)
CAALTPMQANQPL

SEQ ID NO: 26266 - protein, 14 aa, Homo sapiens
  CDR3 for beta chain variable domain of TCR clone 13133 (TRBV27, TRBJ1-1)
CASSLLSGLSEAFF

SEQ ID NO: 26267 - protein, 13 aa, Homo sapiens
  CDR3 for alpha chain variable domain of TCR clone 13134 (TRAV1-1, TRAJ9)
CAAKNTVGFKTIF

SEQ ID NO: 26268 - protein, 14 aa, Homo sapiens
  CDR3 for beta chain variable domain of TCR clone 13134 (TRBV20-1, TRBJ2-1)
CSAQIGGSANEQFF

SEQ ID NO: 26269 - protein, 18 aa, Homo sapiens
  CDR3 for alpha chain variable domain of TCR clone 13135 (TRAV21, TRAJ52)
CAVRPSPAGGTSYGKLTF

SEQ ID NO: 26270 - protein, 17 aa, Homo sapiens
  CDR3 for beta chain variable domain of TCR clone 13135 (TRBV13, TRBJ2-3)
CASSLSRVAGGRNTQYC

SEQ ID NO: 26271 - protein, 14 aa, Homo sapiens
  CDR3 for alpha chain variable domain of TCR clone 13136 (TRAV8-6, TRAJ5)
CAVSGKAGRRALTF

SEQ ID NO: 26272 - protein, 13 aa, Homo sapiens
  CDR3 for beta chain variable domain of TCR clone 13136 (TRBV12-4, TRBJ2-5)
CASSPTGQETQYF

SEQ ID NO: 26273 - protein, 14 aa, Homo sapiens
  CDR3 for alpha chain variable domain of TCR clone 13137 (TRAV12-1, TRAJ17)
CVVNYKAAGNKLTF

SEQ ID NO: 26274 - protein, 17 aa, Homo sapiens
  CDR3 for beta chain variable domain of TCR clone 13137 (TRBV20-1, TRBJ2-1)
CSASSSGLAVSYNEQFF

SEQ ID NO: 26275 - protein, 12 aa, Homo sapiens
  CDR3 for alpha chain variable domain of TCR clone 13138 (TRAV21, TRAJ11)
CAATSGYSTLPF

SEQ ID NO: 26276 - protein, 14 aa, Homo sapiens
  CDR3 for beta chain variable domain of TCR clone 13138 (TRBV20-1, TRBJ2-7)
CSAPELAGVGEQYF

SEQ ID NO: 26277 - protein, 13 aa, Homo sapiens
  CDR3 for alpha chain variable domain of TCR clone 13139 (TRAV21, TRAJ27)
CAARPGNAGKSTF

SEQ ID NO: 26278 - protein, 14 aa, Homo sapiens
  CDR3 for beta chain variable domain of TCR clone 13139 (TRBV7-6, TRBJ2-3)
CANSLGTVTDTQYF

SEQ ID NO: 26279 - protein, 23 aa, Homo sapiens
  CDR3 for alpha chain variable domain of TCR clone 13140 (TRAV26-1, )
CIADNAGNNHIQNPDPAVYQLRD

SEQ ID NO: 26280 - protein, 13 aa, Homo sapiens
  CDR3 for beta chain variable domain of TCR clone 13140 (TRBV20-1, TRBJ1-1)
CSARGGGNTEAFF

SEQ ID NO: 26281 - protein, 18 aa, Homo sapiens
  CDR3 for alpha chain variable domain of TCR clone 13141 (TRAV21, TRAJ52)
CAVRPSPPGGTSYGKLTF

SEQ ID NO: 26282 - protein, 17 aa, Homo sapiens
  CDR3 for beta chain variable domain of TCR clone 13141 (TRBV13, TRBJ2-3)
CASSLSRVAGGRNTQYF

SEQ ID NO: 26283 - protein, 14 aa, Homo sapiens
  CDR3 for alpha chain variable domain of TCR clone 13142 (TRAV2, TRAJ37)
CAVDFTSNTGKLIS

SEQ ID NO: 26284 - protein, 15 aa, Homo sapiens
  CDR3 for beta chain variable domain of TCR clone 13142 (TRBV20-1, TRBJ1-1)
CSASRGVTGNTEAFF

SEQ ID NO: 26285 - protein, 12 aa, Homo sapiens
  CDR3 for alpha chain variable domain of TCR clone 13143 (TRAV1-1, TRAJ9)
CAVDTGGLKTIF

SEQ ID NO: 26286 - protein, 14 aa, Homo sapiens
  CDR3 for beta chain variable domain of TCR clone 13143 (TRBV7-8, TRBJ2-5)
CASSATGGQETQYF

SEQ ID NO: 26287 - protein, 14 aa, Homo sapiens
  CDR3 for alpha chain variable domain of TCR clone 13144 (TRAV2, TRAJ37)
CAVDFTSNTGKLIV

SEQ ID NO: 26288 - protein, 15 aa, Homo sapiens
  CDR3 for beta chain variable domain of TCR clone 13144 (TRBV20-1, TRBJ1-1)
CSASRGVTGNTEAFF

SEQ ID NO: 26289 - protein, 14 aa, Homo sapiens
  CDR3 for alpha chain variable domain of TCR clone 13145 (TRAV12-2, TRAJ17)
CAVLFKAAGNKLTF

SEQ ID NO: 26290 - protein, 14 aa, Homo sapiens
  CDR3 for beta chain variable domain of TCR clone 13145 (TRBV6-1, TRBJ1-3)
CASVQGGGGNTIYF

SEQ ID NO: 26291 - protein, 14 aa, Homo sapiens
  CDR3 for alpha chain variable domain of TCR clone 13146 (TRAV12-1, TRAJ17)
CVVNYKAAGNKLTF

SEQ ID NO: 26292 - protein, 17 aa, Homo sapiens
  CDR3 for beta chain variable domain of TCR clone 13146 (TRBV20-1, TRBJ2-1)
CSASSSGLAGPYNEQFF

SEQ ID NO: 26293 - protein, 15 aa, Homo sapiens
  CDR3 for alpha chain variable domain of TCR clone 13147 (TRAV25, TRAJ53)
CPTSNSGGSNYKLTF

SEQ ID NO: 26294 - protein, 12 aa, Homo sapiens
  CDR3 for beta chain variable domain of TCR clone 13147 (TRBV11-2, TRBJ2-2)
CASSLGGGELFF

SEQ ID NO: 26295 - protein, 10 aa, Homo sapiens
  CDR3 for alpha chain variable domain of TCR clone 13148 (TRAV24, TRAJ11)
CASLYSTLTF

SEQ ID NO: 26296 - protein, 10 aa, Homo sapiens
  CDR3 for beta chain variable domain of TCR clone 13148 (TRBV10-3, TRBJ2-7)
CAATSNEQYF

SEQ ID NO: 26297 - protein, 14 aa, Homo sapiens
  CDR3 for alpha chain variable domain of TCR clone 13149 (TRAV22, TRAJ6)
CAVLSSGGSYIPTF

SEQ ID NO: 26298 - protein, 13 aa, Homo sapiens
  CDR3 for beta chain variable domain of TCR clone 13149 (TRBV7-2, TRBJ2-7)
CASSLGPNGEQYF

SEQ ID NO: 26299 - protein, 13 aa, Homo sapiens
  CDR3 for alpha chain variable domain of TCR clone 13150 (TRAV24, TRAJ23)
CASFLVQGGKLIF

SEQ ID NO: 26300 - protein, 14 aa, Homo sapiens
  CDR3 for beta chain variable domain of TCR clone 13150 (TRBV12-4, TRBJ2-3)
CASTIAGWGDTQYF

SEQ ID NO: 26301 - protein, 14 aa, Homo sapiens
  CDR3 for alpha chain variable domain of TCR clone 13151 (TRAV12-2, TRAJ17)
CAALSKAAGNKLTF

SEQ ID NO: 26302 - protein, 16 aa, Homo sapiens
  CDR3 for beta chain variable domain of TCR clone 13151 (TRBV20-1, TRBJ2-2)
CSASASGIPGAGELFF

SEQ ID NO: 26303 - protein, 15 aa, Homo sapiens
  CDR3 for alpha chain variable domain of TCR clone 13152 (TRAV26-1, TRAJ22)
CIVRVSFWFCKATAL

SEQ ID NO: 26304 - protein, 13 aa, Homo sapiens
  CDR3 for beta chain variable domain of TCR clone 13152 (TRBV7-9, TRBJ1-2)
CASSLKQNYGYTF

SEQ ID NO: 26305 - protein, 13 aa, Homo sapiens
  CDR3 for alpha chain variable domain of TCR clone 13153 (TRAV1-2, TRAJ9)
CAALNTGGFKTIF

SEQ ID NO: 26306 - protein, 13 aa, Homo sapiens
  CDR3 for beta chain variable domain of TCR clone 13153 (TRBV19, TRBJ1-2)
CASSIPGQDGYTF

SEQ ID NO: 26307 - protein, 14 aa, Homo sapiens
  CDR3 for alpha chain variable domain of TCR clone 13154 (TRAV1-2, TRAJ16)
CAVNRFSDGQKLLF

SEQ ID NO: 26308 - protein, 14 aa, Homo sapiens
  CDR3 for beta chain variable domain of TCR clone 13154 (TRBV20-1, TRBJ2-1)
CSARGGSSYSEQFF

SEQ ID NO: 26309 - protein, 14 aa, Homo sapiens
  CDR3 for alpha chain variable domain of TCR clone 13155 (TRAV2, TRAJ37)
CAVDFTSNTGKLIF

SEQ ID NO: 26310 - protein, 15 aa, Homo sapiens
  CDR3 for beta chain variable domain of TCR clone 13155 (TRBV20-1, TRBJ1-1)
CSASRGVTGNTEAFS

SEQ ID NO: 26311 - protein, 15 aa, Homo sapiens
  CDR3 for alpha chain variable domain of TCR clone 13156 (TRAV27, TRAJ38)
CAARRNAGNSRKLIW

SEQ ID NO: 26312 - protein, 13 aa, Homo sapiens
  CDR3 for beta chain variable domain of TCR clone 13156 (TRBV12-5, TRBJ2-3)
CASGDRQSDTQYF

SEQ ID NO: 26313 - protein, 14 aa, Homo sapiens
  CDR3 for alpha chain variable domain of TCR clone 13157 (TRAV35, TRAJ22)
CAGLRPGSARQLTF

SEQ ID NO: 26314 - protein, 15 aa, Homo sapiens
  CDR3 for beta chain variable domain of TCR clone 13157 (TRBV12-4, TRBJ2-5)
CASSPPTGPQETQYF

SEQ ID NO: 26315 - protein, 13 aa, Homo sapiens
  CDR3 for alpha chain variable domain of TCR clone 13158 (TRAV38-2/DV8, TRAJ34)
CAYRNYNTDKLIF

SEQ ID NO: 26316 - protein, 14 aa, Homo sapiens
  CDR3 for beta chain variable domain of TCR clone 13158 (TRBV7-6, TRBJ2-3)
CASSLGTVTDTQYF

SEQ ID NO: 26317 - protein, 11 aa, Homo sapiens
  CDR3 for alpha chain variable domain of TCR clone 13159 (TRAV1-2, TRAJ31)
CAVNNNARLMF

SEQ ID NO: 26318 - protein, 15 aa, Homo sapiens
  CDR3 for beta chain variable domain of TCR clone 13159 (TRBV28, TRBJ2-1)
CASSIIAGGRSERFF

SEQ ID NO: 26319 - protein, 18 aa, Homo sapiens
  CDR3 for alpha chain variable domain of TCR clone 13160 (TRAV12-3, TRAJ52)
CAMSVGGAGGTSYGKLTF

SEQ ID NO: 26320 - protein, 19 aa, Homo sapiens
  CDR3 for beta chain variable domain of TCR clone 13160 (TRBV25-1, TRBJ2-2)
CAILVYRVDRGRKTGELFF

SEQ ID NO: 26321 - protein, 14 aa, Homo sapiens
  CDR3 for alpha chain variable domain of TCR clone 13161 (TRAV1-2, TRAJ16)
CAVNRFSDGQKLLF

SEQ ID NO: 26322 - protein, 16 aa, Homo sapiens
  CDR3 for beta chain variable domain of TCR clone 13161 (TRBV7-9, TRBJ1-2)
CASSLGFSSGEDGYTF

SEQ ID NO: 26323 - protein, 15 aa, Homo sapiens
  CDR3 for alpha chain variable domain of TCR clone 13162 (TRAV26-1, TRAJ29)
CIVRVEGSGNTPLVF

SEQ ID NO: 26324 - protein, 14 aa, Homo sapiens
  CDR3 for beta chain variable domain of TCR clone 13162 (TRBV18, TRBJ2-5)
CASSPGVSQETQYS

SEQ ID NO: 26325 - protein, 13 aa, Homo sapiens
  CDR3 for alpha chain variable domain of TCR clone 13163 (TRAV17, TRAJ29)
CATFGSGNTPLVF

SEQ ID NO: 26326 - protein, 15 aa, Homo sapiens
  CDR3 for beta chain variable domain of TCR clone 13163 (TRBV4-2, TRBJ2-1)
CASSQGTSRYNEQFF

SEQ ID NO: 26327 - protein, 12 aa, Homo sapiens
  CDR3 for alpha chain variable domain of TCR clone 13164 (TRAV1-2, TRAJ33)
CAALDSNYRLIW

SEQ ID NO: 26328 - protein, 16 aa, Homo sapiens
  CDR3 for beta chain variable domain of TCR clone 13164 (TRBV6-4, TRBJ1-2)
CASSEAVGDPNYGYTF

SEQ ID NO: 26329 - protein, 18 aa, Homo sapiens
  CDR3 for alpha chain variable domain of TCR clone 13165 (TRAV26-1, TRAJ23)
CIVRVGLEVWNQGGRLIF

SEQ ID NO: 26330 - protein, 16 aa, Homo sapiens
  CDR3 for beta chain variable domain of TCR clone 13165 (TRBV12-4, TRBJ2-5)
CASSFFVRGRQETQYF

SEQ ID NO: 26331 - protein, 15 aa, Homo sapiens
  CDR3 for alpha chain variable domain of TCR clone 13166 (TRAV29/DV5, TRAJ44)
CAASAGTGTASKLTF

SEQ ID NO: 26332 - protein, 16 aa, Homo sapiens
  CDR3 for beta chain variable domain of TCR clone 13166 (TRBV4-1, TRBJ1-4)
CASSQDLRRGGEKLFF

SEQ ID NO: 26333 - protein, 12 aa, Homo sapiens
  CDR3 for alpha chain variable domain of TCR clone 13167 (TRAV13-2, TRAJ23)
CAERHRGGKLIF

SEQ ID NO: 26334 - protein, 16 aa, Homo sapiens
  CDR3 for beta chain variable domain of TCR clone 13167 (TRBV19, TRBJ2-1)
CASSKAGPSSYNEQFF

SEQ ID NO: 26335 - protein, 13 aa, Homo sapiens
  CDR3 for alpha chain variable domain of TCR clone 13168 (TRAV2, TRAJ40)
CAVVTSGTYKYIF

SEQ ID NO: 26336 - protein, 14 aa, Homo sapiens
  CDR3 for beta chain variable domain of TCR clone 13168 (TRBV19, TRBJ2-1)
CACPTFVLSGEQFF

SEQ ID NO: 26337 - protein, 16 aa, Homo sapiens
  CDR3 for alpha chain variable domain of TCR clone 13169 (TRAV17, TRAJ35)
CATAEGGIGSGNVLHC

SEQ ID NO: 26338 - protein, 16 aa, Homo sapiens
  CDR3 for beta chain variable domain of TCR clone 13169 (TRBV6-5, TRBJ2-7)
CASSSDPTSGFYEQYF

SEQ ID NO: 26339 - protein, 13 aa, Homo sapiens
  CDR3 for alpha chain variable domain of TCR clone 13170 (TRAV27, TRAJ6)
CAGGTRGSYIPTF

SEQ ID NO: 26340 - protein, 13 aa, Homo sapiens
  CDR3 for beta chain variable domain of TCR clone 13170 (TRBV12-5, TRBJ2-3)
CASGDRQSDTQYF

SEQ ID NO: 26341 - protein, 12 aa, Homo sapiens
  CDR3 for alpha chain variable domain of TCR clone 13171 (TRAV8-3, TRAJ20)
CAVGANYYKLSF

SEQ ID NO: 26342 - protein, 16 aa, Homo sapiens
  CDR3 for beta chain variable domain of TCR clone 13171 (TRBV19, TRBJ2-2)
CASRSPGTGATGELFF

SEQ ID NO: 26343 - protein, 13 aa, Homo sapiens
  CDR3 for alpha chain variable domain of TCR clone 13172 (TRAV13-1, TRAJ21)
CAASIYNFNKFYF

SEQ ID NO: 26344 - protein, 13 aa, Homo sapiens
  CDR3 for beta chain variable domain of TCR clone 13172 (TRBV28, TRBJ2-5)
CAEVSRGEETQYF

SEQ ID NO: 26345 - protein, 13 aa, Homo sapiens
  CDR3 for alpha chain variable domain of TCR clone 13173 (TRAV27, TRAJ42)
CAGARGSQGNPIF

SEQ ID NO: 26346 - protein, 15 aa, Homo sapiens
  CDR3 for beta chain variable domain of TCR clone 13173 (TRBV10-3, TRBJ2-2)
CAIRTDREDTGELFF

SEQ ID NO: 26347 - protein, 18 aa, Homo sapiens
  CDR3 for alpha chain variable domain of TCR clone 13174 (TRAV26-1, TRAJ23)
CIVRVGLEVWNQGGKLSF

SEQ ID NO: 26348 - protein, 16 aa, Homo sapiens
  CDR3 for beta chain variable domain of TCR clone 13174 (TRBV12-4, TRBJ2-5)
CASSFFVRGRQETQYF

SEQ ID NO: 26349 - protein, 14 aa, Homo sapiens
  CDR3 for alpha chain variable domain of TCR clone 13175 (TRAV9-2, TRAJ39)
CALYIYNAGNMLTF

SEQ ID NO: 26350 - protein, 12 aa, Homo sapiens
  CDR3 for beta chain variable domain of TCR clone 13175 (TRBV5-5, TRBJ2-5)
CASSYFGETQYF

SEQ ID NO: 26351 - protein, 14 aa, Homo sapiens
  CDR3 for alpha chain variable domain of TCR clone 13176 (TRAV1-2, TRAJ16)
CAVNRFSDGQKLLF

SEQ ID NO: 26352 - protein, 14 aa, Homo sapiens
  CDR3 for beta chain variable domain of TCR clone 13176 (TRBV19, TRBJ1-1)
CATTSGTRGTEAFF

SEQ ID NO: 26353 - protein, 14 aa, Homo sapiens
  CDR3 for alpha chain variable domain of TCR clone 13177 (TRAV1-2, TRAJ16)
CAVNRFSDGQNLLF

SEQ ID NO: 26354 - protein, 15 aa, Homo sapiens
  CDR3 for beta chain variable domain of TCR clone 13177 (TRBV9, TRBJ1-6)
CASSVAGTGDSPLHF

SEQ ID NO: 26355 - protein, 14 aa, Homo sapiens
  CDR3 for alpha chain variable domain of TCR clone 13178 (TRAV1-2, TRAJ8)
CAVREDTGFQKLVF

SEQ ID NO: 26356 - protein, 14 aa, Homo sapiens
  CDR3 for beta chain variable domain of TCR clone 13178 (TRBV9, TRBJ2-1)
CASSVDPRGKEQFF

SEQ ID NO: 26357 - protein, 12 aa, Homo sapiens
  CDR3 for alpha chain variable domain of TCR clone 13179 (TRAV8-3, TRAJ20)
CDVGANDYKLSF

SEQ ID NO: 26358 - protein, 16 aa, Homo sapiens
  CDR3 for beta chain variable domain of TCR clone 13179 (TRBV19, TRBJ2-2)
CASRSPGTGATGELFF

SEQ ID NO: 26359 - protein, 12 aa, Homo sapiens
  CDR3 for alpha chain variable domain of TCR clone 13180 (TRAV25, TRAJ10)
CAFTGGGNKLTF

SEQ ID NO: 26360 - protein, 14 aa, Homo sapiens
  CDR3 for beta chain variable domain of TCR clone 13180 (TRBV19, TRBJ1-1)
CATTSGTRGTEAFF

SEQ ID NO: 26361 - protein, 12 aa, Homo sapiens
  CDR3 for alpha chain variable domain of TCR clone 13181 (TRAV8-3, TRAJ20)
CAVGANDYKLSF

SEQ ID NO: 26362 - protein, 16 aa, Homo sapiens
  CDR3 for beta chain variable domain of TCR clone 13181 (TRBV19, TRBJ2-2)
CAGRSPGTGATGELFF

SEQ ID NO: 26363 - protein, 17 aa, Homo sapiens
  CDR3 for alpha chain variable domain of TCR clone 13182 (TRAV3, TRAJ6)
CAVRDGPRAGGSYIPTF

SEQ ID NO: 26364 - protein, 14 aa, Homo sapiens
  CDR3 for beta chain variable domain of TCR clone 13182 (TRBV7-2, TRBJ2-7)
SASSPKTSFYEQYF

SEQ ID NO: 26365 - protein, 16 aa, Homo sapiens
  CDR3 for alpha chain variable domain of TCR clone 13183 (TRAV21, TRAJ37)
CAVRTAGSSNTGQLIF

SEQ ID NO: 26366 - protein, 13 aa, Homo sapiens
  CDR3 for beta chain variable domain of TCR clone 13183 (TRBV7-9, TRBJ2-5)
CASLPSGRETQYF

SEQ ID NO: 26367 - protein, 13 aa, Homo sapiens
  CDR3 for alpha chain variable domain of TCR clone 13184 (TRAV21, TRAJ27)
CAARPGNAGKSTF

SEQ ID NO: 26368 - protein, 15 aa, Homo sapiens
  CDR3 for beta chain variable domain of TCR clone 13184 (TRBV29-1, TRBJ2-1)
CSGRDRKSSYNEQFF

SEQ ID NO: 26369 - protein, 14 aa, Homo sapiens
  CDR3 for alpha chain variable domain of TCR clone 13185 (TRAV10, TRAJ15)
CVVTTNQAGTALIF

SEQ ID NO: 26370 - protein, 12 aa, Homo sapiens
  CDR3 for beta chain variable domain of TCR clone 13185 (TRBV28, TRBJ1-5)
CATDRGYQPQHF

SEQ ID NO: 26371 - protein, 16 aa, Homo sapiens
  CDR3 for alpha chain variable domain of TCR clone 13186 (TRAV12-1, TRAJ52)
CVVPPAGGTSYGKLTF

SEQ ID NO: 26372 - protein, 13 aa, Homo sapiens
  CDR3 for beta chain variable domain of TCR clone 13186 (TRBV9, TRBJ2-1)
CASSPSGGSEQFF

SEQ ID NO: 26373 - protein, 13 aa, Homo sapiens
  CDR3 for alpha chain variable domain of TCR clone 13187 (TRAV8-3, TRAJ36)
CAVSATGANNLFF

SEQ ID NO: 26374 - protein, 15 aa, Homo sapiens
  CDR3 for beta chain variable domain of TCR clone 13187 (TRBV7-2, TRBJ1-2)
CASSPRAGWNYGYTF

SEQ ID NO: 26375 - protein, 11 aa, Homo sapiens
  CDR3 for alpha chain variable domain of TCR clone 13188 (TRAV3, TRAJ21)
CAVGNFNKFYF

SEQ ID NO: 26376 - protein, 16 aa, Homo sapiens
  CDR3 for beta chain variable domain of TCR clone 13188 (TRBV19, TRBJ2-1)
CASSKAGPSSYNEQVF

SEQ ID NO: 26377 - protein, 12 aa, Homo sapiens
  CDR3 for alpha chain variable domain of TCR clone 13189 (TRAV13-1, TRAJ20)
CAASRGDYKLSF

SEQ ID NO: 26378 - protein, 13 aa, Homo sapiens
  CDR3 for beta chain variable domain of TCR clone 13189 (TRBV15, TRBJ2-7)
CATSTTGHYEQYF

SEQ ID NO: 26379 - protein, 12 aa, Homo sapiens
  CDR3 for alpha chain variable domain of TCR clone 13190 (TRAV13-2, TRAJ23)
CAERHRGGKLIF

SEQ ID NO: 26380 - protein, 14 aa, Homo sapiens
  CDR3 for beta chain variable domain of TCR clone 13190 (TRBV25-1, TRBJ1-1)
CASTHLGGNTEAFF

SEQ ID NO: 26381 - protein, 14 aa, Homo sapiens
  CDR3 for alpha chain variable domain of TCR clone 13191 (TRAV12-2, TRAJ40)
CAVKIPSGTYKYIF

SEQ ID NO: 26382 - protein, 13 aa, Homo sapiens
  CDR3 for beta chain variable domain of TCR clone 13191 (TRBV20-1, TRBJ1-1)
QCTNTDWGTEAFF

SEQ ID NO: 26383 - protein, 14 aa, Homo sapiens
  CDR3 for alpha chain variable domain of TCR clone 13192 (TRAV2, TRAJ37)
CAVDFTSNTGKLIF

SEQ ID NO: 26384 - protein, 12 aa, Homo sapiens
  CDR3 for beta chain variable domain of TCR clone 13192 (TRBV20-1, TRBJ1-1)
QCSTWGGTEAFF

SEQ ID NO: 26385 - protein, 16 aa, Homo sapiens
  CDR3 for alpha chain variable domain of TCR clone 13193 (TRAV30, TRAJ24)
CGTEIVDADSWGKFQF

SEQ ID NO: 26386 - protein, 14 aa, Homo sapiens
  CDR3 for beta chain variable domain of TCR clone 13193 (TRBV11-2, TRBJ2-5)
CASSRTGGIETQYF

SEQ ID NO: 26387 - protein, 16 aa, Homo sapiens
  CDR3 for alpha chain variable domain of TCR clone 13194 (TRAV12-3, TRAJ53)
CAMSPGSGGSNYKLTF

SEQ ID NO: 26388 - protein, 11 aa, Homo sapiens
  CDR3 for beta chain variable domain of TCR clone 13194 (TRBV29-1, TRBJ2-5)
CSEDRTGTKYF

SEQ ID NO: 26389 - protein, 15 aa, Homo sapiens
  CDR3 for alpha chain variable domain of TCR clone 13195 (TRAV21, TRAJ53)
CATLNSGGSNYKLTF

SEQ ID NO: 26390 - protein, 15 aa, Homo sapiens
  CDR3 for beta chain variable domain of TCR clone 13195 (TRBV27, TRBJ2-1)
CASSNGGESSNEQFF

SEQ ID NO: 26391 - protein, 17 aa, Homo sapiens
  CDR3 for alpha chain variable domain of TCR clone 13196 (TRAV3, TRAJ6)
CAVRDGPRAGGSYISTF

SEQ ID NO: 26392 - protein, 20 aa, Homo sapiens
  CDR3 for beta chain variable domain of TCR clone 13196 (TRBV28, TRBJ2-1)
CASTPIGRSPGLAGGNEQFF

SEQ ID NO: 26393 - protein, 15 aa, Homo sapiens
  CDR3 for alpha chain variable domain of TCR clone 13197 (TRAV3, TRAJ22)
CAVRDRGGSARQMTF

SEQ ID NO: 26394 - protein, 16 aa, Homo sapiens
  CDR3 for beta chain variable domain of TCR clone 13197 (TRBV5-4, TRBJ2-3)
CASQQPGAGGADTQYF

SEQ ID NO: 26395 - protein, 14 aa, Homo sapiens
  CDR3 for alpha chain variable domain of TCR clone 13198 (TRAV12-1, TRAJ17)
CVVNHKAAGNKLTF

SEQ ID NO: 26396 - protein, 17 aa, Homo sapiens
  CDR3 for beta chain variable domain of TCR clone 13198 (TRBV20-1, TRBJ2-1)
CSASSSGLAGSYNEQFF

SEQ ID NO: 26397 - protein, 14 aa, Homo sapiens
  CDR3 for alpha chain variable domain of TCR clone 13199 (TRAV12-2, TRAJ45)
CAVNIGGGADGLTF

SEQ ID NO: 26398 - protein, 13 aa, Homo sapiens
  CDR3 for beta chain variable domain of TCR clone 13199 (TRBV5-5, TRBJ1-2)
CASSFWRGEDYTF

SEQ ID NO: 26399 - protein, 12 aa, Homo sapiens
  CDR3 for alpha chain variable domain of TCR clone 13200 (TRAV1-1, TRAJ39)
CAVPVVGNMLTL

SEQ ID NO: 26400 - protein, 15 aa, Homo sapiens
  CDR3 for beta chain variable domain of TCR clone 13200 (TRBV19, TRBJ1-6)
CASSTQGAVGSPLHF

SEQ ID NO: 26401 - protein, 14 aa, Homo sapiens
  CDR3 for alpha chain variable domain of TCR clone 13201 (TRAV22, TRAJ29)
CAVTRNSGNTPLVF

SEQ ID NO: 26402 - protein, 15 aa, Homo sapiens
  CDR3 for beta chain variable domain of TCR clone 13201 (TRBV19, TRBJ1-6)
CASSTQGAVGSPLHF

SEQ ID NO: 26403 - protein, 13 aa, Homo sapiens
  CDR3 for alpha chain variable domain of TCR clone 13202 (TRAV8-3, TRAJ28)
CAVGAVGSYQLTF

SEQ ID NO: 26404 - protein, 15 aa, Homo sapiens
  CDR3 for beta chain variable domain of TCR clone 13202 (TRBV7-9, TRBJ1-5)
CASGQGHQPNQPQHF

SEQ ID NO: 26405 - protein, 14 aa, Homo sapiens
  CDR3 for alpha chain variable domain of TCR clone 13203 (TRAV16, TRAJ32)
CALKSGGATNKLIF

SEQ ID NO: 26406 - protein, 13 aa, Homo sapiens
  CDR3 for beta chain variable domain of TCR clone 13203 (TRBV6-6, TRBJ2-3)
CASSQGGRDTQYF

SEQ ID NO: 26407 - protein, 14 aa, Homo sapiens
  CDR3 for alpha chain variable domain of TCR clone 13204 (TRAV12-2, TRAJ13)
CAVKKTGGYQKVTF

SEQ ID NO: 26408 - protein, 15 aa, Homo sapiens
  CDR3 for beta chain variable domain of TCR clone 13204 (TRBV6-6, TRBJ1-1)
CASSYPTAMNTEAFF

SEQ ID NO: 26409 - protein, 16 aa, Homo sapiens
  CDR3 for alpha chain variable domain of TCR clone 13205 (TRAV16, TRAJ4)
CALRRMFSGGYNKLIF

SEQ ID NO: 26410 - protein, 16 aa, Homo sapiens
  CDR3 for beta chain variable domain of TCR clone 13205 (TRBV24-1, TRBJ2-3)
CATSDPGTGATDTQYF

SEQ ID NO: 26411 - protein, 14 aa, Homo sapiens
  CDR3 for alpha chain variable domain of TCR clone 13206 (TRAV35, TRAJ33)
CAGSSQDSNYQLIW

SEQ ID NO: 26412 - protein, 15 aa, Homo sapiens
  CDR3 for beta chain variable domain of TCR clone 13206 (TRBV20-1, TRBJ2-7)
CSAESETSGAYEQYF

SEQ ID NO: 26413 - protein, 22 aa, Homo sapiens
  CDR3 for alpha chain variable domain of TCR clone 13207 (TRAV26-2, TRAJ45)
CCVLLHPERQGRSGGGADGLTF

SEQ ID NO: 26414 - protein, 15 aa, Homo sapiens
  CDR3 for beta chain variable domain of TCR clone 13207 (TRBV7-6, TRBJ2-5)
CASSKPTGPQETQYF

SEQ ID NO: 26415 - protein, 11 aa, Homo sapiens
  CDR3 for alpha chain variable domain of TCR clone 13208 (TRAV10, TRAJ11)
CGERERSTLTF

SEQ ID NO: 26416 - protein, 15 aa, Homo sapiens
  CDR3 for beta chain variable domain of TCR clone 13208 (TRBV7-2, TRBJ2-1)
CASSFQADEYNEQFF

SEQ ID NO: 26417 - protein, 14 aa, Homo sapiens
  CDR3 for alpha chain variable domain of TCR clone 13209 (TRAV8-1, TRAJ5)
CAVRTDTGRRALTF

SEQ ID NO: 26418 - protein, 16 aa, Homo sapiens
  CDR3 for beta chain variable domain of TCR clone 13209 (TRBV29-1, TRBJ2-7)
CSVEVVGTSGSYEQYF

SEQ ID NO: 26419 - protein, 14 aa, Homo sapiens
  CDR3 for alpha chain variable domain of TCR clone 13210 (TRAV2, TRAJ37)
CAVDFTSNTGKLIF

SEQ ID NO: 26420 - protein, 13 aa, Homo sapiens
  CDR3 for beta chain variable domain of TCR clone 13210 (TRBV7-9, TRBJ1-2)
CASSLKQNYGYTF

SEQ ID NO: 26421 - protein, 14 aa, Homo sapiens
  CDR3 for alpha chain variable domain of TCR clone 13211 (TRAV8-3, TRAJ4)
CAVGAAGGYNKLIS

SEQ ID NO: 26422 - protein, 15 aa, Homo sapiens
  CDR3 for beta chain variable domain of TCR clone 13211 (TRBV6-5, TRBJ2-1)
CASSYDAGAGNEQFF

SEQ ID NO: 26423 - protein, 13 aa, Homo sapiens
  CDR3 for alpha chain variable domain of TCR clone 13212 (TRAV20, TRAJ37)
CAGCASNTGKLIF

SEQ ID NO: 26424 - protein, 11 aa, Homo sapiens
  CDR3 for beta chain variable domain of TCR clone 13212 (TRBV12-4, TRBJ2-3)
CASTATDTQYF

SEQ ID NO: 26425 - protein, 14 aa, Homo sapiens
  CDR3 for alpha chain variable domain of TCR clone 13213 (TRAV10, TRAJ36)
CVVSEGTGANNLFF

SEQ ID NO: 26426 - protein, 13 aa, Homo sapiens
  CDR3 for beta chain variable domain of TCR clone 13213 (TRBV28, TRBJ2-7)
CASSVTWDREMYF

SEQ ID NO: 26427 - protein, 14 aa, Homo sapiens
  CDR3 for alpha chain variable domain of TCR clone 13214 (TRAV26-1, TRAJ38)
CIADNAGNNRKLIW

SEQ ID NO: 26428 - protein, 19 aa, Homo sapiens
  CDR3 for beta chain variable domain of TCR clone 13214 (TRBV25-1, TRBJ2-2)
CAILVYRVDRGRKTGELFF

SEQ ID NO: 26429 - protein, 12 aa, Homo sapiens
  CDR3 for alpha chain variable domain of TCR clone 13215 (TRAV12-2, TRAJ10)
WGVTGGGNKLTF

SEQ ID NO: 26430 - protein, 17 aa, Homo sapiens
  CDR3 for beta chain variable domain of TCR clone 13215 (TRBV13, TRBJ2-3)
CASSLSRVAGGRNTQYF

SEQ ID NO: 26431 - protein, 12 aa, Homo sapiens
  CDR3 for alpha chain variable domain of TCR clone 13216 (TRAV8-3, TRAJ26)
CAGDNYGQNFVF

SEQ ID NO: 26432 - protein, 13 aa, Homo sapiens
  CDR3 for beta chain variable domain of TCR clone 13216 (TRBV7-9, TRBJ1-2)
CASSLKQNYGYTF

SEQ ID NO: 26433 - protein, 18 aa, Homo sapiens
  CDR3 for alpha chain variable domain of TCR clone 13217 (TRAV21, TRAJ52)
CAVRPSPAGGTSYGKLTF

SEQ ID NO: 26434 - protein, 17 aa, Homo sapiens
  CDR3 for beta chain variable domain of TCR clone 13217 (TRBV13, TRBJ2-3)
CASSLSRVEGGRNTQYF

SEQ ID NO: 26435 - protein, 12 aa, Homo sapiens
  CDR3 for alpha chain variable domain of TCR clone 13218 (TRAV12-3, TRAJ17)
CAMTLTGNKLTF

SEQ ID NO: 26436 - protein, 15 aa, Homo sapiens
  CDR3 for beta chain variable domain of TCR clone 13218 (TRBV20-1, TRBJ2-7)
CSARDGVSGMDEQYF

SEQ ID NO: 26437 - protein, 15 aa, Homo sapiens
  CDR3 for alpha chain variable domain of TCR clone 13219 (TRAV35, TRAJ40)
CAGQLGTSGTYKYIF

SEQ ID NO: 26438 - protein, 14 aa, Homo sapiens
  CDR3 for beta chain variable domain of TCR clone 13219 (TRBV7-3, TRBJ2-1)
CASSVAGGTNEQFF

SEQ ID NO: 26439 - protein, 15 aa, Homo sapiens
  CDR3 for alpha chain variable domain of TCR clone 13220 (TRAV23/DV6, TRAJ18)
CAARYRGSTLGRLYF

SEQ ID NO: 26440 - protein, 12 aa, Homo sapiens
  CDR3 for beta chain variable domain of TCR clone 13220 (TRBV7-8, TRBJ2-7)
CASSLGDREQYF

SEQ ID NO: 26441 - protein, 12 aa, Homo sapiens
  CDR3 for alpha chain variable domain of TCR clone 13221 (TRAV21, TRAJ33)
CANMDSNYQLIW

SEQ ID NO: 26442 - protein, 14 aa, Homo sapiens
  CDR3 for beta chain variable domain of TCR clone 13221 (TRBV2, TRBJ2-7)
CASSLTSGGYEQYF

SEQ ID NO: 26443 - protein, 15 aa, Homo sapiens
  CDR3 for alpha chain variable domain of TCR clone 13222 (TRAV26-1, TRAJ29)
CIVRVEVSGNTPLVF

SEQ ID NO: 26444 - protein, 15 aa, Homo sapiens
  CDR3 for beta chain variable domain of TCR clone 13222 (TRBV7-9, TRBJ1-5)
CASSQGHQPNQPQHF

SEQ ID NO: 26445 - protein, 14 aa, Homo sapiens
  CDR3 for alpha chain variable domain of TCR clone 13223 (TRAV13-1, TRAJ35)
CASSKGGFGNVLHC

SEQ ID NO: 26446 - protein, 13 aa, Homo sapiens
  CDR3 for beta chain variable domain of TCR clone 13223 (TRBV7-3, TRBJ1-1)
CASSQDWGAEAFF

SEQ ID NO: 26447 - protein, 15 aa, Homo sapiens
  CDR3 for alpha chain variable domain of TCR clone 13224 (TRAV12-3, TRAJ42)
CAMSGHGGSQGNLIF

SEQ ID NO: 26448 - protein, 13 aa, Homo sapiens
  CDR3 for beta chain variable domain of TCR clone 13224 (TRBV24-1, TRBJ2-1)
CATSAGPYNEQFF

SEQ ID NO: 26449 - protein, 15 aa, Homo sapiens
  CDR3 for alpha chain variable domain of TCR clone 13225 (TRAV3, TRAJ39)
CAVRDRYNAGNMLTF

SEQ ID NO: 26450 - protein, 18 aa, Homo sapiens
  CDR3 for beta chain variable domain of TCR clone 13225 (TRBV4-3, TRBJ2-1)
CASSQDLASGTTYNEQFF

SEQ ID NO: 26451 - protein, 15 aa, Homo sapiens
  CDR3 for alpha chain variable domain of TCR clone 13226 (TRAV26-1, TRAJ29)
CIVRVDGSGNTPLVF

SEQ ID NO: 26452 - protein, 15 aa, Homo sapiens
  CDR3 for beta chain variable domain of TCR clone 13226 (TRBV7-9, TRBJ1-5)
CASSQGHQPNQPQHF

SEQ ID NO: 26453 - protein, 14 aa, Homo sapiens
  CDR3 for alpha chain variable domain of TCR clone 13227 (TRAV26-1, TRAJ38)
CIADNAGTNRKLIW

SEQ ID NO: 26454 - protein, 13 aa, Homo sapiens
  CDR3 for beta chain variable domain of TCR clone 13227 (TRBV20-1, TRBJ1-1)
CSARGGGNTEAFF

SEQ ID NO: 26455 - protein, 14 aa, Homo sapiens
  CDR3 for alpha chain variable domain of TCR clone 13228 (TRAV9-2, TRAJ39)
CALYIYNAGNMLTF

SEQ ID NO: 26456 - protein, 15 aa, Homo sapiens
  CDR3 for beta chain variable domain of TCR clone 13228 (TRBV10-1, TRBJ2-3)
CASSATSGGFDTQYF

SEQ ID NO: 26457 - protein, 12 aa, Homo sapiens
  CDR3 for alpha chain variable domain of TCR clone 13229 (TRAV12-2, TRAJ45)
CAVTGGADGLTF

SEQ ID NO: 26458 - protein, 15 aa, Homo sapiens
  CDR3 for beta chain variable domain of TCR clone 13229 (TRBV27, TRBJ2-1)
CASSNGGGSSNEQFF

SEQ ID NO: 26459 - protein, 15 aa, Homo sapiens
  CDR3 for alpha chain variable domain of TCR clone 13230 (TRAV38-1, TRAJ57)
CAFMDSQGGSEKLVF

SEQ ID NO: 26460 - protein, 16 aa, Homo sapiens
  CDR3 for beta chain variable domain of TCR clone 13230 (TRBV10-3, TRBJ2-1)
CAIRGGGRGDYSEQFF

SEQ ID NO: 26461 - protein, 14 aa, Homo sapiens
  CDR3 for alpha chain variable domain of TCR clone 13231 (TRAV21, TRAJ35)
CTVMPIGFGNVLHC

SEQ ID NO: 26462 - protein, 12 aa, Homo sapiens
  CDR3 for beta chain variable domain of TCR clone 13231 (TRBV7-9, TRBJ2-7)
CASSIKREEQYF

SEQ ID NO: 26463 - protein, 11 aa, Homo sapiens
  CDR3 for alpha chain variable domain of TCR clone 13232 (TRAV12-1, TRAJ33)
CVVNTNYQLIW

SEQ ID NO: 26464 - protein, 11 aa, Homo sapiens
  CDR3 for beta chain variable domain of TCR clone 13232 (TRBV10-1, TRBJ2-3)
CASSDSDTQYF

SEQ ID NO: 26465 - protein, 12 aa, Homo sapiens
  CDR3 for alpha chain variable domain of TCR clone 13233 (TRAV8-3, TRAJ26)
CAGDNYGQNFVF

SEQ ID NO: 26466 - protein, 14 aa, Homo sapiens
  CDR3 for beta chain variable domain of TCR clone 13233 (TRBV5-5, TRBJ1-5)
CASSGQGVDQPQHF

SEQ ID NO: 26467 - protein, 14 aa, Homo sapiens
  CDR3 for alpha chain variable domain of TCR clone 13234 (TRAV1-2, TRAJ16)
CAVNRFSDGQKLLF

SEQ ID NO: 26468 - protein, 12 aa, Homo sapiens
  CDR3 for beta chain variable domain of TCR clone 13234 (TRBV3-1, TRBJ2-1)
CASSQGSSGQFF

SEQ ID NO: 26469 - protein, 14 aa, Homo sapiens
  CDR3 for alpha chain variable domain of TCR clone 13235 (TRAV26-1, TRAJ38)
CIADNAVNNRKLIW

SEQ ID NO: 26470 - protein, 13 aa, Homo sapiens
  CDR3 for beta chain variable domain of TCR clone 13235 (TRBV20-1, TRBJ1-1)
CSARGGGNTEAFF

SEQ ID NO: 26471 - protein, 16 aa, Homo sapiens
  CDR3 for alpha chain variable domain of TCR clone 13236 (TRAV30, TRAJ24)
CGTEIVDADSWGKFQF

SEQ ID NO: 26472 - protein, 14 aa, Homo sapiens
  CDR3 for beta chain variable domain of TCR clone 13236 (TRBV12-5, TRBJ2-5)
CASGLRTHQETQYF

SEQ ID NO: 26473 - protein, 14 aa, Homo sapiens
  CDR3 for alpha chain variable domain of TCR clone 13237 (TRAV12-1, TRAJ30)
CVVNIGGRDDKIIF

SEQ ID NO: 26474 - protein, 13 aa, Homo sapiens
  CDR3 for beta chain variable domain of TCR clone 13237 (TRBV12-5, TRBJ2-1)
CASGVGRGNEQFF

SEQ ID NO: 26475 - protein, 14 aa, Homo sapiens
  CDR3 for alpha chain variable domain of TCR clone 13238 (TRAV1-2, TRAJ8)
CAVREDTSFQKLVF

SEQ ID NO: 26476 - protein, 15 aa, Homo sapiens
  CDR3 for beta chain variable domain of TCR clone 13238 (TRBV6-3, TRBJ2-7)
CASSSPGTVFYEQYF

SEQ ID NO: 26477 - protein, 15 aa, Homo sapiens
  CDR3 for alpha chain variable domain of TCR clone 13239 (TRAV38-1, TRAJ37)
CAFIFGSGNTGKPIF

SEQ ID NO: 26478 - protein, 12 aa, Homo sapiens
  CDR3 for beta chain variable domain of TCR clone 13239 (TRBV7-9, TRBJ2-7)
CASSLEGYEQYF

SEQ ID NO: 26479 - protein, 14 aa, Homo sapiens
  CDR3 for alpha chain variable domain of TCR clone 13240 (TRAV12-2, TRAJ13)
WAVKKTGGYQKVTF

SEQ ID NO: 26480 - protein, 15 aa, Homo sapiens
  CDR3 for beta chain variable domain of TCR clone 13240 (TRBV27, TRBJ2-1)
CASSNGGGSSNEQFF

SEQ ID NO: 26481 - protein, 13 aa, Homo sapiens
  CDR3 for alpha chain variable domain of TCR clone 13241 (TRAV8-3, TRAJ28)
CAVGAVGSYQLTF

SEQ ID NO: 26482 - protein, 15 aa, Homo sapiens
  CDR3 for beta chain variable domain of TCR clone 13241 (TRBV7-9, TRBJ1-5)
CASSQGHQPNQPQHL

SEQ ID NO: 26483 - protein, 15 aa, Homo sapiens
  CDR3 for alpha chain variable domain of TCR clone 13242 (TRAV3, TRAJ5)
CAVRDLDTGRRALTF

SEQ ID NO: 26484 - protein, 13 aa, Homo sapiens
  CDR3 for beta chain variable domain of TCR clone 13242 (TRBV12-3, TRBJ2-7)
CASSPTETYEQYF

SEQ ID NO: 26485 - protein, 16 aa, Homo sapiens
  CDR3 for alpha chain variable domain of TCR clone 13243 (TRAV8-3, TRAJ13)
CAVGAYPSGGYQKVTL

SEQ ID NO: 26486 - protein, 15 aa, Homo sapiens
  CDR3 for beta chain variable domain of TCR clone 13243 (TRBV19, TRBJ1-5)
CASSIVWADNQPQHF

SEQ ID NO: 26487 - protein, 12 aa, Homo sapiens
  CDR3 for alpha chain variable domain of TCR clone 13244 (TRAV12-3, TRAJ40)
CAMGSGTYKYIF

SEQ ID NO: 26488 - protein, 15 aa, Homo sapiens
  CDR3 for beta chain variable domain of TCR clone 13244 (TRBV7-3, TRBJ2-2)
CASSETGQGTGELFF

SEQ ID NO: 26489 - protein, 12 aa, Homo sapiens
  CDR3 for alpha chain variable domain of TCR clone 13245 (TRAV16, TRAJ10)
CSRTGGGNKLTF

SEQ ID NO: 26490 - protein, 17 aa, Homo sapiens
  CDR3 for beta chain variable domain of TCR clone 13245 (TRBV4-1, TRBJ2-7)
CASSRDPLGVRGGEQYF

SEQ ID NO: 26491 - protein, 13 aa, Homo sapiens
  CDR3 for alpha chain variable domain of TCR clone 13246 (TRAV21, TRAJ27)
CAARSGNAGKSTF

SEQ ID NO: 26492 - protein, 14 aa, Homo sapiens
  CDR3 for beta chain variable domain of TCR clone 13246 (TRBV7-6, TRBJ2-3)
CASSLGTVTDTQYF

SEQ ID NO: 26493 - protein, 14 aa, Homo sapiens
  CDR3 for alpha chain variable domain of TCR clone 13247 (TRAV29/DV5, TRAJ36)
CAARRKTGANNLFF

SEQ ID NO: 26494 - protein, 15 aa, Homo sapiens
  CDR3 for beta chain variable domain of TCR clone 13247 (TRBV2, TRBJ2-7)
CASSEGLARSYEQYF

SEQ ID NO: 26495 - protein, 13 aa, Homo sapiens
  CDR3 for alpha chain variable domain of TCR clone 13248 (TRAV21, TRAJ27)
CAERPGNAGKSTF

SEQ ID NO: 26496 - protein, 14 aa, Homo sapiens
  CDR3 for beta chain variable domain of TCR clone 13248 (TRBV7-6, TRBJ2-3)
CASSLGTVTDTQYF

SEQ ID NO: 26497 - protein, 13 aa, Homo sapiens
  CDR3 for alpha chain variable domain of TCR clone 13249 (TRAV13-2, TRAJ48)
CAEMDFGNEKLTF

SEQ ID NO: 26498 - protein, 15 aa, Homo sapiens
  CDR3 for beta chain variable domain of TCR clone 13249 (TRBV7-9, TRBJ1-6)
CASGSPGRGNSPLHF

SEQ ID NO: 26499 - protein, 16 aa, Homo sapiens
  CDR3 for alpha chain variable domain of TCR clone 13250 (TRAV38-1, TRAJ32)
CAFMKGGGGATNKLIF

SEQ ID NO: 26500 - protein, 13 aa, Homo sapiens
  CDR3 for beta chain variable domain of TCR clone 13250 (TRBV20-1, TRBJ2-5)
CSAREAFQGTQYF

SEQ ID NO: 26501 - protein, 13 aa, Homo sapiens
  CDR3 for alpha chain variable domain of TCR clone 13251 (TRAV2, TRAJ40)
CDVVTSGTYKYIF

SEQ ID NO: 26502 - protein, 15 aa, Homo sapiens
  CDR3 for beta chain variable domain of TCR clone 13251 (TRBV11-3, TRBJ2-3)
CASLKDGREGDTQYF

SEQ ID NO: 26503 - protein, 14 aa, Homo sapiens
  CDR3 for alpha chain variable domain of TCR clone 13252 (TRAV12-2, TRAJ13)
CAVKKTGGYQKVTF

SEQ ID NO: 26504 - protein, 16 aa, Homo sapiens
  CDR3 for beta chain variable domain of TCR clone 13252 (TRBV13, TRBJ2-2)
CASSPRTGEHTGELFF

SEQ ID NO: 26505 - protein, 15 aa, Homo sapiens
  CDR3 for alpha chain variable domain of TCR clone 13253 (TRAV3, TRAJ20)
CAVRDIKLSDYNLSF

SEQ ID NO: 26506 - protein, 15 aa, Homo sapiens
  CDR3 for beta chain variable domain of TCR clone 13253 (TRBV7-9, TRBJ1-6)
CASSSPGRGNSPLHF

SEQ ID NO: 26507 - protein, 17 aa, Homo sapiens
  CDR3 for alpha chain variable domain of TCR clone 13254 (TRAV3, TRAJ6)
CAVRDGPRAGGSYIPTF

SEQ ID NO: 26508 - protein, 14 aa, Homo sapiens
  CDR3 for beta chain variable domain of TCR clone 13254 (TRBV7-2, TRBJ2-7)
FASSPKTSFYEQYF

SEQ ID NO: 26509 - protein, 13 aa, Homo sapiens
  CDR3 for alpha chain variable domain of TCR clone 13255 (TRAV27, TRAJ41)
CAGEGNSGYALNF

SEQ ID NO: 26510 - protein, 14 aa, Homo sapiens
  CDR3 for beta chain variable domain of TCR clone 13255 (TRBV7-2, TRBJ1-1)
CASSSLTGTTEAFF

SEQ ID NO: 26511 - protein, 14 aa, Homo sapiens
  CDR3 for alpha chain variable domain of TCR clone 13256 (TRAV2, TRAJ37)
CAVDFTSNTGKLIF

SEQ ID NO: 26512 - protein, 15 aa, Homo sapiens
  CDR3 for beta chain variable domain of TCR clone 13256 (TRBV20-1, TRBJ1-1)
CGASRGVTGNTEAFF

SEQ ID NO: 26513 - protein, 13 aa, Homo sapiens
  CDR3 for alpha chain variable domain of TCR clone 13257 (TRAV13-1, TRAJ5)
CAASDTGRRALTF

SEQ ID NO: 26514 - protein, 12 aa, Homo sapiens
  CDR3 for beta chain variable domain of TCR clone 13257 (TRBV28, TRBJ2-3)
CAGSLYRDTQYF

SEQ ID NO: 26515 - protein, 11 aa, Homo sapiens
  CDR3 for alpha chain variable domain of TCR clone 13258 (TRAV1-2, TRAJ20)
CAVANDYKLSF

SEQ ID NO: 26516 - protein, 18 aa, Homo sapiens
  CDR3 for beta chain variable domain of TCR clone 13258 (TRBV20-1, TRBJ2-6)
CSAEATPTHGSGANVLTF

SEQ ID NO: 26517 - protein, 14 aa, Homo sapiens
  CDR3 for alpha chain variable domain of TCR clone 13259 (TRAV12-2, TRAJ13)
CAVKKTGGYQKVTF

SEQ ID NO: 26518 - protein, 14 aa, Homo sapiens
  CDR3 for beta chain variable domain of TCR clone 13259 (TRBV20-1, TRBJ2-3)
CRAYSGGRTDTQYF

SEQ ID NO: 26519 - protein, 12 aa, Homo sapiens
  CDR3 for alpha chain variable domain of TCR clone 13260 (TRAV12-3, TRAJ17)
CAVTLTGNKLTF

SEQ ID NO: 26520 - protein, 15 aa, Homo sapiens
  CDR3 for beta chain variable domain of TCR clone 13260 (TRBV12-4, TRBJ2-5)
CASSPPTGLQETQYF

SEQ ID NO: 26521 - protein, 14 aa, Homo sapiens
  CDR3 for alpha chain variable domain of TCR clone 13261 (TRAV35, TRAJ22)
CAGLRPGSARQRTF

SEQ ID NO: 26522 - protein, 15 aa, Homo sapiens
  CDR3 for beta chain variable domain of TCR clone 13261 (TRBV12-4, TRBJ2-5)
CASSPPTGLQETQYF

SEQ ID NO: 26523 - protein, 17 aa, Homo sapiens
  CDR3 for alpha chain variable domain of TCR clone 13262 (TRAV17, TRAJ24)
CATANSMTTDSWGKLQF

SEQ ID NO: 26524 - protein, 16 aa, Homo sapiens
  CDR3 for beta chain variable domain of TCR clone 13262 (TRBV6-1, TRBJ2-5)
CASSETLDRGAETQYF

SEQ ID NO: 26525 - protein, 17 aa, Homo sapiens
  CDR3 for alpha chain variable domain of TCR clone 13263 (TRAV3, TRAJ6)
CAVRDGPRAGGSYIPTF

SEQ ID NO: 26526 - protein, 14 aa, Homo sapiens
  CDR3 for beta chain variable domain of TCR clone 13263 (TRBV7-2, TRBJ2-7)
CASSPKSSFYEQYF

SEQ ID NO: 26527 - protein, 15 aa, Homo sapiens
  CDR3 for alpha chain variable domain of TCR clone 13264 (TRAV25, TRAJ52)
CAGRPGGTSYGKLTF

SEQ ID NO: 26528 - protein, 17 aa, Homo sapiens
  CDR3 for beta chain variable domain of TCR clone 13264 (TRBV7-8, TRBJ2-6)
CASSAGTGGAGANALTF

SEQ ID NO: 26529 - protein, 14 aa, Homo sapiens
  CDR3 for alpha chain variable domain of TCR clone 13265 (TRAV20, TRAJ42)
CAVQAGGGQGNLIF

SEQ ID NO: 26530 - protein, 14 aa, Homo sapiens
  CDR3 for beta chain variable domain of TCR clone 13265 (TRBV28, TRBJ1-2)
CASRIQGANYGYTF

SEQ ID NO: 26531 - protein, 11 aa, Homo sapiens
  CDR3 for alpha chain variable domain of TCR clone 13266 (TRAV2, TRAJ13)
CAPGGYQKVTF

SEQ ID NO: 26532 - protein, 16 aa, Homo sapiens
  CDR3 for beta chain variable domain of TCR clone 13266 (TRBV19, TRBJ2-1)
CASSKAGPSSYNEQFF

SEQ ID NO: 26533 - protein, 14 aa, Homo sapiens
  CDR3 for alpha chain variable domain of TCR clone 13267 (TRAV9-2, TRAJ39)
CALYIYNAGNMLTF

SEQ ID NO: 26534 - protein, 14 aa, Homo sapiens
  CDR3 for beta chain variable domain of TCR clone 13267 (TRBV6-1, TRBJ1-3)
CASVQGGGGNTMYF

SEQ ID NO: 26535 - protein, 13 aa, Homo sapiens
  CDR3 for alpha chain variable domain of TCR clone 13268 (TRAV21, TRAJ57)
CAVTQGGSEKLVF

SEQ ID NO: 26536 - protein, 16 aa, Homo sapiens
  CDR3 for beta chain variable domain of TCR clone 13268 (TRBV29-1, TRBJ2-7)
RSVEDAEDGTAYEQYF

SEQ ID NO: 26537 - protein, 12 aa, Homo sapiens
  CDR3 for alpha chain variable domain of TCR clone 13269 (TRAV8-3, TRAJ26)
CAGDNYGQNFVF

SEQ ID NO: 26538 - protein, 15 aa, Homo sapiens
  CDR3 for beta chain variable domain of TCR clone 13269 (TRBV9, TRBJ2-1)
CASSLAGSPYNEQFF

SEQ ID NO: 26539 - protein, 14 aa, Homo sapiens
  CDR3 for alpha chain variable domain of TCR clone 13270 (TRAV13-1, TRAJ35)
CAASKGGFGNVLHC

SEQ ID NO: 26540 - protein, 13 aa, Homo sapiens
  CDR3 for beta chain variable domain of TCR clone 13270 (TRBV7-3, TRBJ1-1)
CASSQDWGAEVFF

SEQ ID NO: 26541 - protein, 12 aa, Homo sapiens
  CDR3 for alpha chain variable domain of TCR clone 13271 (TRAV17, TRAJ20)
CATDSNDYKLSF

SEQ ID NO: 26542 - protein, 15 aa, Homo sapiens
  CDR3 for beta chain variable domain of TCR clone 13271 (TRBV11-3, TRBJ2-5)
CASSDTSGGIETQYF

SEQ ID NO: 26543 - protein, 10 aa, Homo sapiens
  CDR3 for alpha chain variable domain of TCR clone 13272 (TRAV23/DV6, TRAJ57)
CAAGSTLSQG

SEQ ID NO: 26544 - protein, 14 aa, Homo sapiens
  CDR3 for beta chain variable domain of TCR clone 13272 (TRBV25-1, TRBJ1-1)
CASTHLGGNTEAFF

SEQ ID NO: 26545 - protein, 12 aa, Homo sapiens
  CDR3 for alpha chain variable domain of TCR clone 13273 (TRAV8-3, TRAJ20)
CAVGANDYKLSF

SEQ ID NO: 26546 - protein, 16 aa, Homo sapiens
  CDR3 for beta chain variable domain of TCR clone 13273 (TRBV19, TRBJ2-2)
GASRSPGTGATGELFF

SEQ ID NO: 26547 - protein, 13 aa, Homo sapiens
  CDR3 for alpha chain variable domain of TCR clone 13274 (TRAV30, TRAJ32)
CGIFGGATNKLIF

SEQ ID NO: 26548 - protein, 13 aa, Homo sapiens
  CDR3 for beta chain variable domain of TCR clone 13274 (TRBV7-2, TRBJ1-1)
CASSVQGYTEAFF

SEQ ID NO: 26549 - protein, 14 aa, Homo sapiens
  CDR3 for alpha chain variable domain of TCR clone 13275 (TRAV1-1, TRAJ28)
CAVQLWGWELPTHF

SEQ ID NO: 26550 - protein, 14 aa, Homo sapiens
  CDR3 for beta chain variable domain of TCR clone 13275 (TRBV20-1, TRBJ1-3)
CSASPTGAGNTIYF

SEQ ID NO: 26551 - protein, 13 aa, Homo sapiens
  CDR3 for alpha chain variable domain of TCR clone 13276 (TRAV27, TRAJ45)
CRGSGGGADGLTF

SEQ ID NO: 26552 - protein, 17 aa, Homo sapiens
  CDR3 for beta chain variable domain of TCR clone 13276 (TRBV11-2, TRBJ2-1)
CASSLYPPGVEYNEQFF

SEQ ID NO: 26553 - protein, 17 aa, Homo sapiens
  CDR3 for alpha chain variable domain of TCR clone 13277 (TRAV26-1, TRAJ37)
CIVRVITVSSNTGKLIF

SEQ ID NO: 26554 - protein, 14 aa, Homo sapiens
  CDR3 for beta chain variable domain of TCR clone 13277 (TRBV7-8, TRBJ1-2)
CASSPDSLSYGYTF

SEQ ID NO: 26555 - protein, 15 aa, Homo sapiens
  CDR3 for alpha chain variable domain of TCR clone 13278 (TRAV17, TRAJ57)
CATGPSQGGSEKLVF

SEQ ID NO: 26556 - protein, 12 aa, Homo sapiens
  CDR3 for beta chain variable domain of TCR clone 13278 (TRBV11-2, TRBJ2-2)
CASSLGGGELFF

SEQ ID NO: 26557 - protein, 14 aa, Homo sapiens
  CDR3 for alpha chain variable domain of TCR clone 13279 (TRAV1-2, TRAJ16)
CAVNRFSDGQKLLF

SEQ ID NO: 26558 - protein, 15 aa, Homo sapiens
  CDR3 for beta chain variable domain of TCR clone 13279 (TRBV7-9, TRBJ1-6)
CASSSPGRGKSPLHF

SEQ ID NO: 26559 - protein, 14 aa, Homo sapiens
  CDR3 for alpha chain variable domain of TCR clone 13280 (TRAV12-2, TRAJ15)
CAPHTGQAGTALIF

SEQ ID NO: 26560 - protein, 14 aa, Homo sapiens
  CDR3 for beta chain variable domain of TCR clone 13280 (TRBV25-1, TRBJ1-1)
CASTHLGGNTEAFF

SEQ ID NO: 26561 - protein, 15 aa, Homo sapiens
  CDR3 for alpha chain variable domain of TCR clone 13281 (TRAV8-3, TRAJ11)
CAVGLLNSGYSTLTF

SEQ ID NO: 26562 - protein, 16 aa, Homo sapiens
  CDR3 for beta chain variable domain of TCR clone 13281 (TRBV7-9, TRBJ1-2)
CASSLGFSSGEDGYSF

SEQ ID NO: 26563 - protein, 15 aa, Homo sapiens
  CDR3 for alpha chain variable domain of TCR clone 13282 (TRAV23/DV6, TRAJ32)
CAASKMGGATNKLIF

SEQ ID NO: 26564 - protein, 15 aa, Homo sapiens
  CDR3 for beta chain variable domain of TCR clone 13282 (TRBV4-3, TRBJ1-2)
CASSRGQGRNYGYTF

SEQ ID NO: 26565 - protein, 11 aa, Homo sapiens
  CDR3 for alpha chain variable domain of TCR clone 13283 (TRAV6, TRAJ4)
PISGGYNKLIF

SEQ ID NO: 26566 - protein, 13 aa, Homo sapiens
  CDR3 for beta chain variable domain of TCR clone 13283 (TRBV11-3, TRBJ2-7)
CASSLDKLYEQYF

SEQ ID NO: 26567 - protein, 13 aa, Homo sapiens
  CDR3 for alpha chain variable domain of TCR clone 13284 (TRAV8-3, TRAJ28)
CAVGAVGSYQLTF

SEQ ID NO: 26568 - protein, 14 aa, Homo sapiens
  CDR3 for beta chain variable domain of TCR clone 13284 (TRBV7-2, TRBJ2-7)
CAGRSQGAAYEQYF

SEQ ID NO: 26569 - protein, 14 aa, Homo sapiens
  CDR3 for alpha chain variable domain of TCR clone 13285 (TRAV20, TRAJ56)
CAVQFGGANSKMTF

SEQ ID NO: 26570 - protein, 14 aa, Homo sapiens
  CDR3 for beta chain variable domain of TCR clone 13285 (TRBV20-1, TRBJ2-7)
CSAKRGRSSYEQYF

SEQ ID NO: 26571 - protein, 15 aa, Homo sapiens
  CDR3 for alpha chain variable domain of TCR clone 13286 (TRAV26-1, TRAJ29)
CIVRVEGSGNTPLVF

SEQ ID NO: 26572 - protein, 18 aa, Homo sapiens
  CDR3 for beta chain variable domain of TCR clone 13286 (TRBV12-4, TRBJ1-1)
CASSKTGLWRTLKLSLDK

SEQ ID NO: 26573 - protein, 13 aa, Homo sapiens
  CDR3 for alpha chain variable domain of TCR clone 13287 (TRAV12-3, TRAJ33)
CAMSVNSNYQLIW

SEQ ID NO: 26574 - protein, 13 aa, Homo sapiens
  CDR3 for beta chain variable domain of TCR clone 13287 (TRBV7-2, TRBJ2-2)
CASSLAVTGELFL

SEQ ID NO: 26575 - protein, 16 aa, Homo sapiens
  CDR3 for alpha chain variable domain of TCR clone 13288 (TRAV12-3, TRAJ53)
CAMSPGSGGSNYKLTF

SEQ ID NO: 26576 - protein, 11 aa, Homo sapiens
  CDR3 for beta chain variable domain of TCR clone 13288 (TRBV29-1, TRBJ2-5)
CSEDRTGTQYC

SEQ ID NO: 26577 - protein, 13 aa, Homo sapiens
  CDR3 for alpha chain variable domain of TCR clone 13289 (TRAV13-2, TRAJ48)
CAGMDFGNEKLTF

SEQ ID NO: 26578 - protein, 15 aa, Homo sapiens
  CDR3 for beta chain variable domain of TCR clone 13289 (TRBV7-9, TRBJ1-6)
CASSSPGRGNSPLHF

SEQ ID NO: 26579 - protein, 16 aa, Homo sapiens
  CDR3 for alpha chain variable domain of TCR clone 13290 (TRAV20, TRAJ22)
CAVQAPSSGSARQLTF

SEQ ID NO: 26580 - protein, 13 aa, Homo sapiens
  CDR3 for beta chain variable domain of TCR clone 13290 (TRBV7-2, TRBJ2-5)
CASSQTSVETQYF

SEQ ID NO: 26581 - protein, 17 aa, Homo sapiens
  CDR3 for alpha chain variable domain of TCR clone 13291 (TRAV3, TRAJ42)
CAVRDRDYGGSQGNLIF

SEQ ID NO: 26582 - protein, 15 aa, Homo sapiens
  CDR3 for beta chain variable domain of TCR clone 13291 (TRBV4-1, TRBJ2-5)
CASSQWDLYQETQYF

SEQ ID NO: 26583 - protein, 12 aa, Homo sapiens
  CDR3 for alpha chain variable domain of TCR clone 13292 (TRAV13-1, TRAJ43)
SVQQYNNNDMRF

SEQ ID NO: 26584 - protein, 15 aa, Homo sapiens
  CDR3 for beta chain variable domain of TCR clone 13292 (TRBV12-4, TRBJ2-5)
CASSPGSSRQGTQYF

SEQ ID NO: 26585 - protein, 13 aa, Homo sapiens
  CDR3 for alpha chain variable domain of TCR clone 13293 (TRAV13-2, TRAJ48)
CAEMDLGNEKLTF

SEQ ID NO: 26586 - protein, 15 aa, Homo sapiens
  CDR3 for beta chain variable domain of TCR clone 13293 (TRBV7-9, TRBJ1-6)
CASSSPGRGNSPLHF

SEQ ID NO: 26587 - protein, 11 aa, Homo sapiens
  CDR3 for alpha chain variable domain of TCR clone 13294 (TRAV1-2, TRAJ31)
CAVNNNAGLMF

SEQ ID NO: 26588 - protein, 15 aa, Homo sapiens
  CDR3 for beta chain variable domain of TCR clone 13294 (TRBV28, TRBJ2-1)
CASSIIAGGRSEQFF

SEQ ID NO: 26589 - protein, 14 aa, Homo sapiens
  CDR3 for alpha chain variable domain of TCR clone 13295 (TRAV12-2, TRAJ17)
CAVLFKAAGNKLTF

SEQ ID NO: 26590 - protein, 17 aa, Homo sapiens
  CDR3 for beta chain variable domain of TCR clone 13295 (TRBV20-1, TRBJ2-2)
CSAGGSGQGGLTGELFF

SEQ ID NO: 26591 - protein, 16 aa, Homo sapiens
  CDR3 for alpha chain variable domain of TCR clone 13296 (TRAV30, TRAJ24)
CGTGIVDADSWGKFQF

SEQ ID NO: 26592 - protein, 15 aa, Homo sapiens
  CDR3 for beta chain variable domain of TCR clone 13296 (TRBV20-1, TRBJ2-7)
CSARDRVSGMDEQYF

SEQ ID NO: 26593 - protein, 12 aa, Homo sapiens
  CDR3 for alpha chain variable domain of TCR clone 13297 (TRAV23/DV6, TRAJ16)
CAARGRGQKLLF

SEQ ID NO: 26594 - protein, 14 aa, Homo sapiens
  CDR3 for beta chain variable domain of TCR clone 13297 (TRBV4-1, TRBJ1-1)
CASSRSGQSFEAFF

SEQ ID NO: 26595 - protein, 14 aa, Homo sapiens
  CDR3 for alpha chain variable domain of TCR clone 13298 (TRAV1-1, TRAJ13)
CASPNSGGYQKVTF

SEQ ID NO: 26596 - protein, 16 aa, Homo sapiens
  CDR3 for beta chain variable domain of TCR clone 13298 (TRBV3-1, TRBJ2-2)
CASSPWTSGNTGELFF

SEQ ID NO: 26597 - protein, 17 aa, Homo sapiens
  CDR3 for alpha chain variable domain of TCR clone 13299 (TRAV3, TRAJ42)
CAARDRDYGGSQGNLIF

SEQ ID NO: 26598 - protein, 15 aa, Homo sapiens
  CDR3 for beta chain variable domain of TCR clone 13299 (TRBV6-6, TRBJ2-7)
CASSYSYGGSYEQYF

SEQ ID NO: 26599 - protein, 13 aa, Homo sapiens
  CDR3 for alpha chain variable domain of TCR clone 13300 (TRAV21, TRAJ27)
CAARPGNAGKSTF

SEQ ID NO: 26600 - protein, 14 aa, Homo sapiens
  CDR3 for beta chain variable domain of TCR clone 13300 (TRBV7-6, TRBJ2-3)
CASSLGTGTDTQYF

SEQ ID NO: 26601 - protein, 15 aa, Homo sapiens
  CDR3 for alpha chain variable domain of TCR clone 13301 (TRAV38-2/DV8, TRAJ28)
CAYRSRGAGSYQLTF

SEQ ID NO: 26602 - protein, 14 aa, Homo sapiens
  CDR3 for beta chain variable domain of TCR clone 13301 (TRBV7-9, TRBJ2-7)
CASSIGQGAGEQYF

SEQ ID NO: 26603 - protein, 11 aa, Homo sapiens
  CDR3 for alpha chain variable domain of TCR clone 13302 (TRAV23/DV6, TRAJ58)
CAARLLRGETS

SEQ ID NO: 26604 - protein, 13 aa, Homo sapiens
  CDR3 for beta chain variable domain of TCR clone 13302 (TRBV6-6, TRBJ2-3)
CASSQGGRDTQYF

SEQ ID NO: 26605 - protein, 14 aa, Homo sapiens
  CDR3 for alpha chain variable domain of TCR clone 13303 (TRAV13-1, TRAJ35)
CAASKGGFGNVLHC

SEQ ID NO: 26606 - protein, 13 aa, Homo sapiens
  CDR3 for beta chain variable domain of TCR clone 13303 (TRBV7-3, TRBJ1-1)
CACSQDWGAEAFF

SEQ ID NO: 26607 - protein, 15 aa, Homo sapiens
  CDR3 for alpha chain variable domain of TCR clone 13304 (TRAV8-4, TRAJ3)
CAVTGENLVQQCFQD

SEQ ID NO: 26608 - protein, 16 aa, Homo sapiens
  CDR3 for beta chain variable domain of TCR clone 13304 (TRBV5-7, TRBJ2-7)
PAANEGGGRGSYEQYF

SEQ ID NO: 26609 - protein, 14 aa, Homo sapiens
  CDR3 for alpha chain variable domain of TCR clone 13305 (TRAV38-1, TRAJ40)
CALRPTSVTYKYIF

SEQ ID NO: 26610 - protein, 14 aa, Homo sapiens
  CDR3 for beta chain variable domain of TCR clone 13305 (TRBV25-1, TRBJ1-1)
CASTHLGGNTEAFF

SEQ ID NO: 26611 - protein, 12 aa, Homo sapiens
  CDR3 for alpha chain variable domain of TCR clone 13306 (TRAV8-3, TRAJ20)
CAMGANDYKLSF

SEQ ID NO: 26612 - protein, 16 aa, Homo sapiens
  CDR3 for beta chain variable domain of TCR clone 13306 (TRBV19, TRBJ2-2)
CASRSPGTGATGELFF

SEQ ID NO: 26613 - protein, 14 aa, Homo sapiens
  CDR3 for alpha chain variable domain of TCR clone 13307 (TRAV12-2, TRAJ40)
CVVKIPSGTYKYIF

SEQ ID NO: 26614 - protein, 14 aa, Homo sapiens
  CDR3 for beta chain variable domain of TCR clone 13307 (TRBV20-1, TRBJ1-1)
CSAQTRIGGTEAFF

SEQ ID NO: 26615 - protein, 11 aa, Homo sapiens
  CDR3 for alpha chain variable domain of TCR clone 13308 (TRAV2, TRAJ13)
CASGGYQKVTF

SEQ ID NO: 26616 - protein, 16 aa, Homo sapiens
  CDR3 for beta chain variable domain of TCR clone 13308 (TRBV6-1, TRBJ2-5)
CASSGTLDRGAETQYF

SEQ ID NO: 26617 - protein, 16 aa, Homo sapiens
  CDR3 for alpha chain variable domain of TCR clone 13309 (TRAV30, TRAJ24)
CGTEIVDADSWGKFQF

SEQ ID NO: 26618 - protein, 13 aa, Homo sapiens
  CDR3 for beta chain variable domain of TCR clone 13309 (TRBV20-1, TRBJ1-1)
CSARVGGNTEAFF

SEQ ID NO: 26619 - protein, 12 aa, Homo sapiens
  CDR3 for alpha chain variable domain of TCR clone 13310 (TRAV17, TRAJ57)
CATDGGAEKLVF

SEQ ID NO: 26620 - protein, 13 aa, Homo sapiens
  CDR3 for beta chain variable domain of TCR clone 13310 (TRBV7-9, TRBJ2-7)
CASSFAGAYEQYF

SEQ ID NO: 26621 - protein, 16 aa, Homo sapiens
  CDR3 for alpha chain variable domain of TCR clone 13311 (TRAV3, TRAJ10)
CAVRDMGAGGGNKLTF

SEQ ID NO: 26622 - protein, 16 aa, Homo sapiens
  CDR3 for beta chain variable domain of TCR clone 13311 (TRBV19, TRBJ2-2)
CASSFPGQGLAGELFF

SEQ ID NO: 26623 - protein, 16 aa, Homo sapiens
  CDR3 for alpha chain variable domain of TCR clone 13312 (TRAV38-2/DV8, TRAJ47)
CAYRSAIMEYGNKLVF

SEQ ID NO: 26624 - protein, 14 aa, Homo sapiens
  CDR3 for beta chain variable domain of TCR clone 13312 (TRBV19, TRBJ2-7)
RASSIFAGTYEQYF

SEQ ID NO: 26625 - protein, 13 aa, Homo sapiens
  CDR3 for alpha chain variable domain of TCR clone 13313 (TRAV1-1, TRAJ9)
SAAKNTGGFKTIF

SEQ ID NO: 26626 - protein, 14 aa, Homo sapiens
  CDR3 for beta chain variable domain of TCR clone 13313 (TRBV20-1, TRBJ2-1)
CSAQIGGSANEQFF

SEQ ID NO: 26627 - protein, 13 aa, Homo sapiens
  CDR3 for alpha chain variable domain of TCR clone 13314 (TRAV30, TRAJ24)
CDTVTDSWGKLQF

SEQ ID NO: 26628 - protein, 14 aa, Homo sapiens
  CDR3 for beta chain variable domain of TCR clone 13314 (TRBV6-3, TRBJ2-2)
CASTYTPDTGELFF

SEQ ID NO: 26629 - protein, 15 aa, Homo sapiens
  CDR3 for alpha chain variable domain of TCR clone 13315 (TRAV3, TRAJ20)
CAVRDIKLIDYKLSF

SEQ ID NO: 26630 - protein, 15 aa, Homo sapiens
  CDR3 for beta chain variable domain of TCR clone 13315 (TRBV7-9, TRBJ1-6)
CASSSPGRGNSPLHF

SEQ ID NO: 26631 - protein, 12 aa, Homo sapiens
  CDR3 for alpha chain variable domain of TCR clone 13316 (TRAV12-3, TRAJ17)
CAMTLTGNKLTF

SEQ ID NO: 26632 - protein, 15 aa, Homo sapiens
  CDR3 for beta chain variable domain of TCR clone 13316 (TRBV20-1, TRBJ2-7)
CCARDRVSGMDEQYF

SEQ ID NO: 26633 - protein, 14 aa, Homo sapiens
  CDR3 for alpha chain variable domain of TCR clone 13317 (TRAV12-1, TRAJ17)
CVVNYKAAGNKPTF

SEQ ID NO: 26634 - protein, 17 aa, Homo sapiens
  CDR3 for beta chain variable domain of TCR clone 13317 (TRBV20-1, TRBJ2-1)
CSASSSGLAGSYNEQFF

SEQ ID NO: 26635 - protein, 12 aa, Homo sapiens
  CDR3 for alpha chain variable domain of TCR clone 13318 (TRAV5, TRAJ42)
CAVGGSQGNLIF

SEQ ID NO: 26636 - protein, 14 aa, Homo sapiens
  CDR3 for beta chain variable domain of TCR clone 13318 (TRBV10-2, TRBJ2-1)
CASSEGTSEDEQFF

SEQ ID NO: 26637 - protein, 13 aa, Homo sapiens
  CDR3 for alpha chain variable domain of TCR clone 13319 (TRAV20, TRAJ34)
CAVSSYNTDKLIF

SEQ ID NO: 26638 - protein, 13 aa, Homo sapiens
  CDR3 for beta chain variable domain of TCR clone 13319 (TRBV7-9, TRBJ1-2)
CASSSKQNYGYTF

SEQ ID NO: 26639 - protein, 12 aa, Homo sapiens
  CDR3 for alpha chain variable domain of TCR clone 13320 (TRAV21, TRAJ26)
CAVADYGQNFVF

SEQ ID NO: 26640 - protein, 12 aa, Homo sapiens
  CDR3 for beta chain variable domain of TCR clone 13320 (TRBV20-1, TRBJ2-7)
CSARDEVHEQYF

SEQ ID NO: 26641 - protein, 11 aa, Homo sapiens
  CDR3 for alpha chain variable domain of TCR clone 13321 (TRAV3, TRAJ21)
CAVGNFNKFYF

SEQ ID NO: 26642 - protein, 13 aa, Homo sapiens
  CDR3 for beta chain variable domain of TCR clone 13321 (TRBV20-1, TRBJ2-5)
CSAREAFQETQYF

SEQ ID NO: 26643 - protein, 14 aa, Homo sapiens
  CDR3 for alpha chain variable domain of TCR clone 13322 (TRAV13-1, TRAJ6)
CAASITGGSYIPTF

SEQ ID NO: 26644 - protein, 12 aa, Homo sapiens
  CDR3 for beta chain variable domain of TCR clone 13322 (TRBV11-2, TRBJ2-2)
CASSLGGGELFF

SEQ ID NO: 26645 - protein, 14 aa, Homo sapiens
  CDR3 for alpha chain variable domain of TCR clone 13323 (TRAV8-4, TRAJ45)
CASGGGGGADGLTF

SEQ ID NO: 26646 - protein, 13 aa, Homo sapiens
  CDR3 for beta chain variable domain of TCR clone 13323 (TRBV10-3, TRBJ2-7)
CASKLAVNYEQYF

SEQ ID NO: 26647 - protein, 12 aa, Homo sapiens
  CDR3 for alpha chain variable domain of TCR clone 13324 (TRAV13-2, TRAJ23)
CAERHRGGKLIF

SEQ ID NO: 26648 - protein, 16 aa, Homo sapiens
  CDR3 for beta chain variable domain of TCR clone 13324 (TRBV20-1, TRBJ1-4)
CSAPGQGVLTNEKLFF

SEQ ID NO: 26649 - protein, 15 aa, Homo sapiens
  CDR3 for alpha chain variable domain of TCR clone 13325 (TRAV2, TRAJ22)
CAVPSRGGSARRLTF

SEQ ID NO: 26650 - protein, 11 aa, Homo sapiens
  CDR3 for beta chain variable domain of TCR clone 13325 (TRBV27, TRBJ2-3)
CASSLGDTQYF

SEQ ID NO: 26651 - protein, 18 aa, Homo sapiens
  CDR3 for alpha chain variable domain of TCR clone 13326 (TRAV29/DV5, TRAJ52)
CAAGFRGAGGTSYGKLTL

SEQ ID NO: 26652 - protein, 16 aa, Homo sapiens
  CDR3 for beta chain variable domain of TCR clone 13326 (TRBV7-3, TRBJ2-2)
CASSLKRGTLSGELFF

SEQ ID NO: 26653 - protein, 14 aa, Homo sapiens
  CDR3 for alpha chain variable domain of TCR clone 13327 (TRAV8-4, TRAJ16)
CAVSPVGRWPGAAL

SEQ ID NO: 26654 - protein, 14 aa, Homo sapiens
  CDR3 for beta chain variable domain of TCR clone 13327 (TRBV23-1, TRBJ2-5)
CASSFLRSQETQYF

SEQ ID NO: 26655 - protein, 18 aa, Homo sapiens
  CDR3 for alpha chain variable domain of TCR clone 13328 (TRAV13-1, TRAJ52)
CAAKNPNAGGTSYGKLTF

SEQ ID NO: 26656 - protein, 14 aa, Homo sapiens
  CDR3 for beta chain variable domain of TCR clone 13328 (TRBV19, TRBJ2-1)
CASPTFVLSGEQFF

SEQ ID NO: 26657 - protein, 17 aa, Homo sapiens
  CDR3 for alpha chain variable domain of TCR clone 13329 (TRAV8-6, TRAJ58)
CAVGSWVGETSGSRLTF

SEQ ID NO: 26658 - protein, 14 aa, Homo sapiens
  CDR3 for beta chain variable domain of TCR clone 13329 (TRBV4-2, TRBJ2-1)
CASGLDRAYNEQFF

SEQ ID NO: 26659 - protein, 15 aa, Homo sapiens
  CDR3 for alpha chain variable domain of TCR clone 13330 (TRAV12-3, TRAJ6)
CAMSPASGGSYIPTF

SEQ ID NO: 26660 - protein, 16 aa, Homo sapiens
  CDR3 for beta chain variable domain of TCR clone 13330 (TRBV27, TRBJ2-2)
CASSSSGVSNTGELFF

SEQ ID NO: 26661 - protein, 12 aa, Homo sapiens
  CDR3 for alpha chain variable domain of TCR clone 13331 (TRAV16, TRAJ10)
CSRTGGGNKLTF

SEQ ID NO: 26662 - protein, 13 aa, Homo sapiens
  CDR3 for beta chain variable domain of TCR clone 13331 (TRBV7-9, TRBJ1-2)
CASSLKQNYGYTF

SEQ ID NO: 26663 - protein, 16 aa, Homo sapiens
  CDR3 for alpha chain variable domain of TCR clone 13332 (TRAV6, TRAJ43)
CARHKPRFGAGTRLTV

SEQ ID NO: 26664 - protein, 16 aa, Homo sapiens
  CDR3 for beta chain variable domain of TCR clone 13332 (TRBV6-5, TRBJ2-1)
CASSYSLAGGYNEQFF

SEQ ID NO: 26665 - protein, 18 aa, Homo sapiens
  CDR3 for alpha chain variable domain of TCR clone 13333 (TRAV13-1, TRAJ52)
CAASKGSAGGTSYGKLTF

SEQ ID NO: 26666 - protein, 13 aa, Homo sapiens
  CDR3 for beta chain variable domain of TCR clone 13333 (TRBV12-4, TRBJ1-2)
CASSLRQGKGYTF

SEQ ID NO: 26667 - protein, 14 aa, Homo sapiens
  CDR3 for alpha chain variable domain of TCR clone 13334 (TRAV13-1, TRAJ35)
CAAIKGGFGNVLHC

SEQ ID NO: 26668 - protein, 13 aa, Homo sapiens
  CDR3 for beta chain variable domain of TCR clone 13334 (TRBV7-3, TRBJ1-1)
CASSQDWGAEAFF

SEQ ID NO: 26669 - protein, 17 aa, Homo sapiens
  CDR3 for alpha chain variable domain of TCR clone 13335 (TRAV13-1, TRAJ31)
CAPRDRLMFGDGTKLVV

SEQ ID NO: 26670 - protein, 12 aa, Homo sapiens
  CDR3 for beta chain variable domain of TCR clone 13335 (TRBV7-9, TRBJ2-7)
CASSLEGYEQYF

SEQ ID NO: 26671 - protein, 17 aa, Homo sapiens
  CDR3 for alpha chain variable domain of TCR clone 13336 (TRAV14/DV4, TRAJ52)
CAMRGNAGGTSYGKLTF

SEQ ID NO: 26672 - protein, 16 aa, Homo sapiens
  CDR3 for beta chain variable domain of TCR clone 13336 (TRBV4-1, TRBJ2-4)
CASSLLRGTAKNIQYF

SEQ ID NO: 26673 - protein, 17 aa, Homo sapiens
  CDR3 for alpha chain variable domain of TCR clone 13337 (TRAV2, TRAJ36)
CAVEDRGNWGKQPLLWN

SEQ ID NO: 26674 - protein, 14 aa, Homo sapiens
  CDR3 for beta chain variable domain of TCR clone 13337 (TRBV7-9, TRBJ2-5)
CASSLDTAQETQYF

SEQ ID NO: 26675 - protein, 14 aa, Homo sapiens
  CDR3 for alpha chain variable domain of TCR clone 13338 (TRAV12-2, TRAJ15)
CAPHTGQAGTALIL

SEQ ID NO: 26676 - protein, 17 aa, Homo sapiens
  CDR3 for beta chain variable domain of TCR clone 13338 (TRBV5-5, TRBJ1-2)
CASSLGSLDGQSEGYTF

SEQ ID NO: 26677 - protein, 14 aa, Homo sapiens
  CDR3 for alpha chain variable domain of TCR clone 13339 (TRAV26-1, TRAJ38)
CIADNAGNDRKLIW

SEQ ID NO: 26678 - protein, 13 aa, Homo sapiens
  CDR3 for beta chain variable domain of TCR clone 13339 (TRBV20-1, TRBJ1-1)
CSARGGGNTEAFF

SEQ ID NO: 26679 - protein, 20 aa, Homo sapiens
  CDR3 for alpha chain variable domain of TCR clone 13340 (TRAV1-1, TRAJ39)
CLLLLRCEGSAYNAGNMLTF

SEQ ID NO: 26680 - protein, 13 aa, Homo sapiens
  CDR3 for beta chain variable domain of TCR clone 13340 (TRBV12-4, TRBJ1-5)
CASSPDRAQPQHF

SEQ ID NO: 26681 - protein, 16 aa, Homo sapiens
  CDR3 for alpha chain variable domain of TCR clone 13341 (TRAV14/DV4, TRAJ53)
CAMREGGGGSNYKLTF

SEQ ID NO: 26682 - protein, 12 aa, Homo sapiens
  CDR3 for beta chain variable domain of TCR clone 13341 (TRBV12-5, TRBJ2-3)
CASGGAADTQYF

SEQ ID NO: 26683 - protein, 11 aa, Homo sapiens
  CDR3 for alpha chain variable domain of TCR clone 13342 (TRAV3, TRAJ21)
CAVGNFNKFYF

SEQ ID NO: 26684 - protein, 13 aa, Homo sapiens
  CDR3 for beta chain variable domain of TCR clone 13342 (TRBV19, TRBJ1-2)
CASSVPGQDGYTF

SEQ ID NO: 26685 - protein, 13 aa, Homo sapiens
  CDR3 for alpha chain variable domain of TCR clone 13343 (TRAV2, TRAJ40)
CAVVTSGTYKYIF

SEQ ID NO: 26686 - protein, 15 aa, Homo sapiens
  CDR3 for beta chain variable domain of TCR clone 13343 (TRBV11-3, TRBJ2-3)
CASRKDGREGDTQYF

SEQ ID NO: 26687 - protein, 13 aa, Homo sapiens
  CDR3 for alpha chain variable domain of TCR clone 13344 (TRAV35, TRAJ42)
CAGFPGSQGNPIF

SEQ ID NO: 26688 - protein, 13 aa, Homo sapiens
  CDR3 for beta chain variable domain of TCR clone 13344 (TRBV29-1, TRBJ2-1)
CSVEGGRVNEQFF

SEQ ID NO: 26689 - protein, 14 aa, Homo sapiens
  CDR3 for alpha chain variable domain of TCR clone 13345 (TRAV1-2, TRAJ16)
CAVNRFSDGQKLLF

SEQ ID NO: 26690 - protein, 15 aa, Homo sapiens
  CDR3 for beta chain variable domain of TCR clone 13345 (TRBV7-9, TRBJ1-6)
CASSSPGRGNSHLHF

SEQ ID NO: 26691 - protein, 18 aa, Homo sapiens
  CDR3 for alpha chain variable domain of TCR clone 13346 (TRAV13-1, TRAJ52)
CAAKNPNAGGTSYGKLAF

SEQ ID NO: 26692 - protein, 15 aa, Homo sapiens
  CDR3 for beta chain variable domain of TCR clone 13346 (TRBV6-1, TRBJ2-3)
CASSERGGITDTQYF

SEQ ID NO: 26693 - protein, 12 aa, Homo sapiens
  CDR3 for alpha chain variable domain of TCR clone 13347 (TRAV13-2, TRAJ39)
CAESREGNMLTF

SEQ ID NO: 26694 - protein, 15 aa, Homo sapiens
  CDR3 for beta chain variable domain of TCR clone 13347 (TRBV10-2, TRBJ2-6)
CASSEQGTGANVLTF

SEQ ID NO: 26695 - protein, 15 aa, Homo sapiens
  CDR3 for alpha chain variable domain of TCR clone 13348 (TRAV26-1, TRAJ29)
CIVRVEGSGNTPLVF

SEQ ID NO: 26696 - protein, 14 aa, Homo sapiens
  CDR3 for beta chain variable domain of TCR clone 13348 (TRBV18, TRBJ2-5)
CASSPGVSRETQYF

SEQ ID NO: 26697 - protein, 13 aa, Homo sapiens
  CDR3 for alpha chain variable domain of TCR clone 13349 (TRAV2, TRAJ40)
CAVVTSGTYKYIF

SEQ ID NO: 26698 - protein, 14 aa, Homo sapiens
  CDR3 for beta chain variable domain of TCR clone 13349 (TRBV19, TRBJ2-1)
CASRTFVLSGEQFF

SEQ ID NO: 26699 - protein, 15 aa, Homo sapiens
  CDR3 for alpha chain variable domain of TCR clone 13350 (TRAV23/DV6, TRAJ45)
CAASSAGGGADGLTF

SEQ ID NO: 26700 - protein, 16 aa, Homo sapiens
  CDR3 for beta chain variable domain of TCR clone 13350 (TRBV6-6, TRBJ2-5)
CASSYDWAGGSETQYF

SEQ ID NO: 26701 - protein, 13 aa, Homo sapiens
  CDR3 for alpha chain variable domain of TCR clone 13351 (TRAV21, TRAJ27)
CSARPGNAGKSTF

SEQ ID NO: 26702 - protein, 14 aa, Homo sapiens
  CDR3 for beta chain variable domain of TCR clone 13351 (TRBV7-6, TRBJ2-3)
CASSLGTVTDTQYF

SEQ ID NO: 26703 - protein, 11 aa, Homo sapiens
  CDR3 for alpha chain variable domain of TCR clone 13352 (TRAV1-2, TRAJ40)
CAVPGTYKYIF

SEQ ID NO: 26704 - protein, 16 aa, Homo sapiens
  CDR3 for beta chain variable domain of TCR clone 13352 (TRBV29-1, TRBJ2-7)
CSVDVVGTSGSYEQYF

SEQ ID NO: 26705 - protein, 13 aa, Homo sapiens
  CDR3 for alpha chain variable domain of TCR clone 13353 (TRAV3, TRAJ29)
CAVRDIVDTPLVF

SEQ ID NO: 26706 - protein, 14 aa, Homo sapiens
  CDR3 for beta chain variable domain of TCR clone 13353 (TRBV27, TRBJ2-1)
CASSATGGYNEQFF

SEQ ID NO: 26707 - protein, 15 aa, Homo sapiens
  CDR3 for alpha chain variable domain of TCR clone 13354 (TRAV29/DV5, TRAJ42)
CAAIGYGGSQGNLIF

SEQ ID NO: 26708 - protein, 12 aa, Homo sapiens
  CDR3 for beta chain variable domain of TCR clone 13354 (TRBV7-8, TRBJ2-1)
CASSLGHNEQFF

SEQ ID NO: 26709 - protein, 14 aa, Homo sapiens
  CDR3 for alpha chain variable domain of TCR clone 13355 (TRAV8-3, TRAJ4)
CAVGAAGGDNKLIF

SEQ ID NO: 26710 - protein, 15 aa, Homo sapiens
  CDR3 for beta chain variable domain of TCR clone 13355 (TRBV6-5, TRBJ2-1)
CASSYDAGAGNEQFF

SEQ ID NO: 26711 - protein, 11 aa, Homo sapiens
  CDR3 for alpha chain variable domain of TCR clone 13356 (TRAV2, TRAJ33)
CAVDSNYQLIW

SEQ ID NO: 26712 - protein, 15 aa, Homo sapiens
  CDR3 for beta chain variable domain of TCR clone 13356 (TRBV19, TRBJ1-2)
CASSVGQVLSYGYTF

SEQ ID NO: 26713 - protein, 11 aa, Homo sapiens
  CDR3 for alpha chain variable domain of TCR clone 13357 (TRAV12-2, TRAJ10)
PLTGGGNKLTF

SEQ ID NO: 26714 - protein, 12 aa, Homo sapiens
  CDR3 for beta chain variable domain of TCR clone 13357 (TRBV14, TRBJ2-7)
CASSSLKGEQYF

SEQ ID NO: 26715 - protein, 16 aa, Homo sapiens
  CDR3 for alpha chain variable domain of TCR clone 13358 (TRAV12-3, TRAJ53)
CAMSPGSGGSNYKLTF

SEQ ID NO: 26716 - protein, 11 aa, Homo sapiens
  CDR3 for beta chain variable domain of TCR clone 13358 (TRBV7-2, TRBJ2-7)
CASSLGLAMHF

SEQ ID NO: 26717 - protein, 12 aa, Homo sapiens
  CDR3 for alpha chain variable domain of TCR clone 13359 (TRAV8-3, TRAJ20)
CAVGANDYKLSF

SEQ ID NO: 26718 - protein, 16 aa, Homo sapiens
  CDR3 for beta chain variable domain of TCR clone 13359 (TRBV19, TRBJ2-2)
CASRSPGTGTTGELFF

SEQ ID NO: 26719 - protein, 14 aa, Homo sapiens
  CDR3 for alpha chain variable domain of TCR clone 13360 (TRAV1-2, TRAJ16)
CAVNRFSDGQKLLF

SEQ ID NO: 26720 - protein, 14 aa, Homo sapiens
  CDR3 for beta chain variable domain of TCR clone 13360 (TRBV18, TRBJ2-5)
CASSPGVSQETQYF

SEQ ID NO: 26721 - protein, 10 aa, Homo sapiens
  CDR3 for alpha chain variable domain of TCR clone 13361 (TRAV12-2, TRAJ43)
CAGDDMRFGA

SEQ ID NO: 26722 - protein, 16 aa, Homo sapiens
  CDR3 for beta chain variable domain of TCR clone 13361 (TRBV2, TRBJ2-4)
CASSEAPGGEQNIQYF

SEQ ID NO: 26723 - protein, 17 aa, Homo sapiens
  CDR3 for alpha chain variable domain of TCR clone 13362 (TRAV17, TRAJ28)
CATDPRRGGAGSYQLTF

SEQ ID NO: 26724 - protein, 14 aa, Homo sapiens
  CDR3 for beta chain variable domain of TCR clone 13362 (TRBV19, TRBJ2-7)
CASRPGTGVNEQYF

SEQ ID NO: 26725 - protein, 15 aa, Homo sapiens
  CDR3 for alpha chain variable domain of TCR clone 13363 (TRAV8-3, TRAJ27)
CAVGPSKTNAGKSTF

SEQ ID NO: 26726 - protein, 15 aa, Homo sapiens
  CDR3 for beta chain variable domain of TCR clone 13363 (TRBV7-2, TRBJ2-1)
CASSSGLAGGNEQFL

SEQ ID NO: 26727 - protein, 19 aa, Homo sapiens
  CDR3 for alpha chain variable domain of TCR clone 13364 (TRAV26-1, TRAJ52)
CIVRAHRNAGGTSYGKLTF

SEQ ID NO: 26728 - protein, 15 aa, Homo sapiens
  CDR3 for beta chain variable domain of TCR clone 13364 (TRBV12-4, TRBJ2-5)
CAGSPPTGLQETQYF

SEQ ID NO: 26729 - protein, 11 aa, Homo sapiens
  CDR3 for alpha chain variable domain of TCR clone 13365 (TRAV1-1, TRAJ23)
CAVRQVGKLIF

SEQ ID NO: 26730 - protein, 20 aa, Homo sapiens
  CDR3 for beta chain variable domain of TCR clone 13365 (TRBV7-8, TRBJ2-2)
CASSHLFPGPTIHITGELFF

SEQ ID NO: 26731 - protein, 14 aa, Homo sapiens
  CDR3 for alpha chain variable domain of TCR clone 13366 (TRAV12-2, TRAJ17)
CAVLFKAAVNKLTF

SEQ ID NO: 26732 - protein, 17 aa, Homo sapiens
  CDR3 for beta chain variable domain of TCR clone 13366 (TRBV20-1, TRBJ2-2)
CSASGSGQGGLTGELFF

SEQ ID NO: 26733 - protein, 14 aa, Homo sapiens
  CDR3 for alpha chain variable domain of TCR clone 13367 (TRAV1-2, TRAJ16)
CAVNRFSDGQKLPF

SEQ ID NO: 26734 - protein, 14 aa, Homo sapiens
  CDR3 for beta chain variable domain of TCR clone 13367 (TRBV7-9, TRBJ2-3)
CASSLEDGTDTQYF

SEQ ID NO: 26735 - protein, 19 aa, Homo sapiens
  CDR3 for alpha chain variable domain of TCR clone 13368 (TRAV1-2, TRAJ26)
CLLPLCCERPDNYGQNFVF

SEQ ID NO: 26736 - protein, 13 aa, Homo sapiens
  CDR3 for beta chain variable domain of TCR clone 13368 (TRBV5-5, TRBJ1-2)
CASSFWRGEDYTF

SEQ ID NO: 26737 - protein, 15 aa, Homo sapiens
  CDR3 for alpha chain variable domain of TCR clone 13369 (TRAV13-1, TRAJ10)
CAASNPAGGGNKLTF

SEQ ID NO: 26738 - protein, 14 aa, Homo sapiens
  CDR3 for beta chain variable domain of TCR clone 13369 (TRBV7-2, TRBJ2-7)
CASSPKTSFYEQYF

SEQ ID NO: 26739 - protein, 16 aa, Homo sapiens
  CDR3 for alpha chain variable domain of TCR clone 13370 (TRAV4, TRAJ22)
CLVGDLYSGSARQLTF

SEQ ID NO: 26740 - protein, 16 aa, Homo sapiens
  CDR3 for beta chain variable domain of TCR clone 13370 (TRBV6-1, TRBJ2-5)
CASSETLDRGAETQYF

SEQ ID NO: 26741 - protein, 15 aa, Homo sapiens
  CDR3 for alpha chain variable domain of TCR clone 13371 (TRAV12-2, TRAJ43)
CAFDMRFGAGTRLTV

SEQ ID NO: 26742 - protein, 15 aa, Homo sapiens
  CDR3 for beta chain variable domain of TCR clone 13371 (TRBV20-1, TRBJ2-7)
CSARDRVSGMDEQYF

SEQ ID NO: 26743 - protein, 12 aa, Homo sapiens
  CDR3 for alpha chain variable domain of TCR clone 13372 (TRAV2, TRAJ31)
CAVEEGNARLVF

SEQ ID NO: 26744 - protein, 18 aa, Homo sapiens
  CDR3 for beta chain variable domain of TCR clone 13372 (TRBV7-9, TRBJ2-3)
CASSLDLAGLATPDTQYF

SEQ ID NO: 26745 - protein, 23 aa, Homo sapiens
  CDR3 for alpha chain variable domain of TCR clone 13373 (TRAV26-1, TRAJ38)
CIADNAGNNHIQNPDPAVYQLTD

SEQ ID NO: 26746 - protein, 13 aa, Homo sapiens
  CDR3 for beta chain variable domain of TCR clone 13373 (TRBV20-1, TRBJ1-1)
CSARGGGNTEAFF

SEQ ID NO: 26747 - protein, 12 aa, Homo sapiens
  CDR3 for alpha chain variable domain of TCR clone 13374 (TRAV8-3, TRAJ20)
CAVGANDYKLSF

SEQ ID NO: 26748 - protein, 16 aa, Homo sapiens
  CDR3 for beta chain variable domain of TCR clone 13374 (TRBV19, TRBJ2-2)
RASRSPGTGATGELFF

SEQ ID NO: 26749 - protein, 12 aa, Homo sapiens
  CDR3 for alpha chain variable domain of TCR clone 13375 (TRAV20, TRAJ30)
CAGGVGNDKIIF

SEQ ID NO: 26750 - protein, 14 aa, Homo sapiens
  CDR3 for beta chain variable domain of TCR clone 13375 (TRBV7-8, TRBJ2-3)
CASSLDRGTDTQYF

SEQ ID NO: 26751 - protein, 16 aa, Homo sapiens
  CDR3 for alpha chain variable domain of TCR clone 13376 (TRAV3, TRAJ37)
CAVRPHGSGNTGKLIF

SEQ ID NO: 26752 - protein, 12 aa, Homo sapiens
  CDR3 for beta chain variable domain of TCR clone 13376 (TRBV29-1, TRBJ2-3)
CSVTGGADTQYF

SEQ ID NO: 26753 - protein, 15 aa, Homo sapiens
  CDR3 for alpha chain variable domain of TCR clone 13377 (TRAV8-1, TRAJ6)
CAVNTPPGGGYIPTF

SEQ ID NO: 26754 - protein, 14 aa, Homo sapiens
  CDR3 for beta chain variable domain of TCR clone 13377 (TRBV12-4, TRBJ2-1)
CASSLGQGASEQFF

SEQ ID NO: 26755 - protein, 16 aa, Homo sapiens
  CDR3 for alpha chain variable domain of TCR clone 13378 (TRAV1-2, TRAJ10)
CAVRGVLTGGGNKLTF

SEQ ID NO: 26756 - protein, 15 aa, Homo sapiens
  CDR3 for beta chain variable domain of TCR clone 13378 (TRBV28, TRBJ1-2)
CASSSHSIANYGYTF

SEQ ID NO: 26757 - protein, 14 aa, Homo sapiens
  CDR3 for alpha chain variable domain of TCR clone 13379 (TRAV1-2, TRAJ16)
CAVNRFSDGQKLLF

SEQ ID NO: 26758 - protein, 12 aa, Homo sapiens
  CDR3 for beta chain variable domain of TCR clone 13379 (TRBV7-2, TRBJ1-6)
CASSLSSSPLHF

SEQ ID NO: 26759 - protein, 13 aa, Homo sapiens
  CDR3 for alpha chain variable domain of TCR clone 13380 (TRAV13-2, TRAJ48)
CAEMDFGNEKLTF

SEQ ID NO: 26760 - protein, 18 aa, Homo sapiens
  CDR3 for beta chain variable domain of TCR clone 13380 (TRBV20-1, TRBJ2-6)
CSAETTPTHGSGANVLTF

SEQ ID NO: 26761 - protein, 16 aa, Homo sapiens
  CDR3 for alpha chain variable domain of TCR clone 13381 (TRAV3, TRAJ40)
CAVRDRIASGTYKYIF

SEQ ID NO: 26762 - protein, 16 aa, Homo sapiens
  CDR3 for beta chain variable domain of TCR clone 13381 (TRBV2, TRBJ2-1)
CASRSPAGGKYNEQFF

SEQ ID NO: 26763 - protein, 15 aa, Homo sapiens
  CDR3 for alpha chain variable domain of TCR clone 13382 (TRAV8-2, TRAJ42)
CVVSAYMGSQGNLIL

SEQ ID NO: 26764 - protein, 11 aa, Homo sapiens
  CDR3 for beta chain variable domain of TCR clone 13382 (TRBV5-1, TRBJ2-1)
CASSIGQEQFF

SEQ ID NO: 26765 - protein, 13 aa, Homo sapiens
  CDR3 for alpha chain variable domain of TCR clone 13383 (TRAV13-2, TRAJ22)
CRDPSGSARQLTF

SEQ ID NO: 26766 - protein, 15 aa, Homo sapiens
  CDR3 for beta chain variable domain of TCR clone 13383 (TRBV11-3, TRBJ2-1)
CASSLAGQTYNEQFF

SEQ ID NO: 26767 - protein, 10 aa, Homo sapiens
  CDR3 for alpha chain variable domain of TCR clone 13384 (TRAV12-3, TRAJ49)
CAMNDDQFHF

SEQ ID NO: 26768 - protein, 13 aa, Homo sapiens
  CDR3 for beta chain variable domain of TCR clone 13384 (TRBV12-4, TRBJ1-1)
CASSPGTGFEAFF

SEQ ID NO: 26769 - protein, 16 aa, Homo sapiens
  CDR3 for alpha chain variable domain of TCR clone 13385 (TRAV30, TRAJ24)
CGTEIVDADSWGKFQF

SEQ ID NO: 26770 - protein, 15 aa, Homo sapiens
  CDR3 for beta chain variable domain of TCR clone 13385 (TRBV7-3, TRBJ2-1)
CASSPTGGGEVEQFF

SEQ ID NO: 26771 - protein, 15 aa, Homo sapiens
  CDR3 for alpha chain variable domain of TCR clone 13386 (TRAV38-1, TRAJ37)
CAFIFGSGNTGKLIF

SEQ ID NO: 26772 - protein, 12 aa, Homo sapiens
  CDR3 for beta chain variable domain of TCR clone 13386 (TRBV7-9, TRBJ2-7)
CASSLEGYEQYS

SEQ ID NO: 26773 - protein, 10 aa, Homo sapiens
  CDR3 for alpha chain variable domain of TCR clone 13387 (TRAV25, TRAJ34)
CAENTDKLIF

SEQ ID NO: 26774 - protein, 16 aa, Homo sapiens
  CDR3 for beta chain variable domain of TCR clone 13387 (TRBV7-9, TRBJ2-1)
CASSPRASSSYNEQFF

SEQ ID NO: 26775 - protein, 18 aa, Homo sapiens
  CDR3 for alpha chain variable domain of TCR clone 13388 (TRAV8-4, TRAJ52)
CAVTRANAGGTSYGKLTF

SEQ ID NO: 26776 - protein, 12 aa, Homo sapiens
  CDR3 for beta chain variable domain of TCR clone 13388 (TRBV14, TRBJ2-5)
CASSQLKETQYF

SEQ ID NO: 26777 - protein, 10 aa, Homo sapiens
  CDR3 for alpha chain variable domain of TCR clone 13389 (TRAV12-3, TRAJ49)
CAMNDDQLYF

SEQ ID NO: 26778 - protein, 13 aa, Homo sapiens
  CDR3 for beta chain variable domain of TCR clone 13389 (TRBV12-4, TRBJ1-1)
CASSPGTGFEAFF

SEQ ID NO: 26779 - protein, 17 aa, Homo sapiens
  CDR3 for alpha chain variable domain of TCR clone 13390 (TRAV3, TRAJ28)
CAVREAYSGAGSYQLTF

SEQ ID NO: 26780 - protein, 18 aa, Homo sapiens
  CDR3 for beta chain variable domain of TCR clone 13390 (TRBV27, TRBJ2-1)
CASGNRAVGAGSKNEQFF

SEQ ID NO: 26781 - protein, 12 aa, Homo sapiens
  CDR3 for alpha chain variable domain of TCR clone 13391 (TRAV20, TRAJ54)
CAVQEGAQKLVF

SEQ ID NO: 26782 - protein, 16 aa, Homo sapiens
  CDR3 for beta chain variable domain of TCR clone 13391 (TRBV13, TRBJ2-3)
CQQPLQGSGGRNTQYF

SEQ ID NO: 26783 - protein, 15 aa, Homo sapiens
  CDR3 for alpha chain variable domain of TCR clone 13392 (TRAV8-3, TRAJ27)
CAVGPSKTNAGKSTF

SEQ ID NO: 26784 - protein, 15 aa, Homo sapiens
  CDR3 for beta chain variable domain of TCR clone 13392 (TRBV7-2, TRBJ2-1)
CASSPGLAGGNEQFF

SEQ ID NO: 26785 - protein, 14 aa, Homo sapiens
  CDR3 for alpha chain variable domain of TCR clone 13393 (TRAV14/DV4, TRAJ42)
CPRGSLRSQGNLIF

SEQ ID NO: 26786 - protein, 16 aa, Homo sapiens
  CDR3 for beta chain variable domain of TCR clone 13393 (TRBV19, TRBJ2-1)
CASSKAGPSSYNEQFF

SEQ ID NO: 26787 - protein, 14 aa, Homo sapiens
  CDR3 for alpha chain variable domain of TCR clone 13394 (TRAV12-2, TRAJ13)
CAVKKTGGYQKVTI

SEQ ID NO: 26788 - protein, 15 aa, Homo sapiens
  CDR3 for beta chain variable domain of TCR clone 13394 (TRBV27, TRBJ2-1)
CASSNGGGSSNEQFF

SEQ ID NO: 26789 - protein, 13 aa, Homo sapiens
  CDR3 for alpha chain variable domain of TCR clone 13395 (TRAV21, TRAJ27)
CAARPGNAGKSTF

SEQ ID NO: 26790 - protein, 14 aa, Homo sapiens
  CDR3 for beta chain variable domain of TCR clone 13395 (TRBV7-6, TRBJ2-3)
CASSLGTFTDTQYF

SEQ ID NO: 26791 - protein, 13 aa, Homo sapiens
  CDR3 for alpha chain variable domain of TCR clone 13396 (TRAV1-1, TRAJ9)
CAAKNTGGFRTIF

SEQ ID NO: 26792 - protein, 14 aa, Homo sapiens
  CDR3 for beta chain variable domain of TCR clone 13396 (TRBV20-1, TRBJ2-1)
CSAQIGGSANEQFF

SEQ ID NO: 26793 - protein, 15 aa, Homo sapiens
  CDR3 for alpha chain variable domain of TCR clone 13397 (TRAV3, TRAJ22)
CAVRDRGGSARQLTF

SEQ ID NO: 26794 - protein, 16 aa, Homo sapiens
  CDR3 for beta chain variable domain of TCR clone 13397 (TRBV5-4, TRBJ2-3)
CASQQPGAGGADTQYL

SEQ ID NO: 26795 - protein, 11 aa, Homo sapiens
  CDR3 for alpha chain variable domain of TCR clone 13398 (TRAV27, TRAJ45)
CAGAQEEVLTD

SEQ ID NO: 26796 - protein, 14 aa, Homo sapiens
  CDR3 for beta chain variable domain of TCR clone 13398 (TRBV7-9, TRBJ2-1)
CASSSMVGFGEQFF

SEQ ID NO: 26797 - protein, 12 aa, Homo sapiens
  CDR3 for alpha chain variable domain of TCR clone 13399 (TRAV3, TRAJ20)
CAVRDGDYKLSF

SEQ ID NO: 26798 - protein, 13 aa, Homo sapiens
  CDR3 for beta chain variable domain of TCR clone 13399 (TRBV9, TRBJ2-1)
CASSVGRGGEQFF

SEQ ID NO: 26799 - protein, 12 aa, Homo sapiens
  CDR3 for alpha chain variable domain of TCR clone 13400 (TRAV8-3, TRAJ26)
CAGDNYGQNFFF

SEQ ID NO: 26800 - protein, 15 aa, Homo sapiens
  CDR3 for beta chain variable domain of TCR clone 13400 (TRBV9, TRBJ2-1)
CASSLAGSSYNEQFF

SEQ ID NO: 26801 - protein, 16 aa, Homo sapiens
  CDR3 for alpha chain variable domain of TCR clone 13401 (TRAV30, TRAJ24)
CGTEIVDADSWGKFQF

SEQ ID NO: 26802 - protein, 20 aa, Homo sapiens
  CDR3 for beta chain variable domain of TCR clone 13401 (TRBV28, TRBJ2-1)
CASTPIGRSPGLAGGNEQFF

SEQ ID NO: 26803 - protein, 13 aa, Homo sapiens
  CDR3 for alpha chain variable domain of TCR clone 13402 (TRAV27, TRAJ41)
CAGEGNSGYAPNF

SEQ ID NO: 26804 - protein, 14 aa, Homo sapiens
  CDR3 for beta chain variable domain of TCR clone 13402 (TRBV7-2, TRBJ1-1)
CASSFLTGTTEAFF

SEQ ID NO: 26805 - protein, 15 aa, Homo sapiens
  CDR3 for alpha chain variable domain of TCR clone 13403 (TRAV17, TRAJ45)
TSVLRTGGGADGLTF

SEQ ID NO: 26806 - protein, 15 aa, Homo sapiens
  CDR3 for beta chain variable domain of TCR clone 13403 (TRBV5-7, TRBJ1-5)
CASSHGKLWDQPQHF

SEQ ID NO: 26807 - protein, 16 aa, Homo sapiens
  CDR3 for alpha chain variable domain of TCR clone 13404 (TRAV26-1, TRAJ40)
CIVRVGTTSGTYKYIF

SEQ ID NO: 26808 - protein, 12 aa, Homo sapiens
  CDR3 for beta chain variable domain of TCR clone 13404 (TRBV7-9, TRBJ2-7)
CATRTDAYEQYF

SEQ ID NO: 26809 - protein, 14 aa, Homo sapiens
  CDR3 for alpha chain variable domain of TCR clone 13405 (TRAV1-1, TRAJ30)
CAVRSLNRDDKIIF

SEQ ID NO: 26810 - protein, 15 aa, Homo sapiens
  CDR3 for beta chain variable domain of TCR clone 13405 (TRBV27, TRBJ1-4)
CASSAQQDLSEKLFF

SEQ ID NO: 26811 - protein, 13 aa, Homo sapiens
  CDR3 for alpha chain variable domain of TCR clone 13406 (TRAV20, TRAJ37)
CSGCSSNTGKLIF

SEQ ID NO: 26812 - protein, 11 aa, Homo sapiens
  CDR3 for beta chain variable domain of TCR clone 13406 (TRBV12-4, TRBJ2-3)
CASTATDTQYF

SEQ ID NO: 26813 - protein, 13 aa, Homo sapiens
  CDR3 for alpha chain variable domain of TCR clone 13407 (TRAV41, TRAJ49)
CAAQGNTGNQFYF

SEQ ID NO: 26814 - protein, 14 aa, Homo sapiens
  CDR3 for beta chain variable domain of TCR clone 13407 (TRBV18, TRBJ2-7)
CASSLQRAVYEQYF

SEQ ID NO: 26815 - protein, 14 aa, Homo sapiens
  CDR3 for alpha chain variable domain of TCR clone 13408 (TRAV12-2, TRAJ13)
CAVKKTGGYQKVTF

SEQ ID NO: 26816 - protein, 16 aa, Homo sapiens
  CDR3 for beta chain variable domain of TCR clone 13408 (TRBV12-5, TRBJ2-7)
CASGSQGAPTSSTSGR

SEQ ID NO: 26817 - protein, 15 aa, Homo sapiens
  CDR3 for alpha chain variable domain of TCR clone 13409 (TRAV8-3, TRAJ27)
CALGPSKTNAGKSTF

SEQ ID NO: 26818 - protein, 15 aa, Homo sapiens
  CDR3 for beta chain variable domain of TCR clone 13409 (TRBV7-2, TRBJ2-1)
CASSSGLAGGNEQFF

SEQ ID NO: 26819 - protein, 14 aa, Homo sapiens
  CDR3 for alpha chain variable domain of TCR clone 13410 (TRAV9-2, TRAJ39)
CALYIYNAGNMLTF

SEQ ID NO: 26820 - protein, 15 aa, Homo sapiens
  CDR3 for beta chain variable domain of TCR clone 13410 (TRBV4-1, TRBJ1-4)
CASSDTGGTNEKLFF

SEQ ID NO: 26821 - protein, 11 aa, Homo sapiens
  CDR3 for alpha chain variable domain of TCR clone 13411 (TRAV17, TRAJ9)
CATTGGFKAIF

SEQ ID NO: 26822 - protein, 14 aa, Homo sapiens
  CDR3 for beta chain variable domain of TCR clone 13411 (TRBV7-9, TRBJ2-2)
CASSGLADTGELFF

SEQ ID NO: 26823 - protein, 18 aa, Homo sapiens
  CDR3 for alpha chain variable domain of TCR clone 13412 (TRAV21, TRAJ52)
CAVRPSPAGGTSYGKLTF

SEQ ID NO: 26824 - protein, 15 aa, Homo sapiens
  CDR3 for beta chain variable domain of TCR clone 13412 (TRBV6-3, TRBJ2-7)
CASSSPGTVFYEQYF

SEQ ID NO: 26825 - protein, 19 aa, Homo sapiens
  CDR3 for alpha chain variable domain of TCR clone 13413 (TRAV13-1, TRAJ52)
CAASPYQNAGGTSYGKLTF

SEQ ID NO: 26826 - protein, 14 aa, Homo sapiens
  CDR3 for beta chain variable domain of TCR clone 13413 (TRBV19, TRBJ2-7)
CASTAQGRPYEQYF

SEQ ID NO: 26827 - protein, 15 aa, Homo sapiens
  CDR3 for alpha chain variable domain of TCR clone 13414 (TRAV12-3, TRAJ11)
CAMSEENSGYSTLTF

SEQ ID NO: 26828 - protein, 16 aa, Homo sapiens
  CDR3 for beta chain variable domain of TCR clone 13414 (TRBV5-1, TRBJ2-7)
CTSSLEGLAGLYEQYF

SEQ ID NO: 26829 - protein, 11 aa, Homo sapiens
  CDR3 for alpha chain variable domain of TCR clone 13415 (TRAV21, TRAJ41)
CAVRSGYALNF

SEQ ID NO: 26830 - protein, 14 aa, Homo sapiens
  CDR3 for beta chain variable domain of TCR clone 13415 (TRBV6-1, TRBJ1-6)
CASSGTAYNSPLHF

SEQ ID NO: 26831 - protein, 17 aa, Homo sapiens
  CDR3 for alpha chain variable domain of TCR clone 13416 (TRAV3, TRAJ6)
CAVRDGPRAGGSYIPTF

SEQ ID NO: 26832 - protein, 14 aa, Homo sapiens
  CDR3 for beta chain variable domain of TCR clone 13416 (TRBV7-2, TRBJ2-7)
CASSPKTSFYDQYF

SEQ ID NO: 26833 - protein, 12 aa, Homo sapiens
  CDR3 for alpha chain variable domain of TCR clone 13417 (TRAV13-1, TRAJ48)
CAANFGNEKLTF

SEQ ID NO: 26834 - protein, 13 aa, Homo sapiens
  CDR3 for beta chain variable domain of TCR clone 13417 (TRBV7-3, TRBJ1-1)
CASSQDWGADAFF

SEQ ID NO: 26835 - protein, 14 aa, Homo sapiens
  CDR3 for alpha chain variable domain of TCR clone 13418 (TRAV12-3, TRAJ9)
CATSVETGGFKTIF

SEQ ID NO: 26836 - protein, 14 aa, Homo sapiens
  CDR3 for beta chain variable domain of TCR clone 13418 (TRBV7-2, TRBJ2-7)
CASRSQGAAYEQYF

SEQ ID NO: 26837 - protein, 13 aa, Homo sapiens
  CDR3 for alpha chain variable domain of TCR clone 13419 (TRAV12-3, TRAJ35)
CAMAIGFGNVLHC

SEQ ID NO: 26838 - protein, 15 aa, Homo sapiens
  CDR3 for beta chain variable domain of TCR clone 13419 (TRBV20-1, TRBJ2-1)
CSARGSGTYYNEQFF

SEQ ID NO: 26839 - protein, 17 aa, Homo sapiens
  CDR3 for alpha chain variable domain of TCR clone 13420 (TRAV3, TRAJ6)
CAVRDGPRAGGGYIPTF

SEQ ID NO: 26840 - protein, 13 aa, Homo sapiens
  CDR3 for beta chain variable domain of TCR clone 13420 (TRBV4-1, TRBJ2-2)
CASSQENTGELFF

SEQ ID NO: 26841 - protein, 23 aa, Homo sapiens
  CDR3 for alpha chain variable domain of TCR clone 13421 (TRAV26-1, TRAJ38)
CIADNAGNNHIQNPDPAVYQLRN

SEQ ID NO: 26842 - protein, 13 aa, Homo sapiens
  CDR3 for beta chain variable domain of TCR clone 13421 (TRBV20-1, TRBJ1-1)
CSARGGGNTEAFF

SEQ ID NO: 26843 - protein, 14 aa, Homo sapiens
  CDR3 for alpha chain variable domain of TCR clone 13422 (TRAV8-4, TRAJ13)
CAVTLSGGYQKVTL

SEQ ID NO: 26844 - protein, 14 aa, Homo sapiens
  CDR3 for beta chain variable domain of TCR clone 13422 (TRBV7-2, TRBJ1-2)
CASSQTGSTYGYTF

SEQ ID NO: 26845 - protein, 16 aa, Homo sapiens
  CDR3 for alpha chain variable domain of TCR clone 13423 (TRAV12-3, TRAJ53)
CAMSPGSGGSNYKLTF

SEQ ID NO: 26846 - protein, 14 aa, Homo sapiens
  CDR3 for beta chain variable domain of TCR clone 13423 (TRBV25-1, TRBJ1-1)
CASTHLGGNTEAFF

SEQ ID NO: 26847 - protein, 13 aa, Homo sapiens
  CDR3 for alpha chain variable domain of TCR clone 13424 (TRAV27, TRAJ49)
CAPRPYTGNQFYF

SEQ ID NO: 26848 - protein, 16 aa, Homo sapiens
  CDR3 for beta chain variable domain of TCR clone 13424 (TRBV4-1, TRBJ1-2)
CASSQDAGQVLYGYAF

SEQ ID NO: 26849 - protein, 13 aa, Homo sapiens
  CDR3 for alpha chain variable domain of TCR clone 13425 (TRAV6, TRAJ40)
CALVTSGTYKYIF

SEQ ID NO: 26850 - protein, 14 aa, Homo sapiens
  CDR3 for beta chain variable domain of TCR clone 13425 (TRBV11-2, TRBJ2-5)
CASRPLAGRETQYF

SEQ ID NO: 26851 - protein, 14 aa, Homo sapiens
  CDR3 for alpha chain variable domain of TCR clone 13426 (TRAV17, TRAJ16)
CATADLSDGQKLLF

SEQ ID NO: 26852 - protein, 15 aa, Homo sapiens
  CDR3 for beta chain variable domain of TCR clone 13426 (TRBV18, TRBJ2-1)
CASSPPSASYNEQFF

SEQ ID NO: 26853 - protein, 14 aa, Homo sapiens
  CDR3 for alpha chain variable domain of TCR clone 13427 (TRAV8-6, TRAJ13)
CAVRYSGGYQKVTF

SEQ ID NO: 26854 - protein, 14 aa, Homo sapiens
  CDR3 for beta chain variable domain of TCR clone 13427 (TRBV7-2, TRBJ1-5)
CASSRDGSNQPQHF

SEQ ID NO: 26855 - protein, 12 aa, Homo sapiens
  CDR3 for alpha chain variable domain of TCR clone 13428 (TRAV12-2, TRAJ36)
CAVRIGANNLFF

SEQ ID NO: 26856 - protein, 16 aa, Homo sapiens
  CDR3 for beta chain variable domain of TCR clone 13428 (TRBV18, TRBJ2-7)
CASSPLPGGLSYEQYF

SEQ ID NO: 26857 - protein, 14 aa, Homo sapiens
  CDR3 for alpha chain variable domain of TCR clone 13429 (TRAV13-1, TRAJ9)
CAASRPSGGFKTIF

SEQ ID NO: 26858 - protein, 14 aa, Homo sapiens
  CDR3 for beta chain variable domain of TCR clone 13429 (TRBV9, TRBJ2-2)
CASSVGFLTGELFF

SEQ ID NO: 26859 - protein, 17 aa, Homo sapiens
  CDR3 for alpha chain variable domain of TCR clone 13430 (TRAV3, TRAJ42)
CAVRDRDYGGSQGNLIF

SEQ ID NO: 26860 - protein, 13 aa, Homo sapiens
  CDR3 for beta chain variable domain of TCR clone 13430 (TRBV7-9, TRBJ1-2)
CASSLKQNYGYTF

SEQ ID NO: 26861 - protein, 17 aa, Homo sapiens
  CDR3 for alpha chain variable domain of TCR clone 13431 (TRAV3, TRAJ6)
CAERDGPRAGGSYIPTF

SEQ ID NO: 26862 - protein, 14 aa, Homo sapiens
  CDR3 for beta chain variable domain of TCR clone 13431 (TRBV7-2, TRBJ2-7)
CASSPKTSFYEQYF

SEQ ID NO: 26863 - protein, 12 aa, Homo sapiens
  CDR3 for alpha chain variable domain of TCR clone 13432 (TRAV8-2, TRAJ45)
CVQGGGADGLTF

SEQ ID NO: 26864 - protein, 13 aa, Homo sapiens
  CDR3 for beta chain variable domain of TCR clone 13432 (TRBV15, TRBJ1-6)
CATSGGLNSPLHF

SEQ ID NO: 26865 - protein, 17 aa, Homo sapiens
  CDR3 for alpha chain variable domain of TCR clone 13433 (TRAV3, TRAJ42)
CAVRDRDYGGSQGNLIF

SEQ ID NO: 26866 - protein, 15 aa, Homo sapiens
  CDR3 for beta chain variable domain of TCR clone 13433 (TRBV6-6, TRBJ2-7)
CASSYSYGGPYEQYF

SEQ ID NO: 26867 - protein, 15 aa, Homo sapiens
  CDR3 for alpha chain variable domain of TCR clone 13434 (TRAV8-3, TRAJ27)
CAVGPSKANAGKSTF

SEQ ID NO: 26868 - protein, 15 aa, Homo sapiens
  CDR3 for beta chain variable domain of TCR clone 13434 (TRBV7-2, TRBJ2-1)
CASSSGLAGGNEQFF

SEQ ID NO: 26869 - protein, 14 aa, Homo sapiens
  CDR3 for alpha chain variable domain of TCR clone 13435 (TRAV8-4, TRAJ9)
CAVRINTGGFKTIF

SEQ ID NO: 26870 - protein, 14 aa, Homo sapiens
  CDR3 for beta chain variable domain of TCR clone 13435 (TRBV12-5, TRBJ2-5)
CASGSRTHQETQYF

SEQ ID NO: 26871 - protein, 14 aa, Homo sapiens
  CDR3 for alpha chain variable domain of TCR clone 13436 (TRAV9-2, TRAJ39)
CALYIYNAGNMLTF

SEQ ID NO: 26872 - protein, 16 aa, Homo sapiens
  CDR3 for beta chain variable domain of TCR clone 13436 (TRBV15, TRBJ1-2)
CATSRGPRTGGGGYTF

SEQ ID NO: 26873 - protein, 15 aa, Homo sapiens
  CDR3 for alpha chain variable domain of TCR clone 13437 (TRAV21, TRAJ53)
CATLNSGGSNYKLTF

SEQ ID NO: 26874 - protein, 14 aa, Homo sapiens
  CDR3 for beta chain variable domain of TCR clone 13437 (TRBV6-1, TRBJ1-3)
CASVQGGGGNTIYF

SEQ ID NO: 26875 - protein, 12 aa, Homo sapiens
  CDR3 for alpha chain variable domain of TCR clone 13438 (TRAV8-3, TRAJ20)
CAVGANDYKLRF

SEQ ID NO: 26876 - protein, 16 aa, Homo sapiens
  CDR3 for beta chain variable domain of TCR clone 13438 (TRBV19, TRBJ2-2)
CASRSPGTGATGELFF

SEQ ID NO: 26877 - protein, 17 aa, Homo sapiens
  CDR3 for alpha chain variable domain of TCR clone 13439 (TRAV26-1, TRAJ53)
CTVRVDDSGGSNYKLTF

SEQ ID NO: 26878 - protein, 15 aa, Homo sapiens
  CDR3 for beta chain variable domain of TCR clone 13439 (TRBV20-1, TRBJ2-7)
CSARVPAAYFYEQYF

SEQ ID NO: 26879 - protein, 14 aa, Homo sapiens
  CDR3 for alpha chain variable domain of TCR clone 13440 (TRAV12-2, TRAJ13)
CAVKKTGGYQKVTF

SEQ ID NO: 26880 - protein, 15 aa, Homo sapiens
  CDR3 for beta chain variable domain of TCR clone 13440 (TRBV27, TRBJ2-1)
CASSNGGGFSNEQFF

SEQ ID NO: 26881 - protein, 16 aa, Homo sapiens
  CDR3 for alpha chain variable domain of TCR clone 13441 (TRAV14/DV4, TRAJ57)
CNERGLTQGGSEKLVF

SEQ ID NO: 26882 - protein, 13 aa, Homo sapiens
  CDR3 for beta chain variable domain of TCR clone 13441 (TRBV19, TRBJ2-7)
CASSPRQSYEQYF

SEQ ID NO: 26883 - protein, 23 aa, Homo sapiens
  CDR3 for alpha chain variable domain of TCR clone 13442 (TRAV26-1, TRAJ38)
CIADNAGNNHIQSPDPAVYQLRD

SEQ ID NO: 26884 - protein, 13 aa, Homo sapiens
  CDR3 for beta chain variable domain of TCR clone 13442 (TRBV20-1, TRBJ1-1)
CSARGGGNTEAFF

SEQ ID NO: 26885 - protein, 14 aa, Homo sapiens
  CDR3 for alpha chain variable domain of TCR clone 13443 (TRAV9-2, TRAJ39)
CALYIYNAGNMLTF

SEQ ID NO: 26886 - protein, 13 aa, Homo sapiens
  CDR3 for beta chain variable domain of TCR clone 13443 (TRBV12-4, TRBJ2-7)
CASSPTETYEQYF

SEQ ID NO: 26887 - protein, 18 aa, Homo sapiens
  CDR3 for alpha chain variable domain of TCR clone 13444 (TRAV26-2, TRAJ45)
CILRVDKYSGGGADGLTF

SEQ ID NO: 26888 - protein, 20 aa, Homo sapiens
  CDR3 for beta chain variable domain of TCR clone 13444 (TRBV7-8, TRBJ2-2)
CASSHLFPGPTIHITGELFF

SEQ ID NO: 26889 - protein, 14 aa, Homo sapiens
  CDR3 for alpha chain variable domain of TCR clone 13445 (TRAV12-2, TRAJ13)
CAVKKTGGYQKVTF

SEQ ID NO: 26890 - protein, 15 aa, Homo sapiens
  CDR3 for beta chain variable domain of TCR clone 13445 (TRBV7-2, TRBJ2-2)
CASRRPGQNTGELFF

SEQ ID NO: 26891 - protein, 15 aa, Homo sapiens
  CDR3 for alpha chain variable domain of TCR clone 13446 (TRAV3, TRAJ3)
CAVRDRDSSASKIIF

SEQ ID NO: 26892 - protein, 16 aa, Homo sapiens
  CDR3 for beta chain variable domain of TCR clone 13446 (TRBV12-4, TRBJ1-5)
CASSRPVGGSNQPQHF

SEQ ID NO: 26893 - protein, 13 aa, Homo sapiens
  CDR3 for alpha chain variable domain of TCR clone 13447 (TRAV12-3, TRAJ33)
CAMSVNSNHQLIW

SEQ ID NO: 26894 - protein, 13 aa, Homo sapiens
  CDR3 for beta chain variable domain of TCR clone 13447 (TRBV7-2, TRBJ2-2)
CASSLAVTGELFF

SEQ ID NO: 26895 - protein, 13 aa, Homo sapiens
  CDR3 for alpha chain variable domain of TCR clone 13448 (TRAV3, TRAJ27)
CAVRPLGAGKSTF

SEQ ID NO: 26896 - protein, 13 aa, Homo sapiens
  CDR3 for beta chain variable domain of TCR clone 13448 (TRBV7-9, TRBJ2-3)
CASGPGSTDTQYF

SEQ ID NO: 26897 - protein, 13 aa, Homo sapiens
  CDR3 for alpha chain variable domain of TCR clone 13449 (TRAV2, TRAJ15)
CAVASQAGTALIF

SEQ ID NO: 26898 - protein, 15 aa, Homo sapiens
  CDR3 for beta chain variable domain of TCR clone 13449 (TRBV7-8, TRBJ1-5)
CASSLEGSGNQPQHF

SEQ ID NO: 26899 - protein, 15 aa, Homo sapiens
  CDR3 for alpha chain variable domain of TCR clone 13450 (TRAV26-1, TRAJ29)
CIVRVEGSGNTPLVF

SEQ ID NO: 26900 - protein, 14 aa, Homo sapiens
  CDR3 for beta chain variable domain of TCR clone 13450 (TRBV7-9, TRBJ1-5)
CQQPRSPAQSAQHF

SEQ ID NO: 26901 - protein, 14 aa, Homo sapiens
  CDR3 for alpha chain variable domain of TCR clone 13451 (TRAV12-2, TRAJ13)
CDVKKTGGYQKVTF

SEQ ID NO: 26902 - protein, 15 aa, Homo sapiens
  CDR3 for beta chain variable domain of TCR clone 13451 (TRBV27, TRBJ2-1)
CASSNGGGSSNEQFF

SEQ ID NO: 26903 - protein, 12 aa, Homo sapiens
  CDR3 for alpha chain variable domain of TCR clone 13452 (TRAV13-1, TRAJ21)
CAAKEGFNKFYF

SEQ ID NO: 26904 - protein, 12 aa, Homo sapiens
  CDR3 for beta chain variable domain of TCR clone 13452 (TRBV7-8, TRBJ2-7)
CASSLGDREQYF

SEQ ID NO: 26905 - protein, 13 aa, Homo sapiens
  CDR3 for alpha chain variable domain of TCR clone 13453 (TRAV21, TRAJ27)
CAARPGNAGKSTF

SEQ ID NO: 26906 - protein, 14 aa, Homo sapiens
  CDR3 for beta chain variable domain of TCR clone 13453 (TRBV7-6, TRBJ2-3)
CASSLGTVTDTKYF

SEQ ID NO: 26907 - protein, 19 aa, Homo sapiens
  CDR3 for alpha chain variable domain of TCR clone 13454 (TRAV13-1, TRAJ52)
CAASPYQSAGGTSYGKLTF

SEQ ID NO: 26908 - protein, 13 aa, Homo sapiens
  CDR3 for beta chain variable domain of TCR clone 13454 (TRBV15, TRBJ2-7)
CATSTTGHYEQYF

SEQ ID NO: 26909 - protein, 11 aa, Homo sapiens
  CDR3 for alpha chain variable domain of TCR clone 13455 (TRAV2, TRAJ13)
CASGGYQKVTF

SEQ ID NO: 26910 - protein, 16 aa, Homo sapiens
  CDR3 for beta chain variable domain of TCR clone 13455 (TRBV6-1, TRBJ2-5)
CASSETLDRGAETRYF

SEQ ID NO: 26911 - protein, 11 aa, Homo sapiens
  CDR3 for alpha chain variable domain of TCR clone 13456 (TRAV12-3, TRAJ17)
CAMTLRQQANF

SEQ ID NO: 26912 - protein, 15 aa, Homo sapiens
  CDR3 for beta chain variable domain of TCR clone 13456 (TRBV20-1, TRBJ2-7)
CSARDRVSGMDEQYF

SEQ ID NO: 26913 - protein, 12 aa, Homo sapiens
  CDR3 for alpha chain variable domain of TCR clone 13457 (TRAV13-2, TRAJ23)
CAERHGGGKLIF

SEQ ID NO: 26914 - protein, 15 aa, Homo sapiens
  CDR3 for beta chain variable domain of TCR clone 13457 (TRBV19, TRBJ1-2)
CASSVGQVLNYGYTF

SEQ ID NO: 26915 - protein, 14 aa, Homo sapiens
  CDR3 for alpha chain variable domain of TCR clone 13458 (TRAV26-1, TRAJ38)
CIADNAGNNRQLIW

SEQ ID NO: 26916 - protein, 13 aa, Homo sapiens
  CDR3 for beta chain variable domain of TCR clone 13458 (TRBV20-1, TRBJ1-1)
CSARGGGNTEAFF

SEQ ID NO: 26917 - protein, 16 aa, Homo sapiens
  CDR3 for alpha chain variable domain of TCR clone 13459 (TRAV21, TRAJ37)
CAVRTAGSSNTGKPIF

SEQ ID NO: 26918 - protein, 13 aa, Homo sapiens
  CDR3 for beta chain variable domain of TCR clone 13459 (TRBV7-9, TRBJ2-5)
CASLPSGRETQYF

SEQ ID NO: 26919 - protein, 15 aa, Homo sapiens
  CDR3 for alpha chain variable domain of TCR clone 13460 (TRAV8-6, TRAJ48)
CAVSKANFGNEKLTF

SEQ ID NO: 26920 - protein, 14 aa, Homo sapiens
  CDR3 for beta chain variable domain of TCR clone 13460 (TRBV20-1, TRBJ2-1)
CSASLLDGYNEQFF

SEQ ID NO: 26921 - protein, 13 aa, Homo sapiens
  CDR3 for alpha chain variable domain of TCR clone 13461 (TRAV21, TRAJ27)
CAASPGNAGKSTF

SEQ ID NO: 26922 - protein, 14 aa, Homo sapiens
  CDR3 for beta chain variable domain of TCR clone 13461 (TRBV7-6, TRBJ2-3)
CASSLGTVTDTQYF

SEQ ID NO: 26923 - protein, 11 aa, Homo sapiens
  CDR3 for alpha chain variable domain of TCR clone 13462 (TRAV1-2, TRAJ20)
CAVANDYKLSF

SEQ ID NO: 26924 - protein, 14 aa, Homo sapiens
  CDR3 for beta chain variable domain of TCR clone 13462 (TRBV5-1, TRBJ2-3)
CASSLFGPTDTQYF

SEQ ID NO: 26925 - protein, 13 aa, Homo sapiens
  CDR3 for alpha chain variable domain of TCR clone 13463 (TRAV21, TRAJ9)
CAVRRSGGFKTIF

SEQ ID NO: 26926 - protein, 20 aa, Homo sapiens
  CDR3 for beta chain variable domain of TCR clone 13463 (TRBV28, TRBJ2-1)
CASTPIGRSPGLAGGNEQFF

SEQ ID NO: 26927 - protein, 15 aa, Homo sapiens
  CDR3 for alpha chain variable domain of TCR clone 13464 (TRAV8-2, TRAJ17)
CVVRHDQSCRQQANF

SEQ ID NO: 26928 - protein, 14 aa, Homo sapiens
  CDR3 for beta chain variable domain of TCR clone 13464 (TRBV11-2, TRBJ2-7)
CASSLELEGYEQYF

SEQ ID NO: 26929 - protein, 22 aa, Homo sapiens
  CDR3 for alpha chain variable domain of TCR clone 13465 (TRAV8-6, TRAJ6)
CAVTLGEEATYLHLEEGPALLF

SEQ ID NO: 26930 - protein, 15 aa, Homo sapiens
  CDR3 for beta chain variable domain of TCR clone 13465 (TRBV7-2, TRBJ1-1)
CASSPQGGANTEAFF

SEQ ID NO: 26931 - protein, 14 aa, Homo sapiens
  CDR3 for alpha chain variable domain of TCR clone 13466 (TRAV1-2, TRAJ16)
CAVNRFSDGQKLLF

SEQ ID NO: 26932 - protein, 15 aa, Homo sapiens
  CDR3 for beta chain variable domain of TCR clone 13466 (TRBV7-9, TRBJ1-4)
CASSATGGNNEKLFF

SEQ ID NO: 26933 - protein, 14 aa, Homo sapiens
  CDR3 for alpha chain variable domain of TCR clone 13467 (TRAV38-1, TRAJ29)
CAFITPSGNTPPVF

SEQ ID NO: 26934 - protein, 14 aa, Homo sapiens
  CDR3 for beta chain variable domain of TCR clone 13467 (TRBV18, TRBJ2-7)
CASSPRGGAYEQYF

SEQ ID NO: 26935 - protein, 14 aa, Homo sapiens
  CDR3 for alpha chain variable domain of TCR clone 13468 (TRAV12-2, TRAJ44)
CAVNPAGTASKLTF

SEQ ID NO: 26936 - protein, 13 aa, Homo sapiens
  CDR3 for beta chain variable domain of TCR clone 13468 (TRBV20-1, TRBJ1-6)
CSAPLGVGSPLLF

SEQ ID NO: 26937 - protein, 15 aa, Homo sapiens
  CDR3 for alpha chain variable domain of TCR clone 13469 (TRAV23/DV6, TRAJ18)
CAARYRGSTLGRLYF

SEQ ID NO: 26938 - protein, 13 aa, Homo sapiens
  CDR3 for beta chain variable domain of TCR clone 13469 (TRBV7-2, TRBJ2-7)
CASSSPGGSEQYF

SEQ ID NO: 26939 - protein, 14 aa, Homo sapiens
  CDR3 for alpha chain variable domain of TCR clone 13470 (TRAV1-2, TRAJ16)
CAVNRFSDGQKLLF

SEQ ID NO: 26940 - protein, 18 aa, Homo sapiens
  CDR3 for beta chain variable domain of TCR clone 13470 (TRBV7-9, TRBJ2-7)
CASSLTTSGSRTWYEQYF

SEQ ID NO: 26941 - protein, 14 aa, Homo sapiens
  CDR3 for alpha chain variable domain of TCR clone 13471 (TRAV26-1, TRAJ38)
CIADNAGNNRKLIW

SEQ ID NO: 26942 - protein, 14 aa, Homo sapiens
  CDR3 for beta chain variable domain of TCR clone 13471 (TRBV11-2, TRBJ2-5)
CASSRTGGIETQYF

SEQ ID NO: 26943 - protein, 14 aa, Homo sapiens
  CDR3 for alpha chain variable domain of TCR clone 13472 (TRAV12-1, TRAJ17)
CVVNYKATGNKLTF

SEQ ID NO: 26944 - protein, 17 aa, Homo sapiens
  CDR3 for beta chain variable domain of TCR clone 13472 (TRBV20-1, TRBJ2-1)
CSASSSGLAGSYNEQFF

SEQ ID NO: 26945 - protein, 14 aa, Homo sapiens
  CDR3 for alpha chain variable domain of TCR clone 13473 (TRAV1-2, TRAJ16)
CAVNRFSDGQKLLF

SEQ ID NO: 26946 - protein, 15 aa, Homo sapiens
  CDR3 for beta chain variable domain of TCR clone 13473 (TRBV7-9, TRBJ1-6)
CASSSPGRGNSPPHF

SEQ ID NO: 26947 - protein, 13 aa, Homo sapiens
  CDR3 for alpha chain variable domain of TCR clone 13474 (TRAV13-2, TRAJ48)
CAEMDFGNEKLTF

SEQ ID NO: 26948 - protein, 15 aa, Homo sapiens
  CDR3 for beta chain variable domain of TCR clone 13474 (TRBV7-9, TRBJ1-6)
CASSSPGRGNSPLHL

SEQ ID NO: 26949 - protein, 19 aa, Homo sapiens
  CDR3 for alpha chain variable domain of TCR clone 13475 (TRAV1-2, TRAJ26)
CLLPLCCERPDNYGQNFVF

SEQ ID NO: 26950 - protein, 16 aa, Homo sapiens
  CDR3 for beta chain variable domain of TCR clone 13475 (TRBV15, TRBJ2-3)
CATRLSGGRAPDTQYF

SEQ ID NO: 26951 - protein, 13 aa, Homo sapiens
  CDR3 for alpha chain variable domain of TCR clone 13476 (TRAV1-1, TRAJ9)
CAAKNTGGSKTIF

SEQ ID NO: 26952 - protein, 14 aa, Homo sapiens
  CDR3 for beta chain variable domain of TCR clone 13476 (TRBV20-1, TRBJ2-1)
CSAQIGGSANEQFF

SEQ ID NO: 26953 - protein, 15 aa, Homo sapiens
  CDR3 for alpha chain variable domain of TCR clone 13477 (TRAV26-1, TRAJ29)
CIVRVEGSGNPPLVF

SEQ ID NO: 26954 - protein, 14 aa, Homo sapiens
  CDR3 for beta chain variable domain of TCR clone 13477 (TRBV18, TRBJ2-5)
CASSPGVSQETQYF

SEQ ID NO: 26955 - protein, 11 aa, Homo sapiens
  CDR3 for alpha chain variable domain of TCR clone 13478 (TRAV12-3, TRAJ27)
CAMANAGKSTF

SEQ ID NO: 26956 - protein, 13 aa, Homo sapiens
  CDR3 for beta chain variable domain of TCR clone 13478 (TRBV20-1, TRBJ1-1)
CSARVGGNAEAFF

SEQ ID NO: 26957 - protein, 13 aa, Homo sapiens
  CDR3 for alpha chain variable domain of TCR clone 13479 (TRAV12-1, TRAJ33)
CGDAPDSNYQLIW

SEQ ID NO: 26958 - protein, 14 aa, Homo sapiens
  CDR3 for beta chain variable domain of TCR clone 13479 (TRBV7-2, TRBJ2-7)
CASSPKTSFYEQYF

SEQ ID NO: 26959 - protein, 14 aa, Homo sapiens
  CDR3 for alpha chain variable domain of TCR clone 13480 (TRAV26-1, TRAJ38)
CIADNAGNNHIQNP

SEQ ID NO: 26960 - protein, 13 aa, Homo sapiens
  CDR3 for beta chain variable domain of TCR clone 13480 (TRBV20-1, TRBJ1-1)
CSARGGGNTEAFF

SEQ ID NO: 26961 - protein, 15 aa, Homo sapiens
  CDR3 for alpha chain variable domain of TCR clone 13481 (TRAV8-2, TRAJ40)
CVVLGTTPGTYKYIF

SEQ ID NO: 26962 - protein, 16 aa, Homo sapiens
  CDR3 for beta chain variable domain of TCR clone 13481 (TRBV7-3, TRBJ2-1)
CASSLEGYRSYNEQFF

SEQ ID NO: 26963 - protein, 14 aa, Homo sapiens
  CDR3 for alpha chain variable domain of TCR clone 13482 (TRAV19, TRAJ49)
CALSEGNTGNQFYF

SEQ ID NO: 26964 - protein, 15 aa, Homo sapiens
  CDR3 for beta chain variable domain of TCR clone 13482 (TRBV10-3, TRBJ2-3)
CAISLTSGGTDTQYF

SEQ ID NO: 26965 - protein, 11 aa, Homo sapiens
  CDR3 for alpha chain variable domain of TCR clone 13483 (TRAV2, TRAJ33)
CAVESNYQLIW

SEQ ID NO: 26966 - protein, 15 aa, Homo sapiens
  CDR3 for beta chain variable domain of TCR clone 13483 (TRBV19, TRBJ1-1)
CASTSGRIQNTEAFF

SEQ ID NO: 26967 - protein, 14 aa, Homo sapiens
  CDR3 for alpha chain variable domain of TCR clone 13484 (TRAV3, TRAJ28)
CAVRRGAGSHQLTF

SEQ ID NO: 26968 - protein, 16 aa, Homo sapiens
  CDR3 for beta chain variable domain of TCR clone 13484 (TRBV4-1, TRBJ2-7)
CASSQEWTSGPLEQYF

SEQ ID NO: 26969 - protein, 14 aa, Homo sapiens
  CDR3 for alpha chain variable domain of TCR clone 13485 (TRAV21, TRAJ35)
CAVMPIGFGSVLHC

SEQ ID NO: 26970 - protein, 12 aa, Homo sapiens
  CDR3 for beta chain variable domain of TCR clone 13485 (TRBV7-9, TRBJ2-7)
CASSIKREEQYF

SEQ ID NO: 26971 - protein, 17 aa, Homo sapiens
  CDR3 for alpha chain variable domain of TCR clone 13486 (TRAV3, TRAJ42)
CAVRDRGYGGSQGNLIF

SEQ ID NO: 26972 - protein, 15 aa, Homo sapiens
  CDR3 for beta chain variable domain of TCR clone 13486 (TRBV6-6, TRBJ2-7)
CASSYSYGGSYEQYF

SEQ ID NO: 26973 - protein, 13 aa, Homo sapiens
  CDR3 for alpha chain variable domain of TCR clone 13487 (TRAV36/DV7, TRAJ49)
CAVEANTGNQFYF

SEQ ID NO: 26974 - protein, 13 aa, Homo sapiens
  CDR3 for beta chain variable domain of TCR clone 13487 (TRBV10-3, TRBJ2-7)
CASKLAVSYEQYF

SEQ ID NO: 26975 - protein, 17 aa, Homo sapiens
  CDR3 for alpha chain variable domain of TCR clone 13488 (TRAV4, TRAJ42)
CLVGVLNYGGSQGDLIF

SEQ ID NO: 26976 - protein, 12 aa, Homo sapiens
  CDR3 for beta chain variable domain of TCR clone 13488 (TRBV20-1, TRBJ2-1)
CSAQYTYNEQFF

SEQ ID NO: 26977 - protein, 13 aa, Homo sapiens
  CDR3 for alpha chain variable domain of TCR clone 13489 (TRAV2, TRAJ29)
CAVRNSGNTPLVF

SEQ ID NO: 26978 - protein, 14 aa, Homo sapiens
  CDR3 for beta chain variable domain of TCR clone 13489 (TRBV7-9, TRBJ2-7)
CASSLQQGGYEQYF

SEQ ID NO: 26979 - protein, 11 aa, Homo sapiens
  CDR3 for alpha chain variable domain of TCR clone 13490 (TRAV3, TRAJ21)
CAVGNFNKFYF

SEQ ID NO: 26980 - protein, 16 aa, Homo sapiens
  CDR3 for beta chain variable domain of TCR clone 13490 (TRBV19, TRBJ2-1)
YASSKAGPSSYNEQFF

SEQ ID NO: 26981 - protein, 11 aa, Homo sapiens
  CDR3 for alpha chain variable domain of TCR clone 13491 (TRAV2, TRAJ33)
CAVESNYQLIW

SEQ ID NO: 26982 - protein, 15 aa, Homo sapiens
  CDR3 for beta chain variable domain of TCR clone 13491 (TRBV19, TRBJ1-1)
CASTSGQIQNTEAVF

SEQ ID NO: 26983 - protein, 13 aa, Homo sapiens
  CDR3 for alpha chain variable domain of TCR clone 13492 (TRAV1-1, TRAJ9)
CAAKNTGGFKTIF

SEQ ID NO: 26984 - protein, 14 aa, Homo sapiens
  CDR3 for beta chain variable domain of TCR clone 13492 (TRBV20-1, TRBJ2-1)
CSAQIGGSANEQFL

SEQ ID NO: 26985 - protein, 16 aa, Homo sapiens
  CDR3 for alpha chain variable domain of TCR clone 13493 (TRAV30, TRAJ24)
CGTEIVDADSWGKFQF

SEQ ID NO: 26986 - protein, 14 aa, Homo sapiens
  CDR3 for beta chain variable domain of TCR clone 13493 (TRBV12-5, TRBJ2-5)
CASGSRTPQETQYF

SEQ ID NO: 26987 - protein, 12 aa, Homo sapiens
  CDR3 for alpha chain variable domain of TCR clone 13494 (TRAV12-3, TRAJ17)
CAMTLTGNKLTF

SEQ ID NO: 26988 - protein, 15 aa, Homo sapiens
  CDR3 for beta chain variable domain of TCR clone 13494 (TRBV20-1, TRBJ2-7)
CSARDRVSGMVEQYF

SEQ ID NO: 26989 - protein, 16 aa, Homo sapiens
  CDR3 for alpha chain variable domain of TCR clone 13495 (TRAV12-3, TRAJ53)
CAMSPGSGGSNYKLTF

SEQ ID NO: 26990 - protein, 11 aa, Homo sapiens
  CDR3 for beta chain variable domain of TCR clone 13495 (TRBV29-1, TRBJ2-5)
CSEDRMGTQYF

SEQ ID NO: 26991 - protein, 13 aa, Homo sapiens
  CDR3 for alpha chain variable domain of TCR clone 13496 (TRAV13-1, TRAJ5)
CAASDTGRRELTF

SEQ ID NO: 26992 - protein, 12 aa, Homo sapiens
  CDR3 for beta chain variable domain of TCR clone 13496 (TRBV28, TRBJ2-3)
CASSLYRDTQYF

SEQ ID NO: 26993 - protein, 14 aa, Homo sapiens
  CDR3 for alpha chain variable domain of TCR clone 13497 (TRAV2, TRAJ9)
CAVEDRSGGFKTIF

SEQ ID NO: 26994 - protein, 14 aa, Homo sapiens
  CDR3 for beta chain variable domain of TCR clone 13497 (TRBV25-1, TRBJ1-1)
CASTHLGGNTEAFF

SEQ ID NO: 26995 - protein, 14 aa, Homo sapiens
  CDR3 for alpha chain variable domain of TCR clone 13498 (TRAV12-1, TRAJ12)
CVVNGRDSSYKLIF

SEQ ID NO: 26996 - protein, 16 aa, Homo sapiens
  CDR3 for beta chain variable domain of TCR clone 13498 (TRBV12-5, TRBJ2-5)
CASGPRTSGNQETQYF

SEQ ID NO: 26997 - protein, 11 aa, Homo sapiens
  CDR3 for alpha chain variable domain of TCR clone 13499 (TRAV1-1, TRAJ23)
CAVRQGGKLIF

SEQ ID NO: 26998 - protein, 20 aa, Homo sapiens
  CDR3 for beta chain variable domain of TCR clone 13499 (TRBV7-8, TRBJ2-2)
CASSHLFPGQTIHITGELFF

SEQ ID NO: 26999 - protein, 18 aa, Homo sapiens
  CDR3 for alpha chain variable domain of TCR clone 13500 (TRAV13-1, TRAJ52)
CAAKNPNAGGTSYGKLTF

SEQ ID NO: 27000 - protein, 15 aa, Homo sapiens
  CDR3 for beta chain variable domain of TCR clone 13500 (TRBV6-1, TRBJ2-3)
CASSERGGVTDTQYF

SEQ ID NO: 27001 - protein, 17 aa, Homo sapiens
  CDR3 for alpha chain variable domain of TCR clone 13501 (TRAV13-1, TRAJ31)
CAPRDRLMFGDGTQLVV

SEQ ID NO: 27002 - protein, 12 aa, Homo sapiens
  CDR3 for beta chain variable domain of TCR clone 13501 (TRBV7-9, TRBJ2-7)
CASSVEGYEQYF

SEQ ID NO: 27003 - protein, 13 aa, Homo sapiens
  CDR3 for alpha chain variable domain of TCR clone 13502 (TRAV13-1, TRAJ5)
CAASDTGRRALTF

SEQ ID NO: 27004 - protein, 12 aa, Homo sapiens
  CDR3 for beta chain variable domain of TCR clone 13502 (TRBV28, TRBJ2-3)
CASSLHRDTQYF

SEQ ID NO: 27005 - protein, 11 aa, Homo sapiens
  CDR3 for alpha chain variable domain of TCR clone 13503 (TRAV1-1, TRAJ23)
CAVRQGGKLIF

SEQ ID NO: 27006 - protein, 20 aa, Homo sapiens
  CDR3 for beta chain variable domain of TCR clone 13503 (TRBV7-8, TRBJ2-2)
CASSHLFPRPTIHITGELFF

SEQ ID NO: 27007 - protein, 13 aa, Homo sapiens
  CDR3 for alpha chain variable domain of TCR clone 13504 (TRAV27, TRAJ41)
CAGEGNSGYALNF

SEQ ID NO: 27008 - protein, 14 aa, Homo sapiens
  CDR3 for beta chain variable domain of TCR clone 13504 (TRBV7-2, TRBJ1-1)
CASSFLTGTTEALF

SEQ ID NO: 27009 - protein, 12 aa, Homo sapiens
  CDR3 for alpha chain variable domain of TCR clone 13505 (TRAV13-2, TRAJ47)
CAEALYGNKLVF

SEQ ID NO: 27010 - protein, 17 aa, Homo sapiens
  CDR3 for beta chain variable domain of TCR clone 13505 (TRBV10-3, TRBJ1-1)
CAISESGTGGGTTEAFF

SEQ ID NO: 27011 - protein, 16 aa, Homo sapiens
  CDR3 for alpha chain variable domain of TCR clone 13506 (TRAV30, TRAJ24)
CGTEIVDADSWGKFQF

SEQ ID NO: 27012 - protein, 15 aa, Homo sapiens
  CDR3 for beta chain variable domain of TCR clone 13506 (TRBV12-4, TRBJ2-5)
CASSPPTGLQETQYF

SEQ ID NO: 27013 - protein, 15 aa, Homo sapiens
  CDR3 for alpha chain variable domain of TCR clone 13507 (TRAV23/DV6, TRAJ18)
CAARYRGSTLGRRYF

SEQ ID NO: 27014 - protein, 13 aa, Homo sapiens
  CDR3 for beta chain variable domain of TCR clone 13507 (TRBV7-2, TRBJ2-7)
CASSSPSGSEQYF

SEQ ID NO: 27015 - protein, 10 aa, Homo sapiens
  CDR3 for alpha chain variable domain of TCR clone 13508 (TRAV36/DV7, TRAJ31)
CAVGEARLMF

SEQ ID NO: 27016 - protein, 13 aa, Homo sapiens
  CDR3 for beta chain variable domain of TCR clone 13508 (TRBV6-5, TRBJ2-1)
CASSYELSNEQFF

SEQ ID NO: 27017 - protein, 14 aa, Homo sapiens
  CDR3 for alpha chain variable domain of TCR clone 13509 (TRAV8-6, TRAJ29)
CAVSGWAGNTPLVF

SEQ ID NO: 27018 - protein, 15 aa, Homo sapiens
  CDR3 for beta chain variable domain of TCR clone 13509 (TRBV6-3, TRBJ2-2)
CASRGMTVDTGELFF

SEQ ID NO: 27019 - protein, 15 aa, Homo sapiens
  CDR3 for alpha chain variable domain of TCR clone 13510 (TRAV8-6, TRAJ32)
CAVSALWWCYKQAHL

SEQ ID NO: 27020 - protein, 13 aa, Homo sapiens
  CDR3 for beta chain variable domain of TCR clone 13510 (TRBV11-2, TRBJ2-5)
CASGHGAKETQYF

SEQ ID NO: 27021 - protein, 16 aa, Homo sapiens
  CDR3 for alpha chain variable domain of TCR clone 13511 (TRAV12-3, TRAJ53)
CAMSPGSGGSNYKLTF

SEQ ID NO: 27022 - protein, 11 aa, Homo sapiens
  CDR3 for beta chain variable domain of TCR clone 13511 (TRBV29-1, TRBJ2-5)
GSEDRTGTQYF

SEQ ID NO: 27023 - protein, 15 aa, Homo sapiens
  CDR3 for alpha chain variable domain of TCR clone 13512 (TRAV17, TRAJ57)
CATGPSQGGSEKLVF

SEQ ID NO: 27024 - protein, 14 aa, Homo sapiens
  CDR3 for beta chain variable domain of TCR clone 13512 (TRBV25-1, TRBJ1-1)
CASTHLGGNTEAFF

SEQ ID NO: 27025 - protein, 15 aa, Homo sapiens
  CDR3 for alpha chain variable domain of TCR clone 13513 (TRAV8-3, TRAJ27)
CAVGPSTTNAGKSTF

SEQ ID NO: 27026 - protein, 15 aa, Homo sapiens
  CDR3 for beta chain variable domain of TCR clone 13513 (TRBV7-2, TRBJ2-1)
CASSSGLAGGNEQFF

SEQ ID NO: 27027 - protein, 13 aa, Homo sapiens
  CDR3 for alpha chain variable domain of TCR clone 13514 (TRAV9-2, TRAJ10)
CALATGGGNKLTF

SEQ ID NO: 27028 - protein, 17 aa, Homo sapiens
  CDR3 for beta chain variable domain of TCR clone 13514 (TRBV3-1, TRBJ2-5)
CASSNWGGTSGQETQYF

SEQ ID NO: 27029 - protein, 18 aa, Homo sapiens
  CDR3 for alpha chain variable domain of TCR clone 13515 (TRAV13-1, TRAJ52)
CAAKNTNAGGTSYGKLTF

SEQ ID NO: 27030 - protein, 15 aa, Homo sapiens
  CDR3 for beta chain variable domain of TCR clone 13515 (TRBV6-1, TRBJ2-3)
CASSERGGITDTQYF

SEQ ID NO: 27031 - protein, 14 aa, Homo sapiens
  CDR3 for alpha chain variable domain of TCR clone 13516 (TRAV9-2, TRAJ39)
CALYIYNAGNMLTF

SEQ ID NO: 27032 - protein, 13 aa, Homo sapiens
  CDR3 for beta chain variable domain of TCR clone 13516 (TRBV29-1, TRBJ2-1)
CSVEGGRVNEQFF

SEQ ID NO: 27033 - protein, 13 aa, Homo sapiens
  CDR3 for alpha chain variable domain of TCR clone 13517 (TRAV21, TRAJ57)
CAVTQGGSGKLVF

SEQ ID NO: 27034 - protein, 14 aa, Homo sapiens
  CDR3 for beta chain variable domain of TCR clone 13517 (TRBV5-1, TRBJ2-1)
CASSALWAGNEQFF

SEQ ID NO: 27035 - protein, 12 aa, Homo sapiens
  CDR3 for alpha chain variable domain of TCR clone 13518 (TRAV1-1, TRAJ8)
CAGGTGFQKLVF

SEQ ID NO: 27036 - protein, 15 aa, Homo sapiens
  CDR3 for beta chain variable domain of TCR clone 13518 (TRBV7-9, TRBJ1-4)
CASSRTGGFNEELFF

SEQ ID NO: 27037 - protein, 16 aa, Homo sapiens
  CDR3 for alpha chain variable domain of TCR clone 13519 (TRAV12-3, TRAJ53)
CAMSPGSGRSNYKLTF

SEQ ID NO: 27038 - protein, 11 aa, Homo sapiens
  CDR3 for beta chain variable domain of TCR clone 13519 (TRBV29-1, TRBJ2-5)
CSEDRTGTQYF

SEQ ID NO: 27039 - protein, 12 aa, Homo sapiens
  CDR3 for alpha chain variable domain of TCR clone 13520 (TRAV29/DV5, TRAJ26)
CAAILSGQNFVF

SEQ ID NO: 27040 - protein, 15 aa, Homo sapiens
  CDR3 for beta chain variable domain of TCR clone 13520 (TRBV19, TRBJ1-5)
CASSDSGPRNQPQHF

SEQ ID NO: 27041 - protein, 14 aa, Homo sapiens
  CDR3 for alpha chain variable domain of TCR clone 13521 (TRAV12-3, TRAJ10)
SHLPLTGGGNKLTF

SEQ ID NO: 27042 - protein, 12 aa, Homo sapiens
  CDR3 for beta chain variable domain of TCR clone 13521 (TRBV7-2, TRBJ1-6)
CASSLSSSPLHF

SEQ ID NO: 27043 - protein, 16 aa, Homo sapiens
  CDR3 for alpha chain variable domain of TCR clone 13522 (TRAV12-3, TRAJ53)
CAMSPGSGGSNYKLTF

SEQ ID NO: 27044 - protein, 11 aa, Homo sapiens
  CDR3 for beta chain variable domain of TCR clone 13522 (TRBV29-1, TRBJ2-5)
CSDDRTGTQYF

SEQ ID NO: 27045 - protein, 11 aa, Homo sapiens
  CDR3 for alpha chain variable domain of TCR clone 13523 (TRAV2, TRAJ13)
CASGGYQKVTF

SEQ ID NO: 27046 - protein, 16 aa, Homo sapiens
  CDR3 for beta chain variable domain of TCR clone 13523 (TRBV6-1, TRBJ2-5)
CASSEALDRGAETQYF

SEQ ID NO: 27047 - protein, 14 aa, Homo sapiens
  CDR3 for alpha chain variable domain of TCR clone 13524 (TRAV20, TRAJ56)
CAVQFGGANSKLTF

SEQ ID NO: 27048 - protein, 14 aa, Homo sapiens
  CDR3 for beta chain variable domain of TCR clone 13524 (TRBV20-1, TRBJ2-7)
CSAKRGRSAYEQYF

SEQ ID NO: 27049 - protein, 14 aa, Homo sapiens
  CDR3 for alpha chain variable domain of TCR clone 13525 (TRAV1-2, TRAJ16)
CAVNRFSDGQKLLF

SEQ ID NO: 27050 - protein, 14 aa, Homo sapiens
  CDR3 for beta chain variable domain of TCR clone 13525 (TRBV13, TRBJ2-7)
CASSLKGASYEQYF

SEQ ID NO: 27051 - protein, 17 aa, Homo sapiens
  CDR3 for alpha chain variable domain of TCR clone 13526 (TRAV29/DV5, TRAJ21)
CAASNKFYFGSGTKLNV

SEQ ID NO: 27052 - protein, 16 aa, Homo sapiens
  CDR3 for beta chain variable domain of TCR clone 13526 (TRBV27, TRBJ1-5)
CASSLSGGASNQPQHF

SEQ ID NO: 27053 - protein, 14 aa, Homo sapiens
  CDR3 for alpha chain variable domain of TCR clone 13527 (TRAV12-3, TRAJ9)
CAMSPNTGGFETIF

SEQ ID NO: 27054 - protein, 12 aa, Homo sapiens
  CDR3 for beta chain variable domain of TCR clone 13527 (TRBV19, TRBJ1-5)
CASSIAQQPQHF

SEQ ID NO: 27055 - protein, 11 aa, Homo sapiens
  CDR3 for alpha chain variable domain of TCR clone 13528 (TRAV3, TRAJ21)
CAVGNFNKFYF

SEQ ID NO: 27056 - protein, 15 aa, Homo sapiens
  CDR3 for beta chain variable domain of TCR clone 13528 (TRBV6-3, TRBJ2-7)
CASSSPGTVFYEQYF

SEQ ID NO: 27057 - protein, 14 aa, Homo sapiens
  CDR3 for alpha chain variable domain of TCR clone 13529 (TRAV9-2, TRAJ39)
CALYIYNAGNMLTF

SEQ ID NO: 27058 - protein, 12 aa, Homo sapiens
  CDR3 for beta chain variable domain of TCR clone 13529 (TRBV7-8, TRBJ2-7)
CASSLGDREQYF

SEQ ID NO: 27059 - protein, 14 aa, Homo sapiens
  CDR3 for alpha chain variable domain of TCR clone 13530 (TRAV38-1, TRAJ29)
CAFITPSGNTPLAF

SEQ ID NO: 27060 - protein, 14 aa, Homo sapiens
  CDR3 for beta chain variable domain of TCR clone 13530 (TRBV18, TRBJ2-7)
CASSPRGGAYEQYF

SEQ ID NO: 27061 - protein, 14 aa, Homo sapiens
  CDR3 for alpha chain variable domain of TCR clone 13531 (TRAV3, TRAJ9)
CAVRLNTGGFKTTF

SEQ ID NO: 27062 - protein, 15 aa, Homo sapiens
  CDR3 for beta chain variable domain of TCR clone 13531 (TRBV7-2, TRBJ2-1)
CASSLASGRVNEQFF

SEQ ID NO: 27063 - protein, 14 aa, Homo sapiens
  CDR3 for alpha chain variable domain of TCR clone 13532 (TRAV23/DV6, TRAJ58)
CAAAKETSGSRLTF

SEQ ID NO: 27064 - protein, 14 aa, Homo sapiens
  CDR3 for beta chain variable domain of TCR clone 13532 (TRBV5-1, TRBJ2-7)
CASSLFTGTHEQYF

SEQ ID NO: 27065 - protein, 15 aa, Homo sapiens
  CDR3 for alpha chain variable domain of TCR clone 13533 (TRAV26-1, TRAJ22)
CIARVSFWFCKATDL

SEQ ID NO: 27066 - protein, 13 aa, Homo sapiens
  CDR3 for beta chain variable domain of TCR clone 13533 (TRBV7-9, TRBJ1-2)
CASSLKQNYGYTF

SEQ ID NO: 27067 - protein, 14 aa, Homo sapiens
  CDR3 for alpha chain variable domain of TCR clone 13534 (TRAV12-3, TRAJ10)
SHLPLTGGGNKLTF

SEQ ID NO: 27068 - protein, 14 aa, Homo sapiens
  CDR3 for beta chain variable domain of TCR clone 13534 (TRBV18, TRBJ2-7)
CASSPRGGAYEQYF

SEQ ID NO: 27069 - protein, 18 aa, Homo sapiens
  CDR3 for alpha chain variable domain of TCR clone 13535 (TRAV21, TRAJ52)
CAVRPSPAGGSSYGKLTF

SEQ ID NO: 27070 - protein, 17 aa, Homo sapiens
  CDR3 for beta chain variable domain of TCR clone 13535 (TRBV13, TRBJ2-3)
CASSLSRVAGGRNTQYF

SEQ ID NO: 27071 - protein, 15 aa, Homo sapiens
  CDR3 for alpha chain variable domain of TCR clone 13536 (TRAV21, TRAJ38)
CAVRQDAGNNRKLIW

SEQ ID NO: 27072 - protein, 11 aa, Homo sapiens
  CDR3 for beta chain variable domain of TCR clone 13536 (TRBV29-1, TRBJ2-5)
CSEDRTGTQYF

SEQ ID NO: 27073 - protein, 15 aa, Homo sapiens
  CDR3 for alpha chain variable domain of TCR clone 13537 (TRAV20, TRAJ4)
CAVEGSSGGYNKLIF

SEQ ID NO: 27074 - protein, 14 aa, Homo sapiens
  CDR3 for beta chain variable domain of TCR clone 13537 (TRBV7-8, TRBJ2-7)
RASTLGGALGEQYF

SEQ ID NO: 27075 - protein, 13 aa, Homo sapiens
  CDR3 for alpha chain variable domain of TCR clone 13538 (TRAV3, TRAJ27)
CAVRPLGAGKSTF

SEQ ID NO: 27076 - protein, 13 aa, Homo sapiens
  CDR3 for beta chain variable domain of TCR clone 13538 (TRBV7-9, TRBJ2-3)
CASSPGSTDAQYF

SEQ ID NO: 27077 - protein, 14 aa, Homo sapiens
  CDR3 for alpha chain variable domain of TCR clone 13539 (TRAV35, TRAJ33)
CAGSSQDSNYQLIW

SEQ ID NO: 27078 - protein, 15 aa, Homo sapiens
  CDR3 for beta chain variable domain of TCR clone 13539 (TRBV12-4, TRBJ2-5)
CASSPPTGLQETQYF

SEQ ID NO: 27079 - protein, 20 aa, Homo sapiens
  CDR3 for alpha chain variable domain of TCR clone 13540 (TRAV1-1, TRAJ4)
CLLLLRCEGFLSSGYNKLIF

SEQ ID NO: 27080 - protein, 16 aa, Homo sapiens
  CDR3 for beta chain variable domain of TCR clone 13540 (TRBV28, TRBJ1-4)
CASSPPYRGRSEKLFF

SEQ ID NO: 27081 - protein, 15 aa, Homo sapiens
  CDR3 for alpha chain variable domain of TCR clone 13541 (TRAV3, TRAJ4)
CAVRDGTGGYNKLIF

SEQ ID NO: 27082 - protein, 10 aa, Homo sapiens
  CDR3 for beta chain variable domain of TCR clone 13541 (TRBV6-3, TRBJ2-2)
GVSNTGELFF

SEQ ID NO: 27083 - protein, 14 aa, Homo sapiens
  CDR3 for alpha chain variable domain of TCR clone 13542 (TRAV26-1, TRAJ38)
CIADNAGNNRKLIW

SEQ ID NO: 27084 - protein, 14 aa, Homo sapiens
  CDR3 for beta chain variable domain of TCR clone 13542 (TRBV7-3, TRBJ1-1)
CASSLKGGNTEAFF

SEQ ID NO: 27085 - protein, 13 aa, Homo sapiens
  CDR3 for alpha chain variable domain of TCR clone 13543 (TRAV8-3, TRAJ48)
CAVVPFGNEKLTF

SEQ ID NO: 27086 - protein, 15 aa, Homo sapiens
  CDR3 for beta chain variable domain of TCR clone 13543 (TRBV11-2, TRBJ2-1)
CASSSPSTRYNEQFL

SEQ ID NO: 27087 - protein, 15 aa, Homo sapiens
  CDR3 for alpha chain variable domain of TCR clone 13544 (TRAV3, TRAJ5)
CAVRDLDTGSRALTF

SEQ ID NO: 27088 - protein, 13 aa, Homo sapiens
  CDR3 for beta chain variable domain of TCR clone 13544 (TRBV12-4, TRBJ2-7)
CASSPTETYEQYF

SEQ ID NO: 27089 - protein, 13 aa, Homo sapiens
  CDR3 for alpha chain variable domain of TCR clone 13545 (TRAV2, TRAJ15)
CAVASQAGTALIL

SEQ ID NO: 27090 - protein, 16 aa, Homo sapiens
  CDR3 for beta chain variable domain of TCR clone 13545 (TRBV5-1, TRBJ1-1)
CASSSGGNSLNTEAFF

SEQ ID NO: 27091 - protein, 13 aa, Homo sapiens
  CDR3 for alpha chain variable domain of TCR clone 13546 (TRAV12-2, TRAJ20)
CAVYPSNDYKLSF

SEQ ID NO: 27092 - protein, 15 aa, Homo sapiens
  CDR3 for beta chain variable domain of TCR clone 13546 (TRBV27, TRBJ2-5)
CASSLYPRGGGTQYF

SEQ ID NO: 27093 - protein, 11 aa, Homo sapiens
  CDR3 for alpha chain variable domain of TCR clone 13547 (TRAV17, TRAJ9)
CATTGGFKTIF

SEQ ID NO: 27094 - protein, 14 aa, Homo sapiens
  CDR3 for beta chain variable domain of TCR clone 13547 (TRBV7-9, TRBJ2-2)
RASSGLADTGELFF

SEQ ID NO: 27095 - protein, 16 aa, Homo sapiens
  CDR3 for alpha chain variable domain of TCR clone 13548 (TRAV38-1, TRAJ42)
CAFMKLGGGSQGNLIF

SEQ ID NO: 27096 - protein, 16 aa, Homo sapiens
  CDR3 for beta chain variable domain of TCR clone 13548 (TRBV20-1, TRBJ1-4)
CSAPGQGLLTNEKLFF

SEQ ID NO: 27097 - protein, 12 aa, Homo sapiens
  CDR3 for alpha chain variable domain of TCR clone 13549 (TRAV12-2, TRAJ17)
CAMTLTGNKLTF

SEQ ID NO: 27098 - protein, 15 aa, Homo sapiens
  CDR3 for beta chain variable domain of TCR clone 13549 (TRBV20-1, TRBJ2-7)
CSARDRVSGMDEQYF

SEQ ID NO: 27099 - protein, 14 aa, Homo sapiens
  CDR3 for alpha chain variable domain of TCR clone 13550 (TRAV1-2, TRAJ8)
CAVREDTGFQKLVF

SEQ ID NO: 27100 - protein, 15 aa, Homo sapiens
  CDR3 for beta chain variable domain of TCR clone 13550 (TRBV6-3, TRBJ2-7)
CASSSPGTVFYEHYF

SEQ ID NO: 27101 - protein, 13 aa, Homo sapiens
  CDR3 for alpha chain variable domain of TCR clone 13551 (TRAV13-1, TRAJ43)
CAASKNNNNDMRF

SEQ ID NO: 27102 - protein, 13 aa, Homo sapiens
  CDR3 for beta chain variable domain of TCR clone 13551 (TRBV7-3, TRBJ1-1)
CASSQDWGAEAFF

SEQ ID NO: 27103 - protein, 14 aa, Homo sapiens
  CDR3 for alpha chain variable domain of TCR clone 13552 (TRAV2, TRAJ37)
CAVDFTGNTGKLIF

SEQ ID NO: 27104 - protein, 15 aa, Homo sapiens
  CDR3 for beta chain variable domain of TCR clone 13552 (TRBV20-1, TRBJ1-1)
CSASRGVTGNTEAFF

SEQ ID NO: 27105 - protein, 11 aa, Homo sapiens
  CDR3 for alpha chain variable domain of TCR clone 13553 (TRAV9-2, TRAJ13)
CAQGGYQKVTF

SEQ ID NO: 27106 - protein, 13 aa, Homo sapiens
  CDR3 for beta chain variable domain of TCR clone 13553 (TRBV5-1, TRBJ1-2)
CASSSTGVYGYTF

SEQ ID NO: 27107 - protein, 13 aa, Homo sapiens
  CDR3 for alpha chain variable domain of TCR clone 13554 (TRAV25, TRAJ44)
LILGTGTASKLTF

SEQ ID NO: 27108 - protein, 12 aa, Homo sapiens
  CDR3 for beta chain variable domain of TCR clone 13554 (TRBV29-1, TRBJ1-3)
CSTRDSGNTIYF

SEQ ID NO: 27109 - protein, 17 aa, Homo sapiens
  CDR3 for alpha chain variable domain of TCR clone 13555 (TRAV3, TRAJ42)
CAVRDRDYGGSQGNLIF

SEQ ID NO: 27110 - protein, 17 aa, Homo sapiens
  CDR3 for beta chain variable domain of TCR clone 13555 (TRBV13, TRBJ2-3)
CASSLSRVAGGRNTQYF

SEQ ID NO: 27111 - protein, 14 aa, Homo sapiens
  CDR3 for alpha chain variable domain of TCR clone 13556 (TRAV16, TRAJ33)
CALSAMDSNYQLIC

SEQ ID NO: 27112 - protein, 12 aa, Homo sapiens
  CDR3 for beta chain variable domain of TCR clone 13556 (TRBV5-1, TRBJ1-2)
CASSQDTYGYTF

SEQ ID NO: 27113 - protein, 14 aa, Homo sapiens
  CDR3 for alpha chain variable domain of TCR clone 13557 (TRAV12-1, TRAJ12)
CVVTSGDSSYKLIF

SEQ ID NO: 27114 - protein, 13 aa, Homo sapiens
  CDR3 for beta chain variable domain of TCR clone 13557 (TRBV20-1, TRBJ1-1)
CSPRGGGNTEAFF

SEQ ID NO: 27115 - protein, 18 aa, Homo sapiens
  CDR3 for alpha chain variable domain of TCR clone 13558 (TRAV13-1, TRAJ52)
CAAKNPNAGGTSYGRLTF

SEQ ID NO: 27116 - protein, 15 aa, Homo sapiens
  CDR3 for beta chain variable domain of TCR clone 13558 (TRBV28, TRBJ2-3)
CASSPDRQGANTQYF

SEQ ID NO: 27117 - protein, 17 aa, Homo sapiens
  CDR3 for alpha chain variable domain of TCR clone 13559 (TRAV3, TRAJ6)
CAVRDGPRAGGSYIPTF

SEQ ID NO: 27118 - protein, 16 aa, Homo sapiens
  CDR3 for beta chain variable domain of TCR clone 13559 (TRBV7-2, TRBJ2-7)
CASSPRLVSTSSTSGR

SEQ ID NO: 27119 - protein, 13 aa, Homo sapiens
  CDR3 for alpha chain variable domain of TCR clone 13560 (TRAV8-1, TRAJ28)
CAVSGAGSYQLTF

SEQ ID NO: 27120 - protein, 16 aa, Homo sapiens
  CDR3 for beta chain variable domain of TCR clone 13560 (TRBV27, TRBJ2-1)
SMNVEPGTSGDNEQFF

SEQ ID NO: 27121 - protein, 14 aa, Homo sapiens
  CDR3 for alpha chain variable domain of TCR clone 13561 (TRAV14/DV4, TRAJ49)
CAMREGVNGNQFYF

SEQ ID NO: 27122 - protein, 13 aa, Homo sapiens
  CDR3 for beta chain variable domain of TCR clone 13561 (TRBV19, TRBJ2-7)
CASSMRGSYEQYF

SEQ ID NO: 27123 - protein, 14 aa, Homo sapiens
  CDR3 for alpha chain variable domain of TCR clone 13562 (TRAV12-2, TRAJ13)
CAVKKTGGYQKVTF

SEQ ID NO: 27124 - protein, 15 aa, Homo sapiens
  CDR3 for beta chain variable domain of TCR clone 13562 (TRBV27, TRBJ2-1)
CASSNGGGPPMSSSS

SEQ ID NO: 27125 - protein, 13 aa, Homo sapiens
  CDR3 for alpha chain variable domain of TCR clone 13563 (TRAV29/DV5, TRAJ33)
CAASVESNYQLIW

SEQ ID NO: 27126 - protein, 13 aa, Homo sapiens
  CDR3 for beta chain variable domain of TCR clone 13563 (TRBV5-1, TRBJ1-5)
CASSLGSNQPQHF

SEQ ID NO: 27127 - protein, 14 aa, Homo sapiens
  CDR3 for alpha chain variable domain of TCR clone 13564 (TRAV12-3, TRAJ9)
CAMSPNTGGFKTIF

SEQ ID NO: 27128 - protein, 12 aa, Homo sapiens
  CDR3 for beta chain variable domain of TCR clone 13564 (TRBV19, TRBJ1-5)
CASSIARQPQHF

SEQ ID NO: 27129 - protein, 12 aa, Homo sapiens
  CDR3 for alpha chain variable domain of TCR clone 13565 (TRAV17, TRAJ12)
CATLRSRYKLIF

SEQ ID NO: 27130 - protein, 16 aa, Homo sapiens
  CDR3 for beta chain variable domain of TCR clone 13565 (TRBV28, TRBJ2-7)
CASSLFFETGGPEQYF

SEQ ID NO: 27131 - protein, 16 aa, Homo sapiens
  CDR3 for alpha chain variable domain of TCR clone 13566 (TRAV12-3, TRAJ53)
CAMSPGSGGSNYKRTF

SEQ ID NO: 27132 - protein, 11 aa, Homo sapiens
  CDR3 for beta chain variable domain of TCR clone 13566 (TRBV29-1, TRBJ2-5)
CSEDRTGTQYF

SEQ ID NO: 27133 - protein, 13 aa, Homo sapiens
  CDR3 for alpha chain variable domain of TCR clone 13567 (TRAV17, TRAJ26)
CATVDNYGQNFVF

SEQ ID NO: 27134 - protein, 16 aa, Homo sapiens
  CDR3 for beta chain variable domain of TCR clone 13567 (TRBV2, TRBJ2-1)
CASSVGGSLSYNGQFF

SEQ ID NO: 27135 - protein, 14 aa, Homo sapiens
  CDR3 for alpha chain variable domain of TCR clone 13568 (TRAV1-2, TRAJ16)
CAVNRFSDGQKLLF

SEQ ID NO: 27136 - protein, 15 aa, Homo sapiens
  CDR3 for beta chain variable domain of TCR clone 13568 (TRBV7-3, TRBJ2-2)
CASSETGQGTGELFF

SEQ ID NO: 27137 - protein, 13 aa, Homo sapiens
  CDR3 for alpha chain variable domain of TCR clone 13569 (TRAV13-2, TRAJ48)
CAEMDFGNGKLTF

SEQ ID NO: 27138 - protein, 15 aa, Homo sapiens
  CDR3 for beta chain variable domain of TCR clone 13569 (TRBV7-9, TRBJ1-6)
CASSSPGRGNSPLHF

SEQ ID NO: 27139 - protein, 15 aa, Homo sapiens
  CDR3 for alpha chain variable domain of TCR clone 13570 (TRAV17, TRAJ57)
CATGPSQGGPEKLVF

SEQ ID NO: 27140 - protein, 14 aa, Homo sapiens
  CDR3 for beta chain variable domain of TCR clone 13570 (TRBV12-5, TRBJ2-5)
CASGSRTHQETQYF

SEQ ID NO: 27141 - protein, 16 aa, Homo sapiens
  CDR3 for alpha chain variable domain of TCR clone 13571 (TRAV21, TRAJ37)
CAVRTAGSSNKGKLIF

SEQ ID NO: 27142 - protein, 13 aa, Homo sapiens
  CDR3 for beta chain variable domain of TCR clone 13571 (TRBV7-9, TRBJ2-5)
CASLPSGRETQYF

SEQ ID NO: 27143 - protein, 18 aa, Homo sapiens
  CDR3 for alpha chain variable domain of TCR clone 13572 (TRAV14/DV4, TRAJ52)
CAMREANAGGTSYGKLTF

SEQ ID NO: 27144 - protein, 14 aa, Homo sapiens
  CDR3 for beta chain variable domain of TCR clone 13572 (TRBV4-1, TRBJ2-5)
CASSRSGSGETQYF

SEQ ID NO: 27145 - protein, 12 aa, Homo sapiens
  CDR3 for alpha chain variable domain of TCR clone 13573 (TRAV2, TRAJ31)
CAVEDNNARLMF

SEQ ID NO: 27146 - protein, 15 aa, Homo sapiens
  CDR3 for beta chain variable domain of TCR clone 13573 (TRBV11-2, TRBJ2-1)
CASSKNRGLIYEQFF

SEQ ID NO: 27147 - protein, 16 aa, Homo sapiens
  CDR3 for alpha chain variable domain of TCR clone 13574 (TRAV30, TRAJ24)
CGTEIVDADSWGKFQL

SEQ ID NO: 27148 - protein, 14 aa, Homo sapiens
  CDR3 for beta chain variable domain of TCR clone 13574 (TRBV12-5, TRBJ2-5)
CASGSRTHQETQYF

SEQ ID NO: 27149 - protein, 15 aa, Homo sapiens
  CDR3 for alpha chain variable domain of TCR clone 13575 (TRAV38-1, TRAJ45)
CAFMKGGGGADGLTF

SEQ ID NO: 27150 - protein, 13 aa, Homo sapiens
  CDR3 for beta chain variable domain of TCR clone 13575 (TRBV7-9, TRBJ1-2)
CASSSKQNYGYTF

SEQ ID NO: 27151 - protein, 11 aa, Homo sapiens
  CDR3 for alpha chain variable domain of TCR clone 13576 (TRAV1-2, TRAJ20)
CAVANDYKLSL

SEQ ID NO: 27152 - protein, 18 aa, Homo sapiens
  CDR3 for beta chain variable domain of TCR clone 13576 (TRBV20-1, TRBJ2-6)
CSAETTPTHGSGANVLTF

SEQ ID NO: 27153 - protein, 12 aa, Homo sapiens
  CDR3 for alpha chain variable domain of TCR clone 13577 (TRAV21, TRAJ56)
CAVYGANSKLTF

SEQ ID NO: 27154 - protein, 17 aa, Homo sapiens
  CDR3 for beta chain variable domain of TCR clone 13577 (TRBV10-3, TRBJ2-6)
CAISELAESSGANVLTF

SEQ ID NO: 27155 - protein, 14 aa, Homo sapiens
  CDR3 for alpha chain variable domain of TCR clone 13578 (TRAV38-1, TRAJ45)
CASHPGGGADGLTF

SEQ ID NO: 27156 - protein, 13 aa, Homo sapiens
  CDR3 for beta chain variable domain of TCR clone 13578 (TRBV10-3, TRBJ1-2)
CAISERDSYGYTF

SEQ ID NO: 27157 - protein, 13 aa, Homo sapiens
  CDR3 for alpha chain variable domain of TCR clone 13579 (TRAV27, TRAJ41)
CAGEGNSGYALNF

SEQ ID NO: 27158 - protein, 12 aa, Homo sapiens
  CDR3 for beta chain variable domain of TCR clone 13579 (TRBV29-1, TRBJ2-3)
CSVTGGADTQYF

SEQ ID NO: 27159 - protein, 12 aa, Homo sapiens
  CDR3 for alpha chain variable domain of TCR clone 13580 (TRAV2, TRAJ31)
CAVEDNNARLMF

SEQ ID NO: 27160 - protein, 16 aa, Homo sapiens
  CDR3 for beta chain variable domain of TCR clone 13580 (TRBV10-2, TRBJ1-5)
CASSVRDRASNQPQHF

SEQ ID NO: 27161 - protein, 14 aa, Homo sapiens
  CDR3 for alpha chain variable domain of TCR clone 13581 (TRAV8-3, TRAJ6)
CAVSSSGGSYIPTF

SEQ ID NO: 27162 - protein, 18 aa, Homo sapiens
  CDR3 for beta chain variable domain of TCR clone 13581 (TRBV2, TRBJ2-3)
CASSEAGGQALGADTQYF

SEQ ID NO: 27163 - protein, 15 aa, Homo sapiens
  CDR3 for alpha chain variable domain of TCR clone 13582 (TRAV12-1, TRAJ44)
CVADSPTGTASKLTF

SEQ ID NO: 27164 - protein, 13 aa, Homo sapiens
  CDR3 for beta chain variable domain of TCR clone 13582 (TRBV6-5, TRBJ2-5)
CASSPQGGETQYF

SEQ ID NO: 27165 - protein, 18 aa, Homo sapiens
  CDR3 for alpha chain variable domain of TCR clone 13583 (TRAV12-2, )
CAVEDIQNPDPAVYQLRD

SEQ ID NO: 27166 - protein, 17 aa, Homo sapiens
  CDR3 for beta chain variable domain of TCR clone 13583 (TRBV11-2, TRBJ2-1)
CASSLYPPGVEYNEQFF

SEQ ID NO: 27167 - protein, 11 aa, Homo sapiens
  CDR3 for alpha chain variable domain of TCR clone 13584 (TRAV3, TRAJ21)
CAVGNFNKFYF

SEQ ID NO: 27168 - protein, 16 aa, Homo sapiens
  CDR3 for beta chain variable domain of TCR clone 13584 (TRBV19, TRBJ2-1)
CASSKAGPSSYKEQFF

SEQ ID NO: 27169 - protein, 16 aa, Homo sapiens
  CDR3 for alpha chain variable domain of TCR clone 13585 (TRAV30, TRAJ24)
CGTEIVDADSWGKFQF

SEQ ID NO: 27170 - protein, 14 aa, Homo sapiens
  CDR3 for beta chain variable domain of TCR clone 13585 (TRBV18, TRBJ2-5)
CASSPGVSQETQYF

SEQ ID NO: 27171 - protein, 14 aa, Homo sapiens
  CDR3 for alpha chain variable domain of TCR clone 13586 (TRAV23/DV6, TRAJ22)
CAASVSGSARQLTF

SEQ ID NO: 27172 - protein, 15 aa, Homo sapiens
  CDR3 for beta chain variable domain of TCR clone 13586 (TRBV20-1, TRBJ2-7)
CSARDRVSGMDEQYF

SEQ ID NO: 27173 - protein, 14 aa, Homo sapiens
  CDR3 for alpha chain variable domain of TCR clone 13587 (TRAV12-2, TRAJ40)
CAVKIPSGTYKYIF

SEQ ID NO: 27174 - protein, 14 aa, Homo sapiens
  CDR3 for beta chain variable domain of TCR clone 13587 (TRBV20-1, TRBJ1-1)
CGAQTRIGGTEAFF

SEQ ID NO: 27175 - protein, 14 aa, Homo sapiens
  CDR3 for alpha chain variable domain of TCR clone 13588 (TRAV2, TRAJ37)
CAVDFTSNTGKLIF

SEQ ID NO: 27176 - protein, 15 aa, Homo sapiens
  CDR3 for beta chain variable domain of TCR clone 13588 (TRBV20-1, TRBJ1-1)
CSTSRGVTGNTEAFF

SEQ ID NO: 27177 - protein, 11 aa, Homo sapiens
  CDR3 for alpha chain variable domain of TCR clone 13589 (TRAV23/DV6, TRAJ48)
CAPRWGEKLTL

SEQ ID NO: 27178 - protein, 13 aa, Homo sapiens
  CDR3 for beta chain variable domain of TCR clone 13589 (TRBV12-4, TRBJ2-5)
CASSPGTEETQYF

SEQ ID NO: 27179 - protein, 12 aa, Homo sapiens
  CDR3 for alpha chain variable domain of TCR clone 13590 (TRAV13-2, TRAJ23)
CAERHRGGKLIF

SEQ ID NO: 27180 - protein, 15 aa, Homo sapiens
  CDR3 for beta chain variable domain of TCR clone 13590 (TRBV6-1, TRBJ2-3)
CASSERGGITDTQYF

SEQ ID NO: 27181 - protein, 12 aa, Homo sapiens
  CDR3 for alpha chain variable domain of TCR clone 13591 (TRAV1-2, TRAJ11)
CAVRGGYSTLTF

SEQ ID NO: 27182 - protein, 16 aa, Homo sapiens
  CDR3 for beta chain variable domain of TCR clone 13591 (TRBV7-9, TRBJ2-7)
CASSSPSANTVNEQYF

SEQ ID NO: 27183 - protein, 15 aa, Homo sapiens
  CDR3 for alpha chain variable domain of TCR clone 13592 (TRAV2, TRAJ9)
CAVEDRGTGGLKTIF

SEQ ID NO: 27184 - protein, 16 aa, Homo sapiens
  CDR3 for beta chain variable domain of TCR clone 13592 (TRBV24-1, TRBJ2-3)
CATSDPGTGATDTQYF

SEQ ID NO: 27185 - protein, 14 aa, Homo sapiens
  CDR3 for alpha chain variable domain of TCR clone 13593 (TRAV23/DV6, TRAJ45)
CAASWGGGADGLTF

SEQ ID NO: 27186 - protein, 15 aa, Homo sapiens
  CDR3 for beta chain variable domain of TCR clone 13593 (TRBV28, TRBJ1-3)
CASSMGWASGNTIYF

SEQ ID NO: 27187 - protein, 13 aa, Homo sapiens
  CDR3 for alpha chain variable domain of TCR clone 13594 (TRAV17, TRAJ9)
CATFLTGGFKTIF

SEQ ID NO: 27188 - protein, 16 aa, Homo sapiens
  CDR3 for beta chain variable domain of TCR clone 13594 (TRBV5-7, TRBJ1-4)
CASSPSGGLKTEKLFS

SEQ ID NO: 27189 - protein, 16 aa, Homo sapiens
  CDR3 for alpha chain variable domain of TCR clone 13595 (TRAV1-2, TRAJ10)
CAVRGVLAGGGNKLTF

SEQ ID NO: 27190 - protein, 12 aa, Homo sapiens
  CDR3 for beta chain variable domain of TCR clone 13595 (TRBV7-8, TRBJ2-7)
CASSLGDREQYF

SEQ ID NO: 27191 - protein, 13 aa, Homo sapiens
  CDR3 for alpha chain variable domain of TCR clone 13596 (TRAV21, TRAJ57)
CAVTQCGSEKLVF

SEQ ID NO: 27192 - protein, 16 aa, Homo sapiens
  CDR3 for beta chain variable domain of TCR clone 13596 (TRBV29-1, TRBJ2-7)
CSVEDAEDGTAYEQYF

SEQ ID NO: 27193 - protein, 14 aa, Homo sapiens
  CDR3 for alpha chain variable domain of TCR clone 13597 (TRAV13-2, TRAJ43)
CAEIPTYNNNDMRF

SEQ ID NO: 27194 - protein, 15 aa, Homo sapiens
  CDR3 for beta chain variable domain of TCR clone 13597 (TRBV7-9, TRBJ2-2)
CASGPLDTFPGELLF

SEQ ID NO: 27195 - protein, 15 aa, Homo sapiens
  CDR3 for alpha chain variable domain of TCR clone 13598 (TRAV12-3, TRAJ42)
CAMITSVGSQGNLIF

SEQ ID NO: 27196 - protein, 13 aa, Homo sapiens
  CDR3 for beta chain variable domain of TCR clone 13598 (TRBV25-1, TRBJ2-6)
CASRGPGANVLTF

SEQ ID NO: 27197 - protein, 11 aa, Homo sapiens
  CDR3 for alpha chain variable domain of TCR clone 13599 (TRAV2, TRAJ21)
CAVFNFNKFYF

SEQ ID NO: 27198 - protein, 17 aa, Homo sapiens
  CDR3 for beta chain variable domain of TCR clone 13599 (TRBV9, TRBJ2-1)
CQQRSTSGPNNYNEQFF

SEQ ID NO: 27199 - protein, 15 aa, Homo sapiens
  CDR3 for alpha chain variable domain of TCR clone 13600 (TRAV3, TRAJ5)
CAVRYLDTGRRALTF

SEQ ID NO: 27200 - protein, 13 aa, Homo sapiens
  CDR3 for beta chain variable domain of TCR clone 13600 (TRBV12-4, TRBJ2-7)
CASSPTETYEQYF

SEQ ID NO: 27201 - protein, 14 aa, Homo sapiens
  CDR3 for alpha chain variable domain of TCR clone 13601 (TRAV12-2, TRAJ17)
CAVLFKAAGNRLTF

SEQ ID NO: 27202 - protein, 17 aa, Homo sapiens
  CDR3 for beta chain variable domain of TCR clone 13601 (TRBV20-1, TRBJ2-2)
CSASGSGQGGLTGELFF

SEQ ID NO: 27203 - protein, 14 aa, Homo sapiens
  CDR3 for alpha chain variable domain of TCR clone 13602 (TRAV12-2, TRAJ40)
CAVKIPSGTYKYIF

SEQ ID NO: 27204 - protein, 14 aa, Homo sapiens
  CDR3 for beta chain variable domain of TCR clone 13602 (TRBV20-1, TRBJ1-1)
CSAHTRIGGTEAFF

SEQ ID NO: 27205 - protein, 15 aa, Homo sapiens
  CDR3 for alpha chain variable domain of TCR clone 13603 (TRAV12-3, TRAJ6)
CAMSATAGGSYIPTF

SEQ ID NO: 27206 - protein, 16 aa, Homo sapiens
  CDR3 for beta chain variable domain of TCR clone 13603 (TRBV20-1, TRBJ1-2)
CSASMGQGVANYGYTF

SEQ ID NO: 27207 - protein, 15 aa, Homo sapiens
  CDR3 for alpha chain variable domain of TCR clone 13604 (TRAV2, TRAJ9)
CAVEDRGTGGFKTVF

SEQ ID NO: 27208 - protein, 16 aa, Homo sapiens
  CDR3 for beta chain variable domain of TCR clone 13604 (TRBV24-1, TRBJ2-3)
CATSDPGTGATDTQYF

SEQ ID NO: 27209 - protein, 13 aa, Homo sapiens
  CDR3 for alpha chain variable domain of TCR clone 13605 (TRAV27, TRAJ41)
CAGEGNSGYALNF

SEQ ID NO: 27210 - protein, 14 aa, Homo sapiens
  CDR3 for beta chain variable domain of TCR clone 13605 (TRBV7-2, TRBJ1-1)
CASSFLTGATEAFF

SEQ ID NO: 27211 - protein, 14 aa, Homo sapiens
  CDR3 for alpha chain variable domain of TCR clone 13606 (TRAV12-2, TRAJ44)
CAVNPAGTASKLTF

SEQ ID NO: 27212 - protein, 13 aa, Homo sapiens
  CDR3 for beta chain variable domain of TCR clone 13606 (TRBV20-1, TRBJ1-6)
CSAPLGVGSTLHF

SEQ ID NO: 27213 - protein, 11 aa, Homo sapiens
  CDR3 for alpha chain variable domain of TCR clone 13607 (TRAV12-3, TRAJ27)
CATANAGKSTF

SEQ ID NO: 27214 - protein, 13 aa, Homo sapiens
  CDR3 for beta chain variable domain of TCR clone 13607 (TRBV20-1, TRBJ1-1)
CSARVGGNTEAFF

SEQ ID NO: 27215 - protein, 13 aa, Homo sapiens
  CDR3 for alpha chain variable domain of TCR clone 13608 (TRAV1-2, TRAJ33)
CAVQGDSNYQLIW

SEQ ID NO: 27216 - protein, 16 aa, Homo sapiens
  CDR3 for beta chain variable domain of TCR clone 13608 (TRBV28, TRBJ2-1)
CASSSPGLAKGDEQFF

SEQ ID NO: 27217 - protein, 14 aa, Homo sapiens
  CDR3 for alpha chain variable domain of TCR clone 13609 (TRAV12-3, TRAJ9)
CAMSPNTGGFKTIF

SEQ ID NO: 27218 - protein, 12 aa, Homo sapiens
  CDR3 for beta chain variable domain of TCR clone 13609 (TRBV11-2, TRBJ2-2)
CASSLPTGELFF

SEQ ID NO: 27219 - protein, 14 aa, Homo sapiens
  CDR3 for alpha chain variable domain of TCR clone 13610 (TRAV1-1, TRAJ27)
CAVIYNTNAGKSTF

SEQ ID NO: 27220 - protein, 14 aa, Homo sapiens
  CDR3 for beta chain variable domain of TCR clone 13610 (TRBV19, TRBJ2-1)
CASPTFVLSGEQFF

SEQ ID NO: 27221 - protein, 12 aa, Homo sapiens
  CDR3 for alpha chain variable domain of TCR clone 13611 (TRAV36/DV7, TRAJ54)
CAVVRGAQKLVF

SEQ ID NO: 27222 - protein, 14 aa, Homo sapiens
  CDR3 for beta chain variable domain of TCR clone 13611 (TRBV7-3, TRBJ1-1)
CASSLEGGNTEAFF

SEQ ID NO: 27223 - protein, 13 aa, Homo sapiens
  CDR3 for alpha chain variable domain of TCR clone 13612 (TRAV2, TRAJ40)
CAVVASGTYKYIF

SEQ ID NO: 27224 - protein, 15 aa, Homo sapiens
  CDR3 for beta chain variable domain of TCR clone 13612 (TRBV11-3, TRBJ2-3)
CASLKDGREGDTQYF

SEQ ID NO: 27225 - protein, 12 aa, Homo sapiens
  CDR3 for alpha chain variable domain of TCR clone 13613 (TRAV12-1, TRAJ40)
CVVYSGTYRYIF

SEQ ID NO: 27226 - protein, 18 aa, Homo sapiens
  CDR3 for beta chain variable domain of TCR clone 13613 (TRBV11-2, TRBJ2-3)
CASSLGGASRGAPNTQYF

SEQ ID NO: 27227 - protein, 13 aa, Homo sapiens
  CDR3 for alpha chain variable domain of TCR clone 13614 (TRAV3, TRAJ27)
CAVRPLGAGKSAF

SEQ ID NO: 27228 - protein, 13 aa, Homo sapiens
  CDR3 for beta chain variable domain of TCR clone 13614 (TRBV7-9, TRBJ2-3)
CASSPGSTDTQYF

SEQ ID NO: 27229 - protein, 11 aa, Homo sapiens
  CDR3 for alpha chain variable domain of TCR clone 13615 (TRAV23/DV6, TRAJ17)
CKWAAGNKLTF

SEQ ID NO: 27230 - protein, 14 aa, Homo sapiens
  CDR3 for beta chain variable domain of TCR clone 13615 (TRBV6-1, TRBJ2-7)
CASSGGSYLYGQYF

SEQ ID NO: 27231 - protein, 14 aa, Homo sapiens
  CDR3 for alpha chain variable domain of TCR clone 13616 (TRAV13-1, TRAJ35)
CAASKGGFGNVLHC

SEQ ID NO: 27232 - protein, 15 aa, Homo sapiens
  CDR3 for beta chain variable domain of TCR clone 13616 (TRBV11-2, TRBJ2-1)
CASSLTSGGYNEQFF

SEQ ID NO: 27233 - protein, 16 aa, Homo sapiens
  CDR3 for alpha chain variable domain of TCR clone 13617 (TRAV26-1, TRAJ23)
CIVRPHGNNQGGKLIF

SEQ ID NO: 27234 - protein, 16 aa, Homo sapiens
  CDR3 for beta chain variable domain of TCR clone 13617 (TRBV5-4, TRBJ2-7)
CQQLRSEPRSSYEQYF

SEQ ID NO: 27235 - protein, 13 aa, Homo sapiens
  CDR3 for alpha chain variable domain of TCR clone 13618 (TRAV21, TRAJ27)
CAARPGNAGKSTF

SEQ ID NO: 27236 - protein, 14 aa, Homo sapiens
  CDR3 for beta chain variable domain of TCR clone 13618 (TRBV7-6, TRBJ2-3)
CASSLGTVKDTQYF

SEQ ID NO: 27237 - protein, 14 aa, Homo sapiens
  CDR3 for alpha chain variable domain of TCR clone 13619 (TRAV35, TRAJ33)
CAGSSQDSNYKLIW

SEQ ID NO: 27238 - protein, 15 aa, Homo sapiens
  CDR3 for beta chain variable domain of TCR clone 13619 (TRBV20-1, TRBJ2-7)
CSAESGTSGAYEQYF

SEQ ID NO: 27239 - protein, 17 aa, Homo sapiens
  CDR3 for alpha chain variable domain of TCR clone 13620 (TRAV13-1, TRAJ52)
CAASSGAGGTSYGKLTF

SEQ ID NO: 27240 - protein, 15 aa, Homo sapiens
  CDR3 for beta chain variable domain of TCR clone 13620 (TRBV2, TRBJ2-1)
CASSELAGGYNEQFF

SEQ ID NO: 27241 - protein, 12 aa, Homo sapiens
  CDR3 for alpha chain variable domain of TCR clone 13621 (TRAV16, TRAJ10)
CSRTGGGNKPTF

SEQ ID NO: 27242 - protein, 15 aa, Homo sapiens
  CDR3 for beta chain variable domain of TCR clone 13621 (TRBV6-3, TRBJ2-7)
CASSSPGTVFYEQYF

SEQ ID NO: 27243 - protein, 14 aa, Homo sapiens
  CDR3 for alpha chain variable domain of TCR clone 13622 (TRAV8-6, TRAJ53)
CAVSDIGSNYKLTF

SEQ ID NO: 27244 - protein, 13 aa, Homo sapiens
  CDR3 for beta chain variable domain of TCR clone 13622 (TRBV11-3, TRBJ1-1)
CASSLTGNTEAFF

SEQ ID NO: 27245 - protein, 20 aa, Homo sapiens
  CDR3 for alpha chain variable domain of TCR clone 13623 (TRAV8-3, )
CAVGAGDIQNPDPAVYQLRD

SEQ ID NO: 27246 - protein, 13 aa, Homo sapiens
  CDR3 for beta chain variable domain of TCR clone 13623 (TRBV7-2, TRBJ2-2)
CASSLAVTGELFF

SEQ ID NO: 27247 - protein, 10 aa, Homo sapiens
  CDR3 for alpha chain variable domain of TCR clone 13624 (TRAV30, TRAJ48)
CGIGNEELTF

SEQ ID NO: 27248 - protein, 14 aa, Homo sapiens
  CDR3 for beta chain variable domain of TCR clone 13624 (TRBV7-6, TRBJ2-3)
CASSVAGGTDTQYF

SEQ ID NO: 27249 - protein, 11 aa, Homo sapiens
  CDR3 for alpha chain variable domain of TCR clone 13625 (TRAV1-2, TRAJ20)
CAVSNDYKLNF

SEQ ID NO: 27250 - protein, 16 aa, Homo sapiens
  CDR3 for beta chain variable domain of TCR clone 13625 (TRBV29-1, TRBJ2-6)
CSVEDITYSGANVLTF

SEQ ID NO: 27251 - protein, 12 aa, Homo sapiens
  CDR3 for alpha chain variable domain of TCR clone 13626 (TRAV12-1, TRAJ40)
CVFYPGTYKYIF

SEQ ID NO: 27252 - protein, 18 aa, Homo sapiens
  CDR3 for beta chain variable domain of TCR clone 13626 (TRBV12-4, TRBJ2-2)
CASSLVAGTRGRTGELFF

SEQ ID NO: 27253 - protein, 15 aa, Homo sapiens
  CDR3 for alpha chain variable domain of TCR clone 13627 (TRAV17, TRAJ35)
CATAFVIGFGNVLHC

SEQ ID NO: 27254 - protein, 16 aa, Homo sapiens
  CDR3 for beta chain variable domain of TCR clone 13627 (TRBV11-2, TRBJ2-7)
CASSPLAGGPRYEQYF

SEQ ID NO: 27255 - protein, 12 aa, Homo sapiens
  CDR3 for alpha chain variable domain of TCR clone 13628 (TRAV35, TRAJ39)
LSPNNAGNMLTF

SEQ ID NO: 27256 - protein, 16 aa, Homo sapiens
  CDR3 for beta chain variable domain of TCR clone 13628 (TRBV2, TRBJ2-3)
CASSTSVEGVTDTQYF

SEQ ID NO: 27257 - protein, 14 aa, Homo sapiens
  CDR3 for alpha chain variable domain of TCR clone 13629 (TRAV38-1, TRAJ45)
CAYYSGGGADGLTF

SEQ ID NO: 27258 - protein, 20 aa, Homo sapiens
  CDR3 for beta chain variable domain of TCR clone 13629 (TRBV28, TRBJ2-1)
CASTPIGRPPGLAGGNEQFF

SEQ ID NO: 27259 - protein, 11 aa, Homo sapiens
  CDR3 for alpha chain variable domain of TCR clone 13630 (TRAV2, TRAJ13)
CASGGYQKVTF

SEQ ID NO: 27260 - protein, 15 aa, Homo sapiens
  CDR3 for beta chain variable domain of TCR clone 13630 (TRBV7-2, TRBJ2-3)
CASSSTGLETDTQYF

SEQ ID NO: 27261 - protein, 16 aa, Homo sapiens
  CDR3 for alpha chain variable domain of TCR clone 13631 (TRAV30, TRAJ24)
CATEIVDADSWGKFQF

SEQ ID NO: 27262 - protein, 14 aa, Homo sapiens
  CDR3 for beta chain variable domain of TCR clone 13631 (TRBV12-5, TRBJ2-5)
CASGSRTHQETQYF

SEQ ID NO: 27263 - protein, 18 aa, Homo sapiens
  CDR3 for alpha chain variable domain of TCR clone 13632 (TRAV21, TRAJ52)
CAVRPSPAGGTSYGKLTL

SEQ ID NO: 27264 - protein, 13 aa, Homo sapiens
  CDR3 for beta chain variable domain of TCR clone 13632 (TRBV10-3, TRBJ2-7)
CASKLAVNYEQYF

SEQ ID NO: 27265 - protein, 14 aa, Homo sapiens
  CDR3 for alpha chain variable domain of TCR clone 13633 (TRAV12-3, TRAJ10)
SHLPLTGGGNKLTF

SEQ ID NO: 27266 - protein, 16 aa, Homo sapiens
  CDR3 for beta chain variable domain of TCR clone 13633 (TRBV7-9, TRBJ1-2)
CASSLGFSSGEDGYTF

SEQ ID NO: 27267 - protein, 13 aa, Homo sapiens
  CDR3 for alpha chain variable domain of TCR clone 13634 (TRAV38-1, TRAJ42)
YARWGGSQGNLIF

SEQ ID NO: 27268 - protein, 10 aa, Homo sapiens
  CDR3 for beta chain variable domain of TCR clone 13634 (TRBV2, TRBJ2-5)
CASSAATQYF

SEQ ID NO: 27269 - protein, 12 aa, Homo sapiens
  CDR3 for alpha chain variable domain of TCR clone 13635 (TRAV17, TRAJ20)
CATDSNDYKLSF

SEQ ID NO: 27270 - protein, 15 aa, Homo sapiens
  CDR3 for beta chain variable domain of TCR clone 13635 (TRBV28, TRBJ2-3)
CASSPDRQGANTQYF

SEQ ID NO: 27271 - protein, 18 aa, Homo sapiens
  CDR3 for alpha chain variable domain of TCR clone 13636 (TRAV12-3, TRAJ52)
CAMSRTNAGGTSYGKLTF

SEQ ID NO: 27272 - protein, 14 aa, Homo sapiens
  CDR3 for beta chain variable domain of TCR clone 13636 (TRBV7-8, TRBJ2-3)
CASSLEAGTDTQYF

SEQ ID NO: 27273 - protein, 12 aa, Homo sapiens
  CDR3 for alpha chain variable domain of TCR clone 13637 (TRAV14/DV4, TRAJ31)
CNERARGARLMF

SEQ ID NO: 27274 - protein, 15 aa, Homo sapiens
  CDR3 for beta chain variable domain of TCR clone 13637 (TRBV7-9, TRBJ2-7)
CASSPGGGLTYEQYF

SEQ ID NO: 27275 - protein, 11 aa, Homo sapiens
  CDR3 for alpha chain variable domain of TCR clone 13638 (TRAV21, TRAJ39)
LLVNAGNMLTF

SEQ ID NO: 27276 - protein, 15 aa, Homo sapiens
  CDR3 for beta chain variable domain of TCR clone 13638 (TRBV29-1, TRBJ2-1)
CSGRDRKSSYSEQFF

SEQ ID NO: 27277 - protein, 11 aa, Homo sapiens
  CDR3 for alpha chain variable domain of TCR clone 13639 (TRAV23/DV6, TRAJ21)
CAASSGGGTTS

SEQ ID NO: 27278 - protein, 11 aa, Homo sapiens
  CDR3 for beta chain variable domain of TCR clone 13639 (TRBV7-8, TRBJ2-7)
CASSLSLEQYF

SEQ ID NO: 27279 - protein, 13 aa, Homo sapiens
  CDR3 for alpha chain variable domain of TCR clone 13640 (TRAV20, TRAJ37)
CAGCSSNTGKLTF

SEQ ID NO: 27280 - protein, 11 aa, Homo sapiens
  CDR3 for beta chain variable domain of TCR clone 13640 (TRBV12-4, TRBJ2-3)
CASTATDTQYF

SEQ ID NO: 27281 - protein, 15 aa, Homo sapiens
  CDR3 for alpha chain variable domain of TCR clone 13641 (TRAV27, TRAJ38)
CVARRNAGNNRKLIW

SEQ ID NO: 27282 - protein, 13 aa, Homo sapiens
  CDR3 for beta chain variable domain of TCR clone 13641 (TRBV12-5, TRBJ2-3)
CASGDRQSDTQYF

SEQ ID NO: 27283 - protein, 15 aa, Homo sapiens
  CDR3 for alpha chain variable domain of TCR clone 13642 (TRAV3, TRAJ5)
CAVRDRKTGRRELTF

SEQ ID NO: 27284 - protein, 15 aa, Homo sapiens
  CDR3 for beta chain variable domain of TCR clone 13642 (TRBV7-8, TRBJ2-1)
CASSLADSLYNEQFF

SEQ ID NO: 27285 - protein, 15 aa, Homo sapiens
  CDR3 for alpha chain variable domain of TCR clone 13643 (TRAV3, TRAJ5)
CAVRDRKTGRRALTF

SEQ ID NO: 27286 - protein, 15 aa, Homo sapiens
  CDR3 for beta chain variable domain of TCR clone 13643 (TRBV7-8, TRBJ2-1)
CASSLADSLYNEQLF

SEQ ID NO: 27287 - protein, 13 aa, Homo sapiens
  CDR3 for alpha chain variable domain of TCR clone 13644 (TRAV20, TRAJ31)
CAVQAWNNARLMF

SEQ ID NO: 27288 - protein, 12 aa, Homo sapiens
  CDR3 for beta chain variable domain of TCR clone 13644 (TRBV11-2, TRBJ2-2)
CTSSLGGGELFF

SEQ ID NO: 27289 - protein, 15 aa, Homo sapiens
  CDR3 for alpha chain variable domain of TCR clone 13645 (TRAV3, TRAJ5)
CAVRDLDTGRRALTF

SEQ ID NO: 27290 - protein, 13 aa, Homo sapiens
  CDR3 for beta chain variable domain of TCR clone 13645 (TRBV12-4, TRBJ2-7)
CASSPTDTYEQYF

SEQ ID NO: 27291 - protein, 13 aa, Homo sapiens
  CDR3 for alpha chain variable domain of TCR clone 13646 (TRAV29/DV5, TRAJ29)
CAASAAGNTPLVF

SEQ ID NO: 27292 - protein, 16 aa, Homo sapiens
  CDR3 for beta chain variable domain of TCR clone 13646 (TRBV12-4, TRBJ2-5)
CASSFFVRGRQETQYF

SEQ ID NO: 27293 - protein, 12 aa, Homo sapiens
  CDR3 for alpha chain variable domain of TCR clone 13647 (TRAV12-3, TRAJ17)
CAMTLTGNKLTF

SEQ ID NO: 27294 - protein, 13 aa, Homo sapiens
  CDR3 for beta chain variable domain of TCR clone 13647 (TRBV19, TRBJ2-7)
CASRKAGGSEQYF

SEQ ID NO: 27295 - protein, 13 aa, Homo sapiens
  CDR3 for alpha chain variable domain of TCR clone 13648 (TRAV20, TRAJ36)
CAVQGTGANNLFF

SEQ ID NO: 27296 - protein, 14 aa, Homo sapiens
  CDR3 for beta chain variable domain of TCR clone 13648 (TRBV12-5, TRBJ2-5)
CASGSRTHQETQYF

SEQ ID NO: 27297 - protein, 13 aa, Homo sapiens
  CDR3 for alpha chain variable domain of TCR clone 13649 (TRAV21, TRAJ57)
CVVTQGGSEKLVF

SEQ ID NO: 27298 - protein, 16 aa, Homo sapiens
  CDR3 for beta chain variable domain of TCR clone 13649 (TRBV29-1, TRBJ2-7)
CSVEDAEDGTAYEQYF

SEQ ID NO: 27299 - protein, 11 aa, Homo sapiens
  CDR3 for alpha chain variable domain of TCR clone 13650 (TRAV12-3, TRAJ43)
CAMSVSNDMRF

SEQ ID NO: 27300 - protein, 13 aa, Homo sapiens
  CDR3 for beta chain variable domain of TCR clone 13650 (TRBV7-9, TRBJ1-2)
CASSLKQNYGYTF

SEQ ID NO: 27301 - protein, 13 aa, Homo sapiens
  CDR3 for alpha chain variable domain of TCR clone 13651 (TRAV12-3, TRAJ7)
CAMSASGNNRLAL

SEQ ID NO: 27302 - protein, 14 aa, Homo sapiens
  CDR3 for beta chain variable domain of TCR clone 13651 (TRBV13, TRBJ2-5)
CASSLGPRGETQYF

SEQ ID NO: 27303 - protein, 12 aa, Homo sapiens
  CDR3 for alpha chain variable domain of TCR clone 13652 (TRAV12-1, TRAJ34)
CVVAGATDKPIF

SEQ ID NO: 27304 - protein, 12 aa, Homo sapiens
  CDR3 for beta chain variable domain of TCR clone 13652 (TRBV7-9, TRBJ1-1)
CASSLVRGEAFF

SEQ ID NO: 27305 - protein, 15 aa, Homo sapiens
  CDR3 for alpha chain variable domain of TCR clone 13653 (TRAV20, TRAJ53)
CAVQASGGSNYKLTF

SEQ ID NO: 27306 - protein, 14 aa, Homo sapiens
  CDR3 for beta chain variable domain of TCR clone 13653 (TRBV12-5, TRBJ2-5)
CASGSRTHQETQYF

SEQ ID NO: 27307 - protein, 14 aa, Homo sapiens
  CDR3 for alpha chain variable domain of TCR clone 13654 (TRAV26-1, TRAJ39)
CIVRGSRAGNMLTF

SEQ ID NO: 27308 - protein, 15 aa, Homo sapiens
  CDR3 for beta chain variable domain of TCR clone 13654 (TRBV7-9, TRBJ1-5)
CASSRGHQPNQPQHF

SEQ ID NO: 27309 - protein, 13 aa, Homo sapiens
  CDR3 for alpha chain variable domain of TCR clone 13655 (TRAV12-3, TRAJ33)
CAMSVNSNYQLIL

SEQ ID NO: 27310 - protein, 13 aa, Homo sapiens
  CDR3 for beta chain variable domain of TCR clone 13655 (TRBV7-2, TRBJ2-2)
CASSLAVTGELFF

SEQ ID NO: 27311 - protein, 12 aa, Homo sapiens
  CDR3 for alpha chain variable domain of TCR clone 13656 (TRAV12-1, TRAJ40)
CVVYSGTYKYIF

SEQ ID NO: 27312 - protein, 12 aa, Homo sapiens
  CDR3 for beta chain variable domain of TCR clone 13656 (TRBV11-2, TRBJ2-2)
CASSLGGGELFF

SEQ ID NO: 27313 - protein, 13 aa, Homo sapiens
  CDR3 for alpha chain variable domain of TCR clone 13657 (TRAV21, TRAJ27)
CAARPGNAGKSTF

SEQ ID NO: 27314 - protein, 14 aa, Homo sapiens
  CDR3 for beta chain variable domain of TCR clone 13657 (TRBV11-2, TRBJ2-7)
CASSLEAGAYEQYF

SEQ ID NO: 27315 - protein, 14 aa, Homo sapiens
  CDR3 for alpha chain variable domain of TCR clone 13658 (TRAV1-2, TRAJ16)
CAVNRFSAGQKLLF

SEQ ID NO: 27316 - protein, 15 aa, Homo sapiens
  CDR3 for beta chain variable domain of TCR clone 13658 (TRBV9, TRBJ1-6)
CASSVAGTGDSPLHF

SEQ ID NO: 27317 - protein, 13 aa, Homo sapiens
  CDR3 for alpha chain variable domain of TCR clone 13659 (TRAV20, TRAJ37)
CAGCSSNTGKLIF

SEQ ID NO: 27318 - protein, 13 aa, Homo sapiens
  CDR3 for beta chain variable domain of TCR clone 13659 (TRBV7-9, TRBJ1-2)
CASSLKQNYGYTF

SEQ ID NO: 27319 - protein, 12 aa, Homo sapiens
  CDR3 for alpha chain variable domain of TCR clone 13660 (TRAV38-1, TRAJ57)
CAFMKLPPTLVF

SEQ ID NO: 27320 - protein, 14 aa, Homo sapiens
  CDR3 for beta chain variable domain of TCR clone 13660 (TRBV7-8, TRBJ2-3)
CASSLEAGTDTQYF

SEQ ID NO: 27321 - protein, 12 aa, Homo sapiens
  CDR3 for alpha chain variable domain of TCR clone 13661 (TRAV3, TRAJ20)
CAVRDPDYKLSF

SEQ ID NO: 27322 - protein, 14 aa, Homo sapiens
  CDR3 for beta chain variable domain of TCR clone 13661 (TRBV19, TRBJ2-1)
CASPTFVLSGEQFF

SEQ ID NO: 27323 - protein, 14 aa, Homo sapiens
  CDR3 for alpha chain variable domain of TCR clone 13662 (TRAV38-1, TRAJ45)
CASHSGGGADGLTF

SEQ ID NO: 27324 - protein, 14 aa, Homo sapiens
  CDR3 for beta chain variable domain of TCR clone 13662 (TRBV6-1, TRBJ1-3)
CASVQGGGGNTIYF

SEQ ID NO: 27325 - protein, 10 aa, Homo sapiens
  CDR3 for alpha chain variable domain of TCR clone 13663 (TRAV38-2/DV8, TRAJ40)
CASGTYKYIF

SEQ ID NO: 27326 - protein, 18 aa, Homo sapiens
  CDR3 for beta chain variable domain of TCR clone 13663 (TRBV4-1, TRBJ1-5)
CASSQDPRGQGLNQPQHF

SEQ ID NO: 27327 - protein, 15 aa, Homo sapiens
  CDR3 for alpha chain variable domain of TCR clone 13664 (TRAV27, TRAJ38)
CAARRNAGKNRKLIW

SEQ ID NO: 27328 - protein, 13 aa, Homo sapiens
  CDR3 for beta chain variable domain of TCR clone 13664 (TRBV12-5, TRBJ2-3)
CASGDRQSDTQYF

SEQ ID NO: 27329 - protein, 17 aa, Homo sapiens
  CDR3 for alpha chain variable domain of TCR clone 13665 (TRAV13-1, TRAJ31)
CAPRDRLMFGDGTQLLV

SEQ ID NO: 27330 - protein, 12 aa, Homo sapiens
  CDR3 for beta chain variable domain of TCR clone 13665 (TRBV7-9, TRBJ2-7)
CASSLEGYEQYF

SEQ ID NO: 27331 - protein, 15 aa, Homo sapiens
  CDR3 for alpha chain variable domain of TCR clone 13666 (TRAV27, TRAJ38)
CSARRNAGNNRKLIW

SEQ ID NO: 27332 - protein, 13 aa, Homo sapiens
  CDR3 for beta chain variable domain of TCR clone 13666 (TRBV12-5, TRBJ2-3)
CASGDRQSDTQYF

SEQ ID NO: 27333 - protein, 15 aa, Homo sapiens
  CDR3 for alpha chain variable domain of TCR clone 13667 (TRAV2, TRAJ9)
CAVGDRGTGGFKTIF

SEQ ID NO: 27334 - protein, 16 aa, Homo sapiens
  CDR3 for beta chain variable domain of TCR clone 13667 (TRBV24-1, TRBJ2-3)
CATSDPGTGATDTQYF

SEQ ID NO: 27335 - protein, 13 aa, Homo sapiens
  CDR3 for alpha chain variable domain of TCR clone 13668 (TRAV21, TRAJ27)
CAARPGNAGKSTF

SEQ ID NO: 27336 - protein, 14 aa, Homo sapiens
  CDR3 for beta chain variable domain of TCR clone 13668 (TRBV7-6, TRBJ2-3)
GASSLGTVTDTQYF

SEQ ID NO: 27337 - protein, 12 aa, Homo sapiens
  CDR3 for alpha chain variable domain of TCR clone 13669 (TRAV17, TRAJ32)
CATDGGTPMVVL

SEQ ID NO: 27338 - protein, 11 aa, Homo sapiens
  CDR3 for beta chain variable domain of TCR clone 13669 (TRBV20-1, TRBJ1-1)
CSARVRVGAFF

SEQ ID NO: 27339 - protein, 14 aa, Homo sapiens
  CDR3 for alpha chain variable domain of TCR clone 13670 (TRAV26-1, TRAJ22)
CIARVYGSARQLTF

SEQ ID NO: 27340 - protein, 17 aa, Homo sapiens
  CDR3 for beta chain variable domain of TCR clone 13670 (TRBV7-3, TRBJ2-3)
CASSPGGLAGFGDTQYF

SEQ ID NO: 27341 - protein, 15 aa, Homo sapiens
  CDR3 for alpha chain variable domain of TCR clone 13671 (TRAV2, TRAJ9)
CAVEDRGTGGCKTIF

SEQ ID NO: 27342 - protein, 16 aa, Homo sapiens
  CDR3 for beta chain variable domain of TCR clone 13671 (TRBV24-1, TRBJ2-3)
CATSDPGTGATDTQYF

SEQ ID NO: 27343 - protein, 11 aa, Homo sapiens
  CDR3 for alpha chain variable domain of TCR clone 13672 (TRAV3, TRAJ21)
CAVGNFNKFYF

SEQ ID NO: 27344 - protein, 13 aa, Homo sapiens
  CDR3 for beta chain variable domain of TCR clone 13672 (TRBV10-3, TRBJ2-7)
CASKLAVNYEQYF

SEQ ID NO: 27345 - protein, 10 aa, Homo sapiens
  CDR3 for alpha chain variable domain of TCR clone 13673 (TRAV19, TRAJ54)
CALSDGEPRS

SEQ ID NO: 27346 - protein, 13 aa, Homo sapiens
  CDR3 for beta chain variable domain of TCR clone 13673 (TRBV10-3, TRBJ2-5)
CAMTSGAGETQYF

SEQ ID NO: 27347 - protein, 19 aa, Homo sapiens
  CDR3 for alpha chain variable domain of TCR clone 13674 (TRAV38-1, TRAJ53)
CAFMKHGLERGGSNYKLTF

SEQ ID NO: 27348 - protein, 13 aa, Homo sapiens
  CDR3 for beta chain variable domain of TCR clone 13674 (TRBV19, TRBJ2-7)
CASSPRQSYEQYF

SEQ ID NO: 27349 - protein, 16 aa, Homo sapiens
  CDR3 for alpha chain variable domain of TCR clone 13675 (TRAV26-1, TRAJ23)
CIVRPHGNNQGGKLIF

SEQ ID NO: 27350 - protein, 17 aa, Homo sapiens
  CDR3 for beta chain variable domain of TCR clone 13675 (TRBV6-1, TRBJ2-1)
CASSEGGSGRGRNEQFF

SEQ ID NO: 27351 - protein, 11 aa, Homo sapiens
  CDR3 for alpha chain variable domain of TCR clone 13676 (TRAV12-3, TRAJ27)
CAMANAGKSTF

SEQ ID NO: 27352 - protein, 13 aa, Homo sapiens
  CDR3 for beta chain variable domain of TCR clone 13676 (TRBV20-1, TRBJ1-1)
CSARVGGSTEAFF

SEQ ID NO: 27353 - protein, 13 aa, Homo sapiens
  CDR3 for alpha chain variable domain of TCR clone 13677 (TRAV29/DV5, TRAJ29)
CAASAAGNTPLVL

SEQ ID NO: 27354 - protein, 14 aa, Homo sapiens
  CDR3 for beta chain variable domain of TCR clone 13677 (TRBV19, TRBJ2-3)
CASSAPRGTDTQYF

SEQ ID NO: 27355 - protein, 14 aa, Homo sapiens
  CDR3 for alpha chain variable domain of TCR clone 13678 (TRAV1-2, TRAJ16)
CAVNRFSDGQKLLF

SEQ ID NO: 27356 - protein, 15 aa, Homo sapiens
  CDR3 for beta chain variable domain of TCR clone 13678 (TRBV11-2, TRBJ2-2)
CASSSDRVNAGELFF

SEQ ID NO: 27357 - protein, 14 aa, Homo sapiens
  CDR3 for alpha chain variable domain of TCR clone 13679 (TRAV9-2, TRAJ39)
CALYIYNAGNMLTF

SEQ ID NO: 27358 - protein, 15 aa, Homo sapiens
  CDR3 for beta chain variable domain of TCR clone 13679 (TRBV7-9, TRBJ1-6)
CASSSPGRGNSPLHF

SEQ ID NO: 27359 - protein, 15 aa, Homo sapiens
  CDR3 for alpha chain variable domain of TCR clone 13680 (TRAV8-3, TRAJ45)
CASSYSGGGADGLTF

SEQ ID NO: 27360 - protein, 13 aa, Homo sapiens
  CDR3 for beta chain variable domain of TCR clone 13680 (TRBV10-3, TRBJ2-7)
CASTLAVNYEQYF

SEQ ID NO: 27361 - protein, 11 aa, Homo sapiens
  CDR3 for alpha chain variable domain of TCR clone 13681 (TRAV2, TRAJ33)
CVVDSNYQLIW

SEQ ID NO: 27362 - protein, 13 aa, Homo sapiens
  CDR3 for beta chain variable domain of TCR clone 13681 (TRBV7-2, TRBJ2-7)
CASSSPSGSEQYF

SEQ ID NO: 27363 - protein, 14 aa, Homo sapiens
  CDR3 for alpha chain variable domain of TCR clone 13682 (TRAV26-1, TRAJ39)
CIVRGSRAGNMLTF

SEQ ID NO: 27364 - protein, 15 aa, Homo sapiens
  CDR3 for beta chain variable domain of TCR clone 13682 (TRBV7-9, TRBJ1-5)
CASSQGHRPNQPQHF

SEQ ID NO: 27365 - protein, 15 aa, Homo sapiens
  CDR3 for alpha chain variable domain of TCR clone 13683 (TRAV8-3, TRAJ45)
CASSYSGGGADGLTF

SEQ ID NO: 27366 - protein, 13 aa, Homo sapiens
  CDR3 for beta chain variable domain of TCR clone 13683 (TRBV10-3, TRBJ2-7)
CASKLAVNCEQYF

SEQ ID NO: 27367 - protein, 14 aa, Homo sapiens
  CDR3 for alpha chain variable domain of TCR clone 13684 (TRAV21, TRAJ35)
CAVMPIGIGNVLHC

SEQ ID NO: 27368 - protein, 12 aa, Homo sapiens
  CDR3 for beta chain variable domain of TCR clone 13684 (TRBV7-9, TRBJ2-7)
CASSIKREEQYF

SEQ ID NO: 27369 - protein, 13 aa, Homo sapiens
  CDR3 for alpha chain variable domain of TCR clone 13685 (TRAV1-2, TRAJ9)
CAALNTGGFKTIF

SEQ ID NO: 27370 - protein, 13 aa, Homo sapiens
  CDR3 for beta chain variable domain of TCR clone 13685 (TRBV4-2, TRBJ1-1)
CASSQAGNTEAFF

SEQ ID NO: 27371 - protein, 12 aa, Homo sapiens
  CDR3 for alpha chain variable domain of TCR clone 13686 (TRAV12-3, TRAJ17)
CAMTLTGNKLTF

SEQ ID NO: 27372 - protein, 12 aa, Homo sapiens
  CDR3 for beta chain variable domain of TCR clone 13686 (TRBV7-3, TRBJ1-1)
CQQPGLGAEAFF

SEQ ID NO: 27373 - protein, 14 aa, Homo sapiens
  CDR3 for alpha chain variable domain of TCR clone 13687 (TRAV12-2, TRAJ13)
CAVKKTGGYQKVTF

SEQ ID NO: 27374 - protein, 15 aa, Homo sapiens
  CDR3 for beta chain variable domain of TCR clone 13687 (TRBV27, TRBJ2-1)
CASSNGGGSSNEQFC

SEQ ID NO: 27375 - protein, 21 aa, Homo sapiens
  CDR3 for alpha chain variable domain of TCR clone 13688 (TRAV1-1, TRAJ6)
CLLLLRCERLERTGGSYIPTF

SEQ ID NO: 27376 - protein, 13 aa, Homo sapiens
  CDR3 for beta chain variable domain of TCR clone 13688 (TRBV10-2, TRBJ2-7)
YASGASGGYEQYF

SEQ ID NO: 27377 - protein, 13 aa, Homo sapiens
  CDR3 for alpha chain variable domain of TCR clone 13689 (TRAV12-1, TRAJ34)
CVVNNWDTDKLIF

SEQ ID NO: 27378 - protein, 15 aa, Homo sapiens
  CDR3 for beta chain variable domain of TCR clone 13689 (TRBV2, TRBJ1-2)
CASSARRGANYGYTF

SEQ ID NO: 27379 - protein, 17 aa, Homo sapiens
  CDR3 for alpha chain variable domain of TCR clone 13690 (TRAV23/DV6, TRAJ57)
CAASSTLSQGGSDKLVF

SEQ ID NO: 27380 - protein, 14 aa, Homo sapiens
  CDR3 for beta chain variable domain of TCR clone 13690 (TRBV25-1, TRBJ1-1)
CASTHLGGNTEAFF

SEQ ID NO: 27381 - protein, 17 aa, Homo sapiens
  CDR3 for alpha chain variable domain of TCR clone 13691 (TRAV3, TRAJ38)
CAVRGCLNAGSNRKLIW

SEQ ID NO: 27382 - protein, 16 aa, Homo sapiens
  CDR3 for beta chain variable domain of TCR clone 13691 (TRBV20-1, TRBJ1-4)
CSAPGQGLLTNEKLFF

SEQ ID NO: 27383 - protein, 11 aa, Homo sapiens
  CDR3 for alpha chain variable domain of TCR clone 13692 (TRAV1-1, TRAJ23)
CAVRQGGKLIF

SEQ ID NO: 27384 - protein, 14 aa, Homo sapiens
  CDR3 for beta chain variable domain of TCR clone 13692 (TRBV25-1, TRBJ1-1)
CASTHLGGNTEAFF

SEQ ID NO: 27385 - protein, 15 aa, Homo sapiens
  CDR3 for alpha chain variable domain of TCR clone 13693 (TRAV17, TRAJ57)
CAAGPSQGGSEKLVF

SEQ ID NO: 27386 - protein, 16 aa, Homo sapiens
  CDR3 for beta chain variable domain of TCR clone 13693 (TRBV12-4, TRBJ1-5)
CASSRPVGGSNQPQHF

SEQ ID NO: 27387 - protein, 14 aa, Homo sapiens
  CDR3 for alpha chain variable domain of TCR clone 13694 (TRAV35, TRAJ33)
CAGSSQDSSYQLIW

SEQ ID NO: 27388 - protein, 15 aa, Homo sapiens
  CDR3 for beta chain variable domain of TCR clone 13694 (TRBV20-1, TRBJ2-7)
CSAESGTSGAYEQYF

SEQ ID NO: 27389 - protein, 14 aa, Homo sapiens
  CDR3 for alpha chain variable domain of TCR clone 13695 (TRAV8-4, TRAJ9)
CAVRINTGGFKTIL

SEQ ID NO: 27390 - protein, 15 aa, Homo sapiens
  CDR3 for beta chain variable domain of TCR clone 13695 (TRBV10-2, TRBJ2-6)
CASSEQGTGANVLTF

SEQ ID NO: 27391 - protein, 13 aa, Homo sapiens
  CDR3 for alpha chain variable domain of TCR clone 13696 (TRAV13-1, TRAJ5)
CAAEHTGRRALTF

SEQ ID NO: 27392 - protein, 13 aa, Homo sapiens
  CDR3 for beta chain variable domain of TCR clone 13696 (TRBV3-1, TRBJ1-1)
CASSPGVITEAFF

SEQ ID NO: 27393 - protein, 16 aa, Homo sapiens
  CDR3 for alpha chain variable domain of TCR clone 13697 (TRAV12-3, TRAJ53)
CAMSPGSGGSNYKLTC

SEQ ID NO: 27394 - protein, 11 aa, Homo sapiens
  CDR3 for beta chain variable domain of TCR clone 13697 (TRBV29-1, TRBJ2-5)
CSEDRTGTQYF

SEQ ID NO: 27395 - protein, 13 aa, Homo sapiens
  CDR3 for alpha chain variable domain of TCR clone 13698 (TRAV17, TRAJ9)
CATDYTVGFKTIF

SEQ ID NO: 27396 - protein, 14 aa, Homo sapiens
  CDR3 for beta chain variable domain of TCR clone 13698 (TRBV19, TRBJ2-5)
CASSMTGQQETQYF

SEQ ID NO: 27397 - protein, 16 aa, Homo sapiens
  CDR3 for alpha chain variable domain of TCR clone 13699 (TRAV1-2, TRAJ10)
CAVRGVLTGGGNKLTF

SEQ ID NO: 27398 - protein, 15 aa, Homo sapiens
  CDR3 for beta chain variable domain of TCR clone 13699 (TRBV15, TRBJ1-5)
CATSRDPVSNQPQHF

SEQ ID NO: 27399 - protein, 18 aa, Homo sapiens
  CDR3 for alpha chain variable domain of TCR clone 13700 (TRAV26-2, TRAJ45)
CILRVDKYSGGGADGLTF

SEQ ID NO: 27400 - protein, 16 aa, Homo sapiens
  CDR3 for beta chain variable domain of TCR clone 13700 (TRBV2, TRBJ1-4)
CASNLLQGATNEKPFF

SEQ ID NO: 27401 - protein, 14 aa, Homo sapiens
  CDR3 for alpha chain variable domain of TCR clone 13701 (TRAV38-1, TRAJ40)
CALRPTSGTYKYIF

SEQ ID NO: 27402 - protein, 14 aa, Homo sapiens
  CDR3 for beta chain variable domain of TCR clone 13701 (TRBV25-1, TRBJ1-1)
CASTHLGGNTEDFF

SEQ ID NO: 27403 - protein, 16 aa, Homo sapiens
  CDR3 for alpha chain variable domain of TCR clone 13702 (TRAV14/DV4, TRAJ45)
CAMREGERGGADGLTF

SEQ ID NO: 27404 - protein, 16 aa, Homo sapiens
  CDR3 for beta chain variable domain of TCR clone 13702 (TRBV6-6, TRBJ2-4)
CASSNAGQGAKNIQYF

SEQ ID NO: 27405 - protein, 15 aa, Homo sapiens
  CDR3 for alpha chain variable domain of TCR clone 13703 (TRAV2, TRAJ15)
CAVEDRGQAGTALIF

SEQ ID NO: 27406 - protein, 17 aa, Homo sapiens
  CDR3 for beta chain variable domain of TCR clone 13703 (TRBV20-1, TRBJ2-3)
CSARGTGGPTGTDTQYF

SEQ ID NO: 27407 - protein, 15 aa, Homo sapiens
  CDR3 for alpha chain variable domain of TCR clone 13704 (TRAV3, TRAJ5)
CAVRDRRTGRRALTF

SEQ ID NO: 27408 - protein, 15 aa, Homo sapiens
  CDR3 for beta chain variable domain of TCR clone 13704 (TRBV7-8, TRBJ2-1)
CASSLADSLYNEQFF

SEQ ID NO: 27409 - protein, 14 aa, Homo sapiens
  CDR3 for alpha chain variable domain of TCR clone 13705 (TRAV9-2, TRAJ39)
CALYIYNAGNMLTF

SEQ ID NO: 27410 - protein, 13 aa, Homo sapiens
  CDR3 for beta chain variable domain of TCR clone 13705 (TRBV15, TRBJ1-6)
CATSGGLNSPLHF

SEQ ID NO: 27411 - protein, 14 aa, Homo sapiens
  CDR3 for alpha chain variable domain of TCR clone 13706 (TRAV13-2, TRAJ39)
CADHPPGAGNMLTF

SEQ ID NO: 27412 - protein, 18 aa, Homo sapiens
  CDR3 for beta chain variable domain of TCR clone 13706 (TRBV27, TRBJ2-3)
CASSLSGTSGRGTDTQYF

SEQ ID NO: 27413 - protein, 14 aa, Homo sapiens
  CDR3 for alpha chain variable domain of TCR clone 13707 (TRAV1-2, TRAJ16)
CAVNRFSDGQRLLF

SEQ ID NO: 27414 - protein, 13 aa, Homo sapiens
  CDR3 for beta chain variable domain of TCR clone 13707 (TRBV7-9, TRBJ1-2)
CASSLKQNYGYTF

SEQ ID NO: 27415 - protein, 14 aa, Homo sapiens
  CDR3 for alpha chain variable domain of TCR clone 13708 (TRAV26-1, TRAJ34)
CIVRVAYNTDELIF

SEQ ID NO: 27416 - protein, 15 aa, Homo sapiens
  CDR3 for beta chain variable domain of TCR clone 13708 (TRBV20-1, TRBJ2-7)
CSARVPAAYFYEQYF

SEQ ID NO: 27417 - protein, 11 aa, Homo sapiens
  CDR3 for alpha chain variable domain of TCR clone 13709 (TRAV3, TRAJ21)
CAVGNFNKFYF

SEQ ID NO: 27418 - protein, 16 aa, Homo sapiens
  CDR3 for beta chain variable domain of TCR clone 13709 (TRBV19, TRBJ2-1)
CASSKAGPISYNEQFF

SEQ ID NO: 27419 - protein, 14 aa, Homo sapiens
  CDR3 for alpha chain variable domain of TCR clone 13710 (TRAV13-1, TRAJ40)
CAASMTSGTYKYTF

SEQ ID NO: 27420 - protein, 15 aa, Homo sapiens
  CDR3 for beta chain variable domain of TCR clone 13710 (TRBV7-3, TRBJ2-1)
CASSPTGGGEVEQFF

SEQ ID NO: 27421 - protein, 14 aa, Homo sapiens
  CDR3 for alpha chain variable domain of TCR clone 13711 (TRAV12-2, TRAJ17)
CAVLFEAAGNKLTF

SEQ ID NO: 27422 - protein, 17 aa, Homo sapiens
  CDR3 for beta chain variable domain of TCR clone 13711 (TRBV20-1, TRBJ2-2)
CSASGSGQGGLTGELFF

SEQ ID NO: 27423 - protein, 14 aa, Homo sapiens
  CDR3 for alpha chain variable domain of TCR clone 13712 (TRAV36/DV7, TRAJ53)
CAVVDGGSNYKLTF

SEQ ID NO: 27424 - protein, 14 aa, Homo sapiens
  CDR3 for beta chain variable domain of TCR clone 13712 (TRBV19, TRBJ2-1)
CASPTFVLSGEQFF

SEQ ID NO: 27425 - protein, 12 aa, Homo sapiens
  CDR3 for alpha chain variable domain of TCR clone 13713 (TRAV16, TRAJ10)
CSRTGGGNKLTF

SEQ ID NO: 27426 - protein, 13 aa, Homo sapiens
  CDR3 for beta chain variable domain of TCR clone 13713 (TRBV24-1, TRBJ2-2)
CATSDWSTGELFF

SEQ ID NO: 27427 - protein, 11 aa, Homo sapiens
  CDR3 for alpha chain variable domain of TCR clone 13714 (TRAV21, TRAJ34)
CAHYNTDKLIF

SEQ ID NO: 27428 - protein, 13 aa, Homo sapiens
  CDR3 for beta chain variable domain of TCR clone 13714 (TRBV7-6, TRBJ1-2)
CASSLVADYGDTF

SEQ ID NO: 27429 - protein, 13 aa, Homo sapiens
  CDR3 for alpha chain variable domain of TCR clone 13715 (TRAV17, TRAJ9)
CATDYTGGFKTVF

SEQ ID NO: 27430 - protein, 14 aa, Homo sapiens
  CDR3 for beta chain variable domain of TCR clone 13715 (TRBV19, TRBJ2-5)
CASSMTGQQETQYF

SEQ ID NO: 27431 - protein, 14 aa, Homo sapiens
  CDR3 for alpha chain variable domain of TCR clone 13716 (TRAV17, TRAJ57)
CATDPQGGSEKLVF

SEQ ID NO: 27432 - protein, 18 aa, Homo sapiens
  CDR3 for beta chain variable domain of TCR clone 13716 (TRBV11-2, TRBJ2-3)
CASSLGGASRGAPNTQYF

SEQ ID NO: 27433 - protein, 12 aa, Homo sapiens
  CDR3 for alpha chain variable domain of TCR clone 13717 (TRAV13-2, TRAJ42)
CAEGGSQGNLIF

SEQ ID NO: 27434 - protein, 13 aa, Homo sapiens
  CDR3 for beta chain variable domain of TCR clone 13717 (TRBV15, TRBJ2-7)
CATSTTGHYEQYF

SEQ ID NO: 27435 - protein, 12 aa, Homo sapiens
  CDR3 for alpha chain variable domain of TCR clone 13718 (TRAV8-3, TRAJ26)
CAGDNYGQNFVF

SEQ ID NO: 27436 - protein, 17 aa, Homo sapiens
  CDR3 for beta chain variable domain of TCR clone 13718 (TRBV4-1, TRBJ2-3)
CASSQGYVSGGTDTQYF

SEQ ID NO: 27437 - protein, 14 aa, Homo sapiens
  CDR3 for alpha chain variable domain of TCR clone 13719 (TRAV1-2, TRAJ8)
CAVREDTGFQKLVF

SEQ ID NO: 27438 - protein, 15 aa, Homo sapiens
  CDR3 for beta chain variable domain of TCR clone 13719 (TRBV6-6, TRBJ2-7)
CASSYSYGGSYEQYF

SEQ ID NO: 27439 - protein, 11 aa, Homo sapiens
  CDR3 for alpha chain variable domain of TCR clone 13720 (TRAV12-1, TRAJ30)
CVVSGQDKIIF

SEQ ID NO: 27440 - protein, 12 aa, Homo sapiens
  CDR3 for beta chain variable domain of TCR clone 13720 (TRBV27, TRBJ2-2)
CASKLFTGELFF

SEQ ID NO: 27441 - protein, 12 aa, Homo sapiens
  CDR3 for alpha chain variable domain of TCR clone 13721 (TRAV8-4, TRAJ31)
CAASDSNARLMF

SEQ ID NO: 27442 - protein, 14 aa, Homo sapiens
  CDR3 for beta chain variable domain of TCR clone 13721 (TRBV20-1, TRBJ2-7)
CSAKRGRSSYEQYF

SEQ ID NO: 27443 - protein, 13 aa, Homo sapiens
  CDR3 for alpha chain variable domain of TCR clone 13722 (TRAV35, TRAJ42)
CAGLPGSQGNLIF

SEQ ID NO: 27444 - protein, 14 aa, Homo sapiens
  CDR3 for beta chain variable domain of TCR clone 13722 (TRBV19, TRBJ2-1)
CASPTFVLSGEQFF

SEQ ID NO: 27445 - protein, 14 aa, Homo sapiens
  CDR3 for alpha chain variable domain of TCR clone 13723 (TRAV16, TRAJ33)
CALSAMDSNYQLIW

SEQ ID NO: 27446 - protein, 15 aa, Homo sapiens
  CDR3 for beta chain variable domain of TCR clone 13723 (TRBV11-3, TRBJ2-7)
CASSPGPASSYEQYF

SEQ ID NO: 27447 - protein, 15 aa, Homo sapiens
  CDR3 for alpha chain variable domain of TCR clone 13724 (TRAV26-1, TRAJ39)
CIVRDGSNAGNMLTF

SEQ ID NO: 27448 - protein, 16 aa, Homo sapiens
  CDR3 for beta chain variable domain of TCR clone 13724 (TRBV29-1, TRBJ2-7)
CSVEVVGTSGSYEQYF

SEQ ID NO: 27449 - protein, 17 aa, Homo sapiens
  CDR3 for alpha chain variable domain of TCR clone 13725 (TRAV5, TRAJ37)
CAETPRIGSSNTGKLIF

SEQ ID NO: 27450 - protein, 12 aa, Homo sapiens
  CDR3 for beta chain variable domain of TCR clone 13725 (TRBV19, TRBJ2-1)
CASSRQGAEQFF

SEQ ID NO: 27451 - protein, 13 aa, Homo sapiens
  CDR3 for alpha chain variable domain of TCR clone 13726 (TRAV2, TRAJ29)
CAAQNSGNTPLVF

SEQ ID NO: 27452 - protein, 14 aa, Homo sapiens
  CDR3 for beta chain variable domain of TCR clone 13726 (TRBV7-9, TRBJ2-4)
CASSLAMGGNMQYF

SEQ ID NO: 27453 - protein, 15 aa, Homo sapiens
  CDR3 for alpha chain variable domain of TCR clone 13727 (TRAV3, TRAJ4)
CAVRDGTGGYNKRIF

SEQ ID NO: 27454 - protein, 16 aa, Homo sapiens
  CDR3 for beta chain variable domain of TCR clone 13727 (TRBV27, TRBJ2-2)
CASSSSGVSNTGELFF

SEQ ID NO: 27455 - protein, 11 aa, Homo sapiens
  CDR3 for alpha chain variable domain of TCR clone 13728 (TRAV2, TRAJ33)
CAVESNYQLIC

SEQ ID NO: 27456 - protein, 15 aa, Homo sapiens
  CDR3 for beta chain variable domain of TCR clone 13728 (TRBV19, TRBJ1-1)
CASTSGQIQNTEAFF

SEQ ID NO: 27457 - protein, 10 aa, Homo sapiens
  CDR3 for alpha chain variable domain of TCR clone 13729 (TRAV8-3, TRAJ45)
SGGGADGLTF

SEQ ID NO: 27458 - protein, 13 aa, Homo sapiens
  CDR3 for beta chain variable domain of TCR clone 13729 (TRBV10-3, TRBJ2-7)
CASKLAVNYEQYF

SEQ ID NO: 27459 - protein, 12 aa, Homo sapiens
  CDR3 for alpha chain variable domain of TCR clone 13730 (TRAV8-3, TRAJ20)
CAVGANDYKLSF

SEQ ID NO: 27460 - protein, 15 aa, Homo sapiens
  CDR3 for beta chain variable domain of TCR clone 13730 (TRBV19, TRBJ2-2)
CQPISRDRGTGELFF

SEQ ID NO: 27461 - protein, 13 aa, Homo sapiens
  CDR3 for alpha chain variable domain of TCR clone 13731 (TRAV21, TRAJ27)
CASRPGNAGKSTF

SEQ ID NO: 27462 - protein, 14 aa, Homo sapiens
  CDR3 for beta chain variable domain of TCR clone 13731 (TRBV7-6, TRBJ2-3)
CASSLGTVTDTQYF

SEQ ID NO: 27463 - protein, 15 aa, Homo sapiens
  CDR3 for alpha chain variable domain of TCR clone 13732 (TRAV3, TRAJ20)
CAVRDIKLSDYKISF

SEQ ID NO: 27464 - protein, 15 aa, Homo sapiens
  CDR3 for beta chain variable domain of TCR clone 13732 (TRBV7-9, TRBJ1-6)
CASSSPGRGNSPLHF

SEQ ID NO: 27465 - protein, 10 aa, Homo sapiens
  CDR3 for alpha chain variable domain of TCR clone 13733 (TRAV14/DV4, TRAJ48)
CAPRSEKLTF

SEQ ID NO: 27466 - protein, 15 aa, Homo sapiens
  CDR3 for beta chain variable domain of TCR clone 13733 (TRBV9, TRBJ1-6)
CASSVAGTGDSPLHF

SEQ ID NO: 27467 - protein, 14 aa, Homo sapiens
  CDR3 for alpha chain variable domain of TCR clone 13734 (TRAV20, TRAJ40)
CAVSLTSGTYKYIF

SEQ ID NO: 27468 - protein, 14 aa, Homo sapiens
  CDR3 for beta chain variable domain of TCR clone 13734 (TRBV5-1, TRBJ1-2)
CASSLGERNYGYTF

SEQ ID NO: 27469 - protein, 11 aa, Homo sapiens
  CDR3 for alpha chain variable domain of TCR clone 13735 (TRAV21, TRAJ11)
CAVNGYSTLTF

SEQ ID NO: 27470 - protein, 11 aa, Homo sapiens
  CDR3 for beta chain variable domain of TCR clone 13735 (TRBV19, TRBJ1-1)
CASSIGSEAVF

SEQ ID NO: 27471 - protein, 13 aa, Homo sapiens
  CDR3 for alpha chain variable domain of TCR clone 13736 (TRAV8-3, TRAJ43)
CAVGPDNNNDMRF

SEQ ID NO: 27472 - protein, 12 aa, Homo sapiens
  CDR3 for beta chain variable domain of TCR clone 13736 (TRBV7-2, TRBJ1-6)
CASSLSSSPLHL

SEQ ID NO: 27473 - protein, 11 aa, Homo sapiens
  CDR3 for alpha chain variable domain of TCR clone 13737 (TRAV29/DV5, TRAJ49)
CAAVPGNQFYF

SEQ ID NO: 27474 - protein, 13 aa, Homo sapiens
  CDR3 for beta chain variable domain of TCR clone 13737 (TRBV10-3, TRBJ2-7)
CASKLAVNYEQYF

SEQ ID NO: 27475 - protein, 14 aa, Homo sapiens
  CDR3 for alpha chain variable domain of TCR clone 13738 (TRAV14/DV4, TRAJ34)
CAMRGLYNTDKLIF

SEQ ID NO: 27476 - protein, 15 aa, Homo sapiens
  CDR3 for beta chain variable domain of TCR clone 13738 (TRBV18, TRBJ2-5)
CASSPDPGLQETQYF

SEQ ID NO: 27477 - protein, 13 aa, Homo sapiens
  CDR3 for alpha chain variable domain of TCR clone 13739 (TRAV24, TRAJ15)
CAFKDQAGTALIF

SEQ ID NO: 27478 - protein, 14 aa, Homo sapiens
  CDR3 for beta chain variable domain of TCR clone 13739 (TRBV2, TRBJ2-1)
CASGLSGSQGEQFF

SEQ ID NO: 27479 - protein, 14 aa, Homo sapiens
  CDR3 for alpha chain variable domain of TCR clone 13740 (TRAV13-1, TRAJ35)
CAASTGGFGNVLHC

SEQ ID NO: 27480 - protein, 13 aa, Homo sapiens
  CDR3 for beta chain variable domain of TCR clone 13740 (TRBV7-3, TRBJ1-1)
CASSQDWGAEAFF

SEQ ID NO: 27481 - protein, 11 aa, Homo sapiens
  CDR3 for alpha chain variable domain of TCR clone 13741 (TRAV3, TRAJ21)
CAVGNFNKFYF

SEQ ID NO: 27482 - protein, 16 aa, Homo sapiens
  CDR3 for beta chain variable domain of TCR clone 13741 (TRBV19, TRBJ2-1)
CASSKAGPSSYNAQFF

SEQ ID NO: 27483 - protein, 15 aa, Homo sapiens
  CDR3 for alpha chain variable domain of TCR clone 13742 (TRAV12-3, TRAJ6)
CAMSATTGGSYITTF

SEQ ID NO: 27484 - protein, 16 aa, Homo sapiens
  CDR3 for beta chain variable domain of TCR clone 13742 (TRBV20-1, TRBJ1-2)
CSASMGQGVANYGYTF

SEQ ID NO: 27485 - protein, 12 aa, Homo sapiens
  CDR3 for alpha chain variable domain of TCR clone 13743 (TRAV13-2, TRAJ23)
CAERHRGGKLIF

SEQ ID NO: 27486 - protein, 16 aa, Homo sapiens
  CDR3 for beta chain variable domain of TCR clone 13743 (TRBV4-3, TRBJ2-2)
CASSHLQGSGTGELFF

SEQ ID NO: 27487 - protein, 15 aa, Homo sapiens
  CDR3 for alpha chain variable domain of TCR clone 13744 (TRAV26-1, TRAJ29)
CIVRVKGSGNTPLVF

SEQ ID NO: 27488 - protein, 14 aa, Homo sapiens
  CDR3 for beta chain variable domain of TCR clone 13744 (TRBV18, TRBJ2-5)
CASSPGVSQETQYF

SEQ ID NO: 27489 - protein, 14 aa, Homo sapiens
  CDR3 for alpha chain variable domain of TCR clone 13745 (TRAV12-3, TRAJ10)
SHLPLTGGGNKLTF

SEQ ID NO: 27490 - protein, 16 aa, Homo sapiens
  CDR3 for beta chain variable domain of TCR clone 13745 (TRBV5-4, TRBJ2-3)
CASSFGAGEGTDTQYF

SEQ ID NO: 27491 - protein, 13 aa, Homo sapiens
  CDR3 for alpha chain variable domain of TCR clone 13746 (TRAV30, TRAJ34)
CGTVGYNTDKLIF

SEQ ID NO: 27492 - protein, 16 aa, Homo sapiens
  CDR3 for beta chain variable domain of TCR clone 13746 (TRBV11-2, TRBJ2-7)
CASSLDAGTGVYEQYF

SEQ ID NO: 27493 - protein, 15 aa, Homo sapiens
  CDR3 for alpha chain variable domain of TCR clone 13747 (TRAV2, TRAJ9)
CAVAALNTGGFKTIF

SEQ ID NO: 27494 - protein, 13 aa, Homo sapiens
  CDR3 for beta chain variable domain of TCR clone 13747 (TRBV5-5, TRBJ1-2)
CASSFWRGEDYTF

SEQ ID NO: 27495 - protein, 18 aa, Homo sapiens
  CDR3 for alpha chain variable domain of TCR clone 13748 (TRAV21, TRAJ52)
CAVKPSPAGGTSYGKLTF

SEQ ID NO: 27496 - protein, 17 aa, Homo sapiens
  CDR3 for beta chain variable domain of TCR clone 13748 (TRBV13, TRBJ2-3)
CASSLSRVAGGRNTQYF

SEQ ID NO: 27497 - protein, 12 aa, Homo sapiens
  CDR3 for alpha chain variable domain of TCR clone 13749 (TRAV13-2, TRAJ23)
CAERHRGGKLIF

SEQ ID NO: 27498 - protein, 16 aa, Homo sapiens
  CDR3 for beta chain variable domain of TCR clone 13749 (TRBV20-1, TRBJ1-4)
CSAPGQGLLTNEKLFL

SEQ ID NO: 27499 - protein, 14 aa, Homo sapiens
  CDR3 for alpha chain variable domain of TCR clone 13750 (TRAV2, TRAJ37)
CAADFTSNTGKLIF

SEQ ID NO: 27500 - protein, 15 aa, Homo sapiens
  CDR3 for beta chain variable domain of TCR clone 13750 (TRBV20-1, TRBJ1-1)
CSASRGVTGNTEAFF

SEQ ID NO: 27501 - protein, 14 aa, Homo sapiens
  CDR3 for alpha chain variable domain of TCR clone 13751 (TRAV12-2, TRAJ15)
CAPHTGQAGTALIF

SEQ ID NO: 27502 - protein, 14 aa, Homo sapiens
  CDR3 for beta chain variable domain of TCR clone 13751 (TRBV12-4, TRBJ1-1)
CASSLGTGGTEAFF

SEQ ID NO: 27503 - protein, 14 aa, Homo sapiens
  CDR3 for alpha chain variable domain of TCR clone 13752 (TRAV17, TRAJ35)
CATDRPGFGNVLHC

SEQ ID NO: 27504 - protein, 15 aa, Homo sapiens
  CDR3 for beta chain variable domain of TCR clone 13752 (TRBV28, TRBJ2-5)
CASSSGRVIQETQYF

SEQ ID NO: 27505 - protein, 12 aa, Homo sapiens
  CDR3 for alpha chain variable domain of TCR clone 13753 (TRAV12-1, TRAJ40)
CVVYSGTYKYIF

SEQ ID NO: 27506 - protein, 18 aa, Homo sapiens
  CDR3 for beta chain variable domain of TCR clone 13753 (TRBV11-2, TRBJ2-3)
CASSLGGASRGAPNKQYF

SEQ ID NO: 27507 - protein, 15 aa, Homo sapiens
  CDR3 for alpha chain variable domain of TCR clone 13754 (TRAV2, TRAJ9)
CAVEDRGTGGFKTIF

SEQ ID NO: 27508 - protein, 16 aa, Homo sapiens
  CDR3 for beta chain variable domain of TCR clone 13754 (TRBV24-1, TRBJ2-3)
CATSGPGTGATDTQYF

SEQ ID NO: 27509 - protein, 12 aa, Homo sapiens
  CDR3 for alpha chain variable domain of TCR clone 13755 (TRAV4, TRAJ26)
CLVGDYGQNFVF

SEQ ID NO: 27510 - protein, 14 aa, Homo sapiens
  CDR3 for beta chain variable domain of TCR clone 13755 (TRBV6-1, TRBJ1-3)
CASVQGGGGNTIYF

SEQ ID NO: 27511 - protein, 14 aa, Homo sapiens
  CDR3 for alpha chain variable domain of TCR clone 13756 (TRAV9-2, TRAJ39)
CALYIYNAGNMLTF

SEQ ID NO: 27512 - protein, 19 aa, Homo sapiens
  CDR3 for beta chain variable domain of TCR clone 13756 (TRBV25-1, TRBJ2-2)
CAILVYRVDRGRKTGELFF

SEQ ID NO: 27513 - protein, 11 aa, Homo sapiens
  CDR3 for alpha chain variable domain of TCR clone 13757 (TRAV2, TRAJ21)
CAVFNFNKFYF

SEQ ID NO: 27514 - protein, 14 aa, Homo sapiens
  CDR3 for beta chain variable domain of TCR clone 13757 (TRBV15, TRBJ2-3)
RATRSGTSTDTQYF

SEQ ID NO: 27515 - protein, 13 aa, Homo sapiens
  CDR3 for alpha chain variable domain of TCR clone 13758 (TRAV20, TRAJ37)
CAGCSSNTGRLIF

SEQ ID NO: 27516 - protein, 11 aa, Homo sapiens
  CDR3 for beta chain variable domain of TCR clone 13758 (TRBV12-4, TRBJ2-3)
CASTATDTQYF

SEQ ID NO: 27517 - protein, 13 aa, Homo sapiens
  CDR3 for alpha chain variable domain of TCR clone 13759 (TRAV29/DV5, TRAJ31)
CAASRNNNARLMF

SEQ ID NO: 27518 - protein, 13 aa, Homo sapiens
  CDR3 for beta chain variable domain of TCR clone 13759 (TRBV29-1, TRBJ2-5)
CSVTIASEETQYF

SEQ ID NO: 27519 - protein, 14 aa, Homo sapiens
  CDR3 for alpha chain variable domain of TCR clone 13760 (TRAV12-2, TRAJ40)
CAVKIHSGTYKYIF

SEQ ID NO: 27520 - protein, 14 aa, Homo sapiens
  CDR3 for beta chain variable domain of TCR clone 13760 (TRBV20-1, TRBJ1-1)
CSAQTRIGGTEAFF

SEQ ID NO: 27521 - protein, 12 aa, Homo sapiens
  CDR3 for alpha chain variable domain of TCR clone 13761 (TRAV26-1, TRAJ52)
NAGGTSYGKLTF

SEQ ID NO: 27522 - protein, 14 aa, Homo sapiens
  CDR3 for beta chain variable domain of TCR clone 13761 (TRBV15, TRBJ2-7)
CATSRVARGYEQYF

SEQ ID NO: 27523 - protein, 16 aa, Homo sapiens
  CDR3 for alpha chain variable domain of TCR clone 13762 (TRAV30, TRAJ24)
CGTEIVDADSWGKFQF

SEQ ID NO: 27524 - protein, 16 aa, Homo sapiens
  CDR3 for beta chain variable domain of TCR clone 13762 (TRBV13, TRBJ2-2)
CASSPRTGEHTGELFF

SEQ ID NO: 27525 - protein, 11 aa, Homo sapiens
  CDR3 for alpha chain variable domain of TCR clone 13763 (TRAV38-2/DV8, TRAJ24)
CALDSWGKFQF

SEQ ID NO: 27526 - protein, 14 aa, Homo sapiens
  CDR3 for beta chain variable domain of TCR clone 13763 (TRBV25-1, TRBJ2-1)
CASSPRGPYNEQFF

SEQ ID NO: 27527 - protein, 13 aa, Homo sapiens
  CDR3 for alpha chain variable domain of TCR clone 13764 (TRAV1-2, TRAJ31)
CAASRNNNARLMF

SEQ ID NO: 27528 - protein, 18 aa, Homo sapiens
  CDR3 for beta chain variable domain of TCR clone 13764 (TRBV7-2, TRBJ2-3)
CASSLGLAGGRDTDTQYF

SEQ ID NO: 27529 - protein, 16 aa, Homo sapiens
  CDR3 for alpha chain variable domain of TCR clone 13765 (TRAV26-1, TRAJ37)
CVVRGDGSGNTGKLIF

SEQ ID NO: 27530 - protein, 17 aa, Homo sapiens
  CDR3 for beta chain variable domain of TCR clone 13765 (TRBV4-1, TRBJ2-7)
CASSRDPLGVRGGEQYF

SEQ ID NO: 27531 - protein, 12 aa, Homo sapiens
  CDR3 for alpha chain variable domain of TCR clone 13766 (TRAV12-3, TRAJ17)
CAMTLTGNKLTF

SEQ ID NO: 27532 - protein, 15 aa, Homo sapiens
  CDR3 for beta chain variable domain of TCR clone 13766 (TRBV20-1, TRBJ2-7)
CSARDRVSGKDEQYF

SEQ ID NO: 27533 - protein, 12 aa, Homo sapiens
  CDR3 for alpha chain variable domain of TCR clone 13767 (TRAV2, TRAJ9)
CAVGAGGFRTIF

SEQ ID NO: 27534 - protein, 16 aa, Homo sapiens
  CDR3 for beta chain variable domain of TCR clone 13767 (TRBV13, TRBJ2-2)
CASSPRTGEHTGELFF

SEQ ID NO: 27535 - protein, 14 aa, Homo sapiens
  CDR3 for alpha chain variable domain of TCR clone 13768 (TRAV17, TRAJ57)
CATDPQGGSEKLVF

SEQ ID NO: 27536 - protein, 14 aa, Homo sapiens
  CDR3 for beta chain variable domain of TCR clone 13768 (TRBV19, TRBJ2-1)
CASPTFVLSGEQFF

SEQ ID NO: 27537 - protein, 14 aa, Homo sapiens
  CDR3 for alpha chain variable domain of TCR clone 13769 (TRAV8-4, TRAJ8)
CAVSLNTGFQKLVF

SEQ ID NO: 27538 - protein, 13 aa, Homo sapiens
  CDR3 for beta chain variable domain of TCR clone 13769 (TRBV7-9, TRBJ2-3)
CASSPGPTDTQYF

SEQ ID NO: 27539 - protein, 14 aa, Homo sapiens
  CDR3 for alpha chain variable domain of TCR clone 13770 (TRAV12-2, TRAJ53)
CAVKGGGSNYKLTF

SEQ ID NO: 27540 - protein, 15 aa, Homo sapiens
  CDR3 for beta chain variable domain of TCR clone 13770 (TRBV11-3, TRBJ2-3)
CASLKDGREGDTQYF

SEQ ID NO: 27541 - protein, 12 aa, Homo sapiens
  CDR3 for alpha chain variable domain of TCR clone 13771 (TRAV12-3, TRAJ17)
CAMTLTGNKLTF

SEQ ID NO: 27542 - protein, 12 aa, Homo sapiens
  CDR3 for beta chain variable domain of TCR clone 13771 (TRBV19, TRBJ1-5)
CASSIAQQPQHF

SEQ ID NO: 27543 - protein, 17 aa, Homo sapiens
  CDR3 for alpha chain variable domain of TCR clone 13772 (TRAV27, TRAJ18)
CAGLHRGRGSTLGRLYF

SEQ ID NO: 27544 - protein, 14 aa, Homo sapiens
  CDR3 for beta chain variable domain of TCR clone 13772 (TRBV20-1, TRBJ1-5)
CSARGRGSDQPQHF

SEQ ID NO: 27545 - protein, 10 aa, Homo sapiens
  CDR3 for alpha chain variable domain of TCR clone 13773 (TRAV12-3, TRAJ49)
CAMSDDQFYF

SEQ ID NO: 27546 - protein, 13 aa, Homo sapiens
  CDR3 for beta chain variable domain of TCR clone 13773 (TRBV12-4, TRBJ1-1)
CASSPGTGFEAFF

SEQ ID NO: 27547 - protein, 18 aa, Homo sapiens
  CDR3 for alpha chain variable domain of TCR clone 13774 (TRAV13-1, TRAJ52)
CAASKRSAGGTSYGRLTF

SEQ ID NO: 27548 - protein, 13 aa, Homo sapiens
  CDR3 for beta chain variable domain of TCR clone 13774 (TRBV12-4, TRBJ1-2)
CASSLRQGKGYTF

SEQ ID NO: 27549 - protein, 14 aa, Homo sapiens
  CDR3 for alpha chain variable domain of TCR clone 13775 (TRAV12-1, TRAJ22)
CVAFSSGSARQLTF

SEQ ID NO: 27550 - protein, 12 aa, Homo sapiens
  CDR3 for beta chain variable domain of TCR clone 13775 (TRBV2, TRBJ2-7)
CASTYRTDEQYF

SEQ ID NO: 27551 - protein, 14 aa, Homo sapiens
  CDR3 for alpha chain variable domain of TCR clone 13776 (TRAV2, TRAJ28)
CAATSGAGSYQLTF

SEQ ID NO: 27552 - protein, 15 aa, Homo sapiens
  CDR3 for beta chain variable domain of TCR clone 13776 (TRBV9, TRBJ2-2)
CASSVEDTYTGELFF

SEQ ID NO: 27553 - protein, 12 aa, Homo sapiens
  CDR3 for alpha chain variable domain of TCR clone 13777 (TRAV12-1, TRAJ40)
CVFYSGAYKYIF

SEQ ID NO: 27554 - protein, 18 aa, Homo sapiens
  CDR3 for beta chain variable domain of TCR clone 13777 (TRBV12-4, TRBJ2-2)
CASSLVAGTRGRTGELFF

SEQ ID NO: 27555 - protein, 13 aa, Homo sapiens
  CDR3 for alpha chain variable domain of TCR clone 13778 (TRAV8-6, TRAJ21)
CAVSPSSLNNFYF

SEQ ID NO: 27556 - protein, 14 aa, Homo sapiens
  CDR3 for beta chain variable domain of TCR clone 13778 (TRBV7-9, TRBJ2-5)
CASSLDTAQETQYF

SEQ ID NO: 27557 - protein, 14 aa, Homo sapiens
  CDR3 for alpha chain variable domain of TCR clone 13779 (TRAV12-1, TRAJ17)
CVVNYKAAGNKLTF

SEQ ID NO: 27558 - protein, 13 aa, Homo sapiens
  CDR3 for beta chain variable domain of TCR clone 13779 (TRBV4-2, TRBJ1-1)
CASSQAGNTEAFF

SEQ ID NO: 27559 - protein, 13 aa, Homo sapiens
  CDR3 for alpha chain variable domain of TCR clone 13780 (TRAV1-1, TRAJ9)
CAAKNTGGFKTIF

SEQ ID NO: 27560 - protein, 13 aa, Homo sapiens
  CDR3 for beta chain variable domain of TCR clone 13780 (TRBV11-2, TRBJ2-5)
CASSFSSQETQYF

SEQ ID NO: 27561 - protein, 14 aa, Homo sapiens
  CDR3 for alpha chain variable domain of TCR clone 13781 (TRAV35, TRAJ22)
CAGLRPGSARQLTF

SEQ ID NO: 27562 - protein, 15 aa, Homo sapiens
  CDR3 for beta chain variable domain of TCR clone 13781 (TRBV12-4, TRBJ2-5)
CASSPPTGLQETQYL

SEQ ID NO: 27563 - protein, 16 aa, Homo sapiens
  CDR3 for alpha chain variable domain of TCR clone 13782 (TRAV12-3, TRAJ53)
CAMSPGSGGSNYKLTF

SEQ ID NO: 27564 - protein, 15 aa, Homo sapiens
  CDR3 for beta chain variable domain of TCR clone 13782 (TRBV12-4, TRBJ1-6)
CASSLGGQGTSPLHF

SEQ ID NO: 27565 - protein, 14 aa, Homo sapiens
  CDR3 for alpha chain variable domain of TCR clone 13783 (TRAV12-2, TRAJ40)
CAMKIPSGTYKYIF

SEQ ID NO: 27566 - protein, 14 aa, Homo sapiens
  CDR3 for beta chain variable domain of TCR clone 13783 (TRBV20-1, TRBJ1-1)
CSAQTRIGGTEAFF

SEQ ID NO: 27567 - protein, 10 aa, Homo sapiens
  CDR3 for alpha chain variable domain of TCR clone 13784 (TRAV14/DV4, TRAJ48)
CAPRSEKLTF

SEQ ID NO: 27568 - protein, 13 aa, Homo sapiens
  CDR3 for beta chain variable domain of TCR clone 13784 (TRBV13, TRBJ2-5)
CASSPEVGETQYF

SEQ ID NO: 27569 - protein, 14 aa, Homo sapiens
  CDR3 for alpha chain variable domain of TCR clone 13785 (TRAV8-1, TRAJ13)
CAVKRSGGYQKVTF

SEQ ID NO: 27570 - protein, 11 aa, Homo sapiens
  CDR3 for beta chain variable domain of TCR clone 13785 (TRBV29-1, TRBJ2-5)
CSEDRTGTQYF

SEQ ID NO: 27571 - protein, 16 aa, Homo sapiens
  CDR3 for alpha chain variable domain of TCR clone 13786 (TRAV4, TRAJ22)
CLVGDLYSGSARQPTF

SEQ ID NO: 27572 - protein, 16 aa, Homo sapiens
  CDR3 for beta chain variable domain of TCR clone 13786 (TRBV7-9, TRBJ2-1)
CASSDVAGGSYNEQFF

SEQ ID NO: 27573 - protein, 13 aa, Homo sapiens
  CDR3 for alpha chain variable domain of TCR clone 13787 (TRAV3, TRAJ41)
CAASSNSGYALNF

SEQ ID NO: 27574 - protein, 14 aa, Homo sapiens
  CDR3 for beta chain variable domain of TCR clone 13787 (TRBV7-2, TRBJ2-7)
CASSPKTSFYEQYF

SEQ ID NO: 27575 - protein, 15 aa, Homo sapiens
  CDR3 for alpha chain variable domain of TCR clone 13788 (TRAV8-3, TRAJ34)
DAAEYFCAIPGKLIF

SEQ ID NO: 27576 - protein, 15 aa, Homo sapiens
  CDR3 for beta chain variable domain of TCR clone 13788 (TRBV5-7, TRBJ2-1)
CASSRRLAGDNEQFF

SEQ ID NO: 27577 - protein, 11 aa, Homo sapiens
  CDR3 for alpha chain variable domain of TCR clone 13789 (TRAV2, TRAJ13)
CASGGYQKVTF

SEQ ID NO: 27578 - protein, 17 aa, Homo sapiens
  CDR3 for beta chain variable domain of TCR clone 13789 (TRBV7-8, TRBJ2-6)
CASSAGTGGAGANVLTF

SEQ ID NO: 27579 - protein, 13 aa, Homo sapiens
  CDR3 for alpha chain variable domain of TCR clone 13790 (TRAV20, TRAJ20)
CAVQAGSGYKLSF

SEQ ID NO: 27580 - protein, 12 aa, Homo sapiens
  CDR3 for beta chain variable domain of TCR clone 13790 (TRBV3-1, TRBJ2-3)
CQQPRGGDTQYF

SEQ ID NO: 27581 - protein, 13 aa, Homo sapiens
  CDR3 for alpha chain variable domain of TCR clone 13791 (TRAV13-1, TRAJ21)
CAASIYNFNKFYF

SEQ ID NO: 27582 - protein, 15 aa, Homo sapiens
  CDR3 for beta chain variable domain of TCR clone 13791 (TRBV27, TRBJ1-4)
CASSLMGDEKLFLAV

SEQ ID NO: 27583 - protein, 20 aa, Homo sapiens
  CDR3 for alpha chain variable domain of TCR clone 13792 (TRAV26-1, TRAJ42)
CYVLLHRQTYYGGSQGNLIF

SEQ ID NO: 27584 - protein, 16 aa, Homo sapiens
  CDR3 for beta chain variable domain of TCR clone 13792 (TRBV7-3, TRBJ2-2)
CASSLKRGTLSGELFF

SEQ ID NO: 27585 - protein, 11 aa, Homo sapiens
  CDR3 for alpha chain variable domain of TCR clone 13793 (TRAV3, TRAJ21)
CAVGNFNKFYF

SEQ ID NO: 27586 - protein, 19 aa, Homo sapiens
  CDR3 for beta chain variable domain of TCR clone 13793 (TRBV7-2, TRBJ2-3)
CASSFLSRNWGGGTDTQYF

SEQ ID NO: 27587 - protein, 16 aa, Homo sapiens
  CDR3 for alpha chain variable domain of TCR clone 13794 (TRAV16, TRAJ52)
CALSAAGGTSYGKLTF

SEQ ID NO: 27588 - protein, 17 aa, Homo sapiens
  CDR3 for beta chain variable domain of TCR clone 13794 (TRBV11-3, TRBJ2-1)
CASSLYPPGVEYNEQFF

SEQ ID NO: 27589 - protein, 14 aa, Homo sapiens
  CDR3 for alpha chain variable domain of TCR clone 13795 (TRAV38-1, TRAJ40)
CALRPASGTYKYIF

SEQ ID NO: 27590 - protein, 14 aa, Homo sapiens
  CDR3 for beta chain variable domain of TCR clone 13795 (TRBV25-1, TRBJ1-1)
CASTHLGGNTEAFF

SEQ ID NO: 27591 - protein, 16 aa, Homo sapiens
  CDR3 for alpha chain variable domain of TCR clone 13796 (TRAV9-2, TRAJ42)
CALNLNYGGSQGNLIF

SEQ ID NO: 27592 - protein, 15 aa, Homo sapiens
  CDR3 for beta chain variable domain of TCR clone 13796 (TRBV6-5, TRBJ1-5)
CASSLTALGNQPQHF

SEQ ID NO: 27593 - protein, 16 aa, Homo sapiens
  CDR3 for alpha chain variable domain of TCR clone 13797 (TRAV16, TRAJ4)
CALSRMFSGGYNKLIF

SEQ ID NO: 27594 - protein, 16 aa, Homo sapiens
  CDR3 for beta chain variable domain of TCR clone 13797 (TRBV24-1, TRBJ2-3)
CATSDPGAGATDTQYF

SEQ ID NO: 27595 - protein, 14 aa, Homo sapiens
  CDR3 for alpha chain variable domain of TCR clone 13798 (TRAV12-2, TRAJ13)
CAVKKTGGYQKVTF

SEQ ID NO: 27596 - protein, 15 aa, Homo sapiens
  CDR3 for beta chain variable domain of TCR clone 13798 (TRBV27, TRBJ2-1)
CSSSNGGGSSNEQFF

SEQ ID NO: 27597 - protein, 16 aa, Homo sapiens
  CDR3 for alpha chain variable domain of TCR clone 13799 (TRAV30, TRAJ24)
CGTEIVDADSWGKFQF

SEQ ID NO: 27598 - protein, 14 aa, Homo sapiens
  CDR3 for beta chain variable domain of TCR clone 13799 (TRBV20-1, TRBJ2-1)
CSAQIGGSANEQFF

SEQ ID NO: 27599 - protein, 12 aa, Homo sapiens
  CDR3 for alpha chain variable domain of TCR clone 13800 (TRAV6, TRAJ22)
CAKKGFCKATDL

SEQ ID NO: 27600 - protein, 16 aa, Homo sapiens
  CDR3 for beta chain variable domain of TCR clone 13800 (TRBV20-1, TRBJ1-4)
CSAPGQGLLTNEKLFF

SEQ ID NO: 27601 - protein, 14 aa, Homo sapiens
  CDR3 for alpha chain variable domain of TCR clone 13801 (TRAV12-2, TRAJ17)
FAVLFKAAGNKLTF

SEQ ID NO: 27602 - protein, 17 aa, Homo sapiens
  CDR3 for beta chain variable domain of TCR clone 13801 (TRBV20-1, TRBJ2-2)
CSASGSGQGGLTGELFF

SEQ ID NO: 27603 - protein, 13 aa, Homo sapiens
  CDR3 for alpha chain variable domain of TCR clone 13802 (TRAV1-2, TRAJ9)
CAALNTGGFKTIF

SEQ ID NO: 27604 - protein, 15 aa, Homo sapiens
  CDR3 for beta chain variable domain of TCR clone 13802 (TRBV19, TRBJ1-1)
CASASGQIQNTEAFF

SEQ ID NO: 27605 - protein, 11 aa, Homo sapiens
  CDR3 for alpha chain variable domain of TCR clone 13803 (TRAV2, TRAJ13)
CASGGYQKVTF

SEQ ID NO: 27606 - protein, 15 aa, Homo sapiens
  CDR3 for beta chain variable domain of TCR clone 13803 (TRBV18, TRBJ2-7)
CASSPSSTGNYEQYF

SEQ ID NO: 27607 - protein, 14 aa, Homo sapiens
  CDR3 for alpha chain variable domain of TCR clone 13804 (TRAV8-3, TRAJ39)
CAVGANNAGNMLTF

SEQ ID NO: 27608 - protein, 15 aa, Homo sapiens
  CDR3 for beta chain variable domain of TCR clone 13804 (TRBV4-3, TRBJ1-1)
CASSQELGRETEAFF

SEQ ID NO: 27609 - protein, 12 aa, Homo sapiens
  CDR3 for alpha chain variable domain of TCR clone 13805 (TRAV4, TRAJ26)
CLVGDYGQNFVF

SEQ ID NO: 27610 - protein, 16 aa, Homo sapiens
  CDR3 for beta chain variable domain of TCR clone 13805 (TRBV7-2, TRBJ1-2)
CASSSNQDRRGHGYAF

SEQ ID NO: 27611 - protein, 11 aa, Homo sapiens
  CDR3 for alpha chain variable domain of TCR clone 13806 (TRAV1-1, TRAJ23)
CAVRQGGKLIF

SEQ ID NO: 27612 - protein, 20 aa, Homo sapiens
  CDR3 for beta chain variable domain of TCR clone 13806 (TRBV7-8, TRBJ2-2)
CASRHLFPGPTIHITGELFF

SEQ ID NO: 27613 - protein, 13 aa, Homo sapiens
  CDR3 for alpha chain variable domain of TCR clone 13807 (TRAV2, TRAJ40)
CAVVTSGTYKYIF

SEQ ID NO: 27614 - protein, 20 aa, Homo sapiens
  CDR3 for beta chain variable domain of TCR clone 13807 (TRBV7-8, TRBJ2-2)
CASSHLFPGPTIHITGELFF

SEQ ID NO: 27615 - protein, 16 aa, Homo sapiens
  CDR3 for alpha chain variable domain of TCR clone 13808 (TRAV30, TRAJ24)
CGTEIVDADSWGKLQF

SEQ ID NO: 27616 - protein, 13 aa, Homo sapiens
  CDR3 for beta chain variable domain of TCR clone 13808 (TRBV7-3, TRBJ1-1)
CASSQDWGAEAFF

SEQ ID NO: 27617 - protein, 14 aa, Homo sapiens
  CDR3 for alpha chain variable domain of TCR clone 13809 (TRAV9-2, TRAJ39)
CALYIYNAGNMLTF

SEQ ID NO: 27618 - protein, 17 aa, Homo sapiens
  CDR3 for beta chain variable domain of TCR clone 13809 (TRBV5-5, TRBJ1-1)
CASSLRFRGLMNTEAFF

SEQ ID NO: 27619 - protein, 15 aa, Homo sapiens
  CDR3 for alpha chain variable domain of TCR clone 13810 (TRAV8-3, TRAJ45)
CASSYSGGGADGLTF

SEQ ID NO: 27620 - protein, 13 aa, Homo sapiens
  CDR3 for beta chain variable domain of TCR clone 13810 (TRBV10-3, TRBJ2-7)
CASKLEVNYEQYF

SEQ ID NO: 27621 - protein, 15 aa, Homo sapiens
  CDR3 for alpha chain variable domain of TCR clone 13811 (TRAV12-3, TRAJ6)
CAMSATTGGSYIPTF

SEQ ID NO: 27622 - protein, 16 aa, Homo sapiens
  CDR3 for beta chain variable domain of TCR clone 13811 (TRBV20-1, TRBJ1-2)
CSASIGQGVANYGYTF

SEQ ID NO: 27623 - protein, 14 aa, Homo sapiens
  CDR3 for alpha chain variable domain of TCR clone 13812 (TRAV1-2, TRAJ16)
CAVNRFSDGHKLLF

SEQ ID NO: 27624 - protein, 15 aa, Homo sapiens
  CDR3 for beta chain variable domain of TCR clone 13812 (TRBV9, TRBJ1-6)
CASSVAGTGDSPLHF

SEQ ID NO: 27625 - protein, 11 aa, Homo sapiens
  CDR3 for alpha chain variable domain of TCR clone 13813 (TRAV1-1, TRAJ23)
CAVRQGGKIIF

SEQ ID NO: 27626 - protein, 20 aa, Homo sapiens
  CDR3 for beta chain variable domain of TCR clone 13813 (TRBV7-8, TRBJ2-2)
CASSHLFPGPTIHITGELFF

SEQ ID NO: 27627 - protein, 13 aa, Homo sapiens
  CDR3 for alpha chain variable domain of TCR clone 13814 (TRAV8-3, TRAJ28)
CAVGAVGSYQLTF

SEQ ID NO: 27628 - protein, 14 aa, Homo sapiens
  CDR3 for beta chain variable domain of TCR clone 13814 (TRBV7-2, TRBJ2-7)
CASRSQGAAYEQYL

SEQ ID NO: 27629 - protein, 12 aa, Homo sapiens
  CDR3 for alpha chain variable domain of TCR clone 13815 (TRAV3, TRAJ43)
CAVRDPNNDMRF

SEQ ID NO: 27630 - protein, 15 aa, Homo sapiens
  CDR3 for beta chain variable domain of TCR clone 13815 (TRBV27, TRBJ1-5)
CASSLGTGFDQTQHF

SEQ ID NO: 27631 - protein, 16 aa, Homo sapiens
  CDR3 for alpha chain variable domain of TCR clone 13816 (TRAV12-3, TRAJ53)
CAMSPGSGGSNYKLTF

SEQ ID NO: 27632 - protein, 11 aa, Homo sapiens
  CDR3 for beta chain variable domain of TCR clone 13816 (TRBV29-1, TRBJ2-5)
CSEDRTGTQHF

SEQ ID NO: 27633 - protein, 11 aa, Homo sapiens
  CDR3 for alpha chain variable domain of TCR clone 13817 (TRAV10, TRAJ6)
CGPGGSYIPTF

SEQ ID NO: 27634 - protein, 13 aa, Homo sapiens
  CDR3 for beta chain variable domain of TCR clone 13817 (TRBV12-4, TRBJ2-5)
CASRLAVQETQYF

SEQ ID NO: 27635 - protein, 14 aa, Homo sapiens
  CDR3 for alpha chain variable domain of TCR clone 13818 (TRAV12-2, TRAJ40)
CAVKIPSGTYKYIF

SEQ ID NO: 27636 - protein, 14 aa, Homo sapiens
  CDR3 for beta chain variable domain of TCR clone 13818 (TRBV20-1, TRBJ1-1)
CSAQTRIVGTEAFF

SEQ ID NO: 27637 - protein, 13 aa, Homo sapiens
  CDR3 for alpha chain variable domain of TCR clone 13819 (TRAV8-3, TRAJ28)
CAVGAVGSYQLTF

SEQ ID NO: 27638 - protein, 15 aa, Homo sapiens
  CDR3 for beta chain variable domain of TCR clone 13819 (TRBV7-9, TRBJ1-5)
CASSQGHQPKQPQHF

SEQ ID NO: 27639 - protein, 18 aa, Homo sapiens
  CDR3 for alpha chain variable domain of TCR clone 13820 (TRAV26-1, TRAJ23)
CIVRVGLEVWNQGGKLIF

SEQ ID NO: 27640 - protein, 13 aa, Homo sapiens
  CDR3 for beta chain variable domain of TCR clone 13820 (TRBV7-3, TRBJ1-1)
CASSQDWGAEAFF

SEQ ID NO: 27641 - protein, 14 aa, Homo sapiens
  CDR3 for alpha chain variable domain of TCR clone 13821 (TRAV13-2, TRAJ11)
CAETGNSGYSTLTF

SEQ ID NO: 27642 - protein, 17 aa, Homo sapiens
  CDR3 for beta chain variable domain of TCR clone 13821 (TRBV29-1, TRBJ2-7)
CSVVFPADFTGAYEQYF

SEQ ID NO: 27643 - protein, 13 aa, Homo sapiens
  CDR3 for alpha chain variable domain of TCR clone 13822 (TRAV21, TRAJ27)
CAARPGNAGKSTF

SEQ ID NO: 27644 - protein, 14 aa, Homo sapiens
  CDR3 for beta chain variable domain of TCR clone 13822 (TRBV7-6, TRBJ2-3)
CASSLGTVTDKQYF

SEQ ID NO: 27645 - protein, 11 aa, Homo sapiens
  CDR3 for alpha chain variable domain of TCR clone 13823 (TRAV13-2, TRAJ54)
CAESGSGSPEA

SEQ ID NO: 27646 - protein, 15 aa, Homo sapiens
  CDR3 for beta chain variable domain of TCR clone 13823 (TRBV20-1, TRBJ2-7)
CSAESGTSGAYEQYF

SEQ ID NO: 27647 - protein, 13 aa, Homo sapiens
  CDR3 for alpha chain variable domain of TCR clone 13824 (TRAV2, TRAJ40)
CAVVTSGTYKYIF

SEQ ID NO: 27648 - protein, 14 aa, Homo sapiens
  CDR3 for beta chain variable domain of TCR clone 13824 (TRBV7-3, TRBJ2-2)
CASSSGGYTGELFF

SEQ ID NO: 27649 - protein, 13 aa, Homo sapiens
  CDR3 for alpha chain variable domain of TCR clone 13825 (TRAV2, TRAJ40)
CAVVTSGTYKYIF

SEQ ID NO: 27650 - protein, 15 aa, Homo sapiens
  CDR3 for beta chain variable domain of TCR clone 13825 (TRBV11-3, TRBJ2-3)
CAGLKDGREGDTQYF

SEQ ID NO: 27651 - protein, 12 aa, Homo sapiens
  CDR3 for alpha chain variable domain of TCR clone 13826 (TRAV12-3, TRAJ17)
CAMTLTGYKLTF

SEQ ID NO: 27652 - protein, 15 aa, Homo sapiens
  CDR3 for beta chain variable domain of TCR clone 13826 (TRBV20-1, TRBJ2-7)
CSARDRVSGMDEQYF

SEQ ID NO: 27653 - protein, 14 aa, Homo sapiens
  CDR3 for alpha chain variable domain of TCR clone 13827 (TRAV17, TRAJ22)
CATSPSGSARQLTF

SEQ ID NO: 27654 - protein, 15 aa, Homo sapiens
  CDR3 for beta chain variable domain of TCR clone 13827 (TRBV4-1, TRBJ2-5)
CASSQWDLYQETRYF

SEQ ID NO: 27655 - protein, 14 aa, Homo sapiens
  CDR3 for alpha chain variable domain of TCR clone 13828 (TRAV4, TRAJ17)
CLVGPQAAGNKLTF

SEQ ID NO: 27656 - protein, 15 aa, Homo sapiens
  CDR3 for beta chain variable domain of TCR clone 13828 (TRBV9, TRBJ2-1)
CASSLAGSSYNEQFF

SEQ ID NO: 27657 - protein, 15 aa, Homo sapiens
  CDR3 for alpha chain variable domain of TCR clone 13829 (TRAV8-2, TRAJ16)
CVVSDGFSDGQMLLF

SEQ ID NO: 27658 - protein, 14 aa, Homo sapiens
  CDR3 for beta chain variable domain of TCR clone 13829 (TRBV7-3, TRBJ1-1)
CASSLGTGYTEAFF

SEQ ID NO: 27659 - protein, 13 aa, Homo sapiens
  CDR3 for alpha chain variable domain of TCR clone 13830 (TRAV21, TRAJ27)
CAARPGNAGKSTF

SEQ ID NO: 27660 - protein, 14 aa, Homo sapiens
  CDR3 for beta chain variable domain of TCR clone 13830 (TRBV25-1, TRBJ1-1)
CASTHLGGNTEAFF

SEQ ID NO: 27661 - protein, 13 aa, Homo sapiens
  CDR3 for alpha chain variable domain of TCR clone 13831 (TRAV12-3, TRAJ33)
CAMSVNSNYQLIW

SEQ ID NO: 27662 - protein, 13 aa, Homo sapiens
  CDR3 for beta chain variable domain of TCR clone 13831 (TRBV7-2, TRBJ2-2)
CASSLAVTGELFL

SEQ ID NO: 27663 - protein, 10 aa, Homo sapiens
  CDR3 for alpha chain variable domain of TCR clone 13832 (TRAV26-2, TRAJ49)
CILLGNQLYF

SEQ ID NO: 27664 - protein, 13 aa, Homo sapiens
  CDR3 for beta chain variable domain of TCR clone 13832 (TRBV20-1, TRBJ2-7)
CSADPGATYEQYF

SEQ ID NO: 27665 - protein, 13 aa, Homo sapiens
  CDR3 for alpha chain variable domain of TCR clone 13833 (TRAV2, TRAJ40)
CAVVTSGTYKYIF

SEQ ID NO: 27666 - protein, 15 aa, Homo sapiens
  CDR3 for beta chain variable domain of TCR clone 13833 (TRBV11-3, TRBJ2-3)
CASLKDGREGDTQCF

SEQ ID NO: 27667 - protein, 16 aa, Homo sapiens
  CDR3 for alpha chain variable domain of TCR clone 13834 (TRAV3, TRAJ10)
CAVRDMRAGGGNKLTF

SEQ ID NO: 27668 - protein, 15 aa, Homo sapiens
  CDR3 for beta chain variable domain of TCR clone 13834 (TRBV11-2, TRBJ1-6)
CACTGFGTAVSPLHF

SEQ ID NO: 27669 - protein, 12 aa, Homo sapiens
  CDR3 for alpha chain variable domain of TCR clone 13835 (TRAV12-1, TRAJ40)
CVLYSGTYKYIF

SEQ ID NO: 27670 - protein, 18 aa, Homo sapiens
  CDR3 for beta chain variable domain of TCR clone 13835 (TRBV12-4, TRBJ2-2)
CASSLVAGTRGRTGELFF

SEQ ID NO: 27671 - protein, 14 aa, Homo sapiens
  CDR3 for alpha chain variable domain of TCR clone 13836 (TRAV29/DV5, TRAJ45)
CAASFRGGADGLPF

SEQ ID NO: 27672 - protein, 11 aa, Homo sapiens
  CDR3 for beta chain variable domain of TCR clone 13836 (TRBV11-2, TRBJ2-2)
CASSLPGELFF

SEQ ID NO: 27673 - protein, 14 aa, Homo sapiens
  CDR3 for alpha chain variable domain of TCR clone 13837 (TRAV12-2, TRAJ13)
SAVKKTGGYQKVTF

SEQ ID NO: 27674 - protein, 15 aa, Homo sapiens
  CDR3 for beta chain variable domain of TCR clone 13837 (TRBV27, TRBJ2-1)
CASSNGGGSSNEQFF

SEQ ID NO: 27675 - protein, 12 aa, Homo sapiens
  CDR3 for alpha chain variable domain of TCR clone 13838 (TRAV12-3, TRAJ17)
CAMTLTGNKLTF

SEQ ID NO: 27676 - protein, 11 aa, Homo sapiens
  CDR3 for beta chain variable domain of TCR clone 13838 (TRBV12-4, TRBJ2-3)
CASTATDTQYF

SEQ ID NO: 27677 - protein, 15 aa, Homo sapiens
  CDR3 for alpha chain variable domain of TCR clone 13839 (TRAV8-3, TRAJ23)
CAVGDRHNQGGKLIF

SEQ ID NO: 27678 - protein, 22 aa, Homo sapiens
  CDR3 for beta chain variable domain of TCR clone 13839 (TRBV29-1, TRBJ2-5)
TVSNMSPEDSSIYLCSAGTQYF

SEQ ID NO: 27679 - protein, 14 aa, Homo sapiens
  CDR3 for alpha chain variable domain of TCR clone 13840 (TRAV12-3, TRAJ9)
CAMSPNTGGFKTIF

SEQ ID NO: 27680 - protein, 12 aa, Homo sapiens
  CDR3 for beta chain variable domain of TCR clone 13840 (TRBV19, TRBJ1-5)
CASSIAQQHQHF

SEQ ID NO: 27681 - protein, 15 aa, Homo sapiens
  CDR3 for alpha chain variable domain of TCR clone 13841 (TRAV2, TRAJ9)
CAVEDRGTGGFRTIF

SEQ ID NO: 27682 - protein, 16 aa, Homo sapiens
  CDR3 for beta chain variable domain of TCR clone 13841 (TRBV24-1, TRBJ2-3)
CATSDPGTGATDTQYF

SEQ ID NO: 27683 - protein, 13 aa, Homo sapiens
  CDR3 for alpha chain variable domain of TCR clone 13842 (TRAV21, TRAJ57)
YAVTQGGSEKLVF

SEQ ID NO: 27684 - protein, 16 aa, Homo sapiens
  CDR3 for beta chain variable domain of TCR clone 13842 (TRBV29-1, TRBJ2-7)
CSVEDAEDGTAYEQYF

SEQ ID NO: 27685 - protein, 17 aa, Homo sapiens
  CDR3 for alpha chain variable domain of TCR clone 13843 (TRAV3, TRAJ42)
CAVRDRDYGGSQGNLTF

SEQ ID NO: 27686 - protein, 12 aa, Homo sapiens
  CDR3 for beta chain variable domain of TCR clone 13843 (TRBV11-2, TRBJ2-1)
CASSPGNNEQFF

SEQ ID NO: 27687 - protein, 15 aa, Homo sapiens
  CDR3 for alpha chain variable domain of TCR clone 13844 (TRAV3, TRAJ5)
CAVIDLDTGRRALTF

SEQ ID NO: 27688 - protein, 13 aa, Homo sapiens
  CDR3 for beta chain variable domain of TCR clone 13844 (TRBV12-4, TRBJ2-7)
CASSPTETYEQYF

SEQ ID NO: 27689 - protein, 14 aa, Homo sapiens
  CDR3 for alpha chain variable domain of TCR clone 13845 (TRAV1-2, TRAJ16)
FAVNRFSDGQKLLF

SEQ ID NO: 27690 - protein, 15 aa, Homo sapiens
  CDR3 for beta chain variable domain of TCR clone 13845 (TRBV9, TRBJ1-6)
CASSVAGTGDSPLHF

SEQ ID NO: 27691 - protein, 17 aa, Homo sapiens
  CDR3 for alpha chain variable domain of TCR clone 13846 (TRAV12-3, TRAJ6)
RAMSARGGAGGSYIPTF

SEQ ID NO: 27692 - protein, 12 aa, Homo sapiens
  CDR3 for beta chain variable domain of TCR clone 13846 (TRBV12-4, TRBJ2-3)
CASSTLPDTQYF

SEQ ID NO: 27693 - protein, 13 aa, Homo sapiens
  CDR3 for alpha chain variable domain of TCR clone 13847 (TRAV12-3, TRAJ13)
CAMSSGGYQKVTF

SEQ ID NO: 27694 - protein, 14 aa, Homo sapiens
  CDR3 for beta chain variable domain of TCR clone 13847 (TRBV19, TRBJ2-1)
CASPTFVLSGEQFF

SEQ ID NO: 27695 - protein, 14 aa, Homo sapiens
  CDR3 for alpha chain variable domain of TCR clone 13848 (TRAV29/DV5, TRAJ36)
CAARRKTGANNLFF

SEQ ID NO: 27696 - protein, 14 aa, Homo sapiens
  CDR3 for beta chain variable domain of TCR clone 13848 (TRBV6-1, TRBJ1-3)
CASVQGGGGNTIYF

SEQ ID NO: 27697 - protein, 14 aa, Homo sapiens
  CDR3 for alpha chain variable domain of TCR clone 13849 (TRAV8-4, TRAJ13)
CAVTLSGGYQKVTF

SEQ ID NO: 27698 - protein, 14 aa, Homo sapiens
  CDR3 for beta chain variable domain of TCR clone 13849 (TRBV7-2, TRBJ1-2)
CASSQTGSTYGHTF

SEQ ID NO: 27699 - protein, 15 aa, Homo sapiens
  CDR3 for alpha chain variable domain of TCR clone 13850 (TRAV12-1, TRAJ42)
CVVTREGGSQGNLIF

SEQ ID NO: 27700 - protein, 14 aa, Homo sapiens
  CDR3 for beta chain variable domain of TCR clone 13850 (TRBV11-2, TRBJ2-3)
CASSLGGGANTQYF

SEQ ID NO: 27701 - protein, 13 aa, Homo sapiens
  CDR3 for alpha chain variable domain of TCR clone 13851 (TRAV20, TRAJ37)
CAGCSNNTGKLIF

SEQ ID NO: 27702 - protein, 11 aa, Homo sapiens
  CDR3 for beta chain variable domain of TCR clone 13851 (TRBV12-4, TRBJ2-3)
CASTATDTQYF

SEQ ID NO: 27703 - protein, 13 aa, Homo sapiens
  CDR3 for alpha chain variable domain of TCR clone 13852 (TRAV29/DV5, TRAJ31)
CAASRNNNARLMF

SEQ ID NO: 27704 - protein, 16 aa, Homo sapiens
  CDR3 for beta chain variable domain of TCR clone 13852 (TRBV20-1, TRBJ2-2)
CSARDMVAGLTGELFF

SEQ ID NO: 27705 - protein, 14 aa, Homo sapiens
  CDR3 for alpha chain variable domain of TCR clone 13853 (TRAV2, TRAJ37)
CAVDFTSNTGKLIF

SEQ ID NO: 27706 - protein, 15 aa, Homo sapiens
  CDR3 for beta chain variable domain of TCR clone 13853 (TRBV20-1, TRBJ1-1)
CSASRGVMGNTEAFF

SEQ ID NO: 27707 - protein, 15 aa, Homo sapiens
  CDR3 for alpha chain variable domain of TCR clone 13854 (TRAV17, TRAJ57)
CATGPSQGGSEKLVF

SEQ ID NO: 27708 - protein, 12 aa, Homo sapiens
  CDR3 for beta chain variable domain of TCR clone 13854 (TRBV11-2, TRBJ2-4)
CASSSASGSEYF

SEQ ID NO: 27709 - protein, 13 aa, Homo sapiens
  CDR3 for alpha chain variable domain of TCR clone 13855 (TRAV21, TRAJ27)
CAARPGNAGKSTF

SEQ ID NO: 27710 - protein, 14 aa, Homo sapiens
  CDR3 for beta chain variable domain of TCR clone 13855 (TRBV7-6, TRBJ2-3)
CASSLGKVTDTQYF

SEQ ID NO: 27711 - protein, 14 aa, Homo sapiens
  CDR3 for alpha chain variable domain of TCR clone 13856 (TRAV1-2, TRAJ8)
CAVREDSGFQKLVF

SEQ ID NO: 27712 - protein, 15 aa, Homo sapiens
  CDR3 for beta chain variable domain of TCR clone 13856 (TRBV6-3, TRBJ2-7)
CASSSPGTVFYEQYF

SEQ ID NO: 27713 - protein, 14 aa, Homo sapiens
  CDR3 for alpha chain variable domain of TCR clone 13857 (TRAV9-2, TRAJ36)
CALPWRTGANNLFS

SEQ ID NO: 27714 - protein, 14 aa, Homo sapiens
  CDR3 for beta chain variable domain of TCR clone 13857 (TRBV2, TRBJ1-2)
CASSELQVNYGYTF

SEQ ID NO: 27715 - protein, 14 aa, Homo sapiens
  CDR3 for alpha chain variable domain of TCR clone 13858 (TRAV12-2, TRAJ17)
CAVNIKAAGNKLTF

SEQ ID NO: 27716 - protein, 16 aa, Homo sapiens
  CDR3 for beta chain variable domain of TCR clone 13858 (TRBV20-1, TRBJ2-6)
CSASSQGYDGANDLTF

SEQ ID NO: 27717 - protein, 13 aa, Homo sapiens
  CDR3 for alpha chain variable domain of TCR clone 13859 (TRAV20, TRAJ40)
CAVPFPGTYKYIF

SEQ ID NO: 27718 - protein, 13 aa, Homo sapiens
  CDR3 for beta chain variable domain of TCR clone 13859 (TRBV15, TRBJ2-5)
CATSQIGEETQYF

SEQ ID NO: 27719 - protein, 14 aa, Homo sapiens
  CDR3 for alpha chain variable domain of TCR clone 13860 (TRAV26-1, TRAJ34)
CIVRESYNTDKLIF

SEQ ID NO: 27720 - protein, 13 aa, Homo sapiens
  CDR3 for beta chain variable domain of TCR clone 13860 (TRBV19, TRBJ2-1)
CATSRGAYNEQFF

SEQ ID NO: 27721 - protein, 14 aa, Homo sapiens
  CDR3 for alpha chain variable domain of TCR clone 13861 (TRAV35, TRAJ22)
CAGLRPGSARRLTF

SEQ ID NO: 27722 - protein, 15 aa, Homo sapiens
  CDR3 for beta chain variable domain of TCR clone 13861 (TRBV12-4, TRBJ2-5)
CASSPPTGLQETQYF

SEQ ID NO: 27723 - protein, 14 aa, Homo sapiens
  CDR3 for alpha chain variable domain of TCR clone 13862 (TRAV12-2, TRAJ13)
CAVKKTGGYQKVTF

SEQ ID NO: 27724 - protein, 15 aa, Homo sapiens
  CDR3 for beta chain variable domain of TCR clone 13862 (TRBV27, TRBJ2-1)
CASSNGGGSSKEQFF

SEQ ID NO: 27725 - protein, 15 aa, Homo sapiens
  CDR3 for alpha chain variable domain of TCR clone 13863 (TRAV26-1, TRAJ22)
CIVRVSFWFCKATDL

SEQ ID NO: 27726 - protein, 13 aa, Homo sapiens
  CDR3 for beta chain variable domain of TCR clone 13863 (TRBV7-9, TRBJ1-2)
CASSLRQNYGYTF

SEQ ID NO: 27727 - protein, 12 aa, Homo sapiens
  CDR3 for alpha chain variable domain of TCR clone 13864 (TRAV12-2, TRAJ43)
CAVNVNNNDMRF

SEQ ID NO: 27728 - protein, 14 aa, Homo sapiens
  CDR3 for beta chain variable domain of TCR clone 13864 (TRBV25-1, TRBJ2-2)
CASSELGLPGELFL

SEQ ID NO: 27729 - protein, 12 aa, Homo sapiens
  CDR3 for alpha chain variable domain of TCR clone 13865 (TRAV17, TRAJ39)
CATGAAGNMLTF

SEQ ID NO: 27730 - protein, 14 aa, Homo sapiens
  CDR3 for beta chain variable domain of TCR clone 13865 (TRBV7-9, TRBJ1-2)
CASSRQGANYGDTF

SEQ ID NO: 27731 - protein, 14 aa, Homo sapiens
  CDR3 for alpha chain variable domain of TCR clone 13866 (TRAV8-4, TRAJ42)
CAVSEGGSQGNLIF

SEQ ID NO: 27732 - protein, 15 aa, Homo sapiens
  CDR3 for beta chain variable domain of TCR clone 13866 (TRBV28, TRBJ2-7)
CASSLEAYPIYEQYF

SEQ ID NO: 27733 - protein, 11 aa, Homo sapiens
  CDR3 for alpha chain variable domain of TCR clone 13867 (TRAV21, TRAJ34)
CAHYNTDKLIF

SEQ ID NO: 27734 - protein, 13 aa, Homo sapiens
  CDR3 for beta chain variable domain of TCR clone 13867 (TRBV7-6, TRBJ1-2)
CASSLVADYGYAF

SEQ ID NO: 27735 - protein, 11 aa, Homo sapiens
  CDR3 for alpha chain variable domain of TCR clone 13868 (TRAV1-1, TRAJ23)
YAVRQGGKLIF

SEQ ID NO: 27736 - protein, 20 aa, Homo sapiens
  CDR3 for beta chain variable domain of TCR clone 13868 (TRBV7-8, TRBJ2-2)
CASSHLFPGPTIHITGELFF

SEQ ID NO: 27737 - protein, 14 aa, Homo sapiens
  CDR3 for alpha chain variable domain of TCR clone 13869 (TRAV2, TRAJ37)
CAVDFTSNTGKLIF

SEQ ID NO: 27738 - protein, 14 aa, Homo sapiens
  CDR3 for beta chain variable domain of TCR clone 13869 (TRBV19, TRBJ2-1)
CASPTFVLSGEQFF

SEQ ID NO: 27739 - protein, 14 aa, Homo sapiens
  CDR3 for alpha chain variable domain of TCR clone 13870 (TRAV35, TRAJ33)
CAGSSQDSNYQLIW

SEQ ID NO: 27740 - protein, 15 aa, Homo sapiens
  CDR3 for beta chain variable domain of TCR clone 13870 (TRBV20-1, TRBJ2-7)
CSAESGTGGAYEQYF

SEQ ID NO: 27741 - protein, 13 aa, Homo sapiens
  CDR3 for alpha chain variable domain of TCR clone 13871 (TRAV3, TRAJ27)
CAVRPLGAGKSTF

SEQ ID NO: 27742 - protein, 13 aa, Homo sapiens
  CDR3 for beta chain variable domain of TCR clone 13871 (TRBV7-9, TRBJ2-3)
CASSPGSTGTQYF

SEQ ID NO: 27743 - protein, 14 aa, Homo sapiens
  CDR3 for alpha chain variable domain of TCR clone 13872 (TRAV35, TRAJ22)
CAGLRPGSARQLTF

SEQ ID NO: 27744 - protein, 15 aa, Homo sapiens
  CDR3 for beta chain variable domain of TCR clone 13872 (TRBV12-4, TRBJ2-5)
CASGPPTGLQETQYF

SEQ ID NO: 27745 - protein, 16 aa, Homo sapiens
  CDR3 for alpha chain variable domain of TCR clone 13873 (TRAV17, TRAJ35)
CATAEGGIGFGDVLHC

SEQ ID NO: 27746 - protein, 12 aa, Homo sapiens
  CDR3 for beta chain variable domain of TCR clone 13873 (TRBV11-2, TRBJ2-2)
CASSLGGGELFF

SEQ ID NO: 27747 - protein, 11 aa, Homo sapiens
  CDR3 for alpha chain variable domain of TCR clone 13874 (TRAV17, TRAJ9)
CGFTGGFKTIF

SEQ ID NO: 27748 - protein, 14 aa, Homo sapiens
  CDR3 for beta chain variable domain of TCR clone 13874 (TRBV7-9, TRBJ2-2)
CASSLVQGTGELFF

SEQ ID NO: 27749 - protein, 12 aa, Homo sapiens
  CDR3 for alpha chain variable domain of TCR clone 13875 (TRAV8-3, TRAJ26)
CAGDNYGQNFVF

SEQ ID NO: 27750 - protein, 13 aa, Homo sapiens
  CDR3 for beta chain variable domain of TCR clone 13875 (TRBV7-3, TRBJ1-1)
CASSQDWGAEAFF

SEQ ID NO: 27751 - protein, 19 aa, Homo sapiens
  CDR3 for alpha chain variable domain of TCR clone 13876 (TRAV27, TRAJ3)
PSLVIQASLRGSSASKIIF

SEQ ID NO: 27752 - protein, 15 aa, Homo sapiens
  CDR3 for beta chain variable domain of TCR clone 13876 (TRBV28, TRBJ1-3)
CASSMGWASGNTIYF

SEQ ID NO: 27753 - protein, 13 aa, Homo sapiens
  CDR3 for alpha chain variable domain of TCR clone 13877 (TRAV1-2, TRAJ9)
CAALNTGGFKTIF

SEQ ID NO: 27754 - protein, 14 aa, Homo sapiens
  CDR3 for beta chain variable domain of TCR clone 13877 (TRBV7-2, TRBJ1-2)
CASSQTGSTYGYTF

SEQ ID NO: 27755 - protein, 14 aa, Homo sapiens
  CDR3 for alpha chain variable domain of TCR clone 13878 (TRAV35, TRAJ13)
CAGPPSGGYQKVTF

SEQ ID NO: 27756 - protein, 13 aa, Homo sapiens
  CDR3 for beta chain variable domain of TCR clone 13878 (TRBV29-1, TRBJ1-1)
CSVGDSRNTEAFF

SEQ ID NO: 27757 - protein, 14 aa, Homo sapiens
  CDR3 for alpha chain variable domain of TCR clone 13879 (TRAV2, TRAJ37)
CAVDFTINTGKLIF

SEQ ID NO: 27758 - protein, 15 aa, Homo sapiens
  CDR3 for beta chain variable domain of TCR clone 13879 (TRBV20-1, TRBJ1-1)
CSASRGVTGNTEAFF

SEQ ID NO: 27759 - protein, 13 aa, Homo sapiens
  CDR3 for alpha chain variable domain of TCR clone 13880 (TRAV1-2, TRAJ9)
CAALNTEGFKTIF

SEQ ID NO: 27760 - protein, 13 aa, Homo sapiens
  CDR3 for beta chain variable domain of TCR clone 13880 (TRBV19, TRBJ1-2)
CASSVPGQDGYTF

SEQ ID NO: 27761 - protein, 13 aa, Homo sapiens
  CDR3 for alpha chain variable domain of TCR clone 13881 (TRAV22, TRAJ26)
CAVEHNYGQNFVF

SEQ ID NO: 27762 - protein, 16 aa, Homo sapiens
  CDR3 for beta chain variable domain of TCR clone 13881 (TRBV7-2, TRBJ2-6)
CASSGRRASGANVLTF

SEQ ID NO: 27763 - protein, 13 aa, Homo sapiens
  CDR3 for alpha chain variable domain of TCR clone 13882 (TRAV8-3, TRAJ36)
CAVGATGANNRFF

SEQ ID NO: 27764 - protein, 15 aa, Homo sapiens
  CDR3 for beta chain variable domain of TCR clone 13882 (TRBV7-2, TRBJ1-2)
CASSPRAGWNYGYTF

SEQ ID NO: 27765 - protein, 13 aa, Homo sapiens
  CDR3 for alpha chain variable domain of TCR clone 13883 (TRAV8-1, TRAJ5)
CAVIYTGRRALTF

SEQ ID NO: 27766 - protein, 12 aa, Homo sapiens
  CDR3 for beta chain variable domain of TCR clone 13883 (TRBV25-1, TRBJ2-1)
CASSIRDNEQFF

SEQ ID NO: 27767 - protein, 14 aa, Homo sapiens
  CDR3 for alpha chain variable domain of TCR clone 13884 (TRAV17, TRAJ31)
CATVLRNNNARLMF

SEQ ID NO: 27768 - protein, 14 aa, Homo sapiens
  CDR3 for beta chain variable domain of TCR clone 13884 (TRBV25-1, TRBJ2-2)
CASSELGLPGELFF

SEQ ID NO: 27769 - protein, 14 aa, Homo sapiens
  CDR3 for alpha chain variable domain of TCR clone 13885 (TRAV12-1, TRAJ23)
CVVIVYNQGGKLIF

SEQ ID NO: 27770 - protein, 15 aa, Homo sapiens
  CDR3 for beta chain variable domain of TCR clone 13885 (TRBV14, TRBJ2-7)
CQQPRQQGWVYEQYF

SEQ ID NO: 27771 - protein, 14 aa, Homo sapiens
  CDR3 for alpha chain variable domain of TCR clone 13886 (TRAV13-1, TRAJ44)
CAAKATGTASKLTF

SEQ ID NO: 27772 - protein, 17 aa, Homo sapiens
  CDR3 for beta chain variable domain of TCR clone 13886 (TRBV7-3, TRBJ2-3)
CASSLRKRMRGADTQYF

SEQ ID NO: 27773 - protein, 13 aa, Homo sapiens
  CDR3 for alpha chain variable domain of TCR clone 13887 (TRAV1-2, TRAJ9)
CAALNIGGFKTIF

SEQ ID NO: 27774 - protein, 13 aa, Homo sapiens
  CDR3 for beta chain variable domain of TCR clone 13887 (TRBV19, TRBJ1-2)
CASSVPGQDGYTF

SEQ ID NO: 27775 - protein, 12 aa, Homo sapiens
  CDR3 for alpha chain variable domain of TCR clone 13888 (TRAV2, TRAJ9)
CAVGAGGFKTSF

SEQ ID NO: 27776 - protein, 16 aa, Homo sapiens
  CDR3 for beta chain variable domain of TCR clone 13888 (TRBV13, TRBJ2-2)
CASSPRTGEHTGELFF

SEQ ID NO: 27777 - protein, 13 aa, Homo sapiens
  CDR3 for alpha chain variable domain of TCR clone 13889 (TRAV13-1, TRAJ23)
CAASGRGGGKLIF

SEQ ID NO: 27778 - protein, 13 aa, Homo sapiens
  CDR3 for beta chain variable domain of TCR clone 13889 (TRBV15, TRBJ1-6)
CATSGGLNSPLHF

SEQ ID NO: 27779 - protein, 13 aa, Homo sapiens
  CDR3 for alpha chain variable domain of TCR clone 13890 (TRAV29/DV5, TRAJ42)
CAAPGGSQGNLIF

SEQ ID NO: 27780 - protein, 14 aa, Homo sapiens
  CDR3 for beta chain variable domain of TCR clone 13890 (TRBV11-2, TRBJ2-7)
CASSSTGEGYEQYF

SEQ ID NO: 27781 - protein, 13 aa, Homo sapiens
  CDR3 for alpha chain variable domain of TCR clone 13891 (TRAV12-2, TRAJ10)
CAVPTGGGNKLTF

SEQ ID NO: 27782 - protein, 13 aa, Homo sapiens
  CDR3 for beta chain variable domain of TCR clone 13891 (TRBV20-1, TRBJ1-1)
CSAPLGGGTEAFF

SEQ ID NO: 27783 - protein, 15 aa, Homo sapiens
  CDR3 for alpha chain variable domain of TCR clone 13892 (TRAV26-1, TRAJ22)
CIVRVSFRFCKATDL

SEQ ID NO: 27784 - protein, 13 aa, Homo sapiens
  CDR3 for beta chain variable domain of TCR clone 13892 (TRBV7-9, TRBJ1-2)
CASSLKQNYGYTF

SEQ ID NO: 27785 - protein, 13 aa, Homo sapiens
  CDR3 for alpha chain variable domain of TCR clone 13893 (TRAV8-3, TRAJ28)
CAVGAVGSYQLTF

SEQ ID NO: 27786 - protein, 15 aa, Homo sapiens
  CDR3 for beta chain variable domain of TCR clone 13893 (TRBV7-9, TRBJ1-5)
CASCQGHQPNQPQHF

SEQ ID NO: 27787 - protein, 16 aa, Homo sapiens
  CDR3 for alpha chain variable domain of TCR clone 13894 (TRAV12-3, TRAJ53)
CAMSPGSGGSNYKLTF

SEQ ID NO: 27788 - protein, 11 aa, Homo sapiens
  CDR3 for beta chain variable domain of TCR clone 13894 (TRBV29-1, TRBJ2-5)
CSEDRTGTQYS

SEQ ID NO: 27789 - protein, 11 aa, Homo sapiens
  CDR3 for alpha chain variable domain of TCR clone 13895 (TRAV35, TRAJ30)
CAGPGDDKIIF

SEQ ID NO: 27790 - protein, 14 aa, Homo sapiens
  CDR3 for beta chain variable domain of TCR clone 13895 (TRBV7-6, TRBJ1-6)
CASSQAEGGSPLHF

SEQ ID NO: 27791 - protein, 13 aa, Homo sapiens
  CDR3 for alpha chain variable domain of TCR clone 13896 (TRAV8-3, TRAJ28)
RAVGAVGSYQLTF

SEQ ID NO: 27792 - protein, 14 aa, Homo sapiens
  CDR3 for beta chain variable domain of TCR clone 13896 (TRBV7-2, TRBJ2-7)
CASRSQGAAYEQYF

SEQ ID NO: 27793 - protein, 17 aa, Homo sapiens
  CDR3 for alpha chain variable domain of TCR clone 13897 (TRAV8-6, TRAJ58)
CAVSSWVGETSGSRSTF

SEQ ID NO: 27794 - protein, 14 aa, Homo sapiens
  CDR3 for beta chain variable domain of TCR clone 13897 (TRBV4-2, TRBJ2-1)
CASGLDRAYNEQFF

SEQ ID NO: 27795 - protein, 17 aa, Homo sapiens
  CDR3 for alpha chain variable domain of TCR clone 13898 (TRAV3, TRAJ6)
CAVRDGPRAGGSYIPTF

SEQ ID NO: 27796 - protein, 14 aa, Homo sapiens
  CDR3 for beta chain variable domain of TCR clone 13898 (TRBV7-2, TRBJ2-7)
CASSPKTSYYEQYF

SEQ ID NO: 27797 - protein, 13 aa, Homo sapiens
  CDR3 for alpha chain variable domain of TCR clone 13899 (TRAV3, TRAJ21)
CAVREPAFNKFYF

SEQ ID NO: 27798 - protein, 13 aa, Homo sapiens
  CDR3 for beta chain variable domain of TCR clone 13899 (TRBV9, TRBJ2-1)
CASSPSGGNEQFF

SEQ ID NO: 27799 - protein, 13 aa, Homo sapiens
  CDR3 for alpha chain variable domain of TCR clone 13900 (TRAV21, TRAJ27)
CAARPGNAGKSTF

SEQ ID NO: 27800 - protein, 17 aa, Homo sapiens
  CDR3 for beta chain variable domain of TCR clone 13900 (TRBV13, TRBJ2-3)
CASSLSRVAGGRNTQYF

SEQ ID NO: 27801 - protein, 15 aa, Homo sapiens
  CDR3 for alpha chain variable domain of TCR clone 13901 (TRAV27, TRAJ34)
CRGGLGDYNTDKLIF

SEQ ID NO: 27802 - protein, 15 aa, Homo sapiens
  CDR3 for beta chain variable domain of TCR clone 13901 (TRBV9, TRBJ1-4)
CASSVGGSTNEKLFF

SEQ ID NO: 27803 - protein, 14 aa, Homo sapiens
  CDR3 for alpha chain variable domain of TCR clone 13902 (TRAV26-1, TRAJ38)
CIADNAGNNRKLIW

SEQ ID NO: 27804 - protein, 13 aa, Homo sapiens
  CDR3 for beta chain variable domain of TCR clone 13902 (TRBV20-1, TRBJ1-1)
CSARGGGDTEAFF

SEQ ID NO: 27805 - protein, 17 aa, Homo sapiens
  CDR3 for alpha chain variable domain of TCR clone 13903 (TRAV23/DV6, TRAJ57)
CAASSTLSPGGSEKLVF

SEQ ID NO: 27806 - protein, 14 aa, Homo sapiens
  CDR3 for beta chain variable domain of TCR clone 13903 (TRBV25-1, TRBJ1-1)
CASTHLGGNTEAFF

SEQ ID NO: 27807 - protein, 15 aa, Homo sapiens
  CDR3 for alpha chain variable domain of TCR clone 13904 (TRAV21, TRAJ24)
CAARSSTDSWGQLQF

SEQ ID NO: 27808 - protein, 13 aa, Homo sapiens
  CDR3 for beta chain variable domain of TCR clone 13904 (TRBV11-2, TRBJ2-5)
CASSSTGEETQYF

SEQ ID NO: 27809 - protein, 12 aa, Homo sapiens
  CDR3 for alpha chain variable domain of TCR clone 13905 (TRAV13-1, TRAJ15)
CAASQAGTALIF

SEQ ID NO: 27810 - protein, 18 aa, Homo sapiens
  CDR3 for beta chain variable domain of TCR clone 13905 (TRBV7-9, TRBJ2-3)
CASSLPISGQISTDTQYF

SEQ ID NO: 27811 - protein, 15 aa, Homo sapiens
  CDR3 for alpha chain variable domain of TCR clone 13906 (TRAV14/DV4, TRAJ10)
CAMRELTGGGNKLTF

SEQ ID NO: 27812 - protein, 15 aa, Homo sapiens
  CDR3 for beta chain variable domain of TCR clone 13906 (TRBV9, TRBJ1-6)
CASSVAGTGDSPLHF

SEQ ID NO: 27813 - protein, 14 aa, Homo sapiens
  CDR3 for alpha chain variable domain of TCR clone 13907 (TRAV13-1, TRAJ4)
CAAIPVTGYNKLIF

SEQ ID NO: 27814 - protein, 13 aa, Homo sapiens
  CDR3 for beta chain variable domain of TCR clone 13907 (TRBV20-1, TRBJ1-2)
CSAITGGGGGYTF

SEQ ID NO: 27815 - protein, 13 aa, Homo sapiens
  CDR3 for alpha chain variable domain of TCR clone 13908 (TRAV21, TRAJ27)
CAARPGNAGKSTF

SEQ ID NO: 27816 - protein, 13 aa, Homo sapiens
  CDR3 for beta chain variable domain of TCR clone 13908 (TRBV7-6, TRBJ2-3)
CQQLGTVTDTQYF

SEQ ID NO: 27817 - protein, 13 aa, Homo sapiens
  CDR3 for alpha chain variable domain of TCR clone 13909 (TRAV21, TRAJ27)
CAARPGNACKSTF

SEQ ID NO: 27818 - protein, 14 aa, Homo sapiens
  CDR3 for beta chain variable domain of TCR clone 13909 (TRBV7-6, TRBJ2-3)
CASSLGTVTDTQYF

SEQ ID NO: 27819 - protein, 12 aa, Homo sapiens
  CDR3 for alpha chain variable domain of TCR clone 13910 (TRAV21, TRAJ33)
CAKMDSDYQLIW

SEQ ID NO: 27820 - protein, 14 aa, Homo sapiens
  CDR3 for beta chain variable domain of TCR clone 13910 (TRBV2, TRBJ2-7)
CASSLTSGGYEQYF

SEQ ID NO: 27821 - protein, 20 aa, Homo sapiens
  CDR3 for alpha chain variable domain of TCR clone 13911 (TRAV26-1, TRAJ42)
CCVLLHRQTYYGGSQGNLIF

SEQ ID NO: 27822 - protein, 14 aa, Homo sapiens
  CDR3 for beta chain variable domain of TCR clone 13911 (TRBV19, TRBJ2-2)
CASSGQGIAGELFF

SEQ ID NO: 27823 - protein, 18 aa, Homo sapiens
  CDR3 for alpha chain variable domain of TCR clone 13912 (TRAV13-1, TRAJ52)
CAASKRSAGGTSYGKLTF

SEQ ID NO: 27824 - protein, 13 aa, Homo sapiens
  CDR3 for beta chain variable domain of TCR clone 13912 (TRBV12-4, TRBJ1-2)
CASGLRQGKGYTF

SEQ ID NO: 27825 - protein, 14 aa, Homo sapiens
  CDR3 for alpha chain variable domain of TCR clone 13913 (TRAV1-2, TRAJ8)
CAVREDTGFQKLVF

SEQ ID NO: 27826 - protein, 13 aa, Homo sapiens
  CDR3 for beta chain variable domain of TCR clone 13913 (TRBV7-2, TRBJ2-2)
CASSLAVTGELFF

SEQ ID NO: 27827 - protein, 16 aa, Homo sapiens
  CDR3 for alpha chain variable domain of TCR clone 13914 (TRAV3, TRAJ37)
CAVRGKGSGDTGKLIF

SEQ ID NO: 27828 - protein, 13 aa, Homo sapiens
  CDR3 for beta chain variable domain of TCR clone 13914 (TRBV14, TRBJ2-7)
CASSQDRRYEQYF

SEQ ID NO: 27829 - protein, 15 aa, Homo sapiens
  CDR3 for alpha chain variable domain of TCR clone 13915 (TRAV21, TRAJ45)
CAVSYSGGGADGLTF

SEQ ID NO: 27830 - protein, 13 aa, Homo sapiens
  CDR3 for beta chain variable domain of TCR clone 13915 (TRBV20-1, TRBJ2-5)
CSAATELRETQYF

SEQ ID NO: 27831 - protein, 13 aa, Homo sapiens
  CDR3 for alpha chain variable domain of TCR clone 13916 (TRAV1-2, TRAJ9)
CAALNNGGFKTIF

SEQ ID NO: 27832 - protein, 13 aa, Homo sapiens
  CDR3 for beta chain variable domain of TCR clone 13916 (TRBV19, TRBJ1-2)
CASSVPGQDGYTF

SEQ ID NO: 27833 - protein, 14 aa, Homo sapiens
  CDR3 for alpha chain variable domain of TCR clone 13917 (TRAV17, TRAJ12)
CATDREDSSYKLIF

SEQ ID NO: 27834 - protein, 14 aa, Homo sapiens
  CDR3 for beta chain variable domain of TCR clone 13917 (TRBV4-1, TRBJ2-7)
CASSQERDSSEQYF

SEQ ID NO: 27835 - protein, 11 aa, Homo sapiens
  CDR3 for alpha chain variable domain of TCR clone 13918 (TRAV3, TRAJ21)
CAVGNFNKFFF

SEQ ID NO: 27836 - protein, 16 aa, Homo sapiens
  CDR3 for beta chain variable domain of TCR clone 13918 (TRBV19, TRBJ2-1)
CASSKAGPSSYNEQFF

SEQ ID NO: 27837 - protein, 14 aa, Homo sapiens
  CDR3 for alpha chain variable domain of TCR clone 13919 (TRAV1-2, TRAJ8)
CAVREDTGFQKLVF

SEQ ID NO: 27838 - protein, 15 aa, Homo sapiens
  CDR3 for beta chain variable domain of TCR clone 13919 (TRBV6-3, TRBJ2-7)
CASSSHGTVFYEQYF

SEQ ID NO: 27839 - protein, 13 aa, Homo sapiens
  CDR3 for alpha chain variable domain of TCR clone 13920 (TRAV3, TRAJ27)
CAVRPLGAGKSTF

SEQ ID NO: 27840 - protein, 13 aa, Homo sapiens
  CDR3 for beta chain variable domain of TCR clone 13920 (TRBV7-9, TRBJ1-2)
CASSLKQNYGYTF

SEQ ID NO: 27841 - protein, 14 aa, Homo sapiens
  CDR3 for alpha chain variable domain of TCR clone 13921 (TRAV17, TRAJ16)
CATADFSDGQKLLF

SEQ ID NO: 27842 - protein, 15 aa, Homo sapiens
  CDR3 for beta chain variable domain of TCR clone 13921 (TRBV18, TRBJ2-1)
CASSPPSASYDEQFF

SEQ ID NO: 27843 - protein, 15 aa, Homo sapiens
  CDR3 for alpha chain variable domain of TCR clone 13922 (TRAV26-1, TRAJ44)
CIVRANTGTASKLTF

SEQ ID NO: 27844 - protein, 12 aa, Homo sapiens
  CDR3 for beta chain variable domain of TCR clone 13922 (TRBV28, TRBJ2-3)
CASSLYRDTQYF

SEQ ID NO: 27845 - protein, 16 aa, Homo sapiens
  CDR3 for alpha chain variable domain of TCR clone 13923 (TRAV12-3, TRAJ53)
CAMSPGSGGSNYKLTF

SEQ ID NO: 27846 - protein, 15 aa, Homo sapiens
  CDR3 for beta chain variable domain of TCR clone 13923 (TRBV4-3, TRBJ2-7)
CASSQGGRGIYEQYF

SEQ ID NO: 27847 - protein, 14 aa, Homo sapiens
  CDR3 for alpha chain variable domain of TCR clone 13924 (TRAV1-2, TRAJ8)
CAVREDTGFQKLVF

SEQ ID NO: 27848 - protein, 15 aa, Homo sapiens
  CDR3 for beta chain variable domain of TCR clone 13924 (TRBV6-3, TRBJ2-7)
CTSSSPGTVFYEQYF

SEQ ID NO: 27849 - protein, 16 aa, Homo sapiens
  CDR3 for alpha chain variable domain of TCR clone 13925 (TRAV3, TRAJ37)
CAVRGKGSGNTGKLIF

SEQ ID NO: 27850 - protein, 13 aa, Homo sapiens
  CDR3 for beta chain variable domain of TCR clone 13925 (TRBV12-4, TRBJ2-7)
CASSPTETYEQYF

SEQ ID NO: 27851 - protein, 18 aa, Homo sapiens
  CDR3 for alpha chain variable domain of TCR clone 13926 (TRAV29/DV5, TRAJ52)
CAAGFRGAGGTSYGKLTF

SEQ ID NO: 27852 - protein, 18 aa, Homo sapiens
  CDR3 for beta chain variable domain of TCR clone 13926 (TRBV7-3, TRBJ2-1)
CASSLTLASGRAMVSSSS

SEQ ID NO: 27853 - protein, 14 aa, Homo sapiens
  CDR3 for alpha chain variable domain of TCR clone 13927 (TRAV26-1, TRAJ45)
CIEVTGGGADGLTF

SEQ ID NO: 27854 - protein, 13 aa, Homo sapiens
  CDR3 for beta chain variable domain of TCR clone 13927 (TRBV7-6, TRBJ1-2)
CASSVVADYGYTF

SEQ ID NO: 27855 - protein, 12 aa, Homo sapiens
  CDR3 for alpha chain variable domain of TCR clone 13928 (TRAV21, TRAJ33)
CAKMDSNYQLIW

SEQ ID NO: 27856 - protein, 14 aa, Homo sapiens
  CDR3 for beta chain variable domain of TCR clone 13928 (TRBV2, TRBJ2-7)
CASSLTSGGYGQYF

SEQ ID NO: 27857 - protein, 12 aa, Homo sapiens
  CDR3 for alpha chain variable domain of TCR clone 13929 (TRAV12-3, TRAJ17)
CAMTLTGNKLTF

SEQ ID NO: 27858 - protein, 15 aa, Homo sapiens
  CDR3 for beta chain variable domain of TCR clone 13929 (TRBV10-3, TRBJ2-3)
CAISLTSGGTDTQYF

SEQ ID NO: 27859 - protein, 16 aa, Homo sapiens
  CDR3 for alpha chain variable domain of TCR clone 13930 (TRAV38-1, TRAJ32)
CAFMKGGGGATNKPIF

SEQ ID NO: 27860 - protein, 13 aa, Homo sapiens
  CDR3 for beta chain variable domain of TCR clone 13930 (TRBV20-1, TRBJ2-5)
CSAREAFQETQYF

SEQ ID NO: 27861 - protein, 14 aa, Homo sapiens
  CDR3 for alpha chain variable domain of TCR clone 13931 (TRAV12-2, TRAJ45)
CALPARGGADGLTF

SEQ ID NO: 27862 - protein, 14 aa, Homo sapiens
  CDR3 for beta chain variable domain of TCR clone 13931 (TRBV18, TRBJ1-5)
CASSPGNSNQPQHF

SEQ ID NO: 27863 - protein, 13 aa, Homo sapiens
  CDR3 for alpha chain variable domain of TCR clone 13932 (TRAV13-2, TRAJ13)
CAERPRGYQKVTF

SEQ ID NO: 27864 - protein, 14 aa, Homo sapiens
  CDR3 for beta chain variable domain of TCR clone 13932 (TRBV23-1, TRBJ2-5)
CASSFLRSQETQYF

SEQ ID NO: 27865 - protein, 13 aa, Homo sapiens
  CDR3 for alpha chain variable domain of TCR clone 13933 (TRAV35, TRAJ42)
CAGFPGSQGNLIF

SEQ ID NO: 27866 - protein, 13 aa, Homo sapiens
  CDR3 for beta chain variable domain of TCR clone 13933 (TRBV29-1, TRBJ2-1)
CSVEGGRVNEQFL

SEQ ID NO: 27867 - protein, 18 aa, Homo sapiens
  CDR3 for alpha chain variable domain of TCR clone 13934 (TRAV21, TRAJ52)
CAVRPSPAGGTSYGKLTF

SEQ ID NO: 27868 - protein, 17 aa, Homo sapiens
  CDR3 for beta chain variable domain of TCR clone 13934 (TRBV13, TRBJ2-3)
CASSLSRVAGGRNTKYF

SEQ ID NO: 27869 - protein, 10 aa, Homo sapiens
  CDR3 for alpha chain variable domain of TCR clone 13935 (TRAV12-3, TRAJ49)
CAMNGDQFYF

SEQ ID NO: 27870 - protein, 13 aa, Homo sapiens
  CDR3 for beta chain variable domain of TCR clone 13935 (TRBV12-4, TRBJ1-1)
CASSPGTGFEAFF

SEQ ID NO: 27871 - protein, 14 aa, Homo sapiens
  CDR3 for alpha chain variable domain of TCR clone 13936 (TRAV16, TRAJ17)
CALSGRAAGNKLTS

SEQ ID NO: 27872 - protein, 15 aa, Homo sapiens
  CDR3 for beta chain variable domain of TCR clone 13936 (TRBV3-1, TRBJ1-2)
CASSPTRLPEGGYTF

SEQ ID NO: 27873 - protein, 14 aa, Homo sapiens
  CDR3 for alpha chain variable domain of TCR clone 13937 (TRAV12-3, TRAJ10)
SHLPLTGGGNKLTF

SEQ ID NO: 27874 - protein, 14 aa, Homo sapiens
  CDR3 for beta chain variable domain of TCR clone 13937 (TRBV7-8, TRBJ2-3)
CASSLEAGTDTQYF

SEQ ID NO: 27875 - protein, 16 aa, Homo sapiens
  CDR3 for alpha chain variable domain of TCR clone 13938 (TRAV27, TRAJ13)
CAGAKSDSGGYQKVTF

SEQ ID NO: 27876 - protein, 15 aa, Homo sapiens
  CDR3 for beta chain variable domain of TCR clone 13938 (TRBV29-1, TRBJ2-1)
CSVGRHALFYNEQFS

SEQ ID NO: 27877 - protein, 14 aa, Homo sapiens
  CDR3 for alpha chain variable domain of TCR clone 13939 (TRAV12-2, TRAJ44)
CAVNPAGTASKLTF

SEQ ID NO: 27878 - protein, 15 aa, Homo sapiens
  CDR3 for beta chain variable domain of TCR clone 13939 (TRBV5-1, TRBJ2-1)
CASSPPRAPYNEQFF

SEQ ID NO: 27879 - protein, 12 aa, Homo sapiens
  CDR3 for alpha chain variable domain of TCR clone 13940 (TRAV6, TRAJ22)
TISSGSARQLTF

SEQ ID NO: 27880 - protein, 15 aa, Homo sapiens
  CDR3 for beta chain variable domain of TCR clone 13940 (TRBV20-1, TRBJ1-6)
CSARAGGTFNSPLHF

SEQ ID NO: 27881 - protein, 14 aa, Homo sapiens
  CDR3 for alpha chain variable domain of TCR clone 13941 (TRAV38-1, TRAJ28)
CAFTSGAGSYQLTF

SEQ ID NO: 27882 - protein, 13 aa, Homo sapiens
  CDR3 for beta chain variable domain of TCR clone 13941 (TRBV12-4, TRBJ2-7)
CASSFVPTAEQYF

SEQ ID NO: 27883 - protein, 14 aa, Homo sapiens
  CDR3 for alpha chain variable domain of TCR clone 13942 (TRAV1-2, TRAJ8)
CAVREDTGFQKLVF

SEQ ID NO: 27884 - protein, 15 aa, Homo sapiens
  CDR3 for beta chain variable domain of TCR clone 13942 (TRBV7-3, TRBJ2-1)
CASSPTGGSRNEQFF

SEQ ID NO: 27885 - protein, 12 aa, Homo sapiens
  CDR3 for alpha chain variable domain of TCR clone 13943 (TRAV21, TRAJ11)
CAVTSEYSTLTF

SEQ ID NO: 27886 - protein, 14 aa, Homo sapiens
  CDR3 for beta chain variable domain of TCR clone 13943 (TRBV20-1, TRBJ2-7)
CSAPELAGVGEQYF

SEQ ID NO: 27887 - protein, 11 aa, Homo sapiens
  CDR3 for alpha chain variable domain of TCR clone 13944 (TRAV35, TRAJ22)
CAGPGVGQLTF

SEQ ID NO: 27888 - protein, 18 aa, Homo sapiens
  CDR3 for beta chain variable domain of TCR clone 13944 (TRBV7-3, TRBJ2-3)
CASSSTGTYPGSTDTQYF

SEQ ID NO: 27889 - protein, 10 aa, Homo sapiens
  CDR3 for alpha chain variable domain of TCR clone 13945 (TRAV8-1, TRAJ21)
CAVNGTKFYF

SEQ ID NO: 27890 - protein, 12 aa, Homo sapiens
  CDR3 for beta chain variable domain of TCR clone 13945 (TRBV6-3, TRBJ2-7)
CASSLTPYEQYF

SEQ ID NO: 27891 - protein, 13 aa, Homo sapiens
  CDR3 for alpha chain variable domain of TCR clone 13946 (TRAV1-2, TRAJ9)
CAALNTGGFKTVF

SEQ ID NO: 27892 - protein, 13 aa, Homo sapiens
  CDR3 for beta chain variable domain of TCR clone 13946 (TRBV19, TRBJ1-2)
CASSVPGQDGYTF

SEQ ID NO: 27893 - protein, 14 aa, Homo sapiens
  CDR3 for alpha chain variable domain of TCR clone 13947 (TRAV35, TRAJ22)
CAGLRPGSARQLTF

SEQ ID NO: 27894 - protein, 16 aa, Homo sapiens
  CDR3 for beta chain variable domain of TCR clone 13947 (TRBV4-1, TRBJ2-7)
CASSPVAGGTSSTSGR

SEQ ID NO: 27895 - protein, 16 aa, Homo sapiens
  CDR3 for alpha chain variable domain of TCR clone 13948 (TRAV3, TRAJ37)
CAVRGKGSGNTGKLIF

SEQ ID NO: 27896 - protein, 13 aa, Homo sapiens
  CDR3 for beta chain variable domain of TCR clone 13948 (TRBV14, TRBJ2-7)
CASSQDRRYEQYL

SEQ ID NO: 27897 - protein, 12 aa, Homo sapiens
  CDR3 for alpha chain variable domain of TCR clone 13949 (TRAV8-3, TRAJ26)
CAGDNYGQNFVF

SEQ ID NO: 27898 - protein, 15 aa, Homo sapiens
  CDR3 for beta chain variable domain of TCR clone 13949 (TRBV9, TRBJ2-1)
CASSLAGSSYNEQFL

SEQ ID NO: 27899 - protein, 12 aa, Homo sapiens
  CDR3 for alpha chain variable domain of TCR clone 13950 (TRAV36/DV7, TRAJ54)
CAVVRGAQKLVF

SEQ ID NO: 27900 - protein, 13 aa, Homo sapiens
  CDR3 for beta chain variable domain of TCR clone 13950 (TRBV20-1, TRBJ1-1)
CSAGGGGNTEAFF

SEQ ID NO: 27901 - protein, 13 aa, Homo sapiens
  CDR3 for alpha chain variable domain of TCR clone 13951 (TRAV29/DV5, TRAJ31)
CAASRNNNARLMF

SEQ ID NO: 27902 - protein, 17 aa, Homo sapiens
  CDR3 for beta chain variable domain of TCR clone 13951 (TRBV11-2, TRBJ2-1)
CASSLYPPGVEYNEQFF

SEQ ID NO: 27903 - protein, 15 aa, Homo sapiens
  CDR3 for alpha chain variable domain of TCR clone 13952 (TRAV3, TRAJ5)
CAVRDLDTGRRALTF

SEQ ID NO: 27904 - protein, 13 aa, Homo sapiens
  CDR3 for beta chain variable domain of TCR clone 13952 (TRBV12-4, TRBJ2-7)
CASGPTETYEQYF

SEQ ID NO: 27905 - protein, 11 aa, Homo sapiens
  CDR3 for alpha chain variable domain of TCR clone 13953 (TRAV1-2, TRAJ20)
CAVANDYKPSF

SEQ ID NO: 27906 - protein, 18 aa, Homo sapiens
  CDR3 for beta chain variable domain of TCR clone 13953 (TRBV20-1, TRBJ2-6)
CSAETTPTHGSGANVLTF

SEQ ID NO: 27907 - protein, 14 aa, Homo sapiens
  CDR3 for alpha chain variable domain of TCR clone 13954 (TRAV17, TRAJ54)
CATDANQGAQKLVL

SEQ ID NO: 27908 - protein, 14 aa, Homo sapiens
  CDR3 for beta chain variable domain of TCR clone 13954 (TRBV4-2, TRBJ2-1)
CASGLDRAYNEQFF

SEQ ID NO: 27909 - protein, 17 aa, Homo sapiens
  CDR3 for alpha chain variable domain of TCR clone 13955 (TRAV13-1, TRAJ28)
CAASPPYSGAGSYQLTF

SEQ ID NO: 27910 - protein, 16 aa, Homo sapiens
  CDR3 for beta chain variable domain of TCR clone 13955 (TRBV19, TRBJ2-2)
CASRSPGTGATGELFF

SEQ ID NO: 27911 - protein, 14 aa, Homo sapiens
  CDR3 for alpha chain variable domain of TCR clone 13956 (TRAV8-1, TRAJ5)
CAVSMDTGRRALTF

SEQ ID NO: 27912 - protein, 15 aa, Homo sapiens
  CDR3 for beta chain variable domain of TCR clone 13956 (TRBV19, TRBJ2-4)
CASRGPRRGENMQYF

SEQ ID NO: 27913 - protein, 10 aa, Homo sapiens
  CDR3 for alpha chain variable domain of TCR clone 13957 (TRAV23/DV6, TRAJ57)
CAASSTLSQG

SEQ ID NO: 27914 - protein, 14 aa, Homo sapiens
  CDR3 for beta chain variable domain of TCR clone 13957 (TRBV25-1, TRBJ1-1)
CASTHLGGNTEAFL

SEQ ID NO: 27915 - protein, 15 aa, Homo sapiens
  CDR3 for alpha chain variable domain of TCR clone 13958 (TRAV25, TRAJ52)
CAGRPGGTSYGKLTL

SEQ ID NO: 27916 - protein, 17 aa, Homo sapiens
  CDR3 for beta chain variable domain of TCR clone 13958 (TRBV7-8, TRBJ2-6)
CASSAGTGGAGANVLTF

SEQ ID NO: 27917 - protein, 15 aa, Homo sapiens
  CDR3 for alpha chain variable domain of TCR clone 13959 (TRAV17, TRAJ57)
CATGPSQVGSEKLVF

SEQ ID NO: 27918 - protein, 16 aa, Homo sapiens
  CDR3 for beta chain variable domain of TCR clone 13959 (TRBV12-4, TRBJ1-5)
CASSRPVGGSNQPQHF

SEQ ID NO: 27919 - protein, 13 aa, Homo sapiens
  CDR3 for alpha chain variable domain of TCR clone 13960 (TRAV12-3, TRAJ33)
CAMSVNSNYQLIW

SEQ ID NO: 27920 - protein, 14 aa, Homo sapiens
  CDR3 for beta chain variable domain of TCR clone 13960 (TRBV4-1, TRBJ2-2)
CASSQAVNTGELFF

SEQ ID NO: 27921 - protein, 18 aa, Homo sapiens
  CDR3 for alpha chain variable domain of TCR clone 13961 (TRAV21, TRAJ52)
CAVRPSSAGGTSYGKLTF

SEQ ID NO: 27922 - protein, 17 aa, Homo sapiens
  CDR3 for beta chain variable domain of TCR clone 13961 (TRBV13, TRBJ2-3)
CASSLSRVAGGRNTQYF

SEQ ID NO: 27923 - protein, 15 aa, Homo sapiens
  CDR3 for alpha chain variable domain of TCR clone 13962 (TRAV27, TRAJ38)
CAARRNAGNNRKLIW

SEQ ID NO: 27924 - protein, 13 aa, Homo sapiens
  CDR3 for beta chain variable domain of TCR clone 13962 (TRBV12-5, TRBJ2-3)
CASGDLQSDTQYF

SEQ ID NO: 27925 - protein, 11 aa, Homo sapiens
  CDR3 for alpha chain variable domain of TCR clone 13963 (TRAV2, TRAJ33)
CAVDSNYQLIW

SEQ ID NO: 27926 - protein, 14 aa, Homo sapiens
  CDR3 for beta chain variable domain of TCR clone 13963 (TRBV11-3, TRBJ2-3)
CASSRLARTDTQYF

SEQ ID NO: 27927 - protein, 16 aa, Homo sapiens
  CDR3 for alpha chain variable domain of TCR clone 13964 (TRAV27, TRAJ53)
CAAPEGRGGSNYKLTF

SEQ ID NO: 27928 - protein, 15 aa, Homo sapiens
  CDR3 for beta chain variable domain of TCR clone 13964 (TRBV20-1, TRBJ1-1)
CSASRGVTGNTEAFF

SEQ ID NO: 27929 - protein, 14 aa, Homo sapiens
  CDR3 for alpha chain variable domain of TCR clone 13965 (TRAV9-2, TRAJ39)
CALYIYNAGNMLTF

SEQ ID NO: 27930 - protein, 13 aa, Homo sapiens
  CDR3 for beta chain variable domain of TCR clone 13965 (TRBV7-3, TRBJ2-3)
SLSGYRPEDTQYF

SEQ ID NO: 27931 - protein, 14 aa, Homo sapiens
  CDR3 for alpha chain variable domain of TCR clone 13966 (TRAV38-1, TRAJ40)
CALRPTSGTYKYIF

SEQ ID NO: 27932 - protein, 14 aa, Homo sapiens
  CDR3 for beta chain variable domain of TCR clone 13966 (TRBV25-1, TRBJ1-1)
CASTHLGGDTEAFF

SEQ ID NO: 27933 - protein, 13 aa, Homo sapiens
  CDR3 for alpha chain variable domain of TCR clone 13967 (TRAV13-1, TRAJ5)
CAASDTGRRALTF

SEQ ID NO: 27934 - protein, 13 aa, Homo sapiens
  CDR3 for beta chain variable domain of TCR clone 13967 (TRBV27, TRBJ1-1)
CASSLSIGAEAFF

SEQ ID NO: 27935 - protein, 12 aa, Homo sapiens
  CDR3 for alpha chain variable domain of TCR clone 13968 (TRAV17, TRAJ39)
CATGAAGNMPTF

SEQ ID NO: 27936 - protein, 14 aa, Homo sapiens
  CDR3 for beta chain variable domain of TCR clone 13968 (TRBV7-9, TRBJ1-2)
CASSRQGANYGYTF

SEQ ID NO: 27937 - protein, 18 aa, Homo sapiens
  CDR3 for alpha chain variable domain of TCR clone 13969 (TRAV13-1, TRAJ52)
CAAKNPNAGGTSYGKPTF

SEQ ID NO: 27938 - protein, 15 aa, Homo sapiens
  CDR3 for beta chain variable domain of TCR clone 13969 (TRBV6-1, TRBJ2-3)
CASSERGGITDTQYF

SEQ ID NO: 27939 - protein, 14 aa, Homo sapiens
  CDR3 for alpha chain variable domain of TCR clone 13970 (TRAV8-2, TRAJ11)
CVVSEKSGYSTLTF

SEQ ID NO: 27940 - protein, 16 aa, Homo sapiens
  CDR3 for beta chain variable domain of TCR clone 13970 (TRBV28, TRBJ2-1)
CASSSPEYPQDNEQFF

SEQ ID NO: 27941 - protein, 14 aa, Homo sapiens
  CDR3 for alpha chain variable domain of TCR clone 13971 (TRAV38-1, TRAJ40)
CALRPTSGTYKSIF

SEQ ID NO: 27942 - protein, 14 aa, Homo sapiens
  CDR3 for beta chain variable domain of TCR clone 13971 (TRBV25-1, TRBJ1-1)
CASTHLGGNTEAFF

SEQ ID NO: 27943 - protein, 13 aa, Homo sapiens
  CDR3 for alpha chain variable domain of TCR clone 13972 (TRAV35, TRAJ36)
CAGPRIGANNLFF

SEQ ID NO: 27944 - protein, 15 aa, Homo sapiens
  CDR3 for beta chain variable domain of TCR clone 13972 (TRBV28, TRBJ2-5)
CASSPPWSYQGTQYF

SEQ ID NO: 27945 - protein, 15 aa, Homo sapiens
  CDR3 for alpha chain variable domain of TCR clone 13973 (TRAV17, TRAJ23)
CATDAEDNKGGKLIF

SEQ ID NO: 27946 - protein, 12 aa, Homo sapiens
  CDR3 for beta chain variable domain of TCR clone 13973 (TRBV2, TRBJ2-1)
CAKREGYNEQFF

SEQ ID NO: 27947 - protein, 15 aa, Homo sapiens
  CDR3 for alpha chain variable domain of TCR clone 13974 (TRAV16, TRAJ57)
CALSGGQGGSEKLVF

SEQ ID NO: 27948 - protein, 15 aa, Homo sapiens
  CDR3 for beta chain variable domain of TCR clone 13974 (TRBV10-1, TRBJ2-3)
CASSATSGGFDTQYF

SEQ ID NO: 27949 - protein, 13 aa, Homo sapiens
  CDR3 for alpha chain variable domain of TCR clone 13975 (TRAV2, TRAJ40)
CAVVTSGTYKYIF

SEQ ID NO: 27950 - protein, 14 aa, Homo sapiens
  CDR3 for beta chain variable domain of TCR clone 13975 (TRBV19, TRBJ2-1)
CASPTFVLSGEQFC

SEQ ID NO: 27951 - protein, 14 aa, Homo sapiens
  CDR3 for alpha chain variable domain of TCR clone 13976 (TRAV17, TRAJ16)
CATADFSDGQKLLF

SEQ ID NO: 27952 - protein, 14 aa, Homo sapiens
  CDR3 for beta chain variable domain of TCR clone 13976 (TRBV19, TRBJ2-1)
CASSPGLAPNEQFF

SEQ ID NO: 27953 - protein, 13 aa, Homo sapiens
  CDR3 for alpha chain variable domain of TCR clone 13977 (TRAV27, TRAJ45)
CRSSGGGVDGLTF

SEQ ID NO: 27954 - protein, 17 aa, Homo sapiens
  CDR3 for beta chain variable domain of TCR clone 13977 (TRBV11-2, TRBJ2-1)
CASSLYPPGVEYNEQFF

SEQ ID NO: 27955 - protein, 18 aa, Homo sapiens
  CDR3 for alpha chain variable domain of TCR clone 13978 (TRAV26-2, TRAJ45)
CILRVDKYSGGDADGLTF

SEQ ID NO: 27956 - protein, 14 aa, Homo sapiens
  CDR3 for beta chain variable domain of TCR clone 13978 (TRBV7-2, TRBJ2-7)
CASRSQGAAYEQYF

SEQ ID NO: 27957 - protein, 14 aa, Homo sapiens
  CDR3 for alpha chain variable domain of TCR clone 13979 (TRAV1-2, TRAJ16)
CAVNRFPDGQKLLF

SEQ ID NO: 27958 - protein, 15 aa, Homo sapiens
  CDR3 for beta chain variable domain of TCR clone 13979 (TRBV9, TRBJ1-6)
CASSVAGTGDSPLHF

SEQ ID NO: 27959 - protein, 16 aa, Homo sapiens
  CDR3 for alpha chain variable domain of TCR clone 13980 (TRAV38-1, TRAJ37)
CAFKGDGSSNTGKLIF

SEQ ID NO: 27960 - protein, 13 aa, Homo sapiens
  CDR3 for beta chain variable domain of TCR clone 13980 (TRBV12-4, TRBJ2-5)
CASSLLRRETQYF

SEQ ID NO: 27961 - protein, 14 aa, Homo sapiens
  CDR3 for alpha chain variable domain of TCR clone 13981 (TRAV8-3, TRAJ6)
CAVGASGGSYIPTF

SEQ ID NO: 27962 - protein, 17 aa, Homo sapiens
  CDR3 for beta chain variable domain of TCR clone 13981 (TRBV18, TRBJ2-2)
CASSPSDPWQSTGELFF

SEQ ID NO: 27963 - protein, 15 aa, Homo sapiens
  CDR3 for alpha chain variable domain of TCR clone 13982 (TRAV3, TRAJ5)
CAVRDLDTGRRALTL

SEQ ID NO: 27964 - protein, 13 aa, Homo sapiens
  CDR3 for beta chain variable domain of TCR clone 13982 (TRBV12-4, TRBJ2-7)
CASSPTETYEQYF

SEQ ID NO: 27965 - protein, 13 aa, Homo sapiens
  CDR3 for alpha chain variable domain of TCR clone 13983 (TRAV21, TRAJ20)
CAVGLRVDYKLSF

SEQ ID NO: 27966 - protein, 14 aa, Homo sapiens
  CDR3 for beta chain variable domain of TCR clone 13983 (TRBV19, TRBJ2-1)
CASPTFVLSGEQFF

SEQ ID NO: 27967 - protein, 15 aa, Homo sapiens
  CDR3 for alpha chain variable domain of TCR clone 13984 (TRAV30, TRAJ32)
CGTEILGGATNKLIF

SEQ ID NO: 27968 - protein, 17 aa, Homo sapiens
  CDR3 for beta chain variable domain of TCR clone 13984 (TRBV5-4, TRBJ2-1)
RASSSAGGRGPYNEQLF

SEQ ID NO: 27969 - protein, 14 aa, Homo sapiens
  CDR3 for alpha chain variable domain of TCR clone 13985 (TRAV1-2, TRAJ16)
CAVDRFSDGQKLLF

SEQ ID NO: 27970 - protein, 15 aa, Homo sapiens
  CDR3 for beta chain variable domain of TCR clone 13985 (TRBV7-9, TRBJ1-6)
CASSSPGRGNSPLHF

SEQ ID NO: 27971 - protein, 12 aa, Homo sapiens
  CDR3 for alpha chain variable domain of TCR clone 13986 (TRAV16, TRAJ10)
CSRTGGGNKLTF

SEQ ID NO: 27972 - protein, 14 aa, Homo sapiens
  CDR3 for beta chain variable domain of TCR clone 13986 (TRBV4-2, TRBJ2-1)
CASGLDRAYNEQFF

SEQ ID NO: 27973 - protein, 14 aa, Homo sapiens
  CDR3 for alpha chain variable domain of TCR clone 13987 (TRAV12-2, TRAJ13)
CAVKKTGGYQKVTF

SEQ ID NO: 27974 - protein, 16 aa, Homo sapiens
  CDR3 for beta chain variable domain of TCR clone 13987 (TRBV5-1, TRBJ2-7)
CASSWGTGGRAWEQYF

SEQ ID NO: 27975 - protein, 16 aa, Homo sapiens
  CDR3 for alpha chain variable domain of TCR clone 13988 (TRAV3, TRAJ10)
CAVRDMRAGGGNKLTF

SEQ ID NO: 27976 - protein, 18 aa, Homo sapiens
  CDR3 for beta chain variable domain of TCR clone 13988 (TRBV6-5, TRBJ2-5)
CASSYSQAGGSYQETQYF

SEQ ID NO: 27977 - protein, 14 aa, Homo sapiens
  CDR3 for alpha chain variable domain of TCR clone 13989 (TRAV17, TRAJ57)
CATDPQGGSEKLVF

SEQ ID NO: 27978 - protein, 13 aa, Homo sapiens
  CDR3 for beta chain variable domain of TCR clone 13989 (TRBV28, TRBJ2-7)
CASTPGLAGEQYF

SEQ ID NO: 27979 - protein, 15 aa, Homo sapiens
  CDR3 for alpha chain variable domain of TCR clone 13990 (TRAV8-4, TRAJ10)
CAVSDQMGGGNKLTF

SEQ ID NO: 27980 - protein, 13 aa, Homo sapiens
  CDR3 for beta chain variable domain of TCR clone 13990 (TRBV12-4, TRBJ1-1)
CASSPGTGFEAFF

SEQ ID NO: 27981 - protein, 16 aa, Homo sapiens
  CDR3 for alpha chain variable domain of TCR clone 13991 (TRAV26-2, TRAJ52)
CILRDVGGTSYGKLTF

SEQ ID NO: 27982 - protein, 15 aa, Homo sapiens
  CDR3 for beta chain variable domain of TCR clone 13991 (TRBV11-2, TRBJ2-2)
CASSLRAARTGELFF

SEQ ID NO: 27983 - protein, 14 aa, Homo sapiens
  CDR3 for alpha chain variable domain of TCR clone 13992 (TRAV1-1, TRAJ27)
CAVIYNTNAGKSTF

SEQ ID NO: 27984 - protein, 15 aa, Homo sapiens
  CDR3 for beta chain variable domain of TCR clone 13992 (TRBV7-2, TRBJ2-3)
CASSLAGAFIDTQYF

SEQ ID NO: 27985 - protein, 15 aa, Homo sapiens
  CDR3 for alpha chain variable domain of TCR clone 13993 (TRAV26-1, TRAJ29)
CIVRVEGSVNTPLVF

SEQ ID NO: 27986 - protein, 15 aa, Homo sapiens
  CDR3 for beta chain variable domain of TCR clone 13993 (TRBV7-9, TRBJ1-5)
CASSQGHQPNQPQHF

SEQ ID NO: 27987 - protein, 12 aa, Homo sapiens
  CDR3 for alpha chain variable domain of TCR clone 13994 (TRAV9-2, TRAJ10)
CALRGGGNKLTF

SEQ ID NO: 27988 - protein, 15 aa, Homo sapiens
  CDR3 for beta chain variable domain of TCR clone 13994 (TRBV12-4, TRBJ2-2)
CASGPGQLNTGELFF

SEQ ID NO: 27989 - protein, 16 aa, Homo sapiens
  CDR3 for alpha chain variable domain of TCR clone 13995 (TRAV3, TRAJ37)
CAVRPHGSGNTGKLIF

SEQ ID NO: 27990 - protein, 16 aa, Homo sapiens
  CDR3 for beta chain variable domain of TCR clone 13995 (TRBV9, TRBJ1-2)
CASSVEEKVSPYGYAF

SEQ ID NO: 27991 - protein, 15 aa, Homo sapiens
  CDR3 for alpha chain variable domain of TCR clone 13996 (TRAV21, TRAJ53)
CATLNGGGSNYKLTF

SEQ ID NO: 27992 - protein, 16 aa, Homo sapiens
  CDR3 for beta chain variable domain of TCR clone 13996 (TRBV9, TRBJ2-1)
CASSVGGGGNYNEQFF

SEQ ID NO: 27993 - protein, 16 aa, Homo sapiens
  CDR3 for alpha chain variable domain of TCR clone 13997 (TRAV3, TRAJ37)
CAGRGKGSGNTGKLIF

SEQ ID NO: 27994 - protein, 13 aa, Homo sapiens
  CDR3 for beta chain variable domain of TCR clone 13997 (TRBV14, TRBJ2-7)
CASSQDRRYEQYF

SEQ ID NO: 27995 - protein, 12 aa, Homo sapiens
  CDR3 for alpha chain variable domain of TCR clone 13998 (TRAV21, TRAJ56)
CAVYGANSKLTF

SEQ ID NO: 27996 - protein, 16 aa, Homo sapiens
  CDR3 for beta chain variable domain of TCR clone 13998 (TRBV29-1, TRBJ2-7)
CSVEDAEDGTAYEQYF

SEQ ID NO: 27997 - protein, 12 aa, Homo sapiens
  CDR3 for alpha chain variable domain of TCR clone 13999 (TRAV12-3, TRAJ42)
CAPGGSQGNLIF

SEQ ID NO: 27998 - protein, 15 aa, Homo sapiens
  CDR3 for beta chain variable domain of TCR clone 13999 (TRBV9, TRBJ2-1)
CASSLAGSSYNEQFF

SEQ ID NO: 27999 - protein, 11 aa, Homo sapiens
  CDR3 for alpha chain variable domain of TCR clone 14000 (TRAV12-3, TRAJ43)
CAMSVSNDMRF

SEQ ID NO: 28000 - protein, 13 aa, Homo sapiens
  CDR3 for beta chain variable domain of TCR clone 14000 (TRBV20-1, TRBJ1-1)
CSAPLEGGTEAFF

SEQ ID NO: 28001 - protein, 14 aa, Homo sapiens
  CDR3 for alpha chain variable domain of TCR clone 14001 (TRAV13-2, TRAJ17)
CAENSKAAGNKLTF

SEQ ID NO: 28002 - protein, 17 aa, Homo sapiens
  CDR3 for beta chain variable domain of TCR clone 14001 (TRBV28, TRBJ2-5)
CASSTPEGDALQETQYF

SEQ ID NO: 28003 - protein, 11 aa, Homo sapiens
  CDR3 for alpha chain variable domain of TCR clone 14002 (TRAV12-3, TRAJ27)
CAMANAGESTF

SEQ ID NO: 28004 - protein, 13 aa, Homo sapiens
  CDR3 for beta chain variable domain of TCR clone 14002 (TRBV20-1, TRBJ1-1)
CSARVGGNTEAFF

SEQ ID NO: 28005 - protein, 13 aa, Homo sapiens
  CDR3 for alpha chain variable domain of TCR clone 14003 (TRAV1-1, TRAJ27)
CAVRKHQCRQINL

SEQ ID NO: 28006 - protein, 14 aa, Homo sapiens
  CDR3 for beta chain variable domain of TCR clone 14003 (TRBV7-6, TRBJ2-6)
CASSLSGGANVLTF

SEQ ID NO: 28007 - protein, 15 aa, Homo sapiens
  CDR3 for alpha chain variable domain of TCR clone 14004 (TRAV26-1, TRAJ22)
CIVRVSFWFCKATDL

SEQ ID NO: 28008 - protein, 13 aa, Homo sapiens
  CDR3 for beta chain variable domain of TCR clone 14004 (TRBV7-9, TRBJ1-2)
CASSLKQNYGYTL

SEQ ID NO: 28009 - protein, 15 aa, Homo sapiens
  CDR3 for alpha chain variable domain of TCR clone 14005 (TRAV26-1, TRAJ29)
CIVRVEGSGNTPLVF

SEQ ID NO: 28010 - protein, 14 aa, Homo sapiens
  CDR3 for beta chain variable domain of TCR clone 14005 (TRBV18, TRBJ2-5)
CASSPEVSQETQYF

SEQ ID NO: 28011 - protein, 16 aa, Homo sapiens
  CDR3 for alpha chain variable domain of TCR clone 14006 (TRAV12-3, TRAJ53)
CAMSPGSGGSNYKLTF

SEQ ID NO: 28012 - protein, 11 aa, Homo sapiens
  CDR3 for beta chain variable domain of TCR clone 14006 (TRBV29-1, TRBJ2-5)
CSEDRTGTLYF

SEQ ID NO: 28013 - protein, 15 aa, Homo sapiens
  CDR3 for alpha chain variable domain of TCR clone 14007 (TRAV3, TRAJ5)
CAVRDLDTGRRALAF

SEQ ID NO: 28014 - protein, 13 aa, Homo sapiens
  CDR3 for beta chain variable domain of TCR clone 14007 (TRBV12-4, TRBJ2-7)
CASSPTETYEQYF

SEQ ID NO: 28015 - protein, 15 aa, Homo sapiens
  CDR3 for alpha chain variable domain of TCR clone 14008 (TRAV13-1, TRAJ52)
CAATSPRTSYGKLTF

SEQ ID NO: 28016 - protein, 15 aa, Homo sapiens
  CDR3 for beta chain variable domain of TCR clone 14008 (TRBV5-1, TRBJ2-1)
CASSPPRAPYNEQFF

SEQ ID NO: 28017 - protein, 13 aa, Homo sapiens
  CDR3 for alpha chain variable domain of TCR clone 14009 (TRAV35, TRAJ44)
CAGLSGTASKLTF

SEQ ID NO: 28018 - protein, 14 aa, Homo sapiens
  CDR3 for beta chain variable domain of TCR clone 14009 (TRBV7-8, TRBJ1-2)
CASSLGPYRDICMA

SEQ ID NO: 28019 - protein, 15 aa, Homo sapiens
  CDR3 for alpha chain variable domain of TCR clone 14010 (TRAV8-2, TRAJ16)
CVVRDGFSDGQKLLF

SEQ ID NO: 28020 - protein, 14 aa, Homo sapiens
  CDR3 for beta chain variable domain of TCR clone 14010 (TRBV7-3, TRBJ1-1)
CASSLGTGYTEAFF

SEQ ID NO: 28021 - protein, 14 aa, Homo sapiens
  CDR3 for alpha chain variable domain of TCR clone 14011 (TRAV8-2, TRAJ4)
CVVSPSVGYNKLIF

SEQ ID NO: 28022 - protein, 15 aa, Homo sapiens
  CDR3 for beta chain variable domain of TCR clone 14011 (TRBV4-1, TRBJ1-4)
CASSDTGGTNEKLFF

SEQ ID NO: 28023 - protein, 14 aa, Homo sapiens
  CDR3 for alpha chain variable domain of TCR clone 14012 (TRAV1-2, TRAJ16)
CAVNRFSYGQKLLF

SEQ ID NO: 28024 - protein, 15 aa, Homo sapiens
  CDR3 for beta chain variable domain of TCR clone 14012 (TRBV7-9, TRBJ1-6)
CASSSPGRGNSPLHF

SEQ ID NO: 28025 - protein, 10 aa, Homo sapiens
  CDR3 for alpha chain variable domain of TCR clone 14013 (TRAV12-3, TRAJ18)
CAMSAEAQPW

SEQ ID NO: 28026 - protein, 13 aa, Homo sapiens
  CDR3 for beta chain variable domain of TCR clone 14013 (TRBV15, TRBJ1-6)
CVTSGGLNSPLHF

SEQ ID NO: 28027 - protein, 15 aa, Homo sapiens
  CDR3 for alpha chain variable domain of TCR clone 14014 (TRAV4, TRAJ10)
CLVGDEEGGGNKLTF

SEQ ID NO: 28028 - protein, 15 aa, Homo sapiens
  CDR3 for beta chain variable domain of TCR clone 14014 (TRBV7-2, TRBJ2-7)
CASGLTGQGTYEQYF

SEQ ID NO: 28029 - protein, 18 aa, Homo sapiens
  CDR3 for alpha chain variable domain of TCR clone 14015 (TRAV21, TRAJ52)
CAVRPSPAGGTSYGKLTF

SEQ ID NO: 28030 - protein, 17 aa, Homo sapiens
  CDR3 for beta chain variable domain of TCR clone 14015 (TRBV13, TRBJ2-3)
CASSLSRVAGGRNMQYF

SEQ ID NO: 28031 - protein, 10 aa, Homo sapiens
  CDR3 for alpha chain variable domain of TCR clone 14016 (TRAV9-2, TRAJ43)
CALSIPPQRF

SEQ ID NO: 28032 - protein, 15 aa, Homo sapiens
  CDR3 for beta chain variable domain of TCR clone 14016 (TRBV7-2, TRBJ2-7)
CASSLALGSAYEQYF

SEQ ID NO: 28033 - protein, 18 aa, Homo sapiens
  CDR3 for alpha chain variable domain of TCR clone 14017 (TRAV13-1, TRAJ52)
CAASKRSAGGTSDGKLTF

SEQ ID NO: 28034 - protein, 13 aa, Homo sapiens
  CDR3 for beta chain variable domain of TCR clone 14017 (TRBV12-4, TRBJ1-2)
CASSLRQGKGYTF

SEQ ID NO: 28035 - protein, 15 aa, Homo sapiens
  CDR3 for alpha chain variable domain of TCR clone 14018 (TRAV3, TRAJ5)
CAVRDLDTGRRVLTF

SEQ ID NO: 28036 - protein, 13 aa, Homo sapiens
  CDR3 for beta chain variable domain of TCR clone 14018 (TRBV12-4, TRBJ2-7)
CASSPTETYEQYF

SEQ ID NO: 28037 - protein, 15 aa, Homo sapiens
  CDR3 for alpha chain variable domain of TCR clone 14019 (TRAV26-1, TRAJ44)
CIVRANTGTASKLTL

SEQ ID NO: 28038 - protein, 16 aa, Homo sapiens
  CDR3 for beta chain variable domain of TCR clone 14019 (TRBV7-7, TRBJ2-1)
CASSLASGTSYNEQFF

SEQ ID NO: 28039 - protein, 15 aa, Homo sapiens
  CDR3 for alpha chain variable domain of TCR clone 14020 (TRAV3, TRAJ11)
CAVRDRGSGYSTLTF

SEQ ID NO: 28040 - protein, 13 aa, Homo sapiens
  CDR3 for beta chain variable domain of TCR clone 14020 (TRBV27, TRBJ1-4)
CASSLMGDEKLFF

SEQ ID NO: 28041 - protein, 13 aa, Homo sapiens
  CDR3 for alpha chain variable domain of TCR clone 14021 (TRAV13-1, TRAJ5)
CSARVTGRRALTF

SEQ ID NO: 28042 - protein, 15 aa, Homo sapiens
  CDR3 for beta chain variable domain of TCR clone 14021 (TRBV7-9, TRBJ2-7)
CASSPGGGLTYEQYF

SEQ ID NO: 28043 - protein, 13 aa, Homo sapiens
  CDR3 for alpha chain variable domain of TCR clone 14022 (TRAV12-1, TRAJ40)
CVVPTSGTYKYVF

SEQ ID NO: 28044 - protein, 18 aa, Homo sapiens
  CDR3 for beta chain variable domain of TCR clone 14022 (TRBV7-6, TRBJ2-1)
CASSPRTSGMSSYNEQFF

SEQ ID NO: 28045 - protein, 15 aa, Homo sapiens
  CDR3 for alpha chain variable domain of TCR clone 14023 (TRAV8-2, TRAJ15)
CVVTMGNQAGTALIF

SEQ ID NO: 28046 - protein, 16 aa, Homo sapiens
  CDR3 for beta chain variable domain of TCR clone 14023 (TRBV12-4, TRBJ1-5)
CASSRPVGGSNQPQHF

SEQ ID NO: 28047 - protein, 15 aa, Homo sapiens
  CDR3 for alpha chain variable domain of TCR clone 14024 (TRAV12-3, TRAJ6)
CATSATTGGSYIPTF

SEQ ID NO: 28048 - protein, 16 aa, Homo sapiens
  CDR3 for beta chain variable domain of TCR clone 14024 (TRBV20-1, TRBJ1-2)
CSASMGQGVANYGYTF

SEQ ID NO: 28049 - protein, 14 aa, Homo sapiens
  CDR3 for alpha chain variable domain of TCR clone 14025 (TRAV12-2, TRAJ13)
CAVKKTGGYQKVTC

SEQ ID NO: 28050 - protein, 15 aa, Homo sapiens
  CDR3 for beta chain variable domain of TCR clone 14025 (TRBV27, TRBJ2-1)
CASSNGGGSSNEQFF

SEQ ID NO: 28051 - protein, 16 aa, Homo sapiens
  CDR3 for alpha chain variable domain of TCR clone 14026 (TRAV12-3, TRAJ50)
CAMRDPMKTSHDKVIF

SEQ ID NO: 28052 - protein, 13 aa, Homo sapiens
  CDR3 for beta chain variable domain of TCR clone 14026 (TRBV4-1, TRBJ2-3)
CASSLDFTDTQYF

SEQ ID NO: 28053 - protein, 12 aa, Homo sapiens
  CDR3 for alpha chain variable domain of TCR clone 14027 (TRAV13-2, TRAJ23)
CAERHRGGKLIF

SEQ ID NO: 28054 - protein, 15 aa, Homo sapiens
  CDR3 for beta chain variable domain of TCR clone 14027 (TRBV24-1, TRBJ2-1)
CATRASGGQYNEQFF

SEQ ID NO: 28055 - protein, 13 aa, Homo sapiens
  CDR3 for alpha chain variable domain of TCR clone 14028 (TRAV8-1, TRAJ32)
CAADGGATNKLIF

SEQ ID NO: 28056 - protein, 15 aa, Homo sapiens
  CDR3 for beta chain variable domain of TCR clone 14028 (TRBV7-9, TRBJ2-7)
CASSLALAEAYEQYF

SEQ ID NO: 28057 - protein, 14 aa, Homo sapiens
  CDR3 for alpha chain variable domain of TCR clone 14029 (TRAV8-1, TRAJ13)
CAVKRSGGYQKVTF

SEQ ID NO: 28058 - protein, 22 aa, Homo sapiens
  CDR3 for beta chain variable domain of TCR clone 14029 (TRBV11-2, TRBJ1-4)
CASSLDITRRGIPRKDNEKLFF

SEQ ID NO: 28059 - protein, 15 aa, Homo sapiens
  CDR3 for alpha chain variable domain of TCR clone 14030 (TRAV8-3, TRAJ45)
CASSYSGGGADGLTF

SEQ ID NO: 28060 - protein, 14 aa, Homo sapiens
  CDR3 for beta chain variable domain of TCR clone 14030 (TRBV25-1, TRBJ1-1)
CASTHLGGNTEAFF

SEQ ID NO: 28061 - protein, 12 aa, Homo sapiens
  CDR3 for alpha chain variable domain of TCR clone 14031 (TRAV13-2, TRAJ39)
CAENSERNMLTF

SEQ ID NO: 28062 - protein, 13 aa, Homo sapiens
  CDR3 for beta chain variable domain of TCR clone 14031 (TRBV6-1, TRBJ1-2)
CASSGGISFGYTF

SEQ ID NO: 28063 - protein, 17 aa, Homo sapiens
  CDR3 for alpha chain variable domain of TCR clone 14032 (TRAV23/DV6, TRAJ57)
CAASSTLSQGGSEKLVF

SEQ ID NO: 28064 - protein, 14 aa, Homo sapiens
  CDR3 for beta chain variable domain of TCR clone 14032 (TRBV25-1, TRBJ1-1)
CASTHLGGSTEAFF

SEQ ID NO: 28065 - protein, 12 aa, Homo sapiens
  CDR3 for alpha chain variable domain of TCR clone 14033 (TRAV12-3, TRAJ17)
CAMTLTGNKLTF

SEQ ID NO: 28066 - protein, 14 aa, Homo sapiens
  CDR3 for beta chain variable domain of TCR clone 14033 (TRBV7-2, TRBJ1-1)
CASSFLTGTTEAFF

SEQ ID NO: 28067 - protein, 16 aa, Homo sapiens
  CDR3 for alpha chain variable domain of TCR clone 14034 (TRAV16, TRAJ52)
FALSAAGGTSYGKLTF

SEQ ID NO: 28068 - protein, 12 aa, Homo sapiens
  CDR3 for beta chain variable domain of TCR clone 14034 (TRBV12-4, TRBJ1-3)
CASSFSGNTIYF

SEQ ID NO: 28069 - protein, 14 aa, Homo sapiens
  CDR3 for alpha chain variable domain of TCR clone 14035 (TRAV38-1, TRAJ40)
CALRPTSGTYKYVF

SEQ ID NO: 28070 - protein, 14 aa, Homo sapiens
  CDR3 for beta chain variable domain of TCR clone 14035 (TRBV25-1, TRBJ1-1)
CASTHLGGNTEAFF

SEQ ID NO: 28071 - protein, 14 aa, Homo sapiens
  CDR3 for alpha chain variable domain of TCR clone 14036 (TRAV13-1, TRAJ44)
CAAEATGTASKLTF

SEQ ID NO: 28072 - protein, 17 aa, Homo sapiens
  CDR3 for beta chain variable domain of TCR clone 14036 (TRBV7-3, TRBJ2-3)
CASSLMKRMRGADTQYF

SEQ ID NO: 28073 - protein, 14 aa, Homo sapiens
  CDR3 for alpha chain variable domain of TCR clone 14037 (TRAV26-1, TRAJ11)
CIVPLYSGYSTLTF

SEQ ID NO: 28074 - protein, 21 aa, Homo sapiens
  CDR3 for beta chain variable domain of TCR clone 14037 (TRBV5-1, TRBJ1-6)
CASSPRGGADSTGGVRSPLHF

SEQ ID NO: 28075 - protein, 12 aa, Homo sapiens
  CDR3 for alpha chain variable domain of TCR clone 14038 (TRAV13-2, TRAJ23)
CAERHRGGKLIF

SEQ ID NO: 28076 - protein, 13 aa, Homo sapiens
  CDR3 for beta chain variable domain of TCR clone 14038 (TRBV7-8, TRBJ2-7)
CASSLTGGREQYF

SEQ ID NO: 28077 - protein, 13 aa, Homo sapiens
  CDR3 for alpha chain variable domain of TCR clone 14039 (TRAV13-1, TRAJ39)
CSKYSNAGNMLTF

SEQ ID NO: 28078 - protein, 15 aa, Homo sapiens
  CDR3 for beta chain variable domain of TCR clone 14039 (TRBV19, TRBJ1-1)
CASTSGQIQNTEAFF

SEQ ID NO: 28079 - protein, 13 aa, Homo sapiens
  CDR3 for alpha chain variable domain of TCR clone 14040 (TRAV29/DV5, TRAJ29)
CAASAAGNTPLVF

SEQ ID NO: 28080 - protein, 13 aa, Homo sapiens
  CDR3 for beta chain variable domain of TCR clone 14040 (TRBV7-2, TRBJ2-7)
CASSSPSGSEQYF

SEQ ID NO: 28081 - protein, 14 aa, Homo sapiens
  CDR3 for alpha chain variable domain of TCR clone 14041 (TRAV35, TRAJ33)
CAGSSQDRNYQLIW

SEQ ID NO: 28082 - protein, 15 aa, Homo sapiens
  CDR3 for beta chain variable domain of TCR clone 14041 (TRBV20-1, TRBJ2-7)
CSAESGTSGAYEQYF

SEQ ID NO: 28083 - protein, 15 aa, Homo sapiens
  CDR3 for alpha chain variable domain of TCR clone 14042 (TRAV23/DV6, TRAJ18)
CAARYRGSTLGRLYF

SEQ ID NO: 28084 - protein, 13 aa, Homo sapiens
  CDR3 for beta chain variable domain of TCR clone 14042 (TRBV7-2, TRBJ2-7)
CASSSPSGSEQYF

SEQ ID NO: 28085 - protein, 14 aa, Homo sapiens
  CDR3 for alpha chain variable domain of TCR clone 14043 (TRAV35, TRAJ22)
CAGLRPGSARQLTF

SEQ ID NO: 28086 - protein, 15 aa, Homo sapiens
  CDR3 for beta chain variable domain of TCR clone 14043 (TRBV12-4, TRBJ2-5)
CVSSPPTGLQETQYF

SEQ ID NO: 28087 - protein, 15 aa, Homo sapiens
  CDR3 for alpha chain variable domain of TCR clone 14044 (TRAV3, TRAJ20)
CAVSDIKLSDYKLSF

SEQ ID NO: 28088 - protein, 15 aa, Homo sapiens
  CDR3 for beta chain variable domain of TCR clone 14044 (TRBV7-9, TRBJ1-6)
CASSSPGRGNSPLHF

SEQ ID NO: 28089 - protein, 14 aa, Homo sapiens
  CDR3 for alpha chain variable domain of TCR clone 14045 (TRAV8-4, TRAJ9)
CAVRINTGGFKTIF

SEQ ID NO: 28090 - protein, 15 aa, Homo sapiens
  CDR3 for beta chain variable domain of TCR clone 14045 (TRBV10-2, TRBJ2-6)
CASSEQGTGANGLTF

SEQ ID NO: 28091 - protein, 14 aa, Homo sapiens
  CDR3 for alpha chain variable domain of TCR clone 14046 (TRAV29/DV5, TRAJ20)
CAATIRSNDYKLSF

SEQ ID NO: 28092 - protein, 17 aa, Homo sapiens
  CDR3 for beta chain variable domain of TCR clone 14046 (TRBV7-8, TRBJ2-6)
CASSAGTGGAGANVLTF

SEQ ID NO: 28093 - protein, 15 aa, Homo sapiens
  CDR3 for alpha chain variable domain of TCR clone 14047 (TRAV8-6, TRAJ42)
CAVRGRKPRKSHLWK

SEQ ID NO: 28094 - protein, 13 aa, Homo sapiens
  CDR3 for beta chain variable domain of TCR clone 14047 (TRBV7-3, TRBJ1-1)
CASSQDWGAEAFF

SEQ ID NO: 28095 - protein, 16 aa, Homo sapiens
  CDR3 for alpha chain variable domain of TCR clone 14048 (TRAV1-2, TRAJ10)
CAVRGVLTGGGNKLTV

SEQ ID NO: 28096 - protein, 12 aa, Homo sapiens
  CDR3 for beta chain variable domain of TCR clone 14048 (TRBV7-8, TRBJ2-7)
CASSLGDREQYF

SEQ ID NO: 28097 - protein, 18 aa, Homo sapiens
  CDR3 for alpha chain variable domain of TCR clone 14049 (TRAV21, TRAJ52)
CAVRLSPAGGTSYGKLTF

SEQ ID NO: 28098 - protein, 17 aa, Homo sapiens
  CDR3 for beta chain variable domain of TCR clone 14049 (TRBV13, TRBJ2-3)
CASSLSRVAGGRNTQYF

SEQ ID NO: 28099 - protein, 14 aa, Homo sapiens
  CDR3 for alpha chain variable domain of TCR clone 14050 (TRAV12-1, TRAJ17)
CVVNYKAAGKKLTF

SEQ ID NO: 28100 - protein, 17 aa, Homo sapiens
  CDR3 for beta chain variable domain of TCR clone 14050 (TRBV20-1, TRBJ2-1)
CSASSSGLAGSYNEQFF

SEQ ID NO: 28101 - protein, 14 aa, Homo sapiens
  CDR3 for alpha chain variable domain of TCR clone 14051 (TRAV35, TRAJ22)
CSGLRPGSARQLTF

SEQ ID NO: 28102 - protein, 15 aa, Homo sapiens
  CDR3 for beta chain variable domain of TCR clone 14051 (TRBV12-4, TRBJ2-5)
CASSPPTGLQETQYF

SEQ ID NO: 28103 - protein, 12 aa, Homo sapiens
  CDR3 for alpha chain variable domain of TCR clone 14052 (TRAV1-1, TRAJ8)
CAGGTGFQKLVF

SEQ ID NO: 28104 - protein, 14 aa, Homo sapiens
  CDR3 for beta chain variable domain of TCR clone 14052 (TRBV7-6, TRBJ2-3)
CASSVAGGTDTQYF

SEQ ID NO: 28105 - protein, 14 aa, Homo sapiens
  CDR3 for alpha chain variable domain of TCR clone 14053 (TRAV12-3, TRAJ10)
SHLPLTGGGNKLTF

SEQ ID NO: 28106 - protein, 14 aa, Homo sapiens
  CDR3 for beta chain variable domain of TCR clone 14053 (TRBV12-4, TRBJ1-1)
CASSLGTGGTEAFF

SEQ ID NO: 28107 - protein, 12 aa, Homo sapiens
  CDR3 for alpha chain variable domain of TCR clone 14054 (TRAV2, TRAJ9)
CAVGAGGFKTIF

SEQ ID NO: 28108 - protein, 16 aa, Homo sapiens
  CDR3 for beta chain variable domain of TCR clone 14054 (TRBV13, TRBJ2-2)
CASSPRTGEHAGELFF

SEQ ID NO: 28109 - protein, 14 aa, Homo sapiens
  CDR3 for alpha chain variable domain of TCR clone 14055 (TRAV1-2, TRAJ16)
CAVNRFSDGQKLLF

SEQ ID NO: 28110 - protein, 15 aa, Homo sapiens
  CDR3 for beta chain variable domain of TCR clone 14055 (TRBV9, TRBJ1-6)
CASSVAGTGDSALHF

SEQ ID NO: 28111 - protein, 13 aa, Homo sapiens
  CDR3 for alpha chain variable domain of TCR clone 14056 (TRAV13-2, TRAJ48)
CAEMDFGNEKLTF

SEQ ID NO: 28112 - protein, 15 aa, Homo sapiens
  CDR3 for beta chain variable domain of TCR clone 14056 (TRBV7-9, TRBJ1-6)
CASSSTGRGNSPLHF

SEQ ID NO: 28113 - protein, 13 aa, Homo sapiens
  CDR3 for alpha chain variable domain of TCR clone 14057 (TRAV38-2/DV8, TRAJ34)
CAYRTWNTDKLIF

SEQ ID NO: 28114 - protein, 15 aa, Homo sapiens
  CDR3 for beta chain variable domain of TCR clone 14057 (TRBV12-4, TRBJ2-5)
CASSPPTGLQETQYF

SEQ ID NO: 28115 - protein, 14 aa, Homo sapiens
  CDR3 for alpha chain variable domain of TCR clone 14058 (TRAV13-1, TRAJ53)
CAASISGSNYKLTF

SEQ ID NO: 28116 - protein, 15 aa, Homo sapiens
  CDR3 for beta chain variable domain of TCR clone 14058 (TRBV7-3, TRBJ2-3)
CASSLTSGVGDTQYF

SEQ ID NO: 28117 - protein, 15 aa, Homo sapiens
  CDR3 for alpha chain variable domain of TCR clone 14059 (TRAV17, TRAJ57)
CATGPSQGGSETLVF

SEQ ID NO: 28118 - protein, 16 aa, Homo sapiens
  CDR3 for beta chain variable domain of TCR clone 14059 (TRBV12-4, TRBJ1-5)
CASSRPVGGSNQPQHF

SEQ ID NO: 28119 - protein, 16 aa, Homo sapiens
  CDR3 for alpha chain variable domain of TCR clone 14060 (TRAV16, TRAJ4)
CALSRMSSGGYNKLIF

SEQ ID NO: 28120 - protein, 16 aa, Homo sapiens
  CDR3 for beta chain variable domain of TCR clone 14060 (TRBV24-1, TRBJ2-3)
CATSDPGTGATDTQYF

SEQ ID NO: 28121 - protein, 20 aa, Homo sapiens
  CDR3 for alpha chain variable domain of TCR clone 14061 (TRAV12-1, TRAJ42)
SSVIQPPTSVKGGSQGNLTF

SEQ ID NO: 28122 - protein, 18 aa, Homo sapiens
  CDR3 for beta chain variable domain of TCR clone 14061 (TRBV11-2, TRBJ2-3)
CASSLGGASRGAPNTQYF

SEQ ID NO: 28123 - protein, 15 aa, Homo sapiens
  CDR3 for alpha chain variable domain of TCR clone 14062 (TRAV26-1, TRAJ29)
CIVRVEGSGNTPLVF

SEQ ID NO: 28124 - protein, 15 aa, Homo sapiens
  CDR3 for beta chain variable domain of TCR clone 14062 (TRBV7-9, TRBJ1-5)
CASSQGHQPNQPQYF

SEQ ID NO: 28125 - protein, 13 aa, Homo sapiens
  CDR3 for alpha chain variable domain of TCR clone 14063 (TRAV27, TRAJ41)
CAGEGNSGHALNF

SEQ ID NO: 28126 - protein, 14 aa, Homo sapiens
  CDR3 for beta chain variable domain of TCR clone 14063 (TRBV7-2, TRBJ1-1)
CASSFLTGTTEAFF

SEQ ID NO: 28127 - protein, 15 aa, Homo sapiens
  CDR3 for alpha chain variable domain of TCR clone 14064 (TRAV3, TRAJ20)
CAVRDIKLGDYKLSF

SEQ ID NO: 28128 - protein, 15 aa, Homo sapiens
  CDR3 for beta chain variable domain of TCR clone 14064 (TRBV7-9, TRBJ1-6)
CASSSPGRGNSPLHF

SEQ ID NO: 28129 - protein, 14 aa, Homo sapiens
  CDR3 for alpha chain variable domain of TCR clone 14065 (TRAV29/DV5, TRAJ54)
CAASRSPGAQKLVF

SEQ ID NO: 28130 - protein, 13 aa, Homo sapiens
  CDR3 for beta chain variable domain of TCR clone 14065 (TRBV7-2, TRBJ2-5)
CASSQTSVETQYF

SEQ ID NO: 28131 - protein, 16 aa, Homo sapiens
  CDR3 for alpha chain variable domain of TCR clone 14066 (TRAV27, TRAJ13)
CAGAKSDSGGYQEVTF

SEQ ID NO: 28132 - protein, 15 aa, Homo sapiens
  CDR3 for beta chain variable domain of TCR clone 14066 (TRBV29-1, TRBJ2-1)
CSVGRHALFYNEQFF

SEQ ID NO: 28133 - protein, 16 aa, Homo sapiens
  CDR3 for alpha chain variable domain of TCR clone 14067 (TRAV12-3, TRAJ53)
CAMSPGSGGSNYKLTF

SEQ ID NO: 28134 - protein, 11 aa, Homo sapiens
  CDR3 for beta chain variable domain of TCR clone 14067 (TRBV29-1, TRBJ2-5)
CSEDRRGTQYF

SEQ ID NO: 28135 - protein, 13 aa, Homo sapiens
  CDR3 for alpha chain variable domain of TCR clone 14068 (TRAV2, TRAJ40)
CAVVTSGTYKYIF

SEQ ID NO: 28136 - protein, 15 aa, Homo sapiens
  CDR3 for beta chain variable domain of TCR clone 14068 (TRBV28, TRBJ2-1)
CASSIIAGGRSEQFF

SEQ ID NO: 28137 - protein, 15 aa, Homo sapiens
  CDR3 for alpha chain variable domain of TCR clone 14069 (TRAV3, TRAJ5)
CAVRDRKTGRRAITF

SEQ ID NO: 28138 - protein, 15 aa, Homo sapiens
  CDR3 for beta chain variable domain of TCR clone 14069 (TRBV7-8, TRBJ2-1)
CASSLADSLYNEQFF

SEQ ID NO: 28139 - protein, 13 aa, Homo sapiens
  CDR3 for alpha chain variable domain of TCR clone 14070 (TRAV35, TRAJ42)
CAGFPGSQGNLIL

SEQ ID NO: 28140 - protein, 13 aa, Homo sapiens
  CDR3 for beta chain variable domain of TCR clone 14070 (TRBV29-1, TRBJ2-1)
CSVEGGRVNEQFF

SEQ ID NO: 28141 - protein, 14 aa, Homo sapiens
  CDR3 for alpha chain variable domain of TCR clone 14071 (TRAV1-2, TRAJ8)
CAVREDTGFQKLVF

SEQ ID NO: 28142 - protein, 15 aa, Homo sapiens
  CDR3 for beta chain variable domain of TCR clone 14071 (TRBV6-3, TRBJ2-7)
CASSSTGTVFYEQYF

SEQ ID NO: 28143 - protein, 11 aa, Homo sapiens
  CDR3 for alpha chain variable domain of TCR clone 14072 (TRAV25, TRAJ47)
CAGPYGNKLVF

SEQ ID NO: 28144 - protein, 13 aa, Homo sapiens
  CDR3 for beta chain variable domain of TCR clone 14072 (TRBV6-5, TRBJ2-5)
CASSPQGGETQYF

SEQ ID NO: 28145 - protein, 13 aa, Homo sapiens
  CDR3 for alpha chain variable domain of TCR clone 14073 (TRAV21, TRAJ57)
CAVTQGGSEKLVF

SEQ ID NO: 28146 - protein, 16 aa, Homo sapiens
  CDR3 for beta chain variable domain of TCR clone 14073 (TRBV29-1, TRBJ2-7)
CSVEDAEDGTAYEQYF

SEQ ID NO: 28147 - protein, 14 aa, Homo sapiens
  CDR3 for alpha chain variable domain of TCR clone 14074 (TRAV38-1, TRAJ40)
CALRPTSGTYKYIF

SEQ ID NO: 28148 - protein, 13 aa, Homo sapiens
  CDR3 for beta chain variable domain of TCR clone 14074 (TRBV7-9, TRBJ1-2)
CASSLKQNYGYTF

SEQ ID NO: 28149 - protein, 17 aa, Homo sapiens
  CDR3 for alpha chain variable domain of TCR clone 14075 (TRAV3, TRAJ6)
CAGRDGPRAGGSYIPTF

SEQ ID NO: 28150 - protein, 14 aa, Homo sapiens
  CDR3 for beta chain variable domain of TCR clone 14075 (TRBV7-2, TRBJ2-7)
CASSPKTSFYEQYF

SEQ ID NO: 28151 - protein, 12 aa, Homo sapiens
  CDR3 for alpha chain variable domain of TCR clone 14076 (TRAV12-3, TRAJ17)
CAMTLTGNKLTF

SEQ ID NO: 28152 - protein, 15 aa, Homo sapiens
  CDR3 for beta chain variable domain of TCR clone 14076 (TRBV20-1, TRBJ2-7)
CSARDRVSGMDVQYF

SEQ ID NO: 28153 - protein, 13 aa, Homo sapiens
  CDR3 for alpha chain variable domain of TCR clone 14077 (TRAV29/DV5, TRAJ31)
CAASRNNNARLMF

SEQ ID NO: 28154 - protein, 15 aa, Homo sapiens
  CDR3 for beta chain variable domain of TCR clone 14077 (TRBV28, TRBJ2-5)
CASSPPWSYQETQYF

SEQ ID NO: 28155 - protein, 10 aa, Homo sapiens
  CDR3 for alpha chain variable domain of TCR clone 14078 (TRAV12-3, TRAJ49)
CAMNDDKFYF

SEQ ID NO: 28156 - protein, 13 aa, Homo sapiens
  CDR3 for beta chain variable domain of TCR clone 14078 (TRBV12-4, TRBJ1-1)
CASSPGTGFEAFF

SEQ ID NO: 28157 - protein, 13 aa, Homo sapiens
  CDR3 for alpha chain variable domain of TCR clone 14079 (TRAV2, TRAJ40)
CAVVTSGPYKYIF

SEQ ID NO: 28158 - protein, 14 aa, Homo sapiens
  CDR3 for beta chain variable domain of TCR clone 14079 (TRBV19, TRBJ2-1)
CASPTFVLSGEQFF

SEQ ID NO: 28159 - protein, 14 aa, Homo sapiens
  CDR3 for alpha chain variable domain of TCR clone 14080 (TRAV12-1, TRAJ22)
CVVTTSGSARQLTF

SEQ ID NO: 28160 - protein, 16 aa, Homo sapiens
  CDR3 for beta chain variable domain of TCR clone 14080 (TRBV9, TRBJ1-2)
CASSVEEKVSPYGYTF

SEQ ID NO: 28161 - protein, 14 aa, Homo sapiens
  CDR3 for alpha chain variable domain of TCR clone 14081 (TRAV1-2, TRAJ16)
CAVNRFSDGQKLLF

SEQ ID NO: 28162 - protein, 15 aa, Homo sapiens
  CDR3 for beta chain variable domain of TCR clone 14081 (TRBV7-9, TRBJ1-6)
CASSSPGRGNPPLHF

SEQ ID NO: 28163 - protein, 11 aa, Homo sapiens
  CDR3 for alpha chain variable domain of TCR clone 14082 (TRAV21, TRAJ11)
CAVDGYSTLTF

SEQ ID NO: 28164 - protein, 11 aa, Homo sapiens
  CDR3 for beta chain variable domain of TCR clone 14082 (TRBV19, TRBJ1-1)
CASSIGSEAFF

SEQ ID NO: 28165 - protein, 12 aa, Homo sapiens
  CDR3 for alpha chain variable domain of TCR clone 14083 (TRAV13-2, TRAJ23)
CAERHRGGKLIF

SEQ ID NO: 28166 - protein, 15 aa, Homo sapiens
  CDR3 for beta chain variable domain of TCR clone 14083 (TRBV12-4, TRBJ1-6)
CASSLGGQGTSPLHF

SEQ ID NO: 28167 - protein, 13 aa, Homo sapiens
  CDR3 for alpha chain variable domain of TCR clone 14084 (TRAV2, TRAJ40)
CAVATSGTYKYIF

SEQ ID NO: 28168 - protein, 15 aa, Homo sapiens
  CDR3 for beta chain variable domain of TCR clone 14084 (TRBV11-3, TRBJ2-3)
CASLKDGREGDTQYF

SEQ ID NO: 28169 - protein, 15 aa, Homo sapiens
  CDR3 for alpha chain variable domain of TCR clone 14085 (TRAV2, TRAJ9)
CAVEDRGTGGFKTIF

SEQ ID NO: 28170 - protein, 16 aa, Homo sapiens
  CDR3 for beta chain variable domain of TCR clone 14085 (TRBV24-1, TRBJ2-3)
CATSDPGTGATDAQYF

SEQ ID NO: 28171 - protein, 14 aa, Homo sapiens
  CDR3 for alpha chain variable domain of TCR clone 14086 (TRAV29/DV5, TRAJ36)
CAARRKTGANNLFF

SEQ ID NO: 28172 - protein, 13 aa, Homo sapiens
  CDR3 for beta chain variable domain of TCR clone 14086 (TRBV7-9, TRBJ1-2)
CASSLKQNYGYTF

SEQ ID NO: 28173 - protein, 13 aa, Homo sapiens
  CDR3 for alpha chain variable domain of TCR clone 14087 (TRAV21, TRAJ57)
CAVTQGGSEKLVF

SEQ ID NO: 28174 - protein, 14 aa, Homo sapiens
  CDR3 for beta chain variable domain of TCR clone 14087 (TRBV19, TRBJ2-1)
CASPTFVLSGEQFF

SEQ ID NO: 28175 - protein, 13 aa, Homo sapiens
  CDR3 for alpha chain variable domain of TCR clone 14088 (TRAV8-3, TRAJ36)
CAVGATGANNLFF

SEQ ID NO: 28176 - protein, 15 aa, Homo sapiens
  CDR3 for beta chain variable domain of TCR clone 14088 (TRBV7-2, TRBJ1-2)
CASSPRAGWNYGYTV

SEQ ID NO: 28177 - protein, 18 aa, Homo sapiens
  CDR3 for alpha chain variable domain of TCR clone 14089 (TRAV21, TRAJ52)
CAVRPSPAGGTSYGKLTF

SEQ ID NO: 28178 - protein, 13 aa, Homo sapiens
  CDR3 for beta chain variable domain of TCR clone 14089 (TRBV7-3, TRBJ1-1)
CASSQDWGAEAVF

SEQ ID NO: 28179 - protein, 11 aa, Homo sapiens
  CDR3 for alpha chain variable domain of TCR clone 14090 (TRAV12-3, TRAJ43)
CAMSVSNDMRF

SEQ ID NO: 28180 - protein, 13 aa, Homo sapiens
  CDR3 for beta chain variable domain of TCR clone 14090 (TRBV24-1, TRBJ2-2)
CATSDWSTGELFF

SEQ ID NO: 28181 - protein, 14 aa, Homo sapiens
  CDR3 for alpha chain variable domain of TCR clone 14091 (TRAV13-1, TRAJ44)
CAARATGTASKLTF

SEQ ID NO: 28182 - protein, 15 aa, Homo sapiens
  CDR3 for beta chain variable domain of TCR clone 14091 (TRBV10-3, TRBJ2-1)
CAISDVQDRAYEQFF

SEQ ID NO: 28183 - protein, 13 aa, Homo sapiens
  CDR3 for alpha chain variable domain of TCR clone 14092 (TRAV3, TRAJ27)
CAVRPLGAGKSNF

SEQ ID NO: 28184 - protein, 13 aa, Homo sapiens
  CDR3 for beta chain variable domain of TCR clone 14092 (TRBV7-9, TRBJ2-3)
CASSPGSTDTQYF

SEQ ID NO: 28185 - protein, 14 aa, Homo sapiens
  CDR3 for alpha chain variable domain of TCR clone 14093 (TRAV38-1, TRAJ40)
CALRPTSGTYKYIF

SEQ ID NO: 28186 - protein, 14 aa, Homo sapiens
  CDR3 for beta chain variable domain of TCR clone 14093 (TRBV25-1, TRBJ1-1)
CAGTHLGGNTEAFF

SEQ ID NO: 28187 - protein, 16 aa, Homo sapiens
  CDR3 for alpha chain variable domain of TCR clone 14094 (TRAV2, TRAJ4)
CAVEDRFSGGYNKLIF

SEQ ID NO: 28188 - protein, 13 aa, Homo sapiens
  CDR3 for beta chain variable domain of TCR clone 14094 (TRBV7-7, TRBJ2-5)
CASSRSGQEAQYF

SEQ ID NO: 28189 - protein, 13 aa, Homo sapiens
  CDR3 for alpha chain variable domain of TCR clone 14095 (TRAV13-1, TRAJ39)
CSKYSNAGNMLTF

SEQ ID NO: 28190 - protein, 15 aa, Homo sapiens
  CDR3 for beta chain variable domain of TCR clone 14095 (TRBV11-2, TRBJ2-2)
CASSSDRVNAGELFF

SEQ ID NO: 28191 - protein, 14 aa, Homo sapiens
  CDR3 for alpha chain variable domain of TCR clone 14096 (TRAV35, TRAJ22)
CAGLRPGSARQLTF

SEQ ID NO: 28192 - protein, 15 aa, Homo sapiens
  CDR3 for beta chain variable domain of TCR clone 14096 (TRBV12-4, TRBJ2-5)
CASSPPTGLQETHYF

SEQ ID NO: 28193 - protein, 11 aa, Homo sapiens
  CDR3 for alpha chain variable domain of TCR clone 14097 (TRAV1-1, TRAJ23)
CAVRQGGKLIF

SEQ ID NO: 28194 - protein, 20 aa, Homo sapiens
  CDR3 for beta chain variable domain of TCR clone 14097 (TRBV7-8, TRBJ2-2)
CASSHLFPGPTIHITGELSF

SEQ ID NO: 28195 - protein, 13 aa, Homo sapiens
  CDR3 for alpha chain variable domain of TCR clone 14098 (TRAV12-3, TRAJ7)
CAMSASGNNRPAF

SEQ ID NO: 28196 - protein, 14 aa, Homo sapiens
  CDR3 for beta chain variable domain of TCR clone 14098 (TRBV13, TRBJ2-5)
CASSLGPRGETQYF

SEQ ID NO: 28197 - protein, 12 aa, Homo sapiens
  CDR3 for alpha chain variable domain of TCR clone 14099 (TRAV13-1, TRAJ21)
CAAKEGFNKFYF

SEQ ID NO: 28198 - protein, 15 aa, Homo sapiens
  CDR3 for beta chain variable domain of TCR clone 14099 (TRBV29-1, TRBJ2-7)
CSVEFFDRGSYEQYF

SEQ ID NO: 28199 - protein, 15 aa, Homo sapiens
  CDR3 for alpha chain variable domain of TCR clone 14100 (TRAV27, TRAJ38)
SAARRNAGNNRKLIW

SEQ ID NO: 28200 - protein, 13 aa, Homo sapiens
  CDR3 for beta chain variable domain of TCR clone 14100 (TRBV12-5, TRBJ2-3)
CASGDRQSDTQYF

SEQ ID NO: 28201 - protein, 16 aa, Homo sapiens
  CDR3 for alpha chain variable domain of TCR clone 14101 (TRAV3, TRAJ3)
CAVRDRAKSSASKIIF

SEQ ID NO: 28202 - protein, 16 aa, Homo sapiens
  CDR3 for beta chain variable domain of TCR clone 14101 (TRBV20-1, TRBJ2-4)
CSATSLAELAKNMQYF

SEQ ID NO: 28203 - protein, 14 aa, Homo sapiens
  CDR3 for alpha chain variable domain of TCR clone 14102 (TRAV3, TRAJ21)
CAVESQANFNKFYF

SEQ ID NO: 28204 - protein, 18 aa, Homo sapiens
  CDR3 for beta chain variable domain of TCR clone 14102 (TRBV7-9, TRBJ2-1)
CAGSLAVSGTSGRNEQFF

SEQ ID NO: 28205 - protein, 15 aa, Homo sapiens
  CDR3 for alpha chain variable domain of TCR clone 14103 (TRAV17, TRAJ45)
TSVLRTGGGADRLTF

SEQ ID NO: 28206 - protein, 15 aa, Homo sapiens
  CDR3 for beta chain variable domain of TCR clone 14103 (TRBV5-7, TRBJ1-5)
CASSYGKLWDQPQHF

SEQ ID NO: 28207 - protein, 14 aa, Homo sapiens
  CDR3 for alpha chain variable domain of TCR clone 14104 (TRAV1-2, TRAJ16)
CAVNRFSEGQKLLF

SEQ ID NO: 28208 - protein, 15 aa, Homo sapiens
  CDR3 for beta chain variable domain of TCR clone 14104 (TRBV9, TRBJ1-6)
CASSVAGTGDSPLHF

SEQ ID NO: 28209 - protein, 14 aa, Homo sapiens
  CDR3 for alpha chain variable domain of TCR clone 14105 (TRAV35, TRAJ22)
CAGLGPGSARQLTF

SEQ ID NO: 28210 - protein, 15 aa, Homo sapiens
  CDR3 for beta chain variable domain of TCR clone 14105 (TRBV20-1, TRBJ2-7)
CSARDRVSGMDEQYF

SEQ ID NO: 28211 - protein, 12 aa, Homo sapiens
  CDR3 for alpha chain variable domain of TCR clone 14106 (TRAV13-2, TRAJ8)
CAPWLGFQKLVF

SEQ ID NO: 28212 - protein, 16 aa, Homo sapiens
  CDR3 for beta chain variable domain of TCR clone 14106 (TRBV20-1, TRBJ1-4)
CSAPGQGLLTNEKLFF

SEQ ID NO: 28213 - protein, 14 aa, Homo sapiens
  CDR3 for alpha chain variable domain of TCR clone 14107 (TRAV1-2, TRAJ8)
CAVREDTGFQKLVF

SEQ ID NO: 28214 - protein, 14 aa, Homo sapiens
  CDR3 for beta chain variable domain of TCR clone 14107 (TRBV12-4, TRBJ1-1)
CASSLGTGGTEAFF

SEQ ID NO: 28215 - protein, 14 aa, Homo sapiens
  CDR3 for alpha chain variable domain of TCR clone 14108 (TRAV17, TRAJ45)
CAAASGGGADGLTF

SEQ ID NO: 28216 - protein, 15 aa, Homo sapiens
  CDR3 for beta chain variable domain of TCR clone 14108 (TRBV11-2, TRBJ2-1)
CASSRNRGLMYEQFF

SEQ ID NO: 28217 - protein, 16 aa, Homo sapiens
  CDR3 for alpha chain variable domain of TCR clone 14109 (TRAV12-2, TRAJ13)
CAVDSAGAGGYQKVTF

SEQ ID NO: 28218 - protein, 14 aa, Homo sapiens
  CDR3 for beta chain variable domain of TCR clone 14109 (TRBV20-1, TRBJ1-4)
CSARDGSGWEKLFF

SEQ ID NO: 28219 - protein, 15 aa, Homo sapiens
  CDR3 for alpha chain variable domain of TCR clone 14110 (TRAV13-1, TRAJ32)
CAASNGWWCYKQAHL

SEQ ID NO: 28220 - protein, 15 aa, Homo sapiens
  CDR3 for beta chain variable domain of TCR clone 14110 (TRBV15, TRBJ1-4)
CATSRDMGSYEKLFF

SEQ ID NO: 28221 - protein, 11 aa, Homo sapiens
  CDR3 for alpha chain variable domain of TCR clone 14111 (TRAV12-3, TRAJ17)
CNDAYRQQATF

SEQ ID NO: 28222 - protein, 15 aa, Homo sapiens
  CDR3 for beta chain variable domain of TCR clone 14111 (TRBV20-1, TRBJ2-7)
CSARDRVSGMDEQYF

SEQ ID NO: 28223 - protein, 12 aa, Homo sapiens
  CDR3 for alpha chain variable domain of TCR clone 14112 (TRAV12-3, TRAJ17)
CPMTLTGNKLTF

SEQ ID NO: 28224 - protein, 15 aa, Homo sapiens
  CDR3 for beta chain variable domain of TCR clone 14112 (TRBV20-1, TRBJ2-7)
CSARDRVSGMDEQYF

SEQ ID NO: 28225 - protein, 10 aa, Homo sapiens
  CDR3 for alpha chain variable domain of TCR clone 14113 (TRAV12-1, TRAJ20)
CAIYFQRLQA

SEQ ID NO: 28226 - protein, 13 aa, Homo sapiens
  CDR3 for beta chain variable domain of TCR clone 14113 (TRBV5-1, TRBJ1-1)
CASSLGSDTEAFF

SEQ ID NO: 28227 - protein, 17 aa, Homo sapiens
  CDR3 for alpha chain variable domain of TCR clone 14114 (TRAV1-2, TRAJ9)
CLLPLCCLNTGGFKTIF

SEQ ID NO: 28228 - protein, 13 aa, Homo sapiens
  CDR3 for beta chain variable domain of TCR clone 14114 (TRBV19, TRBJ1-2)
CASSVPGQDGYTF

SEQ ID NO: 28229 - protein, 14 aa, Homo sapiens
  CDR3 for alpha chain variable domain of TCR clone 14115 (TRAV17, TRAJ39)
CATDPARAGNMLTF

SEQ ID NO: 28230 - protein, 15 aa, Homo sapiens
  CDR3 for beta chain variable domain of TCR clone 14115 (TRBV13, TRBJ1-5)
CASSFGQGGVQPQHF

SEQ ID NO: 28231 - protein, 14 aa, Homo sapiens
  CDR3 for alpha chain variable domain of TCR clone 14116 (TRAV8-3, TRAJ9)
CAVVYNTVGFKTIF

SEQ ID NO: 28232 - protein, 14 aa, Homo sapiens
  CDR3 for beta chain variable domain of TCR clone 14116 (TRBV7-3, TRBJ2-2)
CASSSGGYTGELFF

SEQ ID NO: 28233 - protein, 14 aa, Homo sapiens
  CDR3 for alpha chain variable domain of TCR clone 14117 (TRAV12-2, TRAJ17)
CAVLFKAAGNKRTF

SEQ ID NO: 28234 - protein, 17 aa, Homo sapiens
  CDR3 for beta chain variable domain of TCR clone 14117 (TRBV20-1, TRBJ2-2)
CSASGSGQGGLTGELFF

SEQ ID NO: 28235 - protein, 13 aa, Homo sapiens
  CDR3 for alpha chain variable domain of TCR clone 14118 (TRAV2, TRAJ40)
CAVVTSGTYKYIF

SEQ ID NO: 28236 - protein, 14 aa, Homo sapiens
  CDR3 for beta chain variable domain of TCR clone 14118 (TRBV19, TRBJ2-1)
CASPTFVWSGEQFF

SEQ ID NO: 28237 - protein, 18 aa, Homo sapiens
  CDR3 for alpha chain variable domain of TCR clone 14119 (TRAV26-1, TRAJ52)
CIVRVEGAGGTSYGKLTF

SEQ ID NO: 28238 - protein, 13 aa, Homo sapiens
  CDR3 for beta chain variable domain of TCR clone 14119 (TRBV7-3, TRBJ1-2)
CASSVKRGYGYTF

SEQ ID NO: 28239 - protein, 15 aa, Homo sapiens
  CDR3 for alpha chain variable domain of TCR clone 14120 (TRAV12-3, TRAJ49)
CAMAVTPNTGNQFYF

SEQ ID NO: 28240 - protein, 18 aa, Homo sapiens
  CDR3 for beta chain variable domain of TCR clone 14120 (TRBV4-1, TRBJ1-5)
CASSQDPRGQGLNQTQHF

SEQ ID NO: 28241 - protein, 14 aa, Homo sapiens
  CDR3 for alpha chain variable domain of TCR clone 14121 (TRAV1-2, TRAJ16)
CAVNRFSDGQKLLF

SEQ ID NO: 28242 - protein, 15 aa, Homo sapiens
  CDR3 for beta chain variable domain of TCR clone 14121 (TRBV10-1, TRBJ2-1)
CASSEWRGTYNEQFF

SEQ ID NO: 28243 - protein, 12 aa, Homo sapiens
  CDR3 for alpha chain variable domain of TCR clone 14122 (TRAV27, TRAJ21)
CAGVRQLQQILL

SEQ ID NO: 28244 - protein, 14 aa, Homo sapiens
  CDR3 for beta chain variable domain of TCR clone 14122 (TRBV7-9, TRBJ1-4)
CASSLEGQSEKLFF

SEQ ID NO: 28245 - protein, 13 aa, Homo sapiens
  CDR3 for alpha chain variable domain of TCR clone 14123 (TRAV1-2, TRAJ9)
CAALNTGGFKTIF

SEQ ID NO: 28246 - protein, 15 aa, Homo sapiens
  CDR3 for beta chain variable domain of TCR clone 14123 (TRBV20-1, TRBJ2-7)
CSARDRVSGMDEQYF

SEQ ID NO: 28247 - protein, 11 aa, Homo sapiens
  CDR3 for alpha chain variable domain of TCR clone 14124 (TRAV3, TRAJ21)
CAVGNFNKFYF

SEQ ID NO: 28248 - protein, 16 aa, Homo sapiens
  CDR3 for beta chain variable domain of TCR clone 14124 (TRBV19, TRBJ2-1)
CASIKAGPSSYNEQFF

SEQ ID NO: 28249 - protein, 15 aa, Homo sapiens
  CDR3 for alpha chain variable domain of TCR clone 14125 (TRAV35, TRAJ40)
CAGQLGTSGTYKYIF

SEQ ID NO: 28250 - protein, 14 aa, Homo sapiens
  CDR3 for beta chain variable domain of TCR clone 14125 (TRBV7-3, TRBJ2-1)
CASSLAGRTNEQFF

SEQ ID NO: 28251 - protein, 11 aa, Homo sapiens
  CDR3 for alpha chain variable domain of TCR clone 14126 (TRAV1-2, TRAJ31)
CAVNNNARLMF

SEQ ID NO: 28252 - protein, 15 aa, Homo sapiens
  CDR3 for beta chain variable domain of TCR clone 14126 (TRBV28, TRBJ2-1)
RASSIIAGGRSEQFF

SEQ ID NO: 28253 - protein, 13 aa, Homo sapiens
  CDR3 for alpha chain variable domain of TCR clone 14127 (TRAV8-3, TRAJ28)
CAVGAVGSYQLTF

SEQ ID NO: 28254 - protein, 14 aa, Homo sapiens
  CDR3 for beta chain variable domain of TCR clone 14127 (TRBV7-2, TRBJ2-7)
CASRPQGAAYEQYF

SEQ ID NO: 28255 - protein, 12 aa, Homo sapiens
  CDR3 for alpha chain variable domain of TCR clone 14128 (TRAV8-3, TRAJ20)
CAVGANAYKLSF

SEQ ID NO: 28256 - protein, 16 aa, Homo sapiens
  CDR3 for beta chain variable domain of TCR clone 14128 (TRBV19, TRBJ2-2)
CASRSPGTGATGELFF

SEQ ID NO: 28257 - protein, 11 aa, Homo sapiens
  CDR3 for alpha chain variable domain of TCR clone 14129 (TRAV1-1, TRAJ23)
CAVRQGGKLIF

SEQ ID NO: 28258 - protein, 20 aa, Homo sapiens
  CDR3 for beta chain variable domain of TCR clone 14129 (TRBV7-8, TRBJ2-2)
CASSHLFPGPTIYITGELFF

SEQ ID NO: 28259 - protein, 14 aa, Homo sapiens
  CDR3 for alpha chain variable domain of TCR clone 14130 (TRAV35, TRAJ33)
CARSSQDSNYQLIW

SEQ ID NO: 28260 - protein, 15 aa, Homo sapiens
  CDR3 for beta chain variable domain of TCR clone 14130 (TRBV20-1, TRBJ2-7)
CSAESGTSGAYEQYF

SEQ ID NO: 28261 - protein, 15 aa, Homo sapiens
  CDR3 for alpha chain variable domain of TCR clone 14131 (TRAV12-3, TRAJ13)
CAMSARSGGYQKVTF

SEQ ID NO: 28262 - protein, 21 aa, Homo sapiens
  CDR3 for beta chain variable domain of TCR clone 14131 (TRBV3-1, TRBJ2-7)
CISVPAAKKGGGRSWHYEQYF

SEQ ID NO: 28263 - protein, 11 aa, Homo sapiens
  CDR3 for alpha chain variable domain of TCR clone 14132 (TRAV8-3, TRAJ15)
CAVGPGTALIF

SEQ ID NO: 28264 - protein, 15 aa, Homo sapiens
  CDR3 for beta chain variable domain of TCR clone 14132 (TRBV7-9, TRBJ2-7)
CVSSLALAEAYEQYF

SEQ ID NO: 28265 - protein, 14 aa, Homo sapiens
  CDR3 for alpha chain variable domain of TCR clone 14133 (TRAV13-1, TRAJ20)
CAARPGSNDYKLSF

SEQ ID NO: 28266 - protein, 14 aa, Homo sapiens
  CDR3 for beta chain variable domain of TCR clone 14133 (TRBV12-4, TRBJ1-1)
CASSLGTGGTEAFF

SEQ ID NO: 28267 - protein, 15 aa, Homo sapiens
  CDR3 for alpha chain variable domain of TCR clone 14134 (TRAV4, TRAJ39)
CLVGPNNNAGNMLTF

SEQ ID NO: 28268 - protein, 15 aa, Homo sapiens
  CDR3 for beta chain variable domain of TCR clone 14134 (TRBV19, TRBJ1-6)
CASSTQGAVGSPLHF

SEQ ID NO: 28269 - protein, 12 aa, Homo sapiens
  CDR3 for alpha chain variable domain of TCR clone 14135 (TRAV9-2, TRAJ49)
CALLGFGNQFYF

SEQ ID NO: 28270 - protein, 14 aa, Homo sapiens
  CDR3 for beta chain variable domain of TCR clone 14135 (TRBV20-1, TRBJ2-5)
CSAHRQGLWETQYF

SEQ ID NO: 28271 - protein, 14 aa, Homo sapiens
  CDR3 for alpha chain variable domain of TCR clone 14136 (TRAV12-2, TRAJ40)
CAVKIPSGTYKYIF

SEQ ID NO: 28272 - protein, 14 aa, Homo sapiens
  CDR3 for beta chain variable domain of TCR clone 14136 (TRBV20-1, TRBJ1-1)
CNAQTRIGGTEAFF

SEQ ID NO: 28273 - protein, 11 aa, Homo sapiens
  CDR3 for alpha chain variable domain of TCR clone 14137 (TRAV1-1, TRAJ23)
CAVRQGGKLIF

SEQ ID NO: 28274 - protein, 20 aa, Homo sapiens
  CDR3 for beta chain variable domain of TCR clone 14137 (TRBV7-8, TRBJ2-2)
CASSHLFPWPTIHITGELFF

SEQ ID NO: 28275 - protein, 15 aa, Homo sapiens
  CDR3 for alpha chain variable domain of TCR clone 14138 (TRAV26-1, TRAJ22)
CIVRVSSWFCKATDL

SEQ ID NO: 28276 - protein, 13 aa, Homo sapiens
  CDR3 for beta chain variable domain of TCR clone 14138 (TRBV7-9, TRBJ1-2)
CASSLKQNYGYTF

SEQ ID NO: 28277 - protein, 15 aa, Homo sapiens
  CDR3 for alpha chain variable domain of TCR clone 14139 (TRAV17, TRAJ52)
CATEAGGTSYGKLTF

SEQ ID NO: 28278 - protein, 14 aa, Homo sapiens
  CDR3 for beta chain variable domain of TCR clone 14139 (TRBV28, TRBJ1-5)
CASSLGVLVKTQHF

SEQ ID NO: 28279 - protein, 13 aa, Homo sapiens
  CDR3 for alpha chain variable domain of TCR clone 14140 (TRAV20, TRAJ48)
CAVQGVGNEKLTF

SEQ ID NO: 28280 - protein, 10 aa, Homo sapiens
  CDR3 for beta chain variable domain of TCR clone 14140 (TRBV2, TRBJ2-2)
CASSQPGLAG

SEQ ID NO: 28281 - protein, 14 aa, Homo sapiens
  CDR3 for alpha chain variable domain of TCR clone 14141 (TRAV35, TRAJ33)
CAGSSQDSNYQLIW

SEQ ID NO: 28282 - protein, 15 aa, Homo sapiens
  CDR3 for beta chain variable domain of TCR clone 14141 (TRBV20-1, TRBJ2-7)
CSAGSGTSGAYEQYF

SEQ ID NO: 28283 - protein, 13 aa, Homo sapiens
  CDR3 for alpha chain variable domain of TCR clone 14142 (TRAV12-3, TRAJ40)
CAMSDSGAYKYIF

SEQ ID NO: 28284 - protein, 14 aa, Homo sapiens
  CDR3 for beta chain variable domain of TCR clone 14142 (TRBV7-2, TRBJ1-5)
CASSTQGAGQPQHF

SEQ ID NO: 28285 - protein, 11 aa, Homo sapiens
  CDR3 for alpha chain variable domain of TCR clone 14143 (TRAV1-1, TRAJ23)
CAVCQGGKLIF

SEQ ID NO: 28286 - protein, 20 aa, Homo sapiens
  CDR3 for beta chain variable domain of TCR clone 14143 (TRBV7-8, TRBJ2-2)
CASSHLFPGPTIHITGELFF

SEQ ID NO: 28287 - protein, 13 aa, Homo sapiens
  CDR3 for alpha chain variable domain of TCR clone 14144 (TRAV8-3, TRAJ28)
CTVGAVGSYQLTF

SEQ ID NO: 28288 - protein, 16 aa, Homo sapiens
  CDR3 for beta chain variable domain of TCR clone 14144 (TRBV19, TRBJ2-1)
CASSKAGPSSYNEQFF

SEQ ID NO: 28289 - protein, 10 aa, Homo sapiens
  CDR3 for alpha chain variable domain of TCR clone 14145 (TRAV12-3, TRAJ49)
CAMNDGQFYF

SEQ ID NO: 28290 - protein, 13 aa, Homo sapiens
  CDR3 for beta chain variable domain of TCR clone 14145 (TRBV12-4, TRBJ1-1)
CASSPGTGFEAFF

SEQ ID NO: 28291 - protein, 17 aa, Homo sapiens
  CDR3 for alpha chain variable domain of TCR clone 14146 (TRAV13-1, TRAJ52)
CAAGRNAGGTSYGKLTF

SEQ ID NO: 28292 - protein, 13 aa, Homo sapiens
  CDR3 for beta chain variable domain of TCR clone 14146 (TRBV7-2, TRBJ1-1)
CASNLEGAKVAFF

SEQ ID NO: 28293 - protein, 15 aa, Homo sapiens
  CDR3 for alpha chain variable domain of TCR clone 14147 (TRAV17, TRAJ57)
CSTGPSQGGSEKLVF

SEQ ID NO: 28294 - protein, 16 aa, Homo sapiens
  CDR3 for beta chain variable domain of TCR clone 14147 (TRBV12-4, TRBJ1-5)
CASSRPVGGSNQPQHF

SEQ ID NO: 28295 - protein, 14 aa, Homo sapiens
  CDR3 for alpha chain variable domain of TCR clone 14148 (TRAV38-1, TRAJ45)
CAYYSGGGADGLNF

SEQ ID NO: 28296 - protein, 20 aa, Homo sapiens
  CDR3 for beta chain variable domain of TCR clone 14148 (TRBV28, TRBJ2-1)
CASTPIGRSPGLAGGNEQFF

SEQ ID NO: 28297 - protein, 14 aa, Homo sapiens
  CDR3 for alpha chain variable domain of TCR clone 14149 (TRAV12-3, TRAJ10)
SHLPLTGGGNKLTF

SEQ ID NO: 28298 - protein, 13 aa, Homo sapiens
  CDR3 for beta chain variable domain of TCR clone 14149 (TRBV12-5, TRBJ2-3)
CASGDRQSDTQYF

SEQ ID NO: 28299 - protein, 15 aa, Homo sapiens
  CDR3 for alpha chain variable domain of TCR clone 14150 (TRAV23/DV6, TRAJ18)
CAARYRGSTLGRPYF

SEQ ID NO: 28300 - protein, 13 aa, Homo sapiens
  CDR3 for beta chain variable domain of TCR clone 14150 (TRBV7-2, TRBJ2-7)
CASSSPSGSEQYF

SEQ ID NO: 28301 - protein, 15 aa, Homo sapiens
  CDR3 for alpha chain variable domain of TCR clone 14151 (TRAV17, TRAJ57)
CATGPSQGGSEKLVF

SEQ ID NO: 28302 - protein, 16 aa, Homo sapiens
  CDR3 for beta chain variable domain of TCR clone 14151 (TRBV12-4, TRBJ1-5)
CAGSRPVGGSNQPQHF

SEQ ID NO: 28303 - protein, 11 aa, Homo sapiens
  CDR3 for alpha chain variable domain of TCR clone 14152 (TRAV12-3, TRAJ43)
CAMSVSNDLRF

SEQ ID NO: 28304 - protein, 13 aa, Homo sapiens
  CDR3 for beta chain variable domain of TCR clone 14152 (TRBV20-1, TRBJ1-1)
CSAPLGGGTEAFF

SEQ ID NO: 28305 - protein, 12 aa, Homo sapiens
  CDR3 for alpha chain variable domain of TCR clone 14153 (TRAV1-2, TRAJ20)
CAVRRLLYKLSF

SEQ ID NO: 28306 - protein, 12 aa, Homo sapiens
  CDR3 for beta chain variable domain of TCR clone 14153 (TRBV7-8, TRBJ2-5)
CASSPRVETQYF

SEQ ID NO: 28307 - protein, 17 aa, Homo sapiens
  CDR3 for alpha chain variable domain of TCR clone 14154 (TRAV3, TRAJ6)
CAVRDGPRAGGSYITTF

SEQ ID NO: 28308 - protein, 20 aa, Homo sapiens
  CDR3 for beta chain variable domain of TCR clone 14154 (TRBV28, TRBJ2-1)
CASTPIGRSPGLAGGNEQFF

SEQ ID NO: 28309 - protein, 15 aa, Homo sapiens
  CDR3 for alpha chain variable domain of TCR clone 14155 (TRAV17, TRAJ57)
CATGPSQGGSEKLVF

SEQ ID NO: 28310 - protein, 16 aa, Homo sapiens
  CDR3 for beta chain variable domain of TCR clone 14155 (TRBV12-4, TRBJ1-5)
CASSRPVGGSNQAQHF

SEQ ID NO: 28311 - protein, 13 aa, Homo sapiens
  CDR3 for alpha chain variable domain of TCR clone 14156 (TRAV1-1, TRAJ9)
CAAKNNGGFKTIF

SEQ ID NO: 28312 - protein, 14 aa, Homo sapiens
  CDR3 for beta chain variable domain of TCR clone 14156 (TRBV20-1, TRBJ2-1)
CSAQIGGSANEQFF

SEQ ID NO: 28313 - protein, 16 aa, Homo sapiens
  CDR3 for alpha chain variable domain of TCR clone 14157 (TRAV3, TRAJ37)
CAVRGKGSGNTGKLIF

SEQ ID NO: 28314 - protein, 13 aa, Homo sapiens
  CDR3 for beta chain variable domain of TCR clone 14157 (TRBV7-9, TRBJ1-2)
CASSLKQNYGYTF

SEQ ID NO: 28315 - protein, 15 aa, Homo sapiens
  CDR3 for alpha chain variable domain of TCR clone 14158 (TRAV12-3, TRAJ49)
CAMAVAPNTGNQFYF

SEQ ID NO: 28316 - protein, 18 aa, Homo sapiens
  CDR3 for beta chain variable domain of TCR clone 14158 (TRBV4-1, TRBJ1-5)
CASSQDPRGQGLNQPQHF

SEQ ID NO: 28317 - protein, 17 aa, Homo sapiens
  CDR3 for alpha chain variable domain of TCR clone 14159 (TRAV26-1, TRAJ53)
CIVRVDDSGGSNYKLTF

SEQ ID NO: 28318 - protein, 15 aa, Homo sapiens
  CDR3 for beta chain variable domain of TCR clone 14159 (TRBV20-1, TRBJ2-7)
CSARVPAAYSYEQYF

SEQ ID NO: 28319 - protein, 13 aa, Homo sapiens
  CDR3 for alpha chain variable domain of TCR clone 14160 (TRAV8-3, TRAJ28)
CAVGEVGSYQLTF

SEQ ID NO: 28320 - protein, 14 aa, Homo sapiens
  CDR3 for beta chain variable domain of TCR clone 14160 (TRBV7-2, TRBJ2-7)
CASRSQGAAYEQYF

SEQ ID NO: 28321 - protein, 14 aa, Homo sapiens
  CDR3 for alpha chain variable domain of TCR clone 14161 (TRAV12-3, TRAJ10)
SHLPLTGGGNKLTF

SEQ ID NO: 28322 - protein, 16 aa, Homo sapiens
  CDR3 for beta chain variable domain of TCR clone 14161 (TRBV14, TRBJ2-2)
CASSRSLGDDTGELFF

SEQ ID NO: 28323 - protein, 13 aa, Homo sapiens
  CDR3 for alpha chain variable domain of TCR clone 14162 (TRAV8-3, TRAJ28)
CAVGAVGSYQLTF

SEQ ID NO: 28324 - protein, 16 aa, Homo sapiens
  CDR3 for beta chain variable domain of TCR clone 14162 (TRBV7-2, TRBJ2-7)
CASRSQGRRTSSTSGR

SEQ ID NO: 28325 - protein, 14 aa, Homo sapiens
  CDR3 for alpha chain variable domain of TCR clone 14163 (TRAV13-1, TRAJ35)
CAASKGGFGNMLHC

SEQ ID NO: 28326 - protein, 13 aa, Homo sapiens
  CDR3 for beta chain variable domain of TCR clone 14163 (TRBV7-3, TRBJ1-1)
CASSQDWGAEAFF

SEQ ID NO: 28327 - protein, 14 aa, Homo sapiens
  CDR3 for alpha chain variable domain of TCR clone 14164 (TRAV8-6, TRAJ30)
CAVRPVNRDDRIIF

SEQ ID NO: 28328 - protein, 17 aa, Homo sapiens
  CDR3 for beta chain variable domain of TCR clone 14164 (TRBV7-8, TRBJ2-6)
CASSAGTGGAGANVLTF

SEQ ID NO: 28329 - protein, 14 aa, Homo sapiens
  CDR3 for alpha chain variable domain of TCR clone 14165 (TRAV12-2, TRAJ13)
CAVKKTGGYQKFTF

SEQ ID NO: 28330 - protein, 15 aa, Homo sapiens
  CDR3 for beta chain variable domain of TCR clone 14165 (TRBV27, TRBJ2-1)
CASSNGGGSSNEQFF

SEQ ID NO: 28331 - protein, 13 aa, Homo sapiens
  CDR3 for alpha chain variable domain of TCR clone 14166 (TRAV3, TRAJ27)
CAVRPLGAGKSTF

SEQ ID NO: 28332 - protein, 13 aa, Homo sapiens
  CDR3 for beta chain variable domain of TCR clone 14166 (TRBV7-9, TRBJ2-3)
CASSPGSADTQYF

SEQ ID NO: 28333 - protein, 16 aa, Homo sapiens
  CDR3 for alpha chain variable domain of TCR clone 14167 (TRAV3, TRAJ10)
CAVRDMRAGGGNKLTF

SEQ ID NO: 28334 - protein, 13 aa, Homo sapiens
  CDR3 for beta chain variable domain of TCR clone 14167 (TRBV20-1, TRBJ1-1)
CSARGGGNTEAFF

SEQ ID NO: 28335 - protein, 15 aa, Homo sapiens
  CDR3 for alpha chain variable domain of TCR clone 14168 (TRAV3, TRAJ20)
CAVRDIKLSDYKLSF

SEQ ID NO: 28336 - protein, 15 aa, Homo sapiens
  CDR3 for beta chain variable domain of TCR clone 14168 (TRBV7-9, TRBJ1-6)
CAGSSPGRGNSPLHF

SEQ ID NO: 28337 - protein, 16 aa, Homo sapiens
  CDR3 for alpha chain variable domain of TCR clone 14169 (TRAV8-6, TRAJ9)
CAVSDPSNTGGFKTIF

SEQ ID NO: 28338 - protein, 16 aa, Homo sapiens
  CDR3 for beta chain variable domain of TCR clone 14169 (TRBV12-4, TRBJ2-5)
CASSFFVRGRQETQYF

SEQ ID NO: 28339 - protein, 12 aa, Homo sapiens
  CDR3 for alpha chain variable domain of TCR clone 14170 (TRAV1-2, TRAJ29)
CAVPSGNTPLVF

SEQ ID NO: 28340 - protein, 13 aa, Homo sapiens
  CDR3 for beta chain variable domain of TCR clone 14170 (TRBV7-6, TRBJ2-1)
CQQLGGGADEQFF

SEQ ID NO: 28341 - protein, 13 aa, Homo sapiens
  CDR3 for alpha chain variable domain of TCR clone 14171 (TRAV13-1, TRAJ5)
CAASDTGRRAITF

SEQ ID NO: 28342 - protein, 12 aa, Homo sapiens
  CDR3 for beta chain variable domain of TCR clone 14171 (TRBV28, TRBJ2-3)
CASSLYRDTQYF

SEQ ID NO: 28343 - protein, 18 aa, Homo sapiens
  CDR3 for alpha chain variable domain of TCR clone 14172 (TRAV21, TRAJ52)
CAVRPSPAGGTSYGKLTF

SEQ ID NO: 28344 - protein, 17 aa, Homo sapiens
  CDR3 for beta chain variable domain of TCR clone 14172 (TRBV13, TRBJ2-3)
CASSLSRIAGGRNTQYF

SEQ ID NO: 28345 - protein, 16 aa, Homo sapiens
  CDR3 for alpha chain variable domain of TCR clone 14173 (TRAV4, TRAJ22)
CLVGDLYSGSARQLPF

SEQ ID NO: 28346 - protein, 16 aa, Homo sapiens
  CDR3 for beta chain variable domain of TCR clone 14173 (TRBV7-9, TRBJ2-1)
CASSDVAGGSYNEQFF

SEQ ID NO: 28347 - protein, 13 aa, Homo sapiens
  CDR3 for alpha chain variable domain of TCR clone 14174 (TRAV12-2, TRAJ10)
CAVPTGGGNKLTF

SEQ ID NO: 28348 - protein, 11 aa, Homo sapiens
  CDR3 for beta chain variable domain of TCR clone 14174 (TRBV6-1, TRBJ2-1)
CAGISSNEQFF

SEQ ID NO: 28349 - protein, 14 aa, Homo sapiens
  CDR3 for alpha chain variable domain of TCR clone 14175 (TRAV12-2, TRAJ13)
CAVKKTGGYQKVTF

SEQ ID NO: 28350 - protein, 15 aa, Homo sapiens
  CDR3 for beta chain variable domain of TCR clone 14175 (TRBV7-3, TRBJ2-1)
CASSPTGGGEVEQFF

SEQ ID NO: 28351 - protein, 14 aa, Homo sapiens
  CDR3 for alpha chain variable domain of TCR clone 14176 (TRAV13-2, TRAJ10)
CAETLPGGGNKLTF

SEQ ID NO: 28352 - protein, 15 aa, Homo sapiens
  CDR3 for beta chain variable domain of TCR clone 14176 (TRBV3-1, TRBJ2-1)
CASSQDYTPRGEQFF

SEQ ID NO: 28353 - protein, 14 aa, Homo sapiens
  CDR3 for alpha chain variable domain of TCR clone 14177 (TRAV1-2, TRAJ16)
CVVNRFSDGQKLLF

SEQ ID NO: 28354 - protein, 15 aa, Homo sapiens
  CDR3 for beta chain variable domain of TCR clone 14177 (TRBV7-9, TRBJ1-6)
CASSSPGRGNSPLHF

SEQ ID NO: 28355 - protein, 14 aa, Homo sapiens
  CDR3 for alpha chain variable domain of TCR clone 14178 (TRAV38-1, TRAJ40)
CALRPTSGTYKYIF

SEQ ID NO: 28356 - protein, 13 aa, Homo sapiens
  CDR3 for beta chain variable domain of TCR clone 14178 (TRBV4-1, TRBJ2-7)
CASSQGQAYEQYF

SEQ ID NO: 28357 - protein, 15 aa, Homo sapiens
  CDR3 for alpha chain variable domain of TCR clone 14179 (TRAV4, TRAJ39)
CLVGPHNNAGNMLTF

SEQ ID NO: 28358 - protein, 13 aa, Homo sapiens
  CDR3 for beta chain variable domain of TCR clone 14179 (TRBV11-2, TRBJ2-5)
CASSSTGEETQYF

SEQ ID NO: 28359 - protein, 12 aa, Homo sapiens
  CDR3 for alpha chain variable domain of TCR clone 14180 (TRAV8-4, TRAJ43)
CAVSVNNNDMRF

SEQ ID NO: 28360 - protein, 11 aa, Homo sapiens
  CDR3 for beta chain variable domain of TCR clone 14180 (TRBV29-1, TRBJ2-5)
CSEDRTGTQYF

SEQ ID NO: 28361 - protein, 10 aa, Homo sapiens
  CDR3 for alpha chain variable domain of TCR clone 14181 (TRAV23/DV6, TRAJ31)
CARGGARLMS

SEQ ID NO: 28362 - protein, 14 aa, Homo sapiens
  CDR3 for beta chain variable domain of TCR clone 14181 (TRBV7-8, TRBJ1-2)
CASSPDSLSYGYTF

SEQ ID NO: 28363 - protein, 18 aa, Homo sapiens
  CDR3 for alpha chain variable domain of TCR clone 14182 (TRAV29/DV5, TRAJ52)
CSAGFRGAGGTSYGKLTF

SEQ ID NO: 28364 - protein, 16 aa, Homo sapiens
  CDR3 for beta chain variable domain of TCR clone 14182 (TRBV7-3, TRBJ2-2)
CASSLKRGTLSGELFF

SEQ ID NO: 28365 - protein, 17 aa, Homo sapiens
  CDR3 for alpha chain variable domain of TCR clone 14183 (TRAV3, TRAJ6)
CAVRDGPRAGGSYIPTF

SEQ ID NO: 28366 - protein, 20 aa, Homo sapiens
  CDR3 for beta chain variable domain of TCR clone 14183 (TRBV28, TRBJ2-1)
RASTPIGRSPGLAGGNEQFF

SEQ ID NO: 28367 - protein, 14 aa, Homo sapiens
  CDR3 for alpha chain variable domain of TCR clone 14184 (TRAV8-1, TRAJ36)
CAVDSPTGANNLFF

SEQ ID NO: 28368 - protein, 15 aa, Homo sapiens
  CDR3 for beta chain variable domain of TCR clone 14184 (TRBV7-2, TRBJ2-3)
CASSLEQGGTDTQYF

SEQ ID NO: 28369 - protein, 17 aa, Homo sapiens
  CDR3 for alpha chain variable domain of TCR clone 14185 (TRAV26-1, TRAJ46)
IASSESEKKSSGDKLTF

SEQ ID NO: 28370 - protein, 14 aa, Homo sapiens
  CDR3 for beta chain variable domain of TCR clone 14185 (TRBV5-1, TRBJ2-2)
CASSLAGGSGELFF

SEQ ID NO: 28371 - protein, 12 aa, Homo sapiens
  CDR3 for alpha chain variable domain of TCR clone 14186 (TRAV13-1, TRAJ27)
CAARTNAGKSTF

SEQ ID NO: 28372 - protein, 14 aa, Homo sapiens
  CDR3 for beta chain variable domain of TCR clone 14186 (TRBV19, TRBJ2-2)
CASSGQGIAGELFF

SEQ ID NO: 28373 - protein, 15 aa, Homo sapiens
  CDR3 for alpha chain variable domain of TCR clone 14187 (TRAV17, TRAJ57)
CATGPSQGGSEKLGF

SEQ ID NO: 28374 - protein, 14 aa, Homo sapiens
  CDR3 for beta chain variable domain of TCR clone 14187 (TRBV12-5, TRBJ2-5)
CASGSRTHQETQYF

SEQ ID NO: 28375 - protein, 13 aa, Homo sapiens
  CDR3 for alpha chain variable domain of TCR clone 14188 (TRAV12-3, TRAJ9)
CAMRNTGGFKTIS

SEQ ID NO: 28376 - protein, 13 aa, Homo sapiens
  CDR3 for beta chain variable domain of TCR clone 14188 (TRBV27, TRBJ2-1)
CASRTLGVGEQFF

SEQ ID NO: 28377 - protein, 19 aa, Homo sapiens
  CDR3 for alpha chain variable domain of TCR clone 14189 (TRAV23/DV6, TRAJ9)
CSKHRLKGAGHTGGFKTIF

SEQ ID NO: 28378 - protein, 12 aa, Homo sapiens
  CDR3 for beta chain variable domain of TCR clone 14189 (TRBV7-8, TRBJ2-7)
CASSLGDREQYF

SEQ ID NO: 28379 - protein, 14 aa, Homo sapiens
  CDR3 for alpha chain variable domain of TCR clone 14190 (TRAV29/DV5, TRAJ36)
CAARRKTGANNLFF

SEQ ID NO: 28380 - protein, 14 aa, Homo sapiens
  CDR3 for beta chain variable domain of TCR clone 14190 (TRBV12-5, TRBJ2-5)
CASGSRAHQETQYF

SEQ ID NO: 28381 - protein, 16 aa, Homo sapiens
  CDR3 for alpha chain variable domain of TCR clone 14191 (TRAV12-3, TRAJ53)
CAMSPGSGGSNYKLTF

SEQ ID NO: 28382 - protein, 14 aa, Homo sapiens
  CDR3 for beta chain variable domain of TCR clone 14191 (TRBV7-2, TRBJ2-7)
CASSPKTSFYEQYF

SEQ ID NO: 28383 - protein, 14 aa, Homo sapiens
  CDR3 for alpha chain variable domain of TCR clone 14192 (TRAV21, TRAJ35)
CAVTPIGFGNVLHC

SEQ ID NO: 28384 - protein, 12 aa, Homo sapiens
  CDR3 for beta chain variable domain of TCR clone 14192 (TRBV7-9, TRBJ2-7)
CASSIKREEQYF

SEQ ID NO: 28385 - protein, 11 aa, Homo sapiens
  CDR3 for alpha chain variable domain of TCR clone 14193 (TRAV13-1, TRAJ8)
CAARGFQKLVL

SEQ ID NO: 28386 - protein, 16 aa, Homo sapiens
  CDR3 for beta chain variable domain of TCR clone 14193 (TRBV19, TRBJ1-5)
CASSTRGTRSNQPQHF

SEQ ID NO: 28387 - protein, 13 aa, Homo sapiens
  CDR3 for alpha chain variable domain of TCR clone 14194 (TRAV3, TRAJ27)
CAVGPLGAGKSTF

SEQ ID NO: 28388 - protein, 13 aa, Homo sapiens
  CDR3 for beta chain variable domain of TCR clone 14194 (TRBV7-9, TRBJ2-3)
CASSPGSTDTQYF

SEQ ID NO: 28389 - protein, 12 aa, Homo sapiens
  CDR3 for alpha chain variable domain of TCR clone 14195 (TRAV8-3, TRAJ20)
CAVGANDYKLSF

SEQ ID NO: 28390 - protein, 16 aa, Homo sapiens
  CDR3 for beta chain variable domain of TCR clone 14195 (TRBV19, TRBJ2-2)
CASRSPGTGATGELFV

SEQ ID NO: 28391 - protein, 14 aa, Homo sapiens
  CDR3 for alpha chain variable domain of TCR clone 14196 (TRAV12-3, TRAJ29)
CAMSPYSGNTPLVF

SEQ ID NO: 28392 - protein, 11 aa, Homo sapiens
  CDR3 for beta chain variable domain of TCR clone 14196 (TRBV12-4, TRBJ2-3)
CASTATDTQYF

SEQ ID NO: 28393 - protein, 14 aa, Homo sapiens
  CDR3 for alpha chain variable domain of TCR clone 14197 (TRAV1-2, TRAJ8)
CAVREDTGFQKRVF

SEQ ID NO: 28394 - protein, 15 aa, Homo sapiens
  CDR3 for beta chain variable domain of TCR clone 14197 (TRBV6-3, TRBJ2-7)
CASSSPGTVFYEQYF

SEQ ID NO: 28395 - protein, 16 aa, Homo sapiens
  CDR3 for alpha chain variable domain of TCR clone 14198 (TRAV27, TRAJ13)
CAGAKSDSGGYQKGTF

SEQ ID NO: 28396 - protein, 15 aa, Homo sapiens
  CDR3 for beta chain variable domain of TCR clone 14198 (TRBV29-1, TRBJ2-1)
CSVGRHALFYNEQFF

SEQ ID NO: 28397 - protein, 14 aa, Homo sapiens
  CDR3 for alpha chain variable domain of TCR clone 14199 (TRAV1-2, TRAJ16)
CAVNRFSDGQKLLF

SEQ ID NO: 28398 - protein, 15 aa, Homo sapiens
  CDR3 for beta chain variable domain of TCR clone 14199 (TRBV9, TRBJ1-6)
CASSVAWTGDSPLHF

SEQ ID NO: 28399 - protein, 12 aa, Homo sapiens
  CDR3 for alpha chain variable domain of TCR clone 14200 (TRAV36/DV7, TRAJ54)
CAVVRGAQKLVF

SEQ ID NO: 28400 - protein, 14 aa, Homo sapiens
  CDR3 for beta chain variable domain of TCR clone 14200 (TRBV7-3, TRBJ1-1)
CASSLKGGNTEAVF

SEQ ID NO: 28401 - protein, 15 aa, Homo sapiens
  CDR3 for alpha chain variable domain of TCR clone 14201 (TRAV26-1, TRAJ22)
CIVRVSFCFCKATDL

SEQ ID NO: 28402 - protein, 13 aa, Homo sapiens
  CDR3 for beta chain variable domain of TCR clone 14201 (TRBV7-9, TRBJ1-2)
CASSLKQNYGYTF

SEQ ID NO: 28403 - protein, 10 aa, Homo sapiens
  CDR3 for alpha chain variable domain of TCR clone 14202 (TRAV1-2, TRAJ23)
CAGQGGKLIF

SEQ ID NO: 28404 - protein, 14 aa, Homo sapiens
  CDR3 for beta chain variable domain of TCR clone 14202 (TRBV11-2, TRBJ1-1)
CASSLRQGGGTLES

SEQ ID NO: 28405 - protein, 11 aa, Homo sapiens
  CDR3 for alpha chain variable domain of TCR clone 14203 (TRAV2, TRAJ33)
CAVESNYQLIW

SEQ ID NO: 28406 - protein, 15 aa, Homo sapiens
  CDR3 for beta chain variable domain of TCR clone 14203 (TRBV19, TRBJ1-1)
CASTSGQTQNTEAFF

SEQ ID NO: 28407 - protein, 13 aa, Homo sapiens
  CDR3 for alpha chain variable domain of TCR clone 14204 (TRAV21, TRAJ52)
CAVRPSPAGGTSY

SEQ ID NO: 28408 - protein, 17 aa, Homo sapiens
  CDR3 for beta chain variable domain of TCR clone 14204 (TRBV13, TRBJ2-3)
CASSLSRVAGGRNTQYF

SEQ ID NO: 28409 - protein, 11 aa, Homo sapiens
  CDR3 for alpha chain variable domain of TCR clone 14205 (TRAV3, TRAJ21)
CAVGNFNKFYF

SEQ ID NO: 28410 - protein, 17 aa, Homo sapiens
  CDR3 for beta chain variable domain of TCR clone 14205 (TRBV7-8, TRBJ2-6)
CASSAGTGGAGANVLTF

SEQ ID NO: 28411 - protein, 14 aa, Homo sapiens
  CDR3 for alpha chain variable domain of TCR clone 14206 (TRAV2, TRAJ3)
CAVPPYSSASKIIF

SEQ ID NO: 28412 - protein, 13 aa, Homo sapiens
  CDR3 for beta chain variable domain of TCR clone 14206 (TRBV7-3, TRBJ1-1)
CASSQDWGAEAFF

SEQ ID NO: 28413 - protein, 14 aa, Homo sapiens
  CDR3 for alpha chain variable domain of TCR clone 14207 (TRAV12-2, TRAJ13)
CAVKKTGGYQKVTF

SEQ ID NO: 28414 - protein, 15 aa, Homo sapiens
  CDR3 for beta chain variable domain of TCR clone 14207 (TRBV10-3, TRBJ2-3)
CAISLTSGGTDTQYF

SEQ ID NO: 28415 - protein, 15 aa, Homo sapiens
  CDR3 for alpha chain variable domain of TCR clone 14208 (TRAV12-3, TRAJ27)
CAMSRLNTNAGKSTF

SEQ ID NO: 28416 - protein, 16 aa, Homo sapiens
  CDR3 for beta chain variable domain of TCR clone 14208 (TRBV20-1, TRBJ1-4)
CSAPGQGLLTNEKLFF

SEQ ID NO: 28417 - protein, 15 aa, Homo sapiens
  CDR3 for alpha chain variable domain of TCR clone 14209 (TRAV35, TRAJ58)
CAGRRQETSGSRLTF

SEQ ID NO: 28418 - protein, 11 aa, Homo sapiens
  CDR3 for beta chain variable domain of TCR clone 14209 (TRBV11-3, TRBJ1-1)
CASSINTEAFF

SEQ ID NO: 28419 - protein, 16 aa, Homo sapiens
  CDR3 for alpha chain variable domain of TCR clone 14210 (TRAV4, TRAJ18)
CCVLLIGGSTLGRLYF

SEQ ID NO: 28420 - protein, 14 aa, Homo sapiens
  CDR3 for beta chain variable domain of TCR clone 14210 (TRBV7-3, TRBJ2-1)
CASSLAGGTNEQFF

SEQ ID NO: 28421 - protein, 15 aa, Homo sapiens
  CDR3 for alpha chain variable domain of TCR clone 14211 (TRAV3, TRAJ5)
CAVRDLDTGRRALTF

SEQ ID NO: 28422 - protein, 13 aa, Homo sapiens
  CDR3 for beta chain variable domain of TCR clone 14211 (TRBV12-4, TRBJ2-7)
CVSSPTETYEQYF

SEQ ID NO: 28423 - protein, 15 aa, Homo sapiens
  CDR3 for alpha chain variable domain of TCR clone 14212 (TRAV26-1, TRAJ44)
CIVRANTGTASKLTF

SEQ ID NO: 28424 - protein, 16 aa, Homo sapiens
  CDR3 for beta chain variable domain of TCR clone 14212 (TRBV7-7, TRBJ2-1)
CASGLASGTSYNEQFF

SEQ ID NO: 28425 - protein, 13 aa, Homo sapiens
  CDR3 for alpha chain variable domain of TCR clone 14213 (TRAV35, TRAJ42)
CAGFPGSQGNLIF

SEQ ID NO: 28426 - protein, 13 aa, Homo sapiens
  CDR3 for beta chain variable domain of TCR clone 14213 (TRBV29-1, TRBJ2-1)
CIVEGGRVNEQFF

SEQ ID NO: 28427 - protein, 10 aa, Homo sapiens
  CDR3 for alpha chain variable domain of TCR clone 14214 (TRAV26-1, TRAJ22)
RSGSARHLTF

SEQ ID NO: 28428 - protein, 13 aa, Homo sapiens
  CDR3 for beta chain variable domain of TCR clone 14214 (TRBV7-9, TRBJ1-2)
CASSLKQNYGYTF

SEQ ID NO: 28429 - protein, 14 aa, Homo sapiens
  CDR3 for alpha chain variable domain of TCR clone 14215 (TRAV16, TRAJ33)
CALSAMDSNYQLIW

SEQ ID NO: 28430 - protein, 12 aa, Homo sapiens
  CDR3 for beta chain variable domain of TCR clone 14215 (TRBV5-1, TRBJ1-2)
CASSQDTYGYAF

SEQ ID NO: 28431 - protein, 16 aa, Homo sapiens
  CDR3 for alpha chain variable domain of TCR clone 14216 (TRAV12-3, TRAJ53)
CAMSPGSGGSNYKLTF

SEQ ID NO: 28432 - protein, 16 aa, Homo sapiens
  CDR3 for beta chain variable domain of TCR clone 14216 (TRBV7-3, TRBJ2-2)
CASSLKRGTLSGELFF

SEQ ID NO: 28433 - protein, 16 aa, Homo sapiens
  CDR3 for alpha chain variable domain of TCR clone 14217 (TRAV1-2, TRAJ10)
CAVRGVLTGGGNKLTF

SEQ ID NO: 28434 - protein, 12 aa, Homo sapiens
  CDR3 for beta chain variable domain of TCR clone 14217 (TRBV7-8, TRBJ2-7)
CASRLGDREQYF

SEQ ID NO: 28435 - protein, 14 aa, Homo sapiens
  CDR3 for alpha chain variable domain of TCR clone 14218 (TRAV12-2, TRAJ13)
CAVKKTGGYQKVTF

SEQ ID NO: 28436 - protein, 15 aa, Homo sapiens
  CDR3 for beta chain variable domain of TCR clone 14218 (TRBV20-1, TRBJ2-7)
CSAESGTSGAYEQYF

SEQ ID NO: 28437 - protein, 16 aa, Homo sapiens
  CDR3 for alpha chain variable domain of TCR clone 14219 (TRAV3, TRAJ10)
CAVRDMRAGGGNKLTF

SEQ ID NO: 28438 - protein, 16 aa, Homo sapiens
  CDR3 for beta chain variable domain of TCR clone 14219 (TRBV5-1, TRBJ2-1)
CASSPWTSGEYNEQFF

SEQ ID NO: 28439 - protein, 14 aa, Homo sapiens
  CDR3 for alpha chain variable domain of TCR clone 14220 (TRAV2, TRAJ37)
CAVDFTSNTGKLIF

SEQ ID NO: 28440 - protein, 14 aa, Homo sapiens
  CDR3 for beta chain variable domain of TCR clone 14220 (TRBV20-1, TRBJ1-1)
SAVLHLGGGTEAFF

SEQ ID NO: 28441 - protein, 11 aa, Homo sapiens
  CDR3 for alpha chain variable domain of TCR clone 14221 (TRAV8-4, TRAJ26)
CAGGEGQNLVF

SEQ ID NO: 28442 - protein, 17 aa, Homo sapiens
  CDR3 for beta chain variable domain of TCR clone 14221 (TRBV7-9, TRBJ2-3)
CASSPTVAGDLTDTQYF

SEQ ID NO: 28443 - protein, 13 aa, Homo sapiens
  CDR3 for alpha chain variable domain of TCR clone 14222 (TRAV13-2, TRAJ48)
CAEMDFGNEKLTF

SEQ ID NO: 28444 - protein, 15 aa, Homo sapiens
  CDR3 for beta chain variable domain of TCR clone 14222 (TRBV7-9, TRBJ1-6)
CASSSPGRGNSHLHF

SEQ ID NO: 28445 - protein, 11 aa, Homo sapiens
  CDR3 for alpha chain variable domain of TCR clone 14223 (TRAV1-1, TRAJ23)
CAVRQGGKLIF

SEQ ID NO: 28446 - protein, 20 aa, Homo sapiens
  CDR3 for beta chain variable domain of TCR clone 14223 (TRBV7-8, TRBJ2-2)
CASSHFFPGPTIHITGELFF

SEQ ID NO: 28447 - protein, 14 aa, Homo sapiens
  CDR3 for alpha chain variable domain of TCR clone 14224 (TRAV23/DV6, )
CADIQNPDPAVYQL

SEQ ID NO: 28448 - protein, 13 aa, Homo sapiens
  CDR3 for beta chain variable domain of TCR clone 14224 (TRBV28, TRBJ2-7)
CASRSSGVYEQYF

SEQ ID NO: 28449 - protein, 14 aa, Homo sapiens
  CDR3 for alpha chain variable domain of TCR clone 14225 (TRAV12-3, TRAJ10)
SHLPLPGGGNKLTF

SEQ ID NO: 28450 - protein, 14 aa, Homo sapiens
  CDR3 for beta chain variable domain of TCR clone 14225 (TRBV6-1, TRBJ1-3)
CASVQGGGGNTIYF

SEQ ID NO: 28451 - protein, 15 aa, Homo sapiens
  CDR3 for alpha chain variable domain of TCR clone 14226 (TRAV3, TRAJ20)
CAVRDIKLSDYKLSF

SEQ ID NO: 28452 - protein, 15 aa, Homo sapiens
  CDR3 for beta chain variable domain of TCR clone 14226 (TRBV7-9, TRBJ1-6)
CASSSPGRGNSPLHS

SEQ ID NO: 28453 - protein, 18 aa, Homo sapiens
  CDR3 for alpha chain variable domain of TCR clone 14227 (TRAV13-1, TRAJ52)
CAAKNPSAGGTSYGKLTF

SEQ ID NO: 28454 - protein, 15 aa, Homo sapiens
  CDR3 for beta chain variable domain of TCR clone 14227 (TRBV6-1, TRBJ2-3)
CASSERGGITDTQYF

SEQ ID NO: 28455 - protein, 14 aa, Homo sapiens
  CDR3 for alpha chain variable domain of TCR clone 14228 (TRAV1-2, TRAJ8)
CAVREDTGFQKLVF

SEQ ID NO: 28456 - protein, 15 aa, Homo sapiens
  CDR3 for beta chain variable domain of TCR clone 14228 (TRBV4-1, TRBJ1-4)
CASSDTGGTNEKLFF

SEQ ID NO: 28457 - protein, 16 aa, Homo sapiens
  CDR3 for alpha chain variable domain of TCR clone 14229 (TRAV30, TRAJ24)
CGTEIVDADSWGKFQF

SEQ ID NO: 28458 - protein, 14 aa, Homo sapiens
  CDR3 for beta chain variable domain of TCR clone 14229 (TRBV20-1, TRBJ1-3)
CSASPTGAGNTIYF

SEQ ID NO: 28459 - protein, 12 aa, Homo sapiens
  CDR3 for alpha chain variable domain of TCR clone 14230 (TRAV1-1, TRAJ8)
CAGGTGFQKLVF

SEQ ID NO: 28460 - protein, 15 aa, Homo sapiens
  CDR3 for beta chain variable domain of TCR clone 14230 (TRBV7-9, TRBJ1-4)
CASSRTGGFNENLFF

SEQ ID NO: 28461 - protein, 15 aa, Homo sapiens
  CDR3 for alpha chain variable domain of TCR clone 14231 (TRAV8-3, TRAJ11)
CAVGLLNSGYSPLTF

SEQ ID NO: 28462 - protein, 16 aa, Homo sapiens
  CDR3 for beta chain variable domain of TCR clone 14231 (TRBV7-9, TRBJ1-2)
CASSLGFSSGEDGYTF

SEQ ID NO: 28463 - protein, 14 aa, Homo sapiens
  CDR3 for alpha chain variable domain of TCR clone 14232 (TRAV21, TRAJ45)
CAVSSGGGADGLTF

SEQ ID NO: 28464 - protein, 15 aa, Homo sapiens
  CDR3 for beta chain variable domain of TCR clone 14232 (TRBV6-1, TRBJ2-4)
CASSEAVWTINMQYF

SEQ ID NO: 28465 - protein, 18 aa, Homo sapiens
  CDR3 for alpha chain variable domain of TCR clone 14233 (TRAV21, TRAJ52)
CAVRPSPAGGTSYGKLTF

SEQ ID NO: 28466 - protein, 17 aa, Homo sapiens
  CDR3 for beta chain variable domain of TCR clone 14233 (TRBV13, TRBJ2-3)
CAISLSRVAGGRNTQYF

SEQ ID NO: 28467 - protein, 11 aa, Homo sapiens
  CDR3 for alpha chain variable domain of TCR clone 14234 (TRAV21, TRAJ34)
CAHYNTDKLIS

SEQ ID NO: 28468 - protein, 13 aa, Homo sapiens
  CDR3 for beta chain variable domain of TCR clone 14234 (TRBV7-6, TRBJ1-2)
CASSLVADYGYTF

SEQ ID NO: 28469 - protein, 15 aa, Homo sapiens
  CDR3 for alpha chain variable domain of TCR clone 14235 (TRAV25, TRAJ52)
CAGTSGGTSYGKLTL

SEQ ID NO: 28470 - protein, 16 aa, Homo sapiens
  CDR3 for beta chain variable domain of TCR clone 14235 (TRBV15, TRBJ1-2)
CATSRGPRTGGGGYTF

SEQ ID NO: 28471 - protein, 11 aa, Homo sapiens
  CDR3 for alpha chain variable domain of TCR clone 14236 (TRAV21, TRAJ11)
CAVNGYGTLTF

SEQ ID NO: 28472 - protein, 11 aa, Homo sapiens
  CDR3 for beta chain variable domain of TCR clone 14236 (TRBV19, TRBJ1-1)
CASSIGSEAFF

SEQ ID NO: 28473 - protein, 11 aa, Homo sapiens
  CDR3 for alpha chain variable domain of TCR clone 14237 (TRAV13-1, TRAJ52)
PGGTSYGKLTF

SEQ ID NO: 28474 - protein, 16 aa, Homo sapiens
  CDR3 for beta chain variable domain of TCR clone 14237 (TRBV28, TRBJ2-7)
CASSPWVATGDRSQYF

SEQ ID NO: 28475 - protein, 15 aa, Homo sapiens
  CDR3 for alpha chain variable domain of TCR clone 14238 (TRAV12-2, TRAJ43)
CAFDMRFGAGTRLTV

SEQ ID NO: 28476 - protein, 17 aa, Homo sapiens
  CDR3 for beta chain variable domain of TCR clone 14238 (TRBV5-1, TRBJ2-5)
CASSLLGLAANQETQYF

SEQ ID NO: 28477 - protein, 14 aa, Homo sapiens
  CDR3 for alpha chain variable domain of TCR clone 14239 (TRAV13-1, TRAJ35)
CEASKGGFGNVLHC

SEQ ID NO: 28478 - protein, 13 aa, Homo sapiens
  CDR3 for beta chain variable domain of TCR clone 14239 (TRBV7-3, TRBJ1-1)
CASSQDWGAEAFF

SEQ ID NO: 28479 - protein, 15 aa, Homo sapiens
  CDR3 for alpha chain variable domain of TCR clone 14240 (TRAV2, TRAJ9)
CAVEDRGTGGFKTIF

SEQ ID NO: 28480 - protein, 14 aa, Homo sapiens
  CDR3 for beta chain variable domain of TCR clone 14240 (TRBV2, TRBJ2-3)
CASSEGQNTDTQYF

SEQ ID NO: 28481 - protein, 14 aa, Homo sapiens
  CDR3 for alpha chain variable domain of TCR clone 14241 (TRAV20, TRAJ56)
CAVQFGGANSKLTF

SEQ ID NO: 28482 - protein, 14 aa, Homo sapiens
  CDR3 for beta chain variable domain of TCR clone 14241 (TRBV20-1, TRBJ2-7)
CSAKRGRSSYEQYL

SEQ ID NO: 28483 - protein, 15 aa, Homo sapiens
  CDR3 for alpha chain variable domain of TCR clone 14242 (TRAV21, TRAJ53)
CATLNSGGSNYKLTF

SEQ ID NO: 28484 - protein, 13 aa, Homo sapiens
  CDR3 for beta chain variable domain of TCR clone 14242 (TRBV27, TRBJ1-1)
CASSVSANTEAFF

SEQ ID NO: 28485 - protein, 14 aa, Homo sapiens
  CDR3 for alpha chain variable domain of TCR clone 14243 (TRAV8-6, TRAJ17)
CAVRKKAAGNKLTF

SEQ ID NO: 28486 - protein, 19 aa, Homo sapiens
  CDR3 for beta chain variable domain of TCR clone 14243 (TRBV6-6, TRBJ1-3)
CASSYGYEGQDLSGNTIYF

SEQ ID NO: 28487 - protein, 16 aa, Homo sapiens
  CDR3 for alpha chain variable domain of TCR clone 14244 (TRAV1-2, TRAJ10)
CAVRGVLTGGGNKLTF

SEQ ID NO: 28488 - protein, 16 aa, Homo sapiens
  CDR3 for beta chain variable domain of TCR clone 14244 (TRBV19, TRBJ1-1)
CASSPTRFWPGTEAFF

SEQ ID NO: 28489 - protein, 15 aa, Homo sapiens
  CDR3 for alpha chain variable domain of TCR clone 14245 (TRAV2, TRAJ9)
CAVEDRGTGGFKTIF

SEQ ID NO: 28490 - protein, 14 aa, Homo sapiens
  CDR3 for beta chain variable domain of TCR clone 14245 (TRBV7-2, TRBJ2-7)
CASSPKTSFYEQYF

SEQ ID NO: 28491 - protein, 11 aa, Homo sapiens
  CDR3 for alpha chain variable domain of TCR clone 14246 (TRAV17, TRAJ9)
CATTGGFKTIF

SEQ ID NO: 28492 - protein, 14 aa, Homo sapiens
  CDR3 for beta chain variable domain of TCR clone 14246 (TRBV7-9, TRBJ2-2)
CASSGLADTGGLFF

SEQ ID NO: 28493 - protein, 14 aa, Homo sapiens
  CDR3 for alpha chain variable domain of TCR clone 14247 (TRAV9-2, TRAJ39)
CALYIYNAGNMLTF

SEQ ID NO: 28494 - protein, 16 aa, Homo sapiens
  CDR3 for beta chain variable domain of TCR clone 14247 (TRBV19, TRBJ2-1)
CASSKAGPSSYNEQFF

SEQ ID NO: 28495 - protein, 12 aa, Homo sapiens
  CDR3 for alpha chain variable domain of TCR clone 14248 (TRAV17, TRAJ12)
CATLRSSYKLIF

SEQ ID NO: 28496 - protein, 16 aa, Homo sapiens
  CDR3 for beta chain variable domain of TCR clone 14248 (TRBV28, TRBJ2-7)
CASSLFFGTGGPEQYF

SEQ ID NO: 28497 - protein, 13 aa, Homo sapiens
  CDR3 for alpha chain variable domain of TCR clone 14249 (TRAV21, TRAJ57)
CAVTQGGSEKLVF

SEQ ID NO: 28498 - protein, 16 aa, Homo sapiens
  CDR3 for beta chain variable domain of TCR clone 14249 (TRBV29-1, TRBJ2-7)
CSVEDTEDGTAYEQYF

SEQ ID NO: 28499 - protein, 15 aa, Homo sapiens
  CDR3 for alpha chain variable domain of TCR clone 14250 (TRAV26-1, TRAJ29)
CIVRVEGSGNTPLVF

SEQ ID NO: 28500 - protein, 15 aa, Homo sapiens
  CDR3 for beta chain variable domain of TCR clone 14250 (TRBV7-9, TRBJ1-5)
CASSQCHQPNQPQHF

SEQ ID NO: 28501 - protein, 12 aa, Homo sapiens
  CDR3 for alpha chain variable domain of TCR clone 14251 (TRAV1-1, TRAJ33)
CAALDSNYQLIW

SEQ ID NO: 28502 - protein, 14 aa, Homo sapiens
  CDR3 for beta chain variable domain of TCR clone 14251 (TRBV20-1, TRBJ2-1)
CSAQIGGSANEQFF

SEQ ID NO: 28503 - protein, 14 aa, Homo sapiens
  CDR3 for alpha chain variable domain of TCR clone 14252 (TRAV38-1, TRAJ45)
CASHSGGGAAGLTF

SEQ ID NO: 28504 - protein, 13 aa, Homo sapiens
  CDR3 for beta chain variable domain of TCR clone 14252 (TRBV10-3, TRBJ1-2)
CAISERDSYGYTF

SEQ ID NO: 28505 - protein, 13 aa, Homo sapiens
  CDR3 for alpha chain variable domain of TCR clone 14253 (TRAV1-2, TRAJ9)
CAALNTGVFKTIF

SEQ ID NO: 28506 - protein, 13 aa, Homo sapiens
  CDR3 for beta chain variable domain of TCR clone 14253 (TRBV19, TRBJ1-2)
CASSVPGQDGYTF

SEQ ID NO: 28507 - protein, 11 aa, Homo sapiens
  CDR3 for alpha chain variable domain of TCR clone 14254 (TRAV41, TRAJ49)
CAVRSRNQFYF

SEQ ID NO: 28508 - protein, 15 aa, Homo sapiens
  CDR3 for beta chain variable domain of TCR clone 14254 (TRBV12-4, TRBJ2-5)
CASSFSSGGGETQYF

SEQ ID NO: 28509 - protein, 15 aa, Homo sapiens
  CDR3 for alpha chain variable domain of TCR clone 14255 (TRAV26-1, TRAJ15)
CIVRAANQAGTALIF

SEQ ID NO: 28510 - protein, 15 aa, Homo sapiens
  CDR3 for beta chain variable domain of TCR clone 14255 (TRBV20-1, TRBJ1-1)
CCARSAATSNTEAFF

SEQ ID NO: 28511 - protein, 15 aa, Homo sapiens
  CDR3 for alpha chain variable domain of TCR clone 14256 (TRAV12-3, TRAJ49)
CAMAVTPNTGNQFYF

SEQ ID NO: 28512 - protein, 18 aa, Homo sapiens
  CDR3 for beta chain variable domain of TCR clone 14256 (TRBV4-1, TRBJ1-5)
CASSQAPRGQGLNQPQHF

SEQ ID NO: 28513 - protein, 13 aa, Homo sapiens
  CDR3 for alpha chain variable domain of TCR clone 14257 (TRAV2, TRAJ40)
CAVVTSGTYKFIF

SEQ ID NO: 28514 - protein, 14 aa, Homo sapiens
  CDR3 for beta chain variable domain of TCR clone 14257 (TRBV19, TRBJ2-1)
CASPTFVLSGEQFF

SEQ ID NO: 28515 - protein, 14 aa, Homo sapiens
  CDR3 for alpha chain variable domain of TCR clone 14258 (TRAV13-1, TRAJ40)
CAASMTSGTYKYIF

SEQ ID NO: 28516 - protein, 23 aa, Homo sapiens
  CDR3 for beta chain variable domain of TCR clone 14258 (TRBV7-3, TRBJ2-1)
GGTQPCISVPAARRGGGEVEQFF

SEQ ID NO: 28517 - protein, 14 aa, Homo sapiens
  CDR3 for alpha chain variable domain of TCR clone 14259 (TRAV12-2, TRAJ40)
CAVKIPSGTYQYIF

SEQ ID NO: 28518 - protein, 14 aa, Homo sapiens
  CDR3 for beta chain variable domain of TCR clone 14259 (TRBV20-1, TRBJ1-1)
CSAQTRIGGTEAFF

SEQ ID NO: 28519 - protein, 15 aa, Homo sapiens
  CDR3 for alpha chain variable domain of TCR clone 14260 (TRAV25, TRAJ52)
CAGTSGGTSYGKLTF

SEQ ID NO: 28520 - protein, 16 aa, Homo sapiens
  CDR3 for beta chain variable domain of TCR clone 14260 (TRBV15, TRBJ1-2)
CATSRGPRTGGGGYAF

SEQ ID NO: 28521 - protein, 14 aa, Homo sapiens
  CDR3 for alpha chain variable domain of TCR clone 14261 (TRAV13-1, TRAJ35)
CAASKGGFGNVLHC

SEQ ID NO: 28522 - protein, 13 aa, Homo sapiens
  CDR3 for beta chain variable domain of TCR clone 14261 (TRBV7-3, TRBJ1-1)
CASSQDWGAEAFC

SEQ ID NO: 28523 - protein, 15 aa, Homo sapiens
  CDR3 for alpha chain variable domain of TCR clone 14262 (TRAV26-1, TRAJ29)
CIVGVEGSGNTPLVF

SEQ ID NO: 28524 - protein, 14 aa, Homo sapiens
  CDR3 for beta chain variable domain of TCR clone 14262 (TRBV18, TRBJ2-5)
CASSPGVSQETQYF

SEQ ID NO: 28525 - protein, 20 aa, Homo sapiens
  CDR3 for alpha chain variable domain of TCR clone 14263 (TRAV26-1, TRAJ42)
CCVLLHRQTYYGGSQGNLIF

SEQ ID NO: 28526 - protein, 16 aa, Homo sapiens
  CDR3 for beta chain variable domain of TCR clone 14263 (TRBV7-3, TRBJ2-2)
CASSLERGTLSGELFF

SEQ ID NO: 28527 - protein, 16 aa, Homo sapiens
  CDR3 for alpha chain variable domain of TCR clone 14264 (TRAV3, TRAJ37)
CAVRGKGSGNTGKLIF

SEQ ID NO: 28528 - protein, 14 aa, Homo sapiens
  CDR3 for beta chain variable domain of TCR clone 14264 (TRBV25-1, TRBJ1-1)
CASTHLGGNTEAFF

SEQ ID NO: 28529 - protein, 13 aa, Homo sapiens
  CDR3 for alpha chain variable domain of TCR clone 14265 (TRAV21, TRAJ57)
CAVTQVGSEKLVF

SEQ ID NO: 28530 - protein, 16 aa, Homo sapiens
  CDR3 for beta chain variable domain of TCR clone 14265 (TRBV29-1, TRBJ2-7)
CSVEDAEDGTAYEQYF

SEQ ID NO: 28531 - protein, 16 aa, Homo sapiens
  CDR3 for alpha chain variable domain of TCR clone 14266 (TRAV26-1, TRAJ53)
CIVRVAVGGSNYKLTF

SEQ ID NO: 28532 - protein, 12 aa, Homo sapiens
  CDR3 for beta chain variable domain of TCR clone 14266 (TRBV7-9, TRBJ1-5)
CASSPQGQPQHF

SEQ ID NO: 28533 - protein, 15 aa, Homo sapiens
  CDR3 for alpha chain variable domain of TCR clone 14267 (TRAV3, TRAJ5)
CAVRDLETGRRALTF

SEQ ID NO: 28534 - protein, 13 aa, Homo sapiens
  CDR3 for beta chain variable domain of TCR clone 14267 (TRBV12-4, TRBJ2-7)
CASSPTETYEQYF

SEQ ID NO: 28535 - protein, 13 aa, Homo sapiens
  CDR3 for alpha chain variable domain of TCR clone 14268 (TRAV12-3, TRAJ33)
CAVSVNSNYQLIW

SEQ ID NO: 28536 - protein, 13 aa, Homo sapiens
  CDR3 for beta chain variable domain of TCR clone 14268 (TRBV7-2, TRBJ2-2)
CASSLAVTGELFF

SEQ ID NO: 28537 - protein, 16 aa, Homo sapiens
  CDR3 for alpha chain variable domain of TCR clone 14269 (TRAV30, TRAJ24)
CGTEIVDADSWGKYQF

SEQ ID NO: 28538 - protein, 14 aa, Homo sapiens
  CDR3 for beta chain variable domain of TCR clone 14269 (TRBV12-5, TRBJ2-5)
CASGSRTHQETQYF

SEQ ID NO: 28539 - protein, 14 aa, Homo sapiens
  CDR3 for alpha chain variable domain of TCR clone 14270 (TRAV1-2, TRAJ16)
CAVNRFSDGQKLLF

SEQ ID NO: 28540 - protein, 15 aa, Homo sapiens
  CDR3 for beta chain variable domain of TCR clone 14270 (TRBV7-2, TRBJ2-2)
CASSSLTGGTRELFF

SEQ ID NO: 28541 - protein, 14 aa, Homo sapiens
  CDR3 for alpha chain variable domain of TCR clone 14271 (TRAV9-2, TRAJ39)
CALYIYNAGNMLTF

SEQ ID NO: 28542 - protein, 14 aa, Homo sapiens
  CDR3 for beta chain variable domain of TCR clone 14271 (TRBV7-6, TRBJ2-3)
CASSLGTVTDTQYF

SEQ ID NO: 28543 - protein, 16 aa, Homo sapiens
  CDR3 for alpha chain variable domain of TCR clone 14272 (TRAV12-3, TRAJ53)
YAMSPGSGGSNYKLTF

SEQ ID NO: 28544 - protein, 11 aa, Homo sapiens
  CDR3 for beta chain variable domain of TCR clone 14272 (TRBV29-1, TRBJ2-5)
CSEDRTGTQYF

SEQ ID NO: 28545 - protein, 11 aa, Homo sapiens
  CDR3 for alpha chain variable domain of TCR clone 14273 (TRAV21, TRAJ11)
CAVNGYSTLTF

SEQ ID NO: 28546 - protein, 11 aa, Homo sapiens
  CDR3 for beta chain variable domain of TCR clone 14273 (TRBV19, TRBJ1-1)
CASSIGSEASF

SEQ ID NO: 28547 - protein, 14 aa, Homo sapiens
  CDR3 for alpha chain variable domain of TCR clone 14274 (TRAV12-2, TRAJ53)
CAVKGGGSNYKLTF

SEQ ID NO: 28548 - protein, 17 aa, Homo sapiens
  CDR3 for beta chain variable domain of TCR clone 14274 (TRBV7-7, TRBJ2-2)
CIAVPPVRTPTPGSCFF

SEQ ID NO: 28549 - protein, 14 aa, Homo sapiens
  CDR3 for alpha chain variable domain of TCR clone 14275 (TRAV2, TRAJ37)
CAVDFTSNTGKLIF

SEQ ID NO: 28550 - protein, 17 aa, Homo sapiens
  CDR3 for beta chain variable domain of TCR clone 14275 (TRBV11-2, TRBJ2-1)
CASSLYPPGVEYNEQFF

SEQ ID NO: 28551 - protein, 16 aa, Homo sapiens
  CDR3 for alpha chain variable domain of TCR clone 14276 (TRAV21, TRAJ37)
CAVRTAGSSNTGKLIF

SEQ ID NO: 28552 - protein, 13 aa, Homo sapiens
  CDR3 for beta chain variable domain of TCR clone 14276 (TRBV7-9, TRBJ2-5)
CASLSSGRETQYF

SEQ ID NO: 28553 - protein, 14 aa, Homo sapiens
  CDR3 for alpha chain variable domain of TCR clone 14277 (TRAV13-1, TRAJ35)
CAASKGGFGNVLHC

SEQ ID NO: 28554 - protein, 12 aa, Homo sapiens
  CDR3 for beta chain variable domain of TCR clone 14277 (TRBV11-2, TRBJ2-2)
CASSLGGGELFF

SEQ ID NO: 28555 - protein, 12 aa, Homo sapiens
  CDR3 for alpha chain variable domain of TCR clone 14278 (TRAV8-3, TRAJ26)
CAGDNYGQNSVF

SEQ ID NO: 28556 - protein, 15 aa, Homo sapiens
  CDR3 for beta chain variable domain of TCR clone 14278 (TRBV9, TRBJ2-1)
CASSLAGSSYNEQFF

SEQ ID NO: 28557 - protein, 15 aa, Homo sapiens
  CDR3 for alpha chain variable domain of TCR clone 14279 (TRAV8-3, TRAJ32)
CAVGPYGGATNKLIF

SEQ ID NO: 28558 - protein, 14 aa, Homo sapiens
  CDR3 for beta chain variable domain of TCR clone 14279 (TRBV29-1, TRBJ2-2)
CSLLAETNTGELFF

SEQ ID NO: 28559 - protein, 15 aa, Homo sapiens
  CDR3 for alpha chain variable domain of TCR clone 14280 (TRAV8-3, TRAJ45)
CASSYSGGGADGLTF

SEQ ID NO: 28560 - protein, 12 aa, Homo sapiens
  CDR3 for beta chain variable domain of TCR clone 14280 (TRBV11-2, TRBJ2-2)
CASSLGGGELFF

SEQ ID NO: 28561 - protein, 12 aa, Homo sapiens
  CDR3 for alpha chain variable domain of TCR clone 14281 (TRAV13-2, TRAJ8)
CAPWLGFQKLVF

SEQ ID NO: 28562 - protein, 12 aa, Homo sapiens
  CDR3 for beta chain variable domain of TCR clone 14281 (TRBV28, TRBJ2-3)
CASSLYRDTQYF

SEQ ID NO: 28563 - protein, 10 aa, Homo sapiens
  CDR3 for alpha chain variable domain of TCR clone 14282 (TRAV13-1, TRAJ41)
CAASGPRRTQ

SEQ ID NO: 28564 - protein, 18 aa, Homo sapiens
  CDR3 for beta chain variable domain of TCR clone 14282 (TRBV18, TRBJ2-3)
ISVPAHHRREGRGNTQYF

SEQ ID NO: 28565 - protein, 16 aa, Homo sapiens
  CDR3 for alpha chain variable domain of TCR clone 14283 (TRAV1-2, TRAJ10)
CAVRGVLTGGGNKLTF

SEQ ID NO: 28566 - protein, 12 aa, Homo sapiens
  CDR3 for beta chain variable domain of TCR clone 14283 (TRBV7-8, TRBJ2-7)
CASSLGDGEQYF

SEQ ID NO: 28567 - protein, 14 aa, Homo sapiens
  CDR3 for alpha chain variable domain of TCR clone 14284 (TRAV36/DV7, TRAJ53)
CAVVDGGSNYKLTF

SEQ ID NO: 28568 - protein, 16 aa, Homo sapiens
  CDR3 for beta chain variable domain of TCR clone 14284 (TRBV15, TRBJ2-7)
CATSARQARSSYEQYF

SEQ ID NO: 28569 - protein, 16 aa, Homo sapiens
  CDR3 for alpha chain variable domain of TCR clone 14285 (TRAV8-3, TRAJ13)
CAVGAYPSVGYQKVTF

SEQ ID NO: 28570 - protein, 15 aa, Homo sapiens
  CDR3 for beta chain variable domain of TCR clone 14285 (TRBV19, TRBJ1-5)
CASSIVWADNQPQHF

SEQ ID NO: 28571 - protein, 12 aa, Homo sapiens
  CDR3 for alpha chain variable domain of TCR clone 14286 (TRAV21, TRAJ33)
CAKMDSNYQLIW

SEQ ID NO: 28572 - protein, 14 aa, Homo sapiens
  CDR3 for beta chain variable domain of TCR clone 14286 (TRBV2, TRBJ2-7)
CASSLASGGYEQYF

SEQ ID NO: 28573 - protein, 13 aa, Homo sapiens
  CDR3 for alpha chain variable domain of TCR clone 14287 (TRAV2, TRAJ21)
CAVEDNNFNKSYF

SEQ ID NO: 28574 - protein, 14 aa, Homo sapiens
  CDR3 for beta chain variable domain of TCR clone 14287 (TRBV6-1, TRBJ2-7)
CASSERVNPYEQYF

SEQ ID NO: 28575 - protein, 15 aa, Homo sapiens
  CDR3 for alpha chain variable domain of TCR clone 14288 (TRAV27, TRAJ50)
CAGVGRGTSYDKMIF

SEQ ID NO: 28576 - protein, 14 aa, Homo sapiens
  CDR3 for beta chain variable domain of TCR clone 14288 (TRBV7-2, TRBJ1-1)
CASSFYDLNTEAFF

SEQ ID NO: 28577 - protein, 14 aa, Homo sapiens
  CDR3 for alpha chain variable domain of TCR clone 14289 (TRAV26-1, TRAJ38)
CIADNASNNRKLIW

SEQ ID NO: 28578 - protein, 13 aa, Homo sapiens
  CDR3 for beta chain variable domain of TCR clone 14289 (TRBV20-1, TRBJ1-1)
CSARGGGNTEAFF

SEQ ID NO: 28579 - protein, 14 aa, Homo sapiens
  CDR3 for alpha chain variable domain of TCR clone 14290 (TRAV8-4, TRAJ9)
CAVRINTGGFKTIF

SEQ ID NO: 28580 - protein, 15 aa, Homo sapiens
  CDR3 for beta chain variable domain of TCR clone 14290 (TRBV4-1, TRBJ1-4)
CASSDTGGTNEKLFF

SEQ ID NO: 28581 - protein, 16 aa, Homo sapiens
  CDR3 for alpha chain variable domain of TCR clone 14291 (TRAV30, TRAJ24)
CGTEIVDADSWGKFQF

SEQ ID NO: 28582 - protein, 16 aa, Homo sapiens
  CDR3 for beta chain variable domain of TCR clone 14291 (TRBV7-9, TRBJ1-2)
CASSLGFSSGEDGYTF

SEQ ID NO: 28583 - protein, 11 aa, Homo sapiens
  CDR3 for alpha chain variable domain of TCR clone 14292 (TRAV13-2, TRAJ26)
CAEIPGQNFVF

SEQ ID NO: 28584 - protein, 15 aa, Homo sapiens
  CDR3 for beta chain variable domain of TCR clone 14292 (TRBV10-3, TRBJ1-5)
CAISDTGLGGQPQHF

SEQ ID NO: 28585 - protein, 13 aa, Homo sapiens
  CDR3 for alpha chain variable domain of TCR clone 14293 (TRAV27, TRAJ45)
CRSSGGGAGGLTF

SEQ ID NO: 28586 - protein, 17 aa, Homo sapiens
  CDR3 for beta chain variable domain of TCR clone 14293 (TRBV11-2, TRBJ2-1)
CASSLYPPGVEYNEQFF

SEQ ID NO: 28587 - protein, 14 aa, Homo sapiens
  CDR3 for alpha chain variable domain of TCR clone 14294 (TRAV36/DV7, TRAJ57)
CAVGFPGGSEKLVF

SEQ ID NO: 28588 - protein, 12 aa, Homo sapiens
  CDR3 for beta chain variable domain of TCR clone 14294 (TRBV19, TRBJ2-7)
CASTSGTYEQYL

SEQ ID NO: 28589 - protein, 15 aa, Homo sapiens
  CDR3 for alpha chain variable domain of TCR clone 14295 (TRAV3, TRAJ9)
CAVRDINTGGFKTIF

SEQ ID NO: 28590 - protein, 13 aa, Homo sapiens
  CDR3 for beta chain variable domain of TCR clone 14295 (TRBV19, TRBJ2-7)
CASSIPSVHEQYF

SEQ ID NO: 28591 - protein, 10 aa, Homo sapiens
  CDR3 for alpha chain variable domain of TCR clone 14296 (TRAV26-1, TRAJ22)
CSGSARQLTF

SEQ ID NO: 28592 - protein, 13 aa, Homo sapiens
  CDR3 for beta chain variable domain of TCR clone 14296 (TRBV7-9, TRBJ1-2)
CASSLKQNYGYTF

SEQ ID NO: 28593 - protein, 16 aa, Homo sapiens
  CDR3 for alpha chain variable domain of TCR clone 14297 (TRAV30, TRAJ24)
CGTEIVDADSWGKFQF

SEQ ID NO: 28594 - protein, 13 aa, Homo sapiens
  CDR3 for beta chain variable domain of TCR clone 14297 (TRBV15, TRBJ1-6)
CATSGGLNSPLHF

SEQ ID NO: 28595 - protein, 14 aa, Homo sapiens
  CDR3 for alpha chain variable domain of TCR clone 14298 (TRAV26-1, TRAJ38)
RIADNAGNNRKLIW

SEQ ID NO: 28596 - protein, 17 aa, Homo sapiens
  CDR3 for beta chain variable domain of TCR clone 14298 (TRBV15, TRBJ1-1)
CATSRVGGADGDTEAFF

SEQ ID NO: 28597 - protein, 13 aa, Homo sapiens
  CDR3 for alpha chain variable domain of TCR clone 14299 (TRAV2, TRAJ40)
CAVVTSGTYKYIF

SEQ ID NO: 28598 - protein, 14 aa, Homo sapiens
  CDR3 for beta chain variable domain of TCR clone 14299 (TRBV19, TRBJ2-1)
CASPTFVLNGEQFF

SEQ ID NO: 28599 - protein, 12 aa, Homo sapiens
  CDR3 for alpha chain variable domain of TCR clone 14300 (TRAV1-1, TRAJ8)
CAGGTGFQNLVF

SEQ ID NO: 28600 - protein, 15 aa, Homo sapiens
  CDR3 for beta chain variable domain of TCR clone 14300 (TRBV7-9, TRBJ1-4)
CASSRTGGFNEKLFF

SEQ ID NO: 28601 - protein, 16 aa, Homo sapiens
  CDR3 for alpha chain variable domain of TCR clone 14301 (TRAV9-2, TRAJ18)
CALTSDRGSTLGRLYF

SEQ ID NO: 28602 - protein, 14 aa, Homo sapiens
  CDR3 for beta chain variable domain of TCR clone 14301 (TRBV29-1, TRBJ2-1)
CSVLGTGVWNEQFF

SEQ ID NO: 28603 - protein, 12 aa, Homo sapiens
  CDR3 for alpha chain variable domain of TCR clone 14302 (TRAV2, TRAJ9)
RAVGAGGFKTIF

SEQ ID NO: 28604 - protein, 16 aa, Homo sapiens
  CDR3 for beta chain variable domain of TCR clone 14302 (TRBV13, TRBJ2-2)
CASSPRTGEHTGELFF

SEQ ID NO: 28605 - protein, 12 aa, Homo sapiens
  CDR3 for alpha chain variable domain of TCR clone 14303 (TRAV29/DV5, TRAJ34)
CAARHNTDKPIF

SEQ ID NO: 28606 - protein, 15 aa, Homo sapiens
  CDR3 for beta chain variable domain of TCR clone 14303 (TRBV19, TRBJ2-7)
CASSPAGSGEALRYF

SEQ ID NO: 28607 - protein, 11 aa, Homo sapiens
  CDR3 for alpha chain variable domain of TCR clone 14304 (TRAV25, TRAJ49)
CAGNTGNQFYF

SEQ ID NO: 28608 - protein, 14 aa, Homo sapiens
  CDR3 for beta chain variable domain of TCR clone 14304 (TRBV5-7, TRBJ2-2)
CASSLARNTGELFF

SEQ ID NO: 28609 - protein, 14 aa, Homo sapiens
  CDR3 for alpha chain variable domain of TCR clone 14305 (TRAV12-2, TRAJ17)
CAVRFKAAGNKLTF

SEQ ID NO: 28610 - protein, 17 aa, Homo sapiens
  CDR3 for beta chain variable domain of TCR clone 14305 (TRBV20-1, TRBJ2-2)
CSASGSGQGGLTGELFF

SEQ ID NO: 28611 - protein, 12 aa, Homo sapiens
  CDR3 for alpha chain variable domain of TCR clone 14306 (TRAV13-2, TRAJ48)
CRDGLGNEKLTF

SEQ ID NO: 28612 - protein, 15 aa, Homo sapiens
  CDR3 for beta chain variable domain of TCR clone 14306 (TRBV7-9, TRBJ1-6)
CASSSPGRGNSPLHF

SEQ ID NO: 28613 - protein, 15 aa, Homo sapiens
  CDR3 for alpha chain variable domain of TCR clone 14307 (TRAV8-3, TRAJ45)
FASSYSGGGADGLTF

SEQ ID NO: 28614 - protein, 13 aa, Homo sapiens
  CDR3 for beta chain variable domain of TCR clone 14307 (TRBV10-3, TRBJ2-7)
CASKLAVNYEQYF

SEQ ID NO: 28615 - protein, 14 aa, Homo sapiens
  CDR3 for alpha chain variable domain of TCR clone 14308 (TRAV1-2, TRAJ8)
CAVREDTGFQKLVF

SEQ ID NO: 28616 - protein, 14 aa, Homo sapiens
  CDR3 for beta chain variable domain of TCR clone 14308 (TRBV19, TRBJ2-2)
CASSTLHRSGELFF

SEQ ID NO: 28617 - protein, 15 aa, Homo sapiens
  CDR3 for alpha chain variable domain of TCR clone 14309 (TRAV21, TRAJ24)
CAARPSTDSWGKLQF

SEQ ID NO: 28618 - protein, 13 aa, Homo sapiens
  CDR3 for beta chain variable domain of TCR clone 14309 (TRBV11-2, TRBJ2-5)
CASSSTGEETQYF

SEQ ID NO: 28619 - protein, 13 aa, Homo sapiens
  CDR3 for alpha chain variable domain of TCR clone 14310 (TRAV12-1, TRAJ33)
CGDAPDSNYQLIW

SEQ ID NO: 28620 - protein, 12 aa, Homo sapiens
  CDR3 for beta chain variable domain of TCR clone 14310 (TRBV5-7, TRBJ2-7)
CASSLGRYEQYF

SEQ ID NO: 28621 - protein, 16 aa, Homo sapiens
  CDR3 for alpha chain variable domain of TCR clone 14311 (TRAV16, TRAJ4)
CALSRMFSGGYNELIF

SEQ ID NO: 28622 - protein, 16 aa, Homo sapiens
  CDR3 for beta chain variable domain of TCR clone 14311 (TRBV24-1, TRBJ2-3)
CATSDPGTGATDTQYF

SEQ ID NO: 28623 - protein, 13 aa, Homo sapiens
  CDR3 for alpha chain variable domain of TCR clone 14312 (TRAV17, TRAJ5)
CAPMDTGRRALTF

SEQ ID NO: 28624 - protein, 15 aa, Homo sapiens
  CDR3 for beta chain variable domain of TCR clone 14312 (TRBV20-1, TRBJ2-7)
CSAESGTSGAYEQYF

SEQ ID NO: 28625 - protein, 11 aa, Homo sapiens
  CDR3 for alpha chain variable domain of TCR clone 14313 (TRAV2, TRAJ33)
CAVESNYQLIW

SEQ ID NO: 28626 - protein, 13 aa, Homo sapiens
  CDR3 for beta chain variable domain of TCR clone 14313 (TRBV7-9, TRBJ1-2)
CASSLKQNYGYTF

SEQ ID NO: 28627 - protein, 16 aa, Homo sapiens
  CDR3 for alpha chain variable domain of TCR clone 14314 (TRAV1-2, TRAJ10)
CAVRGVLTGGGNKLTF

SEQ ID NO: 28628 - protein, 12 aa, Homo sapiens
  CDR3 for beta chain variable domain of TCR clone 14314 (TRBV7-8, TRBJ2-7)
CASGLGDREQYF

SEQ ID NO: 28629 - protein, 15 aa, Homo sapiens
  CDR3 for alpha chain variable domain of TCR clone 14315 (TRAV25, TRAJ52)
CAGRPGGTSYGKLTF

SEQ ID NO: 28630 - protein, 17 aa, Homo sapiens
  CDR3 for beta chain variable domain of TCR clone 14315 (TRBV7-8, TRBJ2-6)
CASSAGAGGAGANVLTF

SEQ ID NO: 28631 - protein, 14 aa, Homo sapiens
  CDR3 for alpha chain variable domain of TCR clone 14316 (TRAV35, TRAJ42)
CCVPYGGSQGNLIF

SEQ ID NO: 28632 - protein, 15 aa, Homo sapiens
  CDR3 for beta chain variable domain of TCR clone 14316 (TRBV27, TRBJ2-5)
CASSLIPSGGETQYF

SEQ ID NO: 28633 - protein, 11 aa, Homo sapiens
  CDR3 for alpha chain variable domain of TCR clone 14317 (TRAV12-1, TRAJ8)
RVVTGFQKLVF

SEQ ID NO: 28634 - protein, 14 aa, Homo sapiens
  CDR3 for beta chain variable domain of TCR clone 14317 (TRBV19, TRBJ2-1)
CASGKSTQYNEQFF

SEQ ID NO: 28635 - protein, 15 aa, Homo sapiens
  CDR3 for alpha chain variable domain of TCR clone 14318 (TRAV27, TRAJ38)
CAARRNAGNNRKLIW

SEQ ID NO: 28636 - protein, 15 aa, Homo sapiens
  CDR3 for beta chain variable domain of TCR clone 14318 (TRBV5-1, TRBJ2-1)
CAGSPPRAPYNEQFF

SEQ ID NO: 28637 - protein, 16 aa, Homo sapiens
  CDR3 for alpha chain variable domain of TCR clone 14319 (TRAV8-1, TRAJ40)
CAVNGGGRSGTYKYIF

SEQ ID NO: 28638 - protein, 15 aa, Homo sapiens
  CDR3 for beta chain variable domain of TCR clone 14319 (TRBV27, TRBJ2-5)
CASSPPGQGAETQYF

SEQ ID NO: 28639 - protein, 17 aa, Homo sapiens
  CDR3 for alpha chain variable domain of TCR clone 14320 (TRAV3, TRAJ6)
CAVRDGPRAGGSYIPTF

SEQ ID NO: 28640 - protein, 18 aa, Homo sapiens
  CDR3 for beta chain variable domain of TCR clone 14320 (TRBV11-2, TRBJ2-3)
CASSLGGASRGAPNTQYF

SEQ ID NO: 28641 - protein, 11 aa, Homo sapiens
  CDR3 for alpha chain variable domain of TCR clone 14321 (TRAV17, TRAJ43)
CATPRSNDIRF

SEQ ID NO: 28642 - protein, 15 aa, Homo sapiens
  CDR3 for beta chain variable domain of TCR clone 14321 (TRBV11-2, TRBJ2-1)
CASSLGTSGLNEQFF

SEQ ID NO: 28643 - protein, 17 aa, Homo sapiens
  CDR3 for alpha chain variable domain of TCR clone 14322 (TRAV3, TRAJ6)
CAVRDGPRAGGSCIPTF

SEQ ID NO: 28644 - protein, 20 aa, Homo sapiens
  CDR3 for beta chain variable domain of TCR clone 14322 (TRBV28, TRBJ2-1)
CASTPIGRSPGLAGGNEQFF

SEQ ID NO: 28645 - protein, 11 aa, Homo sapiens
  CDR3 for alpha chain variable domain of TCR clone 14323 (TRAV3, TRAJ21)
CAVGNFNKFYF

SEQ ID NO: 28646 - protein, 11 aa, Homo sapiens
  CDR3 for beta chain variable domain of TCR clone 14323 (TRBV29-1, TRBJ2-5)
CSEDRTGTQYF

SEQ ID NO: 28647 - protein, 18 aa, Homo sapiens
  CDR3 for alpha chain variable domain of TCR clone 14324 (TRAV12-3, TRAJ52)
CAMSVGGAGGTSYGKLTF

SEQ ID NO: 28648 - protein, 13 aa, Homo sapiens
  CDR3 for beta chain variable domain of TCR clone 14324 (TRBV7-9, TRBJ1-2)
CASSLKQNYGYTF

SEQ ID NO: 28649 - protein, 14 aa, Homo sapiens
  CDR3 for alpha chain variable domain of TCR clone 14325 (TRAV9-2, TRAJ39)
CALYIYNAGNMLTF

SEQ ID NO: 28650 - protein, 13 aa, Homo sapiens
  CDR3 for beta chain variable domain of TCR clone 14325 (TRBV20-1, TRBJ1-1)
CSARGGGNTEAFF

SEQ ID NO: 28651 - protein, 11 aa, Homo sapiens
  CDR3 for alpha chain variable domain of TCR clone 14326 (TRAV2, TRAJ33)
CAVDSDYQLIW

SEQ ID NO: 28652 - protein, 14 aa, Homo sapiens
  CDR3 for beta chain variable domain of TCR clone 14326 (TRBV11-2, TRBJ2-3)
CASSRLARTDTQYF

SEQ ID NO: 28653 - protein, 13 aa, Homo sapiens
  CDR3 for alpha chain variable domain of TCR clone 14327 (TRAV8-2, TRAJ49)
CVVSPSTGNQFYF

SEQ ID NO: 28654 - protein, 14 aa, Homo sapiens
  CDR3 for beta chain variable domain of TCR clone 14327 (TRBV11-2, TRBJ2-7)
CAGSRSGGAGEQYF

SEQ ID NO: 28655 - protein, 15 aa, Homo sapiens
  CDR3 for alpha chain variable domain of TCR clone 14328 (TRAV26-1, TRAJ22)
CIVRVSFWSCKATDL

SEQ ID NO: 28656 - protein, 13 aa, Homo sapiens
  CDR3 for beta chain variable domain of TCR clone 14328 (TRBV7-9, TRBJ1-2)
CASSLKQNYGYTF

SEQ ID NO: 28657 - protein, 14 aa, Homo sapiens
  CDR3 for alpha chain variable domain of TCR clone 14329 (TRAV12-2, TRAJ17)
CAALFKAAGNKLTF

SEQ ID NO: 28658 - protein, 17 aa, Homo sapiens
  CDR3 for beta chain variable domain of TCR clone 14329 (TRBV20-1, TRBJ2-2)
CSASGSGQGGLTGELFF

SEQ ID NO: 28659 - protein, 15 aa, Homo sapiens
  CDR3 for alpha chain variable domain of TCR clone 14330 (TRAV23/DV6, TRAJ18)
CSARYRGSTLGRLYF

SEQ ID NO: 28660 - protein, 13 aa, Homo sapiens
  CDR3 for beta chain variable domain of TCR clone 14330 (TRBV7-2, TRBJ2-7)
CASSSPSGSEQYF

SEQ ID NO: 28661 - protein, 17 aa, Homo sapiens
  CDR3 for alpha chain variable domain of TCR clone 14331 (TRAV17, TRAJ4)
CFLLLCYGRGGYNKLIF

SEQ ID NO: 28662 - protein, 15 aa, Homo sapiens
  CDR3 for beta chain variable domain of TCR clone 14331 (TRBV2, TRBJ2-3)
CASSDFEKATDTQYF

SEQ ID NO: 28663 - protein, 13 aa, Homo sapiens
  CDR3 for alpha chain variable domain of TCR clone 14332 (TRAV13-2, TRAJ53)
CAENMGSNYKLTF

SEQ ID NO: 28664 - protein, 13 aa, Homo sapiens
  CDR3 for beta chain variable domain of TCR clone 14332 (TRBV4-1, TRBJ2-2)
CASSQENTGELVF

SEQ ID NO: 28665 - protein, 14 aa, Homo sapiens
  CDR3 for alpha chain variable domain of TCR clone 14333 (TRAV1-2, TRAJ8)
CAVREDTGFQKLVF

SEQ ID NO: 28666 - protein, 12 aa, Homo sapiens
  CDR3 for beta chain variable domain of TCR clone 14333 (TRBV12-4, TRBJ2-1)
CASSPGRNEQFF

SEQ ID NO: 28667 - protein, 15 aa, Homo sapiens
  CDR3 for alpha chain variable domain of TCR clone 14334 (TRAV12-3, TRAJ6)
CAMSATTGGSYIPTF

SEQ ID NO: 28668 - protein, 16 aa, Homo sapiens
  CDR3 for beta chain variable domain of TCR clone 14334 (TRBV20-1, TRBJ1-2)
CSASMGQGVANYGYTF

SEQ ID NO: 28669 - protein, 16 aa, Homo sapiens
  CDR3 for alpha chain variable domain of TCR clone 14335 (TRAV14/DV4, TRAJ53)
CAMREGGGGSNYKLTF

SEQ ID NO: 28670 - protein, 16 aa, Homo sapiens
  CDR3 for beta chain variable domain of TCR clone 14335 (TRBV20-1, TRBJ1-4)
CSAPGQGLLTNEKLFF

SEQ ID NO: 28671 - protein, 14 aa, Homo sapiens
  CDR3 for alpha chain variable domain of TCR clone 14336 (TRAV12-2, TRAJ13)
CAVKKTGGYQKVTF

SEQ ID NO: 28672 - protein, 15 aa, Homo sapiens
  CDR3 for beta chain variable domain of TCR clone 14336 (TRBV27, TRBJ2-1)
CASRNGGGSSNEQFF

SEQ ID NO: 28673 - protein, 14 aa, Homo sapiens
  CDR3 for alpha chain variable domain of TCR clone 14337 (TRAV1-2, TRAJ16)
CAVNRFSDGQKLLF

SEQ ID NO: 28674 - protein, 15 aa, Homo sapiens
  CDR3 for beta chain variable domain of TCR clone 14337 (TRBV19, TRBJ1-2)
CASSVGQVLNYGYTF

SEQ ID NO: 28675 - protein, 14 aa, Homo sapiens
  CDR3 for alpha chain variable domain of TCR clone 14338 (TRAV1-2, TRAJ8)
CAVREDTGFQKLVF

SEQ ID NO: 28676 - protein, 15 aa, Homo sapiens
  CDR3 for beta chain variable domain of TCR clone 14338 (TRBV6-3, TRBJ2-7)
CASSSPGTVFYAQYF

SEQ ID NO: 28677 - protein, 12 aa, Homo sapiens
  CDR3 for alpha chain variable domain of TCR clone 14339 (TRAV12-1, TRAJ40)
CVVYSGTYKYIF

SEQ ID NO: 28678 - protein, 18 aa, Homo sapiens
  CDR3 for beta chain variable domain of TCR clone 14339 (TRBV11-2, TRBJ2-3)
WASSLGGASRGAPNTQYF

SEQ ID NO: 28679 - protein, 18 aa, Homo sapiens
  CDR3 for alpha chain variable domain of TCR clone 14340 (TRAV21, TRAJ52)
CAVRPFPAGGTSYGKLTF

SEQ ID NO: 28680 - protein, 17 aa, Homo sapiens
  CDR3 for beta chain variable domain of TCR clone 14340 (TRBV13, TRBJ2-3)
CASSLSRVAGGRNTQYF

SEQ ID NO: 28681 - protein, 17 aa, Homo sapiens
  CDR3 for alpha chain variable domain of TCR clone 14341 (TRAV13-1, TRAJ31)
CAPRDRLMLGDGTQLVV

SEQ ID NO: 28682 - protein, 12 aa, Homo sapiens
  CDR3 for beta chain variable domain of TCR clone 14341 (TRBV7-9, TRBJ2-7)
CASSLEGYEQYF

SEQ ID NO: 28683 - protein, 15 aa, Homo sapiens
  CDR3 for alpha chain variable domain of TCR clone 14342 (TRAV27, TRAJ38)
CAARRNAGNHRKLIW

SEQ ID NO: 28684 - protein, 13 aa, Homo sapiens
  CDR3 for beta chain variable domain of TCR clone 14342 (TRBV12-5, TRBJ2-3)
CASGDRQSDTQYF

SEQ ID NO: 28685 - protein, 10 aa, Homo sapiens
  CDR3 for alpha chain variable domain of TCR clone 14343 (TRAV13-1, TRAJ8)
CAAPFQKLVF

SEQ ID NO: 28686 - protein, 13 aa, Homo sapiens
  CDR3 for beta chain variable domain of TCR clone 14343 (TRBV4-2, TRBJ2-3)
CASSLTSTDTQYF

SEQ ID NO: 28687 - protein, 16 aa, Homo sapiens
  CDR3 for alpha chain variable domain of TCR clone 14344 (TRAV1-2, TRAJ10)
CAVRGVLTGGGNKITF

SEQ ID NO: 28688 - protein, 12 aa, Homo sapiens
  CDR3 for beta chain variable domain of TCR clone 14344 (TRBV7-8, TRBJ2-7)
CASSLGDREQYF

SEQ ID NO: 28689 - protein, 13 aa, Homo sapiens
  CDR3 for alpha chain variable domain of TCR clone 14345 (TRAV2, TRAJ15)
CAVASQAGTALIF

SEQ ID NO: 28690 - protein, 16 aa, Homo sapiens
  CDR3 for beta chain variable domain of TCR clone 14345 (TRBV5-1, TRBJ1-1)
CASSSGGNALNTEAFF

SEQ ID NO: 28691 - protein, 14 aa, Homo sapiens
  CDR3 for alpha chain variable domain of TCR clone 14346 (TRAV38-1, TRAJ45)
CAYYSGGGADGLTF

SEQ ID NO: 28692 - protein, 18 aa, Homo sapiens
  CDR3 for beta chain variable domain of TCR clone 14346 (TRBV28, TRBJ2-1)
CTPIGRSPGLAGGNEQFF

SEQ ID NO: 28693 - protein, 16 aa, Homo sapiens
  CDR3 for alpha chain variable domain of TCR clone 14347 (TRAV14/DV4, TRAJ53)
CAMREGGGGSNYKLTF

SEQ ID NO: 28694 - protein, 14 aa, Homo sapiens
  CDR3 for beta chain variable domain of TCR clone 14347 (TRBV27, TRBJ2-5)
CASSSLKGWETQYF

SEQ ID NO: 28695 - protein, 15 aa, Homo sapiens
  CDR3 for alpha chain variable domain of TCR clone 14348 (TRAV17, TRAJ56)
CATEPFTGANNKLTF

SEQ ID NO: 28696 - protein, 15 aa, Homo sapiens
  CDR3 for beta chain variable domain of TCR clone 14348 (TRBV28, TRBJ1-5)
CASSRTGGYVQPQHF

SEQ ID NO: 28697 - protein, 17 aa, Homo sapiens
  CDR3 for alpha chain variable domain of TCR clone 14349 (TRAV8-6, TRAJ58)
CAVSSWVGETSGSRLTF

SEQ ID NO: 28698 - protein, 14 aa, Homo sapiens
  CDR3 for beta chain variable domain of TCR clone 14349 (TRBV4-3, TRBJ2-1)
CASGLDRAYNEQFF

SEQ ID NO: 28699 - protein, 14 aa, Homo sapiens
  CDR3 for alpha chain variable domain of TCR clone 14350 (TRAV23/DV6, TRAJ37)
CAASTSSNTGKLIF

SEQ ID NO: 28700 - protein, 17 aa, Homo sapiens
  CDR3 for beta chain variable domain of TCR clone 14350 (TRBV13, TRBJ2-3)
CASSLSRVAGRRNTQYF

SEQ ID NO: 28701 - protein, 11 aa, Homo sapiens
  CDR3 for alpha chain variable domain of TCR clone 14351 (TRAV1-1, TRAJ23)
CAVRQGGKLIF

SEQ ID NO: 28702 - protein, 20 aa, Homo sapiens
  CDR3 for beta chain variable domain of TCR clone 14351 (TRBV7-8, TRBJ2-2)
CASSHLFPGPTIHITGEPFF

SEQ ID NO: 28703 - protein, 13 aa, Homo sapiens
  CDR3 for alpha chain variable domain of TCR clone 14352 (TRAV8-4, TRAJ48)
CAVSEFGNEKLTF

SEQ ID NO: 28704 - protein, 13 aa, Homo sapiens
  CDR3 for beta chain variable domain of TCR clone 14352 (TRBV19, TRBJ2-2)
CASSIWSTGELFF

SEQ ID NO: 28705 - protein, 14 aa, Homo sapiens
  CDR3 for alpha chain variable domain of TCR clone 14353 (TRAV26-1, TRAJ39)
CIVRGSRAGNMLTF

SEQ ID NO: 28706 - protein, 15 aa, Homo sapiens
  CDR3 for beta chain variable domain of TCR clone 14353 (TRBV7-9, TRBJ1-5)
CAGSQGHQPNQPQHF

SEQ ID NO: 28707 - protein, 18 aa, Homo sapiens
  CDR3 for alpha chain variable domain of TCR clone 14354 (TRAV21, TRAJ52)
CAVRPSPAGGTSYGKLTF

SEQ ID NO: 28708 - protein, 17 aa, Homo sapiens
  CDR3 for beta chain variable domain of TCR clone 14354 (TRBV13, TRBJ2-3)
CASSLYRVAGGRNTQYF

SEQ ID NO: 28709 - protein, 12 aa, Homo sapiens
  CDR3 for alpha chain variable domain of TCR clone 14355 (TRAV13-1, TRAJ27)
CAAHTNAGKSTF

SEQ ID NO: 28710 - protein, 14 aa, Homo sapiens
  CDR3 for beta chain variable domain of TCR clone 14355 (TRBV19, TRBJ2-2)
CASSGQGIAGEPFF

SEQ ID NO: 28711 - protein, 11 aa, Homo sapiens
  CDR3 for alpha chain variable domain of TCR clone 14356 (TRAV21, TRAJ34)
CAHYNTDKLIF

SEQ ID NO: 28712 - protein, 14 aa, Homo sapiens
  CDR3 for beta chain variable domain of TCR clone 14356 (TRBV7-2, TRBJ2-7)
CASSPKTSFYEQYF

SEQ ID NO: 28713 - protein, 11 aa, Homo sapiens
  CDR3 for alpha chain variable domain of TCR clone 14357 (TRAV21, TRAJ11)
CAVSGYSTLTF

SEQ ID NO: 28714 - protein, 11 aa, Homo sapiens
  CDR3 for beta chain variable domain of TCR clone 14357 (TRBV19, TRBJ1-1)
CASSIGSEAFF

SEQ ID NO: 28715 - protein, 14 aa, Homo sapiens
  CDR3 for alpha chain variable domain of TCR clone 14358 (TRAV27, TRAJ36)
CAGPPKRGANNLFF

SEQ ID NO: 28716 - protein, 15 aa, Homo sapiens
  CDR3 for beta chain variable domain of TCR clone 14358 (TRBV18, TRBJ2-7)
CPSSPASTPNYEQYF

SEQ ID NO: 28717 - protein, 11 aa, Homo sapiens
  CDR3 for alpha chain variable domain of TCR clone 14359 (TRAV1-1, TRAJ23)
CAVRQGGKLIS

SEQ ID NO: 28718 - protein, 20 aa, Homo sapiens
  CDR3 for beta chain variable domain of TCR clone 14359 (TRBV7-8, TRBJ2-2)
CASSHLFPGPTIHITGELFF

SEQ ID NO: 28719 - protein, 12 aa, Homo sapiens
  CDR3 for alpha chain variable domain of TCR clone 14360 (TRAV16, TRAJ10)
CSRTGGGNKLTF

SEQ ID NO: 28720 - protein, 15 aa, Homo sapiens
  CDR3 for beta chain variable domain of TCR clone 14360 (TRBV6-3, TRBJ2-7)
CASSSPGTVLYEQYF

SEQ ID NO: 28721 - protein, 15 aa, Homo sapiens
  CDR3 for alpha chain variable domain of TCR clone 14361 (TRAV12-3, TRAJ42)
CAMSGHGGSQGNLIF

SEQ ID NO: 28722 - protein, 14 aa, Homo sapiens
  CDR3 for beta chain variable domain of TCR clone 14361 (TRBV7-2, TRBJ1-1)
CASSFLTGTTEAFF

SEQ ID NO: 28723 - protein, 14 aa, Homo sapiens
  CDR3 for alpha chain variable domain of TCR clone 14362 (TRAV38-2/DV8, TRAJ32)
CAYRSGRATNKLIF

SEQ ID NO: 28724 - protein, 18 aa, Homo sapiens
  CDR3 for beta chain variable domain of TCR clone 14362 (TRBV23-1, TRBJ2-3)
CASSHTSGTRRSTDTQYF

SEQ ID NO: 28725 - protein, 14 aa, Homo sapiens
  CDR3 for alpha chain variable domain of TCR clone 14363 (TRAV13-2, TRAJ6)
CAGAGTGGSYIPTF

SEQ ID NO: 28726 - protein, 14 aa, Homo sapiens
  CDR3 for beta chain variable domain of TCR clone 14363 (TRBV7-7, TRBJ2-1)
CASSSGLASNEQFF

SEQ ID NO: 28727 - protein, 17 aa, Homo sapiens
  CDR3 for alpha chain variable domain of TCR clone 14364 (TRAV8-6, TRAJ8)
CAVKEGIENTGFQKLVF

SEQ ID NO: 28728 - protein, 12 aa, Homo sapiens
  CDR3 for beta chain variable domain of TCR clone 14364 (TRBV19, TRBJ1-4)
CASKDWPGRLFF

SEQ ID NO: 28729 - protein, 14 aa, Homo sapiens
  CDR3 for alpha chain variable domain of TCR clone 14365 (TRAV16, TRAJ33)
CALSAMDSNYQLIW

SEQ ID NO: 28730 - protein, 12 aa, Homo sapiens
  CDR3 for beta chain variable domain of TCR clone 14365 (TRBV5-1, TRBJ1-2)
CASSQDTYGDTF

SEQ ID NO: 28731 - protein, 18 aa, Homo sapiens
  CDR3 for alpha chain variable domain of TCR clone 14366 (TRAV13-1, TRAJ52)
CAAKNPNAGGTSYGKLTL

SEQ ID NO: 28732 - protein, 15 aa, Homo sapiens
  CDR3 for beta chain variable domain of TCR clone 14366 (TRBV6-1, TRBJ2-3)
CASSERGGITDTQYF

SEQ ID NO: 28733 - protein, 12 aa, Homo sapiens
  CDR3 for alpha chain variable domain of TCR clone 14367 (TRAV12-3, TRAJ17)
CAMRLTGNKLTF

SEQ ID NO: 28734 - protein, 15 aa, Homo sapiens
  CDR3 for beta chain variable domain of TCR clone 14367 (TRBV20-1, TRBJ2-7)
CSARDRVSGMDEQYF

SEQ ID NO: 28735 - protein, 14 aa, Homo sapiens
  CDR3 for alpha chain variable domain of TCR clone 14368 (TRAV38-1, TRAJ40)
CALRPTSGTYKYIF

SEQ ID NO: 28736 - protein, 14 aa, Homo sapiens
  CDR3 for beta chain variable domain of TCR clone 14368 (TRBV25-1, TRBJ1-1)
CASTHLGGNTGAFF

SEQ ID NO: 28737 - protein, 15 aa, Homo sapiens
  CDR3 for alpha chain variable domain of TCR clone 14369 (TRAV2, TRAJ9)
CAAEDRGTGGFKTIF

SEQ ID NO: 28738 - protein, 16 aa, Homo sapiens
  CDR3 for beta chain variable domain of TCR clone 14369 (TRBV24-1, TRBJ2-3)
CATSDPGTGATDTQYF

SEQ ID NO: 28739 - protein, 14 aa, Homo sapiens
  CDR3 for alpha chain variable domain of TCR clone 14370 (TRAV1-2, TRAJ16)
CAVNRFSDGQKLLF

SEQ ID NO: 28740 - protein, 15 aa, Homo sapiens
  CDR3 for beta chain variable domain of TCR clone 14370 (TRBV7-9, TRBJ1-6)
CASSSPGRGNSPLHC

SEQ ID NO: 28741 - protein, 12 aa, Homo sapiens
  CDR3 for alpha chain variable domain of TCR clone 14371 (TRAV21, TRAJ11)
CAATSGYSTLTL

SEQ ID NO: 28742 - protein, 14 aa, Homo sapiens
  CDR3 for beta chain variable domain of TCR clone 14371 (TRBV20-1, TRBJ2-7)
CSAPELAGVGEQYF

SEQ ID NO: 28743 - protein, 12 aa, Homo sapiens
  CDR3 for alpha chain variable domain of TCR clone 14372 (TRAV8-3, TRAJ20)
CAVGTNDYKLSF

SEQ ID NO: 28744 - protein, 16 aa, Homo sapiens
  CDR3 for beta chain variable domain of TCR clone 14372 (TRBV19, TRBJ2-2)
CASRSPGTGATGELFF

SEQ ID NO: 28745 - protein, 11 aa, Homo sapiens
  CDR3 for alpha chain variable domain of TCR clone 14373 (TRAV2, TRAJ13)
CASGGYQKVTF

SEQ ID NO: 28746 - protein, 16 aa, Homo sapiens
  CDR3 for beta chain variable domain of TCR clone 14373 (TRBV6-1, TRBJ2-5)
CASSETLDRGAETQYL

SEQ ID NO: 28747 - protein, 15 aa, Homo sapiens
  CDR3 for alpha chain variable domain of TCR clone 14374 (TRAV3, TRAJ20)
CAVRGIKLSDYKLSF

SEQ ID NO: 28748 - protein, 15 aa, Homo sapiens
  CDR3 for beta chain variable domain of TCR clone 14374 (TRBV7-9, TRBJ1-6)
CASSSPGRGNSPLHF

SEQ ID NO: 28749 - protein, 13 aa, Homo sapiens
  CDR3 for alpha chain variable domain of TCR clone 14375 (TRAV13-2, TRAJ48)
CAEMDFGHEKLTF

SEQ ID NO: 28750 - protein, 15 aa, Homo sapiens
  CDR3 for beta chain variable domain of TCR clone 14375 (TRBV7-9, TRBJ1-6)
CASSSPGRGNSPLHF

SEQ ID NO: 28751 - protein, 14 aa, Homo sapiens
  CDR3 for alpha chain variable domain of TCR clone 14376 (TRAV1-2, TRAJ8)
CAVREDTGFQKLVF

SEQ ID NO: 28752 - protein, 14 aa, Homo sapiens
  CDR3 for beta chain variable domain of TCR clone 14376 (TRBV28, TRBJ2-5)
CASTGAGGVETQYF

SEQ ID NO: 28753 - protein, 15 aa, Homo sapiens
  CDR3 for alpha chain variable domain of TCR clone 14377 (TRAV3, TRAJ5)
CAVRDLDTGRRGLTF

SEQ ID NO: 28754 - protein, 13 aa, Homo sapiens
  CDR3 for beta chain variable domain of TCR clone 14377 (TRBV12-4, TRBJ2-7)
CASSPTETYEQYF

SEQ ID NO: 28755 - protein, 14 aa, Homo sapiens
  CDR3 for alpha chain variable domain of TCR clone 14378 (TRAV16, TRAJ33)
CALSAMDSNYQLIW

SEQ ID NO: 28756 - protein, 13 aa, Homo sapiens
  CDR3 for beta chain variable domain of TCR clone 14378 (TRBV7-9, TRBJ1-2)
CASSLKQNYGYTF

SEQ ID NO: 28757 - protein, 17 aa, Homo sapiens
  CDR3 for alpha chain variable domain of TCR clone 14379 (TRAV23/DV6, TRAJ57)
CAASSTLSQGGSEQLVF

SEQ ID NO: 28758 - protein, 14 aa, Homo sapiens
  CDR3 for beta chain variable domain of TCR clone 14379 (TRBV25-1, TRBJ1-1)
CASTHLGGNTEAFF

SEQ ID NO: 28759 - protein, 15 aa, Homo sapiens
  CDR3 for alpha chain variable domain of TCR clone 14380 (TRAV8-3, TRAJ45)
CASSYSGGGADGLTF

SEQ ID NO: 28760 - protein, 13 aa, Homo sapiens
  CDR3 for beta chain variable domain of TCR clone 14380 (TRBV10-3, TRBJ2-7)
CASKLVVNYEQYF

SEQ ID NO: 28761 - protein, 15 aa, Homo sapiens
  CDR3 for alpha chain variable domain of TCR clone 14381 (TRAV35, TRAJ40)
CAGQLGTSGTYNYIF

SEQ ID NO: 28762 - protein, 14 aa, Homo sapiens
  CDR3 for beta chain variable domain of TCR clone 14381 (TRBV7-3, TRBJ2-1)
CASSLAGGTNEQFF

SEQ ID NO: 28763 - protein, 13 aa, Homo sapiens
  CDR3 for alpha chain variable domain of TCR clone 14382 (TRAV4, TRAJ22)
CLGGSGSARQLTF

SEQ ID NO: 28764 - protein, 14 aa, Homo sapiens
  CDR3 for beta chain variable domain of TCR clone 14382 (TRBV13, TRBJ2-5)
CASSLERVGETQYF

SEQ ID NO: 28765 - protein, 13 aa, Homo sapiens
  CDR3 for alpha chain variable domain of TCR clone 14383 (TRAV12-3, TRAJ54)
CAMTLQGTQKLVF

SEQ ID NO: 28766 - protein, 14 aa, Homo sapiens
  CDR3 for beta chain variable domain of TCR clone 14383 (TRBV4-1, TRBJ2-2)
CASSQAVNTGELFF

SEQ ID NO: 28767 - protein, 14 aa, Homo sapiens
  CDR3 for alpha chain variable domain of TCR clone 14384 (TRAV13-1, TRAJ44)
CAAKATGTASKLTF

SEQ ID NO: 28768 - protein, 12 aa, Homo sapiens
  CDR3 for beta chain variable domain of TCR clone 14384 (TRBV3-1, TRBJ2-1)
CASSQGSSGQFF

SEQ ID NO: 28769 - protein, 13 aa, Homo sapiens
  CDR3 for alpha chain variable domain of TCR clone 14385 (TRAV21, TRAJ27)
CAALNTNAGKSTF

SEQ ID NO: 28770 - protein, 14 aa, Homo sapiens
  CDR3 for beta chain variable domain of TCR clone 14385 (TRBV27, TRBJ1-1)
CASSLLSGLSEAFL

SEQ ID NO: 28771 - protein, 13 aa, Homo sapiens
  CDR3 for alpha chain variable domain of TCR clone 14386 (TRAV12-2, TRAJ52)
CAVGGTSYGKLTF

SEQ ID NO: 28772 - protein, 15 aa, Homo sapiens
  CDR3 for beta chain variable domain of TCR clone 14386 (TRBV5-4, TRBJ2-6)
CASSSGRTGANVLTF

SEQ ID NO: 28773 - protein, 14 aa, Homo sapiens
  CDR3 for alpha chain variable domain of TCR clone 14387 (TRAV21, TRAJ35)
CAVMPIGFGNALHC

SEQ ID NO: 28774 - protein, 12 aa, Homo sapiens
  CDR3 for beta chain variable domain of TCR clone 14387 (TRBV7-9, TRBJ2-7)
CASSIKREEQYF

SEQ ID NO: 28775 - protein, 13 aa, Homo sapiens
  CDR3 for alpha chain variable domain of TCR clone 14388 (TRAV3, TRAJ21)
CAVREPDFNKFYS

SEQ ID NO: 28776 - protein, 13 aa, Homo sapiens
  CDR3 for beta chain variable domain of TCR clone 14388 (TRBV9, TRBJ2-1)
CASSPSGGNEQFF

SEQ ID NO: 28777 - protein, 14 aa, Homo sapiens
  CDR3 for alpha chain variable domain of TCR clone 14389 (TRAV12-2, TRAJ17)
CAVLFKAAGNKLTF

SEQ ID NO: 28778 - protein, 17 aa, Homo sapiens
  CDR3 for beta chain variable domain of TCR clone 14389 (TRBV20-1, TRBJ2-2)
CSASGAGQGGLTGELFF

SEQ ID NO: 28779 - protein, 13 aa, Homo sapiens
  CDR3 for alpha chain variable domain of TCR clone 14390 (TRAV13-2, TRAJ48)
CSEMDFGNEKLTF

SEQ ID NO: 28780 - protein, 15 aa, Homo sapiens
  CDR3 for beta chain variable domain of TCR clone 14390 (TRBV7-9, TRBJ1-6)
CASSSPGRGNSPLHF

SEQ ID NO: 28781 - protein, 17 aa, Homo sapiens
  CDR3 for alpha chain variable domain of TCR clone 14391 (TRAV3, TRAJ6)
CAVRDGPRAGGSYIPTF

SEQ ID NO: 28782 - protein, 14 aa, Homo sapiens
  CDR3 for beta chain variable domain of TCR clone 14391 (TRBV7-2, TRBJ2-7)
CAISPKTSFYEQYF

SEQ ID NO: 28783 - protein, 11 aa, Homo sapiens
  CDR3 for alpha chain variable domain of TCR clone 14392 (TRAV1-1, TRAJ23)
CAVRQGGNLIF

SEQ ID NO: 28784 - protein, 20 aa, Homo sapiens
  CDR3 for beta chain variable domain of TCR clone 14392 (TRBV7-8, TRBJ2-2)
CASSHLFPGPTIHITGELFF

SEQ ID NO: 28785 - protein, 13 aa, Homo sapiens
  CDR3 for alpha chain variable domain of TCR clone 14393 (TRAV1-1, TRAJ9)
CAAKNTGGFKTIF

SEQ ID NO: 28786 - protein, 14 aa, Homo sapiens
  CDR3 for beta chain variable domain of TCR clone 14393 (TRBV20-1, TRBJ2-1)
CSAQRGGSANEQFF

SEQ ID NO: 28787 - protein, 18 aa, Homo sapiens
  CDR3 for alpha chain variable domain of TCR clone 14394 (TRAV21, TRAJ52)
CAVRPSPAGGTSYGKLTF

SEQ ID NO: 28788 - protein, 13 aa, Homo sapiens
  CDR3 for beta chain variable domain of TCR clone 14394 (TRBV12-4, TRBJ1-2)
CASSLRQGKGYTF

SEQ ID NO: 28789 - protein, 12 aa, Homo sapiens
  CDR3 for alpha chain variable domain of TCR clone 14395 (TRAV12-3, TRAJ17)
CAMTLTGNKLTF

SEQ ID NO: 28790 - protein, 14 aa, Homo sapiens
  CDR3 for beta chain variable domain of TCR clone 14395 (TRBV18, TRBJ2-5)
CASSPGVSQETQYF

SEQ ID NO: 28791 - protein, 13 aa, Homo sapiens
  CDR3 for alpha chain variable domain of TCR clone 14396 (TRAV2, TRAJ15)
CAVAPQAGTALIF

SEQ ID NO: 28792 - protein, 16 aa, Homo sapiens
  CDR3 for beta chain variable domain of TCR clone 14396 (TRBV5-1, TRBJ1-1)
CASSSGGNSLNTEAFF

SEQ ID NO: 28793 - protein, 14 aa, Homo sapiens
  CDR3 for alpha chain variable domain of TCR clone 14397 (TRAV29/DV5, TRAJ36)
CAARRKTGANNLFF

SEQ ID NO: 28794 - protein, 13 aa, Homo sapiens
  CDR3 for beta chain variable domain of TCR clone 14397 (TRBV20-1, TRBJ2-5)
CSARYTGEETQYF

SEQ ID NO: 28795 - protein, 12 aa, Homo sapiens
  CDR3 for alpha chain variable domain of TCR clone 14398 (TRAV8-3, TRAJ20)
CAVGANDYKLSF

SEQ ID NO: 28796 - protein, 16 aa, Homo sapiens
  CDR3 for beta chain variable domain of TCR clone 14398 (TRBV19, TRBJ2-2)
CANRSPGTGATGELFF

SEQ ID NO: 28797 - protein, 17 aa, Homo sapiens
  CDR3 for alpha chain variable domain of TCR clone 14399 (TRAV3, TRAJ6)
CAVRDGPRAGGSYIPTF

SEQ ID NO: 28798 - protein, 15 aa, Homo sapiens
  CDR3 for beta chain variable domain of TCR clone 14399 (TRBV7-9, TRBJ1-5)
CASSQGHQPNQPQHF

SEQ ID NO: 28799 - protein, 13 aa, Homo sapiens
  CDR3 for alpha chain variable domain of TCR clone 14400 (TRAV21, TRAJ20)
CAVGLRVDYKLSF

SEQ ID NO: 28800 - protein, 14 aa, Homo sapiens
  CDR3 for beta chain variable domain of TCR clone 14400 (TRBV25-1, TRBJ1-1)
CASTHLGGNTEAFF

SEQ ID NO: 28801 - protein, 17 aa, Homo sapiens
  CDR3 for alpha chain variable domain of TCR clone 14401 (TRAV38-2/DV8, TRAJ38)
CAYRSARGAGNNRKLIW

SEQ ID NO: 28802 - protein, 13 aa, Homo sapiens
  CDR3 for beta chain variable domain of TCR clone 14401 (TRBV6-5, TRBJ2-1)
CASRGRVGDEQFF

SEQ ID NO: 28803 - protein, 14 aa, Homo sapiens
  CDR3 for alpha chain variable domain of TCR clone 14402 (TRAV12-2, TRAJ40)
CAVKVPSGTYKYIF

SEQ ID NO: 28804 - protein, 14 aa, Homo sapiens
  CDR3 for beta chain variable domain of TCR clone 14402 (TRBV20-1, TRBJ1-1)
CSAQTRIGGTEAFF

SEQ ID NO: 28805 - protein, 13 aa, Homo sapiens
  CDR3 for alpha chain variable domain of TCR clone 14403 (TRAV29/DV5, TRAJ48)
CAASRVGNEKLTF

SEQ ID NO: 28806 - protein, 14 aa, Homo sapiens
  CDR3 for beta chain variable domain of TCR clone 14403 (TRBV11-3, TRBJ2-1)
CASSVGGGASEQFF

SEQ ID NO: 28807 - protein, 11 aa, Homo sapiens
  CDR3 for alpha chain variable domain of TCR clone 14404 (TRAV12-3, TRAJ27)
CAMANAGKSTF

SEQ ID NO: 28808 - protein, 19 aa, Homo sapiens
  CDR3 for beta chain variable domain of TCR clone 14404 (TRBV6-1, TRBJ2-5)
CASSEQGLAGGLYQETQYF

SEQ ID NO: 28809 - protein, 13 aa, Homo sapiens
  CDR3 for alpha chain variable domain of TCR clone 14405 (TRAV38-2/DV8, TRAJ34)
CAYRNYNTDKLIF

SEQ ID NO: 28810 - protein, 17 aa, Homo sapiens
  CDR3 for beta chain variable domain of TCR clone 14405 (TRBV13, TRBJ2-3)
CASSLSRVAGGRNTQYF

SEQ ID NO: 28811 - protein, 13 aa, Homo sapiens
  CDR3 for alpha chain variable domain of TCR clone 14406 (TRAV8-3, TRAJ36)
CAVGATGADNLFF

SEQ ID NO: 28812 - protein, 15 aa, Homo sapiens
  CDR3 for beta chain variable domain of TCR clone 14406 (TRBV7-2, TRBJ1-2)
CASSPRAGWNYGYTF

SEQ ID NO: 28813 - protein, 10 aa, Homo sapiens
  CDR3 for alpha chain variable domain of TCR clone 14407 (TRAV1-2, TRAJ31)
CVSEDARLMF

SEQ ID NO: 28814 - protein, 13 aa, Homo sapiens
  CDR3 for beta chain variable domain of TCR clone 14407 (TRBV4-2, TRBJ1-1)
CASSQAGNTEAFF

SEQ ID NO: 28815 - protein, 14 aa, Homo sapiens
  CDR3 for alpha chain variable domain of TCR clone 14408 (TRAV12-2, TRAJ45)
CAVNIGGGADGLTF

SEQ ID NO: 28816 - protein, 13 aa, Homo sapiens
  CDR3 for beta chain variable domain of TCR clone 14408 (TRBV19, TRBJ2-2)
CASGIWSTGGLFF

SEQ ID NO: 28817 - protein, 14 aa, Homo sapiens
  CDR3 for alpha chain variable domain of TCR clone 14409 (TRAV21, TRAJ35)
CAVMPIGFGNVLHC

SEQ ID NO: 28818 - protein, 13 aa, Homo sapiens
  CDR3 for beta chain variable domain of TCR clone 14409 (TRBV7-9, TRBJ1-2)
CASSLKQNYGYTF

SEQ ID NO: 28819 - protein, 14 aa, Homo sapiens
  CDR3 for alpha chain variable domain of TCR clone 14410 (TRAV17, TRAJ35)
CATDRPGFGNVLHF

SEQ ID NO: 28820 - protein, 19 aa, Homo sapiens
  CDR3 for beta chain variable domain of TCR clone 14410 (TRBV11-3, TRBJ2-2)
CASSTRPGAKTTNTGELFF

SEQ ID NO: 28821 - protein, 10 aa, Homo sapiens
  CDR3 for alpha chain variable domain of TCR clone 14411 (TRAV26-1, TRAJ22)
CIVSLNFFWF

SEQ ID NO: 28822 - protein, 15 aa, Homo sapiens
  CDR3 for beta chain variable domain of TCR clone 14411 (TRBV4-2, TRBJ1-2)
CASSQRTGGRDGYAF

SEQ ID NO: 28823 - protein, 14 aa, Homo sapiens
  CDR3 for alpha chain variable domain of TCR clone 14412 (TRAV1-1, TRAJ9)
CAVRGGNGGFKTIF

SEQ ID NO: 28824 - protein, 16 aa, Homo sapiens
  CDR3 for beta chain variable domain of TCR clone 14412 (TRBV4-3, TRBJ2-2)
CASSQDLSGGYGELFF

SEQ ID NO: 28825 - protein, 18 aa, Homo sapiens
  CDR3 for alpha chain variable domain of TCR clone 14413 (TRAV21, TRAJ52)
CAVRPSQAGGTSYGKLTF

SEQ ID NO: 28826 - protein, 17 aa, Homo sapiens
  CDR3 for beta chain variable domain of TCR clone 14413 (TRBV13, TRBJ2-3)
CASSLSRVAGGRNTQYF

SEQ ID NO: 28827 - protein, 14 aa, Homo sapiens
  CDR3 for alpha chain variable domain of TCR clone 14414 (TRAV29/DV5, TRAJ36)
CAARRKTGANNLFF

SEQ ID NO: 28828 - protein, 14 aa, Homo sapiens
  CDR3 for beta chain variable domain of TCR clone 14414 (TRBV28, TRBJ2-3)
CASSFVSGTDTQYF

SEQ ID NO: 28829 - protein, 13 aa, Homo sapiens
  CDR3 for alpha chain variable domain of TCR clone 14415 (TRAV8-3, TRAJ28)
CAVGAVVSYQLTF

SEQ ID NO: 28830 - protein, 14 aa, Homo sapiens
  CDR3 for beta chain variable domain of TCR clone 14415 (TRBV7-2, TRBJ2-7)
CASRSQGAAYEQYF

SEQ ID NO: 28831 - protein, 11 aa, Homo sapiens
  CDR3 for alpha chain variable domain of TCR clone 14416 (TRAV2, TRAJ13)
CASGGYQKVTF

SEQ ID NO: 28832 - protein, 15 aa, Homo sapiens
  CDR3 for beta chain variable domain of TCR clone 14416 (TRBV12-4, TRBJ2-5)
CASSPPTGLQETQYF

SEQ ID NO: 28833 - protein, 13 aa, Homo sapiens
  CDR3 for alpha chain variable domain of TCR clone 14417 (TRAV27, TRAJ3)
ASLRGRSASKIIF

SEQ ID NO: 28834 - protein, 15 aa, Homo sapiens
  CDR3 for beta chain variable domain of TCR clone 14417 (TRBV28, TRBJ1-3)
CASSMGWASGNTIYF

SEQ ID NO: 28835 - protein, 11 aa, Homo sapiens
  CDR3 for alpha chain variable domain of TCR clone 14418 (TRAV12-3, TRAJ27)
CAMANAGKSTF

SEQ ID NO: 28836 - protein, 13 aa, Homo sapiens
  CDR3 for beta chain variable domain of TCR clone 14418 (TRBV20-1, TRBJ1-1)
CSARVGGNTEAFL

SEQ ID NO: 28837 - protein, 13 aa, Homo sapiens
  CDR3 for alpha chain variable domain of TCR clone 14419 (TRAV38-1, TRAJ42)
CARWGGSQGDLIF

SEQ ID NO: 28838 - protein, 17 aa, Homo sapiens
  CDR3 for beta chain variable domain of TCR clone 14419 (TRBV20-1, TRBJ2-1)
CSARDPLAGVWDNEQFF

SEQ ID NO: 28839 - protein, 14 aa, Homo sapiens
  CDR3 for alpha chain variable domain of TCR clone 14420 (TRAV26-1, TRAJ38)
CIADNAGNNRKLIW

SEQ ID NO: 28840 - protein, 13 aa, Homo sapiens
  CDR3 for beta chain variable domain of TCR clone 14420 (TRBV20-1, TRBJ1-1)
CSARDGGNTEAFF

SEQ ID NO: 28841 - protein, 15 aa, Homo sapiens
  CDR3 for alpha chain variable domain of TCR clone 14421 (TRAV34, TRAJ38)
CGADFTPGNNRKLIW

SEQ ID NO: 28842 - protein, 16 aa, Homo sapiens
  CDR3 for beta chain variable domain of TCR clone 14421 (TRBV12-5, TRBJ2-5)
CASGPRTSGNQETQYF

SEQ ID NO: 28843 - protein, 13 aa, Homo sapiens
  CDR3 for alpha chain variable domain of TCR clone 14422 (TRAV21, TRAJ57)
CDVTQGGSEKLVF

SEQ ID NO: 28844 - protein, 16 aa, Homo sapiens
  CDR3 for beta chain variable domain of TCR clone 14422 (TRBV29-1, TRBJ2-7)
CSVEDAEDGTAYEQYF

SEQ ID NO: 28845 - protein, 18 aa, Homo sapiens
  CDR3 for alpha chain variable domain of TCR clone 14423 (TRAV1-1, TRAJ29)
CLLLLRCASNSGNTPLVF

SEQ ID NO: 28846 - protein, 14 aa, Homo sapiens
  CDR3 for beta chain variable domain of TCR clone 14423 (TRBV7-2, TRBJ2-3)
CASSFVMPTDTQYF

SEQ ID NO: 28847 - protein, 13 aa, Homo sapiens
  CDR3 for alpha chain variable domain of TCR clone 14424 (TRAV8-3, TRAJ43)
CAVGPDNNNDVRF

SEQ ID NO: 28848 - protein, 12 aa, Homo sapiens
  CDR3 for beta chain variable domain of TCR clone 14424 (TRBV7-2, TRBJ1-6)
CASSLSSSPLHF

SEQ ID NO: 28849 - protein, 13 aa, Homo sapiens
  CDR3 for alpha chain variable domain of TCR clone 14425 (TRAV27, TRAJ45)
CRSSGGGADGLTF

SEQ ID NO: 28850 - protein, 17 aa, Homo sapiens
  CDR3 for beta chain variable domain of TCR clone 14425 (TRBV11-2, TRBJ2-1)
CASSLHPPGVEYNEQFF

SEQ ID NO: 28851 - protein, 14 aa, Homo sapiens
  CDR3 for alpha chain variable domain of TCR clone 14426 (TRAV12-2, TRAJ17)
CAVLFKAAGNKLTF

SEQ ID NO: 28852 - protein, 15 aa, Homo sapiens
  CDR3 for beta chain variable domain of TCR clone 14426 (TRBV29-1, TRBJ2-6)
CSVGDRGSGANVLTF

SEQ ID NO: 28853 - protein, 12 aa, Homo sapiens
  CDR3 for alpha chain variable domain of TCR clone 14427 (TRAV1-1, TRAJ39)
CAVPVVGNMLTF

SEQ ID NO: 28854 - protein, 15 aa, Homo sapiens
  CDR3 for beta chain variable domain of TCR clone 14427 (TRBV19, TRBJ1-6)
CASSTQGAVGSTLHF

SEQ ID NO: 28855 - protein, 16 aa, Homo sapiens
  CDR3 for alpha chain variable domain of TCR clone 14428 (TRAV3, TRAJ10)
CAVRDMRAGGGNKLTF

SEQ ID NO: 28856 - protein, 14 aa, Homo sapiens
  CDR3 for beta chain variable domain of TCR clone 14428 (TRBV7-3, TRBJ2-1)
CASSLAGGTNEQFF

SEQ ID NO: 28857 - protein, 14 aa, Homo sapiens
  CDR3 for alpha chain variable domain of TCR clone 14429 (TRAV12-2, TRAJ40)
CAVEIPSGTYKYIF

SEQ ID NO: 28858 - protein, 14 aa, Homo sapiens
  CDR3 for beta chain variable domain of TCR clone 14429 (TRBV20-1, TRBJ1-1)
CSAQTRIGGTEAFF

SEQ ID NO: 28859 - protein, 17 aa, Homo sapiens
  CDR3 for alpha chain variable domain of TCR clone 14430 (TRAV3, TRAJ6)
CAVRDGPRAGGSDIPTF

SEQ ID NO: 28860 - protein, 20 aa, Homo sapiens
  CDR3 for beta chain variable domain of TCR clone 14430 (TRBV28, TRBJ2-1)
CASTPIGRSPGLAGGNEQFF

SEQ ID NO: 28861 - protein, 15 aa, Homo sapiens
  CDR3 for alpha chain variable domain of TCR clone 14431 (TRAV3, TRAJ20)
CAVRDIKLSDYKLSL

SEQ ID NO: 28862 - protein, 15 aa, Homo sapiens
  CDR3 for beta chain variable domain of TCR clone 14431 (TRBV7-9, TRBJ1-6)
CASSSPGRGNSPLHF

SEQ ID NO: 28863 - protein, 13 aa, Homo sapiens
  CDR3 for alpha chain variable domain of TCR clone 14432 (TRAV23/DV6, TRAJ15)
CAALPAGRNCPDL

SEQ ID NO: 28864 - protein, 14 aa, Homo sapiens
  CDR3 for beta chain variable domain of TCR clone 14432 (TRBV7-9, TRBJ1-2)
CASSRQGANYGYTF

SEQ ID NO: 28865 - protein, 14 aa, Homo sapiens
  CDR3 for alpha chain variable domain of TCR clone 14433 (TRAV26-1, TRAJ38)
CIADNAGNNRKLIW

SEQ ID NO: 28866 - protein, 13 aa, Homo sapiens
  CDR3 for beta chain variable domain of TCR clone 14433 (TRBV10-3, TRBJ2-7)
CASKLAVNYEQYF

SEQ ID NO: 28867 - protein, 15 aa, Homo sapiens
  CDR3 for alpha chain variable domain of TCR clone 14434 (TRAV21, TRAJ24)
CAARSSTDGWGKLQF

SEQ ID NO: 28868 - protein, 13 aa, Homo sapiens
  CDR3 for beta chain variable domain of TCR clone 14434 (TRBV11-2, TRBJ2-5)
CASSSTGEETQYF

SEQ ID NO: 28869 - protein, 13 aa, Homo sapiens
  CDR3 for alpha chain variable domain of TCR clone 14435 (TRAV3, TRAJ27)
CAVRPLGSGKSTF

SEQ ID NO: 28870 - protein, 13 aa, Homo sapiens
  CDR3 for beta chain variable domain of TCR clone 14435 (TRBV7-9, TRBJ2-3)
CASSPGSTDTQYF

SEQ ID NO: 28871 - protein, 14 aa, Homo sapiens
  CDR3 for alpha chain variable domain of TCR clone 14436 (TRAV26-1, TRAJ38)
CIADNAGNNRKLNW

SEQ ID NO: 28872 - protein, 13 aa, Homo sapiens
  CDR3 for beta chain variable domain of TCR clone 14436 (TRBV20-1, TRBJ1-1)
CSARGGGNTEAFF

SEQ ID NO: 28873 - protein, 14 aa, Homo sapiens
  CDR3 for alpha chain variable domain of TCR clone 14437 (TRAV12-3, TRAJ42)
CAMNYGGSQGNLIS

SEQ ID NO: 28874 - protein, 15 aa, Homo sapiens
  CDR3 for beta chain variable domain of TCR clone 14437 (TRBV5-7, TRBJ1-5)
CASSYGKLWDQPQHF

SEQ ID NO: 28875 - protein, 15 aa, Homo sapiens
  CDR3 for alpha chain variable domain of TCR clone 14438 (TRAV13-1, TRAJ50)
CAAKGSETSYDKVMF

SEQ ID NO: 28876 - protein, 13 aa, Homo sapiens
  CDR3 for beta chain variable domain of TCR clone 14438 (TRBV20-1, TRBJ2-3)
CSARAGGRDTQYF

SEQ ID NO: 28877 - protein, 18 aa, Homo sapiens
  CDR3 for alpha chain variable domain of TCR clone 14439 (TRAV29/DV5, TRAJ52)
CAAGFRGAGGTSYGKLTF

SEQ ID NO: 28878 - protein, 15 aa, Homo sapiens
  CDR3 for beta chain variable domain of TCR clone 14439 (TRBV20-1, TRBJ2-7)
CSARDRVSGMDEQYF

SEQ ID NO: 28879 - protein, 15 aa, Homo sapiens
  CDR3 for alpha chain variable domain of TCR clone 14440 (TRAV26-1, TRAJ29)
CIVRVAGSGNTPLVF

SEQ ID NO: 28880 - protein, 14 aa, Homo sapiens
  CDR3 for beta chain variable domain of TCR clone 14440 (TRBV18, TRBJ2-5)
CASSPGVSQETQYF

SEQ ID NO: 28881 - protein, 16 aa, Homo sapiens
  CDR3 for alpha chain variable domain of TCR clone 14441 (TRAV30, TRAJ24)
CGTEIVGADSWGKSQF

SEQ ID NO: 28882 - protein, 14 aa, Homo sapiens
  CDR3 for beta chain variable domain of TCR clone 14441 (TRBV12-5, TRBJ2-5)
CASGSRTHQETQYF

SEQ ID NO: 28883 - protein, 14 aa, Homo sapiens
  CDR3 for alpha chain variable domain of TCR clone 14442 (TRAV13-1, TRAJ44)
CAAKATGTASKLTF

SEQ ID NO: 28884 - protein, 17 aa, Homo sapiens
  CDR3 for beta chain variable domain of TCR clone 14442 (TRBV7-3, TRBJ2-3)
CASSLMKGMRGADTQYF

SEQ ID NO: 28885 - protein, 12 aa, Homo sapiens
  CDR3 for alpha chain variable domain of TCR clone 14443 (TRAV16, TRAJ56)
CAPTGASSKLTF

SEQ ID NO: 28886 - protein, 17 aa, Homo sapiens
  CDR3 for beta chain variable domain of TCR clone 14443 (TRBV27, TRBJ2-6)
CASSLTGFASGANVLTF

SEQ ID NO: 28887 - protein, 15 aa, Homo sapiens
  CDR3 for alpha chain variable domain of TCR clone 14444 (TRAV8-3, TRAJ41)
CAVGSNSNSGYALNF

SEQ ID NO: 28888 - protein, 17 aa, Homo sapiens
  CDR3 for beta chain variable domain of TCR clone 14444 (TRBV25-1, TRBJ2-1)
CASSAYGQGRGAYEQFF

SEQ ID NO: 28889 - protein, 15 aa, Homo sapiens
  CDR3 for alpha chain variable domain of TCR clone 14445 (TRAV26-1, TRAJ29)
CIVRVEGSGNTPLVF

SEQ ID NO: 28890 - protein, 15 aa, Homo sapiens
  CDR3 for beta chain variable domain of TCR clone 14445 (TRBV7-9, TRBJ1-5)
CASSQGHQTNQPQHF

SEQ ID NO: 28891 - protein, 14 aa, Homo sapiens
  CDR3 for alpha chain variable domain of TCR clone 14446 (TRAV38-1, TRAJ40)
CALRPTSGTYKYIF

SEQ ID NO: 28892 - protein, 14 aa, Homo sapiens
  CDR3 for beta chain variable domain of TCR clone 14446 (TRBV25-1, TRBJ1-1)
CASTHLGGNIEAFF

SEQ ID NO: 28893 - protein, 13 aa, Homo sapiens
  CDR3 for alpha chain variable domain of TCR clone 14447 (TRAV21, TRAJ20)
CAVGLRVDYKLSF

SEQ ID NO: 28894 - protein, 13 aa, Homo sapiens
  CDR3 for beta chain variable domain of TCR clone 14447 (TRBV7-9, TRBJ1-2)
CASSLKQNYGYTF

SEQ ID NO: 28895 - protein, 16 aa, Homo sapiens
  CDR3 for alpha chain variable domain of TCR clone 14448 (TRAV12-3, TRAJ53)
CAMSQGSGGSNYKLTF

SEQ ID NO: 28896 - protein, 11 aa, Homo sapiens
  CDR3 for beta chain variable domain of TCR clone 14448 (TRBV29-1, TRBJ2-5)
CSEDRTGTQYF

SEQ ID NO: 28897 - protein, 15 aa, Homo sapiens
  CDR3 for alpha chain variable domain of TCR clone 14449 (TRAV3, TRAJ22)
CAVRDRGGSAGQLTF

SEQ ID NO: 28898 - protein, 16 aa, Homo sapiens
  CDR3 for beta chain variable domain of TCR clone 14449 (TRBV5-4, TRBJ2-3)
CASQQPGAGGADTQYF

SEQ ID NO: 28899 - protein, 15 aa, Homo sapiens
  CDR3 for alpha chain variable domain of TCR clone 14450 (TRAV3, TRAJ20)
CAVRDIKLSDYKLSF

SEQ ID NO: 28900 - protein, 15 aa, Homo sapiens
  CDR3 for beta chain variable domain of TCR clone 14450 (TRBV7-9, TRBJ1-6)
CASSSPGRGNSPLYF

SEQ ID NO: 28901 - protein, 14 aa, Homo sapiens
  CDR3 for alpha chain variable domain of TCR clone 14451 (TRAV17, TRAJ22)
CATSSSGSARQLTF

SEQ ID NO: 28902 - protein, 15 aa, Homo sapiens
  CDR3 for beta chain variable domain of TCR clone 14451 (TRBV4-1, TRBJ2-5)
CASSQWDLYQETQYF

SEQ ID NO: 28903 - protein, 13 aa, Homo sapiens
  CDR3 for alpha chain variable domain of TCR clone 14452 (TRAV20, TRAJ37)
CAGCSSNTGNLIF

SEQ ID NO: 28904 - protein, 11 aa, Homo sapiens
  CDR3 for beta chain variable domain of TCR clone 14452 (TRBV12-4, TRBJ2-3)
CASTATDTQYF

SEQ ID NO: 28905 - protein, 14 aa, Homo sapiens
  CDR3 for alpha chain variable domain of TCR clone 14453 (TRAV1-2, TRAJ8)
CAVREDTGFQKLVF

SEQ ID NO: 28906 - protein, 15 aa, Homo sapiens
  CDR3 for beta chain variable domain of TCR clone 14453 (TRBV7-3, TRBJ2-1)
CASSPTGGGEVEQFF

SEQ ID NO: 28907 - protein, 15 aa, Homo sapiens
  CDR3 for alpha chain variable domain of TCR clone 14454 (TRAV26-2, TRAJ50)
CILRDEETSYDKVIF

SEQ ID NO: 28908 - protein, 17 aa, Homo sapiens
  CDR3 for beta chain variable domain of TCR clone 14454 (TRBV5-7, TRBJ1-6)
CASSLAPGDTYNSPLHF

SEQ ID NO: 28909 - protein, 16 aa, Homo sapiens
  CDR3 for alpha chain variable domain of TCR clone 14455 (TRAV30, TRAJ24)
CGTEFVDADSWGKFQF

SEQ ID NO: 28910 - protein, 14 aa, Homo sapiens
  CDR3 for beta chain variable domain of TCR clone 14455 (TRBV12-5, TRBJ2-5)
CASGSRTHQETQYF

SEQ ID NO: 28911 - protein, 17 aa, Homo sapiens
  CDR3 for alpha chain variable domain of TCR clone 14456 (TRAV3, TRAJ42)
CAVRGRDYGGSQGNLIF

SEQ ID NO: 28912 - protein, 15 aa, Homo sapiens
  CDR3 for beta chain variable domain of TCR clone 14456 (TRBV3-1, TRBJ2-1)
CASSQVVDDGEEQFF

SEQ ID NO: 28913 - protein, 15 aa, Homo sapiens
  CDR3 for alpha chain variable domain of TCR clone 14457 (TRAV21, TRAJ53)
CATLNSGGSNYKLTF

SEQ ID NO: 28914 - protein, 16 aa, Homo sapiens
  CDR3 for beta chain variable domain of TCR clone 14457 (TRBV12-5, TRBJ2-5)
CASGPRTSGNQETQYF

SEQ ID NO: 28915 - protein, 14 aa, Homo sapiens
  CDR3 for alpha chain variable domain of TCR clone 14458 (TRAV29/DV5, TRAJ36)
CAARRKTGANNLFF

SEQ ID NO: 28916 - protein, 16 aa, Homo sapiens
  CDR3 for beta chain variable domain of TCR clone 14458 (TRBV20-1, TRBJ1-4)
CSAPGQGLLTNEKLFF

SEQ ID NO: 28917 - protein, 12 aa, Homo sapiens
  CDR3 for alpha chain variable domain of TCR clone 14459 (TRAV2, TRAJ5)
CALDTGRRALTF

SEQ ID NO: 28918 - protein, 13 aa, Homo sapiens
  CDR3 for beta chain variable domain of TCR clone 14459 (TRBV15, TRBJ1-6)
CATSGGLNSPLHF

SEQ ID NO: 28919 - protein, 14 aa, Homo sapiens
  CDR3 for alpha chain variable domain of TCR clone 14460 (TRAV12-3, TRAJ10)
SHLPLTGGGNKLTF

SEQ ID NO: 28920 - protein, 14 aa, Homo sapiens
  CDR3 for beta chain variable domain of TCR clone 14460 (TRBV7-2, TRBJ1-1)
CASSFLTGTTEAFF

SEQ ID NO: 28921 - protein, 13 aa, Homo sapiens
  CDR3 for alpha chain variable domain of TCR clone 14461 (TRAV3, TRAJ27)
CALRPLGAGKSTF

SEQ ID NO: 28922 - protein, 13 aa, Homo sapiens
  CDR3 for beta chain variable domain of TCR clone 14461 (TRBV7-9, TRBJ2-3)
CASSPGSTDTQYF

SEQ ID NO: 28923 - protein, 12 aa, Homo sapiens
  CDR3 for alpha chain variable domain of TCR clone 14462 (TRAV1-2, TRAJ26)
CAVRYYGQNLVF

SEQ ID NO: 28924 - protein, 14 aa, Homo sapiens
  CDR3 for beta chain variable domain of TCR clone 14462 (TRBV11-1, TRBJ2-7)
CASSFRQGSYEQYF

SEQ ID NO: 28925 - protein, 14 aa, Homo sapiens
  CDR3 for alpha chain variable domain of TCR clone 14463 (TRAV13-1, TRAJ40)
CAASMTSGTYKYIL

SEQ ID NO: 28926 - protein, 15 aa, Homo sapiens
  CDR3 for beta chain variable domain of TCR clone 14463 (TRBV7-3, TRBJ2-1)
CASSPTGGGEVEQFF

SEQ ID NO: 28927 - protein, 12 aa, Homo sapiens
  CDR3 for alpha chain variable domain of TCR clone 14464 (TRAV2, TRAJ10)
CASTGGGNKLTF

SEQ ID NO: 28928 - protein, 11 aa, Homo sapiens
  CDR3 for beta chain variable domain of TCR clone 14464 (TRBV29-1, TRBJ2-5)
CSEDRTGTQYF

SEQ ID NO: 28929 - protein, 15 aa, Homo sapiens
  CDR3 for alpha chain variable domain of TCR clone 14465 (TRAV26-1, TRAJ22)
CIVRVSLWFCKATDL

SEQ ID NO: 28930 - protein, 13 aa, Homo sapiens
  CDR3 for beta chain variable domain of TCR clone 14465 (TRBV7-9, TRBJ1-2)
CASSLKQNYGYTF

SEQ ID NO: 28931 - protein, 16 aa, Homo sapiens
  CDR3 for alpha chain variable domain of TCR clone 14466 (TRAV22, TRAJ45)
CAVGRGKRGGADGLTF

SEQ ID NO: 28932 - protein, 13 aa, Homo sapiens
  CDR3 for beta chain variable domain of TCR clone 14466 (TRBV27, TRBJ1-1)
CASSLSIGAEAFF

SEQ ID NO: 28933 - protein, 13 aa, Homo sapiens
  CDR3 for alpha chain variable domain of TCR clone 14467 (TRAV16, TRAJ48)
CSPLNFGSEKLTF

SEQ ID NO: 28934 - protein, 11 aa, Homo sapiens
  CDR3 for beta chain variable domain of TCR clone 14467 (TRBV7-9, TRBJ2-3)
CASSPTDTQYF

SEQ ID NO: 28935 - protein, 14 aa, Homo sapiens
  CDR3 for alpha chain variable domain of TCR clone 14468 (TRAV21, TRAJ35)
CAVMPIGFGDVLHC

SEQ ID NO: 28936 - protein, 12 aa, Homo sapiens
  CDR3 for beta chain variable domain of TCR clone 14468 (TRBV7-9, TRBJ2-7)
CASSIKREEQYF

SEQ ID NO: 28937 - protein, 14 aa, Homo sapiens
  CDR3 for alpha chain variable domain of TCR clone 14469 (TRAV38-1, TRAJ40)
CALRPTSGTYKYIF

SEQ ID NO: 28938 - protein, 14 aa, Homo sapiens
  CDR3 for beta chain variable domain of TCR clone 14469 (TRBV25-1, TRBJ1-1)
CASTHLGGNTEASF

SEQ ID NO: 28939 - protein, 12 aa, Homo sapiens
  CDR3 for alpha chain variable domain of TCR clone 14470 (TRAV1-1, TRAJ8)
CAGGTGFQKLVF

SEQ ID NO: 28940 - protein, 15 aa, Homo sapiens
  CDR3 for beta chain variable domain of TCR clone 14470 (TRBV7-9, TRBJ1-4)
CASGRTGGFNEKLFF

SEQ ID NO: 28941 - protein, 13 aa, Homo sapiens
  CDR3 for alpha chain variable domain of TCR clone 14471 (TRAV8-3, TRAJ28)
CAVGAVGSYQLTF

SEQ ID NO: 28942 - protein, 14 aa, Homo sapiens
  CDR3 for beta chain variable domain of TCR clone 14471 (TRBV7-2, TRBJ2-7)
CASRSQGAAYEQYS

SEQ ID NO: 28943 - protein, 14 aa, Homo sapiens
  CDR3 for alpha chain variable domain of TCR clone 14472 (TRAV1-2, TRAJ8)
CAVREDTGFQKLIF

SEQ ID NO: 28944 - protein, 15 aa, Homo sapiens
  CDR3 for beta chain variable domain of TCR clone 14472 (TRBV6-3, TRBJ2-7)
CASSSPGTVFYEQYF

SEQ ID NO: 28945 - protein, 16 aa, Homo sapiens
  CDR3 for alpha chain variable domain of TCR clone 14473 (TRAV8-3, TRAJ44)
CAVGTLMTGTASKLTF

SEQ ID NO: 28946 - protein, 17 aa, Homo sapiens
  CDR3 for beta chain variable domain of TCR clone 14473 (TRBV11-2, TRBJ2-1)
CASSLYPPGVEYNEQFF

SEQ ID NO: 28947 - protein, 18 aa, Homo sapiens
  CDR3 for alpha chain variable domain of TCR clone 14474 (TRAV13-1, TRAJ52)
CAASKRSAGGTSYGKLTF

SEQ ID NO: 28948 - protein, 15 aa, Homo sapiens
  CDR3 for beta chain variable domain of TCR clone 14474 (TRBV20-1, TRBJ1-2)
CSATGGARGFYGYTF

SEQ ID NO: 28949 - protein, 14 aa, Homo sapiens
  CDR3 for alpha chain variable domain of TCR clone 14475 (TRAV12-2, TRAJ40)
CAVKIPSGNYKYIF

SEQ ID NO: 28950 - protein, 14 aa, Homo sapiens
  CDR3 for beta chain variable domain of TCR clone 14475 (TRBV20-1, TRBJ1-1)
CSAQTRIGGTEAFF

SEQ ID NO: 28951 - protein, 14 aa, Homo sapiens
  CDR3 for alpha chain variable domain of TCR clone 14476 (TRAV12-2, TRAJ17)
CAVLFKAAGNKLTF

SEQ ID NO: 28952 - protein, 14 aa, Homo sapiens
  CDR3 for beta chain variable domain of TCR clone 14476 (TRBV7-2, TRBJ2-7)
CASSPKTSFYEQYF

SEQ ID NO: 28953 - protein, 19 aa, Homo sapiens
  CDR3 for alpha chain variable domain of TCR clone 14477 (TRAV12-2, TRAJ52)
PVTQPPTSFRSTSYGKLTF

SEQ ID NO: 28954 - protein, 11 aa, Homo sapiens
  CDR3 for beta chain variable domain of TCR clone 14477 (TRBV11-2, TRBJ2-2)
CASSLPGELFF

SEQ ID NO: 28955 - protein, 14 aa, Homo sapiens
  CDR3 for alpha chain variable domain of TCR clone 14478 (TRAV38-1, TRAJ40)
CALSPTSGTYKYIF

SEQ ID NO: 28956 - protein, 14 aa, Homo sapiens
  CDR3 for beta chain variable domain of TCR clone 14478 (TRBV25-1, TRBJ1-1)
CASTHLGGNTEAFF

SEQ ID NO: 28957 - protein, 13 aa, Homo sapiens
  CDR3 for alpha chain variable domain of TCR clone 14479 (TRAV2, TRAJ15)
CAVASQAGTALIF

SEQ ID NO: 28958 - protein, 12 aa, Homo sapiens
  CDR3 for beta chain variable domain of TCR clone 14479 (TRBV11-2, TRBJ2-2)
CASSLGGGELFF

SEQ ID NO: 28959 - protein, 13 aa, Homo sapiens
  CDR3 for alpha chain variable domain of TCR clone 14480 (TRAV2, TRAJ40)
CAVVTSGTYKYIF

SEQ ID NO: 28960 - protein, 14 aa, Homo sapiens
  CDR3 for beta chain variable domain of TCR clone 14480 (TRBV19, TRBJ2-1)
CGSPTFVLSGEQFF

SEQ ID NO: 28961 - protein, 17 aa, Homo sapiens
  CDR3 for alpha chain variable domain of TCR clone 14481 (TRAV26-2, TRAJ42)
CILRDVGYGGSQGNRIF

SEQ ID NO: 28962 - protein, 16 aa, Homo sapiens
  CDR3 for beta chain variable domain of TCR clone 14481 (TRBV12-4, TRBJ2-7)
CASSLIGGTGTYEQYF

SEQ ID NO: 28963 - protein, 10 aa, Homo sapiens
  CDR3 for alpha chain variable domain of TCR clone 14482 (TRAV8-3, TRAJ43)
CAVALADIRF

SEQ ID NO: 28964 - protein, 14 aa, Homo sapiens
  CDR3 for beta chain variable domain of TCR clone 14482 (TRBV4-2, TRBJ2-1)
CASGLDRAYNEQFF

SEQ ID NO: 28965 - protein, 18 aa, Homo sapiens
  CDR3 for alpha chain variable domain of TCR clone 14483 (TRAV13-1, TRAJ52)
CAASKRSDGGTSYGKLTF

SEQ ID NO: 28966 - protein, 13 aa, Homo sapiens
  CDR3 for beta chain variable domain of TCR clone 14483 (TRBV12-4, TRBJ1-2)
CASSLRQGKGYTF

SEQ ID NO: 28967 - protein, 16 aa, Homo sapiens
  CDR3 for alpha chain variable domain of TCR clone 14484 (TRAV23/DV6, TRAJ9)
CAASIGGNTGGFKTIF

SEQ ID NO: 28968 - protein, 17 aa, Homo sapiens
  CDR3 for beta chain variable domain of TCR clone 14484 (TRBV11-2, TRBJ2-1)
CASSLYPPGVEYNEQFF

SEQ ID NO: 28969 - protein, 13 aa, Homo sapiens
  CDR3 for alpha chain variable domain of TCR clone 14485 (TRAV2, TRAJ40)
CAVVTSGTFKYIF

SEQ ID NO: 28970 - protein, 14 aa, Homo sapiens
  CDR3 for beta chain variable domain of TCR clone 14485 (TRBV19, TRBJ2-1)
CASPTFVLSGEQFF

SEQ ID NO: 28971 - protein, 22 aa, Homo sapiens
  CDR3 for alpha chain variable domain of TCR clone 14486 (TRAV24, TRAJ42)
CAFNGAKEISSLEKALNSLLNQ

SEQ ID NO: 28972 - protein, 12 aa, Homo sapiens
  CDR3 for beta chain variable domain of TCR clone 14486 (TRBV14, TRBJ2-7)
CASSSLKGEQYF

SEQ ID NO: 28973 - protein, 15 aa, Homo sapiens
  CDR3 for alpha chain variable domain of TCR clone 14487 (TRAV26-1, TRAJ38)
CIVRAEGGNNRKLIW

SEQ ID NO: 28974 - protein, 14 aa, Homo sapiens
  CDR3 for beta chain variable domain of TCR clone 14487 (TRBV7-6, TRBJ2-5)
CASSSPSGSEAQYF

SEQ ID NO: 28975 - protein, 15 aa, Homo sapiens
  CDR3 for alpha chain variable domain of TCR clone 14488 (TRAV35, TRAJ40)
CAGQLGTSGTYKYIF

SEQ ID NO: 28976 - protein, 14 aa, Homo sapiens
  CDR3 for beta chain variable domain of TCR clone 14488 (TRBV7-3, TRBJ2-1)
CAGSLAGGTNEQFF

SEQ ID NO: 28977 - protein, 13 aa, Homo sapiens
  CDR3 for alpha chain variable domain of TCR clone 14489 (TRAV1-1, TRAJ9)
CAAKNTGGFKTIF

SEQ ID NO: 28978 - protein, 12 aa, Homo sapiens
  CDR3 for beta chain variable domain of TCR clone 14489 (TRBV11-2, TRBJ2-2)
CAGSLGGGELFF

SEQ ID NO: 28979 - protein, 12 aa, Homo sapiens
  CDR3 for alpha chain variable domain of TCR clone 14490 (TRAV12-3, TRAJ17)
CAMTLTGNKLTF

SEQ ID NO: 28980 - protein, 15 aa, Homo sapiens
  CDR3 for beta chain variable domain of TCR clone 14490 (TRBV20-1, TRBJ2-7)
CSARDRVSGMDEQYI

SEQ ID NO: 28981 - protein, 14 aa, Homo sapiens
  CDR3 for alpha chain variable domain of TCR clone 14491 (TRAV13-1, TRAJ35)
CAASKGGFGNVLHC

SEQ ID NO: 28982 - protein, 21 aa, Homo sapiens
  CDR3 for beta chain variable domain of TCR clone 14491 (TRBV7-3, TRBJ1-1)
GGTQPCISVPAARIGGAEAFF

SEQ ID NO: 28983 - protein, 19 aa, Homo sapiens
  CDR3 for alpha chain variable domain of TCR clone 14492 (TRAV12-1, TRAJ31)
SLLIRDSKLSDSATPRLMF

SEQ ID NO: 28984 - protein, 14 aa, Homo sapiens
  CDR3 for beta chain variable domain of TCR clone 14492 (TRBV6-3, TRBJ2-1)
CASSSGQFYNEQFF

SEQ ID NO: 28985 - protein, 15 aa, Homo sapiens
  CDR3 for alpha chain variable domain of TCR clone 14493 (TRAV3, TRAJ5)
CAVRARKTGRRALTF

SEQ ID NO: 28986 - protein, 15 aa, Homo sapiens
  CDR3 for beta chain variable domain of TCR clone 14493 (TRBV7-8, TRBJ2-1)
CASSLADSLYNEQFF

SEQ ID NO: 28987 - protein, 14 aa, Homo sapiens
  CDR3 for alpha chain variable domain of TCR clone 14494 (TRAV35, TRAJ22)
CAGLRPGSARQPTF

SEQ ID NO: 28988 - protein, 15 aa, Homo sapiens
  CDR3 for beta chain variable domain of TCR clone 14494 (TRBV12-4, TRBJ2-5)
CASSPPTGLQETQYF

SEQ ID NO: 28989 - protein, 16 aa, Homo sapiens
  CDR3 for alpha chain variable domain of TCR clone 14495 (TRAV14/DV4, TRAJ54)
CAMREGRIQGAQKLVF

SEQ ID NO: 28990 - protein, 15 aa, Homo sapiens
  CDR3 for beta chain variable domain of TCR clone 14495 (TRBV7-2, TRBJ2-2)
CASRRPGQNTGELFF

SEQ ID NO: 28991 - protein, 15 aa, Homo sapiens
  CDR3 for alpha chain variable domain of TCR clone 14496 (TRAV20, TRAJ56)
CAVLAYTGANSKLTF

SEQ ID NO: 28992 - protein, 13 aa, Homo sapiens
  CDR3 for beta chain variable domain of TCR clone 14496 (TRBV9, TRBJ1-2)
CASSVGGGYGYTF

SEQ ID NO: 28993 - protein, 16 aa, Homo sapiens
  CDR3 for alpha chain variable domain of TCR clone 14497 (TRAV12-3, TRAJ53)
CAMSPGSGGSTYKLTF

SEQ ID NO: 28994 - protein, 11 aa, Homo sapiens
  CDR3 for beta chain variable domain of TCR clone 14497 (TRBV29-1, TRBJ2-5)
CSEDRTGTQYF

SEQ ID NO: 28995 - protein, 13 aa, Homo sapiens
  CDR3 for alpha chain variable domain of TCR clone 14498 (TRAV12-3, TRAJ33)
CAMSVNSNYQLVW

SEQ ID NO: 28996 - protein, 13 aa, Homo sapiens
  CDR3 for beta chain variable domain of TCR clone 14498 (TRBV7-2, TRBJ2-2)
CASSLAVTGELFF

SEQ ID NO: 28997 - protein, 17 aa, Homo sapiens
  CDR3 for alpha chain variable domain of TCR clone 14499 (TRAV1-1, TRAJ28)
CAVDPAYSGAGSYQLTF

SEQ ID NO: 28998 - protein, 14 aa, Homo sapiens
  CDR3 for beta chain variable domain of TCR clone 14499 (TRBV19, TRBJ2-1)
CASPTFVLSGKQFF

SEQ ID NO: 28999 - protein, 13 aa, Homo sapiens
  CDR3 for alpha chain variable domain of TCR clone 14500 (TRAV13-2, TRAJ30)
CAETSNRDDKIIF

SEQ ID NO: 29000 - protein, 15 aa, Homo sapiens
  CDR3 for beta chain variable domain of TCR clone 14500 (TRBV7-2, TRBJ2-7)
CASSLAVGQVYEQYF

SEQ ID NO: 29001 - protein, 16 aa, Homo sapiens
  CDR3 for alpha chain variable domain of TCR clone 14501 (TRAV12-3, TRAJ53)
CAMSPGSGGSNYKLTF

SEQ ID NO: 29002 - protein, 17 aa, Homo sapiens
  CDR3 for beta chain variable domain of TCR clone 14501 (TRBV13, TRBJ2-3)
CASSLSRVAGGRNTQYF

SEQ ID NO: 29003 - protein, 16 aa, Homo sapiens
  CDR3 for alpha chain variable domain of TCR clone 14502 (TRAV1-2, TRAJ10)
CAVRGVLTGGGSKLTF

SEQ ID NO: 29004 - protein, 12 aa, Homo sapiens
  CDR3 for beta chain variable domain of TCR clone 14502 (TRBV7-8, TRBJ2-7)
CASSLGDREQYF

SEQ ID NO: 29005 - protein, 15 aa, Homo sapiens
  CDR3 for alpha chain variable domain of TCR clone 14503 (TRAV25, TRAJ52)
YAGRPGGTSYGKLTF

SEQ ID NO: 29006 - protein, 17 aa, Homo sapiens
  CDR3 for beta chain variable domain of TCR clone 14503 (TRBV7-8, TRBJ2-6)
CASSAGTGGAGANVLTF

SEQ ID NO: 29007 - protein, 13 aa, Homo sapiens
  CDR3 for alpha chain variable domain of TCR clone 14504 (TRAV27, TRAJ45)
CRSSGGGADGLTF

SEQ ID NO: 29008 - protein, 17 aa, Homo sapiens
  CDR3 for beta chain variable domain of TCR clone 14504 (TRBV11-2, TRBJ2-1)
CDSSLYPPGVEYNEQFF

SEQ ID NO: 29009 - protein, 14 aa, Homo sapiens
  CDR3 for alpha chain variable domain of TCR clone 14505 (TRAV13-1, TRAJ35)
CAASKGCFGNVLHC

SEQ ID NO: 29010 - protein, 13 aa, Homo sapiens
  CDR3 for beta chain variable domain of TCR clone 14505 (TRBV7-3, TRBJ1-1)
CASSQDWGAEAFF

SEQ ID NO: 29011 - protein, 16 aa, Homo sapiens
  CDR3 for alpha chain variable domain of TCR clone 14506 (TRAV3, TRAJ21)
CAVRGIERGNFNKFYF

SEQ ID NO: 29012 - protein, 16 aa, Homo sapiens
  CDR3 for beta chain variable domain of TCR clone 14506 (TRBV12-4, TRBJ1-5)
CASSRPVGGSNQPQHF

SEQ ID NO: 29013 - protein, 16 aa, Homo sapiens
  CDR3 for alpha chain variable domain of TCR clone 14507 (TRAV21, TRAJ45)
CAVSWGSGGGADGLTF

SEQ ID NO: 29014 - protein, 14 aa, Homo sapiens
  CDR3 for beta chain variable domain of TCR clone 14507 (TRBV4-2, TRBJ1-2)
CASSPGGSNYGCTF

SEQ ID NO: 29015 - protein, 16 aa, Homo sapiens
  CDR3 for alpha chain variable domain of TCR clone 14508 (TRAV4, TRAJ18)
CCVLLLGGSTLGRLYF

SEQ ID NO: 29016 - protein, 12 aa, Homo sapiens
  CDR3 for beta chain variable domain of TCR clone 14508 (TRBV6-3, TRBJ2-7)
CASSLTPYEQYF

SEQ ID NO: 29017 - protein, 16 aa, Homo sapiens
  CDR3 for alpha chain variable domain of TCR clone 14509 (TRAV12-3, TRAJ53)
CAMSPGRGGSNYKLTF

SEQ ID NO: 29018 - protein, 16 aa, Homo sapiens
  CDR3 for beta chain variable domain of TCR clone 14509 (TRBV4-2, TRBJ1-1)
CASSQAGFGMNTEAFF

SEQ ID NO: 29019 - protein, 13 aa, Homo sapiens
  CDR3 for alpha chain variable domain of TCR clone 14510 (TRAV1-1, TRAJ9)
CAAKNTGGFKTIF

SEQ ID NO: 29020 - protein, 14 aa, Homo sapiens
  CDR3 for beta chain variable domain of TCR clone 14510 (TRBV20-1, TRBJ2-1)
CSAQIGGSASEQFF

SEQ ID NO: 29021 - protein, 15 aa, Homo sapiens
  CDR3 for alpha chain variable domain of TCR clone 14511 (TRAV2, TRAJ15)
CAVEDRGQAGTALSF

SEQ ID NO: 29022 - protein, 13 aa, Homo sapiens
  CDR3 for beta chain variable domain of TCR clone 14511 (TRBV10-2, TRBJ2-7)
CASGASGGYEQYF

SEQ ID NO: 29023 - protein, 15 aa, Homo sapiens
  CDR3 for alpha chain variable domain of TCR clone 14512 (TRAV17, TRAJ57)
CATCPSQGGSEKLVF

SEQ ID NO: 29024 - protein, 16 aa, Homo sapiens
  CDR3 for beta chain variable domain of TCR clone 14512 (TRBV12-4, TRBJ1-5)
CASSRPVGGSNQPQHF

SEQ ID NO: 29025 - protein, 20 aa, Homo sapiens
  CDR3 for alpha chain variable domain of TCR clone 14513 (TRAV12-1, TRAJ42)
SSVIQPPTSVTGGSQGNLIF

SEQ ID NO: 29026 - protein, 18 aa, Homo sapiens
  CDR3 for beta chain variable domain of TCR clone 14513 (TRBV11-2, TRBJ2-3)
CASSLGGASRGAPNTQYF

SEQ ID NO: 29027 - protein, 14 aa, Homo sapiens
  CDR3 for alpha chain variable domain of TCR clone 14514 (TRAV13-2, TRAJ32)
CAENYGGATNKLIF

SEQ ID NO: 29028 - protein, 15 aa, Homo sapiens
  CDR3 for beta chain variable domain of TCR clone 14514 (TRBV6-1, TRBJ2-5)
CASSEGWGIQETQYF

SEQ ID NO: 29029 - protein, 15 aa, Homo sapiens
  CDR3 for alpha chain variable domain of TCR clone 14515 (TRAV8-3, TRAJ11)
CAVGLLNSGYSTPTF

SEQ ID NO: 29030 - protein, 16 aa, Homo sapiens
  CDR3 for beta chain variable domain of TCR clone 14515 (TRBV7-9, TRBJ1-2)
CASSLGFSSGEDGYTF

SEQ ID NO: 29031 - protein, 13 aa, Homo sapiens
  CDR3 for alpha chain variable domain of TCR clone 14516 (TRAV13-1, TRAJ10)
CAATAGRGNKLTF

SEQ ID NO: 29032 - protein, 14 aa, Homo sapiens
  CDR3 for beta chain variable domain of TCR clone 14516 (TRBV12-4, TRBJ2-7)
CASSPAGLKYEQYF

SEQ ID NO: 29033 - protein, 14 aa, Homo sapiens
  CDR3 for alpha chain variable domain of TCR clone 14517 (TRAV12-1, TRAJ17)
CVVNYKAAGTKLTF

SEQ ID NO: 29034 - protein, 17 aa, Homo sapiens
  CDR3 for beta chain variable domain of TCR clone 14517 (TRBV20-1, TRBJ2-1)
CSASSSGLAGSYNEQFF

SEQ ID NO: 29035 - protein, 15 aa, Homo sapiens
  CDR3 for alpha chain variable domain of TCR clone 14518 (TRAV12-1, TRAJ4)
CVVTPWMGGYNKLIF

SEQ ID NO: 29036 - protein, 18 aa, Homo sapiens
  CDR3 for beta chain variable domain of TCR clone 14518 (TRBV11-2, TRBJ2-3)
CASSVRTSGSKKTDTQYF

SEQ ID NO: 29037 - protein, 12 aa, Homo sapiens
  CDR3 for alpha chain variable domain of TCR clone 14519 (TRAV27, TRAJ35)
CAGADFGNVLHC

SEQ ID NO: 29038 - protein, 15 aa, Homo sapiens
  CDR3 for beta chain variable domain of TCR clone 14519 (TRBV20-1, TRBJ2-7)
CSARDRVSGMDEQYF

SEQ ID NO: 29039 - protein, 13 aa, Homo sapiens
  CDR3 for alpha chain variable domain of TCR clone 14520 (TRAV27, TRAJ45)
CRSSGGGADGLTF

SEQ ID NO: 29040 - protein, 17 aa, Homo sapiens
  CDR3 for beta chain variable domain of TCR clone 14520 (TRBV11-2, TRBJ2-1)
CAGSLYPPGVEYNEQFF

SEQ ID NO: 29041 - protein, 17 aa, Homo sapiens
  CDR3 for alpha chain variable domain of TCR clone 14521 (TRAV3, TRAJ6)
CAVRDGPRAGGSYIPTF

SEQ ID NO: 29042 - protein, 14 aa, Homo sapiens
  CDR3 for beta chain variable domain of TCR clone 14521 (TRBV7-6, TRBJ2-3)
CASSLGTVTDTQYF

SEQ ID NO: 29043 - protein, 16 aa, Homo sapiens
  CDR3 for alpha chain variable domain of TCR clone 14522 (TRAV1-1, TRAJ8)
CLLLLRGGTGFQKLVF

SEQ ID NO: 29044 - protein, 15 aa, Homo sapiens
  CDR3 for beta chain variable domain of TCR clone 14522 (TRBV7-9, TRBJ1-4)
CASSRTGGFNEKLFF

SEQ ID NO: 29045 - protein, 23 aa, Homo sapiens
  CDR3 for alpha chain variable domain of TCR clone 14523 (TRAV26-1, TRAJ38)
CIADNAGNNHIQNPDPAVDQLRD

SEQ ID NO: 29046 - protein, 13 aa, Homo sapiens
  CDR3 for beta chain variable domain of TCR clone 14523 (TRBV20-1, TRBJ1-1)
CSARGGGNTEAFF

SEQ ID NO: 29047 - protein, 14 aa, Homo sapiens
  CDR3 for alpha chain variable domain of TCR clone 14524 (TRAV20, TRAJ44)
CAVQDTGTASKLTF

SEQ ID NO: 29048 - protein, 13 aa, Homo sapiens
  CDR3 for beta chain variable domain of TCR clone 14524 (TRBV29-1, TRBJ1-3)
CSAGTGRGNTMYF

SEQ ID NO: 29049 - protein, 13 aa, Homo sapiens
  CDR3 for alpha chain variable domain of TCR clone 14525 (TRAV12-3, TRAJ9)
CAMRNTGGFKTIF

SEQ ID NO: 29050 - protein, 14 aa, Homo sapiens
  CDR3 for beta chain variable domain of TCR clone 14525 (TRBV11-2, TRBJ2-7)
CASSSAGEGYEQYF

SEQ ID NO: 29051 - protein, 14 aa, Homo sapiens
  CDR3 for alpha chain variable domain of TCR clone 14526 (TRAV12-2, TRAJ44)
CAVNPAGTASKLTF

SEQ ID NO: 29052 - protein, 14 aa, Homo sapiens
  CDR3 for beta chain variable domain of TCR clone 14526 (TRBV20-1, TRBJ1-6)
SAVPPLGVGSPLHF

SEQ ID NO: 29053 - protein, 12 aa, Homo sapiens
  CDR3 for alpha chain variable domain of TCR clone 14527 (TRAV13-1, TRAJ21)
CAAKEGSNKFYF

SEQ ID NO: 29054 - protein, 17 aa, Homo sapiens
  CDR3 for beta chain variable domain of TCR clone 14527 (TRBV19, TRBJ2-7)
CASSISFYDSYPYEQYF

SEQ ID NO: 29055 - protein, 15 aa, Homo sapiens
  CDR3 for alpha chain variable domain of TCR clone 14528 (TRAV14/DV4, TRAJ10)
CAMRELTGGGNKLTF

SEQ ID NO: 29056 - protein, 15 aa, Homo sapiens
  CDR3 for beta chain variable domain of TCR clone 14528 (TRBV3-1, TRBJ2-5)
CASSANLGGPETQYF

SEQ ID NO: 29057 - protein, 11 aa, Homo sapiens
  CDR3 for alpha chain variable domain of TCR clone 14529 (TRAV3, TRAJ21)
CAVGNFNKFYF

SEQ ID NO: 29058 - protein, 16 aa, Homo sapiens
  CDR3 for beta chain variable domain of TCR clone 14529 (TRBV19, TRBJ2-1)
CASSKAGPSSYIEQFF

SEQ ID NO: 29059 - protein, 11 aa, Homo sapiens
  CDR3 for alpha chain variable domain of TCR clone 14530 (TRAV12-2, TRAJ49)
CALQGGNQFYF

SEQ ID NO: 29060 - protein, 16 aa, Homo sapiens
  CDR3 for beta chain variable domain of TCR clone 14530 (TRBV20-1, TRBJ1-4)
CSAPGQGLLTNEKLFF

SEQ ID NO: 29061 - protein, 13 aa, Homo sapiens
  CDR3 for alpha chain variable domain of TCR clone 14531 (TRAV2, TRAJ29)
CAAQNSGNTPLVF

SEQ ID NO: 29062 - protein, 14 aa, Homo sapiens
  CDR3 for beta chain variable domain of TCR clone 14531 (TRBV7-9, TRBJ2-4)
CASSLAMGGNSQYF

SEQ ID NO: 29063 - protein, 13 aa, Homo sapiens
  CDR3 for alpha chain variable domain of TCR clone 14532 (TRAV13-2, TRAJ48)
CAEMDFGNEKLTF

SEQ ID NO: 29064 - protein, 14 aa, Homo sapiens
  CDR3 for beta chain variable domain of TCR clone 14532 (TRBV12-5, TRBJ2-5)
CASGSRTHQETQYF

SEQ ID NO: 29065 - protein, 23 aa, Homo sapiens
  CDR3 for alpha chain variable domain of TCR clone 14533 (TRAV1-1, TRAJ11)
PLQELQMKDSASYFCAGYSTLTF

SEQ ID NO: 29066 - protein, 15 aa, Homo sapiens
  CDR3 for beta chain variable domain of TCR clone 14533 (TRBV6-5, TRBJ2-1)
CASRGDFDSYNEQFF

SEQ ID NO: 29067 - protein, 15 aa, Homo sapiens
  CDR3 for alpha chain variable domain of TCR clone 14534 (TRAV8-3, TRAJ27)
CAVGPSKTNAGTSTF

SEQ ID NO: 29068 - protein, 15 aa, Homo sapiens
  CDR3 for beta chain variable domain of TCR clone 14534 (TRBV7-2, TRBJ2-1)
CASSSGLAGGNEQFF

SEQ ID NO: 29069 - protein, 13 aa, Homo sapiens
  CDR3 for alpha chain variable domain of TCR clone 14535 (TRAV13-2, TRAJ53)
CAENMGSNYKLTF

SEQ ID NO: 29070 - protein, 14 aa, Homo sapiens
  CDR3 for beta chain variable domain of TCR clone 14535 (TRBV19, TRBJ2-1)
CASPTFVLSGEQFF

SEQ ID NO: 29071 - protein, 12 aa, Homo sapiens
  CDR3 for alpha chain variable domain of TCR clone 14536 (TRAV8-3, TRAJ26)
CAGDNYGQNFVF

SEQ ID NO: 29072 - protein, 13 aa, Homo sapiens
  CDR3 for beta chain variable domain of TCR clone 14536 (TRBV20-1, TRBJ2-5)
CSARGDYQETQHF

SEQ ID NO: 29073 - protein, 13 aa, Homo sapiens
  CDR3 for alpha chain variable domain of TCR clone 14537 (TRAV35, TRAJ42)
CAGLPGSQGNLIF

SEQ ID NO: 29074 - protein, 13 aa, Homo sapiens
  CDR3 for beta chain variable domain of TCR clone 14537 (TRBV29-1, TRBJ2-1)
CSVEGGRVNEQFF

SEQ ID NO: 29075 - protein, 14 aa, Homo sapiens
  CDR3 for alpha chain variable domain of TCR clone 14538 (TRAV21, TRAJ35)
CAVVPIGFGNVLHC

SEQ ID NO: 29076 - protein, 12 aa, Homo sapiens
  CDR3 for beta chain variable domain of TCR clone 14538 (TRBV7-9, TRBJ2-7)
CASSIKREEQYF

SEQ ID NO: 29077 - protein, 16 aa, Homo sapiens
  CDR3 for alpha chain variable domain of TCR clone 14539 (TRAV23/DV6, TRAJ9)
CAASIGGNTGGFKTIF

SEQ ID NO: 29078 - protein, 16 aa, Homo sapiens
  CDR3 for beta chain variable domain of TCR clone 14539 (TRBV27, TRBJ2-2)
CASSLRPGGAPGELFF

SEQ ID NO: 29079 - protein, 13 aa, Homo sapiens
  CDR3 for alpha chain variable domain of TCR clone 14540 (TRAV13-1, TRAJ49)
CAAIWALGNQFYF

SEQ ID NO: 29080 - protein, 12 aa, Homo sapiens
  CDR3 for beta chain variable domain of TCR clone 14540 (TRBV7-8, TRBJ2-7)
CASSLGDREQYF

SEQ ID NO: 29081 - protein, 11 aa, Homo sapiens
  CDR3 for alpha chain variable domain of TCR clone 14541 (TRAV21, TRAJ11)
CAVNGYSTPTF

SEQ ID NO: 29082 - protein, 11 aa, Homo sapiens
  CDR3 for beta chain variable domain of TCR clone 14541 (TRBV19, TRBJ1-1)
CASSIGSEAFF

SEQ ID NO: 29083 - protein, 14 aa, Homo sapiens
  CDR3 for alpha chain variable domain of TCR clone 14542 (TRAV1-2, TRAJ33)
CAVRAPDSNYQLIW

SEQ ID NO: 29084 - protein, 12 aa, Homo sapiens
  CDR3 for beta chain variable domain of TCR clone 14542 (TRBV18, TRBJ2-1)
CASSSDEDEQFF

SEQ ID NO: 29085 - protein, 15 aa, Homo sapiens
  CDR3 for alpha chain variable domain of TCR clone 14543 (TRAV17, TRAJ57)
CATGPSQGGSEKLVS

SEQ ID NO: 29086 - protein, 16 aa, Homo sapiens
  CDR3 for beta chain variable domain of TCR clone 14543 (TRBV12-4, TRBJ1-5)
CASSRPVGGSNQPQHF

SEQ ID NO: 29087 - protein, 16 aa, Homo sapiens
  CDR3 for alpha chain variable domain of TCR clone 14544 (TRAV13-1, TRAJ38)
CAASTSNAGNNRKLIW

SEQ ID NO: 29088 - protein, 16 aa, Homo sapiens
  CDR3 for beta chain variable domain of TCR clone 14544 (TRBV12-4, TRBJ1-5)
CASSSGPRGSNQPQHF

SEQ ID NO: 29089 - protein, 12 aa, Homo sapiens
  CDR3 for alpha chain variable domain of TCR clone 14545 (TRAV21, TRAJ33)
CAKMDSNYRLIW

SEQ ID NO: 29090 - protein, 14 aa, Homo sapiens
  CDR3 for beta chain variable domain of TCR clone 14545 (TRBV2, TRBJ2-7)
CASSLTSGGYEQYF

SEQ ID NO: 29091 - protein, 15 aa, Homo sapiens
  CDR3 for alpha chain variable domain of TCR clone 14546 (TRAV26-1, TRAJ44)
CIVRIDTGTASKLTF

SEQ ID NO: 29092 - protein, 15 aa, Homo sapiens
  CDR3 for beta chain variable domain of TCR clone 14546 (TRBV7-6, TRBJ2-1)
CASSSLAGEGNEQFF

SEQ ID NO: 29093 - protein, 18 aa, Homo sapiens
  CDR3 for alpha chain variable domain of TCR clone 14547 (TRAV21, TRAJ52)
CAVRPSPAGGTSYGKLTF

SEQ ID NO: 29094 - protein, 11 aa, Homo sapiens
  CDR3 for beta chain variable domain of TCR clone 14547 (TRBV29-1, TRBJ2-5)
CSEDRTGTQYF

SEQ ID NO: 29095 - protein, 10 aa, Homo sapiens
  CDR3 for alpha chain variable domain of TCR clone 14548 (TRAV16, TRAJ22)
SAMYLRQLTF

SEQ ID NO: 29096 - protein, 15 aa, Homo sapiens
  CDR3 for beta chain variable domain of TCR clone 14548 (TRBV7-9, TRBJ1-6)
CASSSPGRGNSPLHY

SEQ ID NO: 29097 - protein, 15 aa, Homo sapiens
  CDR3 for alpha chain variable domain of TCR clone 14549 (TRAV8-3, TRAJ45)
CASSYSGGGADGLSF

SEQ ID NO: 29098 - protein, 13 aa, Homo sapiens
  CDR3 for beta chain variable domain of TCR clone 14549 (TRBV10-3, TRBJ2-7)
CASKLAVNYEQYF

SEQ ID NO: 29099 - protein, 13 aa, Homo sapiens
  CDR3 for alpha chain variable domain of TCR clone 14550 (TRAV8-3, TRAJ42)
CARYGGSQGNLIF

SEQ ID NO: 29100 - protein, 14 aa, Homo sapiens
  CDR3 for beta chain variable domain of TCR clone 14550 (TRBV20-1, TRBJ2-1)
CSALDRGTYDEQFF

SEQ ID NO: 29101 - protein, 11 aa, Homo sapiens
  CDR3 for alpha chain variable domain of TCR clone 14551 (TRAV21, TRAJ11)
CAVNGYRTLTF

SEQ ID NO: 29102 - protein, 11 aa, Homo sapiens
  CDR3 for beta chain variable domain of TCR clone 14551 (TRBV19, TRBJ1-1)
CASSIGSEAFF

SEQ ID NO: 29103 - protein, 17 aa, Homo sapiens
  CDR3 for alpha chain variable domain of TCR clone 14552 (TRAV3, TRAJ42)
CAVRDRDYGGSQGNLIF

SEQ ID NO: 29104 - protein, 15 aa, Homo sapiens
  CDR3 for beta chain variable domain of TCR clone 14552 (TRBV6-6, TRBJ2-7)
RASSYSYGGSYEQYF

SEQ ID NO: 29105 - protein, 15 aa, Homo sapiens
  CDR3 for alpha chain variable domain of TCR clone 14553 (TRAV3, TRAJ20)
CAVRDIKLSDYKLSF

SEQ ID NO: 29106 - protein, 15 aa, Homo sapiens
  CDR3 for beta chain variable domain of TCR clone 14553 (TRBV7-9, TRBJ1-6)
CASSSPGRGNSPLHC

SEQ ID NO: 29107 - protein, 14 aa, Homo sapiens
  CDR3 for alpha chain variable domain of TCR clone 14554 (TRAV8-2, TRAJ11)
CVVSEKSGYSTLTS

SEQ ID NO: 29108 - protein, 16 aa, Homo sapiens
  CDR3 for beta chain variable domain of TCR clone 14554 (TRBV28, TRBJ2-1)
CASSSPEYPRDNEQFF

SEQ ID NO: 29109 - protein, 14 aa, Homo sapiens
  CDR3 for alpha chain variable domain of TCR clone 14555 (TRAV1-2, TRAJ8)
CAVGEDTGFQKLVF

SEQ ID NO: 29110 - protein, 15 aa, Homo sapiens
  CDR3 for beta chain variable domain of TCR clone 14555 (TRBV27, TRBJ2-1)
CASSNGGGSSNEQFF

SEQ ID NO: 29111 - protein, 15 aa, Homo sapiens
  CDR3 for alpha chain variable domain of TCR clone 14556 (TRAV26-1, TRAJ29)
CIVRVDGSGNTPLVF

SEQ ID NO: 29112 - protein, 14 aa, Homo sapiens
  CDR3 for beta chain variable domain of TCR clone 14556 (TRBV18, TRBJ2-5)
CASSPGVSQETQYF

SEQ ID NO: 29113 - protein, 15 aa, Homo sapiens
  CDR3 for alpha chain variable domain of TCR clone 14557 (TRAV8-3, TRAJ11)
CAVGLLDSGYSTLTF

SEQ ID NO: 29114 - protein, 16 aa, Homo sapiens
  CDR3 for beta chain variable domain of TCR clone 14557 (TRBV7-9, TRBJ1-2)
CASSLGFSSGEDGYTF

SEQ ID NO: 29115 - protein, 15 aa, Homo sapiens
  CDR3 for alpha chain variable domain of TCR clone 14558 (TRAV8-4, TRAJ9)
CAVSDLEGGGFKTIF

SEQ ID NO: 29116 - protein, 12 aa, Homo sapiens
  CDR3 for beta chain variable domain of TCR clone 14558 (TRBV29-1, TRBJ2-3)
CSVTGGADTQYF

SEQ ID NO: 29117 - protein, 18 aa, Homo sapiens
  CDR3 for alpha chain variable domain of TCR clone 14559 (TRAV12-3, TRAJ52)
CAMSRTNAGGTSYGKLTF

SEQ ID NO: 29118 - protein, 17 aa, Homo sapiens
  CDR3 for beta chain variable domain of TCR clone 14559 (TRBV7-3, TRBJ2-3)
CASSLRKRMRGADTQYF

SEQ ID NO: 29119 - protein, 13 aa, Homo sapiens
  CDR3 for alpha chain variable domain of TCR clone 14560 (TRAV1-2, TRAJ9)
CAALNTGGFKTIF

SEQ ID NO: 29120 - protein, 11 aa, Homo sapiens
  CDR3 for beta chain variable domain of TCR clone 14560 (TRBV11-2, TRBJ2-2)
CASSLPGELFF

SEQ ID NO: 29121 - protein, 15 aa, Homo sapiens
  CDR3 for alpha chain variable domain of TCR clone 14561 (TRAV26-1, TRAJ29)
CIVRVEGSGNTPLVF

SEQ ID NO: 29122 - protein, 13 aa, Homo sapiens
  CDR3 for beta chain variable domain of TCR clone 14561 (TRBV7-3, TRBJ1-1)
CASSQDWGAEAFF

SEQ ID NO: 29123 - protein, 15 aa, Homo sapiens
  CDR3 for alpha chain variable domain of TCR clone 14562 (TRAV8-2, TRAJ40)
CVVLGTTSGTYKYIF

SEQ ID NO: 29124 - protein, 16 aa, Homo sapiens
  CDR3 for beta chain variable domain of TCR clone 14562 (TRBV7-3, TRBJ2-1)
CASSLEGYRSYNEQLF

SEQ ID NO: 29125 - protein, 14 aa, Homo sapiens
  CDR3 for alpha chain variable domain of TCR clone 14563 (TRAV26-1, TRAJ38)
CIADNAGNNRKLIW

SEQ ID NO: 29126 - protein, 12 aa, Homo sapiens
  CDR3 for beta chain variable domain of TCR clone 14563 (TRBV11-2, TRBJ2-2)
CASSLGGGELFF

SEQ ID NO: 29127 - protein, 18 aa, Homo sapiens
  CDR3 for alpha chain variable domain of TCR clone 14564 (TRAV13-1, TRAJ52)
CAAKNPNAGGTSYGKLTF

SEQ ID NO: 29128 - protein, 16 aa, Homo sapiens
  CDR3 for beta chain variable domain of TCR clone 14564 (TRBV4-1, TRBJ1-3)
CASSQDELLAGNTIYF

SEQ ID NO: 29129 - protein, 14 aa, Homo sapiens
  CDR3 for alpha chain variable domain of TCR clone 14565 (TRAV1-2, TRAJ16)
CAVNRFSDGQKLLF

SEQ ID NO: 29130 - protein, 15 aa, Homo sapiens
  CDR3 for beta chain variable domain of TCR clone 14565 (TRBV7-2, TRBJ2-3)
CASSLAGAFIDTQYF

SEQ ID NO: 29131 - protein, 11 aa, Homo sapiens
  CDR3 for alpha chain variable domain of TCR clone 14566 (TRAV1-1, TRAJ30)
CAQNRDDKIIF

SEQ ID NO: 29132 - protein, 14 aa, Homo sapiens
  CDR3 for beta chain variable domain of TCR clone 14566 (TRBV7-8, TRBJ2-7)
CASGPGLADYEQYF

SEQ ID NO: 29133 - protein, 14 aa, Homo sapiens
  CDR3 for alpha chain variable domain of TCR clone 14567 (TRAV12-3, TRAJ9)
CAMSPNTGGFKTIF

SEQ ID NO: 29134 - protein, 12 aa, Homo sapiens
  CDR3 for beta chain variable domain of TCR clone 14567 (TRBV11-2, TRBJ2-2)
CASNLGGGELFF

SEQ ID NO: 29135 - protein, 15 aa, Homo sapiens
  CDR3 for alpha chain variable domain of TCR clone 14568 (TRAV8-6, TRAJ10)
CAVSDQAGGGNKLTF

SEQ ID NO: 29136 - protein, 13 aa, Homo sapiens
  CDR3 for beta chain variable domain of TCR clone 14568 (TRBV7-3, TRBJ1-1)
CASSQDWGAEAFF

SEQ ID NO: 29137 - protein, 18 aa, Homo sapiens
  CDR3 for alpha chain variable domain of TCR clone 14569 (TRAV21, TRAJ52)
CAVRPSPAGGTSYGRLTF

SEQ ID NO: 29138 - protein, 17 aa, Homo sapiens
  CDR3 for beta chain variable domain of TCR clone 14569 (TRBV25-1, TRBJ2-1)
CASSAYGQGRGVYEQFF

SEQ ID NO: 29139 - protein, 16 aa, Homo sapiens
  CDR3 for alpha chain variable domain of TCR clone 14570 (TRAV30, TRAJ24)
CGTEIVDADSWGKLQF

SEQ ID NO: 29140 - protein, 12 aa, Homo sapiens
  CDR3 for beta chain variable domain of TCR clone 14570 (TRBV11-2, TRBJ2-1)
CASSPGNNEQFF

SEQ ID NO: 29141 - protein, 11 aa, Homo sapiens
  CDR3 for alpha chain variable domain of TCR clone 14571 (TRAV2, TRAJ33)
CAVDSNYQLIW

SEQ ID NO: 29142 - protein, 16 aa, Homo sapiens
  CDR3 for beta chain variable domain of TCR clone 14571 (TRBV12-5, TRBJ2-5)
CASGPRTSGNQETQYF

SEQ ID NO: 29143 - protein, 14 aa, Homo sapiens
  CDR3 for alpha chain variable domain of TCR clone 14572 (TRAV8-2, TRAJ11)
CVVSEKSGCSTLTF

SEQ ID NO: 29144 - protein, 16 aa, Homo sapiens
  CDR3 for beta chain variable domain of TCR clone 14572 (TRBV28, TRBJ2-1)
CASSSPEYPRDNEQFF

SEQ ID NO: 29145 - protein, 18 aa, Homo sapiens
  CDR3 for alpha chain variable domain of TCR clone 14573 (TRAV13-1, TRAJ52)
RAAKNPNAGGTSYGKLTF

SEQ ID NO: 29146 - protein, 15 aa, Homo sapiens
  CDR3 for beta chain variable domain of TCR clone 14573 (TRBV6-1, TRBJ2-3)
CASSERGGITDTQYF

SEQ ID NO: 29147 - protein, 15 aa, Homo sapiens
  CDR3 for alpha chain variable domain of TCR clone 14574 (TRAV17, TRAJ57)
CATGPSQGGSEKLVF

SEQ ID NO: 29148 - protein, 16 aa, Homo sapiens
  CDR3 for beta chain variable domain of TCR clone 14574 (TRBV12-4, TRBJ1-5)
CASSRPVGGSSQPQHF

SEQ ID NO: 29149 - protein, 15 aa, Homo sapiens
  CDR3 for alpha chain variable domain of TCR clone 14575 (TRAV2, TRAJ9)
CAVEERGTGGFKTIF

SEQ ID NO: 29150 - protein, 16 aa, Homo sapiens
  CDR3 for beta chain variable domain of TCR clone 14575 (TRBV24-1, TRBJ2-3)
CATSDPGTGATDTQYF

SEQ ID NO: 29151 - protein, 14 aa, Homo sapiens
  CDR3 for alpha chain variable domain of TCR clone 14576 (TRAV35, TRAJ22)
CAGLRPGSARQLTF

SEQ ID NO: 29152 - protein, 15 aa, Homo sapiens
  CDR3 for beta chain variable domain of TCR clone 14576 (TRBV12-4, TRBJ2-5)
CASSPPTGLKETQYF

SEQ ID NO: 29153 - protein, 15 aa, Homo sapiens
  CDR3 for alpha chain variable domain of TCR clone 14577 (TRAV17, TRAJ57)
CATGPSQGGSEKLVF

SEQ ID NO: 29154 - protein, 14 aa, Homo sapiens
  CDR3 for beta chain variable domain of TCR clone 14577 (TRBV12-5, TRBJ2-5)
CASGPRTHQETQYF

SEQ ID NO: 29155 - protein, 13 aa, Homo sapiens
  CDR3 for alpha chain variable domain of TCR clone 14578 (TRAV12-2, TRAJ34)
CAVRGYNTDKLIF

SEQ ID NO: 29156 - protein, 15 aa, Homo sapiens
  CDR3 for beta chain variable domain of TCR clone 14578 (TRBV28, TRBJ2-1)
CASRTGAGVIARQLF

SEQ ID NO: 29157 - protein, 13 aa, Homo sapiens
  CDR3 for alpha chain variable domain of TCR clone 14579 (TRAV13-2, TRAJ48)
CAEMDFGNEELTF

SEQ ID NO: 29158 - protein, 15 aa, Homo sapiens
  CDR3 for beta chain variable domain of TCR clone 14579 (TRBV7-9, TRBJ1-6)
CASSSPGRGNSPLHF

SEQ ID NO: 29159 - protein, 15 aa, Homo sapiens
  CDR3 for alpha chain variable domain of TCR clone 14580 (TRAV3, TRAJ5)
CAVRDLDTCRRALTF

SEQ ID NO: 29160 - protein, 13 aa, Homo sapiens
  CDR3 for beta chain variable domain of TCR clone 14580 (TRBV12-4, TRBJ2-7)
CASSPTETYEQYF

SEQ ID NO: 29161 - protein, 14 aa, Homo sapiens
  CDR3 for alpha chain variable domain of TCR clone 14581 (TRAV1-2, TRAJ8)
CAVREDTGFQKLVF

SEQ ID NO: 29162 - protein, 15 aa, Homo sapiens
  CDR3 for beta chain variable domain of TCR clone 14581 (TRBV19, TRBJ1-1)
CASTSGQIQNTEAFF

SEQ ID NO: 29163 - protein, 14 aa, Homo sapiens
  CDR3 for alpha chain variable domain of TCR clone 14582 (TRAV26-1, TRAJ39)
CIVRGSRAGNMLPF

SEQ ID NO: 29164 - protein, 15 aa, Homo sapiens
  CDR3 for beta chain variable domain of TCR clone 14582 (TRBV7-9, TRBJ1-5)
CASSQGHQPNQPQHF

SEQ ID NO: 29165 - protein, 17 aa, Homo sapiens
  CDR3 for alpha chain variable domain of TCR clone 14583 (TRAV3, TRAJ6)
CAVRDGPRAGGSSIPTF

SEQ ID NO: 29166 - protein, 20 aa, Homo sapiens
  CDR3 for beta chain variable domain of TCR clone 14583 (TRBV28, TRBJ2-1)
CASTPIGRSPGLAGGNEQFF

SEQ ID NO: 29167 - protein, 13 aa, Homo sapiens
  CDR3 for alpha chain variable domain of TCR clone 14584 (TRAV2, TRAJ23)
CAVMGNQGGKLIF

SEQ ID NO: 29168 - protein, 14 aa, Homo sapiens
  CDR3 for beta chain variable domain of TCR clone 14584 (TRBV11-2, TRBJ2-1)
CASSRATPYNEQFF

SEQ ID NO: 29169 - protein, 12 aa, Homo sapiens
  CDR3 for alpha chain variable domain of TCR clone 14585 (TRAV35, TRAJ12)
CAGMDSSYKLIL

SEQ ID NO: 29170 - protein, 14 aa, Homo sapiens
  CDR3 for beta chain variable domain of TCR clone 14585 (TRBV28, TRBJ2-5)
CASSLYRGTETQYF

SEQ ID NO: 29171 - protein, 12 aa, Homo sapiens
  CDR3 for alpha chain variable domain of TCR clone 14586 (TRAV12-3, TRAJ17)
CAMTLTGNKLTF

SEQ ID NO: 29172 - protein, 14 aa, Homo sapiens
  CDR3 for beta chain variable domain of TCR clone 14586 (TRBV11-2, TRBJ2-5)
CASSRTGGIETQYF

SEQ ID NO: 29173 - protein, 13 aa, Homo sapiens
  CDR3 for alpha chain variable domain of TCR clone 14587 (TRAV12-3, TRAJ7)
CAMTPYGNNRLAF

SEQ ID NO: 29174 - protein, 14 aa, Homo sapiens
  CDR3 for beta chain variable domain of TCR clone 14587 (TRBV9, TRBJ1-1)
CQQRSSKDGTEAFF

SEQ ID NO: 29175 - protein, 13 aa, Homo sapiens
  CDR3 for alpha chain variable domain of TCR clone 14588 (TRAV2, TRAJ40)
CAVVTSGTYKYIF

SEQ ID NO: 29176 - protein, 14 aa, Homo sapiens
  CDR3 for beta chain variable domain of TCR clone 14588 (TRBV19, TRBJ2-1)
CASPTFVLSGVQFF

SEQ ID NO: 29177 - protein, 12 aa, Homo sapiens
  CDR3 for alpha chain variable domain of TCR clone 14589 (TRAV3, TRAJ43)
CAVRDPNNDMRF

SEQ ID NO: 29178 - protein, 15 aa, Homo sapiens
  CDR3 for beta chain variable domain of TCR clone 14589 (TRBV11-1, TRBJ1-5)
CASSLGTGFDQPQHF

SEQ ID NO: 29179 - protein, 14 aa, Homo sapiens
  CDR3 for alpha chain variable domain of TCR clone 14590 (TRAV21, TRAJ35)
CAVMPIGFGNVLHC

SEQ ID NO: 29180 - protein, 12 aa, Homo sapiens
  CDR3 for beta chain variable domain of TCR clone 14590 (TRBV7-9, TRBJ2-7)
CASSIKREEQHF

SEQ ID NO: 29181 - protein, 13 aa, Homo sapiens
  CDR3 for alpha chain variable domain of TCR clone 14591 (TRAV1-1, TRAJ30)
CAVRSDRDDKIIF

SEQ ID NO: 29182 - protein, 15 aa, Homo sapiens
  CDR3 for beta chain variable domain of TCR clone 14591 (TRBV20-1, TRBJ2-7)
CSARDRVSGMDEQYF

SEQ ID NO: 29183 - protein, 14 aa, Homo sapiens
  CDR3 for alpha chain variable domain of TCR clone 14592 (TRAV1-2, TRAJ8)
CAVREDTCFQKLVF

SEQ ID NO: 29184 - protein, 15 aa, Homo sapiens
  CDR3 for beta chain variable domain of TCR clone 14592 (TRBV6-3, TRBJ2-7)
CASSSPGTVFYEQYF

SEQ ID NO: 29185 - protein, 11 aa, Homo sapiens
  CDR3 for alpha chain variable domain of TCR clone 14593 (TRAV13-1, TRAJ11)
CAARGYSTLTF

SEQ ID NO: 29186 - protein, 15 aa, Homo sapiens
  CDR3 for beta chain variable domain of TCR clone 14593 (TRBV9, TRBJ1-6)
CASSVAGTGDSPLHF

SEQ ID NO: 29187 - protein, 16 aa, Homo sapiens
  CDR3 for alpha chain variable domain of TCR clone 14594 (TRAV30, TRAJ24)
CGTEIVDADSWGKFQF

SEQ ID NO: 29188 - protein, 15 aa, Homo sapiens
  CDR3 for beta chain variable domain of TCR clone 14594 (TRBV19, TRBJ1-2)
CASSVGQVLNYGYTF

SEQ ID NO: 29189 - protein, 12 aa, Homo sapiens
  CDR3 for alpha chain variable domain of TCR clone 14595 (TRAV4, TRAJ6)
CLAPGGSYIPTF

SEQ ID NO: 29190 - protein, 17 aa, Homo sapiens
  CDR3 for beta chain variable domain of TCR clone 14595 (TRBV13, TRBJ2-3)
CASSLSRVAGGRNTQYF

SEQ ID NO: 29191 - protein, 16 aa, Homo sapiens
  CDR3 for alpha chain variable domain of TCR clone 14596 (TRAV3, TRAJ10)
CAVRDMRAGGGNKLTF

SEQ ID NO: 29192 - protein, 13 aa, Homo sapiens
  CDR3 for beta chain variable domain of TCR clone 14596 (TRBV7-3, TRBJ1-1)
CASSQDWGAEAFF

SEQ ID NO: 29193 - protein, 17 aa, Homo sapiens
  CDR3 for alpha chain variable domain of TCR clone 14597 (TRAV3, TRAJ28)
CAVRDGYSGAGSYQLTF

SEQ ID NO: 29194 - protein, 16 aa, Homo sapiens
  CDR3 for beta chain variable domain of TCR clone 14597 (TRBV25-1, TRBJ1-1)
CASSGDRDRGRIEAFF

SEQ ID NO: 29195 - protein, 14 aa, Homo sapiens
  CDR3 for alpha chain variable domain of TCR clone 14598 (TRAV16, TRAJ13)
CALRRSGGYQKVTF

SEQ ID NO: 29196 - protein, 14 aa, Homo sapiens
  CDR3 for beta chain variable domain of TCR clone 14598 (TRBV2, TRBJ2-7)
CASTVGRSSYEQYF

SEQ ID NO: 29197 - protein, 16 aa, Homo sapiens
  CDR3 for alpha chain variable domain of TCR clone 14599 (TRAV12-3, TRAJ53)
CAMSPGRGGSNYKLTF

SEQ ID NO: 29198 - protein, 17 aa, Homo sapiens
  CDR3 for beta chain variable domain of TCR clone 14599 (TRBV28, TRBJ2-5)
CASSTPEGDALQETQYF

SEQ ID NO: 29199 - protein, 12 aa, Homo sapiens
  CDR3 for alpha chain variable domain of TCR clone 14600 (TRAV21, TRAJ13)
PGPSGGYQKVTF

SEQ ID NO: 29200 - protein, 15 aa, Homo sapiens
  CDR3 for beta chain variable domain of TCR clone 14600 (TRBV7-9, TRBJ1-6)
CASSSPGRGDSPLHF

SEQ ID NO: 29201 - protein, 12 aa, Homo sapiens
  CDR3 for alpha chain variable domain of TCR clone 14601 (TRAV12-1, TRAJ40)
CVVYSGTYKYIF

SEQ ID NO: 29202 - protein, 12 aa, Homo sapiens
  CDR3 for beta chain variable domain of TCR clone 14601 (TRBV11-2, TRBJ2-1)
CASSPGNNEQFF

SEQ ID NO: 29203 - protein, 16 aa, Homo sapiens
  CDR3 for alpha chain variable domain of TCR clone 14602 (TRAV21, TRAJ45)
CAVSWGSGGGADGLTF

SEQ ID NO: 29204 - protein, 13 aa, Homo sapiens
  CDR3 for beta chain variable domain of TCR clone 14602 (TRBV7-3, TRBJ1-1)
CASSQDWGAEAFF

SEQ ID NO: 29205 - protein, 14 aa, Homo sapiens
  CDR3 for alpha chain variable domain of TCR clone 14603 (TRAV3, TRAJ21)
CAVESQANFNKFYF

SEQ ID NO: 29206 - protein, 18 aa, Homo sapiens
  CDR3 for beta chain variable domain of TCR clone 14603 (TRBV7-9, TRBJ2-1)
CASSLAVSGTSGRNGQFF

SEQ ID NO: 29207 - protein, 11 aa, Homo sapiens
  CDR3 for alpha chain variable domain of TCR clone 14604 (TRAV12-1, TRAJ30)
CVVNGQDKIIF

SEQ ID NO: 29208 - protein, 12 aa, Homo sapiens
  CDR3 for beta chain variable domain of TCR clone 14604 (TRBV27, TRBJ2-2)
CASKLFAGELFF

SEQ ID NO: 29209 - protein, 15 aa, Homo sapiens
  CDR3 for alpha chain variable domain of TCR clone 14605 (TRAV26-1, TRAJ48)
CIVRVGDFGNEELTF

SEQ ID NO: 29210 - protein, 16 aa, Homo sapiens
  CDR3 for beta chain variable domain of TCR clone 14605 (TRBV4-1, TRBJ2-3)
CASSQRAGGLTDTQYF

SEQ ID NO: 29211 - protein, 10 aa, Homo sapiens
  CDR3 for alpha chain variable domain of TCR clone 14606 (TRAV23/DV6, TRAJ57)
CAASSTLSQR

SEQ ID NO: 29212 - protein, 14 aa, Homo sapiens
  CDR3 for beta chain variable domain of TCR clone 14606 (TRBV25-1, TRBJ1-1)
CASTHLGGNTEAFF

SEQ ID NO: 29213 - protein, 14 aa, Homo sapiens
  CDR3 for alpha chain variable domain of TCR clone 14607 (TRAV12-2, TRAJ13)
CAVKKTGGYQKVTF

SEQ ID NO: 29214 - protein, 15 aa, Homo sapiens
  CDR3 for beta chain variable domain of TCR clone 14607 (TRBV27, TRBJ2-1)
CASNNGGGSSNEQFF

SEQ ID NO: 29215 - protein, 11 aa, Homo sapiens
  CDR3 for alpha chain variable domain of TCR clone 14608 (TRAV2, TRAJ13)
CASGGYQRVTF

SEQ ID NO: 29216 - protein, 16 aa, Homo sapiens
  CDR3 for beta chain variable domain of TCR clone 14608 (TRBV6-1, TRBJ2-5)
CASSETLDRGAETQYF

SEQ ID NO: 29217 - protein, 14 aa, Homo sapiens
  CDR3 for alpha chain variable domain of TCR clone 14609 (TRAV2, TRAJ37)
CAVDFTSNTGKLIF

SEQ ID NO: 29218 - protein, 15 aa, Homo sapiens
  CDR3 for beta chain variable domain of TCR clone 14609 (TRBV20-1, TRBJ1-1)
CSARRGVTGNTEAFF

SEQ ID NO: 29219 - protein, 14 aa, Homo sapiens
  CDR3 for alpha chain variable domain of TCR clone 14610 (TRAV2, TRAJ37)
CAVDFTSNTCKLIF

SEQ ID NO: 29220 - protein, 15 aa, Homo sapiens
  CDR3 for beta chain variable domain of TCR clone 14610 (TRBV20-1, TRBJ1-1)
CSASRGVTGNTEAFF

SEQ ID NO: 29221 - protein, 18 aa, Homo sapiens
  CDR3 for alpha chain variable domain of TCR clone 14611 (TRAV29/DV5, TRAJ52)
CAAGFRGAGGTSYGQLTF

SEQ ID NO: 29222 - protein, 16 aa, Homo sapiens
  CDR3 for beta chain variable domain of TCR clone 14611 (TRBV7-3, TRBJ2-2)
CASSLKRGTLSGELFF

SEQ ID NO: 29223 - protein, 12 aa, Homo sapiens
  CDR3 for alpha chain variable domain of TCR clone 14612 (TRAV12-3, TRAJ17)
CAMTLTGNKLTF

SEQ ID NO: 29224 - protein, 11 aa, Homo sapiens
  CDR3 for beta chain variable domain of TCR clone 14612 (TRBV11-2, TRBJ1-1)
CASGINTEAFF

SEQ ID NO: 29225 - protein, 15 aa, Homo sapiens
  CDR3 for alpha chain variable domain of TCR clone 14613 (TRAV12-1, TRAJ44)
CVVDTPQGTASRLTF

SEQ ID NO: 29226 - protein, 13 aa, Homo sapiens
  CDR3 for beta chain variable domain of TCR clone 14613 (TRBV27, TRBJ2-1)
CASSSGSYNEQFF

SEQ ID NO: 29227 - protein, 14 aa, Homo sapiens
  CDR3 for alpha chain variable domain of TCR clone 14614 (TRAV9-2, TRAJ39)
CALYIYNAGNMLTF

SEQ ID NO: 29228 - protein, 17 aa, Homo sapiens
  CDR3 for beta chain variable domain of TCR clone 14614 (TRBV11-2, TRBJ2-1)
CASSLYPPGVEYNEQFF

SEQ ID NO: 29229 - protein, 15 aa, Homo sapiens
  CDR3 for alpha chain variable domain of TCR clone 14615 (TRAV8-3, TRAJ45)
CASSYSGGGADGLTF

SEQ ID NO: 29230 - protein, 14 aa, Homo sapiens
  CDR3 for beta chain variable domain of TCR clone 14615 (TRBV12-5, TRBJ2-5)
CASGSRTHQETQYF

SEQ ID NO: 29231 - protein, 15 aa, Homo sapiens
  CDR3 for alpha chain variable domain of TCR clone 14616 (TRAV26-1, TRAJ22)
CIVRASFWFCKATDL

SEQ ID NO: 29232 - protein, 13 aa, Homo sapiens
  CDR3 for beta chain variable domain of TCR clone 14616 (TRBV7-9, TRBJ1-2)
CASSLKQNYGYTF

SEQ ID NO: 29233 - protein, 15 aa, Homo sapiens
  CDR3 for alpha chain variable domain of TCR clone 14617 (TRAV8-3, TRAJ32)
CAVGPYGGATNKLIF

SEQ ID NO: 29234 - protein, 14 aa, Homo sapiens
  CDR3 for beta chain variable domain of TCR clone 14617 (TRBV29-1, TRBJ2-2)
CSVLAETNTGEPFF

SEQ ID NO: 29235 - protein, 14 aa, Homo sapiens
  CDR3 for alpha chain variable domain of TCR clone 14618 (TRAV38-1, TRAJ29)
CAFITPSGTTPLVF

SEQ ID NO: 29236 - protein, 14 aa, Homo sapiens
  CDR3 for beta chain variable domain of TCR clone 14618 (TRBV18, TRBJ2-7)
CASSPRGGAYEQYF

SEQ ID NO: 29237 - protein, 15 aa, Homo sapiens
  CDR3 for alpha chain variable domain of TCR clone 14619 (TRAV17, TRAJ56)
CATEPFTGANSKLTF

SEQ ID NO: 29238 - protein, 15 aa, Homo sapiens
  CDR3 for beta chain variable domain of TCR clone 14619 (TRBV28, TRBJ1-5)
CASSRTGGYVQTQHF

SEQ ID NO: 29239 - protein, 16 aa, Homo sapiens
  CDR3 for alpha chain variable domain of TCR clone 14620 (TRAV4, TRAJ22)
CLVGDLHSGSARQLTF

SEQ ID NO: 29240 - protein, 16 aa, Homo sapiens
  CDR3 for beta chain variable domain of TCR clone 14620 (TRBV7-9, TRBJ2-1)
CASSDVAGGSYNEQFF

SEQ ID NO: 29241 - protein, 17 aa, Homo sapiens
  CDR3 for alpha chain variable domain of TCR clone 14621 (TRAV12-2, TRAJ39)
CAVNNMLTFGGGTRLMV

SEQ ID NO: 29242 - protein, 16 aa, Homo sapiens
  CDR3 for beta chain variable domain of TCR clone 14621 (TRBV9, TRBJ2-7)
CASSAGPDRSPYEQYF

SEQ ID NO: 29243 - protein, 13 aa, Homo sapiens
  CDR3 for alpha chain variable domain of TCR clone 14622 (TRAV12-3, TRAJ7)
CAMSASGNNRLAF

SEQ ID NO: 29244 - protein, 14 aa, Homo sapiens
  CDR3 for beta chain variable domain of TCR clone 14622 (TRBV13, TRBJ2-5)
CASGLGPRGETQYF

SEQ ID NO: 29245 - protein, 12 aa, Homo sapiens
  CDR3 for alpha chain variable domain of TCR clone 14623 (TRAV13-1, TRAJ34)
CAASKGTDKLIF

SEQ ID NO: 29246 - protein, 13 aa, Homo sapiens
  CDR3 for beta chain variable domain of TCR clone 14623 (TRBV2, TRBJ2-5)
CASSPRGGGAQYF

SEQ ID NO: 29247 - protein, 15 aa, Homo sapiens
  CDR3 for alpha chain variable domain of TCR clone 14624 (TRAV8-3, TRAJ45)
CAASYSGGGADGLTF

SEQ ID NO: 29248 - protein, 13 aa, Homo sapiens
  CDR3 for beta chain variable domain of TCR clone 14624 (TRBV10-3, TRBJ2-7)
CASKLAVNYEQYF

SEQ ID NO: 29249 - protein, 14 aa, Homo sapiens
  CDR3 for alpha chain variable domain of TCR clone 14625 (TRAV17, TRAJ22)
CATSPSGSARQLTF

SEQ ID NO: 29250 - protein, 15 aa, Homo sapiens
  CDR3 for beta chain variable domain of TCR clone 14625 (TRBV4-1, TRBJ2-5)
CASGQWDLYQETQYF

SEQ ID NO: 29251 - protein, 16 aa, Homo sapiens
  CDR3 for alpha chain variable domain of TCR clone 14626 (TRAV8-3, TRAJ42)
CAVGEGNGGSQGNLIF

SEQ ID NO: 29252 - protein, 14 aa, Homo sapiens
  CDR3 for beta chain variable domain of TCR clone 14626 (TRBV7-2, TRBJ2-1)
CASSRGGAKNEQFF

SEQ ID NO: 29253 - protein, 22 aa, Homo sapiens
  CDR3 for alpha chain variable domain of TCR clone 14627 (TRAV1-2, TRAJ10)
CAVRGGTHGRRKQTHLWDRHSA

SEQ ID NO: 29254 - protein, 15 aa, Homo sapiens
  CDR3 for beta chain variable domain of TCR clone 14627 (TRBV6-3, TRBJ2-7)
CASSSPGTVFYEQYF

SEQ ID NO: 29255 - protein, 12 aa, Homo sapiens
  CDR3 for alpha chain variable domain of TCR clone 14628 (TRAV10, TRAJ31)
CVVRAHRARLMF

SEQ ID NO: 29256 - protein, 13 aa, Homo sapiens
  CDR3 for beta chain variable domain of TCR clone 14628 (TRBV7-8, TRBJ2-1)
CASSLERLGEQFF

SEQ ID NO: 29257 - protein, 17 aa, Homo sapiens
  CDR3 for alpha chain variable domain of TCR clone 14629 (TRAV4, TRAJ13)
CLVGVQGSSGGYQKVTF

SEQ ID NO: 29258 - protein, 18 aa, Homo sapiens
  CDR3 for beta chain variable domain of TCR clone 14629 (TRBV15, TRBJ2-3)
CATSRDGARSWDADTQYF

SEQ ID NO: 29259 - protein, 14 aa, Homo sapiens
  CDR3 for alpha chain variable domain of TCR clone 14630 (TRAV1-2, TRAJ8)
CAVREDTGFQKLVF

SEQ ID NO: 29260 - protein, 11 aa, Homo sapiens
  CDR3 for beta chain variable domain of TCR clone 14630 (TRBV19, TRBJ1-1)
CASSIGSEAFF

SEQ ID NO: 29261 - protein, 14 aa, Homo sapiens
  CDR3 for alpha chain variable domain of TCR clone 14631 (TRAV1-2, TRAJ16)
CAVNRFSDGQKLLF

SEQ ID NO: 29262 - protein, 18 aa, Homo sapiens
  CDR3 for beta chain variable domain of TCR clone 14631 (TRBV11-1, TRBJ2-6)
CASSFPGAGISGANVLTF

SEQ ID NO: 29263 - protein, 18 aa, Homo sapiens
  CDR3 for alpha chain variable domain of TCR clone 14632 (TRAV21, TRAJ52)
CAMRPSPAGGTSYGKLTF

SEQ ID NO: 29264 - protein, 17 aa, Homo sapiens
  CDR3 for beta chain variable domain of TCR clone 14632 (TRBV13, TRBJ2-3)
CASSLSRVAGGRNTQYF

SEQ ID NO: 29265 - protein, 13 aa, Homo sapiens
  CDR3 for alpha chain variable domain of TCR clone 14633 (TRAV8-3, TRAJ43)
CAVVPYNNNDMRF

SEQ ID NO: 29266 - protein, 17 aa, Homo sapiens
  CDR3 for beta chain variable domain of TCR clone 14633 (TRBV7-7, TRBJ1-1)
CASIGDRPNLGVTEAFL

SEQ ID NO: 29267 - protein, 17 aa, Homo sapiens
  CDR3 for alpha chain variable domain of TCR clone 14634 (TRAV26-2, TRAJ42)
CILRDVGYGGSQGNLIL

SEQ ID NO: 29268 - protein, 16 aa, Homo sapiens
  CDR3 for beta chain variable domain of TCR clone 14634 (TRBV12-4, TRBJ2-7)
CASSLIGGTGTYEQYF

SEQ ID NO: 29269 - protein, 11 aa, Homo sapiens
  CDR3 for alpha chain variable domain of TCR clone 14635 (TRAV2, TRAJ13)
CASGGYQKVTF

SEQ ID NO: 29270 - protein, 15 aa, Homo sapiens
  CDR3 for beta chain variable domain of TCR clone 14635 (TRBV7-9, TRBJ1-5)
CASSQGHQPNQPQHF

SEQ ID NO: 29271 - protein, 14 aa, Homo sapiens
  CDR3 for alpha chain variable domain of TCR clone 14636 (TRAV12-1, TRAJ17)
FVVNYKAAGNKLTF

SEQ ID NO: 29272 - protein, 17 aa, Homo sapiens
  CDR3 for beta chain variable domain of TCR clone 14636 (TRBV20-1, TRBJ2-1)
CSASSSGLAGSYNEQFF

SEQ ID NO: 29273 - protein, 15 aa, Homo sapiens
  CDR3 for alpha chain variable domain of TCR clone 14637 (TRAV26-1, TRAJ29)
CIVRVEGSGNTPLVI

SEQ ID NO: 29274 - protein, 15 aa, Homo sapiens
  CDR3 for beta chain variable domain of TCR clone 14637 (TRBV7-9, TRBJ1-5)
CASSQGHQPNQPQHF

SEQ ID NO: 29275 - protein, 11 aa, Homo sapiens
  CDR3 for alpha chain variable domain of TCR clone 14638 (TRAV1-2, TRAJ40)
CAVPGTYKYIF

SEQ ID NO: 29276 - protein, 16 aa, Homo sapiens
  CDR3 for beta chain variable domain of TCR clone 14638 (TRBV29-1, TRBJ2-7)
CSVEVVGTSGNYEQYF

SEQ ID NO: 29277 - protein, 16 aa, Homo sapiens
  CDR3 for alpha chain variable domain of TCR clone 14639 (TRAV21, TRAJ37)
CAVRTAGSSNTGKLIF

SEQ ID NO: 29278 - protein, 13 aa, Homo sapiens
  CDR3 for beta chain variable domain of TCR clone 14639 (TRBV7-9, TRBJ2-5)
YASLPSGRETQYF

SEQ ID NO: 29279 - protein, 17 aa, Homo sapiens
  CDR3 for alpha chain variable domain of TCR clone 14640 (TRAV13-1, TRAJ31)
CAPRDRLMFGDGTQLVV

SEQ ID NO: 29280 - protein, 12 aa, Homo sapiens
  CDR3 for beta chain variable domain of TCR clone 14640 (TRBV7-9, TRBJ2-7)
RASSLEGYEQYF

SEQ ID NO: 29281 - protein, 15 aa, Homo sapiens
  CDR3 for alpha chain variable domain of TCR clone 14641 (TRAV29/DV5, TRAJ24)
CAASGATDSWGKFQV

SEQ ID NO: 29282 - protein, 12 aa, Homo sapiens
  CDR3 for beta chain variable domain of TCR clone 14641 (TRBV11-2, TRBJ2-2)
CASSLPTGELFF

SEQ ID NO: 29283 - protein, 14 aa, Homo sapiens
  CDR3 for alpha chain variable domain of TCR clone 14642 (TRAV1-2, TRAJ16)
CAVNRFSDGQKLLF

SEQ ID NO: 29284 - protein, 13 aa, Homo sapiens
  CDR3 for beta chain variable domain of TCR clone 14642 (TRBV2, TRBJ1-4)
CASSERAGEKLFF

SEQ ID NO: 29285 - protein, 18 aa, Homo sapiens
  CDR3 for alpha chain variable domain of TCR clone 14643 (TRAV21, TRAJ52)
CAVRPSPAGGTSYGKLTF

SEQ ID NO: 29286 - protein, 17 aa, Homo sapiens
  CDR3 for beta chain variable domain of TCR clone 14643 (TRBV13, TRBJ2-3)
GASSLSRVAGGRNTQYF

SEQ ID NO: 29287 - protein, 14 aa, Homo sapiens
  CDR3 for alpha chain variable domain of TCR clone 14644 (TRAV2, TRAJ37)
CAVDFTSNTGKLIF

SEQ ID NO: 29288 - protein, 15 aa, Homo sapiens
  CDR3 for beta chain variable domain of TCR clone 14644 (TRBV20-1, TRBJ1-1)
CSASRGVTGNTDAFF

SEQ ID NO: 29289 - protein, 14 aa, Homo sapiens
  CDR3 for alpha chain variable domain of TCR clone 14645 (TRAV14/DV4, TRAJ54)
CAMSPIQGAQKLVF

SEQ ID NO: 29290 - protein, 15 aa, Homo sapiens
  CDR3 for beta chain variable domain of TCR clone 14645 (TRBV5-1, TRBJ2-3)
CASRSNREGTDTQYF

SEQ ID NO: 29291 - protein, 13 aa, Homo sapiens
  CDR3 for alpha chain variable domain of TCR clone 14646 (TRAV24, TRAJ44)
CALLTGTASKLTF

SEQ ID NO: 29292 - protein, 17 aa, Homo sapiens
  CDR3 for beta chain variable domain of TCR clone 14646 (TRBV20-1, TRBJ2-2)
CSASGSGQGGLTGELFF

SEQ ID NO: 29293 - protein, 18 aa, Homo sapiens
  CDR3 for alpha chain variable domain of TCR clone 14647 (TRAV21, TRAJ52)
CAVRPSPAGGTSYGKLTF

SEQ ID NO: 29294 - protein, 17 aa, Homo sapiens
  CDR3 for beta chain variable domain of TCR clone 14647 (TRBV13, TRBJ2-3)
CTSSLSRVAGGRNTQYF

SEQ ID NO: 29295 - protein, 23 aa, Homo sapiens
  CDR3 for alpha chain variable domain of TCR clone 14648 (TRAV26-1, TRAJ38)
CIADNAGNNHIQNPDPAVYQLRD

SEQ ID NO: 29296 - protein, 14 aa, Homo sapiens
  CDR3 for beta chain variable domain of TCR clone 14648 (TRBV7-2, TRBJ2-7)
CASRSQGAAYEQYF

SEQ ID NO: 29297 - protein, 16 aa, Homo sapiens
  CDR3 for alpha chain variable domain of TCR clone 14649 (TRAV1-2, TRAJ10)
CAVRGVLTGGGNKLTF

SEQ ID NO: 29298 - protein, 12 aa, Homo sapiens
  CDR3 for beta chain variable domain of TCR clone 14649 (TRBV7-8, TRBJ2-7)
CASSLGDSEQYF

SEQ ID NO: 29299 - protein, 10 aa, Homo sapiens
  CDR3 for alpha chain variable domain of TCR clone 14650 (TRAV12-3, TRAJ49)
CAMNDDQFYF

SEQ ID NO: 29300 - protein, 13 aa, Homo sapiens
  CDR3 for beta chain variable domain of TCR clone 14650 (TRBV12-4, TRBJ1-1)
CASSPGTGFEAFS

SEQ ID NO: 29301 - protein, 12 aa, Homo sapiens
  CDR3 for alpha chain variable domain of TCR clone 14651 (TRAV12-1, TRAJ40)
CVVYSGTCKYIF

SEQ ID NO: 29302 - protein, 18 aa, Homo sapiens
  CDR3 for beta chain variable domain of TCR clone 14651 (TRBV11-2, TRBJ2-3)
CASSLGGASRGAPNTQYF

SEQ ID NO: 29303 - protein, 14 aa, Homo sapiens
  CDR3 for alpha chain variable domain of TCR clone 14652 (TRAV27, TRAJ36)
CAGPPKRGANNLLF

SEQ ID NO: 29304 - protein, 15 aa, Homo sapiens
  CDR3 for beta chain variable domain of TCR clone 14652 (TRBV18, TRBJ2-7)
CASSPASTPNYEQYF

SEQ ID NO: 29305 - protein, 20 aa, Homo sapiens
  CDR3 for alpha chain variable domain of TCR clone 14653 (TRAV21, )
CAVRQDAGNNHIQNPDPAVY

SEQ ID NO: 29306 - protein, 16 aa, Homo sapiens
  CDR3 for beta chain variable domain of TCR clone 14653 (TRBV4-2, TRBJ1-1)
CASRPLDGGGDTEAFF

SEQ ID NO: 29307 - protein, 13 aa, Homo sapiens
  CDR3 for alpha chain variable domain of TCR clone 14654 (TRAV17, TRAJ26)
CATVDNYGQNFFF

SEQ ID NO: 29308 - protein, 16 aa, Homo sapiens
  CDR3 for beta chain variable domain of TCR clone 14654 (TRBV2, TRBJ2-1)
CASSVGGSLSYNEQFF

SEQ ID NO: 29309 - protein, 13 aa, Homo sapiens
  CDR3 for alpha chain variable domain of TCR clone 14655 (TRAV27, TRAJ49)
CAPRPYTGNQFYF

SEQ ID NO: 29310 - protein, 16 aa, Homo sapiens
  CDR3 for beta chain variable domain of TCR clone 14655 (TRBV4-1, TRBJ1-2)
CASSQDAGQVLYGDTF

SEQ ID NO: 29311 - protein, 15 aa, Homo sapiens
  CDR3 for alpha chain variable domain of TCR clone 14656 (TRAV27, TRAJ38)
CAARRNAGNNRNLIW

SEQ ID NO: 29312 - protein, 13 aa, Homo sapiens
  CDR3 for beta chain variable domain of TCR clone 14656 (TRBV12-5, TRBJ2-3)
CASGDRQSDTQYF

SEQ ID NO: 29313 - protein, 14 aa, Homo sapiens
  CDR3 for alpha chain variable domain of TCR clone 14657 (TRAV1-2, TRAJ8)
CAVREDTGFQKLVF

SEQ ID NO: 29314 - protein, 15 aa, Homo sapiens
  CDR3 for beta chain variable domain of TCR clone 14657 (TRBV6-3, TRBJ2-7)
CASSSLGTVFYEQYF

SEQ ID NO: 29315 - protein, 15 aa, Homo sapiens
  CDR3 for alpha chain variable domain of TCR clone 14658 (TRAV3, TRAJ5)
CAVRDLDTGRRALTF

SEQ ID NO: 29316 - protein, 13 aa, Homo sapiens
  CDR3 for beta chain variable domain of TCR clone 14658 (TRBV12-4, TRBJ2-7)
CAGSPTETYEQYF

SEQ ID NO: 29317 - protein, 15 aa, Homo sapiens
  CDR3 for alpha chain variable domain of TCR clone 14659 (TRAV26-1, TRAJ29)
CIVRVEGSGNTPLVF

SEQ ID NO: 29318 - protein, 15 aa, Homo sapiens
  CDR3 for beta chain variable domain of TCR clone 14659 (TRBV7-9, TRBJ1-5)
CASSQGHQPNQLQHF

SEQ ID NO: 29319 - protein, 13 aa, Homo sapiens
  CDR3 for alpha chain variable domain of TCR clone 14660 (TRAV1-2, TRAJ24)
CAVTTDSWGKLQF

SEQ ID NO: 29320 - protein, 16 aa, Homo sapiens
  CDR3 for beta chain variable domain of TCR clone 14660 (TRBV6-3, TRBJ1-1)
CASTDLGTVPNTEAFF

SEQ ID NO: 29321 - protein, 13 aa, Homo sapiens
  CDR3 for alpha chain variable domain of TCR clone 14661 (TRAV8-6, TRAJ49)
CAVITNTGNQFYF

SEQ ID NO: 29322 - protein, 13 aa, Homo sapiens
  CDR3 for beta chain variable domain of TCR clone 14661 (TRBV7-3, TRBJ1-1)
CASSQDWGAEAFF

SEQ ID NO: 29323 - protein, 14 aa, Homo sapiens
  CDR3 for alpha chain variable domain of TCR clone 14662 (TRAV1-2, TRAJ16)
CAVNRLSDGQKLLF

SEQ ID NO: 29324 - protein, 11 aa, Homo sapiens
  CDR3 for beta chain variable domain of TCR clone 14662 (TRBV29-1, TRBJ2-5)
CSEDRTGTQYF

SEQ ID NO: 29325 - protein, 17 aa, Homo sapiens
  CDR3 for alpha chain variable domain of TCR clone 14663 (TRAV3, TRAJ6)
CAVRDGPRAGGSYIPTF

SEQ ID NO: 29326 - protein, 14 aa, Homo sapiens
  CDR3 for beta chain variable domain of TCR clone 14663 (TRBV7-2, TRBJ2-7)
CASSPKTSIYEQYF

SEQ ID NO: 29327 - protein, 15 aa, Homo sapiens
  CDR3 for alpha chain variable domain of TCR clone 14664 (TRAV35, TRAJ40)
CAGQLGTSGAYKYIF

SEQ ID NO: 29328 - protein, 14 aa, Homo sapiens
  CDR3 for beta chain variable domain of TCR clone 14664 (TRBV7-3, TRBJ2-1)
CASSLAGGTNEQFF

SEQ ID NO: 29329 - protein, 17 aa, Homo sapiens
  CDR3 for alpha chain variable domain of TCR clone 14665 (TRAV8-3, TRAJ34)
CAIPGKLIFGTGTRLQV

SEQ ID NO: 29330 - protein, 15 aa, Homo sapiens
  CDR3 for beta chain variable domain of TCR clone 14665 (TRBV5-6, TRBJ2-1)
CASSRRLAGDNEQFF

SEQ ID NO: 29331 - protein, 12 aa, Homo sapiens
  CDR3 for alpha chain variable domain of TCR clone 14666 (TRAV16, TRAJ17)
CAPSAAGNKLTF

SEQ ID NO: 29332 - protein, 13 aa, Homo sapiens
  CDR3 for beta chain variable domain of TCR clone 14666 (TRBV7-3, TRBJ2-7)
CASSQAGGYEQYF

SEQ ID NO: 29333 - protein, 14 aa, Homo sapiens
  CDR3 for alpha chain variable domain of TCR clone 14667 (TRAV16, TRAJ48)
CALTPGFGSEKLTF

SEQ ID NO: 29334 - protein, 14 aa, Homo sapiens
  CDR3 for beta chain variable domain of TCR clone 14667 (TRBV7-2, TRBJ2-7)
CASSSISGFSEQYF

SEQ ID NO: 29335 - protein, 14 aa, Homo sapiens
  CDR3 for alpha chain variable domain of TCR clone 14668 (TRAV20, TRAJ33)
CAVLTRDSNYQLIW

SEQ ID NO: 29336 - protein, 15 aa, Homo sapiens
  CDR3 for beta chain variable domain of TCR clone 14668 (TRBV23-1, TRBJ2-2)
CASRGQGVYTGELFF

SEQ ID NO: 29337 - protein, 18 aa, Homo sapiens
  CDR3 for alpha chain variable domain of TCR clone 14669 (TRAV13-1, TRAJ52)
CSASKRSAGGTSYGKLTF

SEQ ID NO: 29338 - protein, 13 aa, Homo sapiens
  CDR3 for beta chain variable domain of TCR clone 14669 (TRBV12-4, TRBJ1-2)
CASSLRQGKGYTF

SEQ ID NO: 29339 - protein, 11 aa, Homo sapiens
  CDR3 for alpha chain variable domain of TCR clone 14670 (TRAV17, TRAJ9)
CGFTGGLKTIF

SEQ ID NO: 29340 - protein, 14 aa, Homo sapiens
  CDR3 for beta chain variable domain of TCR clone 14670 (TRBV7-9, TRBJ2-2)
CASSLVQDTGELFF

SEQ ID NO: 29341 - protein, 14 aa, Homo sapiens
  CDR3 for alpha chain variable domain of TCR clone 14671 (TRAV26-1, TRAJ34)
CIVRVAYNTDKLIF

SEQ ID NO: 29342 - protein, 15 aa, Homo sapiens
  CDR3 for beta chain variable domain of TCR clone 14671 (TRBV20-1, TRBJ2-7)
CSARAPAAYFYEQYF

SEQ ID NO: 29343 - protein, 12 aa, Homo sapiens
  CDR3 for alpha chain variable domain of TCR clone 14672 (TRAV3, TRAJ20)
CAVRDPDYKLSL

SEQ ID NO: 29344 - protein, 14 aa, Homo sapiens
  CDR3 for beta chain variable domain of TCR clone 14672 (TRBV4-2, TRBJ2-1)
CASGLDRAYNEQFF

SEQ ID NO: 29345 - protein, 15 aa, Homo sapiens
  CDR3 for alpha chain variable domain of TCR clone 14673 (TRAV8-3, TRAJ27)
CAVGPSKTNAGNSTF

SEQ ID NO: 29346 - protein, 15 aa, Homo sapiens
  CDR3 for beta chain variable domain of TCR clone 14673 (TRBV7-2, TRBJ2-1)
CASSSGLAGGNEQFF

SEQ ID NO: 29347 - protein, 14 aa, Homo sapiens
  CDR3 for alpha chain variable domain of TCR clone 14674 (TRAV12-2, TRAJ13)
CAVKKTGGYQKVTF

SEQ ID NO: 29348 - protein, 15 aa, Homo sapiens
  CDR3 for beta chain variable domain of TCR clone 14674 (TRBV27, TRBJ2-1)
CASSNGVGSSNEQFF

SEQ ID NO: 29349 - protein, 13 aa, Homo sapiens
  CDR3 for alpha chain variable domain of TCR clone 14675 (TRAV12-1, TRAJ26)
CVVRRNYGQNFVF

SEQ ID NO: 29350 - protein, 15 aa, Homo sapiens
  CDR3 for beta chain variable domain of TCR clone 14675 (TRBV20-1, TRBJ2-7)
CSARDRVSGMDEQYF

SEQ ID NO: 29351 - protein, 15 aa, Homo sapiens
  CDR3 for alpha chain variable domain of TCR clone 14676 (TRAV13-2, TRAJ6)
CAENIGAGGSYIPTF

SEQ ID NO: 29352 - protein, 15 aa, Homo sapiens
  CDR3 for beta chain variable domain of TCR clone 14676 (TRBV7-2, TRBJ1-2)
CASSFTQGAKYGYTF

SEQ ID NO: 29353 - protein, 11 aa, Homo sapiens
  CDR3 for alpha chain variable domain of TCR clone 14677 (TRAV12-1, TRAJ8)
CVVTGFQKLVI

SEQ ID NO: 29354 - protein, 14 aa, Homo sapiens
  CDR3 for beta chain variable domain of TCR clone 14677 (TRBV19, TRBJ2-1)
CASGKSTQYNEQFF

SEQ ID NO: 29355 - protein, 14 aa, Homo sapiens
  CDR3 for alpha chain variable domain of TCR clone 14678 (TRAV9-2, TRAJ39)
CALYIYNAGNMLTF

SEQ ID NO: 29356 - protein, 15 aa, Homo sapiens
  CDR3 for beta chain variable domain of TCR clone 14678 (TRBV12-4, TRBJ2-5)
CASSPPTGLQETQYF

SEQ ID NO: 29357 - protein, 18 aa, Homo sapiens
  CDR3 for alpha chain variable domain of TCR clone 14679 (TRAV21, TRAJ52)
CAVRPSPAGSTSYGKLTF

SEQ ID NO: 29358 - protein, 17 aa, Homo sapiens
  CDR3 for beta chain variable domain of TCR clone 14679 (TRBV13, TRBJ2-3)
CASSLSRVAGGRNTQYF

SEQ ID NO: 29359 - protein, 13 aa, Homo sapiens
  CDR3 for alpha chain variable domain of TCR clone 14680 (TRAV2, TRAJ40)
CAVVTSGTYKYIF

SEQ ID NO: 29360 - protein, 14 aa, Homo sapiens
  CDR3 for beta chain variable domain of TCR clone 14680 (TRBV19, TRBJ2-1)
CASPTFVLSGELFF

SEQ ID NO: 29361 - protein, 15 aa, Homo sapiens
  CDR3 for alpha chain variable domain of TCR clone 14681 (TRAV3, TRAJ5)
CAVRDLDTGRRALTF

SEQ ID NO: 29362 - protein, 13 aa, Homo sapiens
  CDR3 for beta chain variable domain of TCR clone 14681 (TRBV12-4, TRBJ2-7)
CASRPTETYEQYF

SEQ ID NO: 29363 - protein, 14 aa, Homo sapiens
  CDR3 for alpha chain variable domain of TCR clone 14682 (TRAV1-2, TRAJ16)
CSVNRFSDGQKLLF

SEQ ID NO: 29364 - protein, 16 aa, Homo sapiens
  CDR3 for beta chain variable domain of TCR clone 14682 (TRBV9, TRBJ2-1)
CASSVGGGGNYNEQFF

SEQ ID NO: 29365 - protein, 14 aa, Homo sapiens
  CDR3 for alpha chain variable domain of TCR clone 14683 (TRAV12-1, TRAJ23)
CVVIVYNQGGKLIF

SEQ ID NO: 29366 - protein, 15 aa, Homo sapiens
  CDR3 for beta chain variable domain of TCR clone 14683 (TRBV20-1, TRBJ2-7)
CSARDRVSGMDEQYF

SEQ ID NO: 29367 - protein, 10 aa, Homo sapiens
  CDR3 for alpha chain variable domain of TCR clone 14684 (TRAV23/DV6, TRAJ31)
CARGGARLMF

SEQ ID NO: 29368 - protein, 14 aa, Homo sapiens
  CDR3 for beta chain variable domain of TCR clone 14684 (TRBV7-8, TRBJ1-2)
CASSPDSLSYGHTF

SEQ ID NO: 29369 - protein, 14 aa, Homo sapiens
  CDR3 for alpha chain variable domain of TCR clone 14685 (TRAV13-1, TRAJ44)
CAAKATGTASKLTF

SEQ ID NO: 29370 - protein, 15 aa, Homo sapiens
  CDR3 for beta chain variable domain of TCR clone 14685 (TRBV20-1, TRBJ2-7)
CSARDRVSGMDEQYF

SEQ ID NO: 29371 - protein, 12 aa, Homo sapiens
  CDR3 for alpha chain variable domain of TCR clone 14686 (TRAV13-2, TRAJ8)
CAPWLGFQKLVF

SEQ ID NO: 29372 - protein, 15 aa, Homo sapiens
  CDR3 for beta chain variable domain of TCR clone 14686 (TRBV19, TRBJ1-5)
CASSIVWADNQPQHF

SEQ ID NO: 29373 - protein, 14 aa, Homo sapiens
  CDR3 for alpha chain variable domain of TCR clone 14687 (TRAV13-2, TRAJ17)
CAENSKAAGNKLTF

SEQ ID NO: 29374 - protein, 13 aa, Homo sapiens
  CDR3 for beta chain variable domain of TCR clone 14687 (TRBV19, TRBJ1-2)
CASSQGQVYGYTF

SEQ ID NO: 29375 - protein, 13 aa, Homo sapiens
  CDR3 for alpha chain variable domain of TCR clone 14688 (TRAV1-2, TRAJ9)
CAALNTGGFKTIF

SEQ ID NO: 29376 - protein, 14 aa, Homo sapiens
  CDR3 for beta chain variable domain of TCR clone 14688 (TRBV12-5, TRBJ2-5)
CASGSRTHQETQYF

SEQ ID NO: 29377 - protein, 22 aa, Homo sapiens
  CDR3 for alpha chain variable domain of TCR clone 14689 (TRAV39, TRAJ49)
PCMTSLPPTSVPWTNTSNQFYF

SEQ ID NO: 29378 - protein, 17 aa, Homo sapiens
  CDR3 for beta chain variable domain of TCR clone 14689 (TRBV20-1, TRBJ2-1)
CSARDRRRASSYNEQFF

SEQ ID NO: 29379 - protein, 13 aa, Homo sapiens
  CDR3 for alpha chain variable domain of TCR clone 14690 (TRAV29/DV5, TRAJ31)
CAASRNNNARLMF

SEQ ID NO: 29380 - protein, 20 aa, Homo sapiens
  CDR3 for beta chain variable domain of TCR clone 14690 (TRBV19, TRBJ2-7)
CASTQVAPESLRAVLRAGHQ

SEQ ID NO: 29381 - protein, 13 aa, Homo sapiens
  CDR3 for alpha chain variable domain of TCR clone 14691 (TRAV12-3, TRAJ33)
CAMGVNSNYQLIW

SEQ ID NO: 29382 - protein, 13 aa, Homo sapiens
  CDR3 for beta chain variable domain of TCR clone 14691 (TRBV7-2, TRBJ2-2)
CASSLAVTGELFF

SEQ ID NO: 29383 - protein, 18 aa, Homo sapiens
  CDR3 for alpha chain variable domain of TCR clone 14692 (TRAV21, TRAJ52)
CAVRSSPAGGTSYGKLTF

SEQ ID NO: 29384 - protein, 17 aa, Homo sapiens
  CDR3 for beta chain variable domain of TCR clone 14692 (TRBV13, TRBJ2-3)
CASSLSRVAGGRNTQYF

SEQ ID NO: 29385 - protein, 12 aa, Homo sapiens
  CDR3 for alpha chain variable domain of TCR clone 14693 (TRAV12-1, TRAJ40)
CVVYSGTYKYIS

SEQ ID NO: 29386 - protein, 18 aa, Homo sapiens
  CDR3 for beta chain variable domain of TCR clone 14693 (TRBV11-2, TRBJ2-3)
CASSLGGASRGAPNTQYF

SEQ ID NO: 29387 - protein, 13 aa, Homo sapiens
  CDR3 for alpha chain variable domain of TCR clone 14694 (TRAV1-2, TRAJ9)
CAALNTGGFKTIF

SEQ ID NO: 29388 - protein, 13 aa, Homo sapiens
  CDR3 for beta chain variable domain of TCR clone 14694 (TRBV19, TRBJ1-2)
CVSSVPGQDGYTF

SEQ ID NO: 29389 - protein, 15 aa, Homo sapiens
  CDR3 for alpha chain variable domain of TCR clone 14695 (TRAV3, TRAJ5)
CAVRDRKTGRRALTF

SEQ ID NO: 29390 - protein, 15 aa, Homo sapiens
  CDR3 for beta chain variable domain of TCR clone 14695 (TRBV7-8, TRBJ2-1)
CAGSLADSLYNEQFF

SEQ ID NO: 29391 - protein, 17 aa, Homo sapiens
  CDR3 for alpha chain variable domain of TCR clone 14696 (TRAV3, TRAJ6)
CAVRDGPRAGGSYIRTF

SEQ ID NO: 29392 - protein, 14 aa, Homo sapiens
  CDR3 for beta chain variable domain of TCR clone 14696 (TRBV7-2, TRBJ2-7)
CASSPKTSFYEQYF

SEQ ID NO: 29393 - protein, 10 aa, Homo sapiens
  CDR3 for alpha chain variable domain of TCR clone 14697 (TRAV12-3, TRAJ49)
CAMNDDQSYF

SEQ ID NO: 29394 - protein, 13 aa, Homo sapiens
  CDR3 for beta chain variable domain of TCR clone 14697 (TRBV12-4, TRBJ1-1)
CASSPGTGFEAFF

SEQ ID NO: 29395 - protein, 12 aa, Homo sapiens
  CDR3 for alpha chain variable domain of TCR clone 14698 (TRAV12-3, TRAJ20)
CAMVRGDYKLSF

SEQ ID NO: 29396 - protein, 14 aa, Homo sapiens
  CDR3 for beta chain variable domain of TCR clone 14698 (TRBV5-5, TRBJ1-5)
CASSGQGVDQTQHF

SEQ ID NO: 29397 - protein, 12 aa, Homo sapiens
  CDR3 for alpha chain variable domain of TCR clone 14699 (TRAV1-1, TRAJ8)
CAGGTGFQKLVF

SEQ ID NO: 29398 - protein, 12 aa, Homo sapiens
  CDR3 for beta chain variable domain of TCR clone 14699 (TRBV11-2, TRBJ2-2)
CASSLGGGELFF

SEQ ID NO: 29399 - protein, 17 aa, Homo sapiens
  CDR3 for alpha chain variable domain of TCR clone 14700 (TRAV3, TRAJ6)
CAVRDGPRAGGSYIPTF

SEQ ID NO: 29400 - protein, 14 aa, Homo sapiens
  CDR3 for beta chain variable domain of TCR clone 14700 (TRBV7-2, TRBJ2-7)
CASSPKNSFYEQYF

SEQ ID NO: 29401 - protein, 17 aa, Homo sapiens
  CDR3 for alpha chain variable domain of TCR clone 14701 (TRAV3, TRAJ42)
CAVRDGDYGGSQGNLIF

SEQ ID NO: 29402 - protein, 15 aa, Homo sapiens
  CDR3 for beta chain variable domain of TCR clone 14701 (TRBV6-6, TRBJ2-7)
CASSYSYGGSYEQYF

SEQ ID NO: 29403 - protein, 12 aa, Homo sapiens
  CDR3 for alpha chain variable domain of TCR clone 14702 (TRAV12-3, TRAJ17)
CAMTLTGNKLTF

SEQ ID NO: 29404 - protein, 15 aa, Homo sapiens
  CDR3 for beta chain variable domain of TCR clone 14702 (TRBV20-1, TRBJ2-7)
CSARDRVSGMHEQYF

SEQ ID NO: 29405 - protein, 13 aa, Homo sapiens
  CDR3 for alpha chain variable domain of TCR clone 14703 (TRAV27, TRAJ41)
CAEEGNSGYALNF

SEQ ID NO: 29406 - protein, 14 aa, Homo sapiens
  CDR3 for beta chain variable domain of TCR clone 14703 (TRBV7-2, TRBJ1-1)
CASSFLTGTTEAFF

SEQ ID NO: 29407 - protein, 13 aa, Homo sapiens
  CDR3 for alpha chain variable domain of TCR clone 14704 (TRAV1-1, TRAJ9)
CAAKNIGGFKTIF

SEQ ID NO: 29408 - protein, 14 aa, Homo sapiens
  CDR3 for beta chain variable domain of TCR clone 14704 (TRBV20-1, TRBJ2-1)
CSAQIGGSANEQFF

SEQ ID NO: 29409 - protein, 12 aa, Homo sapiens
  CDR3 for alpha chain variable domain of TCR clone 14705 (TRAV13-2, TRAJ23)
CAERNRGGKLIF

SEQ ID NO: 29410 - protein, 16 aa, Homo sapiens
  CDR3 for beta chain variable domain of TCR clone 14705 (TRBV20-1, TRBJ1-4)
CSAPGQGLLTNEKLFF

SEQ ID NO: 29411 - protein, 12 aa, Homo sapiens
  CDR3 for alpha chain variable domain of TCR clone 14706 (TRAV12-3, TRAJ17)
CAMTLTGNKLTF

SEQ ID NO: 29412 - protein, 15 aa, Homo sapiens
  CDR3 for beta chain variable domain of TCR clone 14706 (TRBV5-1, TRBJ2-3)
CASSVTSGSTDTQYF

SEQ ID NO: 29413 - protein, 16 aa, Homo sapiens
  CDR3 for alpha chain variable domain of TCR clone 14707 (TRAV30, TRAJ24)
CGTEIVDADSWGNSSL

SEQ ID NO: 29414 - protein, 15 aa, Homo sapiens
  CDR3 for beta chain variable domain of TCR clone 14707 (TRBV20-1, TRBJ2-7)
CSARDRVSGMDEQYF

SEQ ID NO: 29415 - protein, 14 aa, Homo sapiens
  CDR3 for alpha chain variable domain of TCR clone 14708 (TRAV8-2, TRAJ15)
CVVSDQQAGTALIF

SEQ ID NO: 29416 - protein, 17 aa, Homo sapiens
  CDR3 for beta chain variable domain of TCR clone 14708 (TRBV28, TRBJ2-1)
CASSLSVAGGPVDEQFF

SEQ ID NO: 29417 - protein, 14 aa, Homo sapiens
  CDR3 for alpha chain variable domain of TCR clone 14709 (TRAV1-2, TRAJ16)
CAVNRFSDGQKLLF

SEQ ID NO: 29418 - protein, 15 aa, Homo sapiens
  CDR3 for beta chain variable domain of TCR clone 14709 (TRBV9, TRBJ1-6)
CASSAAGTGDSPLHF

SEQ ID NO: 29419 - protein, 13 aa, Homo sapiens
  CDR3 for alpha chain variable domain of TCR clone 14710 (TRAV12-3, TRAJ33)
CAMSVNSNYQLIW

SEQ ID NO: 29420 - protein, 15 aa, Homo sapiens
  CDR3 for beta chain variable domain of TCR clone 14710 (TRBV27, TRBJ2-1)
CASSNGGGSSNEQFF

SEQ ID NO: 29421 - protein, 16 aa, Homo sapiens
  CDR3 for alpha chain variable domain of TCR clone 14711 (TRAV30, TRAJ24)
CGTEIVDANSWGKFQF

SEQ ID NO: 29422 - protein, 13 aa, Homo sapiens
  CDR3 for beta chain variable domain of TCR clone 14711 (TRBV12-4, TRBJ2-5)
CASSPGTEETQYF

SEQ ID NO: 29423 - protein, 13 aa, Homo sapiens
  CDR3 for alpha chain variable domain of TCR clone 14712 (TRAV19, TRAJ48)
CALKGFGNEKLTF

SEQ ID NO: 29424 - protein, 16 aa, Homo sapiens
  CDR3 for beta chain variable domain of TCR clone 14712 (TRBV10-2, TRBJ1-2)
CASSERRGPDNYGYTF

SEQ ID NO: 29425 - protein, 16 aa, Homo sapiens
  CDR3 for alpha chain variable domain of TCR clone 14713 (TRAV30, TRAJ24)
CGTEIVDADSWGKFQF

SEQ ID NO: 29426 - protein, 16 aa, Homo sapiens
  CDR3 for beta chain variable domain of TCR clone 14713 (TRBV7-9, TRBJ2-1)
CASSDVAGGSYNEQFF

SEQ ID NO: 29427 - protein, 16 aa, Homo sapiens
  CDR3 for alpha chain variable domain of TCR clone 14714 (TRAV30, TRAJ24)
CGTEIVDADSWGKFQF

SEQ ID NO: 29428 - protein, 15 aa, Homo sapiens
  CDR3 for beta chain variable domain of TCR clone 14714 (TRBV5-1, TRBJ2-3)
CASSVTSGSTDTQYF

SEQ ID NO: 29429 - protein, 14 aa, Homo sapiens
  CDR3 for alpha chain variable domain of TCR clone 14715 (TRAV35, TRAJ22)
CAGLRPGSARQLTF

SEQ ID NO: 29430 - protein, 15 aa, Homo sapiens
  CDR3 for beta chain variable domain of TCR clone 14715 (TRBV12-5, TRBJ2-2)
CASGRLGGNTGELFF

SEQ ID NO: 29431 - protein, 12 aa, Homo sapiens
  CDR3 for alpha chain variable domain of TCR clone 14716 (TRAV9-2, TRAJ5)
CALSPGRRALTF

SEQ ID NO: 29432 - protein, 12 aa, Homo sapiens
  CDR3 for beta chain variable domain of TCR clone 14716 (TRBV29-1, TRBJ2-3)
CSVTGGADTQYF

SEQ ID NO: 29433 - protein, 13 aa, Homo sapiens
  CDR3 for alpha chain variable domain of TCR clone 14717 (TRAV16, TRAJ10)
CAPAREEETNSPL

SEQ ID NO: 29434 - protein, 15 aa, Homo sapiens
  CDR3 for beta chain variable domain of TCR clone 14717 (TRBV6-3, TRBJ2-7)
CASSSPGTVFYEQYF

SEQ ID NO: 29435 - protein, 14 aa, Homo sapiens
  CDR3 for alpha chain variable domain of TCR clone 14718 (TRAV13-1, TRAJ35)
CAASKGGFGNVLHC

SEQ ID NO: 29436 - protein, 13 aa, Homo sapiens
  CDR3 for beta chain variable domain of TCR clone 14718 (TRBV7-3, TRBJ1-1)
CASNQDWGAEAFF

SEQ ID NO: 29437 - protein, 14 aa, Homo sapiens
  CDR3 for alpha chain variable domain of TCR clone 14719 (TRAV17, TRAJ57)
CATDPQGGSEKLVF

SEQ ID NO: 29438 - protein, 10 aa, Homo sapiens
  CDR3 for beta chain variable domain of TCR clone 14719 (TRBV5-1, TRBJ2-2)
CASSLAGLSG

SEQ ID NO: 29439 - protein, 12 aa, Homo sapiens
  CDR3 for alpha chain variable domain of TCR clone 14720 (TRAV21, TRAJ11)
CAATSGYSTLTS

SEQ ID NO: 29440 - protein, 14 aa, Homo sapiens
  CDR3 for beta chain variable domain of TCR clone 14720 (TRBV20-1, TRBJ2-7)
CSAPELAGVGEQYF

SEQ ID NO: 29441 - protein, 14 aa, Homo sapiens
  CDR3 for alpha chain variable domain of TCR clone 14721 (TRAV13-1, TRAJ44)
CAAKATGTASKLTF

SEQ ID NO: 29442 - protein, 13 aa, Homo sapiens
  CDR3 for beta chain variable domain of TCR clone 14721 (TRBV7-9, TRBJ1-2)
CASSLKQNYGYTF

SEQ ID NO: 29443 - protein, 15 aa, Homo sapiens
  CDR3 for alpha chain variable domain of TCR clone 14722 (TRAV3, TRAJ47)
CAVRDIGEYGNKLAF

SEQ ID NO: 29444 - protein, 14 aa, Homo sapiens
  CDR3 for beta chain variable domain of TCR clone 14722 (TRBV13, TRBJ2-5)
CASSLERVGETQYF

SEQ ID NO: 29445 - protein, 11 aa, Homo sapiens
  CDR3 for alpha chain variable domain of TCR clone 14723 (TRAV1-1, TRAJ23)
CAVRQGGKLIF

SEQ ID NO: 29446 - protein, 17 aa, Homo sapiens
  CDR3 for beta chain variable domain of TCR clone 14723 (TRBV13, TRBJ2-3)
CASSLSRVAGGRNTQYF

SEQ ID NO: 29447 - protein, 14 aa, Homo sapiens
  CDR3 for alpha chain variable domain of TCR clone 14724 (TRAV3, TRAJ27)
CAVRGDTNAGKSTF

SEQ ID NO: 29448 - protein, 15 aa, Homo sapiens
  CDR3 for beta chain variable domain of TCR clone 14724 (TRBV7-7, TRBJ2-2)
CATSKLAKNTGELFF

SEQ ID NO: 29449 - protein, 16 aa, Homo sapiens
  CDR3 for alpha chain variable domain of TCR clone 14725 (TRAV30, TRAJ24)
CGTEIVDADSWGKFQF

SEQ ID NO: 29450 - protein, 14 aa, Homo sapiens
  CDR3 for beta chain variable domain of TCR clone 14725 (TRBV12-5, TRBJ2-5)
CASGSRTHQETQYY

SEQ ID NO: 29451 - protein, 16 aa, Homo sapiens
  CDR3 for alpha chain variable domain of TCR clone 14726 (TRAV30, TRAJ24)
CGTEIVDADSWGKFQF

SEQ ID NO: 29452 - protein, 16 aa, Homo sapiens
  CDR3 for beta chain variable domain of TCR clone 14726 (TRBV27, TRBJ2-5)
CASSYGPGGQKETQYS

SEQ ID NO: 29453 - protein, 12 aa, Homo sapiens
  CDR3 for alpha chain variable domain of TCR clone 14727 (TRAV3, TRAJ20)
CAVRDPDYKLSF

SEQ ID NO: 29454 - protein, 13 aa, Homo sapiens
  CDR3 for beta chain variable domain of TCR clone 14727 (TRBV9, TRBJ2-1)
CASGVGQGGEQFF

SEQ ID NO: 29455 - protein, 16 aa, Homo sapiens
  CDR3 for alpha chain variable domain of TCR clone 14728 (TRAV12-3, TRAJ53)
CAMSPGSEGSNYKLTF

SEQ ID NO: 29456 - protein, 11 aa, Homo sapiens
  CDR3 for beta chain variable domain of TCR clone 14728 (TRBV29-1, TRBJ2-5)
CSEDRTGTQYF

SEQ ID NO: 29457 - protein, 13 aa, Homo sapiens
  CDR3 for alpha chain variable domain of TCR clone 14729 (TRAV8-3, TRAJ28)
CAVGAVGSYQLTF

SEQ ID NO: 29458 - protein, 15 aa, Homo sapiens
  CDR3 for beta chain variable domain of TCR clone 14729 (TRBV7-9, TRBJ1-5)
CAGSQGHQPNQPQHF

SEQ ID NO: 29459 - protein, 13 aa, Homo sapiens
  CDR3 for alpha chain variable domain of TCR clone 14730 (TRAV21, TRAJ37)
CAVSSGNTGKLIF

SEQ ID NO: 29460 - protein, 18 aa, Homo sapiens
  CDR3 for beta chain variable domain of TCR clone 14730 (TRBV23-1, TRBJ2-3)
CISAPAVNRPASTDTQYF

SEQ ID NO: 29461 - protein, 14 aa, Homo sapiens
  CDR3 for alpha chain variable domain of TCR clone 14731 (TRAV1-2, TRAJ16)
CAVNRFSDGQTLLF

SEQ ID NO: 29462 - protein, 15 aa, Homo sapiens
  CDR3 for beta chain variable domain of TCR clone 14731 (TRBV9, TRBJ1-6)
CASSVAGTGDSPLHF

SEQ ID NO: 29463 - protein, 14 aa, Homo sapiens
  CDR3 for alpha chain variable domain of TCR clone 14732 (TRAV1-2, TRAJ8)
CVVREDTGFQKLVF

SEQ ID NO: 29464 - protein, 15 aa, Homo sapiens
  CDR3 for beta chain variable domain of TCR clone 14732 (TRBV6-3, TRBJ2-7)
CASSSPGTVFYEQYF

SEQ ID NO: 29465 - protein, 13 aa, Homo sapiens
  CDR3 for alpha chain variable domain of TCR clone 14733 (TRAV35, TRAJ36)
CAGPRIGANNPFF

SEQ ID NO: 29466 - protein, 15 aa, Homo sapiens
  CDR3 for beta chain variable domain of TCR clone 14733 (TRBV28, TRBJ2-5)
CASSPPWSYQETQYF

SEQ ID NO: 29467 - protein, 15 aa, Homo sapiens
  CDR3 for alpha chain variable domain of TCR clone 14734 (TRAV12-3, TRAJ6)
CAMSATTGGSYTPTF

SEQ ID NO: 29468 - protein, 16 aa, Homo sapiens
  CDR3 for beta chain variable domain of TCR clone 14734 (TRBV20-1, TRBJ1-2)
CSASMGQGVANYGYTF

SEQ ID NO: 29469 - protein, 12 aa, Homo sapiens
  CDR3 for alpha chain variable domain of TCR clone 14735 (TRAV13-2, TRAJ23)
CAERHRGGKPIF

SEQ ID NO: 29470 - protein, 12 aa, Homo sapiens
  CDR3 for beta chain variable domain of TCR clone 14735 (TRBV12-4, TRBJ1-2)
CASSFIWLHLRF

SEQ ID NO: 29471 - protein, 14 aa, Homo sapiens
  CDR3 for alpha chain variable domain of TCR clone 14736 (TRAV17, TRAJ53)
CALNSGGSNYKLTF

SEQ ID NO: 29472 - protein, 12 aa, Homo sapiens
  CDR3 for beta chain variable domain of TCR clone 14736 (TRBV6-5, TRBJ2-5)
CASSEGSETQYF

SEQ ID NO: 29473 - protein, 13 aa, Homo sapiens
  CDR3 for alpha chain variable domain of TCR clone 14737 (TRAV8-1, TRAJ30)
CAVIMNRDDEIIF

SEQ ID NO: 29474 - protein, 14 aa, Homo sapiens
  CDR3 for beta chain variable domain of TCR clone 14737 (TRBV7-2, TRBJ1-6)
CASSLQGANSPLHF

SEQ ID NO: 29475 - protein, 15 aa, Homo sapiens
  CDR3 for alpha chain variable domain of TCR clone 14738 (TRAV13-2, TRAJ28)
CAENNAGAGSYQLTF

SEQ ID NO: 29476 - protein, 13 aa, Homo sapiens
  CDR3 for beta chain variable domain of TCR clone 14738 (TRBV25-1, TRBJ1-2)
CASSENMGRGYTF

SEQ ID NO: 29477 - protein, 11 aa, Homo sapiens
  CDR3 for alpha chain variable domain of TCR clone 14739 (TRAV2, TRAJ33)
CAVDSNYQLIW

SEQ ID NO: 29478 - protein, 15 aa, Homo sapiens
  CDR3 for beta chain variable domain of TCR clone 14739 (TRBV19, TRBJ1-2)
CASSVGQVLNYGYAF

SEQ ID NO: 29479 - protein, 14 aa, Homo sapiens
  CDR3 for alpha chain variable domain of TCR clone 14740 (TRAV26-1, TRAJ38)
CIADNAGSNRKLIW

SEQ ID NO: 29480 - protein, 13 aa, Homo sapiens
  CDR3 for beta chain variable domain of TCR clone 14740 (TRBV20-1, TRBJ1-1)
CSARGGGNTEAFF

SEQ ID NO: 29481 - protein, 13 aa, Homo sapiens
  CDR3 for alpha chain variable domain of TCR clone 14741 (TRAV1-2, TRAJ9)
CAALNTGDFKTIF

SEQ ID NO: 29482 - protein, 13 aa, Homo sapiens
  CDR3 for beta chain variable domain of TCR clone 14741 (TRBV19, TRBJ1-2)
CASSVPGQDGYTF

SEQ ID NO: 29483 - protein, 13 aa, Homo sapiens
  CDR3 for alpha chain variable domain of TCR clone 14742 (TRAV27, TRAJ45)
CRSSGGGADGLTF

SEQ ID NO: 29484 - protein, 17 aa, Homo sapiens
  CDR3 for beta chain variable domain of TCR clone 14742 (TRBV11-2, TRBJ2-1)
CASSSYPPGVEYNEQFF

SEQ ID NO: 29485 - protein, 14 aa, Homo sapiens
  CDR3 for alpha chain variable domain of TCR clone 14743 (TRAV13-1, TRAJ35)
CAASKGGFGNVLHC

SEQ ID NO: 29486 - protein, 13 aa, Homo sapiens
  CDR3 for beta chain variable domain of TCR clone 14743 (TRBV7-3, TRBJ1-1)
CASIQDWGAEAFF

SEQ ID NO: 29487 - protein, 14 aa, Homo sapiens
  CDR3 for alpha chain variable domain of TCR clone 14744 (TRAV12-2, TRAJ45)
CAVNIGGGADGLTF

SEQ ID NO: 29488 - protein, 13 aa, Homo sapiens
  CDR3 for beta chain variable domain of TCR clone 14744 (TRBV19, TRBJ2-2)
CASSIWSTGELFL

SEQ ID NO: 29489 - protein, 14 aa, Homo sapiens
  CDR3 for alpha chain variable domain of TCR clone 14745 (TRAV8-1, TRAJ5)
CAVRTDTGRRALTF

SEQ ID NO: 29490 - protein, 17 aa, Homo sapiens
  CDR3 for beta chain variable domain of TCR clone 14745 (TRBV5-1, TRBJ2-5)
CASSLLGLAANQETQYF

SEQ ID NO: 29491 - protein, 15 aa, Homo sapiens
  CDR3 for alpha chain variable domain of TCR clone 14746 (TRAV17, TRAJ57)
CATGPSQGGSAKLVF

SEQ ID NO: 29492 - protein, 16 aa, Homo sapiens
  CDR3 for beta chain variable domain of TCR clone 14746 (TRBV12-4, TRBJ1-5)
CASSRPVGGSNQPQHF

SEQ ID NO: 29493 - protein, 14 aa, Homo sapiens
  CDR3 for alpha chain variable domain of TCR clone 14747 (TRAV8-4, TRAJ27)
CAVSDNTNAGKSTF

SEQ ID NO: 29494 - protein, 15 aa, Homo sapiens
  CDR3 for beta chain variable domain of TCR clone 14747 (TRBV7-6, TRBJ2-7)
CASSLGQGASYEQYF

SEQ ID NO: 29495 - protein, 13 aa, Homo sapiens
  CDR3 for alpha chain variable domain of TCR clone 14748 (TRAV1-2, TRAJ9)
CAALNTGGFKTIF

SEQ ID NO: 29496 - protein, 13 aa, Homo sapiens
  CDR3 for beta chain variable domain of TCR clone 14748 (TRBV19, TRBJ1-2)
CASGVPGQDGYTF

SEQ ID NO: 29497 - protein, 12 aa, Homo sapiens
  CDR3 for alpha chain variable domain of TCR clone 14749 (TRAV13-1, TRAJ21)
CAAKEGFNKFYF

SEQ ID NO: 29498 - protein, 14 aa, Homo sapiens
  CDR3 for beta chain variable domain of TCR clone 14749 (TRBV4-3, TRBJ2-2)
CASSQGHVTGELFF

SEQ ID NO: 29499 - protein, 15 aa, Homo sapiens
  CDR3 for alpha chain variable domain of TCR clone 14750 (TRAV25, TRAJ53)
CPTSNSGGSNYKLTF

SEQ ID NO: 29500 - protein, 14 aa, Homo sapiens
  CDR3 for beta chain variable domain of TCR clone 14750 (TRBV11-2, TRBJ2-3)
CASSRLARTDTQYF

SEQ ID NO: 29501 - protein, 13 aa, Homo sapiens
  CDR3 for alpha chain variable domain of TCR clone 14751 (TRAV21, TRAJ57)
CAVTQGGSEKLVF

SEQ ID NO: 29502 - protein, 16 aa, Homo sapiens
  CDR3 for beta chain variable domain of TCR clone 14751 (TRBV29-1, TRBJ2-7)
CSVEDAGDGTAYEQYF

SEQ ID NO: 29503 - protein, 13 aa, Homo sapiens
  CDR3 for alpha chain variable domain of TCR clone 14752 (TRAV3, TRAJ21)
CAVREPDFNKFYF

SEQ ID NO: 29504 - protein, 15 aa, Homo sapiens
  CDR3 for beta chain variable domain of TCR clone 14752 (TRBV20-1, TRBJ2-7)
CSARDRVSGMDEQYF

SEQ ID NO: 29505 - protein, 13 aa, Homo sapiens
  CDR3 for alpha chain variable domain of TCR clone 14753 (TRAV29/DV5, TRAJ31)
CAASRNNNARLMF

SEQ ID NO: 29506 - protein, 16 aa, Homo sapiens
  CDR3 for beta chain variable domain of TCR clone 14753 (TRBV7-2, TRBJ2-6)
CASSERRASGANVLTF

SEQ ID NO: 29507 - protein, 11 aa, Homo sapiens
  CDR3 for alpha chain variable domain of TCR clone 14754 (TRAV13-1, TRAJ23)
CAASSRGKLIF

SEQ ID NO: 29508 - protein, 12 aa, Homo sapiens
  CDR3 for beta chain variable domain of TCR clone 14754 (TRBV7-3, TRBJ2-5)
CQQLPGGETQYF

SEQ ID NO: 29509 - protein, 14 aa, Homo sapiens
  CDR3 for alpha chain variable domain of TCR clone 14755 (TRAV38-1, TRAJ29)
CAFITPSGNTPLVL

SEQ ID NO: 29510 - protein, 14 aa, Homo sapiens
  CDR3 for beta chain variable domain of TCR clone 14755 (TRBV18, TRBJ2-7)
CASSPRGGAYEQYF

SEQ ID NO: 29511 - protein, 16 aa, Homo sapiens
  CDR3 for alpha chain variable domain of TCR clone 14756 (TRAV12-3, TRAJ53)
CAMSPGSGGSNYKLTF

SEQ ID NO: 29512 - protein, 17 aa, Homo sapiens
  CDR3 for beta chain variable domain of TCR clone 14756 (TRBV28, TRBJ2-5)
CAGSTPEGDALQETQYF

SEQ ID NO: 29513 - protein, 16 aa, Homo sapiens
  CDR3 for alpha chain variable domain of TCR clone 14757 (TRAV1-2, TRAJ10)
CAVRGVLTGGGKKLTF

SEQ ID NO: 29514 - protein, 12 aa, Homo sapiens
  CDR3 for beta chain variable domain of TCR clone 14757 (TRBV7-8, TRBJ2-7)
CASSLGDREQYF

SEQ ID NO: 29515 - protein, 13 aa, Homo sapiens
  CDR3 for alpha chain variable domain of TCR clone 14758 (TRAV21, TRAJ57)
CAVTQGGSEKLVF

SEQ ID NO: 29516 - protein, 16 aa, Homo sapiens
  CDR3 for beta chain variable domain of TCR clone 14758 (TRBV29-1, TRBJ2-7)
GSVEDAEDGTAYEQYF

SEQ ID NO: 29517 - protein, 14 aa, Homo sapiens
  CDR3 for alpha chain variable domain of TCR clone 14759 (TRAV13-1, TRAJ35)
CAESKGGFGNVLHC

SEQ ID NO: 29518 - protein, 13 aa, Homo sapiens
  CDR3 for beta chain variable domain of TCR clone 14759 (TRBV7-3, TRBJ1-1)
CASSQDWGAEAFF

SEQ ID NO: 29519 - protein, 15 aa, Homo sapiens
  CDR3 for alpha chain variable domain of TCR clone 14760 (TRAV25, TRAJ53)
CPTSNSGGSNYKLTF

SEQ ID NO: 29520 - protein, 14 aa, Homo sapiens
  CDR3 for beta chain variable domain of TCR clone 14760 (TRBV11-2, TRBJ2-3)
CANSRLARTDTQYF

SEQ ID NO: 29521 - protein, 14 aa, Homo sapiens
  CDR3 for alpha chain variable domain of TCR clone 14761 (TRAV17, TRAJ12)
CATDREDSSYKLIF

SEQ ID NO: 29522 - protein, 16 aa, Homo sapiens
  CDR3 for beta chain variable domain of TCR clone 14761 (TRBV11-2, TRBJ2-1)
CASSYRLAGVWNEQFF

SEQ ID NO: 29523 - protein, 11 aa, Homo sapiens
  CDR3 for alpha chain variable domain of TCR clone 14762 (TRAV23/DV6, TRAJ48)
CAPRWSEKLTF

SEQ ID NO: 29524 - protein, 13 aa, Homo sapiens
  CDR3 for beta chain variable domain of TCR clone 14762 (TRBV12-4, TRBJ2-5)
CASSPGTEETQYF

SEQ ID NO: 29525 - protein, 15 aa, Homo sapiens
  CDR3 for alpha chain variable domain of TCR clone 14763 (TRAV26-1, TRAJ29)
CIVRVEGSGNTPLVF

SEQ ID NO: 29526 - protein, 15 aa, Homo sapiens
  CDR3 for beta chain variable domain of TCR clone 14763 (TRBV7-9, TRBJ1-5)
CSSSQGHQPNQPQHF

SEQ ID NO: 29527 - protein, 17 aa, Homo sapiens
  CDR3 for alpha chain variable domain of TCR clone 14764 (TRAV3, TRAJ6)
CAVRDGPRAGGSYIPTF

SEQ ID NO: 29528 - protein, 14 aa, Homo sapiens
  CDR3 for beta chain variable domain of TCR clone 14764 (TRBV7-2, TRBJ2-7)
CASSPKTSFYEQYY

SEQ ID NO: 29529 - protein, 13 aa, Homo sapiens
  CDR3 for alpha chain variable domain of TCR clone 14765 (TRAV12-3, TRAJ58)
CAMGETSGSRLTF

SEQ ID NO: 29530 - protein, 15 aa, Homo sapiens
  CDR3 for beta chain variable domain of TCR clone 14765 (TRBV20-1, TRBJ2-5)
CSATPLTGDQETQYF

SEQ ID NO: 29531 - protein, 12 aa, Homo sapiens
  CDR3 for alpha chain variable domain of TCR clone 14766 (TRAV12-3, TRAJ20)
CAMVRGDYKLSF

SEQ ID NO: 29532 - protein, 14 aa, Homo sapiens
  CDR3 for beta chain variable domain of TCR clone 14766 (TRBV19, TRBJ2-1)
CASPTFVLSGEQFF

SEQ ID NO: 29533 - protein, 14 aa, Homo sapiens
  CDR3 for alpha chain variable domain of TCR clone 14767 (TRAV1-2, TRAJ8)
CAVREDTGFQKLVF

SEQ ID NO: 29534 - protein, 14 aa, Homo sapiens
  CDR3 for beta chain variable domain of TCR clone 14767 (TRBV18, TRBJ2-5)
CASSPGVSQETQYF

SEQ ID NO: 29535 - protein, 13 aa, Homo sapiens
  CDR3 for alpha chain variable domain of TCR clone 14768 (TRAV21, TRAJ20)
CAVGLRVDYKLSF

SEQ ID NO: 29536 - protein, 12 aa, Homo sapiens
  CDR3 for beta chain variable domain of TCR clone 14768 (TRBV11-2, TRBJ2-2)
CASSLGGGELFF

SEQ ID NO: 29537 - protein, 14 aa, Homo sapiens
  CDR3 for alpha chain variable domain of TCR clone 14769 (TRAV2, TRAJ37)
CAVDFTSNKGKLIF

SEQ ID NO: 29538 - protein, 15 aa, Homo sapiens
  CDR3 for beta chain variable domain of TCR clone 14769 (TRBV20-1, TRBJ1-1)
CSASRGVTGNTEAFF

SEQ ID NO: 29539 - protein, 13 aa, Homo sapiens
  CDR3 for alpha chain variable domain of TCR clone 14770 (TRAV3, TRAJ5)
CAVRVLGRRALTF

SEQ ID NO: 29540 - protein, 15 aa, Homo sapiens
  CDR3 for beta chain variable domain of TCR clone 14770 (TRBV20-1, TRBJ1-1)
CSARLGTGEYTEAFF

SEQ ID NO: 29541 - protein, 13 aa, Homo sapiens
  CDR3 for alpha chain variable domain of TCR clone 14771 (TRAV27, TRAJ45)
CRSSGGGADGLTF

SEQ ID NO: 29542 - protein, 13 aa, Homo sapiens
  CDR3 for beta chain variable domain of TCR clone 14771 (TRBV27, TRBJ1-4)
CASSLMGDEKLFF

SEQ ID NO: 29543 - protein, 14 aa, Homo sapiens
  CDR3 for alpha chain variable domain of TCR clone 14772 (TRAV35, TRAJ22)
CAGLRPGSARQLTF

SEQ ID NO: 29544 - protein, 14 aa, Homo sapiens
  CDR3 for beta chain variable domain of TCR clone 14772 (TRBV19, TRBJ2-1)
CASPTFVLSGEQFF

SEQ ID NO: 29545 - protein, 15 aa, Homo sapiens
  CDR3 for alpha chain variable domain of TCR clone 14773 (TRAV38-2/DV8, TRAJ45)
CAYWDSGGGADGLTF

SEQ ID NO: 29546 - protein, 15 aa, Homo sapiens
  CDR3 for beta chain variable domain of TCR clone 14773 (TRBV20-1, TRBJ2-7)
CSARDRVSGMDEQYF

SEQ ID NO: 29547 - protein, 14 aa, Homo sapiens
  CDR3 for alpha chain variable domain of TCR clone 14774 (TRAV12-2, TRAJ32)
CAHPESGATNKPIF

SEQ ID NO: 29548 - protein, 14 aa, Homo sapiens
  CDR3 for beta chain variable domain of TCR clone 14774 (TRBV4-2, TRBJ2-3)
CASRETRAPGMQYF

SEQ ID NO: 29549 - protein, 14 aa, Homo sapiens
  CDR3 for alpha chain variable domain of TCR clone 14775 (TRAV12-2, TRAJ13)
CAVKKTGGYQKVTF

SEQ ID NO: 29550 - protein, 15 aa, Homo sapiens
  CDR3 for beta chain variable domain of TCR clone 14775 (TRBV27, TRBJ2-1)
CASSNGGGSSNEQCF

SEQ ID NO: 29551 - protein, 13 aa, Homo sapiens
  CDR3 for alpha chain variable domain of TCR clone 14776 (TRAV20, TRAJ49)
CAVQARTGNQFYF

SEQ ID NO: 29552 - protein, 13 aa, Homo sapiens
  CDR3 for beta chain variable domain of TCR clone 14776 (TRBV4-2, TRBJ1-1)
CASSQAGNTEAFF

SEQ ID NO: 29553 - protein, 12 aa, Homo sapiens
  CDR3 for alpha chain variable domain of TCR clone 14777 (TRAV8-3, TRAJ20)
CAVGSNDYKLSF

SEQ ID NO: 29554 - protein, 16 aa, Homo sapiens
  CDR3 for beta chain variable domain of TCR clone 14777 (TRBV19, TRBJ2-2)
CASRSPGTGATGELFF

SEQ ID NO: 29555 - protein, 15 aa, Homo sapiens
  CDR3 for alpha chain variable domain of TCR clone 14778 (TRAV25, TRAJ53)
CPTSNSGGSNYKLTF

SEQ ID NO: 29556 - protein, 14 aa, Homo sapiens
  CDR3 for beta chain variable domain of TCR clone 14778 (TRBV11-2, TRBJ2-3)
CASSRLARTDTQYL

SEQ ID NO: 29557 - protein, 11 aa, Homo sapiens
  CDR3 for alpha chain variable domain of TCR clone 14779 (TRAV4, TRAJ23)
CLVAPGGKLIF

SEQ ID NO: 29558 - protein, 15 aa, Homo sapiens
  CDR3 for beta chain variable domain of TCR clone 14779 (TRBV11-3, TRBJ2-7)
CASSPGPASSYEQYF

SEQ ID NO: 29559 - protein, 13 aa, Homo sapiens
  CDR3 for alpha chain variable domain of TCR clone 14780 (TRAV8-4, TRAJ26)
CAVSSSMVRILSL

SEQ ID NO: 29560 - protein, 15 aa, Homo sapiens
  CDR3 for beta chain variable domain of TCR clone 14780 (TRBV19, TRBJ1-5)
CASSIVWADNQPQHF

SEQ ID NO: 29561 - protein, 13 aa, Homo sapiens
  CDR3 for alpha chain variable domain of TCR clone 14781 (TRAV2, TRAJ40)
CAVVTSETYKYIF

SEQ ID NO: 29562 - protein, 15 aa, Homo sapiens
  CDR3 for beta chain variable domain of TCR clone 14781 (TRBV11-3, TRBJ2-3)
CASLKDGREGDTQYF

SEQ ID NO: 29563 - protein, 14 aa, Homo sapiens
  CDR3 for alpha chain variable domain of TCR clone 14782 (TRAV12-2, TRAJ5)
CAVNRSTGGRALTF

SEQ ID NO: 29564 - protein, 12 aa, Homo sapiens
  CDR3 for beta chain variable domain of TCR clone 14782 (TRBV19, TRBJ1-5)
CASSIAQQPQHF

SEQ ID NO: 29565 - protein, 11 aa, Homo sapiens
  CDR3 for alpha chain variable domain of TCR clone 14783 (TRAV2, TRAJ33)
CAVDSNYQLIW

SEQ ID NO: 29566 - protein, 15 aa, Homo sapiens
  CDR3 for beta chain variable domain of TCR clone 14783 (TRBV19, TRBJ1-2)
CASSVGQVLNYGYTL

SEQ ID NO: 29567 - protein, 14 aa, Homo sapiens
  CDR3 for alpha chain variable domain of TCR clone 14784 (TRAV17, TRAJ16)
CATADFSDGQKLLF

SEQ ID NO: 29568 - protein, 15 aa, Homo sapiens
  CDR3 for beta chain variable domain of TCR clone 14784 (TRBV5-8, TRBJ1-1)
CASSFSGTSLKGAFF

SEQ ID NO: 29569 - protein, 14 aa, Homo sapiens
  CDR3 for alpha chain variable domain of TCR clone 14785 (TRAV12-1, TRAJ17)
CVVNYEAAGNKLTF

SEQ ID NO: 29570 - protein, 17 aa, Homo sapiens
  CDR3 for beta chain variable domain of TCR clone 14785 (TRBV20-1, TRBJ2-1)
CSASSSGLAGSYNEQFF

SEQ ID NO: 29571 - protein, 14 aa, Homo sapiens
  CDR3 for alpha chain variable domain of TCR clone 14786 (TRAV13-2, TRAJ16)
CAENNWEDGQKLLF

SEQ ID NO: 29572 - protein, 15 aa, Homo sapiens
  CDR3 for beta chain variable domain of TCR clone 14786 (TRBV6-5, TRBJ1-5)
CASSYSWDSNQPQHF

SEQ ID NO: 29573 - protein, 15 aa, Homo sapiens
  CDR3 for alpha chain variable domain of TCR clone 14787 (TRAV27, TRAJ38)
CAARRTAGNNRKLIW

SEQ ID NO: 29574 - protein, 13 aa, Homo sapiens
  CDR3 for beta chain variable domain of TCR clone 14787 (TRBV12-5, TRBJ2-3)
CASGDRQSDTQYF

SEQ ID NO: 29575 - protein, 15 aa, Homo sapiens
  CDR3 for alpha chain variable domain of TCR clone 14788 (TRAV21, TRAJ24)
CAARSSTDSWGKLRF

SEQ ID NO: 29576 - protein, 13 aa, Homo sapiens
  CDR3 for beta chain variable domain of TCR clone 14788 (TRBV11-2, TRBJ2-5)
CASSSTGEETQYF

SEQ ID NO: 29577 - protein, 17 aa, Homo sapiens
  CDR3 for alpha chain variable domain of TCR clone 14789 (TRAV4, TRAJ13)
CLVGVQGSSGGYQKVTF

SEQ ID NO: 29578 - protein, 18 aa, Homo sapiens
  CDR3 for beta chain variable domain of TCR clone 14789 (TRBV15, TRBJ2-3)
CATSRDGARGWDTDTQYF

SEQ ID NO: 29579 - protein, 14 aa, Homo sapiens
  CDR3 for alpha chain variable domain of TCR clone 14790 (TRAV20, TRAJ42)
CAVQAGGSQGNLIF

SEQ ID NO: 29580 - protein, 14 aa, Homo sapiens
  CDR3 for beta chain variable domain of TCR clone 14790 (TRBV28, TRBJ1-2)
CASRIQGANYGYAF

SEQ ID NO: 29581 - protein, 15 aa, Homo sapiens
  CDR3 for alpha chain variable domain of TCR clone 14791 (TRAV12-3, TRAJ6)
CAMSATTGGSYMPTF

SEQ ID NO: 29582 - protein, 16 aa, Homo sapiens
  CDR3 for beta chain variable domain of TCR clone 14791 (TRBV20-1, TRBJ1-2)
CSASMGQGVANYGYTF

SEQ ID NO: 29583 - protein, 23 aa, Homo sapiens
  CDR3 for alpha chain variable domain of TCR clone 14792 (TRAV1-1, TRAJ11)
LLQELQMKDSASYFCAGYSTLTF

SEQ ID NO: 29584 - protein, 16 aa, Homo sapiens
  CDR3 for beta chain variable domain of TCR clone 14792 (TRBV7-2, TRBJ2-3)
CASSLVALYSTDTQYF

SEQ ID NO: 29585 - protein, 14 aa, Homo sapiens
  CDR3 for alpha chain variable domain of TCR clone 14793 (TRAV1-2, TRAJ8)
CAVREDTGFQKLVF

SEQ ID NO: 29586 - protein, 15 aa, Homo sapiens
  CDR3 for beta chain variable domain of TCR clone 14793 (TRBV6-3, TRBJ2-7)
CASRSPGTVFYEQYF

SEQ ID NO: 29587 - protein, 18 aa, Homo sapiens
  CDR3 for alpha chain variable domain of TCR clone 14794 (TRAV13-1, TRAJ52)
CAAKNPNAGGTSYGNLTF

SEQ ID NO: 29588 - protein, 15 aa, Homo sapiens
  CDR3 for beta chain variable domain of TCR clone 14794 (TRBV6-1, TRBJ2-3)
CASSERGGITDTQYF

SEQ ID NO: 29589 - protein, 16 aa, Homo sapiens
  CDR3 for alpha chain variable domain of TCR clone 14795 (TRAV30, TRAJ24)
CGTEIVDADSWGKFQF

SEQ ID NO: 29590 - protein, 15 aa, Homo sapiens
  CDR3 for beta chain variable domain of TCR clone 14795 (TRBV10-2, TRBJ2-6)
CASSEQGTGANVLTF

SEQ ID NO: 29591 - protein, 12 aa, Homo sapiens
  CDR3 for alpha chain variable domain of TCR clone 14796 (TRAV8-3, TRAJ20)
CAVGANDYKLSF

SEQ ID NO: 29592 - protein, 16 aa, Homo sapiens
  CDR3 for beta chain variable domain of TCR clone 14796 (TRBV19, TRBJ2-2)
CASRSPGTGATGELFL

SEQ ID NO: 29593 - protein, 15 aa, Homo sapiens
  CDR3 for alpha chain variable domain of TCR clone 14797 (TRAV8-3, TRAJ45)
CASSYSGGGADGLTF

SEQ ID NO: 29594 - protein, 15 aa, Homo sapiens
  CDR3 for beta chain variable domain of TCR clone 14797 (TRBV9, TRBJ1-6)
CASSVAGTGDSPLHF

SEQ ID NO: 29595 - protein, 13 aa, Homo sapiens
  CDR3 for alpha chain variable domain of TCR clone 14798 (TRAV2, TRAJ40)
CAVVTSGTYKYIF

SEQ ID NO: 29596 - protein, 11 aa, Homo sapiens
  CDR3 for beta chain variable domain of TCR clone 14798 (TRBV29-1, TRBJ2-5)
CSEDRTGTQYF

SEQ ID NO: 29597 - protein, 23 aa, Homo sapiens
  CDR3 for alpha chain variable domain of TCR clone 14799 (TRAV26-1, TRAJ38)
CIADNAGNNHIQNPDPAVYQLRD

SEQ ID NO: 29598 - protein, 16 aa, Homo sapiens
  CDR3 for beta chain variable domain of TCR clone 14799 (TRBV19, TRBJ2-1)
CASSKAGPSSYNEQFF

SEQ ID NO: 29599 - protein, 15 aa, Homo sapiens
  CDR3 for alpha chain variable domain of TCR clone 14800 (TRAV3, TRAJ20)
CAVRDIKLSDYKLSF

SEQ ID NO: 29600 - protein, 15 aa, Homo sapiens
  CDR3 for beta chain variable domain of TCR clone 14800 (TRBV7-9, TRBJ1-6)
CASSSPGRGNSHLHF

SEQ ID NO: 29601 - protein, 12 aa, Homo sapiens
  CDR3 for alpha chain variable domain of TCR clone 14801 (TRAV22, TRAJ22)
CAPGGSARQLTF

SEQ ID NO: 29602 - protein, 15 aa, Homo sapiens
  CDR3 for beta chain variable domain of TCR clone 14801 (TRBV20-1, TRBJ1-4)
CSARFITGEDEKLFF

SEQ ID NO: 29603 - protein, 14 aa, Homo sapiens
  CDR3 for alpha chain variable domain of TCR clone 14802 (TRAV12-2, TRAJ17)
CAVLFKAAGNKLNF

SEQ ID NO: 29604 - protein, 17 aa, Homo sapiens
  CDR3 for beta chain variable domain of TCR clone 14802 (TRBV20-1, TRBJ2-2)
CSASGSGQGGLTGELFF

SEQ ID NO: 29605 - protein, 16 aa, Homo sapiens
  CDR3 for alpha chain variable domain of TCR clone 14803 (TRAV12-3, TRAJ53)
CAMSPGSGGSNYKLTF

SEQ ID NO: 29606 - protein, 11 aa, Homo sapiens
  CDR3 for beta chain variable domain of TCR clone 14803 (TRBV29-1, TRBJ2-5)
CSEDRTWTQYF

SEQ ID NO: 29607 - protein, 14 aa, Homo sapiens
  CDR3 for alpha chain variable domain of TCR clone 14804 (TRAV26-1, TRAJ38)
CIADNADNNRKLIW

SEQ ID NO: 29608 - protein, 13 aa, Homo sapiens
  CDR3 for beta chain variable domain of TCR clone 14804 (TRBV20-1, TRBJ1-1)
CSARGGGNTEAFF

SEQ ID NO: 29609 - protein, 13 aa, Homo sapiens
  CDR3 for alpha chain variable domain of TCR clone 14805 (TRAV2, TRAJ40)
CAVVTSGTYKYIF

SEQ ID NO: 29610 - protein, 15 aa, Homo sapiens
  CDR3 for beta chain variable domain of TCR clone 14805 (TRBV19, TRBJ1-1)
CASTSGQIQNTEAFF

SEQ ID NO: 29611 - protein, 14 aa, Homo sapiens
  CDR3 for alpha chain variable domain of TCR clone 14806 (TRAV1-2, TRAJ16)
CAVNRFSDGQKLLF

SEQ ID NO: 29612 - protein, 15 aa, Homo sapiens
  CDR3 for beta chain variable domain of TCR clone 14806 (TRBV7-9, TRBJ1-6)
RASSSPGRGNSPLHF

SEQ ID NO: 29613 - protein, 16 aa, Homo sapiens
  CDR3 for alpha chain variable domain of TCR clone 14807 (TRAV12-3, TRAJ53)
CAMSPGSGGSNYTLTF

SEQ ID NO: 29614 - protein, 11 aa, Homo sapiens
  CDR3 for beta chain variable domain of TCR clone 14807 (TRBV29-1, TRBJ2-5)
CSEDRTGTQYF

SEQ ID NO: 29615 - protein, 14 aa, Homo sapiens
  CDR3 for alpha chain variable domain of TCR clone 14808 (TRAV35, TRAJ22)
CAGLRSGSARQLTF

SEQ ID NO: 29616 - protein, 15 aa, Homo sapiens
  CDR3 for beta chain variable domain of TCR clone 14808 (TRBV12-4, TRBJ2-5)
CASSPPTGLQETQYF

SEQ ID NO: 29617 - protein, 16 aa, Homo sapiens
  CDR3 for alpha chain variable domain of TCR clone 14809 (TRAV1-2, TRAJ6)
CAVRDQGTGGSYIPTF

SEQ ID NO: 29618 - protein, 12 aa, Homo sapiens
  CDR3 for beta chain variable domain of TCR clone 14809 (TRBV11-2, TRBJ2-2)
CASSLGGGELFF

SEQ ID NO: 29619 - protein, 16 aa, Homo sapiens
  CDR3 for alpha chain variable domain of TCR clone 14810 (TRAV21, TRAJ37)
CAVRTAGSSNTGKLIF

SEQ ID NO: 29620 - protein, 13 aa, Homo sapiens
  CDR3 for beta chain variable domain of TCR clone 14810 (TRBV7-9, TRBJ2-5)
CASLPPGRETQYF

SEQ ID NO: 29621 - protein, 15 aa, Homo sapiens
  CDR3 for alpha chain variable domain of TCR clone 14811 (TRAV3, TRAJ5)
CAVRDRKTGRKALTF

SEQ ID NO: 29622 - protein, 15 aa, Homo sapiens
  CDR3 for beta chain variable domain of TCR clone 14811 (TRBV7-8, TRBJ2-1)
CASSLADSLYNEQFF

SEQ ID NO: 29623 - protein, 12 aa, Homo sapiens
  CDR3 for alpha chain variable domain of TCR clone 14812 (TRAV3, TRAJ7)
CADLLWEQQTRF

SEQ ID NO: 29624 - protein, 13 aa, Homo sapiens
  CDR3 for beta chain variable domain of TCR clone 14812 (TRBV7-3, TRBJ2-5)
CASSVRGGETQYF

SEQ ID NO: 29625 - protein, 14 aa, Homo sapiens
  CDR3 for alpha chain variable domain of TCR clone 14813 (TRAV12-2, TRAJ40)
CAVKIPSGTYKYIF

SEQ ID NO: 29626 - protein, 14 aa, Homo sapiens
  CDR3 for beta chain variable domain of TCR clone 14813 (TRBV20-1, TRBJ1-1)
CSAQTRIGGTEAFF

SEQ ID NO: 29627 - protein, 15 aa, Homo sapiens
  CDR3 for alpha chain variable domain of TCR clone 14814 (TRAV36/DV7, TRAJ53)
CAVEGSGGSNYKLTF

SEQ ID NO: 29628 - protein, 12 aa, Homo sapiens
  CDR3 for beta chain variable domain of TCR clone 14814 (TRBV7-8, TRBJ2-1)
CASSLGHNEQFF

SEQ ID NO: 29629 - protein, 14 aa, Homo sapiens
  CDR3 for alpha chain variable domain of TCR clone 14815 (TRAV13-1, TRAJ6)
CAASITGGSYIPTF

SEQ ID NO: 29630 - protein, 17 aa, Homo sapiens
  CDR3 for beta chain variable domain of TCR clone 14815 (TRBV7-8, TRBJ2-6)
CASSAGTGGAGANVLTF

SEQ ID NO: 29631 - protein, 15 aa, Homo sapiens
  CDR3 for alpha chain variable domain of TCR clone 14816 (TRAV2, TRAJ9)
CAVEDRGTVGFKTIF

SEQ ID NO: 29632 - protein, 16 aa, Homo sapiens
  CDR3 for beta chain variable domain of TCR clone 14816 (TRBV24-1, TRBJ2-3)
CATSDPGTGATDTQYF

SEQ ID NO: 29633 - protein, 11 aa, Homo sapiens
  CDR3 for alpha chain variable domain of TCR clone 14817 (TRAV1-2, TRAJ31)
CAVNNNARLMF

SEQ ID NO: 29634 - protein, 15 aa, Homo sapiens
  CDR3 for beta chain variable domain of TCR clone 14817 (TRBV28, TRBJ2-1)
CASSIIAGGRSEQFL

SEQ ID NO: 29635 - protein, 14 aa, Homo sapiens
  CDR3 for alpha chain variable domain of TCR clone 14818 (TRAV12-3, TRAJ10)
SHLPLTGGGNKLTF

SEQ ID NO: 29636 - protein, 11 aa, Homo sapiens
  CDR3 for beta chain variable domain of TCR clone 14818 (TRBV20-1, TRBJ2-5)
CSAGRAETQYF

SEQ ID NO: 29637 - protein, 16 aa, Homo sapiens
  CDR3 for alpha chain variable domain of TCR clone 14819 (TRAV27, TRAJ13)
CAGAKSDSGGYQKATF

SEQ ID NO: 29638 - protein, 15 aa, Homo sapiens
  CDR3 for beta chain variable domain of TCR clone 14819 (TRBV29-1, TRBJ2-1)
CSVGRHALFYNEQFF

SEQ ID NO: 29639 - protein, 14 aa, Homo sapiens
  CDR3 for alpha chain variable domain of TCR clone 14820 (TRAV12-1, TRAJ12)
CVVTRMGSSYKLIF

SEQ ID NO: 29640 - protein, 13 aa, Homo sapiens
  CDR3 for beta chain variable domain of TCR clone 14820 (TRBV20-1, TRBJ1-1)
CSARGGGNTEAFF

SEQ ID NO: 29641 - protein, 10 aa, Homo sapiens
  CDR3 for alpha chain variable domain of TCR clone 14821 (TRAV12-3, TRAJ49)
CAMNDDQFYF

SEQ ID NO: 29642 - protein, 13 aa, Homo sapiens
  CDR3 for beta chain variable domain of TCR clone 14821 (TRBV12-4, TRBJ1-1)
CASSPGTGSEAFF

SEQ ID NO: 29643 - protein, 15 aa, Homo sapiens
  CDR3 for alpha chain variable domain of TCR clone 14822 (TRAV3, TRAJ4)
CAVRDGTGGYNKLIL

SEQ ID NO: 29644 - protein, 16 aa, Homo sapiens
  CDR3 for beta chain variable domain of TCR clone 14822 (TRBV27, TRBJ2-2)
CASSSSGVSNTGELFF

SEQ ID NO: 29645 - protein, 15 aa, Homo sapiens
  CDR3 for alpha chain variable domain of TCR clone 14823 (TRAV3, TRAJ5)
CALRDLDTGRRALTF

SEQ ID NO: 29646 - protein, 13 aa, Homo sapiens
  CDR3 for beta chain variable domain of TCR clone 14823 (TRBV12-4, TRBJ2-7)
CASSPTETYEQYF

SEQ ID NO: 29647 - protein, 13 aa, Homo sapiens
  CDR3 for alpha chain variable domain of TCR clone 14824 (TRAV20, TRAJ37)
CAGCSSNKGKLIF

SEQ ID NO: 29648 - protein, 11 aa, Homo sapiens
  CDR3 for beta chain variable domain of TCR clone 14824 (TRBV12-4, TRBJ2-3)
CASTATDTQYF

SEQ ID NO: 29649 - protein, 14 aa, Homo sapiens
  CDR3 for alpha chain variable domain of TCR clone 14825 (TRAV26-1, TRAJ34)
CIVRVAYNTDKLIF

SEQ ID NO: 29650 - protein, 15 aa, Homo sapiens
  CDR3 for beta chain variable domain of TCR clone 14825 (TRBV20-1, TRBJ2-7)
CGARVPAAYFYEQYF

SEQ ID NO: 29651 - protein, 11 aa, Homo sapiens
  CDR3 for alpha chain variable domain of TCR clone 14826 (TRAV8-6, TRAJ42)
CAVRGRKPRKS

SEQ ID NO: 29652 - protein, 13 aa, Homo sapiens
  CDR3 for beta chain variable domain of TCR clone 14826 (TRBV7-3, TRBJ1-1)
CASSQDWGAEAFF

SEQ ID NO: 29653 - protein, 15 aa, Homo sapiens
  CDR3 for alpha chain variable domain of TCR clone 14827 (TRAV8-3, TRAJ45)
CASSYSEGGADGLTF

SEQ ID NO: 29654 - protein, 13 aa, Homo sapiens
  CDR3 for beta chain variable domain of TCR clone 14827 (TRBV10-3, TRBJ2-7)
CASKLAVNYEQYF

SEQ ID NO: 29655 - protein, 14 aa, Homo sapiens
  CDR3 for alpha chain variable domain of TCR clone 14828 (TRAV12-3, TRAJ10)
SHLPLTGGGNKLTF

SEQ ID NO: 29656 - protein, 19 aa, Homo sapiens
  CDR3 for beta chain variable domain of TCR clone 14828 (TRBV25-1, TRBJ2-2)
CAILVYRVDRGRKTGELFF

SEQ ID NO: 29657 - protein, 13 aa, Homo sapiens
  CDR3 for alpha chain variable domain of TCR clone 14829 (TRAV27, TRAJ41)
CAGEGNSGYALNF

SEQ ID NO: 29658 - protein, 14 aa, Homo sapiens
  CDR3 for beta chain variable domain of TCR clone 14829 (TRBV7-2, TRBJ1-1)
CASSFLTGTTEAVF

SEQ ID NO: 29659 - protein, 14 aa, Homo sapiens
  CDR3 for alpha chain variable domain of TCR clone 14830 (TRAV20, TRAJ42)
CAVQAGGSQGNIIF

SEQ ID NO: 29660 - protein, 14 aa, Homo sapiens
  CDR3 for beta chain variable domain of TCR clone 14830 (TRBV28, TRBJ1-2)
CASRIQGANYGYTF

SEQ ID NO: 29661 - protein, 13 aa, Homo sapiens
  CDR3 for alpha chain variable domain of TCR clone 14831 (TRAV21, TRAJ27)
CAARPGNAGKSTF

SEQ ID NO: 29662 - protein, 13 aa, Homo sapiens
  CDR3 for beta chain variable domain of TCR clone 14831 (TRBV10-3, TRBJ2-7)
CASKLAVNYEQYF

SEQ ID NO: 29663 - protein, 16 aa, Homo sapiens
  CDR3 for alpha chain variable domain of TCR clone 14832 (TRAV30, TRAJ24)
CGTEIVDADSWGKFQF

SEQ ID NO: 29664 - protein, 16 aa, Homo sapiens
  CDR3 for beta chain variable domain of TCR clone 14832 (TRBV2, TRBJ1-3)
CASSGGAGRSGNTMYF

SEQ ID NO: 29665 - protein, 16 aa, Homo sapiens
  CDR3 for alpha chain variable domain of TCR clone 14833 (TRAV3, TRAJ3)
CAVRDRAKSSASKIIF

SEQ ID NO: 29666 - protein, 16 aa, Homo sapiens
  CDR3 for beta chain variable domain of TCR clone 14833 (TRBV20-1, TRBJ2-4)
CSATSLAELAKNSQYF

SEQ ID NO: 29667 - protein, 14 aa, Homo sapiens
  CDR3 for alpha chain variable domain of TCR clone 14834 (TRAV13-1, TRAJ44)
CAAKATGTASKLTF

SEQ ID NO: 29668 - protein, 14 aa, Homo sapiens
  CDR3 for beta chain variable domain of TCR clone 14834 (TRBV19, TRBJ2-1)
CASPTFVLSGEQFF

SEQ ID NO: 29669 - protein, 12 aa, Homo sapiens
  CDR3 for alpha chain variable domain of TCR clone 14835 (TRAV3, TRAJ17)
CAVRSCRQQANF

SEQ ID NO: 29670 - protein, 15 aa, Homo sapiens
  CDR3 for beta chain variable domain of TCR clone 14835 (TRBV2, TRBJ2-4)
CASSGTNLAKNIQYF

SEQ ID NO: 29671 - protein, 12 aa, Homo sapiens
  CDR3 for alpha chain variable domain of TCR clone 14836 (TRAV13-2, TRAJ23)
CAERHRGGKLIF

SEQ ID NO: 29672 - protein, 16 aa, Homo sapiens
  CDR3 for beta chain variable domain of TCR clone 14836 (TRBV20-1, TRBJ1-4)
CSAPGQGLLTNEELFF

SEQ ID NO: 29673 - protein, 13 aa, Homo sapiens
  CDR3 for alpha chain variable domain of TCR clone 14837 (TRAV2, TRAJ40)
CAVVTSGTYKYIF

SEQ ID NO: 29674 - protein, 15 aa, Homo sapiens
  CDR3 for beta chain variable domain of TCR clone 14837 (TRBV11-3, TRBJ2-3)
CASLKDRREGDTQYF

SEQ ID NO: 29675 - protein, 13 aa, Homo sapiens
  CDR3 for alpha chain variable domain of TCR clone 14838 (TRAV27, TRAJ3)
ASLRGSSASKIIF

SEQ ID NO: 29676 - protein, 15 aa, Homo sapiens
  CDR3 for beta chain variable domain of TCR clone 14838 (TRBV28, TRBJ1-3)
CASSMGWASGDTIYF

SEQ ID NO: 29677 - protein, 11 aa, Homo sapiens
  CDR3 for alpha chain variable domain of TCR clone 14839 (TRAV12-2, TRAJ49)
CAVWAGNQFYF

SEQ ID NO: 29678 - protein, 19 aa, Homo sapiens
  CDR3 for beta chain variable domain of TCR clone 14839 (TRBV4-1, TRBJ2-1)
CASSQGPLPGLGSRNEQFF

SEQ ID NO: 29679 - protein, 16 aa, Homo sapiens
  CDR3 for alpha chain variable domain of TCR clone 14840 (TRAV3, TRAJ37)
CAVRGKGSGNTGKLIF

SEQ ID NO: 29680 - protein, 15 aa, Homo sapiens
  CDR3 for beta chain variable domain of TCR clone 14840 (TRBV11-2, TRBJ2-2)
CASSSDRVNAGELFF

SEQ ID NO: 29681 - protein, 18 aa, Homo sapiens
  CDR3 for alpha chain variable domain of TCR clone 14841 (TRAV21, TRAJ52)
CAVMPSPAGGTSYGKLTF

SEQ ID NO: 29682 - protein, 13 aa, Homo sapiens
  CDR3 for beta chain variable domain of TCR clone 14841 (TRBV7-3, TRBJ1-1)
CASSQDWGAEAFF

SEQ ID NO: 29683 - protein, 11 aa, Homo sapiens
  CDR3 for alpha chain variable domain of TCR clone 14842 (TRAV3, TRAJ21)
CAVGNFNKFYF

SEQ ID NO: 29684 - protein, 14 aa, Homo sapiens
  CDR3 for beta chain variable domain of TCR clone 14842 (TRBV4-1, TRBJ2-2)
CASSQAVNTGELFF

SEQ ID NO: 29685 - protein, 14 aa, Homo sapiens
  CDR3 for alpha chain variable domain of TCR clone 14843 (TRAV2, TRAJ37)
CAVDFTSNTGQLIF

SEQ ID NO: 29686 - protein, 15 aa, Homo sapiens
  CDR3 for beta chain variable domain of TCR clone 14843 (TRBV20-1, TRBJ1-1)
CSASRGVTGNTEAFF

SEQ ID NO: 29687 - protein, 15 aa, Homo sapiens
  CDR3 for alpha chain variable domain of TCR clone 14844 (TRAV8-4, TRAJ3)
CAVTGENLVQQCFQD

SEQ ID NO: 29688 - protein, 16 aa, Homo sapiens
  CDR3 for beta chain variable domain of TCR clone 14844 (TRBV20-1, TRBJ1-4)
CSAPGQGLLTNEKLFF

SEQ ID NO: 29689 - protein, 15 aa, Homo sapiens
  CDR3 for alpha chain variable domain of TCR clone 14845 (TRAV27, TRAJ38)
CAARHNAGNNRKLIW

SEQ ID NO: 29690 - protein, 13 aa, Homo sapiens
  CDR3 for beta chain variable domain of TCR clone 14845 (TRBV12-5, TRBJ2-3)
CASGDRQSDTQYF

SEQ ID NO: 29691 - protein, 14 aa, Homo sapiens
  CDR3 for alpha chain variable domain of TCR clone 14846 (TRAV1-2, TRAJ16)
CAVNRFSDGQKLLF

SEQ ID NO: 29692 - protein, 13 aa, Homo sapiens
  CDR3 for beta chain variable domain of TCR clone 14846 (TRBV12-4, TRBJ2-7)
CASSPTETYEQYF

SEQ ID NO: 29693 - protein, 12 aa, Homo sapiens
  CDR3 for alpha chain variable domain of TCR clone 14847 (TRAV12-3, TRAJ17)
CAMTLTGNKLTF

SEQ ID NO: 29694 - protein, 15 aa, Homo sapiens
  CDR3 for beta chain variable domain of TCR clone 14847 (TRBV6-6, TRBJ2-7)
CASSYSYGGSYEQYF

SEQ ID NO: 29695 - protein, 16 aa, Homo sapiens
  CDR3 for alpha chain variable domain of TCR clone 14848 (TRAV30, TRAJ24)
CGTEIVDADSWGKFQF

SEQ ID NO: 29696 - protein, 13 aa, Homo sapiens
  CDR3 for beta chain variable domain of TCR clone 14848 (TRBV20-1, TRBJ1-1)
CSARGGGNTEAFL

SEQ ID NO: 29697 - protein, 15 aa, Homo sapiens
  CDR3 for alpha chain variable domain of TCR clone 14849 (TRAV8-3, TRAJ45)
GASSYSGGGADGLTF

SEQ ID NO: 29698 - protein, 13 aa, Homo sapiens
  CDR3 for beta chain variable domain of TCR clone 14849 (TRBV10-3, TRBJ2-7)
CASKLAVNYEQYF

SEQ ID NO: 29699 - protein, 14 aa, Homo sapiens
  CDR3 for alpha chain variable domain of TCR clone 14850 (TRAV13-1, TRAJ44)
CAAKATGTAGKLTF

SEQ ID NO: 29700 - protein, 12 aa, Homo sapiens
  CDR3 for beta chain variable domain of TCR clone 14850 (TRBV7-8, TRBJ2-7)
CASSLGDREQYF

SEQ ID NO: 29701 - protein, 14 aa, Homo sapiens
  CDR3 for alpha chain variable domain of TCR clone 14851 (TRAV12-3, TRAJ9)
CAMSPNTGGFKTIF

SEQ ID NO: 29702 - protein, 12 aa, Homo sapiens
  CDR3 for beta chain variable domain of TCR clone 14851 (TRBV19, TRBJ1-5)
CASSIAQQPQHL

SEQ ID NO: 29703 - protein, 14 aa, Homo sapiens
  CDR3 for alpha chain variable domain of TCR clone 14852 (TRAV29/DV5, TRAJ45)
CAASFRGGADGLTF

SEQ ID NO: 29704 - protein, 13 aa, Homo sapiens
  CDR3 for beta chain variable domain of TCR clone 14852 (TRBV10-3, TRBJ2-7)
CASKLAVDYEQYF

SEQ ID NO: 29705 - protein, 17 aa, Homo sapiens
  CDR3 for alpha chain variable domain of TCR clone 14853 (TRAV3, TRAJ6)
CAVRDGPRAGGSYIPNF

SEQ ID NO: 29706 - protein, 14 aa, Homo sapiens
  CDR3 for beta chain variable domain of TCR clone 14853 (TRBV7-2, TRBJ2-7)
CASSPKTSFYEQYF

SEQ ID NO: 29707 - protein, 12 aa, Homo sapiens
  CDR3 for alpha chain variable domain of TCR clone 14854 (TRAV17, TRAJ4)
CATDGGDNKLIF

SEQ ID NO: 29708 - protein, 13 aa, Homo sapiens
  CDR3 for beta chain variable domain of TCR clone 14854 (TRBV29-1, TRBJ2-2)
CSTTGVNTGELFF

SEQ ID NO: 29709 - protein, 13 aa, Homo sapiens
  CDR3 for alpha chain variable domain of TCR clone 14855 (TRAV2, TRAJ40)
CAVVTSGTYKYIF

SEQ ID NO: 29710 - protein, 14 aa, Homo sapiens
  CDR3 for beta chain variable domain of TCR clone 14855 (TRBV19, TRBJ2-1)
FASPTFVLSGEQFF

SEQ ID NO: 29711 - protein, 14 aa, Homo sapiens
  CDR3 for alpha chain variable domain of TCR clone 14856 (TRAV12-2, TRAJ17)
CAVLFKAAGNKLTF

SEQ ID NO: 29712 - protein, 17 aa, Homo sapiens
  CDR3 for beta chain variable domain of TCR clone 14856 (TRBV20-1, TRBJ2-2)
CSASGSGQCGLTGELFF

SEQ ID NO: 29713 - protein, 14 aa, Homo sapiens
  CDR3 for alpha chain variable domain of TCR clone 14857 (TRAV6, TRAJ10)
CALDFTGGGNKLTF

SEQ ID NO: 29714 - protein, 14 aa, Homo sapiens
  CDR3 for beta chain variable domain of TCR clone 14857 (TRBV7-3, TRBJ1-1)
CASSPTGGVSEAFF

SEQ ID NO: 29715 - protein, 16 aa, Homo sapiens
  CDR3 for alpha chain variable domain of TCR clone 14858 (TRAV27, TRAJ13)
CAGAKSDSGGYQKVTF

SEQ ID NO: 29716 - protein, 15 aa, Homo sapiens
  CDR3 for beta chain variable domain of TCR clone 14858 (TRBV29-1, TRBJ2-1)
CSVGGHALFYNEQFF

SEQ ID NO: 29717 - protein, 13 aa, Homo sapiens
  CDR3 for alpha chain variable domain of TCR clone 14859 (TRAV26-1, TRAJ45)
CIVEGGGADGLTF

SEQ ID NO: 29718 - protein, 14 aa, Homo sapiens
  CDR3 for beta chain variable domain of TCR clone 14859 (TRBV12-4, TRBJ2-5)
CASSLPAGVGTQYF

SEQ ID NO: 29719 - protein, 13 aa, Homo sapiens
  CDR3 for alpha chain variable domain of TCR clone 14860 (TRAV29/DV5, TRAJ21)
CAASGDNFNKFYF

SEQ ID NO: 29720 - protein, 14 aa, Homo sapiens
  CDR3 for beta chain variable domain of TCR clone 14860 (TRBV7-2, TRBJ2-7)
CASSPRDGAYEQYF

SEQ ID NO: 29721 - protein, 17 aa, Homo sapiens
  CDR3 for alpha chain variable domain of TCR clone 14861 (TRAV3, TRAJ38)
CAVRDCLNAGNNRKLIW

SEQ ID NO: 29722 - protein, 14 aa, Homo sapiens
  CDR3 for beta chain variable domain of TCR clone 14861 (TRBV5-5, TRBJ1-5)
CASSGQGVDQTQHF

SEQ ID NO: 29723 - protein, 14 aa, Homo sapiens
  CDR3 for alpha chain variable domain of TCR clone 14862 (TRAV12-2, TRAJ40)
CAVKIPSGTYKYIF

SEQ ID NO: 29724 - protein, 14 aa, Homo sapiens
  CDR3 for beta chain variable domain of TCR clone 14862 (TRBV20-1, TRBJ1-1)
CSAQTLIGGTEAFF

SEQ ID NO: 29725 - protein, 20 aa, Homo sapiens
  CDR3 for alpha chain variable domain of TCR clone 14863 (TRAV30, TRAJ32)
RNLLLRHREGYGGATNKLIF

SEQ ID NO: 29726 - protein, 13 aa, Homo sapiens
  CDR3 for beta chain variable domain of TCR clone 14863 (TRBV10-3, TRBJ2-7)
CASKLAVNYEQYF

SEQ ID NO: 29727 - protein, 17 aa, Homo sapiens
  CDR3 for alpha chain variable domain of TCR clone 14864 (TRAV13-1, TRAJ52)
CAASSGAGGTSYGRLTF

SEQ ID NO: 29728 - protein, 15 aa, Homo sapiens
  CDR3 for beta chain variable domain of TCR clone 14864 (TRBV2, TRBJ2-1)
CASSELAGSYNEQFF

SEQ ID NO: 29729 - protein, 17 aa, Homo sapiens
  CDR3 for alpha chain variable domain of TCR clone 14865 (TRAV8-6, TRAJ58)
CAVSSWGGETSGSRLTF

SEQ ID NO: 29730 - protein, 14 aa, Homo sapiens
  CDR3 for beta chain variable domain of TCR clone 14865 (TRBV4-2, TRBJ2-1)
CASGLDRAYNEQFF

SEQ ID NO: 29731 - protein, 11 aa, Homo sapiens
  CDR3 for alpha chain variable domain of TCR clone 14866 (TRAV21, TRAJ34)
CAVTNTDKLIF

SEQ ID NO: 29732 - protein, 13 aa, Homo sapiens
  CDR3 for beta chain variable domain of TCR clone 14866 (TRBV7-3, TRBJ1-1)
CASSQDWGAEAFF

SEQ ID NO: 29733 - protein, 14 aa, Homo sapiens
  CDR3 for alpha chain variable domain of TCR clone 14867 (TRAV1-2, TRAJ8)
CAVREDTGFQKLVF

SEQ ID NO: 29734 - protein, 15 aa, Homo sapiens
  CDR3 for beta chain variable domain of TCR clone 14867 (TRBV6-3, TRBJ2-7)
CASSSPVTVFYEQYF

SEQ ID NO: 29735 - protein, 14 aa, Homo sapiens
  CDR3 for alpha chain variable domain of TCR clone 14868 (TRAV13-1, TRAJ35)
CAASKGGFGNVLHC

SEQ ID NO: 29736 - protein, 17 aa, Homo sapiens
  CDR3 for beta chain variable domain of TCR clone 14868 (TRBV13, TRBJ2-3)
CASSLSRVAGGRNTQYF

SEQ ID NO: 29737 - protein, 14 aa, Homo sapiens
  CDR3 for alpha chain variable domain of TCR clone 14869 (TRAV8-6, TRAJ15)
CAVILNQAGTALIF

SEQ ID NO: 29738 - protein, 12 aa, Homo sapiens
  CDR3 for beta chain variable domain of TCR clone 14869 (TRBV7-9, TRBJ1-6)
CASSASESPLHF

SEQ ID NO: 29739 - protein, 14 aa, Homo sapiens
  CDR3 for alpha chain variable domain of TCR clone 14870 (TRAV1-2, TRAJ8)
CAVREDTGFQKLVF

SEQ ID NO: 29740 - protein, 15 aa, Homo sapiens
  CDR3 for beta chain variable domain of TCR clone 14870 (TRBV6-3, TRBJ2-7)
CACSSPGTVFYEQYF

SEQ ID NO: 29741 - protein, 11 aa, Homo sapiens
  CDR3 for alpha chain variable domain of TCR clone 14871 (TRAV3, TRAJ21)
YAVGNFNKFYF

SEQ ID NO: 29742 - protein, 16 aa, Homo sapiens
  CDR3 for beta chain variable domain of TCR clone 14871 (TRBV19, TRBJ2-1)
CASSKAGPSSYNEQFF

SEQ ID NO: 29743 - protein, 15 aa, Homo sapiens
  CDR3 for alpha chain variable domain of TCR clone 14872 (TRAV12-3, TRAJ6)
CAMSATSGGSYIPTF

SEQ ID NO: 29744 - protein, 11 aa, Homo sapiens
  CDR3 for beta chain variable domain of TCR clone 14872 (TRBV20-1, TRBJ1-5)
CSAQGDQTQHF

SEQ ID NO: 29745 - protein, 14 aa, Homo sapiens
  CDR3 for alpha chain variable domain of TCR clone 14873 (TRAV2, TRAJ37)
CAVDFTSNTGKLIF

SEQ ID NO: 29746 - protein, 15 aa, Homo sapiens
  CDR3 for beta chain variable domain of TCR clone 14873 (TRBV20-1, TRBJ1-1)
CSASRGVTGNTEAFF

SEQ ID NO: 29747 - protein, 14 aa, Homo sapiens
  CDR3 for alpha chain variable domain of TCR clone 14874 (TRAV12-1, TRAJ17)
CVVNYKAEGNKLTF

SEQ ID NO: 29748 - protein, 17 aa, Homo sapiens
  CDR3 for beta chain variable domain of TCR clone 14874 (TRBV20-1, TRBJ2-1)
CSASSSGLAGSYNEQFF

SEQ ID NO: 29749 - protein, 14 aa, Homo sapiens
  CDR3 for alpha chain variable domain of TCR clone 14875 (TRAV17, TRAJ57)
CATDPQGGSEKLVF

SEQ ID NO: 29750 - protein, 18 aa, Homo sapiens
  CDR3 for beta chain variable domain of TCR clone 14875 (TRBV6-6, TRBJ1-3)
CASSYSKWDSISGSTIYF

SEQ ID NO: 29751 - protein, 14 aa, Homo sapiens
  CDR3 for alpha chain variable domain of TCR clone 14876 (TRAV1-2, TRAJ16)
CSVNRFSDGQKLLF

SEQ ID NO: 29752 - protein, 15 aa, Homo sapiens
  CDR3 for beta chain variable domain of TCR clone 14876 (TRBV7-9, TRBJ1-6)
CASSSPGRGNSPLHF

SEQ ID NO: 29753 - protein, 14 aa, Homo sapiens
  CDR3 for alpha chain variable domain of TCR clone 14877 (TRAV13-2, TRAJ15)
CAENPNQAGTALIF

SEQ ID NO: 29754 - protein, 16 aa, Homo sapiens
  CDR3 for beta chain variable domain of TCR clone 14877 (TRBV12-4, TRBJ1-2)
CASSPTATGKTRGYIF

SEQ ID NO: 29755 - protein, 13 aa, Homo sapiens
  CDR3 for alpha chain variable domain of TCR clone 14878 (TRAV3, TRAJ27)
CSVRPLGAGKSTF

SEQ ID NO: 29756 - protein, 13 aa, Homo sapiens
  CDR3 for beta chain variable domain of TCR clone 14878 (TRBV7-9, TRBJ2-3)
CASSPGSTDTQYF

SEQ ID NO: 29757 - protein, 12 aa, Homo sapiens
  CDR3 for alpha chain variable domain of TCR clone 14879 (TRAV13-2, TRAJ42)
CAEGGSQGNLIF

SEQ ID NO: 29758 - protein, 11 aa, Homo sapiens
  CDR3 for beta chain variable domain of TCR clone 14879 (TRBV6-3, TRBJ2-3)
CATGQADTQYF

SEQ ID NO: 29759 - protein, 11 aa, Homo sapiens
  CDR3 for alpha chain variable domain of TCR clone 14880 (TRAV23/DV6, TRAJ26)
CAARTYQADNY

SEQ ID NO: 29760 - protein, 16 aa, Homo sapiens
  CDR3 for beta chain variable domain of TCR clone 14880 (TRBV6-5, TRBJ2-2)
CASSHVSRAQPGELFF

SEQ ID NO: 29761 - protein, 15 aa, Homo sapiens
  CDR3 for alpha chain variable domain of TCR clone 14881 (TRAV8-3, TRAJ27)
CAVGPSKTNAGKSTF

SEQ ID NO: 29762 - protein, 17 aa, Homo sapiens
  CDR3 for beta chain variable domain of TCR clone 14881 (TRBV4-3, TRBJ2-1)
CASSQFSSGRASGEQFF

SEQ ID NO: 29763 - protein, 13 aa, Homo sapiens
  CDR3 for alpha chain variable domain of TCR clone 14882 (TRAV21, TRAJ27)
CAARPGNAGKSTF

SEQ ID NO: 29764 - protein, 16 aa, Homo sapiens
  CDR3 for beta chain variable domain of TCR clone 14882 (TRBV20-1, TRBJ1-2)
CSASMGQGVANYGYAF

SEQ ID NO: 29765 - protein, 13 aa, Homo sapiens
  CDR3 for alpha chain variable domain of TCR clone 14883 (TRAV1-2, TRAJ9)
CAALNTGGFKTIF

SEQ ID NO: 29766 - protein, 13 aa, Homo sapiens
  CDR3 for beta chain variable domain of TCR clone 14883 (TRBV19, TRBJ1-2)
CASSVTGQDGYTF

SEQ ID NO: 29767 - protein, 13 aa, Homo sapiens
  CDR3 for alpha chain variable domain of TCR clone 14884 (TRAV2, TRAJ40)
CAVVTSGTYKYIF

SEQ ID NO: 29768 - protein, 14 aa, Homo sapiens
  CDR3 for beta chain variable domain of TCR clone 14884 (TRBV19, TRBJ2-1)
CASPTFVLSGEQCF

SEQ ID NO: 29769 - protein, 13 aa, Homo sapiens
  CDR3 for alpha chain variable domain of TCR clone 14885 (TRAV21, TRAJ27)
CAARPGNADKSTF

SEQ ID NO: 29770 - protein, 14 aa, Homo sapiens
  CDR3 for beta chain variable domain of TCR clone 14885 (TRBV7-6, TRBJ2-3)
CASSLGTVTDTQYF

SEQ ID NO: 29771 - protein, 15 aa, Homo sapiens
  CDR3 for alpha chain variable domain of TCR clone 14886 (TRAV26-1, TRAJ29)
CIVRGEGSGNTPLVF

SEQ ID NO: 29772 - protein, 15 aa, Homo sapiens
  CDR3 for beta chain variable domain of TCR clone 14886 (TRBV7-9, TRBJ1-5)
CASSQGHQPNQPQHF

SEQ ID NO: 29773 - protein, 14 aa, Homo sapiens
  CDR3 for alpha chain variable domain of TCR clone 14887 (TRAV17, TRAJ22)
CATSPSGSTRQLTF

SEQ ID NO: 29774 - protein, 15 aa, Homo sapiens
  CDR3 for beta chain variable domain of TCR clone 14887 (TRBV4-1, TRBJ2-5)
CASSQWDLYQETQYF

SEQ ID NO: 29775 - protein, 16 aa, Homo sapiens
  CDR3 for alpha chain variable domain of TCR clone 14888 (TRAV30, TRAJ24)
CGTEIVDGDSWGKFQF

SEQ ID NO: 29776 - protein, 14 aa, Homo sapiens
  CDR3 for beta chain variable domain of TCR clone 14888 (TRBV12-5, TRBJ2-5)
CASGSRTHQETQYF

SEQ ID NO: 29777 - protein, 14 aa, Homo sapiens
  CDR3 for alpha chain variable domain of TCR clone 14889 (TRAV26-1, TRAJ45)
CIEVTGGGADGLPF

SEQ ID NO: 29778 - protein, 13 aa, Homo sapiens
  CDR3 for beta chain variable domain of TCR clone 14889 (TRBV7-6, TRBJ1-2)
CASSLVADYGYTF

SEQ ID NO: 29779 - protein, 13 aa, Homo sapiens
  CDR3 for alpha chain variable domain of TCR clone 14890 (TRAV20, TRAJ37)
CAGCSSNTVKLIF

SEQ ID NO: 29780 - protein, 11 aa, Homo sapiens
  CDR3 for beta chain variable domain of TCR clone 14890 (TRBV12-4, TRBJ2-3)
CASTATDTQYF

SEQ ID NO: 29781 - protein, 12 aa, Homo sapiens
  CDR3 for alpha chain variable domain of TCR clone 14891 (TRAV10, TRAJ31)
CVVRAHRARLMF

SEQ ID NO: 29782 - protein, 12 aa, Homo sapiens
  CDR3 for beta chain variable domain of TCR clone 14891 (TRBV29-1, TRBJ2-3)
CSVTGGADTQYF

SEQ ID NO: 29783 - protein, 13 aa, Homo sapiens
  CDR3 for alpha chain variable domain of TCR clone 14892 (TRAV12-2, TRAJ6)
CAVNVSRKLHTYI

SEQ ID NO: 29784 - protein, 18 aa, Homo sapiens
  CDR3 for beta chain variable domain of TCR clone 14892 (TRBV4-1, TRBJ1-5)
CASSQDPRGQGLNQPQHF

SEQ ID NO: 29785 - protein, 15 aa, Homo sapiens
  CDR3 for alpha chain variable domain of TCR clone 14893 (TRAV12-2, TRAJ9)
CAVNGGYTGGFKTIF

SEQ ID NO: 29786 - protein, 17 aa, Homo sapiens
  CDR3 for beta chain variable domain of TCR clone 14893 (TRBV4-1, TRBJ2-1)
CASSHRDSGSSYNEQFF

SEQ ID NO: 29787 - protein, 14 aa, Homo sapiens
  CDR3 for alpha chain variable domain of TCR clone 14894 (TRAV1-2, TRAJ16)
CAVNRFSDGQKLLF

SEQ ID NO: 29788 - protein, 16 aa, Homo sapiens
  CDR3 for beta chain variable domain of TCR clone 14894 (TRBV7-9, TRBJ2-1)
CASSDVAGGSYNEQFF

SEQ ID NO: 29789 - protein, 16 aa, Homo sapiens
  CDR3 for alpha chain variable domain of TCR clone 14895 (TRAV8-3, TRAJ8)
CAVPRDGNTGFQKPVF

SEQ ID NO: 29790 - protein, 14 aa, Homo sapiens
  CDR3 for beta chain variable domain of TCR clone 14895 (TRBV28, TRBJ1-1)
CASSESGRGTEAFF

SEQ ID NO: 29791 - protein, 13 aa, Homo sapiens
  CDR3 for alpha chain variable domain of TCR clone 14896 (TRAV36/DV7, TRAJ38)
CVANAGNNRKLIW

SEQ ID NO: 29792 - protein, 14 aa, Homo sapiens
  CDR3 for beta chain variable domain of TCR clone 14896 (TRBV7-2, TRBJ2-7)
CASSLRWEANEQYF

SEQ ID NO: 29793 - protein, 12 aa, Homo sapiens
  CDR3 for alpha chain variable domain of TCR clone 14897 (TRAV8-3, TRAJ20)
CAVGANDYKLSF

SEQ ID NO: 29794 - protein, 16 aa, Homo sapiens
  CDR3 for beta chain variable domain of TCR clone 14897 (TRBV19, TRBJ2-2)
CASRSPGTEATGELFF

SEQ ID NO: 29795 - protein, 15 aa, Homo sapiens
  CDR3 for alpha chain variable domain of TCR clone 14898 (TRAV36/DV7, TRAJ21)
CALKFYFGSGTKLNV

SEQ ID NO: 29796 - protein, 15 aa, Homo sapiens
  CDR3 for beta chain variable domain of TCR clone 14898 (TRBV28, TRBJ2-3)
CASSPDRQGANTQYF

SEQ ID NO: 29797 - protein, 18 aa, Homo sapiens
  CDR3 for alpha chain variable domain of TCR clone 14899 (TRAV21, TRAJ52)
CAVRPSPAGGTSYGKLTF

SEQ ID NO: 29798 - protein, 17 aa, Homo sapiens
  CDR3 for beta chain variable domain of TCR clone 14899 (TRBV13, TRBJ2-3)
FASSLSRVAGGRNTQYF

SEQ ID NO: 29799 - protein, 13 aa, Homo sapiens
  CDR3 for alpha chain variable domain of TCR clone 14900 (TRAV1-1, TRAJ23)
CAVVANQGGKLIF

SEQ ID NO: 29800 - protein, 15 aa, Homo sapiens
  CDR3 for beta chain variable domain of TCR clone 14900 (TRBV9, TRBJ1-6)
CASSVAGTGDSPLHF

SEQ ID NO: 29801 - protein, 15 aa, Homo sapiens
  CDR3 for alpha chain variable domain of TCR clone 14901 (TRAV26-1, TRAJ44)
CIARVPFGTASKLTF

SEQ ID NO: 29802 - protein, 17 aa, Homo sapiens
  CDR3 for beta chain variable domain of TCR clone 14901 (TRBV24-1, TRBJ2-4)
CATSDAEARGVRNSQYF

SEQ ID NO: 29803 - protein, 17 aa, Homo sapiens
  CDR3 for alpha chain variable domain of TCR clone 14902 (TRAV3, TRAJ42)
CAVRDRDYGGSQGNLIF

SEQ ID NO: 29804 - protein, 12 aa, Homo sapiens
  CDR3 for beta chain variable domain of TCR clone 14902 (TRBV7-9, TRBJ1-5)
CASSPQGQPQHF

SEQ ID NO: 29805 - protein, 14 aa, Homo sapiens
  CDR3 for alpha chain variable domain of TCR clone 14903 (TRAV21, TRAJ35)
CAVMPIGFGTVLHC

SEQ ID NO: 29806 - protein, 12 aa, Homo sapiens
  CDR3 for beta chain variable domain of TCR clone 14903 (TRBV7-9, TRBJ2-7)
CASSIKREEQYF

SEQ ID NO: 29807 - protein, 12 aa, Homo sapiens
  CDR3 for alpha chain variable domain of TCR clone 14904 (TRAV8-3, TRAJ20)
CAVGANDYKLSF

SEQ ID NO: 29808 - protein, 14 aa, Homo sapiens
  CDR3 for beta chain variable domain of TCR clone 14904 (TRBV19, TRBJ2-1)
CASPTFVLSGEQFF

SEQ ID NO: 29809 - protein, 14 aa, Homo sapiens
  CDR3 for alpha chain variable domain of TCR clone 14905 (TRAV2, TRAJ37)
CAVDFTSNTGKLIF

SEQ ID NO: 29810 - protein, 14 aa, Homo sapiens
  CDR3 for beta chain variable domain of TCR clone 14905 (TRBV5-1, TRBJ2-5)
CASSSGGSQETQYF

SEQ ID NO: 29811 - protein, 13 aa, Homo sapiens
  CDR3 for alpha chain variable domain of TCR clone 14906 (TRAV21, TRAJ57)
CAVTQGGSENLVF

SEQ ID NO: 29812 - protein, 16 aa, Homo sapiens
  CDR3 for beta chain variable domain of TCR clone 14906 (TRBV29-1, TRBJ2-7)
CSVEDAEDGTAYEQYF

SEQ ID NO: 29813 - protein, 15 aa, Homo sapiens
  CDR3 for alpha chain variable domain of TCR clone 14907 (TRAV17, TRAJ57)
CATGPSHGGSEKLVF

SEQ ID NO: 29814 - protein, 16 aa, Homo sapiens
  CDR3 for beta chain variable domain of TCR clone 14907 (TRBV12-4, TRBJ1-5)
CASSRPVGGSNQPQHF

SEQ ID NO: 29815 - protein, 12 aa, Homo sapiens
  CDR3 for alpha chain variable domain of TCR clone 14908 (TRAV12-1, TRAJ40)
CVVYSGTYKYIF

SEQ ID NO: 29816 - protein, 14 aa, Homo sapiens
  CDR3 for beta chain variable domain of TCR clone 14908 (TRBV7-3, TRBJ1-1)
CASSLKGGNTEAFF

SEQ ID NO: 29817 - protein, 14 aa, Homo sapiens
  CDR3 for alpha chain variable domain of TCR clone 14909 (TRAV12-2, TRAJ17)
CAVLFKAAGNKLAF

SEQ ID NO: 29818 - protein, 17 aa, Homo sapiens
  CDR3 for beta chain variable domain of TCR clone 14909 (TRBV20-1, TRBJ2-2)
CSASGSGQGGLTGELFF

SEQ ID NO: 29819 - protein, 12 aa, Homo sapiens
  CDR3 for alpha chain variable domain of TCR clone 14910 (TRAV1-1, TRAJ39)
CAVPVVGNMLTF

SEQ ID NO: 29820 - protein, 13 aa, Homo sapiens
  CDR3 for beta chain variable domain of TCR clone 14910 (TRBV10-3, TRBJ2-7)
CASKLAVNYEQYF

SEQ ID NO: 29821 - protein, 16 aa, Homo sapiens
  CDR3 for alpha chain variable domain of TCR clone 14911 (TRAV16, TRAJ4)
CALSRMLSGGYNKLIF

SEQ ID NO: 29822 - protein, 16 aa, Homo sapiens
  CDR3 for beta chain variable domain of TCR clone 14911 (TRBV24-1, TRBJ2-3)
CATSDPGTGATDTQYF

SEQ ID NO: 29823 - protein, 11 aa, Homo sapiens
  CDR3 for alpha chain variable domain of TCR clone 14912 (TRAV1-1, TRAJ23)
CAVRQGGKLIF

SEQ ID NO: 29824 - protein, 20 aa, Homo sapiens
  CDR3 for beta chain variable domain of TCR clone 14912 (TRBV7-8, TRBJ2-2)
CARSHLFPGPTIHITGELFF

SEQ ID NO: 29825 - protein, 14 aa, Homo sapiens
  CDR3 for alpha chain variable domain of TCR clone 14913 (TRAV17, TRAJ22)
RATSPSGSARQLTF

SEQ ID NO: 29826 - protein, 15 aa, Homo sapiens
  CDR3 for beta chain variable domain of TCR clone 14913 (TRBV4-1, TRBJ2-5)
CASSQWDLYQETQYF

SEQ ID NO: 29827 - protein, 14 aa, Homo sapiens
  CDR3 for alpha chain variable domain of TCR clone 14914 (TRAV13-2, TRAJ42)
CGEWVGGSQGNLIF

SEQ ID NO: 29828 - protein, 14 aa, Homo sapiens
  CDR3 for beta chain variable domain of TCR clone 14914 (TRBV11-2, TRBJ1-5)
CASSSRTGNQPQHF

SEQ ID NO: 29829 - protein, 18 aa, Homo sapiens
  CDR3 for alpha chain variable domain of TCR clone 14915 (TRAV29/DV5, TRAJ52)
CAAGFRGAGVTSYGKLTF

SEQ ID NO: 29830 - protein, 16 aa, Homo sapiens
  CDR3 for beta chain variable domain of TCR clone 14915 (TRBV7-3, TRBJ2-2)
CASSLKRGTLSGELFF

SEQ ID NO: 29831 - protein, 12 aa, Homo sapiens
  CDR3 for alpha chain variable domain of TCR clone 14916 (TRAV12-3, TRAJ17)
CAMTLTGNKLTF

SEQ ID NO: 29832 - protein, 16 aa, Homo sapiens
  CDR3 for beta chain variable domain of TCR clone 14916 (TRBV7-9, TRBJ2-1)
CASSDVAGGSYNEQFF

SEQ ID NO: 29833 - protein, 10 aa, Homo sapiens
  CDR3 for alpha chain variable domain of TCR clone 14917 (TRAV12-2, TRAJ49)
CAMNDDQFYF

SEQ ID NO: 29834 - protein, 13 aa, Homo sapiens
  CDR3 for beta chain variable domain of TCR clone 14917 (TRBV12-4, TRBJ1-1)
CASSPGTGFEAFF

SEQ ID NO: 29835 - protein, 13 aa, Homo sapiens
  CDR3 for alpha chain variable domain of TCR clone 14918 (TRAV21, TRAJ27)
CAARPGNAGKSTF

SEQ ID NO: 29836 - protein, 14 aa, Homo sapiens
  CDR3 for beta chain variable domain of TCR clone 14918 (TRBV7-6, TRBJ2-3)
CASSLVTVTDTQYF

SEQ ID NO: 29837 - protein, 14 aa, Homo sapiens
  CDR3 for alpha chain variable domain of TCR clone 14919 (TRAV1-2, TRAJ16)
CAVNRFSDGQKLLF

SEQ ID NO: 29838 - protein, 15 aa, Homo sapiens
  CDR3 for beta chain variable domain of TCR clone 14919 (TRBV9, TRBJ1-6)
CASSVAGTGDSPLNF

SEQ ID NO: 29839 - protein, 12 aa, Homo sapiens
  CDR3 for alpha chain variable domain of TCR clone 14920 (TRAV26-2, TRAJ47)
CVLVEYGNKLVF

SEQ ID NO: 29840 - protein, 16 aa, Homo sapiens
  CDR3 for beta chain variable domain of TCR clone 14920 (TRBV18, TRBJ1-4)
CASSPLVGDRAEKLFF

SEQ ID NO: 29841 - protein, 14 aa, Homo sapiens
  CDR3 for alpha chain variable domain of TCR clone 14921 (TRAV29/DV5, TRAJ45)
CAASFRGGAAGLTF

SEQ ID NO: 29842 - protein, 11 aa, Homo sapiens
  CDR3 for beta chain variable domain of TCR clone 14921 (TRBV11-2, TRBJ2-2)
CASSLPGELFF

SEQ ID NO: 29843 - protein, 10 aa, Homo sapiens
  CDR3 for alpha chain variable domain of TCR clone 14922 (TRAV16, TRAJ22)
SAMYLRQLTF

SEQ ID NO: 29844 - protein, 15 aa, Homo sapiens
  CDR3 for beta chain variable domain of TCR clone 14922 (TRBV7-9, TRBJ1-6)
CASSSPGRGNSTLHF

SEQ ID NO: 29845 - protein, 12 aa, Homo sapiens
  CDR3 for alpha chain variable domain of TCR clone 14923 (TRAV13-2, TRAJ23)
CAERHRGGKLIF

SEQ ID NO: 29846 - protein, 16 aa, Homo sapiens
  CDR3 for beta chain variable domain of TCR clone 14923 (TRBV20-1, TRBJ1-4)
CSAPGRGLLTNEKLFF

SEQ ID NO: 29847 - protein, 11 aa, Homo sapiens
  CDR3 for alpha chain variable domain of TCR clone 14924 (TRAV12-1, TRAJ34)
CVVNKGRELTF

SEQ ID NO: 29848 - protein, 12 aa, Homo sapiens
  CDR3 for beta chain variable domain of TCR clone 14924 (TRBV2, TRBJ2-1)
CAYGPPGNEQFF

SEQ ID NO: 29849 - protein, 11 aa, Homo sapiens
  CDR3 for alpha chain variable domain of TCR clone 14925 (TRAV12-3, TRAJ43)
CAMSVSNDMRF

SEQ ID NO: 29850 - protein, 13 aa, Homo sapiens
  CDR3 for beta chain variable domain of TCR clone 14925 (TRBV20-1, TRBJ1-1)
CSAPLGGGAEAFF

SEQ ID NO: 29851 - protein, 14 aa, Homo sapiens
  CDR3 for alpha chain variable domain of TCR clone 14926 (TRAV1-2, TRAJ8)
CALREDTGFQKLVF

SEQ ID NO: 29852 - protein, 15 aa, Homo sapiens
  CDR3 for beta chain variable domain of TCR clone 14926 (TRBV6-3, TRBJ2-7)
CASSSPGTVFYEQYF

SEQ ID NO: 29853 - protein, 14 aa, Homo sapiens
  CDR3 for alpha chain variable domain of TCR clone 14927 (TRAV9-2, TRAJ39)
CALYIYNAGNMLTF

SEQ ID NO: 29854 - protein, 14 aa, Homo sapiens
  CDR3 for beta chain variable domain of TCR clone 14927 (TRBV4-2, TRBJ2-1)
CASGLDRAYNEQFF

SEQ ID NO: 29855 - protein, 13 aa, Homo sapiens
  CDR3 for alpha chain variable domain of TCR clone 14928 (TRAV1-2, TRAJ9)
CAALTTGGFKTIF

SEQ ID NO: 29856 - protein, 13 aa, Homo sapiens
  CDR3 for beta chain variable domain of TCR clone 14928 (TRBV19, TRBJ1-2)
CASSVPGQDGYTF

SEQ ID NO: 29857 - protein, 15 aa, Homo sapiens
  CDR3 for alpha chain variable domain of TCR clone 14929 (TRAV13-1, TRAJ44)
CAASRGGGTASKLTF

SEQ ID NO: 29858 - protein, 13 aa, Homo sapiens
  CDR3 for beta chain variable domain of TCR clone 14929 (TRBV7-3, TRBJ1-1)
CASSQDWGAEAFF

SEQ ID NO: 29859 - protein, 12 aa, Homo sapiens
  CDR3 for alpha chain variable domain of TCR clone 14930 (TRAV12-3, TRAJ17)
CAMTLTGNKLTF

SEQ ID NO: 29860 - protein, 15 aa, Homo sapiens
  CDR3 for beta chain variable domain of TCR clone 14930 (TRBV20-1, TRBJ2-7)
CSARDRVSGMDQQYF

SEQ ID NO: 29861 - protein, 12 aa, Homo sapiens
  CDR3 for alpha chain variable domain of TCR clone 14931 (TRAV12-3, TRAJ17)
CAMTLTGNKLTF

SEQ ID NO: 29862 - protein, 14 aa, Homo sapiens
  CDR3 for beta chain variable domain of TCR clone 14931 (TRBV7-9, TRBJ2-1)
CASSPRDSLYEQFF

SEQ ID NO: 29863 - protein, 10 aa, Homo sapiens
  CDR3 for alpha chain variable domain of TCR clone 14932 (TRAV13-2, TRAJ24)
TTDSWGKLQF

SEQ ID NO: 29864 - protein, 16 aa, Homo sapiens
  CDR3 for beta chain variable domain of TCR clone 14932 (TRBV19, TRBJ2-2)
CASSFPGQGLAGELFF

SEQ ID NO: 29865 - protein, 13 aa, Homo sapiens
  CDR3 for alpha chain variable domain of TCR clone 14933 (TRAV26-2, TRAJ43)
CILRAVNNNDMRF

SEQ ID NO: 29866 - protein, 14 aa, Homo sapiens
  CDR3 for beta chain variable domain of TCR clone 14933 (TRBV5-1, TRBJ1-2)
CASSLEPVNYGYTF

SEQ ID NO: 29867 - protein, 14 aa, Homo sapiens
  CDR3 for alpha chain variable domain of TCR clone 14934 (TRAV8-3, TRAJ4)
CAVGAAGGYSKLIF

SEQ ID NO: 29868 - protein, 15 aa, Homo sapiens
  CDR3 for beta chain variable domain of TCR clone 14934 (TRBV6-5, TRBJ2-1)
CASSYDAGAGNEQFF

SEQ ID NO: 29869 - protein, 14 aa, Homo sapiens
  CDR3 for alpha chain variable domain of TCR clone 14935 (TRAV8-4, TRAJ5)
CAVSTDTGRRALTF

SEQ ID NO: 29870 - protein, 16 aa, Homo sapiens
  CDR3 for beta chain variable domain of TCR clone 14935 (TRBV15, TRBJ1-2)
CATSRGPRTGGGGYTF

SEQ ID NO: 29871 - protein, 14 aa, Homo sapiens
  CDR3 for alpha chain variable domain of TCR clone 14936 (TRAV38-1, TRAJ40)
CALRPTLGTYKYIF

SEQ ID NO: 29872 - protein, 14 aa, Homo sapiens
  CDR3 for beta chain variable domain of TCR clone 14936 (TRBV25-1, TRBJ1-1)
CASTHLGGNTEAFF

SEQ ID NO: 29873 - protein, 14 aa, Homo sapiens
  CDR3 for alpha chain variable domain of TCR clone 14937 (TRAV17, TRAJ16)
CATADFSDGQKLLF

SEQ ID NO: 29874 - protein, 15 aa, Homo sapiens
  CDR3 for beta chain variable domain of TCR clone 14937 (TRBV18, TRBJ2-1)
CASSPPSASYNGQFF

SEQ ID NO: 29875 - protein, 15 aa, Homo sapiens
  CDR3 for alpha chain variable domain of TCR clone 14938 (TRAV21, TRAJ53)
CAALNSGGSNYKLTF

SEQ ID NO: 29876 - protein, 15 aa, Homo sapiens
  CDR3 for beta chain variable domain of TCR clone 14938 (TRBV20-1, TRBJ2-7)
CSARDRVSGMDEQYF

SEQ ID NO: 29877 - protein, 18 aa, Homo sapiens
  CDR3 for alpha chain variable domain of TCR clone 14939 (TRAV21, TRAJ52)
CAVRPSPAGGTSYGKLTF

SEQ ID NO: 29878 - protein, 17 aa, Homo sapiens
  CDR3 for beta chain variable domain of TCR clone 14939 (TRBV13, TRBJ2-3)
CASSLSRVAGGRNTQHF

SEQ ID NO: 29879 - protein, 14 aa, Homo sapiens
  CDR3 for alpha chain variable domain of TCR clone 14940 (TRAV35, TRAJ33)
CAGSSQGSNYQLIW

SEQ ID NO: 29880 - protein, 15 aa, Homo sapiens
  CDR3 for beta chain variable domain of TCR clone 14940 (TRBV20-1, TRBJ2-7)
CSAESGTSGAYEQYF

SEQ ID NO: 29881 - protein, 14 aa, Homo sapiens
  CDR3 for alpha chain variable domain of TCR clone 14941 (TRAV13-1, TRAJ5)
CAALGLAGRRALTF

SEQ ID NO: 29882 - protein, 13 aa, Homo sapiens
  CDR3 for beta chain variable domain of TCR clone 14941 (TRBV11-3, TRBJ2-3)
CASSFTGPDTQYF

SEQ ID NO: 29883 - protein, 16 aa, Homo sapiens
  CDR3 for alpha chain variable domain of TCR clone 14942 (TRAV14/DV4, TRAJ54)
CAMREGRIQGAQKLVF

SEQ ID NO: 29884 - protein, 16 aa, Homo sapiens
  CDR3 for beta chain variable domain of TCR clone 14942 (TRBV7-9, TRBJ2-3)
CASSPWREVGTDTQYF

SEQ ID NO: 29885 - protein, 14 aa, Homo sapiens
  CDR3 for alpha chain variable domain of TCR clone 14943 (TRAV12-1, TRAJ17)
CVVNYKAAGNKLTF

SEQ ID NO: 29886 - protein, 17 aa, Homo sapiens
  CDR3 for beta chain variable domain of TCR clone 14943 (TRBV20-1, TRBJ2-1)
GSASSSGLAGSYNEQFF

SEQ ID NO: 29887 - protein, 18 aa, Homo sapiens
  CDR3 for alpha chain variable domain of TCR clone 14944 (TRAV21, TRAJ52)
CAVRPSPAGGTSYGKLTF

SEQ ID NO: 29888 - protein, 16 aa, Homo sapiens
  CDR3 for beta chain variable domain of TCR clone 14944 (TRBV13, TRBJ2-3)
CQQPLQGSGGGNTQYF

SEQ ID NO: 29889 - protein, 13 aa, Homo sapiens
  CDR3 for alpha chain variable domain of TCR clone 14945 (TRAV17, TRAJ54)
CAMKIQGAQKLVF

SEQ ID NO: 29890 - protein, 11 aa, Homo sapiens
  CDR3 for beta chain variable domain of TCR clone 14945 (TRBV29-1, TRBJ2-5)
CSEDRTGTQYF

SEQ ID NO: 29891 - protein, 14 aa, Homo sapiens
  CDR3 for alpha chain variable domain of TCR clone 14946 (TRAV38-1, TRAJ45)
CAYYSGGGADGLTF

SEQ ID NO: 29892 - protein, 20 aa, Homo sapiens
  CDR3 for beta chain variable domain of TCR clone 14946 (TRBV28, TRBJ2-1)
WASTPIGRSPGLAGGNEQFF

SEQ ID NO: 29893 - protein, 12 aa, Homo sapiens
  CDR3 for alpha chain variable domain of TCR clone 14947 (TRAV2, TRAJ10)
CASTGGGNKLAF

SEQ ID NO: 29894 - protein, 14 aa, Homo sapiens
  CDR3 for beta chain variable domain of TCR clone 14947 (TRBV7-2, TRBJ2-2)
CASRGQGAAGELFF

SEQ ID NO: 29895 - protein, 12 aa, Homo sapiens
  CDR3 for alpha chain variable domain of TCR clone 14948 (TRAV13-1, TRAJ49)
CAASPMGNQFYF

SEQ ID NO: 29896 - protein, 13 aa, Homo sapiens
  CDR3 for beta chain variable domain of TCR clone 14948 (TRBV20-1, TRBJ2-2)
CSASAAGTWELFF

SEQ ID NO: 29897 - protein, 13 aa, Homo sapiens
  CDR3 for alpha chain variable domain of TCR clone 14949 (TRAV1-1, TRAJ9)
CAAKNTGGFKTTF

SEQ ID NO: 29898 - protein, 14 aa, Homo sapiens
  CDR3 for beta chain variable domain of TCR clone 14949 (TRBV20-1, TRBJ2-1)
CSAQIGGSANEQFF

SEQ ID NO: 29899 - protein, 12 aa, Homo sapiens
  CDR3 for alpha chain variable domain of TCR clone 14950 (TRAV13-2, TRAJ23)
CAERHRGGKLIF

SEQ ID NO: 29900 - protein, 15 aa, Homo sapiens
  CDR3 for beta chain variable domain of TCR clone 14950 (TRBV4-1, TRBJ1-4)
CASSDTGGTNEKLFF

SEQ ID NO: 29901 - protein, 13 aa, Homo sapiens
  CDR3 for alpha chain variable domain of TCR clone 14951 (TRAV2, TRAJ40)
CAVVTSGTYKYSF

SEQ ID NO: 29902 - protein, 14 aa, Homo sapiens
  CDR3 for beta chain variable domain of TCR clone 14951 (TRBV19, TRBJ2-1)
CASPTFVLSGEQFF

SEQ ID NO: 29903 - protein, 10 aa, Homo sapiens
  CDR3 for alpha chain variable domain of TCR clone 14952 (TRAV13-1, TRAJ27)
CAPLARQINL

SEQ ID NO: 29904 - protein, 13 aa, Homo sapiens
  CDR3 for beta chain variable domain of TCR clone 14952 (TRBV28, TRBJ1-1)
CASSKQGWTEAFS

SEQ ID NO: 29905 - protein, 23 aa, Homo sapiens
  CDR3 for alpha chain variable domain of TCR clone 14953 (TRAV26-1, TRAJ38)
CIADNAGNNHIQNPAPAVYQLRD

SEQ ID NO: 29906 - protein, 13 aa, Homo sapiens
  CDR3 for beta chain variable domain of TCR clone 14953 (TRBV20-1, TRBJ1-1)
CSARGGGNTEAFF

SEQ ID NO: 29907 - protein, 20 aa, Homo sapiens
  CDR3 for alpha chain variable domain of TCR clone 14954 (TRAV26-1, TRAJ42)
CCVLLHRQTYYGGGQGNLIF

SEQ ID NO: 29908 - protein, 16 aa, Homo sapiens
  CDR3 for beta chain variable domain of TCR clone 14954 (TRBV7-3, TRBJ2-2)
CASSLKRGTLSGELFF

SEQ ID NO: 29909 - protein, 16 aa, Homo sapiens
  CDR3 for alpha chain variable domain of TCR clone 14955 (TRAV26-1, TRAJ37)
CIVRGDGSGNTGKLIF

SEQ ID NO: 29910 - protein, 19 aa, Homo sapiens
  CDR3 for beta chain variable domain of TCR clone 14955 (TRBV4-1, TRBJ2-7)
CASSRDPLGVRGGSSTSGR

SEQ ID NO: 29911 - protein, 14 aa, Homo sapiens
  CDR3 for alpha chain variable domain of TCR clone 14956 (TRAV12-1, TRAJ12)
CVVNDRDSSYKLIF

SEQ ID NO: 29912 - protein, 14 aa, Homo sapiens
  CDR3 for beta chain variable domain of TCR clone 14956 (TRBV12-5, TRBJ2-5)
CASGSRTHQETQYF

SEQ ID NO: 29913 - protein, 12 aa, Homo sapiens
  CDR3 for alpha chain variable domain of TCR clone 14957 (TRAV29/DV5, TRAJ49)
CAATDTGNQFYF

SEQ ID NO: 29914 - protein, 11 aa, Homo sapiens
  CDR3 for beta chain variable domain of TCR clone 14957 (TRBV20-1, TRBJ2-7)
CSARTSYEQYF

SEQ ID NO: 29915 - protein, 12 aa, Homo sapiens
  CDR3 for alpha chain variable domain of TCR clone 14958 (TRAV13-1, TRAJ49)
CAAPNTGNQFYF

SEQ ID NO: 29916 - protein, 14 aa, Homo sapiens
  CDR3 for beta chain variable domain of TCR clone 14958 (TRBV19, TRBJ2-5)
CASSLTGGEETQYF

SEQ ID NO: 29917 - protein, 13 aa, Homo sapiens
  CDR3 for alpha chain variable domain of TCR clone 14959 (TRAV12-2, TRAJ4)
CAVRSSGYNKLIF

SEQ ID NO: 29918 - protein, 15 aa, Homo sapiens
  CDR3 for beta chain variable domain of TCR clone 14959 (TRBV10-3, TRBJ2-1)
CAISDVQDRAYEQFF

SEQ ID NO: 29919 - protein, 15 aa, Homo sapiens
  CDR3 for alpha chain variable domain of TCR clone 14960 (TRAV8-3, TRAJ11)
CAVGLLNSGYSTLTF

SEQ ID NO: 29920 - protein, 16 aa, Homo sapiens
  CDR3 for beta chain variable domain of TCR clone 14960 (TRBV7-9, TRBJ1-2)
CASSLGFASGEDGYTF

SEQ ID NO: 29921 - protein, 14 aa, Homo sapiens
  CDR3 for alpha chain variable domain of TCR clone 14961 (TRAV12-2, TRAJ13)
CAVKKTGGYQKVTF

SEQ ID NO: 29922 - protein, 15 aa, Homo sapiens
  CDR3 for beta chain variable domain of TCR clone 14961 (TRBV27, TRBJ2-1)
CASSNWGGSSNEQFF

SEQ ID NO: 29923 - protein, 15 aa, Homo sapiens
  CDR3 for alpha chain variable domain of TCR clone 14962 (TRAV3, TRAJ4)
CAVRDGTGGYNKMIF

SEQ ID NO: 29924 - protein, 16 aa, Homo sapiens
  CDR3 for beta chain variable domain of TCR clone 14962 (TRBV27, TRBJ2-2)
CASSSSGVSNTGELFF

SEQ ID NO: 29925 - protein, 13 aa, Homo sapiens
  CDR3 for alpha chain variable domain of TCR clone 14963 (TRAV20, TRAJ48)
CAVQGVGNEKLTF

SEQ ID NO: 29926 - protein, 19 aa, Homo sapiens
  CDR3 for beta chain variable domain of TCR clone 14963 (TRBV2, TRBJ2-2)
WASSQPGLAGGGNTGELFF

SEQ ID NO: 29927 - protein, 13 aa, Homo sapiens
  CDR3 for alpha chain variable domain of TCR clone 14964 (TRAV13-1, TRAJ6)
CAASSGGSYIPTF

SEQ ID NO: 29928 - protein, 14 aa, Homo sapiens
  CDR3 for beta chain variable domain of TCR clone 14964 (TRBV9, TRBJ2-7)
CASSVGVGSYEQYF

SEQ ID NO: 29929 - protein, 11 aa, Homo sapiens
  CDR3 for alpha chain variable domain of TCR clone 14965 (TRAV2, TRAJ33)
CAVDSNYQLIW

SEQ ID NO: 29930 - protein, 17 aa, Homo sapiens
  CDR3 for beta chain variable domain of TCR clone 14965 (TRBV13, TRBJ2-3)
CASSLSRVAGGRNTQYF

SEQ ID NO: 29931 - protein, 17 aa, Homo sapiens
  CDR3 for alpha chain variable domain of TCR clone 14966 (TRAV23/DV6, TRAJ57)
CAASSTLPQGGSEKLVF

SEQ ID NO: 29932 - protein, 13 aa, Homo sapiens
  CDR3 for beta chain variable domain of TCR clone 14966 (TRBV15, TRBJ1-6)
CATSGGLNSPLHF

SEQ ID NO: 29933 - protein, 13 aa, Homo sapiens
  CDR3 for alpha chain variable domain of TCR clone 14967 (TRAV21, TRAJ27)
FAARPGNAGKSTF

SEQ ID NO: 29934 - protein, 14 aa, Homo sapiens
  CDR3 for beta chain variable domain of TCR clone 14967 (TRBV7-6, TRBJ2-3)
CASSLGTVTDTQYF

SEQ ID NO: 29935 - protein, 15 aa, Homo sapiens
  CDR3 for alpha chain variable domain of TCR clone 14968 (TRAV12-1, TRAJ44)
CVVDKYTGTASKLTF

SEQ ID NO: 29936 - protein, 14 aa, Homo sapiens
  CDR3 for beta chain variable domain of TCR clone 14968 (TRBV5-1, TRBJ1-2)
CASSLEPVNYGYTF

SEQ ID NO: 29937 - protein, 12 aa, Homo sapiens
  CDR3 for alpha chain variable domain of TCR clone 14969 (TRAV29/DV5, TRAJ49)
CAATDAGNQFYF

SEQ ID NO: 29938 - protein, 12 aa, Homo sapiens
  CDR3 for beta chain variable domain of TCR clone 14969 (TRBV12-4, TRBJ2-7)
CASSLGGYEQYF

SEQ ID NO: 29939 - protein, 15 aa, Homo sapiens
  CDR3 for alpha chain variable domain of TCR clone 14970 (TRAV3, TRAJ5)
CAVRDLDTGRRALTF

SEQ ID NO: 29940 - protein, 15 aa, Homo sapiens
  CDR3 for beta chain variable domain of TCR clone 14970 (TRBV27, TRBJ2-1)
CASSNGGGSSNEQFF

SEQ ID NO: 29941 - protein, 13 aa, Homo sapiens
  CDR3 for alpha chain variable domain of TCR clone 14971 (TRAV21, TRAJ27)
CAALNTNAGKSTF

SEQ ID NO: 29942 - protein, 14 aa, Homo sapiens
  CDR3 for beta chain variable domain of TCR clone 14971 (TRBV27, TRBJ1-1)
CAGSLLSGLSEAFF

SEQ ID NO: 29943 - protein, 12 aa, Homo sapiens
  CDR3 for alpha chain variable domain of TCR clone 14972 (TRAV2, TRAJ9)
CAVGAGGFKTIS

SEQ ID NO: 29944 - protein, 16 aa, Homo sapiens
  CDR3 for beta chain variable domain of TCR clone 14972 (TRBV13, TRBJ2-2)
CASSPRTGEHTGELFF

SEQ ID NO: 29945 - protein, 11 aa, Homo sapiens
  CDR3 for alpha chain variable domain of TCR clone 14973 (TRAV17, TRAJ9)
CATTGGFKTVF

SEQ ID NO: 29946 - protein, 14 aa, Homo sapiens
  CDR3 for beta chain variable domain of TCR clone 14973 (TRBV7-9, TRBJ2-2)
CASSGLADTGELFF

SEQ ID NO: 29947 - protein, 14 aa, Homo sapiens
  CDR3 for alpha chain variable domain of TCR clone 14974 (TRAV12-2, TRAJ13)
CAVKKTGGYQKVTF

SEQ ID NO: 29948 - protein, 15 aa, Homo sapiens
  CDR3 for beta chain variable domain of TCR clone 14974 (TRBV27, TRBJ2-1)
CASSNGRGSSNEQFF

SEQ ID NO: 29949 - protein, 13 aa, Homo sapiens
  CDR3 for alpha chain variable domain of TCR clone 14975 (TRAV20, TRAJ37)
FAGCSSNTGKLIF

SEQ ID NO: 29950 - protein, 11 aa, Homo sapiens
  CDR3 for beta chain variable domain of TCR clone 14975 (TRBV12-4, TRBJ2-3)
CASTATDTQYF

SEQ ID NO: 29951 - protein, 15 aa, Homo sapiens
  CDR3 for alpha chain variable domain of TCR clone 14976 (TRAV8-3, TRAJ11)
CAVGLLNSGCSTLTF

SEQ ID NO: 29952 - protein, 16 aa, Homo sapiens
  CDR3 for beta chain variable domain of TCR clone 14976 (TRBV7-9, TRBJ1-2)
CASSLGFSSGEDGYTF

SEQ ID NO: 29953 - protein, 14 aa, Homo sapiens
  CDR3 for alpha chain variable domain of TCR clone 14977 (TRAV38-1, TRAJ45)
CAYYSGGGADGLTF

SEQ ID NO: 29954 - protein, 20 aa, Homo sapiens
  CDR3 for beta chain variable domain of TCR clone 14977 (TRBV28, TRBJ2-1)
CASTPIGRSPGLAGGNEQFL

SEQ ID NO: 29955 - protein, 14 aa, Homo sapiens
  CDR3 for alpha chain variable domain of TCR clone 14978 (TRAV1-2, TRAJ16)
CAVNRFSDGQKLLF

SEQ ID NO: 29956 - protein, 15 aa, Homo sapiens
  CDR3 for beta chain variable domain of TCR clone 14978 (TRBV7-2, TRBJ2-7)
CASSTPGLTRGEQYF

SEQ ID NO: 29957 - protein, 14 aa, Homo sapiens
  CDR3 for alpha chain variable domain of TCR clone 14979 (TRAV12-2, TRAJ13)
CAVKKTGGYQKVTF

SEQ ID NO: 29958 - protein, 15 aa, Homo sapiens
  CDR3 for beta chain variable domain of TCR clone 14979 (TRBV27, TRBJ2-1)
CASSNGGWSSNEQFF

SEQ ID NO: 29959 - protein, 13 aa, Homo sapiens
  CDR3 for alpha chain variable domain of TCR clone 14980 (TRAV13-1, TRAJ53)
QAARGGSNYKLTF

SEQ ID NO: 29960 - protein, 15 aa, Homo sapiens
  CDR3 for beta chain variable domain of TCR clone 14980 (TRBV5-1, TRBJ2-1)
CASSPPRAPYNEQFF

SEQ ID NO: 29961 - protein, 23 aa, Homo sapiens
  CDR3 for alpha chain variable domain of TCR clone 14981 (TRAV26-1, TRAJ38)
CIADNAGNNHIQNPDPAVYQLRD

SEQ ID NO: 29962 - protein, 13 aa, Homo sapiens
  CDR3 for beta chain variable domain of TCR clone 14981 (TRBV20-1, TRBJ2-1)
CSARSSPRDEQFF

SEQ ID NO: 29963 - protein, 11 aa, Homo sapiens
  CDR3 for alpha chain variable domain of TCR clone 14982 (TRAV3, TRAJ21)
CAVGNFNKFYF

SEQ ID NO: 29964 - protein, 16 aa, Homo sapiens
  CDR3 for beta chain variable domain of TCR clone 14982 (TRBV19, TRBJ2-1)
CASSKAGPSSYNEQYF

SEQ ID NO: 29965 - protein, 18 aa, Homo sapiens
  CDR3 for alpha chain variable domain of TCR clone 14983 (TRAV12-3, TRAJ52)
CAMSVGGAGGTSYGKLTF

SEQ ID NO: 29966 - protein, 14 aa, Homo sapiens
  CDR3 for beta chain variable domain of TCR clone 14983 (TRBV19, TRBJ2-1)
CASPTFVLSGEQFF

SEQ ID NO: 29967 - protein, 12 aa, Homo sapiens
  CDR3 for alpha chain variable domain of TCR clone 14984 (TRAV12-1, TRAJ40)
RVVYSGTYKYIF

SEQ ID NO: 29968 - protein, 18 aa, Homo sapiens
  CDR3 for beta chain variable domain of TCR clone 14984 (TRBV11-2, TRBJ2-3)
CASSLGGASRGAPNTQYF

SEQ ID NO: 29969 - protein, 16 aa, Homo sapiens
  CDR3 for alpha chain variable domain of TCR clone 14985 (TRAV13-1, TRAJ52)
CAAIMRGGTSYGKLTF

SEQ ID NO: 29970 - protein, 15 aa, Homo sapiens
  CDR3 for beta chain variable domain of TCR clone 14985 (TRBV3-1, TRBJ2-7)
CASSQVAGAQYGQYF

SEQ ID NO: 29971 - protein, 15 aa, Homo sapiens
  CDR3 for alpha chain variable domain of TCR clone 14986 (TRAV8-2, TRAJ40)
CVVLGTTSGTYKYIF

SEQ ID NO: 29972 - protein, 20 aa, Homo sapiens
  CDR3 for beta chain variable domain of TCR clone 14986 (TRBV28, TRBJ2-1)
CASTPIGRSPGLAGGNEQFF

SEQ ID NO: 29973 - protein, 12 aa, Homo sapiens
  CDR3 for alpha chain variable domain of TCR clone 14987 (TRAV1-1, TRAJ23)
CAVTNQGGKLIF

SEQ ID NO: 29974 - protein, 14 aa, Homo sapiens
  CDR3 for beta chain variable domain of TCR clone 14987 (TRBV12-4, TRBJ1-6)
CASNLQGKGSPLHF

SEQ ID NO: 29975 - protein, 12 aa, Homo sapiens
  CDR3 for alpha chain variable domain of TCR clone 14988 (TRAV5, TRAJ41)
CAENNSGYALNF

SEQ ID NO: 29976 - protein, 13 aa, Homo sapiens
  CDR3 for beta chain variable domain of TCR clone 14988 (TRBV29-1, TRBJ1-3)
CSADVDSGNTIYF

SEQ ID NO: 29977 - protein, 13 aa, Homo sapiens
  CDR3 for alpha chain variable domain of TCR clone 14989 (TRAV13-2, TRAJ53)
CAENMGSNYKLAF

SEQ ID NO: 29978 - protein, 13 aa, Homo sapiens
  CDR3 for beta chain variable domain of TCR clone 14989 (TRBV4-1, TRBJ2-2)
CASSQENTGELFF

SEQ ID NO: 29979 - protein, 16 aa, Homo sapiens
  CDR3 for alpha chain variable domain of TCR clone 14990 (TRAV30, TRAJ24)
CGTEIVDADSWGKFQF

SEQ ID NO: 29980 - protein, 11 aa, Homo sapiens
  CDR3 for beta chain variable domain of TCR clone 14990 (TRBV11-2, TRBJ2-2)
CASSLPGELFF

SEQ ID NO: 29981 - protein, 12 aa, Homo sapiens
  CDR3 for alpha chain variable domain of TCR clone 14991 (TRAV8-3, TRAJ20)
CAVGANDYKISF

SEQ ID NO: 29982 - protein, 16 aa, Homo sapiens
  CDR3 for beta chain variable domain of TCR clone 14991 (TRBV19, TRBJ2-2)
CASRSPGTGATGELFF

SEQ ID NO: 29983 - protein, 14 aa, Homo sapiens
  CDR3 for alpha chain variable domain of TCR clone 14992 (TRAV8-2, TRAJ11)
CVVSEKSGYGTLTF

SEQ ID NO: 29984 - protein, 16 aa, Homo sapiens
  CDR3 for beta chain variable domain of TCR clone 14992 (TRBV28, TRBJ2-1)
CASSSPEYPRDNEQFF

SEQ ID NO: 29985 - protein, 14 aa, Homo sapiens
  CDR3 for alpha chain variable domain of TCR clone 14993 (TRAV8-3, TRAJ4)
CAVGAAGGYNKLIF

SEQ ID NO: 29986 - protein, 15 aa, Homo sapiens
  CDR3 for beta chain variable domain of TCR clone 14993 (TRBV6-5, TRBJ2-1)
CVSSYDAGAGNEQFF

SEQ ID NO: 29987 - protein, 14 aa, Homo sapiens
  CDR3 for alpha chain variable domain of TCR clone 14994 (TRAV1-2, TRAJ16)
CAVNRFSDGQKLRF

SEQ ID NO: 29988 - protein, 15 aa, Homo sapiens
  CDR3 for beta chain variable domain of TCR clone 14994 (TRBV9, TRBJ1-6)
CASSVAGTGDSPLHF

SEQ ID NO: 29989 - protein, 14 aa, Homo sapiens
  CDR3 for alpha chain variable domain of TCR clone 14995 (TRAV35, TRAJ22)
CAGLRPGSARQLTF

SEQ ID NO: 29990 - protein, 14 aa, Homo sapiens
  CDR3 for beta chain variable domain of TCR clone 14995 (TRBV12-4, TRBJ2-5)
CQQSPTGLQETQYF

SEQ ID NO: 29991 - protein, 15 aa, Homo sapiens
  CDR3 for alpha chain variable domain of TCR clone 14996 (TRAV9-2, TRAJ49)
CALSPPDHTGNQFYF

SEQ ID NO: 29992 - protein, 10 aa, Homo sapiens
  CDR3 for beta chain variable domain of TCR clone 14996 (TRBV15, TRBJ2-7)
AETGGYEQYF

SEQ ID NO: 29993 - protein, 11 aa, Homo sapiens
  CDR3 for alpha chain variable domain of TCR clone 14997 (TRAV17, TRAJ9)
CAATGGFKTIF

SEQ ID NO: 29994 - protein, 14 aa, Homo sapiens
  CDR3 for beta chain variable domain of TCR clone 14997 (TRBV7-9, TRBJ2-2)
CASSGLADTGELFF

SEQ ID NO: 29995 - protein, 11 aa, Homo sapiens
  CDR3 for alpha chain variable domain of TCR clone 14998 (TRAV3, TRAJ21)
CAVGNFNKFYF

SEQ ID NO: 29996 - protein, 18 aa, Homo sapiens
  CDR3 for beta chain variable domain of TCR clone 14998 (TRBV20-1, TRBJ2-3)
CSASGLAGGPGTTDTQYF

SEQ ID NO: 29997 - protein, 12 aa, Homo sapiens
  CDR3 for alpha chain variable domain of TCR clone 14999 (TRAV8-4, TRAJ37)
CAVSGNTGKLIF

SEQ ID NO: 29998 - protein, 17 aa, Homo sapiens
  CDR3 for beta chain variable domain of TCR clone 14999 (TRBV7-2, TRBJ2-3)
CASSPQGRARVQDTQYS

SEQ ID NO: 29999 - protein, 12 aa, Homo sapiens
  CDR3 for alpha chain variable domain of TCR clone 15000 (TRAV17, TRAJ39)
CATGAAGNMLTF

SEQ ID NO: 30000 - protein, 14 aa, Homo sapiens
  CDR3 for beta chain variable domain of TCR clone 15000 (TRBV7-9, TRBJ1-2)
CASSRRGANYGYTF

SEQ ID NO: 30001 - protein, 11 aa, Homo sapiens
  CDR3 for alpha chain variable domain of TCR clone 15001 (TRAV6, TRAJ29)
PLCSTITPLVF

SEQ ID NO: 30002 - protein, 12 aa, Homo sapiens
  CDR3 for beta chain variable domain of TCR clone 15001 (TRBV12-4, TRBJ2-3)
CASSTLPDTQYF

SEQ ID NO: 30003 - protein, 15 aa, Homo sapiens
  CDR3 for alpha chain variable domain of TCR clone 15002 (TRAV8-4, TRAJ29)
CAVSEDFRGNTPLVF

SEQ ID NO: 30004 - protein, 14 aa, Homo sapiens
  CDR3 for beta chain variable domain of TCR clone 15002 (TRBV7-2, TRBJ1-1)
CASSFLTGTTEAFF

SEQ ID NO: 30005 - protein, 15 aa, Homo sapiens
  CDR3 for alpha chain variable domain of TCR clone 15003 (TRAV13-1, TRAJ44)
CAASRGGGTASKLTF

SEQ ID NO: 30006 - protein, 16 aa, Homo sapiens
  CDR3 for beta chain variable domain of TCR clone 15003 (TRBV12-5, TRBJ2-5)
CASGPRTSGNQETQYF

SEQ ID NO: 30007 - protein, 13 aa, Homo sapiens
  CDR3 for alpha chain variable domain of TCR clone 15004 (TRAV25, TRAJ26)
CAGMDNYGQNFVF

SEQ ID NO: 30008 - protein, 15 aa, Homo sapiens
  CDR3 for beta chain variable domain of TCR clone 15004 (TRBV10-3, TRBJ2-1)
CAIRNGTSGHDEQFF

SEQ ID NO: 30009 - protein, 15 aa, Homo sapiens
  CDR3 for alpha chain variable domain of TCR clone 15005 (TRAV8-3, TRAJ27)
CAVGPSKTNAGKSTF

SEQ ID NO: 30010 - protein, 15 aa, Homo sapiens
  CDR3 for beta chain variable domain of TCR clone 15005 (TRBV7-2, TRBJ2-1)
CASSSGLAGGDEQFF

SEQ ID NO: 30011 - protein, 18 aa, Homo sapiens
  CDR3 for alpha chain variable domain of TCR clone 15006 (TRAV12-3, TRAJ52)
RAMSRTNAGGTSYGKLTF

SEQ ID NO: 30012 - protein, 17 aa, Homo sapiens
  CDR3 for beta chain variable domain of TCR clone 15006 (TRBV7-3, TRBJ2-3)
CASSLMKRMRGADTQYF

SEQ ID NO: 30013 - protein, 17 aa, Homo sapiens
  CDR3 for alpha chain variable domain of TCR clone 15007 (TRAV12-3, TRAJ6)
CAMSARGGAGGSYIPTF

SEQ ID NO: 30014 - protein, 18 aa, Homo sapiens
  CDR3 for beta chain variable domain of TCR clone 15007 (TRBV7-9, TRBJ2-3)
CARSPRGTSGTGTDTQYF

SEQ ID NO: 30015 - protein, 11 aa, Homo sapiens
  CDR3 for alpha chain variable domain of TCR clone 15008 (TRAV2, TRAJ33)
CAVDRNYQLIW

SEQ ID NO: 30016 - protein, 15 aa, Homo sapiens
  CDR3 for beta chain variable domain of TCR clone 15008 (TRBV19, TRBJ1-2)
CASSVGQVLNYGYTF

SEQ ID NO: 30017 - protein, 12 aa, Homo sapiens
  CDR3 for alpha chain variable domain of TCR clone 15009 (TRAV16, TRAJ56)
FAPTGANSKLTF

SEQ ID NO: 30018 - protein, 17 aa, Homo sapiens
  CDR3 for beta chain variable domain of TCR clone 15009 (TRBV27, TRBJ2-6)
CASSLTGFASGANVLTF

SEQ ID NO: 30019 - protein, 13 aa, Homo sapiens
  CDR3 for alpha chain variable domain of TCR clone 15010 (TRAV29/DV5, TRAJ31)
CAASRNNNARLMF

SEQ ID NO: 30020 - protein, 13 aa, Homo sapiens
  CDR3 for beta chain variable domain of TCR clone 15010 (TRBV7-9, TRBJ1-2)
CASSLKQNYGYTF

SEQ ID NO: 30021 - protein, 15 aa, Homo sapiens
  CDR3 for alpha chain variable domain of TCR clone 15011 (TRAV34, TRAJ38)
CGADFTPGNNRKLIW

SEQ ID NO: 30022 - protein, 15 aa, Homo sapiens
  CDR3 for beta chain variable domain of TCR clone 15011 (TRBV24-1, TRBJ1-1)
CATSDRRGVNTEAFF

SEQ ID NO: 30023 - protein, 15 aa, Homo sapiens
  CDR3 for alpha chain variable domain of TCR clone 15012 (TRAV3, TRAJ5)
CAVRDLDTGRRALTF

SEQ ID NO: 30024 - protein, 13 aa, Homo sapiens
  CDR3 for beta chain variable domain of TCR clone 15012 (TRBV12-4, TRBJ2-7)
CASSPTETYEQYC

SEQ ID NO: 30025 - protein, 19 aa, Homo sapiens
  CDR3 for alpha chain variable domain of TCR clone 15013 (TRAV8-3, TRAJ8)
LSTSVLWDPMNTGFQKLVF

SEQ ID NO: 30026 - protein, 15 aa, Homo sapiens
  CDR3 for beta chain variable domain of TCR clone 15013 (TRBV3-1, TRBJ2-5)
CASSANLGGPETQYF

SEQ ID NO: 30027 - protein, 14 aa, Homo sapiens
  CDR3 for alpha chain variable domain of TCR clone 15014 (TRAV2, TRAJ37)
CAVDFTNNTGKLIF

SEQ ID NO: 30028 - protein, 15 aa, Homo sapiens
  CDR3 for beta chain variable domain of TCR clone 15014 (TRBV20-1, TRBJ1-1)
CSASRGVTGNTEAFF

SEQ ID NO: 30029 - protein, 14 aa, Homo sapiens
  CDR3 for alpha chain variable domain of TCR clone 15015 (TRAV35, TRAJ33)
CAGSPQDSNYQLIW

SEQ ID NO: 30030 - protein, 15 aa, Homo sapiens
  CDR3 for beta chain variable domain of TCR clone 15015 (TRBV20-1, TRBJ2-7)
CSAESGTSGAYEQYF

SEQ ID NO: 30031 - protein, 14 aa, Homo sapiens
  CDR3 for alpha chain variable domain of TCR clone 15016 (TRAV8-3, TRAJ4)
CAVGAAGGYNKLIF

SEQ ID NO: 30032 - protein, 12 aa, Homo sapiens
  CDR3 for beta chain variable domain of TCR clone 15016 (TRBV11-2, TRBJ2-2)
CASSLGGGELFF

SEQ ID NO: 30033 - protein, 15 aa, Homo sapiens
  CDR3 for alpha chain variable domain of TCR clone 15017 (TRAV26-1, TRAJ29)
CIVRVERSGNTPLVF

SEQ ID NO: 30034 - protein, 14 aa, Homo sapiens
  CDR3 for beta chain variable domain of TCR clone 15017 (TRBV18, TRBJ2-5)
CASSPGVSQETQYF

SEQ ID NO: 30035 - protein, 12 aa, Homo sapiens
  CDR3 for alpha chain variable domain of TCR clone 15018 (TRAV17, TRAJ4)
CATDGGYNKLIF

SEQ ID NO: 30036 - protein, 13 aa, Homo sapiens
  CDR3 for beta chain variable domain of TCR clone 15018 (TRBV29-1, TRBJ2-2)
CSTTGANTGELFF

SEQ ID NO: 30037 - protein, 14 aa, Homo sapiens
  CDR3 for alpha chain variable domain of TCR clone 15019 (TRAV12-3, TRAJ10)
SHLPLTGGGSKLTF

SEQ ID NO: 30038 - protein, 13 aa, Homo sapiens
  CDR3 for beta chain variable domain of TCR clone 15019 (TRBV9, TRBJ2-1)
CASSPSGGNEQFF

SEQ ID NO: 30039 - protein, 13 aa, Homo sapiens
  CDR3 for alpha chain variable domain of TCR clone 15020 (TRAV8-3, TRAJ28)
CAVGAVGCYQLTF

SEQ ID NO: 30040 - protein, 15 aa, Homo sapiens
  CDR3 for beta chain variable domain of TCR clone 15020 (TRBV7-9, TRBJ1-5)
CASSQGHQPNQPQHF

SEQ ID NO: 30041 - protein, 16 aa, Homo sapiens
  CDR3 for alpha chain variable domain of TCR clone 15021 (TRAV10, TRAJ41)
CVVSLANSNSGYALNF

SEQ ID NO: 30042 - protein, 13 aa, Homo sapiens
  CDR3 for beta chain variable domain of TCR clone 15021 (TRBV15, TRBJ1-2)
CATSRGQLYGYTF

SEQ ID NO: 30043 - protein, 15 aa, Homo sapiens
  CDR3 for alpha chain variable domain of TCR clone 15022 (TRAV20, TRAJ4)
CAVEGSSGGYNKLIF

SEQ ID NO: 30044 - protein, 16 aa, Homo sapiens
  CDR3 for beta chain variable domain of TCR clone 15022 (TRBV7-8, TRBJ2-7)
CASTLGGPLASSTSGR

SEQ ID NO: 30045 - protein, 14 aa, Homo sapiens
  CDR3 for alpha chain variable domain of TCR clone 15023 (TRAV1-2, TRAJ16)
CAVNRFSDGQKRLF

SEQ ID NO: 30046 - protein, 15 aa, Homo sapiens
  CDR3 for beta chain variable domain of TCR clone 15023 (TRBV9, TRBJ1-6)
CASSVAGTGDSPLHF

SEQ ID NO: 30047 - protein, 13 aa, Homo sapiens
  CDR3 for alpha chain variable domain of TCR clone 15024 (TRAV27, TRAJ45)
CRSSGGGADGLTF

SEQ ID NO: 30048 - protein, 17 aa, Homo sapiens
  CDR3 for beta chain variable domain of TCR clone 15024 (TRBV11-2, TRBJ2-1)
CASSLYPPGVEYNGQFF

SEQ ID NO: 30049 - protein, 11 aa, Homo sapiens
  CDR3 for alpha chain variable domain of TCR clone 15025 (TRAV23/DV6, TRAJ58)
CAARLLRGETS

SEQ ID NO: 30050 - protein, 17 aa, Homo sapiens
  CDR3 for beta chain variable domain of TCR clone 15025 (TRBV19, TRBJ2-7)
CASSISFYDSYPYEQYF

SEQ ID NO: 30051 - protein, 14 aa, Homo sapiens
  CDR3 for alpha chain variable domain of TCR clone 15026 (TRAV23/DV6, TRAJ36)
CAASRRTGANNLFF

SEQ ID NO: 30052 - protein, 15 aa, Homo sapiens
  CDR3 for beta chain variable domain of TCR clone 15026 (TRBV5-1, TRBJ2-1)
CASSPPRAPYNEQFF

SEQ ID NO: 30053 - protein, 16 aa, Homo sapiens
  CDR3 for alpha chain variable domain of TCR clone 15027 (TRAV1-2, TRAJ10)
CAVGGVLTGGGNKLTF

SEQ ID NO: 30054 - protein, 12 aa, Homo sapiens
  CDR3 for beta chain variable domain of TCR clone 15027 (TRBV7-8, TRBJ2-7)
CASSLGDREQYL

SEQ ID NO: 30055 - protein, 13 aa, Homo sapiens
  CDR3 for alpha chain variable domain of TCR clone 15028 (TRAV12-1, TRAJ6)
CVVFPGGSYIPTF

SEQ ID NO: 30056 - protein, 13 aa, Homo sapiens
  CDR3 for beta chain variable domain of TCR clone 15028 (TRBV20-1, TRBJ2-7)
CSATHTSGYEQYF

SEQ ID NO: 30057 - protein, 13 aa, Homo sapiens
  CDR3 for alpha chain variable domain of TCR clone 15029 (TRAV3, TRAJ21)
CAVREPDLNKFYF

SEQ ID NO: 30058 - protein, 13 aa, Homo sapiens
  CDR3 for beta chain variable domain of TCR clone 15029 (TRBV9, TRBJ2-1)
CASSPSGGNEQFF

SEQ ID NO: 30059 - protein, 18 aa, Homo sapiens
  CDR3 for alpha chain variable domain of TCR clone 15030 (TRAV26-1, TRAJ52)
CIVRVEGAGGTSYGKLTF

SEQ ID NO: 30060 - protein, 13 aa, Homo sapiens
  CDR3 for beta chain variable domain of TCR clone 15030 (TRBV7-3, TRBJ1-2)
CASSLKRGYGDTF

SEQ ID NO: 30061 - protein, 13 aa, Homo sapiens
  CDR3 for alpha chain variable domain of TCR clone 15031 (TRAV27, TRAJ6)
CAGGARGSYIPTF

SEQ ID NO: 30062 - protein, 15 aa, Homo sapiens
  CDR3 for beta chain variable domain of TCR clone 15031 (TRBV11-2, TRBJ1-3)
CASSLSPLVRDTIYF

SEQ ID NO: 30063 - protein, 13 aa, Homo sapiens
  CDR3 for alpha chain variable domain of TCR clone 15032 (TRAV1-1, TRAJ6)
CAVRLGGSYIPTF

SEQ ID NO: 30064 - protein, 14 aa, Homo sapiens
  CDR3 for beta chain variable domain of TCR clone 15032 (TRBV7-2, TRBJ2-5)
CASSLAPDQETQYF

SEQ ID NO: 30065 - protein, 13 aa, Homo sapiens
  CDR3 for alpha chain variable domain of TCR clone 15033 (TRAV1-2, TRAJ9)
CAALNTGGFKAIF

SEQ ID NO: 30066 - protein, 13 aa, Homo sapiens
  CDR3 for beta chain variable domain of TCR clone 15033 (TRBV19, TRBJ1-2)
CASSVPGQDGYTF

SEQ ID NO: 30067 - protein, 20 aa, Homo sapiens
  CDR3 for alpha chain variable domain of TCR clone 15034 (TRAV25, TRAJ53)
CRNLLLPTSNSGGSNYKLTF

SEQ ID NO: 30068 - protein, 14 aa, Homo sapiens
  CDR3 for beta chain variable domain of TCR clone 15034 (TRBV11-2, TRBJ2-3)
CASSRLARTDTQYF

SEQ ID NO: 30069 - protein, 12 aa, Homo sapiens
  CDR3 for alpha chain variable domain of TCR clone 15035 (TRAV13-1, TRAJ21)
CAAKEGFNKFYF

SEQ ID NO: 30070 - protein, 14 aa, Homo sapiens
  CDR3 for beta chain variable domain of TCR clone 15035 (TRBV5-4, TRBJ1-1)
CASGLDSRRDEAFF

SEQ ID NO: 30071 - protein, 14 aa, Homo sapiens
  CDR3 for alpha chain variable domain of TCR clone 15036 (TRAV23/DV6, TRAJ22)
CAASVSGPARQLTF

SEQ ID NO: 30072 - protein, 16 aa, Homo sapiens
  CDR3 for beta chain variable domain of TCR clone 15036 (TRBV19, TRBJ2-2)
CASSFPGQGLAGELFF

SEQ ID NO: 30073 - protein, 12 aa, Homo sapiens
  CDR3 for alpha chain variable domain of TCR clone 15037 (TRAV13-1, TRAJ48)
CAANFGSEKLTF

SEQ ID NO: 30074 - protein, 13 aa, Homo sapiens
  CDR3 for beta chain variable domain of TCR clone 15037 (TRBV7-3, TRBJ1-1)
CASSQDWGAEAFF

SEQ ID NO: 30075 - protein, 13 aa, Homo sapiens
  CDR3 for alpha chain variable domain of TCR clone 15038 (TRAV2, TRAJ40)
CAVVTSGTYKYIF

SEQ ID NO: 30076 - protein, 16 aa, Homo sapiens
  CDR3 for beta chain variable domain of TCR clone 15038 (TRBV9, TRBJ2-1)
CASSVGGGGNYNEQFF

SEQ ID NO: 30077 - protein, 15 aa, Homo sapiens
  CDR3 for alpha chain variable domain of TCR clone 15039 (TRAV12-1, TRAJ44)
CVVFVNTGTASKLTF

SEQ ID NO: 30078 - protein, 17 aa, Homo sapiens
  CDR3 for beta chain variable domain of TCR clone 15039 (TRBV7-8, TRBJ2-6)
YASSAGTGGAGANVLTF

SEQ ID NO: 30079 - protein, 14 aa, Homo sapiens
  CDR3 for alpha chain variable domain of TCR clone 15040 (TRAV1-2, TRAJ16)
CAVNRFSDGQTLLF

SEQ ID NO: 30080 - protein, 15 aa, Homo sapiens
  CDR3 for beta chain variable domain of TCR clone 15040 (TRBV7-9, TRBJ1-6)
CASSSPGRGNSPLHF

SEQ ID NO: 30081 - protein, 13 aa, Homo sapiens
  CDR3 for alpha chain variable domain of TCR clone 15041 (TRAV29/DV5, TRAJ13)
CAARPGGYQKVTF

SEQ ID NO: 30082 - protein, 13 aa, Homo sapiens
  CDR3 for beta chain variable domain of TCR clone 15041 (TRBV12-4, TRBJ1-2)
CASSLDSNYGYTF

SEQ ID NO: 30083 - protein, 16 aa, Homo sapiens
  CDR3 for alpha chain variable domain of TCR clone 15042 (TRAV27, TRAJ13)
CAGAKSDSGGYKKVTF

SEQ ID NO: 30084 - protein, 15 aa, Homo sapiens
  CDR3 for beta chain variable domain of TCR clone 15042 (TRBV29-1, TRBJ2-1)
CSVGRHALFYNEQFF

SEQ ID NO: 30085 - protein, 10 aa, Homo sapiens
  CDR3 for alpha chain variable domain of TCR clone 15043 (TRAV23/DV6, TRAJ57)
CAASSALSQG

SEQ ID NO: 30086 - protein, 14 aa, Homo sapiens
  CDR3 for beta chain variable domain of TCR clone 15043 (TRBV25-1, TRBJ1-1)
CASTHLGGNTEAFF

SEQ ID NO: 30087 - protein, 14 aa, Homo sapiens
  CDR3 for alpha chain variable domain of TCR clone 15044 (TRAV38-1, TRAJ45)
RAYYSGGGADGLTF

SEQ ID NO: 30088 - protein, 20 aa, Homo sapiens
  CDR3 for beta chain variable domain of TCR clone 15044 (TRBV28, TRBJ2-1)
CASTPIGRSPGLAGGNEQFF

SEQ ID NO: 30089 - protein, 13 aa, Homo sapiens
  CDR3 for alpha chain variable domain of TCR clone 15045 (TRAV8-3, TRAJ43)
CAVGPDNNNDIRF

SEQ ID NO: 30090 - protein, 14 aa, Homo sapiens
  CDR3 for beta chain variable domain of TCR clone 15045 (TRBV19, TRBJ2-1)
CASPTFVLSGEQFF

SEQ ID NO: 30091 - protein, 14 aa, Homo sapiens
  CDR3 for alpha chain variable domain of TCR clone 15046 (TRAV8-2, TRAJ4)
CVVSPSGGYNKLIF

SEQ ID NO: 30092 - protein, 17 aa, Homo sapiens
  CDR3 for beta chain variable domain of TCR clone 15046 (TRBV13, TRBJ2-3)
CASSLSRVAGGRNTQYF

SEQ ID NO: 30093 - protein, 14 aa, Homo sapiens
  CDR3 for alpha chain variable domain of TCR clone 15047 (TRAV13-2, TRAJ10)
CRESSYSGYSTLTF

SEQ ID NO: 30094 - protein, 16 aa, Homo sapiens
  CDR3 for beta chain variable domain of TCR clone 15047 (TRBV19, TRBJ1-1)
CASRFGGPVTGTEAFF

SEQ ID NO: 30095 - protein, 11 aa, Homo sapiens
  CDR3 for alpha chain variable domain of TCR clone 15048 (TRAV1-2, TRAJ40)
CAVPGTYKYIF

SEQ ID NO: 30096 - protein, 15 aa, Homo sapiens
  CDR3 for beta chain variable domain of TCR clone 15048 (TRBV25-1, TRBJ1-4)
CASSPGDSTNEELFF

SEQ ID NO: 30097 - protein, 16 aa, Homo sapiens
  CDR3 for alpha chain variable domain of TCR clone 15049 (TRAV14/DV4, TRAJ53)
CAMREGGGGSNYKLTF

SEQ ID NO: 30098 - protein, 12 aa, Homo sapiens
  CDR3 for beta chain variable domain of TCR clone 15049 (TRBV11-2, TRBJ2-2)
CTSSLGGGELFF

SEQ ID NO: 30099 - protein, 12 aa, Homo sapiens
  CDR3 for alpha chain variable domain of TCR clone 15050 (TRAV4, TRAJ26)
CLVGDYGQNFVF

SEQ ID NO: 30100 - protein, 16 aa, Homo sapiens
  CDR3 for beta chain variable domain of TCR clone 15050 (TRBV7-2, TRBJ1-2)
CASSSNQGRRGHGYTF

SEQ ID NO: 30101 - protein, 17 aa, Homo sapiens
  CDR3 for alpha chain variable domain of TCR clone 15051 (TRAV3, TRAJ6)
CAVRDGPRAGGSYLPTF

SEQ ID NO: 30102 - protein, 20 aa, Homo sapiens
  CDR3 for beta chain variable domain of TCR clone 15051 (TRBV28, TRBJ2-1)
CASTPIGRSPGLAGGNEQFF

SEQ ID NO: 30103 - protein, 15 aa, Homo sapiens
  CDR3 for alpha chain variable domain of TCR clone 15052 (TRAV3, TRAJ22)
CAVRDRGGSARQLTF

SEQ ID NO: 30104 - protein, 16 aa, Homo sapiens
  CDR3 for beta chain variable domain of TCR clone 15052 (TRBV20-1, TRBJ1-4)
CSAPGQGLLTNEKLFF

SEQ ID NO: 30105 - protein, 14 aa, Homo sapiens
  CDR3 for alpha chain variable domain of TCR clone 15053 (TRAV12-2, TRAJ40)
CAVKIPSGTYKYIF

SEQ ID NO: 30106 - protein, 16 aa, Homo sapiens
  CDR3 for beta chain variable domain of TCR clone 15053 (TRBV19, TRBJ2-1)
CASSKAGPSSYNEQFF

SEQ ID NO: 30107 - protein, 17 aa, Homo sapiens
  CDR3 for alpha chain variable domain of TCR clone 15054 (TRAV23/DV6, TRAJ57)
CAASSTLSQGGSEKLVL

SEQ ID NO: 30108 - protein, 14 aa, Homo sapiens
  CDR3 for beta chain variable domain of TCR clone 15054 (TRBV25-1, TRBJ1-1)
CASTHLGGNTEAFF

SEQ ID NO: 30109 - protein, 16 aa, Homo sapiens
  CDR3 for alpha chain variable domain of TCR clone 15055 (TRAV21, TRAJ37)
CAVRTAGSSNTGKLIF

SEQ ID NO: 30110 - protein, 13 aa, Homo sapiens
  CDR3 for beta chain variable domain of TCR clone 15055 (TRBV7-9, TRBJ2-5)
CASLPSGRETQHF

SEQ ID NO: 30111 - protein, 14 aa, Homo sapiens
  CDR3 for alpha chain variable domain of TCR clone 15056 (TRAV20, TRAJ56)
CAVQFGGANSKLTF

SEQ ID NO: 30112 - protein, 14 aa, Homo sapiens
  CDR3 for beta chain variable domain of TCR clone 15056 (TRBV20-1, TRBJ2-7)
CSARRGRSSYEQYF

SEQ ID NO: 30113 - protein, 14 aa, Homo sapiens
  CDR3 for alpha chain variable domain of TCR clone 15057 (TRAV12-2, TRAJ13)
CAVKKTGGYQKVTF

SEQ ID NO: 30114 - protein, 15 aa, Homo sapiens
  CDR3 for beta chain variable domain of TCR clone 15057 (TRBV27, TRBJ2-1)
CASSNGGGSTNEQFF

SEQ ID NO: 30115 - protein, 17 aa, Homo sapiens
  CDR3 for alpha chain variable domain of TCR clone 15058 (TRAV3, TRAJ6)
CAVRDGPRAGGSYIPTF

SEQ ID NO: 30116 - protein, 17 aa, Homo sapiens
  CDR3 for beta chain variable domain of TCR clone 15058 (TRBV7-3, TRBJ2-3)
CASSLMKRMRGADTQYF

SEQ ID NO: 30117 - protein, 15 aa, Homo sapiens
  CDR3 for alpha chain variable domain of TCR clone 15059 (TRAV3, TRAJ5)
CAVRDRKTGRRALIF

SEQ ID NO: 30118 - protein, 15 aa, Homo sapiens
  CDR3 for beta chain variable domain of TCR clone 15059 (TRBV7-8, TRBJ2-1)
CASSLADSLYNEQFF

SEQ ID NO: 30119 - protein, 14 aa, Homo sapiens
  CDR3 for alpha chain variable domain of TCR clone 15060 (TRAV13-1, TRAJ35)
CAASKGGFGNVLHC

SEQ ID NO: 30120 - protein, 13 aa, Homo sapiens
  CDR3 for beta chain variable domain of TCR clone 15060 (TRBV7-3, TRBJ1-1)
CARSQDWGAEAFF

SEQ ID NO: 30121 - protein, 12 aa, Homo sapiens
  CDR3 for alpha chain variable domain of TCR clone 15061 (TRAV12-3, TRAJ17)
CAMTLTGNKLTF

SEQ ID NO: 30122 - protein, 11 aa, Homo sapiens
  CDR3 for beta chain variable domain of TCR clone 15061 (TRBV7-8, TRBJ2-7)
CASSLSLEQYF

SEQ ID NO: 30123 - protein, 12 aa, Homo sapiens
  CDR3 for alpha chain variable domain of TCR clone 15062 (TRAV12-1, TRAJ40)
CVVYSGTYKYIF

SEQ ID NO: 30124 - protein, 18 aa, Homo sapiens
  CDR3 for beta chain variable domain of TCR clone 15062 (TRBV11-2, TRBJ2-3)
CASSLGGASRGAPNTQYL

SEQ ID NO: 30125 - protein, 15 aa, Homo sapiens
  CDR3 for alpha chain variable domain of TCR clone 15063 (TRAV2, TRAJ9)
CAVEDRGTGGFTTIF

SEQ ID NO: 30126 - protein, 16 aa, Homo sapiens
  CDR3 for beta chain variable domain of TCR clone 15063 (TRBV24-1, TRBJ2-3)
CATSDPGTGATDTQYF

SEQ ID NO: 30127 - protein, 12 aa, Homo sapiens
  CDR3 for alpha chain variable domain of TCR clone 15064 (TRAV13-1, TRAJ15)
CAASQAGTALIF

SEQ ID NO: 30128 - protein, 15 aa, Homo sapiens
  CDR3 for beta chain variable domain of TCR clone 15064 (TRBV11-3, TRBJ2-3)
CASLKDGREGDTQYF

SEQ ID NO: 30129 - protein, 15 aa, Homo sapiens
  CDR3 for alpha chain variable domain of TCR clone 15065 (TRAV4, TRAJ39)
CLVGPTNNAGNMLTF

SEQ ID NO: 30130 - protein, 13 aa, Homo sapiens
  CDR3 for beta chain variable domain of TCR clone 15065 (TRBV11-2, TRBJ2-5)
CASSSTGEETQYF

SEQ ID NO: 30131 - protein, 13 aa, Homo sapiens
  CDR3 for alpha chain variable domain of TCR clone 15066 (TRAV8-3, TRAJ44)
CAVVPGTASKLPF

SEQ ID NO: 30132 - protein, 14 aa, Homo sapiens
  CDR3 for beta chain variable domain of TCR clone 15066 (TRBV11-2, TRBJ2-3)
CASSRLARTDTQYF

SEQ ID NO: 30133 - protein, 13 aa, Homo sapiens
  CDR3 for alpha chain variable domain of TCR clone 15067 (TRAV21, TRAJ27)
CAARPGNAGKSTF

SEQ ID NO: 30134 - protein, 14 aa, Homo sapiens
  CDR3 for beta chain variable domain of TCR clone 15067 (TRBV7-6, TRBJ2-3)
CASSLGSVTDTQYF

SEQ ID NO: 30135 - protein, 18 aa, Homo sapiens
  CDR3 for alpha chain variable domain of TCR clone 15068 (TRAV21, TRAJ52)
CAVRPSPAGGTSYGKLTF

SEQ ID NO: 30136 - protein, 14 aa, Homo sapiens
  CDR3 for beta chain variable domain of TCR clone 15068 (TRBV7-6, TRBJ2-3)
CASSLGTVTDTQYF

SEQ ID NO: 30137 - protein, 15 aa, Homo sapiens
  CDR3 for alpha chain variable domain of TCR clone 15069 (TRAV8-3, TRAJ45)
CASSYSGGGADGLTF

SEQ ID NO: 30138 - protein, 13 aa, Homo sapiens
  CDR3 for beta chain variable domain of TCR clone 15069 (TRBV10-3, TRBJ2-7)
CVSKLAVNYEQYF

SEQ ID NO: 30139 - protein, 13 aa, Homo sapiens
  CDR3 for alpha chain variable domain of TCR clone 15070 (TRAV22, TRAJ49)
CAVGREAVTSSIL

SEQ ID NO: 30140 - protein, 14 aa, Homo sapiens
  CDR3 for beta chain variable domain of TCR clone 15070 (TRBV11-2, TRBJ1-2)
CASSLGTANYGYTF

SEQ ID NO: 30141 - protein, 11 aa, Homo sapiens
  CDR3 for alpha chain variable domain of TCR clone 15071 (TRAV1-2, TRAJ20)
CAVANDYKLSF

SEQ ID NO: 30142 - protein, 18 aa, Homo sapiens
  CDR3 for beta chain variable domain of TCR clone 15071 (TRBV20-1, TRBJ2-6)
CSAEMTPTHGSGANVLTF

SEQ ID NO: 30143 - protein, 16 aa, Homo sapiens
  CDR3 for alpha chain variable domain of TCR clone 15072 (TRAV3, TRAJ37)
CAVRGKGSGNTGKLIF

SEQ ID NO: 30144 - protein, 17 aa, Homo sapiens
  CDR3 for beta chain variable domain of TCR clone 15072 (TRBV13, TRBJ2-3)
CASSLSRVAGGRNTQYF

SEQ ID NO: 30145 - protein, 10 aa, Homo sapiens
  CDR3 for alpha chain variable domain of TCR clone 15073 (TRAV23/DV6, TRAJ57)
CAASSNLSQG

SEQ ID NO: 30146 - protein, 14 aa, Homo sapiens
  CDR3 for beta chain variable domain of TCR clone 15073 (TRBV25-1, TRBJ1-1)
CASTHLGGNTEAFF

SEQ ID NO: 30147 - protein, 11 aa, Homo sapiens
  CDR3 for alpha chain variable domain of TCR clone 15074 (TRAV1-2, TRAJ20)
CAVANDYKLSF

SEQ ID NO: 30148 - protein, 18 aa, Homo sapiens
  CDR3 for beta chain variable domain of TCR clone 15074 (TRBV20-1, TRBJ2-6)
CNAETTPTHGSGANVLTF

SEQ ID NO: 30149 - protein, 16 aa, Homo sapiens
  CDR3 for alpha chain variable domain of TCR clone 15075 (TRAV14/DV4, TRAJ11)
CAMREGGNSGYSTLTF

SEQ ID NO: 30150 - protein, 16 aa, Homo sapiens
  CDR3 for beta chain variable domain of TCR clone 15075 (TRBV5-1, TRBJ2-2)
CASSSRTGGRTGELFF

SEQ ID NO: 30151 - protein, 13 aa, Homo sapiens
  CDR3 for alpha chain variable domain of TCR clone 15076 (TRAV1-1, TRAJ9)
CAAKTTGGFKTIF

SEQ ID NO: 30152 - protein, 14 aa, Homo sapiens
  CDR3 for beta chain variable domain of TCR clone 15076 (TRBV20-1, TRBJ2-1)
CSAQIGGSANEQFF

SEQ ID NO: 30153 - protein, 15 aa, Homo sapiens
  CDR3 for alpha chain variable domain of TCR clone 15077 (TRAV21, TRAJ24)
CAARSSTDSWGKLQS

SEQ ID NO: 30154 - protein, 13 aa, Homo sapiens
  CDR3 for beta chain variable domain of TCR clone 15077 (TRBV11-2, TRBJ2-5)
CASSSTGEETQYF

SEQ ID NO: 30155 - protein, 12 aa, Homo sapiens
  CDR3 for alpha chain variable domain of TCR clone 15078 (TRAV2, TRAJ9)
CAVGAGGSKTIF

SEQ ID NO: 30156 - protein, 16 aa, Homo sapiens
  CDR3 for beta chain variable domain of TCR clone 15078 (TRBV13, TRBJ2-2)
CASSPRTGEHTGELFF

SEQ ID NO: 30157 - protein, 18 aa, Homo sapiens
  CDR3 for alpha chain variable domain of TCR clone 15079 (TRAV21, TRAJ52)
CAVRPSPAGGTSYGKLTF

SEQ ID NO: 30158 - protein, 17 aa, Homo sapiens
  CDR3 for beta chain variable domain of TCR clone 15079 (TRBV13, TRBJ2-3)
CASSLSRVAGWRNTQYF

SEQ ID NO: 30159 - protein, 14 aa, Homo sapiens
  CDR3 for alpha chain variable domain of TCR clone 15080 (TRAV38-1, TRAJ29)
CAFITPSGDTPLVF

SEQ ID NO: 30160 - protein, 14 aa, Homo sapiens
  CDR3 for beta chain variable domain of TCR clone 15080 (TRBV18, TRBJ2-7)
CASSPRGGAYEQYF

SEQ ID NO: 30161 - protein, 13 aa, Homo sapiens
  CDR3 for alpha chain variable domain of TCR clone 15081 (TRAV12-3, TRAJ13)
CAMSSGGYQKVTF

SEQ ID NO: 30162 - protein, 13 aa, Homo sapiens
  CDR3 for beta chain variable domain of TCR clone 15081 (TRBV20-1, TRBJ1-1)
CSAPPGGHTEALF

SEQ ID NO: 30163 - protein, 14 aa, Homo sapiens
  CDR3 for alpha chain variable domain of TCR clone 15082 (TRAV21, TRAJ35)
CAVMPIGFGHVLHC

SEQ ID NO: 30164 - protein, 12 aa, Homo sapiens
  CDR3 for beta chain variable domain of TCR clone 15082 (TRBV7-9, TRBJ2-7)
CASSIKREEQYF

SEQ ID NO: 30165 - protein, 14 aa, Homo sapiens
  CDR3 for alpha chain variable domain of TCR clone 15083 (TRAV8-1, TRAJ39)
CAVNDNNAGNMLTF

SEQ ID NO: 30166 - protein, 17 aa, Homo sapiens
  CDR3 for beta chain variable domain of TCR clone 15083 (TRBV20-1, TRBJ2-1)
CSASSSGLAGSYNEQFF

SEQ ID NO: 30167 - protein, 11 aa, Homo sapiens
  CDR3 for alpha chain variable domain of TCR clone 15084 (TRAV12-3, TRAJ43)
CAMSVSDDMRF

SEQ ID NO: 30168 - protein, 13 aa, Homo sapiens
  CDR3 for beta chain variable domain of TCR clone 15084 (TRBV20-1, TRBJ1-1)
CSAPLGGGTEAFF

SEQ ID NO: 30169 - protein, 14 aa, Homo sapiens
  CDR3 for alpha chain variable domain of TCR clone 15085 (TRAV12-2, TRAJ40)
CAVKIPSGTYKYIF

SEQ ID NO: 30170 - protein, 12 aa, Homo sapiens
  CDR3 for beta chain variable domain of TCR clone 15085 (TRBV7-8, TRBJ2-7)
CASSLGDREQYF

SEQ ID NO: 30171 - protein, 14 aa, Homo sapiens
  CDR3 for alpha chain variable domain of TCR clone 15086 (TRAV13-1, TRAJ16)
CAAGQMARSCSLQG

SEQ ID NO: 30172 - protein, 13 aa, Homo sapiens
  CDR3 for beta chain variable domain of TCR clone 15086 (TRBV7-2, TRBJ2-4)
CASSREHANIQYF

SEQ ID NO: 30173 - protein, 15 aa, Homo sapiens
  CDR3 for alpha chain variable domain of TCR clone 15087 (TRAV35, TRAJ40)
CAGQLGTSGTYKYIF

SEQ ID NO: 30174 - protein, 14 aa, Homo sapiens
  CDR3 for beta chain variable domain of TCR clone 15087 (TRBV7-3, TRBJ2-1)
CASSLAGGTNGQFF

SEQ ID NO: 30175 - protein, 14 aa, Homo sapiens
  CDR3 for alpha chain variable domain of TCR clone 15088 (TRAV20, TRAJ56)
CAVQFGGANSNLTF

SEQ ID NO: 30176 - protein, 14 aa, Homo sapiens
  CDR3 for beta chain variable domain of TCR clone 15088 (TRBV20-1, TRBJ2-7)
CSAKRGRSSYEQYF

SEQ ID NO: 30177 - protein, 14 aa, Homo sapiens
  CDR3 for alpha chain variable domain of TCR clone 15089 (TRAV1-2, TRAJ16)
CAVNRFSDGQNLLF

SEQ ID NO: 30178 - protein, 15 aa, Homo sapiens
  CDR3 for beta chain variable domain of TCR clone 15089 (TRBV7-9, TRBJ1-6)
CASSSPGRGNSPLHF

SEQ ID NO: 30179 - protein, 11 aa, Homo sapiens
  CDR3 for alpha chain variable domain of TCR clone 15090 (TRAV21, TRAJ11)
CAVNGYSTLPF

SEQ ID NO: 30180 - protein, 11 aa, Homo sapiens
  CDR3 for beta chain variable domain of TCR clone 15090 (TRBV19, TRBJ1-1)
CASSIGSEAFF

SEQ ID NO: 30181 - protein, 14 aa, Homo sapiens
  CDR3 for alpha chain variable domain of TCR clone 15091 (TRAV1-2, TRAJ16)
CAVNRFSDDQKLLF

SEQ ID NO: 30182 - protein, 15 aa, Homo sapiens
  CDR3 for beta chain variable domain of TCR clone 15091 (TRBV9, TRBJ1-6)
CASSVAGTGDSPLHF

SEQ ID NO: 30183 - protein, 14 aa, Homo sapiens
  CDR3 for alpha chain variable domain of TCR clone 15092 (TRAV13-1, TRAJ35)
CAASKGGFGNVLHC

SEQ ID NO: 30184 - protein, 13 aa, Homo sapiens
  CDR3 for beta chain variable domain of TCR clone 15092 (TRBV19, TRBJ1-2)
CASSVPGQDGYTF

SEQ ID NO: 30185 - protein, 11 aa, Homo sapiens
  CDR3 for alpha chain variable domain of TCR clone 15093 (TRAV12-3, TRAJ43)
CAMSVSNDMRF

SEQ ID NO: 30186 - protein, 13 aa, Homo sapiens
  CDR3 for beta chain variable domain of TCR clone 15093 (TRBV20-1, TRBJ1-1)
CSAPLGGGIEAFF

SEQ ID NO: 30187 - protein, 14 aa, Homo sapiens
  CDR3 for alpha chain variable domain of TCR clone 15094 (TRAV12-3, TRAJ10)
SHLPLTGGGNKLTF

SEQ ID NO: 30188 - protein, 14 aa, Homo sapiens
  CDR3 for beta chain variable domain of TCR clone 15094 (TRBV7-9, TRBJ2-1)
CASSPRDSLYEQFF

SEQ ID NO: 30189 - protein, 13 aa, Homo sapiens
  CDR3 for alpha chain variable domain of TCR clone 15095 (TRAV29/DV5, TRAJ31)
CAASRNNYARLMF

SEQ ID NO: 30190 - protein, 12 aa, Homo sapiens
  CDR3 for beta chain variable domain of TCR clone 15095 (TRBV28, TRBJ2-3)
CASSLYRDTQYF

SEQ ID NO: 30191 - protein, 15 aa, Homo sapiens
  CDR3 for alpha chain variable domain of TCR clone 15096 (TRAV8-4, TRAJ3)
CAVTGENPVQQCFQD

SEQ ID NO: 30192 - protein, 16 aa, Homo sapiens
  CDR3 for beta chain variable domain of TCR clone 15096 (TRBV4-2, TRBJ1-1)
CASSQAGFGMNTEAFF

SEQ ID NO: 30193 - protein, 17 aa, Homo sapiens
  CDR3 for alpha chain variable domain of TCR clone 15097 (TRAV3, TRAJ6)
CAVRHGPRAGGSYIPTF

SEQ ID NO: 30194 - protein, 14 aa, Homo sapiens
  CDR3 for beta chain variable domain of TCR clone 15097 (TRBV7-2, TRBJ2-7)
CASSPKTSFYEQYF

SEQ ID NO: 30195 - protein, 18 aa, Homo sapiens
  CDR3 for alpha chain variable domain of TCR clone 15098 (TRAV13-1, TRAJ52)
CAASKRSAGGTSYGKLTF

SEQ ID NO: 30196 - protein, 16 aa, Homo sapiens
  CDR3 for beta chain variable domain of TCR clone 15098 (TRBV29-1, TRBJ2-7)
CSVEVVGTSGSYEQYF

SEQ ID NO: 30197 - protein, 12 aa, Homo sapiens
  CDR3 for alpha chain variable domain of TCR clone 15099 (TRAV13-1, TRAJ49)
CAASPMGNQFYF

SEQ ID NO: 30198 - protein, 16 aa, Homo sapiens
  CDR3 for beta chain variable domain of TCR clone 15099 (TRBV19, TRBJ2-5)
CASSIDGTGLEETQYF

SEQ ID NO: 30199 - protein, 14 aa, Homo sapiens
  CDR3 for alpha chain variable domain of TCR clone 15100 (TRAV12-1, TRAJ17)
CVLNYKAAGNKLTF

SEQ ID NO: 30200 - protein, 17 aa, Homo sapiens
  CDR3 for beta chain variable domain of TCR clone 15100 (TRBV20-1, TRBJ2-1)
CSASSSGLAGSYNEQFF

SEQ ID NO: 30201 - protein, 14 aa, Homo sapiens
  CDR3 for alpha chain variable domain of TCR clone 15101 (TRAV2, TRAJ3)
CAVPPYSSASKVIF

SEQ ID NO: 30202 - protein, 16 aa, Homo sapiens
  CDR3 for beta chain variable domain of TCR clone 15101 (TRBV19, TRBJ2-1)
CASSKAGPSSYNEQFF

SEQ ID NO: 30203 - protein, 14 aa, Homo sapiens
  CDR3 for alpha chain variable domain of TCR clone 15102 (TRAV12-2, TRAJ13)
CAVKKTGGYQKVTF

SEQ ID NO: 30204 - protein, 12 aa, Homo sapiens
  CDR3 for beta chain variable domain of TCR clone 15102 (TRBV11-2, TRBJ2-2)
CASSLPTGELFF

SEQ ID NO: 30205 - protein, 16 aa, Homo sapiens
  CDR3 for alpha chain variable domain of TCR clone 15103 (TRAV3, TRAJ37)
CAVRGKGSGNTGKLIF

SEQ ID NO: 30206 - protein, 13 aa, Homo sapiens
  CDR3 for beta chain variable domain of TCR clone 15103 (TRBV14, TRBJ2-7)
CASSQARRYEQYF

SEQ ID NO: 30207 - protein, 18 aa, Homo sapiens
  CDR3 for alpha chain variable domain of TCR clone 15104 (TRAV12-3, TRAJ52)
CAMSRTNAGGTSYGKLTF

SEQ ID NO: 30208 - protein, 17 aa, Homo sapiens
  CDR3 for beta chain variable domain of TCR clone 15104 (TRBV7-3, TRBJ2-3)
CASSLMRRMRGADTQYF

SEQ ID NO: 30209 - protein, 13 aa, Homo sapiens
  CDR3 for alpha chain variable domain of TCR clone 15105 (TRAV21, TRAJ27)
CAARPGNAGKSTF

SEQ ID NO: 30210 - protein, 14 aa, Homo sapiens
  CDR3 for beta chain variable domain of TCR clone 15105 (TRBV7-6, TRBJ2-3)
CAISLGTVTDTQYF

SEQ ID NO: 30211 - protein, 15 aa, Homo sapiens
  CDR3 for alpha chain variable domain of TCR clone 15106 (TRAV8-3, TRAJ27)
CAVGTSKTNAGKSTF

SEQ ID NO: 30212 - protein, 15 aa, Homo sapiens
  CDR3 for beta chain variable domain of TCR clone 15106 (TRBV7-2, TRBJ2-1)
CASSSGLAGGNEQFF

SEQ ID NO: 30213 - protein, 17 aa, Homo sapiens
  CDR3 for alpha chain variable domain of TCR clone 15107 (TRAV3, TRAJ6)
CAVRDGPRAGGSYIPTF

SEQ ID NO: 30214 - protein, 17 aa, Homo sapiens
  CDR3 for beta chain variable domain of TCR clone 15107 (TRBV7-8, TRBJ2-6)
CASSAGTGGAGANVLTF

SEQ ID NO: 30215 - protein, 12 aa, Homo sapiens
  CDR3 for alpha chain variable domain of TCR clone 15108 (TRAV12-3, TRAJ17)
CAMTLTGNKLTF

SEQ ID NO: 30216 - protein, 13 aa, Homo sapiens
  CDR3 for beta chain variable domain of TCR clone 15108 (TRBV7-9, TRBJ2-3)
CASSPGSTDTQYF

SEQ ID NO: 30217 - protein, 18 aa, Homo sapiens
  CDR3 for alpha chain variable domain of TCR clone 15109 (TRAV12-3, TRAJ52)
CAMSRTNAGGTSYGKLTF

SEQ ID NO: 30218 - protein, 17 aa, Homo sapiens
  CDR3 for beta chain variable domain of TCR clone 15109 (TRBV7-3, TRBJ2-3)
CASSLMKRVRGADTQYF

SEQ ID NO: 30219 - protein, 14 aa, Homo sapiens
  CDR3 for alpha chain variable domain of TCR clone 15110 (TRAV2, TRAJ9)
CAVDPNTGGFKTIF

SEQ ID NO: 30220 - protein, 14 aa, Homo sapiens
  CDR3 for beta chain variable domain of TCR clone 15110 (TRBV27, TRBJ1-1)
CASSPQGKRAEAFF

SEQ ID NO: 30221 - protein, 12 aa, Homo sapiens
  CDR3 for alpha chain variable domain of TCR clone 15111 (TRAV2, TRAJ9)
CAVGAGGFKTIF

SEQ ID NO: 30222 - protein, 16 aa, Homo sapiens
  CDR3 for beta chain variable domain of TCR clone 15111 (TRBV13, TRBJ2-2)
CASSPRTGEHTGEPFF

SEQ ID NO: 30223 - protein, 14 aa, Homo sapiens
  CDR3 for alpha chain variable domain of TCR clone 15112 (TRAV13-1, TRAJ44)
CAAKATGTASKLTL

SEQ ID NO: 30224 - protein, 17 aa, Homo sapiens
  CDR3 for beta chain variable domain of TCR clone 15112 (TRBV7-3, TRBJ2-3)
CASSLMKRMRGADTQYF

SEQ ID NO: 30225 - protein, 12 aa, Homo sapiens
  CDR3 for alpha chain variable domain of TCR clone 15113 (TRAV17, TRAJ12)
CATLRSSYKLIF

SEQ ID NO: 30226 - protein, 16 aa, Homo sapiens
  CDR3 for beta chain variable domain of TCR clone 15113 (TRBV28, TRBJ2-7)
RASSLFFETGGPEQYF

SEQ ID NO: 30227 - protein, 14 aa, Homo sapiens
  CDR3 for alpha chain variable domain of TCR clone 15114 (TRAV35, TRAJ22)
FAGLRPGSARQLTF

SEQ ID NO: 30228 - protein, 15 aa, Homo sapiens
  CDR3 for beta chain variable domain of TCR clone 15114 (TRBV12-4, TRBJ2-5)
CASSPPTGLQETQYF

SEQ ID NO: 30229 - protein, 17 aa, Homo sapiens
  CDR3 for alpha chain variable domain of TCR clone 15115 (TRAV19, TRAJ28)
CALSEASSGAGSYQLTF

SEQ ID NO: 30230 - protein, 16 aa, Homo sapiens
  CDR3 for beta chain variable domain of TCR clone 15115 (TRBV11-2, TRBJ1-1)
CASSLRQGGEHSKAFF

SEQ ID NO: 30231 - protein, 13 aa, Homo sapiens
  CDR3 for alpha chain variable domain of TCR clone 15116 (TRAV8-3, TRAJ36)
CAVGATGANNLLF

SEQ ID NO: 30232 - protein, 15 aa, Homo sapiens
  CDR3 for beta chain variable domain of TCR clone 15116 (TRBV7-2, TRBJ1-2)
CASSPRAGWNYGYTF

SEQ ID NO: 30233 - protein, 12 aa, Homo sapiens
  CDR3 for alpha chain variable domain of TCR clone 15117 (TRAV13-1, TRAJ21)
CAAKEGFNKFYF

SEQ ID NO: 30234 - protein, 14 aa, Homo sapiens
  CDR3 for beta chain variable domain of TCR clone 15117 (TRBV5-4, TRBJ1-1)
CASSLDSRRDEAVF

SEQ ID NO: 30235 - protein, 14 aa, Homo sapiens
  CDR3 for alpha chain variable domain of TCR clone 15118 (TRAV26-1, TRAJ26)
CIVRATLLGQNFVF

SEQ ID NO: 30236 - protein, 16 aa, Homo sapiens
  CDR3 for beta chain variable domain of TCR clone 15118 (TRBV12-4, TRBJ2-7)
CASRSTGTGPSYEQYF

SEQ ID NO: 30237 - protein, 14 aa, Homo sapiens
  CDR3 for alpha chain variable domain of TCR clone 15119 (TRAV38-1, TRAJ29)
CAFITPSGNTPLVS

SEQ ID NO: 30238 - protein, 14 aa, Homo sapiens
  CDR3 for beta chain variable domain of TCR clone 15119 (TRBV18, TRBJ2-7)
CASSPRGGAYEQYF

SEQ ID NO: 30239 - protein, 15 aa, Homo sapiens
  CDR3 for alpha chain variable domain of TCR clone 15120 (TRAV3, TRAJ22)
CAVRDRGGSARQLTF

SEQ ID NO: 30240 - protein, 16 aa, Homo sapiens
  CDR3 for beta chain variable domain of TCR clone 15120 (TRBV5-4, TRBJ2-3)
CASQQPGAGGPDTQYF

SEQ ID NO: 30241 - protein, 14 aa, Homo sapiens
  CDR3 for alpha chain variable domain of TCR clone 15121 (TRAV38-1, TRAJ40)
CALRTTSGTYKYIF

SEQ ID NO: 30242 - protein, 14 aa, Homo sapiens
  CDR3 for beta chain variable domain of TCR clone 15121 (TRBV25-1, TRBJ1-1)
CASTHLGGNTEAFF

SEQ ID NO: 30243 - protein, 15 aa, Homo sapiens
  CDR3 for alpha chain variable domain of TCR clone 15122 (TRAV17, TRAJ57)
CATGPSQGGSEKLVF

SEQ ID NO: 30244 - protein, 16 aa, Homo sapiens
  CDR3 for beta chain variable domain of TCR clone 15122 (TRBV12-4, TRBJ1-5)
CASSRPVGGSKQPQHF

SEQ ID NO: 30245 - protein, 11 aa, Homo sapiens
  CDR3 for alpha chain variable domain of TCR clone 15123 (TRAV12-3, TRAJ49)
CAANTGNQFYF

SEQ ID NO: 30246 - protein, 12 aa, Homo sapiens
  CDR3 for beta chain variable domain of TCR clone 15123 (TRBV6-3, TRBJ2-7)
CASSEPGCEQYF

SEQ ID NO: 30247 - protein, 15 aa, Homo sapiens
  CDR3 for alpha chain variable domain of TCR clone 15124 (TRAV26-1, TRAJ29)
CIVRVEGSGNTPLVF

SEQ ID NO: 30248 - protein, 14 aa, Homo sapiens
  CDR3 for beta chain variable domain of TCR clone 15124 (TRBV18, TRBJ2-5)
CASAPGVSQETQYF

SEQ ID NO: 30249 - protein, 12 aa, Homo sapiens
  CDR3 for alpha chain variable domain of TCR clone 15125 (TRAV13-1, TRAJ49)
CAASPMGDQFYF

SEQ ID NO: 30250 - protein, 13 aa, Homo sapiens
  CDR3 for beta chain variable domain of TCR clone 15125 (TRBV20-1, TRBJ2-2)
CSASAAGTGELFF

SEQ ID NO: 30251 - protein, 13 aa, Homo sapiens
  CDR3 for alpha chain variable domain of TCR clone 15126 (TRAV12-3, TRAJ33)
CAMSVNSNYQLIW

SEQ ID NO: 30252 - protein, 13 aa, Homo sapiens
  CDR3 for beta chain variable domain of TCR clone 15126 (TRBV7-2, TRBJ2-2)
CASSLAVTGELLF

SEQ ID NO: 30253 - protein, 20 aa, Homo sapiens
  CDR3 for alpha chain variable domain of TCR clone 15127 (TRAV26-1, TRAJ42)
CCVLLHRQTYYGGSQGNLIS

SEQ ID NO: 30254 - protein, 16 aa, Homo sapiens
  CDR3 for beta chain variable domain of TCR clone 15127 (TRBV7-3, TRBJ2-2)
CASSLKRGTLSGELFF

SEQ ID NO: 30255 - protein, 13 aa, Homo sapiens
  CDR3 for alpha chain variable domain of TCR clone 15128 (TRAV8-4, TRAJ54)
CAVRIQGAQKLVF

SEQ ID NO: 30256 - protein, 15 aa, Homo sapiens
  CDR3 for beta chain variable domain of TCR clone 15128 (TRBV5-5, TRBJ2-7)
CASSLAAPLSYEQYF

SEQ ID NO: 30257 - protein, 14 aa, Homo sapiens
  CDR3 for alpha chain variable domain of TCR clone 15129 (TRAV21, TRAJ21)
CAVKGFGNFNKFYF

SEQ ID NO: 30258 - protein, 16 aa, Homo sapiens
  CDR3 for beta chain variable domain of TCR clone 15129 (TRBV12-4, TRBJ1-5)
CASRQGSGLGNQPQHF

SEQ ID NO: 30259 - protein, 14 aa, Homo sapiens
  CDR3 for alpha chain variable domain of TCR clone 15130 (TRAV17, TRAJ22)
CATSPSGSASQLTF

SEQ ID NO: 30260 - protein, 15 aa, Homo sapiens
  CDR3 for beta chain variable domain of TCR clone 15130 (TRBV4-1, TRBJ2-5)
CASSQWDLYQETQYF

SEQ ID NO: 30261 - protein, 14 aa, Homo sapiens
  CDR3 for alpha chain variable domain of TCR clone 15131 (TRAV29/DV5, TRAJ36)
CAARRKTGANNLFF

SEQ ID NO: 30262 - protein, 17 aa, Homo sapiens
  CDR3 for beta chain variable domain of TCR clone 15131 (TRBV5-1, TRBJ2-2)
CASSLAGLSGGTGELFF

SEQ ID NO: 30263 - protein, 11 aa, Homo sapiens
  CDR3 for alpha chain variable domain of TCR clone 15132 (TRAV1-1, TRAJ23)
CAARQGGKLIF

SEQ ID NO: 30264 - protein, 20 aa, Homo sapiens
  CDR3 for beta chain variable domain of TCR clone 15132 (TRBV7-8, TRBJ2-2)
CASSHLFPGPTIHITGELFF

SEQ ID NO: 30265 - protein, 19 aa, Homo sapiens
  CDR3 for alpha chain variable domain of TCR clone 15133 (TRAV3, TRAJ6)
CAVRDRNPSRSGGSYIPPF

SEQ ID NO: 30266 - protein, 15 aa, Homo sapiens
  CDR3 for beta chain variable domain of TCR clone 15133 (TRBV18, TRBJ2-7)
CASSPTFMDSYEQYF

SEQ ID NO: 30267 - protein, 11 aa, Homo sapiens
  CDR3 for alpha chain variable domain of TCR clone 15134 (TRAV12-3, TRAJ43)
CAMSVSNDMRF

SEQ ID NO: 30268 - protein, 14 aa, Homo sapiens
  CDR3 for beta chain variable domain of TCR clone 15134 (TRBV19, TRBJ2-1)
CASPTFVLSGEQFF

SEQ ID NO: 30269 - protein, 14 aa, Homo sapiens
  CDR3 for alpha chain variable domain of TCR clone 15135 (TRAV26-1, TRAJ38)
CIADNAGNSRKLIW

SEQ ID NO: 30270 - protein, 13 aa, Homo sapiens
  CDR3 for beta chain variable domain of TCR clone 15135 (TRBV20-1, TRBJ1-1)
CSARGGGNTEAFF

SEQ ID NO: 30271 - protein, 15 aa, Homo sapiens
  CDR3 for alpha chain variable domain of TCR clone 15136 (TRAV3, TRAJ20)
CAVRDIRLSDYKLSF

SEQ ID NO: 30272 - protein, 15 aa, Homo sapiens
  CDR3 for beta chain variable domain of TCR clone 15136 (TRBV7-9, TRBJ1-6)
CASSSPGRGNSPLHF

SEQ ID NO: 30273 - protein, 18 aa, Homo sapiens
  CDR3 for alpha chain variable domain of TCR clone 15137 (TRAV13-1, TRAJ52)
CAAKNPNAGGTSYGKLTF

SEQ ID NO: 30274 - protein, 16 aa, Homo sapiens
  CDR3 for beta chain variable domain of TCR clone 15137 (TRBV11-2, TRBJ1-2)
CASSPSGREANYGYTF

SEQ ID NO: 30275 - protein, 15 aa, Homo sapiens
  CDR3 for alpha chain variable domain of TCR clone 15138 (TRAV38-2/DV8, TRAJ48)
CAYGGRDFGNEKLTF

SEQ ID NO: 30276 - protein, 18 aa, Homo sapiens
  CDR3 for beta chain variable domain of TCR clone 15138 (TRBV5-1, TRBJ1-6)
CASSRSGQGTARGSPLHF

SEQ ID NO: 30277 - protein, 14 aa, Homo sapiens
  CDR3 for alpha chain variable domain of TCR clone 15139 (TRAV12-2, TRAJ17)
CAVLFKAAGNKLTF

SEQ ID NO: 30278 - protein, 14 aa, Homo sapiens
  CDR3 for beta chain variable domain of TCR clone 15139 (TRBV12-5, TRBJ2-5)
CAGGSRTHQETQYF

SEQ ID NO: 30279 - protein, 15 aa, Homo sapiens
  CDR3 for alpha chain variable domain of TCR clone 15140 (TRAV17, TRAJ57)
CATGPPQGGSEKLVF

SEQ ID NO: 30280 - protein, 14 aa, Homo sapiens
  CDR3 for beta chain variable domain of TCR clone 15140 (TRBV12-5, TRBJ2-5)
CASGSRTHQETQYF

SEQ ID NO: 30281 - protein, 13 aa, Homo sapiens
  CDR3 for alpha chain variable domain of TCR clone 15141 (TRAV21, TRAJ27)
CAARPGNAGKSTF

SEQ ID NO: 30282 - protein, 14 aa, Homo sapiens
  CDR3 for beta chain variable domain of TCR clone 15141 (TRBV27, TRBJ2-5)
CASSSLKGWETQYF

SEQ ID NO: 30283 - protein, 13 aa, Homo sapiens
  CDR3 for alpha chain variable domain of TCR clone 15142 (TRAV1-2, TRAJ9)
CAALNTGGFKTIF

SEQ ID NO: 30284 - protein, 16 aa, Homo sapiens
  CDR3 for beta chain variable domain of TCR clone 15142 (TRBV19, TRBJ2-1)
CASSKAGPSSYNEQFF

SEQ ID NO: 30285 - protein, 11 aa, Homo sapiens
  CDR3 for alpha chain variable domain of TCR clone 15143 (TRAV13-1, TRAJ23)
CAASSRGKLIF

SEQ ID NO: 30286 - protein, 18 aa, Homo sapiens
  CDR3 for beta chain variable domain of TCR clone 15143 (TRBV7-3, TRBJ2-5)
CASSFRGGGDPVLRARHA

SEQ ID NO: 30287 - protein, 23 aa, Homo sapiens
  CDR3 for alpha chain variable domain of TCR clone 15144 (TRAV8-3, TRAJ38)
CAVGASNAGNNHIQNPDPAVYQL

SEQ ID NO: 30288 - protein, 15 aa, Homo sapiens
  CDR3 for beta chain variable domain of TCR clone 15144 (TRBV11-3, TRBJ1-3)
CASSLFGPSGNTTYF

SEQ ID NO: 30289 - protein, 14 aa, Homo sapiens
  CDR3 for alpha chain variable domain of TCR clone 15145 (TRAV20, TRAJ56)
CAVRFGGANSKLTF

SEQ ID NO: 30290 - protein, 14 aa, Homo sapiens
  CDR3 for beta chain variable domain of TCR clone 15145 (TRBV20-1, TRBJ2-7)
CSAKRGRSSYEQYF

SEQ ID NO: 30291 - protein, 15 aa, Homo sapiens
  CDR3 for alpha chain variable domain of TCR clone 15146 (TRAV26-1, TRAJ44)
CIVGANTGTASKLTF

SEQ ID NO: 30292 - protein, 16 aa, Homo sapiens
  CDR3 for beta chain variable domain of TCR clone 15146 (TRBV7-7, TRBJ2-1)
CASSLASGTSYNEQFF

SEQ ID NO: 30293 - protein, 15 aa, Homo sapiens
  CDR3 for alpha chain variable domain of TCR clone 15147 (TRAV12-3, TRAJ27)
CAMRAYNTNAGKSTL

SEQ ID NO: 30294 - protein, 13 aa, Homo sapiens
  CDR3 for beta chain variable domain of TCR clone 15147 (TRBV11-2, TRBJ2-5)
CASSRGPSETQYF

SEQ ID NO: 30295 - protein, 11 aa, Homo sapiens
  CDR3 for alpha chain variable domain of TCR clone 15148 (TRAV17, TRAJ9)
CATTVGFKTIF

SEQ ID NO: 30296 - protein, 14 aa, Homo sapiens
  CDR3 for beta chain variable domain of TCR clone 15148 (TRBV7-9, TRBJ2-2)
CASSGLADTGELFF

SEQ ID NO: 30297 - protein, 14 aa, Homo sapiens
  CDR3 for alpha chain variable domain of TCR clone 15149 (TRAV8-3, TRAJ9)
CAVVYNTGGFNTIF

SEQ ID NO: 30298 - protein, 14 aa, Homo sapiens
  CDR3 for beta chain variable domain of TCR clone 15149 (TRBV7-3, TRBJ2-2)
CASSSGGYTGELFF

SEQ ID NO: 30299 - protein, 18 aa, Homo sapiens
  CDR3 for alpha chain variable domain of TCR clone 15150 (TRAV26-1, TRAJ23)
CIVRVGLEVWNQGGKLIF

SEQ ID NO: 30300 - protein, 16 aa, Homo sapiens
  CDR3 for beta chain variable domain of TCR clone 15150 (TRBV12-4, TRBJ2-5)
CASSCFVRGRQETQYF

SEQ ID NO: 30301 - protein, 16 aa, Homo sapiens
  CDR3 for alpha chain variable domain of TCR clone 15151 (TRAV12-1, TRAJ18)
CVVNPRGGSTLGRLYF

SEQ ID NO: 30302 - protein, 14 aa, Homo sapiens
  CDR3 for beta chain variable domain of TCR clone 15151 (TRBV27, TRBJ2-1)
CASRPMGQGVEQLF

SEQ ID NO: 30303 - protein, 12 aa, Homo sapiens
  CDR3 for alpha chain variable domain of TCR clone 15152 (TRAV3, TRAJ39)
CAVIGWSNMLTF

SEQ ID NO: 30304 - protein, 14 aa, Homo sapiens
  CDR3 for beta chain variable domain of TCR clone 15152 (TRBV7-8, TRBJ2-3)
CASSFPDGQDTQYF

SEQ ID NO: 30305 - protein, 11 aa, Homo sapiens
  CDR3 for alpha chain variable domain of TCR clone 15153 (TRAV1-2, TRAJ20)
CAVANDYKLSF

SEQ ID NO: 30306 - protein, 18 aa, Homo sapiens
  CDR3 for beta chain variable domain of TCR clone 15153 (TRBV20-1, TRBJ2-6)
CSAGTTPTHGSGANVLTF

SEQ ID NO: 30307 - protein, 14 aa, Homo sapiens
  CDR3 for alpha chain variable domain of TCR clone 15154 (TRAV1-2, TRAJ8)
CAVREDTGFQKLVF

SEQ ID NO: 30308 - protein, 15 aa, Homo sapiens
  CDR3 for beta chain variable domain of TCR clone 15154 (TRBV6-3, TRBJ2-7)
CASSSPGTVFYEQFF

SEQ ID NO: 30309 - protein, 14 aa, Homo sapiens
  CDR3 for alpha chain variable domain of TCR clone 15155 (TRAV13-1, TRAJ5)
CAAPLGTGRRALTF

SEQ ID NO: 30310 - protein, 13 aa, Homo sapiens
  CDR3 for beta chain variable domain of TCR clone 15155 (TRBV7-2, TRBJ1-6)
CASSLGSNSPLHF

SEQ ID NO: 30311 - protein, 17 aa, Homo sapiens
  CDR3 for alpha chain variable domain of TCR clone 15156 (TRAV3, TRAJ6)
CAVRDGPRAGGSYIPTF

SEQ ID NO: 30312 - protein, 16 aa, Homo sapiens
  CDR3 for beta chain variable domain of TCR clone 15156 (TRBV7-2, TRBJ2-5)
CASSSKWLSGQETQYF

SEQ ID NO: 30313 - protein, 17 aa, Homo sapiens
  CDR3 for alpha chain variable domain of TCR clone 15157 (TRAV26-1, TRAJ53)
CIVRVDDSGGSNYKLTF

SEQ ID NO: 30314 - protein, 15 aa, Homo sapiens
  CDR3 for beta chain variable domain of TCR clone 15157 (TRBV20-1, TRBJ2-7)
CSAGVPAAYFYEQYF

SEQ ID NO: 30315 - protein, 15 aa, Homo sapiens
  CDR3 for alpha chain variable domain of TCR clone 15158 (TRAV21, TRAJ53)
CATLNSGGSNYKPTF

SEQ ID NO: 30316 - protein, 16 aa, Homo sapiens
  CDR3 for beta chain variable domain of TCR clone 15158 (TRBV9, TRBJ2-1)
CASSVGGGGNYNEQFF

SEQ ID NO: 30317 - protein, 16 aa, Homo sapiens
  CDR3 for alpha chain variable domain of TCR clone 15159 (TRAV14/DV4, TRAJ54)
CAMREGRIQGAQKLVF

SEQ ID NO: 30318 - protein, 15 aa, Homo sapiens
  CDR3 for beta chain variable domain of TCR clone 15159 (TRBV3-1, TRBJ2-1)
CASSQQPSGGNEQFF

SEQ ID NO: 30319 - protein, 14 aa, Homo sapiens
  CDR3 for alpha chain variable domain of TCR clone 15160 (TRAV16, TRAJ42)
CALLAGGSQGNLIF

SEQ ID NO: 30320 - protein, 14 aa, Homo sapiens
  CDR3 for beta chain variable domain of TCR clone 15160 (TRBV7-3, TRBJ2-1)
CASSLAGGTNEQFF

SEQ ID NO: 30321 - protein, 18 aa, Homo sapiens
  CDR3 for alpha chain variable domain of TCR clone 15161 (TRAV21, TRAJ52)
CAVRPSPAGGTSYGKLTF

SEQ ID NO: 30322 - protein, 13 aa, Homo sapiens
  CDR3 for beta chain variable domain of TCR clone 15161 (TRBV7-3, TRBJ1-1)
CASSQDWGAEALF

SEQ ID NO: 30323 - protein, 14 aa, Homo sapiens
  CDR3 for alpha chain variable domain of TCR clone 15162 (TRAV1-2, TRAJ8)
CAVREDTGFQKLVF

SEQ ID NO: 30324 - protein, 15 aa, Homo sapiens
  CDR3 for beta chain variable domain of TCR clone 15162 (TRBV6-3, TRBJ2-7)
CARSSPGTVFYEQYF

SEQ ID NO: 30325 - protein, 13 aa, Homo sapiens
  CDR3 for alpha chain variable domain of TCR clone 15163 (TRAV26-2, TRAJ43)
CILGAVNNNDMRF

SEQ ID NO: 30326 - protein, 15 aa, Homo sapiens
  CDR3 for beta chain variable domain of TCR clone 15163 (TRBV7-2, TRBJ2-1)
CASTHGTGIYNEQFF

SEQ ID NO: 30327 - protein, 13 aa, Homo sapiens
  CDR3 for alpha chain variable domain of TCR clone 15164 (TRAV12-3, TRAJ13)
CAMSSGGYQKVTF

SEQ ID NO: 30328 - protein, 13 aa, Homo sapiens
  CDR3 for beta chain variable domain of TCR clone 15164 (TRBV20-1, TRBJ1-1)
CSAPPGGHTGAFF

SEQ ID NO: 30329 - protein, 10 aa, Homo sapiens
  CDR3 for alpha chain variable domain of TCR clone 15165 (TRAV8-3, TRAJ44)
CTGTASKLTF

SEQ ID NO: 30330 - protein, 15 aa, Homo sapiens
  CDR3 for beta chain variable domain of TCR clone 15165 (TRBV6-5, TRBJ1-2)
CASSYSQAFNYGYTF

SEQ ID NO: 30331 - protein, 14 aa, Homo sapiens
  CDR3 for alpha chain variable domain of TCR clone 15166 (TRAV26-1, TRAJ45)
CIEVTGGGADGLTF

SEQ ID NO: 30332 - protein, 13 aa, Homo sapiens
  CDR3 for beta chain variable domain of TCR clone 15166 (TRBV7-7, TRBJ1-2)
CASSLVADYGYTF

SEQ ID NO: 30333 - protein, 13 aa, Homo sapiens
  CDR3 for alpha chain variable domain of TCR clone 15167 (TRAV8-4, TRAJ36)
CAVSDSGANNLFF

SEQ ID NO: 30334 - protein, 11 aa, Homo sapiens
  CDR3 for beta chain variable domain of TCR clone 15167 (TRBV29-1, TRBJ1-1)
CSVEVNVITFF

SEQ ID NO: 30335 - protein, 13 aa, Homo sapiens
  CDR3 for alpha chain variable domain of TCR clone 15168 (TRAV27, TRAJ57)
CRSAQGGPEKLVF

SEQ ID NO: 30336 - protein, 11 aa, Homo sapiens
  CDR3 for beta chain variable domain of TCR clone 15168 (TRBV11-2, TRBJ1-1)
CASSINTEAFF

SEQ ID NO: 30337 - protein, 13 aa, Homo sapiens
  CDR3 for alpha chain variable domain of TCR clone 15169 (TRAV23/DV6, TRAJ5)
CAARAAGRRALTF

SEQ ID NO: 30338 - protein, 15 aa, Homo sapiens
  CDR3 for beta chain variable domain of TCR clone 15169 (TRBV5-4, TRBJ2-1)
CASSFSGGSYNEQFF

SEQ ID NO: 30339 - protein, 14 aa, Homo sapiens
  CDR3 for alpha chain variable domain of TCR clone 15170 (TRAV38-1, TRAJ45)
CAYYSGGGADGLTF

SEQ ID NO: 30340 - protein, 20 aa, Homo sapiens
  CDR3 for beta chain variable domain of TCR clone 15170 (TRBV28, TRBJ2-1)
CASAPIGRSPGLAGGNEQFF

SEQ ID NO: 30341 - protein, 14 aa, Homo sapiens
  CDR3 for alpha chain variable domain of TCR clone 15171 (TRAV26-1, TRAJ39)
CIVFTNNAGNMLTF

SEQ ID NO: 30342 - protein, 15 aa, Homo sapiens
  CDR3 for beta chain variable domain of TCR clone 15171 (TRBV19, TRBJ2-4)
CASSLTGLTKNMQYF

SEQ ID NO: 30343 - protein, 14 aa, Homo sapiens
  CDR3 for alpha chain variable domain of TCR clone 15172 (TRAV1-2, TRAJ16)
CAVNRFSDGQKLLF

SEQ ID NO: 30344 - protein, 11 aa, Homo sapiens
  CDR3 for beta chain variable domain of TCR clone 15172 (TRBV7-6, TRBJ2-5)
CASSSQETQYF

SEQ ID NO: 30345 - protein, 14 aa, Homo sapiens
  CDR3 for alpha chain variable domain of TCR clone 15173 (TRAV8-3, TRAJ9)
CAVGYNTGGFKTIF

SEQ ID NO: 30346 - protein, 14 aa, Homo sapiens
  CDR3 for beta chain variable domain of TCR clone 15173 (TRBV7-3, TRBJ2-2)
CASSSGGYTGELFF

SEQ ID NO: 30347 - protein, 15 aa, Homo sapiens
  CDR3 for alpha chain variable domain of TCR clone 15174 (TRAV26-2, TRAJ57)
CILRDIRGGSEKLGF

SEQ ID NO: 30348 - protein, 15 aa, Homo sapiens
  CDR3 for beta chain variable domain of TCR clone 15174 (TRBV2, TRBJ2-1)
CASDIGLAGEGEQFF

SEQ ID NO: 30349 - protein, 13 aa, Homo sapiens
  CDR3 for alpha chain variable domain of TCR clone 15175 (TRAV21, TRAJ27)
CAARPGNAGKSTF

SEQ ID NO: 30350 - protein, 15 aa, Homo sapiens
  CDR3 for beta chain variable domain of TCR clone 15175 (TRBV2, TRBJ2-3)
CASSNAGGPPDTQYF

SEQ ID NO: 30351 - protein, 12 aa, Homo sapiens
  CDR3 for alpha chain variable domain of TCR clone 15176 (TRAV13-1, TRAJ21)
CAAKEGFNKFYF

SEQ ID NO: 30352 - protein, 13 aa, Homo sapiens
  CDR3 for beta chain variable domain of TCR clone 15176 (TRBV20-1, TRBJ1-1)
CSARGGGNTEAFF

SEQ ID NO: 30353 - protein, 15 aa, Homo sapiens
  CDR3 for alpha chain variable domain of TCR clone 15177 (TRAV17, TRAJ57)
CATGPSQGGSEKLVF

SEQ ID NO: 30354 - protein, 16 aa, Homo sapiens
  CDR3 for beta chain variable domain of TCR clone 15177 (TRBV12-4, TRBJ1-5)
CASSRPVGGSNQPQHS

SEQ ID NO: 30355 - protein, 11 aa, Homo sapiens
  CDR3 for alpha chain variable domain of TCR clone 15178 (TRAV2, TRAJ33)
CAVDSNYQLIW

SEQ ID NO: 30356 - protein, 14 aa, Homo sapiens
  CDR3 for beta chain variable domain of TCR clone 15178 (TRBV19, TRBJ2-1)
CASPTFVLSGEQFF

SEQ ID NO: 30357 - protein, 16 aa, Homo sapiens
  CDR3 for alpha chain variable domain of TCR clone 15179 (TRAV3, TRAJ37)
CAVRPHGSGNTGKLIF

SEQ ID NO: 30358 - protein, 13 aa, Homo sapiens
  CDR3 for beta chain variable domain of TCR clone 15179 (TRBV2, TRBJ1-5)
CASGTGGYQPQHL

SEQ ID NO: 30359 - protein, 13 aa, Homo sapiens
  CDR3 for alpha chain variable domain of TCR clone 15180 (TRAV3, TRAJ27)
CAVRPLGAGKSTF

SEQ ID NO: 30360 - protein, 12 aa, Homo sapiens
  CDR3 for beta chain variable domain of TCR clone 15180 (TRBV11-2, TRBJ2-2)
CASSLGGGELFF

SEQ ID NO: 30361 - protein, 19 aa, Homo sapiens
  CDR3 for alpha chain variable domain of TCR clone 15181 (TRAV8-4, )
CAGGEDIQNPDPAVYQLRD

SEQ ID NO: 30362 - protein, 15 aa, Homo sapiens
  CDR3 for beta chain variable domain of TCR clone 15181 (TRBV7-2, TRBJ2-1)
CASRKTGSSYNEQFF

SEQ ID NO: 30363 - protein, 16 aa, Homo sapiens
  CDR3 for alpha chain variable domain of TCR clone 15182 (TRAV3, TRAJ37)
CAVRGKGSGNTGKLIF

SEQ ID NO: 30364 - protein, 16 aa, Homo sapiens
  CDR3 for beta chain variable domain of TCR clone 15182 (TRBV28, TRBJ1-5)
CASSLRGGYSNQPQHF

SEQ ID NO: 30365 - protein, 11 aa, Homo sapiens
  CDR3 for alpha chain variable domain of TCR clone 15183 (TRAV1-1, TRAJ23)
CAVRQGGKLIF

SEQ ID NO: 30366 - protein, 20 aa, Homo sapiens
  CDR3 for beta chain variable domain of TCR clone 15183 (TRBV7-8, TRBJ2-2)
CASSHLFPGPTSHITGELFF

SEQ ID NO: 30367 - protein, 14 aa, Homo sapiens
  CDR3 for alpha chain variable domain of TCR clone 15184 (TRAV8-2, TRAJ4)
CVVSPSGCYNKLIF

SEQ ID NO: 30368 - protein, 15 aa, Homo sapiens
  CDR3 for beta chain variable domain of TCR clone 15184 (TRBV4-1, TRBJ1-4)
CASSDTGGTNEKLFF

SEQ ID NO: 30369 - protein, 13 aa, Homo sapiens
  CDR3 for alpha chain variable domain of TCR clone 15185 (TRAV27, TRAJ45)
CRSSGGGTDGLTF

SEQ ID NO: 30370 - protein, 17 aa, Homo sapiens
  CDR3 for beta chain variable domain of TCR clone 15185 (TRBV11-2, TRBJ2-1)
CASSLYPPGVEYNEQFF

SEQ ID NO: 30371 - protein, 10 aa, Homo sapiens
  CDR3 for alpha chain variable domain of TCR clone 15186 (TRAV22, TRAJ21)
CAVGAGKFYF

SEQ ID NO: 30372 - protein, 13 aa, Homo sapiens
  CDR3 for beta chain variable domain of TCR clone 15186 (TRBV18, TRBJ2-7)
CASSPGQDYEQYF

SEQ ID NO: 30373 - protein, 15 aa, Homo sapiens
  CDR3 for alpha chain variable domain of TCR clone 15187 (TRAV17, TRAJ22)
CATVAPSGSARQLTF

SEQ ID NO: 30374 - protein, 16 aa, Homo sapiens
  CDR3 for beta chain variable domain of TCR clone 15187 (TRBV10-3, TRBJ2-7)
YAISADFADRPYEQYF

SEQ ID NO: 30375 - protein, 12 aa, Homo sapiens
  CDR3 for alpha chain variable domain of TCR clone 15188 (TRAV13-2, TRAJ23)
CAERHRGGKLIF

SEQ ID NO: 30376 - protein, 16 aa, Homo sapiens
  CDR3 for beta chain variable domain of TCR clone 15188 (TRBV20-1, TRBJ1-4)
CSAPGQGLLTNEKLLF

SEQ ID NO: 30377 - protein, 13 aa, Homo sapiens
  CDR3 for alpha chain variable domain of TCR clone 15189 (TRAV29/DV5, TRAJ49)
CAASVGTGNQFYF

SEQ ID NO: 30378 - protein, 14 aa, Homo sapiens
  CDR3 for beta chain variable domain of TCR clone 15189 (TRBV5-5, TRBJ2-7)
CASSPPRGLWEQYF

SEQ ID NO: 30379 - protein, 13 aa, Homo sapiens
  CDR3 for alpha chain variable domain of TCR clone 15190 (TRAV12-2, TRAJ34)
CAVRGYNTDKLIF

SEQ ID NO: 30380 - protein, 15 aa, Homo sapiens
  CDR3 for beta chain variable domain of TCR clone 15190 (TRBV28, TRBJ2-1)
CASRTGAGVIARQSF

SEQ ID NO: 30381 - protein, 18 aa, Homo sapiens
  CDR3 for alpha chain variable domain of TCR clone 15191 (TRAV13-1, TRAJ52)
CAAKNPNAGGTSYGKLTF

SEQ ID NO: 30382 - protein, 15 aa, Homo sapiens
  CDR3 for beta chain variable domain of TCR clone 15191 (TRBV4-1, TRBJ2-7)
CASSQNTGRLYEQYF

SEQ ID NO: 30383 - protein, 13 aa, Homo sapiens
  CDR3 for alpha chain variable domain of TCR clone 15192 (TRAV8-6, TRAJ20)
CAVRTADDYKLSF

SEQ ID NO: 30384 - protein, 15 aa, Homo sapiens
  CDR3 for beta chain variable domain of TCR clone 15192 (TRBV11-1, TRBJ2-3)
CASSLLLASTDTQYF

SEQ ID NO: 30385 - protein, 15 aa, Homo sapiens
  CDR3 for alpha chain variable domain of TCR clone 15193 (TRAV12-3, TRAJ6)
CAMSATTGGSYIPTF

SEQ ID NO: 30386 - protein, 14 aa, Homo sapiens
  CDR3 for beta chain variable domain of TCR clone 15193 (TRBV12-5, TRBJ2-5)
CASGSRTHQETQYF

SEQ ID NO: 30387 - protein, 13 aa, Homo sapiens
  CDR3 for alpha chain variable domain of TCR clone 15194 (TRAV1-1, TRAJ9)
CAAKNTGGFKTIF

SEQ ID NO: 30388 - protein, 14 aa, Homo sapiens
  CDR3 for beta chain variable domain of TCR clone 15194 (TRBV20-1, TRBJ2-1)
CSAQIGGSANEQSF

SEQ ID NO: 30389 - protein, 18 aa, Homo sapiens
  CDR3 for alpha chain variable domain of TCR clone 15195 (TRAV21, TRAJ52)
CAVRPSPAGGTSNGKLTF

SEQ ID NO: 30390 - protein, 17 aa, Homo sapiens
  CDR3 for beta chain variable domain of TCR clone 15195 (TRBV13, TRBJ2-3)
CASSLSRVAGGRNTQYF

SEQ ID NO: 30391 - protein, 13 aa, Homo sapiens
  CDR3 for alpha chain variable domain of TCR clone 15196 (TRAV27, TRAJ49)
CAPRPYTGNQFYL

SEQ ID NO: 30392 - protein, 16 aa, Homo sapiens
  CDR3 for beta chain variable domain of TCR clone 15196 (TRBV4-1, TRBJ1-2)
CASSQDAGQVLYGYTF

SEQ ID NO: 30393 - protein, 13 aa, Homo sapiens
  CDR3 for alpha chain variable domain of TCR clone 15197 (TRAV8-6, TRAJ24)
CAVSPDSWGKLQF

SEQ ID NO: 30394 - protein, 14 aa, Homo sapiens
  CDR3 for beta chain variable domain of TCR clone 15197 (TRBV7-2, TRBJ2-7)
CASSPKTSFYEQYF

SEQ ID NO: 30395 - protein, 14 aa, Homo sapiens
  CDR3 for alpha chain variable domain of TCR clone 15198 (TRAV26-1, TRAJ45)
CIEVTGGGADGLTF

SEQ ID NO: 30396 - protein, 13 aa, Homo sapiens
  CDR3 for beta chain variable domain of TCR clone 15198 (TRBV7-6, TRBJ1-2)
RASSLVADYGYTF

SEQ ID NO: 30397 - protein, 15 aa, Homo sapiens
  CDR3 for alpha chain variable domain of TCR clone 15199 (TRAV8-3, TRAJ27)
CAVGPSKTNAGKSTF

SEQ ID NO: 30398 - protein, 15 aa, Homo sapiens
  CDR3 for beta chain variable domain of TCR clone 15199 (TRBV7-2, TRBJ2-1)
CASSAGLAGGNEQFF

SEQ ID NO: 30399 - protein, 16 aa, Homo sapiens
  CDR3 for alpha chain variable domain of TCR clone 15200 (TRAV12-3, TRAJ53)
CEMSPGSGGSNYKLTF

SEQ ID NO: 30400 - protein, 11 aa, Homo sapiens
  CDR3 for beta chain variable domain of TCR clone 15200 (TRBV29-1, TRBJ2-5)
CSEDRTGTQYF

SEQ ID NO: 30401 - protein, 11 aa, Homo sapiens
  CDR3 for alpha chain variable domain of TCR clone 15201 (TRAV17, TRAJ9)
CSTTGGFKTIF

SEQ ID NO: 30402 - protein, 14 aa, Homo sapiens
  CDR3 for beta chain variable domain of TCR clone 15201 (TRBV7-9, TRBJ2-2)
CASSGLADTGELFF

SEQ ID NO: 30403 - protein, 16 aa, Homo sapiens
  CDR3 for alpha chain variable domain of TCR clone 15202 (TRAV13-1, TRAJ38)
CAASTSNAGNNRKLIW

SEQ ID NO: 30404 - protein, 15 aa, Homo sapiens
  CDR3 for beta chain variable domain of TCR clone 15202 (TRBV27, TRBJ2-1)
CASSNGGGSSNEQFF

SEQ ID NO: 30405 - protein, 15 aa, Homo sapiens
  CDR3 for alpha chain variable domain of TCR clone 15203 (TRAV12-3, TRAJ6)
CAMSATTGGSYIPTF

SEQ ID NO: 30406 - protein, 16 aa, Homo sapiens
  CDR3 for beta chain variable domain of TCR clone 15203 (TRBV20-1, TRBJ1-2)
CSAPMGQGVANYGYTF

SEQ ID NO: 30407 - protein, 15 aa, Homo sapiens
  CDR3 for alpha chain variable domain of TCR clone 15204 (TRAV2, TRAJ9)
CAVEDRGTGGFKTTF

SEQ ID NO: 30408 - protein, 13 aa, Homo sapiens
  CDR3 for beta chain variable domain of TCR clone 15204 (TRBV20-1, TRBJ1-1)
CSARGGGNTEAFF

SEQ ID NO: 30409 - protein, 13 aa, Homo sapiens
  CDR3 for alpha chain variable domain of TCR clone 15205 (TRAV21, TRAJ36)
CAVIKTGANNPFF

SEQ ID NO: 30410 - protein, 13 aa, Homo sapiens
  CDR3 for beta chain variable domain of TCR clone 15205 (TRBV29-1, TRBJ2-3)
CSATRGGRDTQYF

SEQ ID NO: 30411 - protein, 14 aa, Homo sapiens
  CDR3 for alpha chain variable domain of TCR clone 15206 (TRAV1-2, TRAJ16)
CAVNRFSDGQKLLF

SEQ ID NO: 30412 - protein, 15 aa, Homo sapiens
  CDR3 for beta chain variable domain of TCR clone 15206 (TRBV3-1, TRBJ2-7)
CASSQVRQGAYEQYF

SEQ ID NO: 30413 - protein, 18 aa, Homo sapiens
  CDR3 for alpha chain variable domain of TCR clone 15207 (TRAV26-1, TRAJ22)
CIVRVALISSGPARQLTF

SEQ ID NO: 30414 - protein, 13 aa, Homo sapiens
  CDR3 for beta chain variable domain of TCR clone 15207 (TRBV13, TRBJ2-5)
CASSPEVGETQYF

SEQ ID NO: 30415 - protein, 14 aa, Homo sapiens
  CDR3 for alpha chain variable domain of TCR clone 15208 (TRAV12-3, TRAJ10)
SHLPLTGGGNKLTF

SEQ ID NO: 30416 - protein, 13 aa, Homo sapiens
  CDR3 for beta chain variable domain of TCR clone 15208 (TRBV29-1, TRBJ2-1)
CSVEGGRVNEQFF

SEQ ID NO: 30417 - protein, 19 aa, Homo sapiens
  CDR3 for alpha chain variable domain of TCR clone 15209 (TRAV13-2, TRAJ37)
CACRPRQHRQTNLWARDNF

SEQ ID NO: 30418 - protein, 14 aa, Homo sapiens
  CDR3 for beta chain variable domain of TCR clone 15209 (TRBV12-4, TRBJ2-7)
CASSLTAGGYEQYF

SEQ ID NO: 30419 - protein, 15 aa, Homo sapiens
  CDR3 for alpha chain variable domain of TCR clone 15210 (TRAV27, TRAJ38)
CAARRNAGNNRKLIW

SEQ ID NO: 30420 - protein, 15 aa, Homo sapiens
  CDR3 for beta chain variable domain of TCR clone 15210 (TRBV6-3, TRBJ2-7)
CASSSPGTVFYEQYF

SEQ ID NO: 30421 - protein, 15 aa, Homo sapiens
  CDR3 for alpha chain variable domain of TCR clone 15211 (TRAV12-1, TRAJ42)
CVVTRDGGSQGNLIF

SEQ ID NO: 30422 - protein, 13 aa, Homo sapiens
  CDR3 for beta chain variable domain of TCR clone 15211 (TRBV27, TRBJ2-7)
CASSLTTGYEQYS

SEQ ID NO: 30423 - protein, 16 aa, Homo sapiens
  CDR3 for alpha chain variable domain of TCR clone 15212 (TRAV8-4, TRAJ45)
CAVSAGVGGGADGLTF

SEQ ID NO: 30424 - protein, 14 aa, Homo sapiens
  CDR3 for beta chain variable domain of TCR clone 15212 (TRBV6-1, TRBJ1-3)
CASVQGGGGNTIYF

SEQ ID NO: 30425 - protein, 11 aa, Homo sapiens
  CDR3 for alpha chain variable domain of TCR clone 15213 (TRAV3, TRAJ21)
CAVGNFNKFYF

SEQ ID NO: 30426 - protein, 11 aa, Homo sapiens
  CDR3 for beta chain variable domain of TCR clone 15213 (TRBV11-2, TRBJ2-2)
CASSLPGELFF

SEQ ID NO: 30427 - protein, 13 aa, Homo sapiens
  CDR3 for alpha chain variable domain of TCR clone 15214 (TRAV2, TRAJ40)
WAVVTSGTYKYIF

SEQ ID NO: 30428 - protein, 14 aa, Homo sapiens
  CDR3 for beta chain variable domain of TCR clone 15214 (TRBV19, TRBJ2-1)
CASPTFVLSGEQFF

SEQ ID NO: 30429 - protein, 14 aa, Homo sapiens
  CDR3 for alpha chain variable domain of TCR clone 15215 (TRAV26-1, TRAJ38)
CIADNAGNNRKLIW

SEQ ID NO: 30430 - protein, 13 aa, Homo sapiens
  CDR3 for beta chain variable domain of TCR clone 15215 (TRBV20-1, TRBJ1-1)
CSARGRGNTEAFF

SEQ ID NO: 30431 - protein, 14 aa, Homo sapiens
  CDR3 for alpha chain variable domain of TCR clone 15216 (TRAV38-1, TRAJ40)
CALRPTSGTYKYNF

SEQ ID NO: 30432 - protein, 14 aa, Homo sapiens
  CDR3 for beta chain variable domain of TCR clone 15216 (TRBV25-1, TRBJ1-1)
CASTHLGGNTEAFF

SEQ ID NO: 30433 - protein, 11 aa, Homo sapiens
  CDR3 for alpha chain variable domain of TCR clone 15217 (TRAV12-3, TRAJ27)
CAMANAGKSTF

SEQ ID NO: 30434 - protein, 13 aa, Homo sapiens
  CDR3 for beta chain variable domain of TCR clone 15217 (TRBV20-1, TRBJ1-1)
CSARVGGNTEAVF

SEQ ID NO: 30435 - protein, 18 aa, Homo sapiens
  CDR3 for alpha chain variable domain of TCR clone 15218 (TRAV9-2, TRAJ52)
CALSRHNAGGTSYGKLTF

SEQ ID NO: 30436 - protein, 13 aa, Homo sapiens
  CDR3 for beta chain variable domain of TCR clone 15218 (TRBV7-9, TRBJ1-2)
CASSLKQNYGYAF

SEQ ID NO: 30437 - protein, 15 aa, Homo sapiens
  CDR3 for alpha chain variable domain of TCR clone 15219 (TRAV2, TRAJ15)
CAVEGRGQAGTALIF

SEQ ID NO: 30438 - protein, 13 aa, Homo sapiens
  CDR3 for beta chain variable domain of TCR clone 15219 (TRBV10-2, TRBJ2-7)
CASGASGGYEQYF

SEQ ID NO: 30439 - protein, 14 aa, Homo sapiens
  CDR3 for alpha chain variable domain of TCR clone 15220 (TRAV1-2, TRAJ16)
CAVNRFSGGQKLLF

SEQ ID NO: 30440 - protein, 16 aa, Homo sapiens
  CDR3 for beta chain variable domain of TCR clone 15220 (TRBV7-3, TRBJ2-2)
CASSLKRGTLSGELFF

SEQ ID NO: 30441 - protein, 20 aa, Homo sapiens
  CDR3 for alpha chain variable domain of TCR clone 15221 (TRAV14/DV4, TRAJ52)
CAMREGSANAGGTSYGKLTF

SEQ ID NO: 30442 - protein, 13 aa, Homo sapiens
  CDR3 for beta chain variable domain of TCR clone 15221 (TRBV6-5, TRBJ2-2)
CASRTVNTGELFF

SEQ ID NO: 30443 - protein, 23 aa, Homo sapiens
  CDR3 for alpha chain variable domain of TCR clone 15222 (TRAV26-1, TRAJ38)
CIADNAGNNHIQNPDPAVYQLRD

SEQ ID NO: 30444 - protein, 13 aa, Homo sapiens
  CDR3 for beta chain variable domain of TCR clone 15222 (TRBV20-1, TRBJ1-1)
CSARGGGNTEAVF

SEQ ID NO: 30445 - protein, 14 aa, Homo sapiens
  CDR3 for alpha chain variable domain of TCR clone 15223 (TRAV35, TRAJ50)
CAGHRKTSYDKVIF

SEQ ID NO: 30446 - protein, 13 aa, Homo sapiens
  CDR3 for beta chain variable domain of TCR clone 15223 (TRBV7-7, TRBJ2-3)
CASSLSRADTQYS

SEQ ID NO: 30447 - protein, 12 aa, Homo sapiens
  CDR3 for alpha chain variable domain of TCR clone 15224 (TRAV30, TRAJ43)
CGTEERGNDMRF

SEQ ID NO: 30448 - protein, 13 aa, Homo sapiens
  CDR3 for beta chain variable domain of TCR clone 15224 (TRBV7-3, TRBJ1-1)
CASSQDWGAEAFF

SEQ ID NO: 30449 - protein, 12 aa, Homo sapiens
  CDR3 for alpha chain variable domain of TCR clone 15225 (TRAV36/DV7, TRAJ54)
CAVVRGAQKLVF

SEQ ID NO: 30450 - protein, 18 aa, Homo sapiens
  CDR3 for beta chain variable domain of TCR clone 15225 (TRBV20-1, TRBJ2-3)
CGASGLAGGPGTTDTQYF

SEQ ID NO: 30451 - protein, 13 aa, Homo sapiens
  CDR3 for alpha chain variable domain of TCR clone 15226 (TRAV27, TRAJ49)
CAPRPYTGNQLYF

SEQ ID NO: 30452 - protein, 16 aa, Homo sapiens
  CDR3 for beta chain variable domain of TCR clone 15226 (TRBV4-1, TRBJ1-2)
CASSQDAGQVLYGYTF

SEQ ID NO: 30453 - protein, 14 aa, Homo sapiens
  CDR3 for alpha chain variable domain of TCR clone 15227 (TRAV20, TRAJ42)
CAVQAGGSQGNLIL

SEQ ID NO: 30454 - protein, 14 aa, Homo sapiens
  CDR3 for beta chain variable domain of TCR clone 15227 (TRBV28, TRBJ1-2)
CASRIQGANYGYTF

SEQ ID NO: 30455 - protein, 15 aa, Homo sapiens
  CDR3 for alpha chain variable domain of TCR clone 15228 (TRAV12-3, TRAJ6)
CAMSATTGGSYIPTF

SEQ ID NO: 30456 - protein, 14 aa, Homo sapiens
  CDR3 for beta chain variable domain of TCR clone 15228 (TRBV12-4, TRBJ1-1)
CASSFQSFGTEAFF

SEQ ID NO: 30457 - protein, 13 aa, Homo sapiens
  CDR3 for alpha chain variable domain of TCR clone 15229 (TRAV12-3, TRAJ9)
CAMRNTGGFKTIF

SEQ ID NO: 30458 - protein, 14 aa, Homo sapiens
  CDR3 for beta chain variable domain of TCR clone 15229 (TRBV7-2, TRBJ2-7)
CASSPKTSFYEQYF

SEQ ID NO: 30459 - protein, 17 aa, Homo sapiens
  CDR3 for alpha chain variable domain of TCR clone 15230 (TRAV13-2, TRAJ42)
CAEGASHYGGSQGNLIF

SEQ ID NO: 30460 - protein, 16 aa, Homo sapiens
  CDR3 for beta chain variable domain of TCR clone 15230 (TRBV10-3, TRBJ2-7)
CAISADFADRPYEQYF

SEQ ID NO: 30461 - protein, 20 aa, Homo sapiens
  CDR3 for alpha chain variable domain of TCR clone 15231 (TRAV12-1, TRAJ42)
SSVIQPPTSVNGGSQGNLIF

SEQ ID NO: 30462 - protein, 18 aa, Homo sapiens
  CDR3 for beta chain variable domain of TCR clone 15231 (TRBV11-2, TRBJ2-3)
CASSLGGASRGAPNTQYF

SEQ ID NO: 30463 - protein, 14 aa, Homo sapiens
  CDR3 for alpha chain variable domain of TCR clone 15232 (TRAV38-1, TRAJ45)
CASHSGGGADGLTF

SEQ ID NO: 30464 - protein, 13 aa, Homo sapiens
  CDR3 for beta chain variable domain of TCR clone 15232 (TRBV10-3, TRBJ1-2)
CAISEQDSYGYTF

SEQ ID NO: 30465 - protein, 14 aa, Homo sapiens
  CDR3 for alpha chain variable domain of TCR clone 15233 (TRAV3, TRAJ22)
CAVGDYGSARQLTF

SEQ ID NO: 30466 - protein, 13 aa, Homo sapiens
  CDR3 for beta chain variable domain of TCR clone 15233 (TRBV11-2, TRBJ2-5)
CASGHGAKETQYF

SEQ ID NO: 30467 - protein, 11 aa, Homo sapiens
  CDR3 for alpha chain variable domain of TCR clone 15234 (TRAV1-1, TRAJ23)
CAMRQGGKLIF

SEQ ID NO: 30468 - protein, 20 aa, Homo sapiens
  CDR3 for beta chain variable domain of TCR clone 15234 (TRBV7-8, TRBJ2-2)
CASSHLFPGPTIHITGELFF

SEQ ID NO: 30469 - protein, 13 aa, Homo sapiens
  CDR3 for alpha chain variable domain of TCR clone 15235 (TRAV3, TRAJ27)
CAVRPLGAGKSTF

SEQ ID NO: 30470 - protein, 13 aa, Homo sapiens
  CDR3 for beta chain variable domain of TCR clone 15235 (TRBV7-9, TRBJ2-3)
CASSPGPTDTQYF

SEQ ID NO: 30471 - protein, 13 aa, Homo sapiens
  CDR3 for alpha chain variable domain of TCR clone 15236 (TRAV2, TRAJ40)
CAVVTSGTYKYIF

SEQ ID NO: 30472 - protein, 15 aa, Homo sapiens
  CDR3 for beta chain variable domain of TCR clone 15236 (TRBV7-9, TRBJ1-5)
CASSQGHQPNQPQHF

SEQ ID NO: 30473 - protein, 15 aa, Homo sapiens
  CDR3 for alpha chain variable domain of TCR clone 15237 (TRAV38-1, TRAJ37)
CAFIHGSGNTGKLIF

SEQ ID NO: 30474 - protein, 12 aa, Homo sapiens
  CDR3 for beta chain variable domain of TCR clone 15237 (TRBV7-9, TRBJ2-7)
CASSFGSYEQCF

SEQ ID NO: 30475 - protein, 14 aa, Homo sapiens
  CDR3 for alpha chain variable domain of TCR clone 15238 (TRAV17, TRAJ16)
CATADFSDGRKLLF

SEQ ID NO: 30476 - protein, 12 aa, Homo sapiens
  CDR3 for beta chain variable domain of TCR clone 15238 (TRBV24-1, TRBJ1-1)
CATLYPDTEAFF

SEQ ID NO: 30477 - protein, 12 aa, Homo sapiens
  CDR3 for alpha chain variable domain of TCR clone 15239 (TRAV12-3, TRAJ17)
CAMTLTGNKLTF

SEQ ID NO: 30478 - protein, 15 aa, Homo sapiens
  CDR3 for beta chain variable domain of TCR clone 15239 (TRBV20-1, TRBJ2-7)
CSPRDRVSGMDEQYF

SEQ ID NO: 30479 - protein, 15 aa, Homo sapiens
  CDR3 for alpha chain variable domain of TCR clone 15240 (TRAV3, TRAJ3)
CAVRDRDSSASKIIF

SEQ ID NO: 30480 - protein, 18 aa, Homo sapiens
  CDR3 for beta chain variable domain of TCR clone 15240 (TRBV25-1, TRBJ1-2)
CASSGLQNGQGLIFGDTF

SEQ ID NO: 30481 - protein, 14 aa, Homo sapiens
  CDR3 for alpha chain variable domain of TCR clone 15241 (TRAV26-1, TRAJ39)
CIVRGSRAGNMLTS

SEQ ID NO: 30482 - protein, 15 aa, Homo sapiens
  CDR3 for beta chain variable domain of TCR clone 15241 (TRBV7-9, TRBJ1-5)
CASSQGHQPNQPQHF

SEQ ID NO: 30483 - protein, 12 aa, Homo sapiens
  CDR3 for alpha chain variable domain of TCR clone 15242 (TRAV1-1, TRAJ24)
CAVRGSWGKFQF

SEQ ID NO: 30484 - protein, 14 aa, Homo sapiens
  CDR3 for beta chain variable domain of TCR clone 15242 (TRBV7-2, TRBJ1-2)
CASSQTGSTYGYAF

SEQ ID NO: 30485 - protein, 14 aa, Homo sapiens
  CDR3 for alpha chain variable domain of TCR clone 15243 (TRAV12-2, TRAJ17)
CAVLFRAAGNKLTF

SEQ ID NO: 30486 - protein, 14 aa, Homo sapiens
  CDR3 for beta chain variable domain of TCR clone 15243 (TRBV7-2, TRBJ2-7)
CASRSQGAAYEQYF

SEQ ID NO: 30487 - protein, 12 aa, Homo sapiens
  CDR3 for alpha chain variable domain of TCR clone 15244 (TRAV21, TRAJ49)
CAVTNTGNQFYF

SEQ ID NO: 30488 - protein, 17 aa, Homo sapiens
  CDR3 for beta chain variable domain of TCR clone 15244 (TRBV13, TRBJ2-3)
CASSLSRVAGGGNTQYF

SEQ ID NO: 30489 - protein, 11 aa, Homo sapiens
  CDR3 for alpha chain variable domain of TCR clone 15245 (TRAV3, TRAJ21)
CAVGNFNKFYF

SEQ ID NO: 30490 - protein, 13 aa, Homo sapiens
  CDR3 for beta chain variable domain of TCR clone 15245 (TRBV7-9, TRBJ1-2)
CASSLKQNYGYAF

SEQ ID NO: 30491 - protein, 13 aa, Homo sapiens
  CDR3 for alpha chain variable domain of TCR clone 15246 (TRAV12-3, TRAJ33)
CAMSVNSNYQLIW

SEQ ID NO: 30492 - protein, 16 aa, Homo sapiens
  CDR3 for beta chain variable domain of TCR clone 15246 (TRBV7-3, TRBJ2-2)
CASSLKRGTLSGELFF

SEQ ID NO: 30493 - protein, 13 aa, Homo sapiens
  CDR3 for alpha chain variable domain of TCR clone 15247 (TRAV9-2, TRAJ9)
CALSDRGGFNTIF

SEQ ID NO: 30494 - protein, 14 aa, Homo sapiens
  CDR3 for beta chain variable domain of TCR clone 15247 (TRBV20-1, TRBJ2-2)
CSAPDTANTGELFF

SEQ ID NO: 30495 - protein, 15 aa, Homo sapiens
  CDR3 for alpha chain variable domain of TCR clone 15248 (TRAV35, TRAJ50)
CAGQLRKTSYDKGIF

SEQ ID NO: 30496 - protein, 12 aa, Homo sapiens
  CDR3 for beta chain variable domain of TCR clone 15248 (TRBV5-1, TRBJ2-5)
CASSLGLETQYF

SEQ ID NO: 30497 - protein, 13 aa, Homo sapiens
  CDR3 for alpha chain variable domain of TCR clone 15249 (TRAV38-1, TRAJ42)
CARWGGSQGNLIF

SEQ ID NO: 30498 - protein, 17 aa, Homo sapiens
  CDR3 for beta chain variable domain of TCR clone 15249 (TRBV20-1, TRBJ2-1)
CSARDPLAGVWDNGQFF

SEQ ID NO: 30499 - protein, 14 aa, Homo sapiens
  CDR3 for alpha chain variable domain of TCR clone 15250 (TRAV2, TRAJ37)
CAVDFTSNTGKLIF

SEQ ID NO: 30500 - protein, 15 aa, Homo sapiens
  CDR3 for beta chain variable domain of TCR clone 15250 (TRBV7-9, TRBJ1-6)
CASSSPGRGNSPLHF

SEQ ID NO: 30501 - protein, 11 aa, Homo sapiens
  CDR3 for alpha chain variable domain of TCR clone 15251 (TRAV1-2, TRAJ20)
CAVANDYKLSF

SEQ ID NO: 30502 - protein, 18 aa, Homo sapiens
  CDR3 for beta chain variable domain of TCR clone 15251 (TRBV20-1, TRBJ2-6)
CSAETTPAHGSGANVLTF

SEQ ID NO: 30503 - protein, 13 aa, Homo sapiens
  CDR3 for alpha chain variable domain of TCR clone 15252 (TRAV1-2, TRAJ9)
CAALNTGGFKTIF

SEQ ID NO: 30504 - protein, 13 aa, Homo sapiens
  CDR3 for beta chain variable domain of TCR clone 15252 (TRBV19, TRBJ1-2)
CASSVPGHDGYTF

SEQ ID NO: 30505 - protein, 12 aa, Homo sapiens
  CDR3 for alpha chain variable domain of TCR clone 15253 (TRAV21, TRAJ33)
CAKMDSNYQLIR

SEQ ID NO: 30506 - protein, 14 aa, Homo sapiens
  CDR3 for beta chain variable domain of TCR clone 15253 (TRBV2, TRBJ2-7)
CASSLTSGGYEQYF

SEQ ID NO: 30507 - protein, 16 aa, Homo sapiens
  CDR3 for alpha chain variable domain of TCR clone 15254 (TRAV30, TRAJ24)
CGTQIVDADSWGKFQF

SEQ ID NO: 30508 - protein, 14 aa, Homo sapiens
  CDR3 for beta chain variable domain of TCR clone 15254 (TRBV12-5, TRBJ2-5)
CASGSRTHQETQYF

SEQ ID NO: 30509 - protein, 18 aa, Homo sapiens
  CDR3 for alpha chain variable domain of TCR clone 15255 (TRAV21, TRAJ52)
CAVRPSPAGGTSYGKLTF

SEQ ID NO: 30510 - protein, 17 aa, Homo sapiens
  CDR3 for beta chain variable domain of TCR clone 15255 (TRBV13, TRBJ2-3)
CACSLSRVAGGRNTQYF

SEQ ID NO: 30511 - protein, 14 aa, Homo sapiens
  CDR3 for alpha chain variable domain of TCR clone 15256 (TRAV35, TRAJ22)
CAGLRPGSARQLTF

SEQ ID NO: 30512 - protein, 15 aa, Homo sapiens
  CDR3 for beta chain variable domain of TCR clone 15256 (TRBV12-4, TRBJ2-5)
CASSPPTGLQETRYF

SEQ ID NO: 30513 - protein, 16 aa, Homo sapiens
  CDR3 for alpha chain variable domain of TCR clone 15257 (TRAV2, TRAJ4)
CAVEDRFSGGYNKLIF

SEQ ID NO: 30514 - protein, 13 aa, Homo sapiens
  CDR3 for beta chain variable domain of TCR clone 15257 (TRBV7-7, TRBJ2-5)
CASSRSGQETQCF

SEQ ID NO: 30515 - protein, 14 aa, Homo sapiens
  CDR3 for alpha chain variable domain of TCR clone 15258 (TRAV21, TRAJ35)
CAVMPLGFGNVLHC

SEQ ID NO: 30516 - protein, 12 aa, Homo sapiens
  CDR3 for beta chain variable domain of TCR clone 15258 (TRBV7-9, TRBJ2-7)
CASSIKREEQYF

SEQ ID NO: 30517 - protein, 14 aa, Homo sapiens
  CDR3 for alpha chain variable domain of TCR clone 15259 (TRAV21, TRAJ38)
CAVMGAGNNRKLIW

SEQ ID NO: 30518 - protein, 13 aa, Homo sapiens
  CDR3 for beta chain variable domain of TCR clone 15259 (TRBV7-3, TRBJ2-5)
CASSIGFFETQYL

SEQ ID NO: 30519 - protein, 16 aa, Homo sapiens
  CDR3 for alpha chain variable domain of TCR clone 15260 (TRAV4, TRAJ22)
CLVGDLYSGSARQLTF

SEQ ID NO: 30520 - protein, 15 aa, Homo sapiens
  CDR3 for beta chain variable domain of TCR clone 15260 (TRBV7-9, TRBJ2-1)
CQQRCSGGSYNEQFF

SEQ ID NO: 30521 - protein, 11 aa, Homo sapiens
  CDR3 for alpha chain variable domain of TCR clone 15261 (TRAV2, TRAJ33)
CAVDSNYQLIW

SEQ ID NO: 30522 - protein, 18 aa, Homo sapiens
  CDR3 for beta chain variable domain of TCR clone 15261 (TRBV20-1, TRBJ2-6)
CSARGSGTTRSGANVLTF

SEQ ID NO: 30523 - protein, 14 aa, Homo sapiens
  CDR3 for alpha chain variable domain of TCR clone 15262 (TRAV12-2, TRAJ13)
CAVKKTGGYQKVTF

SEQ ID NO: 30524 - protein, 15 aa, Homo sapiens
  CDR3 for beta chain variable domain of TCR clone 15262 (TRBV11-1, TRBJ2-1)
CASSNGGGSSNEQFF

SEQ ID NO: 30525 - protein, 16 aa, Homo sapiens
  CDR3 for alpha chain variable domain of TCR clone 15263 (TRAV27, TRAJ13)
CAGAKSDSGGYQKVTF

SEQ ID NO: 30526 - protein, 15 aa, Homo sapiens
  CDR3 for beta chain variable domain of TCR clone 15263 (TRBV29-1, TRBJ2-1)
RSVGRHALFYNEQFF

SEQ ID NO: 30527 - protein, 17 aa, Homo sapiens
  CDR3 for alpha chain variable domain of TCR clone 15264 (TRAV3, TRAJ42)
CAVRDRDYGGSQGNLIF

SEQ ID NO: 30528 - protein, 15 aa, Homo sapiens
  CDR3 for beta chain variable domain of TCR clone 15264 (TRBV6-6, TRBJ2-7)
CASSYSDGGSYEQYF

SEQ ID NO: 30529 - protein, 16 aa, Homo sapiens
  CDR3 for alpha chain variable domain of TCR clone 15265 (TRAV3, TRAJ18)
CAVRDGRGSTLGRLSF

SEQ ID NO: 30530 - protein, 15 aa, Homo sapiens
  CDR3 for beta chain variable domain of TCR clone 15265 (TRBV7-9, TRBJ1-6)
CASSSPGRGNSPLHF

SEQ ID NO: 30531 - protein, 15 aa, Homo sapiens
  CDR3 for alpha chain variable domain of TCR clone 15266 (TRAV3, TRAJ22)
CAVRDRGGSARQLTF

SEQ ID NO: 30532 - protein, 13 aa, Homo sapiens
  CDR3 for beta chain variable domain of TCR clone 15266 (TRBV19, TRBJ1-2)
CASSVPGQDGYTF

SEQ ID NO: 30533 - protein, 13 aa, Homo sapiens
  CDR3 for alpha chain variable domain of TCR clone 15267 (TRAV2, TRAJ15)
CAVASQAGTALIF

SEQ ID NO: 30534 - protein, 13 aa, Homo sapiens
  CDR3 for beta chain variable domain of TCR clone 15267 (TRBV7-3, TRBJ1-1)
CASSQDWGAEAFF

SEQ ID NO: 30535 - protein, 12 aa, Homo sapiens
  CDR3 for alpha chain variable domain of TCR clone 15268 (TRAV12-3, TRAJ17)
CAMTLTGNKLTF

SEQ ID NO: 30536 - protein, 12 aa, Homo sapiens
  CDR3 for beta chain variable domain of TCR clone 15268 (TRBV29-1, TRBJ2-3)
CSVTGGADTQYF

SEQ ID NO: 30537 - protein, 14 aa, Homo sapiens
  CDR3 for alpha chain variable domain of TCR clone 15269 (TRAV1-2, TRAJ8)
CAVREDIGFQKLVF

SEQ ID NO: 30538 - protein, 15 aa, Homo sapiens
  CDR3 for beta chain variable domain of TCR clone 15269 (TRBV6-3, TRBJ2-7)
CASSSPGTVFYEQYF

SEQ ID NO: 30539 - protein, 15 aa, Homo sapiens
  CDR3 for alpha chain variable domain of TCR clone 15270 (TRAV17, TRAJ23)
CATDAEDNQGGKLIF

SEQ ID NO: 30540 - protein, 12 aa, Homo sapiens
  CDR3 for beta chain variable domain of TCR clone 15270 (TRBV2, TRBJ2-1)
CAKREGYSEQFF

SEQ ID NO: 30541 - protein, 11 aa, Homo sapiens
  CDR3 for alpha chain variable domain of TCR clone 15271 (TRAV2, TRAJ13)
CASGGYQKVNF

SEQ ID NO: 30542 - protein, 16 aa, Homo sapiens
  CDR3 for beta chain variable domain of TCR clone 15271 (TRBV6-1, TRBJ2-5)
CASSETLDRGAETQYF

SEQ ID NO: 30543 - protein, 14 aa, Homo sapiens
  CDR3 for alpha chain variable domain of TCR clone 15272 (TRAV1-2, TRAJ16)
CAVNRFSDGQKLLF

SEQ ID NO: 30544 - protein, 12 aa, Homo sapiens
  CDR3 for beta chain variable domain of TCR clone 15272 (TRBV14, TRBJ2-7)
CASSLYKDEQYF

SEQ ID NO: 30545 - protein, 13 aa, Homo sapiens
  CDR3 for alpha chain variable domain of TCR clone 15273 (TRAV29/DV5, TRAJ31)
CAASRNNNARLMF

SEQ ID NO: 30546 - protein, 20 aa, Homo sapiens
  CDR3 for beta chain variable domain of TCR clone 15273 (TRBV28, TRBJ2-1)
CASTPIGRSPGLAGGNEQFF

SEQ ID NO: 30547 - protein, 15 aa, Homo sapiens
  CDR3 for alpha chain variable domain of TCR clone 15274 (TRAV26-1, TRAJ29)
CIVRVEGSGNPPLVF

SEQ ID NO: 30548 - protein, 15 aa, Homo sapiens
  CDR3 for beta chain variable domain of TCR clone 15274 (TRBV7-9, TRBJ1-5)
CASSQGHQPNQPQHF

SEQ ID NO: 30549 - protein, 16 aa, Homo sapiens
  CDR3 for alpha chain variable domain of TCR clone 15275 (TRAV30, TRAJ24)
CGTEIVDADSWGKFQF

SEQ ID NO: 30550 - protein, 15 aa, Homo sapiens
  CDR3 for beta chain variable domain of TCR clone 15275 (TRBV6-1, TRBJ2-1)
CASSELRGQYNEQFF

SEQ ID NO: 30551 - protein, 14 aa, Homo sapiens
  CDR3 for alpha chain variable domain of TCR clone 15276 (TRAV1-2, TRAJ16)
CAVNRFSDGQKLFF

SEQ ID NO: 30552 - protein, 15 aa, Homo sapiens
  CDR3 for beta chain variable domain of TCR clone 15276 (TRBV9, TRBJ1-6)
CASSVAGTGDSPLHF

SEQ ID NO: 30553 - protein, 11 aa, Homo sapiens
  CDR3 for alpha chain variable domain of TCR clone 15277 (TRAV20, TRAJ34)
CAVLDTDKLIF

SEQ ID NO: 30554 - protein, 15 aa, Homo sapiens
  CDR3 for beta chain variable domain of TCR clone 15277 (TRBV6-3, TRBJ2-7)
CASSSPGTVFYEQYF

SEQ ID NO: 30555 - protein, 14 aa, Homo sapiens
  CDR3 for alpha chain variable domain of TCR clone 15278 (TRAV38-1, TRAJ40)
CTLRPTSGTYKYIF

SEQ ID NO: 30556 - protein, 14 aa, Homo sapiens
  CDR3 for beta chain variable domain of TCR clone 15278 (TRBV25-1, TRBJ1-1)
CASTHLGGNTEAFF

SEQ ID NO: 30557 - protein, 11 aa, Homo sapiens
  CDR3 for alpha chain variable domain of TCR clone 15279 (TRAV8-3, TRAJ20)
CCGANDYKLSF

SEQ ID NO: 30558 - protein, 16 aa, Homo sapiens
  CDR3 for beta chain variable domain of TCR clone 15279 (TRBV19, TRBJ2-2)
CASRSPGTGATGELFF

SEQ ID NO: 30559 - protein, 10 aa, Homo sapiens
  CDR3 for alpha chain variable domain of TCR clone 15280 (TRAV13-1, TRAJ7)
LIGGNNRLAF

SEQ ID NO: 30560 - protein, 16 aa, Homo sapiens
  CDR3 for beta chain variable domain of TCR clone 15280 (TRBV7-8, TRBJ2-6)
CHSEGTGESGANVLTF

SEQ ID NO: 30561 - protein, 13 aa, Homo sapiens
  CDR3 for alpha chain variable domain of TCR clone 15281 (TRAV35, TRAJ42)
CAGFPGSQGNLIF

SEQ ID NO: 30562 - protein, 14 aa, Homo sapiens
  CDR3 for beta chain variable domain of TCR clone 15281 (TRBV19, TRBJ2-1)
CASPTFVSSGEQFF

SEQ ID NO: 30563 - protein, 12 aa, Homo sapiens
  CDR3 for alpha chain variable domain of TCR clone 15282 (TRAV8-3, TRAJ20)
CAVGASDYKLSF

SEQ ID NO: 30564 - protein, 16 aa, Homo sapiens
  CDR3 for beta chain variable domain of TCR clone 15282 (TRBV19, TRBJ2-2)
CASRSPGTGATGELFF

SEQ ID NO: 30565 - protein, 17 aa, Homo sapiens
  CDR3 for alpha chain variable domain of TCR clone 15283 (TRAV3, TRAJ42)
CAVRDRDYGGSQGNLIF

SEQ ID NO: 30566 - protein, 15 aa, Homo sapiens
  CDR3 for beta chain variable domain of TCR clone 15283 (TRBV20-1, TRBJ2-7)
CSARDRVSGMDEQYF

SEQ ID NO: 30567 - protein, 14 aa, Homo sapiens
  CDR3 for alpha chain variable domain of TCR clone 15284 (TRAV1-1, TRAJ28)
CAAPSGAGSYQLTF

SEQ ID NO: 30568 - protein, 15 aa, Homo sapiens
  CDR3 for beta chain variable domain of TCR clone 15284 (TRBV7-2, TRBJ1-2)
CASSLVLGGDYGYTF

SEQ ID NO: 30569 - protein, 14 aa, Homo sapiens
  CDR3 for alpha chain variable domain of TCR clone 15285 (TRAV1-2, TRAJ16)
CAVNRFSDGQKLLF

SEQ ID NO: 30570 - protein, 15 aa, Homo sapiens
  CDR3 for beta chain variable domain of TCR clone 15285 (TRBV2, TRBJ2-1)
CASSEEREGDNGQFF

SEQ ID NO: 30571 - protein, 11 aa, Homo sapiens
  CDR3 for alpha chain variable domain of TCR clone 15286 (TRAV21, TRAJ11)
CAVNGYSNLTF

SEQ ID NO: 30572 - protein, 11 aa, Homo sapiens
  CDR3 for beta chain variable domain of TCR clone 15286 (TRBV19, TRBJ1-1)
CASSIGSEAFF

SEQ ID NO: 30573 - protein, 14 aa, Homo sapiens
  CDR3 for alpha chain variable domain of TCR clone 15287 (TRAV8-2, TRAJ4)
CVVSPSGGYNKLIF

SEQ ID NO: 30574 - protein, 15 aa, Homo sapiens
  CDR3 for beta chain variable domain of TCR clone 15287 (TRBV4-1, TRBJ1-4)
CASSDTGGTNEELFF

SEQ ID NO: 30575 - protein, 14 aa, Homo sapiens
  CDR3 for alpha chain variable domain of TCR clone 15288 (TRAV9-2, TRAJ9)
CALTLNTGGFKTIF

SEQ ID NO: 30576 - protein, 16 aa, Homo sapiens
  CDR3 for beta chain variable domain of TCR clone 15288 (TRBV7-6, TRBJ2-1)
CASSAPGPSSYNEQFF

SEQ ID NO: 30577 - protein, 14 aa, Homo sapiens
  CDR3 for alpha chain variable domain of TCR clone 15289 (TRAV12-2, TRAJ45)
CALPERGGADGLTF

SEQ ID NO: 30578 - protein, 14 aa, Homo sapiens
  CDR3 for beta chain variable domain of TCR clone 15289 (TRBV18, TRBJ1-5)
CASSPGSSNQPQHF

SEQ ID NO: 30579 - protein, 14 aa, Homo sapiens
  CDR3 for alpha chain variable domain of TCR clone 15290 (TRAV1-2, TRAJ16)
CAVNRFSDGQKLLF

SEQ ID NO: 30580 - protein, 13 aa, Homo sapiens
  CDR3 for beta chain variable domain of TCR clone 15290 (TRBV14, TRBJ1-1)
CASSREFGTEAFF

SEQ ID NO: 30581 - protein, 14 aa, Homo sapiens
  CDR3 for alpha chain variable domain of TCR clone 15291 (TRAV12-3, TRAJ10)
SHLPLTGGGNKLTF

SEQ ID NO: 30582 - protein, 16 aa, Homo sapiens
  CDR3 for beta chain variable domain of TCR clone 15291 (TRBV13, TRBJ2-2)
CASSPRTGEHTGELFF

SEQ ID NO: 30583 - protein, 14 aa, Homo sapiens
  CDR3 for alpha chain variable domain of TCR clone 15292 (TRAV13-1, TRAJ40)
CAASITSGTYKYIF

SEQ ID NO: 30584 - protein, 15 aa, Homo sapiens
  CDR3 for beta chain variable domain of TCR clone 15292 (TRBV7-3, TRBJ2-1)
CASSPTGGGEVEQFF

SEQ ID NO: 30585 - protein, 14 aa, Homo sapiens
  CDR3 for alpha chain variable domain of TCR clone 15293 (TRAV13-1, TRAJ44)
CAAKATGTASKLTF

SEQ ID NO: 30586 - protein, 20 aa, Homo sapiens
  CDR3 for beta chain variable domain of TCR clone 15293 (TRBV7-8, TRBJ2-2)
CASSHLFPGPTIHITGELFF

SEQ ID NO: 30587 - protein, 13 aa, Homo sapiens
  CDR3 for alpha chain variable domain of TCR clone 15294 (TRAV2, TRAJ40)
CAVVTSGTYKYIF

SEQ ID NO: 30588 - protein, 12 aa, Homo sapiens
  CDR3 for beta chain variable domain of TCR clone 15294 (TRBV7-3, TRBJ2-1)
CASSFQSGPQFF

SEQ ID NO: 30589 - protein, 14 aa, Homo sapiens
  CDR3 for alpha chain variable domain of TCR clone 15295 (TRAV10, TRAJ34)
CVVSGKHRQAHLWD

SEQ ID NO: 30590 - protein, 14 aa, Homo sapiens
  CDR3 for beta chain variable domain of TCR clone 15295 (TRBV19, TRBJ2-1)
CASPTFVLSGEQFF

SEQ ID NO: 30591 - protein, 20 aa, Homo sapiens
  CDR3 for alpha chain variable domain of TCR clone 15296 (TRAV8-3, )
CAGDNYDIQNPDPAVYQLRD

SEQ ID NO: 30592 - protein, 14 aa, Homo sapiens
  CDR3 for beta chain variable domain of TCR clone 15296 (TRBV5-5, TRBJ1-5)
CASSGQGVDQPQHF

SEQ ID NO: 30593 - protein, 15 aa, Homo sapiens
  CDR3 for alpha chain variable domain of TCR clone 15297 (TRAV8-3, TRAJ45)
CASSYSGGGADGLTC

SEQ ID NO: 30594 - protein, 13 aa, Homo sapiens
  CDR3 for beta chain variable domain of TCR clone 15297 (TRBV10-3, TRBJ2-7)
CASKLAVNYEQYF

SEQ ID NO: 30595 - protein, 18 aa, Homo sapiens
  CDR3 for alpha chain variable domain of TCR clone 15298 (TRAV12-3, TRAJ52)
CAMSVGGAGGTSYGKLTF

SEQ ID NO: 30596 - protein, 15 aa, Homo sapiens
  CDR3 for beta chain variable domain of TCR clone 15298 (TRBV27, TRBJ1-6)
CASSFDRGLGSPFHF

SEQ ID NO: 30597 - protein, 12 aa, Homo sapiens
  CDR3 for alpha chain variable domain of TCR clone 15299 (TRAV21, TRAJ33)
CAKMDSNYPLIW

SEQ ID NO: 30598 - protein, 14 aa, Homo sapiens
  CDR3 for beta chain variable domain of TCR clone 15299 (TRBV2, TRBJ2-7)
CASSLTSGGYEQYF

SEQ ID NO: 30599 - protein, 17 aa, Homo sapiens
  CDR3 for alpha chain variable domain of TCR clone 15300 (TRAV3, TRAJ42)
CAVRDRDYGGGQGNLIF

SEQ ID NO: 30600 - protein, 15 aa, Homo sapiens
  CDR3 for beta chain variable domain of TCR clone 15300 (TRBV6-6, TRBJ2-7)
CASSYSYGGSYEQYF

SEQ ID NO: 30601 - protein, 14 aa, Homo sapiens
  CDR3 for alpha chain variable domain of TCR clone 15301 (TRAV14/DV4, TRAJ26)
CAMREGTYGQNFVF

SEQ ID NO: 30602 - protein, 17 aa, Homo sapiens
  CDR3 for beta chain variable domain of TCR clone 15301 (TRBV7-2, TRBJ2-7)
CASSFETSGSTSSTSGR

SEQ ID NO: 30603 - protein, 13 aa, Homo sapiens
  CDR3 for alpha chain variable domain of TCR clone 15302 (TRAV29/DV5, TRAJ31)
CAASRNNNARLMF

SEQ ID NO: 30604 - protein, 14 aa, Homo sapiens
  CDR3 for beta chain variable domain of TCR clone 15302 (TRBV19, TRBJ2-1)
CASPTFVLSGEQFF

SEQ ID NO: 30605 - protein, 13 aa, Homo sapiens
  CDR3 for alpha chain variable domain of TCR clone 15303 (TRAV21, TRAJ52)
CAVRPSPAGGTSY

SEQ ID NO: 30606 - protein, 17 aa, Homo sapiens
  CDR3 for beta chain variable domain of TCR clone 15303 (TRBV13, TRBJ2-3)
CASSLSRVAGGRNTQYF

SEQ ID NO: 30607 - protein, 15 aa, Homo sapiens
  CDR3 for alpha chain variable domain of TCR clone 15304 (TRAV26-1, TRAJ29)
CIVIVEGSGNTPLVF

SEQ ID NO: 30608 - protein, 14 aa, Homo sapiens
  CDR3 for beta chain variable domain of TCR clone 15304 (TRBV18, TRBJ2-5)
CASSPGVSQETQYF

SEQ ID NO: 30609 - protein, 13 aa, Homo sapiens
  CDR3 for alpha chain variable domain of TCR clone 15305 (TRAV20, TRAJ37)
CAGCSGNTGKLIF

SEQ ID NO: 30610 - protein, 11 aa, Homo sapiens
  CDR3 for beta chain variable domain of TCR clone 15305 (TRBV12-4, TRBJ2-3)
CASTATDTQYF

SEQ ID NO: 30611 - protein, 14 aa, Homo sapiens
  CDR3 for alpha chain variable domain of TCR clone 15306 (TRAV12-2, TRAJ13)
CAVKKTGGYQKVTF

SEQ ID NO: 30612 - protein, 15 aa, Homo sapiens
  CDR3 for beta chain variable domain of TCR clone 15306 (TRBV27, TRBJ2-1)
CASINGGGSSNEQFF

SEQ ID NO: 30613 - protein, 13 aa, Homo sapiens
  CDR3 for alpha chain variable domain of TCR clone 15307 (TRAV8-3, TRAJ48)
CCGCNFGNEKLTF

SEQ ID NO: 30614 - protein, 12 aa, Homo sapiens
  CDR3 for beta chain variable domain of TCR clone 15307 (TRBV7-2, TRBJ2-5)
CASSQYQETQCF

SEQ ID NO: 30615 - protein, 12 aa, Homo sapiens
  CDR3 for alpha chain variable domain of TCR clone 15308 (TRAV1-1, TRAJ8)
CAGGTGFQKLVF

SEQ ID NO: 30616 - protein, 15 aa, Homo sapiens
  CDR3 for beta chain variable domain of TCR clone 15308 (TRBV7-9, TRBJ1-4)
CASSRTGGFNERLFF

SEQ ID NO: 30617 - protein, 14 aa, Homo sapiens
  CDR3 for alpha chain variable domain of TCR clone 15309 (TRAV1-2, TRAJ16)
CAVNRFSDGQKLLF

SEQ ID NO: 30618 - protein, 16 aa, Homo sapiens
  CDR3 for beta chain variable domain of TCR clone 15309 (TRBV2, TRBJ2-1)
CASSVGGSLSYNEQFF

SEQ ID NO: 30619 - protein, 14 aa, Homo sapiens
  CDR3 for alpha chain variable domain of TCR clone 15310 (TRAV2, TRAJ39)
CAVEGDNAGNVLTF

SEQ ID NO: 30620 - protein, 14 aa, Homo sapiens
  CDR3 for beta chain variable domain of TCR clone 15310 (TRBV28, TRBJ2-4)
CASSPRARGNIQYF

SEQ ID NO: 30621 - protein, 13 aa, Homo sapiens
  CDR3 for alpha chain variable domain of TCR clone 15311 (TRAV21, TRAJ57)
CAVTQGGSEKLVF

SEQ ID NO: 30622 - protein, 16 aa, Homo sapiens
  CDR3 for beta chain variable domain of TCR clone 15311 (TRBV29-1, TRBJ2-7)
CSVEDAEGGTAYEQYF

SEQ ID NO: 30623 - protein, 14 aa, Homo sapiens
  CDR3 for alpha chain variable domain of TCR clone 15312 (TRAV13-1, TRAJ40)
CAASMTSGTYKYIF

SEQ ID NO: 30624 - protein, 15 aa, Homo sapiens
  CDR3 for beta chain variable domain of TCR clone 15312 (TRBV28, TRBJ2-1)
CASSIIAEGRSEQFF

SEQ ID NO: 30625 - protein, 19 aa, Homo sapiens
  CDR3 for alpha chain variable domain of TCR clone 15313 (TRAV3, TRAJ6)
CAVRDRNPSRSGGSYIPTF

SEQ ID NO: 30626 - protein, 15 aa, Homo sapiens
  CDR3 for beta chain variable domain of TCR clone 15313 (TRBV18, TRBJ2-7)
CASSPTFMDSYEQYF

SEQ ID NO: 30627 - protein, 19 aa, Homo sapiens
  CDR3 for alpha chain variable domain of TCR clone 15314 (TRAV1-2, TRAJ26)
CLLPLCCERPDNYGQNFVF

SEQ ID NO: 30628 - protein, 15 aa, Homo sapiens
  CDR3 for beta chain variable domain of TCR clone 15314 (TRBV9, TRBJ1-6)
CAGSVAGTGDSPLHF

SEQ ID NO: 30629 - protein, 18 aa, Homo sapiens
  CDR3 for alpha chain variable domain of TCR clone 15315 (TRAV6, TRAJ37)
CALRWQHRQTNLWARDNF

SEQ ID NO: 30630 - protein, 15 aa, Homo sapiens
  CDR3 for beta chain variable domain of TCR clone 15315 (TRBV12-4, TRBJ2-5)
CASSPPTGLQETQYF

SEQ ID NO: 30631 - protein, 18 aa, Homo sapiens
  CDR3 for alpha chain variable domain of TCR clone 15316 (TRAV21, TRAJ52)
CAVRPSPAGGTSYGKLTF

SEQ ID NO: 30632 - protein, 17 aa, Homo sapiens
  CDR3 for beta chain variable domain of TCR clone 15316 (TRBV13, TRBJ2-3)
CASSLSRVAGVRNTQYF

SEQ ID NO: 30633 - protein, 13 aa, Homo sapiens
  CDR3 for alpha chain variable domain of TCR clone 15317 (TRAV13-2, TRAJ40)
CAENGSGTYKYIF

SEQ ID NO: 30634 - protein, 15 aa, Homo sapiens
  CDR3 for beta chain variable domain of TCR clone 15317 (TRBV10-3, TRBJ1-1)
CAISDRGGMNTEAFF

SEQ ID NO: 30635 - protein, 18 aa, Homo sapiens
  CDR3 for alpha chain variable domain of TCR clone 15318 (TRAV12-3, TRAJ52)
CEMSVGGAGGTSYGKLTF

SEQ ID NO: 30636 - protein, 15 aa, Homo sapiens
  CDR3 for beta chain variable domain of TCR clone 15318 (TRBV27, TRBJ1-6)
CASSFDRGLGSPLHF

SEQ ID NO: 30637 - protein, 15 aa, Homo sapiens
  CDR3 for alpha chain variable domain of TCR clone 15319 (TRAV3, TRAJ22)
CAVRDRGGSARQLTF

SEQ ID NO: 30638 - protein, 16 aa, Homo sapiens
  CDR3 for beta chain variable domain of TCR clone 15319 (TRBV4-1, TRBJ2-7)
CASRPSGGGADNEQYF

SEQ ID NO: 30639 - protein, 15 aa, Homo sapiens
  CDR3 for alpha chain variable domain of TCR clone 15320 (TRAV12-3, TRAJ13)
CAMSARSGGYQKVTF

SEQ ID NO: 30640 - protein, 17 aa, Homo sapiens
  CDR3 for beta chain variable domain of TCR clone 15320 (TRBV3-1, TRBJ2-7)
CQQPRRGGRSWHYEQYF

SEQ ID NO: 30641 - protein, 13 aa, Homo sapiens
  CDR3 for alpha chain variable domain of TCR clone 15321 (TRAV8-3, TRAJ36)
CAVGATGANNLFF

SEQ ID NO: 30642 - protein, 15 aa, Homo sapiens
  CDR3 for beta chain variable domain of TCR clone 15321 (TRBV7-2, TRBJ1-2)
CASSPRAGRNYGYTF

SEQ ID NO: 30643 - protein, 16 aa, Homo sapiens
  CDR3 for alpha chain variable domain of TCR clone 15322 (TRAV3, TRAJ6)
CAVRDGQGRRKLHTYI

SEQ ID NO: 30644 - protein, 14 aa, Homo sapiens
  CDR3 for beta chain variable domain of TCR clone 15322 (TRBV7-2, TRBJ2-7)
CASSPKTSFYEQYF

SEQ ID NO: 30645 - protein, 14 aa, Homo sapiens
  CDR3 for alpha chain variable domain of TCR clone 15323 (TRAV25, TRAJ45)
CAGNSGGGADGLTF

SEQ ID NO: 30646 - protein, 14 aa, Homo sapiens
  CDR3 for beta chain variable domain of TCR clone 15323 (TRBV29-1, TRBJ1-2)
CSTRRGTQTSGYTF

SEQ ID NO: 30647 - protein, 13 aa, Homo sapiens
  CDR3 for alpha chain variable domain of TCR clone 15324 (TRAV27, TRAJ3)
ASLRGSRASKIIF

SEQ ID NO: 30648 - protein, 15 aa, Homo sapiens
  CDR3 for beta chain variable domain of TCR clone 15324 (TRBV28, TRBJ1-3)
CASSMGWASGNTIYF

SEQ ID NO: 30649 - protein, 13 aa, Homo sapiens
  CDR3 for alpha chain variable domain of TCR clone 15325 (TRAV27, TRAJ36)
QASTPAGANNLFF

SEQ ID NO: 30650 - protein, 13 aa, Homo sapiens
  CDR3 for beta chain variable domain of TCR clone 15325 (TRBV7-9, TRBJ2-3)
CASSPGSTDTQYF

SEQ ID NO: 30651 - protein, 16 aa, Homo sapiens
  CDR3 for alpha chain variable domain of TCR clone 15326 (TRAV12-3, TRAJ53)
CAMSPGSGGSNYKLTF

SEQ ID NO: 30652 - protein, 15 aa, Homo sapiens
  CDR3 for beta chain variable domain of TCR clone 15326 (TRBV6-3, TRBJ2-7)
CASSSPGTVFYEQYF

SEQ ID NO: 30653 - protein, 14 aa, Homo sapiens
  CDR3 for alpha chain variable domain of TCR clone 15327 (TRAV26-1, TRAJ38)
CIADNAGNNRRLIW

SEQ ID NO: 30654 - protein, 13 aa, Homo sapiens
  CDR3 for beta chain variable domain of TCR clone 15327 (TRBV20-1, TRBJ1-1)
CSARGGGNTEAFF

SEQ ID NO: 30655 - protein, 11 aa, Homo sapiens
  CDR3 for alpha chain variable domain of TCR clone 15328 (TRAV2, TRAJ13)
CASGGYQKVTF

SEQ ID NO: 30656 - protein, 14 aa, Homo sapiens
  CDR3 for beta chain variable domain of TCR clone 15328 (TRBV7-8, TRBJ2-3)
CASSLEAGTDTQYF

SEQ ID NO: 30657 - protein, 14 aa, Homo sapiens
  CDR3 for alpha chain variable domain of TCR clone 15329 (TRAV38-1, TRAJ40)
CALRPPSGTYKYIF

SEQ ID NO: 30658 - protein, 14 aa, Homo sapiens
  CDR3 for beta chain variable domain of TCR clone 15329 (TRBV25-1, TRBJ1-1)
CASTHLGGNTEAFF

SEQ ID NO: 30659 - protein, 14 aa, Homo sapiens
  CDR3 for alpha chain variable domain of TCR clone 15330 (TRAV3, TRAJ9)
CAVRLNTGGFKTIF

SEQ ID NO: 30660 - protein, 15 aa, Homo sapiens
  CDR3 for beta chain variable domain of TCR clone 15330 (TRBV7-2, TRBJ2-1)
CASSLAGGRVNEQFF

SEQ ID NO: 30661 - protein, 14 aa, Homo sapiens
  CDR3 for alpha chain variable domain of TCR clone 15331 (TRAV26-1, TRAJ34)
CIVRVAYNTDKLIF

SEQ ID NO: 30662 - protein, 15 aa, Homo sapiens
  CDR3 for beta chain variable domain of TCR clone 15331 (TRBV20-1, TRBJ2-7)
CSARVPAAYSYEQYF

SEQ ID NO: 30663 - protein, 14 aa, Homo sapiens
  CDR3 for alpha chain variable domain of TCR clone 15332 (TRAV26-1, TRAJ34)
CIVRVAYNNDKLIF

SEQ ID NO: 30664 - protein, 15 aa, Homo sapiens
  CDR3 for beta chain variable domain of TCR clone 15332 (TRBV20-1, TRBJ2-7)
CSARVPAAYFYEQYF

SEQ ID NO: 30665 - protein, 13 aa, Homo sapiens
  CDR3 for alpha chain variable domain of TCR clone 15333 (TRAV13-2, TRAJ48)
CAEMDFGNERLTF

SEQ ID NO: 30666 - protein, 15 aa, Homo sapiens
  CDR3 for beta chain variable domain of TCR clone 15333 (TRBV7-9, TRBJ1-6)
CASSSPGRGNSPLHF

SEQ ID NO: 30667 - protein, 14 aa, Homo sapiens
  CDR3 for alpha chain variable domain of TCR clone 15334 (TRAV8-4, TRAJ13)
CAVTLSGGYQKGTF

SEQ ID NO: 30668 - protein, 14 aa, Homo sapiens
  CDR3 for beta chain variable domain of TCR clone 15334 (TRBV7-2, TRBJ1-2)
CASSQTGSTYGYTF

SEQ ID NO: 30669 - protein, 18 aa, Homo sapiens
  CDR3 for alpha chain variable domain of TCR clone 15335 (TRAV13-1, TRAJ52)
CAASKRSAGGTSYGKLTF

SEQ ID NO: 30670 - protein, 13 aa, Homo sapiens
  CDR3 for beta chain variable domain of TCR clone 15335 (TRBV12-4, TRBJ1-2)
CASSLRQGKGYTV

SEQ ID NO: 30671 - protein, 15 aa, Homo sapiens
  CDR3 for alpha chain variable domain of TCR clone 15336 (TRAV26-1, TRAJ22)
CTVRVSFWFCKATDL

SEQ ID NO: 30672 - protein, 13 aa, Homo sapiens
  CDR3 for beta chain variable domain of TCR clone 15336 (TRBV7-9, TRBJ1-2)
CASSLKQNYGYTF

SEQ ID NO: 30673 - protein, 11 aa, Homo sapiens
  CDR3 for alpha chain variable domain of TCR clone 15337 (TRAV17, TRAJ9)
CATTGGLKTIF

SEQ ID NO: 30674 - protein, 14 aa, Homo sapiens
  CDR3 for beta chain variable domain of TCR clone 15337 (TRBV7-9, TRBJ2-2)
CASSGLADTGELFF

SEQ ID NO: 30675 - protein, 15 aa, Homo sapiens
  CDR3 for alpha chain variable domain of TCR clone 15338 (TRAV26-1, TRAJ44)
CIVRIGTGTASKLTF

SEQ ID NO: 30676 - protein, 15 aa, Homo sapiens
  CDR3 for beta chain variable domain of TCR clone 15338 (TRBV7-6, TRBJ2-1)
CASSSLAGEGNEQLF

SEQ ID NO: 30677 - protein, 11 aa, Homo sapiens
  CDR3 for alpha chain variable domain of TCR clone 15339 (TRAV12-3, TRAJ43)
CAMSASNDMRF

SEQ ID NO: 30678 - protein, 13 aa, Homo sapiens
  CDR3 for beta chain variable domain of TCR clone 15339 (TRBV20-1, TRBJ1-1)
CSAPLGGGTEAFF

SEQ ID NO: 30679 - protein, 17 aa, Homo sapiens
  CDR3 for alpha chain variable domain of TCR clone 15340 (TRAV13-1, TRAJ28)
CAASPPYSGAGSYQLTF

SEQ ID NO: 30680 - protein, 13 aa, Homo sapiens
  CDR3 for beta chain variable domain of TCR clone 15340 (TRBV7-2, TRBJ2-7)
CASSSPSGSEQYS

SEQ ID NO: 30681 - protein, 10 aa, Homo sapiens
  CDR3 for alpha chain variable domain of TCR clone 15341 (TRAV23/DV6, TRAJ57)
CAASSPLSQG

SEQ ID NO: 30682 - protein, 14 aa, Homo sapiens
  CDR3 for beta chain variable domain of TCR clone 15341 (TRBV25-1, TRBJ1-1)
CASTHLGGNTEAFF

SEQ ID NO: 30683 - protein, 14 aa, Homo sapiens
  CDR3 for alpha chain variable domain of TCR clone 15342 (TRAV2, TRAJ37)
CAVDFTSNTGKLVF

SEQ ID NO: 30684 - protein, 15 aa, Homo sapiens
  CDR3 for beta chain variable domain of TCR clone 15342 (TRBV20-1, TRBJ1-1)
CSASRGVTGNTEAFF

SEQ ID NO: 30685 - protein, 15 aa, Homo sapiens
  CDR3 for alpha chain variable domain of TCR clone 15343 (TRAV36/DV7, TRAJ53)
CAVEGSGGSNYKLTF

SEQ ID NO: 30686 - protein, 12 aa, Homo sapiens
  CDR3 for beta chain variable domain of TCR clone 15343 (TRBV29-1, TRBJ2-3)
CSVTGGADTQYF

SEQ ID NO: 30687 - protein, 15 aa, Homo sapiens
  CDR3 for alpha chain variable domain of TCR clone 15344 (TRAV38-1, TRAJ58)
CAFMKQETSGSRLTF

SEQ ID NO: 30688 - protein, 15 aa, Homo sapiens
  CDR3 for beta chain variable domain of TCR clone 15344 (TRBV7-2, TRBJ2-1)
CASTHGTGIYNEQFF

SEQ ID NO: 30689 - protein, 18 aa, Homo sapiens
  CDR3 for alpha chain variable domain of TCR clone 15345 (TRAV13-1, TRAJ52)
CAASKRSAGGTSYGKLTF

SEQ ID NO: 30690 - protein, 13 aa, Homo sapiens
  CDR3 for beta chain variable domain of TCR clone 15345 (TRBV12-4, TRBJ1-2)
CASSLRQGRGYTF

SEQ ID NO: 30691 - protein, 13 aa, Homo sapiens
  CDR3 for alpha chain variable domain of TCR clone 15346 (TRAV8-3, TRAJ28)
CAVGAFGSYQLTF

SEQ ID NO: 30692 - protein, 14 aa, Homo sapiens
  CDR3 for beta chain variable domain of TCR clone 15346 (TRBV7-2, TRBJ2-7)
CASRSQGAAYEQYF

SEQ ID NO: 30693 - protein, 14 aa, Homo sapiens
  CDR3 for alpha chain variable domain of TCR clone 15347 (TRAV1-2, TRAJ16)
CAVNRFSDGQKLLF

SEQ ID NO: 30694 - protein, 13 aa, Homo sapiens
  CDR3 for beta chain variable domain of TCR clone 15347 (TRBV10-3, TRBJ2-7)
CASKLAANYEQYF

SEQ ID NO: 30695 - protein, 12 aa, Homo sapiens
  CDR3 for alpha chain variable domain of TCR clone 15348 (TRAV1-1, TRAJ8)
CAVRPGFQKLVF

SEQ ID NO: 30696 - protein, 14 aa, Homo sapiens
  CDR3 for beta chain variable domain of TCR clone 15348 (TRBV11-3, TRBJ2-2)
CASSPRRDTGELFF

SEQ ID NO: 30697 - protein, 14 aa, Homo sapiens
  CDR3 for alpha chain variable domain of TCR clone 15349 (TRAV12-2, TRAJ17)
CAVLFKAASNKLTF

SEQ ID NO: 30698 - protein, 17 aa, Homo sapiens
  CDR3 for beta chain variable domain of TCR clone 15349 (TRBV20-1, TRBJ2-2)
CSASGSGQGGLTGELFF

SEQ ID NO: 30699 - protein, 11 aa, Homo sapiens
  CDR3 for alpha chain variable domain of TCR clone 15350 (TRAV17, TRAJ9)
CGFTGGFKTIF

SEQ ID NO: 30700 - protein, 14 aa, Homo sapiens
  CDR3 for beta chain variable domain of TCR clone 15350 (TRBV7-9, TRBJ2-2)
CASGLVQDTGELFF

SEQ ID NO: 30701 - protein, 14 aa, Homo sapiens
  CDR3 for alpha chain variable domain of TCR clone 15351 (TRAV8-4, TRAJ54)
CAVREVLGAQKLVF

SEQ ID NO: 30702 - protein, 13 aa, Homo sapiens
  CDR3 for beta chain variable domain of TCR clone 15351 (TRBV27, TRBJ2-7)
CASSFVSSYEQYF

SEQ ID NO: 30703 - protein, 15 aa, Homo sapiens
  CDR3 for alpha chain variable domain of TCR clone 15352 (TRAV12-3, TRAJ6)
CAMSATIGGSYIPTF

SEQ ID NO: 30704 - protein, 16 aa, Homo sapiens
  CDR3 for beta chain variable domain of TCR clone 15352 (TRBV20-1, TRBJ1-2)
CSASMGQGVANYGYTF

SEQ ID NO: 30705 - protein, 14 aa, Homo sapiens
  CDR3 for alpha chain variable domain of TCR clone 15353 (TRAV12-1, TRAJ24)
CVVRSTDSWGKFQF

SEQ ID NO: 30706 - protein, 13 aa, Homo sapiens
  CDR3 for beta chain variable domain of TCR clone 15353 (TRBV20-1, TRBJ1-1)
CSAGTVGNTEAFF

SEQ ID NO: 30707 - protein, 18 aa, Homo sapiens
  CDR3 for alpha chain variable domain of TCR clone 15354 (TRAV21, TRAJ52)
CAVRPSPAGGTSYGKLTF

SEQ ID NO: 30708 - protein, 12 aa, Homo sapiens
  CDR3 for beta chain variable domain of TCR clone 15354 (TRBV11-2, TRBJ2-1)
CASSPGNNEQFF

SEQ ID NO: 30709 - protein, 21 aa, Homo sapiens
  CDR3 for alpha chain variable domain of TCR clone 15355 (TRAV8-3, TRAJ38)
CAVGASNAGNNHIQNPDPAVY

SEQ ID NO: 30710 - protein, 15 aa, Homo sapiens
  CDR3 for beta chain variable domain of TCR clone 15355 (TRBV11-3, TRBJ1-3)
CASSLFGPSGNTIYF

SEQ ID NO: 30711 - protein, 17 aa, Homo sapiens
  CDR3 for alpha chain variable domain of TCR clone 15356 (TRAV3, TRAJ37)
CAVRDMRTPGNTGKLIF

SEQ ID NO: 30712 - protein, 13 aa, Homo sapiens
  CDR3 for beta chain variable domain of TCR clone 15356 (TRBV13, TRBJ2-7)
CASSQGVSYEQYF

SEQ ID NO: 30713 - protein, 11 aa, Homo sapiens
  CDR3 for alpha chain variable domain of TCR clone 15357 (TRAV21, TRAJ34)
CAHYNTDKPIF

SEQ ID NO: 30714 - protein, 13 aa, Homo sapiens
  CDR3 for beta chain variable domain of TCR clone 15357 (TRBV7-6, TRBJ1-2)
CASSLVADYGYTF

SEQ ID NO: 30715 - protein, 14 aa, Homo sapiens
  CDR3 for alpha chain variable domain of TCR clone 15358 (TRAV8-4, TRAJ9)
CAVGINTGGFKTIF

SEQ ID NO: 30716 - protein, 15 aa, Homo sapiens
  CDR3 for beta chain variable domain of TCR clone 15358 (TRBV10-2, TRBJ2-6)
CASSEQGTGANVLTF

SEQ ID NO: 30717 - protein, 18 aa, Homo sapiens
  CDR3 for alpha chain variable domain of TCR clone 15359 (TRAV21, TRAJ52)
CAVRPSPAGGTSYGKLTF

SEQ ID NO: 30718 - protein, 14 aa, Homo sapiens
  CDR3 for beta chain variable domain of TCR clone 15359 (TRBV7-2, TRBJ1-1)
CASSFLTGTTEAFF

SEQ ID NO: 30719 - protein, 15 aa, Homo sapiens
  CDR3 for alpha chain variable domain of TCR clone 15360 (TRAV38-1, TRAJ37)
CAFIFGSVNTGKLIF

SEQ ID NO: 30720 - protein, 12 aa, Homo sapiens
  CDR3 for beta chain variable domain of TCR clone 15360 (TRBV7-9, TRBJ2-7)
CASSLEGYEQYF

SEQ ID NO: 30721 - protein, 14 aa, Homo sapiens
  CDR3 for alpha chain variable domain of TCR clone 15361 (TRAV1-2, TRAJ16)
CAVNRFSDGQKLLF

SEQ ID NO: 30722 - protein, 12 aa, Homo sapiens
  CDR3 for beta chain variable domain of TCR clone 15361 (TRBV11-2, TRBJ2-2)
CASSLGGGELLF

SEQ ID NO: 30723 - protein, 13 aa, Homo sapiens
  CDR3 for alpha chain variable domain of TCR clone 15362 (TRAV3, TRAJ27)
CAVRLLGAGKSTF

SEQ ID NO: 30724 - protein, 13 aa, Homo sapiens
  CDR3 for beta chain variable domain of TCR clone 15362 (TRBV7-9, TRBJ2-3)
CASSPGSTDTQYF

SEQ ID NO: 30725 - protein, 17 aa, Homo sapiens
  CDR3 for alpha chain variable domain of TCR clone 15363 (TRAV20, TRAJ28)
CAVQEGYSGAGSYQLTF

SEQ ID NO: 30726 - protein, 15 aa, Homo sapiens
  CDR3 for beta chain variable domain of TCR clone 15363 (TRBV7-2, TRBJ2-7)
CASSLSSGRTYEQYF

SEQ ID NO: 30727 - protein, 13 aa, Homo sapiens
  CDR3 for alpha chain variable domain of TCR clone 15364 (TRAV1-2, TRAJ9)
CASLNTGGFKTIF

SEQ ID NO: 30728 - protein, 13 aa, Homo sapiens
  CDR3 for beta chain variable domain of TCR clone 15364 (TRBV19, TRBJ1-2)
CASSVPGQDGYTF

SEQ ID NO: 30729 - protein, 15 aa, Homo sapiens
  CDR3 for alpha chain variable domain of TCR clone 15365 (TRAV12-1, TRAJ42)
PPTSVKGGSQGNLIF

SEQ ID NO: 30730 - protein, 18 aa, Homo sapiens
  CDR3 for beta chain variable domain of TCR clone 15365 (TRBV11-2, TRBJ2-3)
CASSLGGASRGAPNTQYF

SEQ ID NO: 30731 - protein, 15 aa, Homo sapiens
  CDR3 for alpha chain variable domain of TCR clone 15366 (TRAV21, TRAJ57)
CAVIITQGGSEKLIF

SEQ ID NO: 30732 - protein, 14 aa, Homo sapiens
  CDR3 for beta chain variable domain of TCR clone 15366 (TRBV5-1, TRBJ2-2)
CASSLIWIPGELFF

SEQ ID NO: 30733 - protein, 15 aa, Homo sapiens
  CDR3 for alpha chain variable domain of TCR clone 15367 (TRAV26-1, TRAJ29)
CIVRVEGSRNTPLVF

SEQ ID NO: 30734 - protein, 15 aa, Homo sapiens
  CDR3 for beta chain variable domain of TCR clone 15367 (TRBV7-9, TRBJ1-5)
CASSQGHQPNQPQHF

SEQ ID NO: 30735 - protein, 15 aa, Homo sapiens
  CDR3 for alpha chain variable domain of TCR clone 15368 (TRAV21, TRAJ24)
CAARSSTDSRGKLQF

SEQ ID NO: 30736 - protein, 13 aa, Homo sapiens
  CDR3 for beta chain variable domain of TCR clone 15368 (TRBV11-2, TRBJ2-5)
CASSSTGEETQYF

SEQ ID NO: 30737 - protein, 17 aa, Homo sapiens
  CDR3 for alpha chain variable domain of TCR clone 15369 (TRAV3, TRAJ6)
CAVRDGPRAGGSYIPTF

SEQ ID NO: 30738 - protein, 20 aa, Homo sapiens
  CDR3 for beta chain variable domain of TCR clone 15369 (TRBV28, TRBJ2-1)
CASIPIGRSPGLAGGNEQFF

SEQ ID NO: 30739 - protein, 12 aa, Homo sapiens
  CDR3 for alpha chain variable domain of TCR clone 15370 (TRAV1-1, TRAJ8)
CAGGTGFQKLVF

SEQ ID NO: 30740 - protein, 15 aa, Homo sapiens
  CDR3 for beta chain variable domain of TCR clone 15370 (TRBV7-9, TRBJ1-4)
CASSRTGGFSEKLFF

SEQ ID NO: 30741 - protein, 11 aa, Homo sapiens
  CDR3 for alpha chain variable domain of TCR clone 15371 (TRAV2, TRAJ23)
CAVKTRGKLIF

SEQ ID NO: 30742 - protein, 14 aa, Homo sapiens
  CDR3 for beta chain variable domain of TCR clone 15371 (TRBV2, TRBJ2-3)
CASSEGQNTDTQYF

SEQ ID NO: 30743 - protein, 14 aa, Homo sapiens
  CDR3 for alpha chain variable domain of TCR clone 15372 (TRAV13-1, TRAJ35)
CAVSKGGFGNVLHC

SEQ ID NO: 30744 - protein, 13 aa, Homo sapiens
  CDR3 for beta chain variable domain of TCR clone 15372 (TRBV7-3, TRBJ1-1)
CASSQDWGAEAFF

SEQ ID NO: 30745 - protein, 12 aa, Homo sapiens
  CDR3 for alpha chain variable domain of TCR clone 15373 (TRAV12-1, TRAJ40)
CVVYSGTYKYIF

SEQ ID NO: 30746 - protein, 18 aa, Homo sapiens
  CDR3 for beta chain variable domain of TCR clone 15373 (TRBV11-2, TRBJ2-3)
CASSLGGASRGAHNTQYF

SEQ ID NO: 30747 - protein, 14 aa, Homo sapiens
  CDR3 for alpha chain variable domain of TCR clone 15374 (TRAV26-1, TRAJ44)
CIARTTGTASKLTF

SEQ ID NO: 30748 - protein, 12 aa, Homo sapiens
  CDR3 for beta chain variable domain of TCR clone 15374 (TRBV11-2, TRBJ2-1)
CASSPGNNEQFF

SEQ ID NO: 30749 - protein, 16 aa, Homo sapiens
  CDR3 for alpha chain variable domain of TCR clone 15375 (TRAV21, TRAJ37)
CAVRTAGSSNTGNLIF

SEQ ID NO: 30750 - protein, 13 aa, Homo sapiens
  CDR3 for beta chain variable domain of TCR clone 15375 (TRBV7-9, TRBJ2-5)
CASLPSGRETQYF

SEQ ID NO: 30751 - protein, 15 aa, Homo sapiens
  CDR3 for alpha chain variable domain of TCR clone 15376 (TRAV12-1, TRAJ48)
CVVNPLGFGNEKLTF

SEQ ID NO: 30752 - protein, 17 aa, Homo sapiens
  CDR3 for beta chain variable domain of TCR clone 15376 (TRBV13, TRBJ2-3)
CASSLSRVAGGRNTQYF

SEQ ID NO: 30753 - protein, 11 aa, Homo sapiens
  CDR3 for alpha chain variable domain of TCR clone 15377 (TRAV12-2, TRAJ36)
CAVKDNLFFGT

SEQ ID NO: 30754 - protein, 15 aa, Homo sapiens
  CDR3 for beta chain variable domain of TCR clone 15377 (TRBV28, TRBJ2-2)
CASTVAGANTGELFF

SEQ ID NO: 30755 - protein, 18 aa, Homo sapiens
  CDR3 for alpha chain variable domain of TCR clone 15378 (TRAV13-1, TRAJ52)
CAAKNPNAGGTSYGKLTF

SEQ ID NO: 30756 - protein, 14 aa, Homo sapiens
  CDR3 for beta chain variable domain of TCR clone 15378 (TRBV12-5, TRBJ2-5)
CASGSRTHQETQYF

SEQ ID NO: 30757 - protein, 10 aa, Homo sapiens
  CDR3 for alpha chain variable domain of TCR clone 15379 (TRAV26-1, )
CIVSHRVEGF

SEQ ID NO: 30758 - protein, 14 aa, Homo sapiens
  CDR3 for beta chain variable domain of TCR clone 15379 (TRBV20-1, TRBJ2-7)
CSAWTALSSYEQYF

SEQ ID NO: 30759 - protein, 10 aa, Homo sapiens
  CDR3 for alpha chain variable domain of TCR clone 15380 (TRAV23/DV6, TRAJ57)
CAASSTLSQS

SEQ ID NO: 30760 - protein, 14 aa, Homo sapiens
  CDR3 for beta chain variable domain of TCR clone 15380 (TRBV25-1, TRBJ1-1)
CASTHLGGNTEAFF

SEQ ID NO: 30761 - protein, 16 aa, Homo sapiens
  CDR3 for alpha chain variable domain of TCR clone 15381 (TRAV30, TRAJ24)
CGTEIVDADSWGKFQF

SEQ ID NO: 30762 - protein, 14 aa, Homo sapiens
  CDR3 for beta chain variable domain of TCR clone 15381 (TRBV7-9, TRBJ2-4)
CASSLAMGGNMQYF

SEQ ID NO: 30763 - protein, 13 aa, Homo sapiens
  CDR3 for alpha chain variable domain of TCR clone 15382 (TRAV13-2, TRAJ48)
CAEMDFGNEKLTF

SEQ ID NO: 30764 - protein, 15 aa, Homo sapiens
  CDR3 for beta chain variable domain of TCR clone 15382 (TRBV7-9, TRBJ1-6)
CASSSPGRGNSPLHS

SEQ ID NO: 30765 - protein, 15 aa, Homo sapiens
  CDR3 for alpha chain variable domain of TCR clone 15383 (TRAV27, TRAJ38)
CAARRNAGNNRKLIW

SEQ ID NO: 30766 - protein, 13 aa, Homo sapiens
  CDR3 for beta chain variable domain of TCR clone 15383 (TRBV12-5, TRBJ2-3)
CASGDRQSDTQYS

SEQ ID NO: 30767 - protein, 15 aa, Homo sapiens
  CDR3 for alpha chain variable domain of TCR clone 15384 (TRAV8-4, TRAJ34)
CAVSHLSYNTDKLIF

SEQ ID NO: 30768 - protein, 15 aa, Homo sapiens
  CDR3 for beta chain variable domain of TCR clone 15384 (TRBV2, TRBJ2-1)
CASRARDGSYNEQFF

SEQ ID NO: 30769 - protein, 13 aa, Homo sapiens
  CDR3 for alpha chain variable domain of TCR clone 15385 (TRAV21, TRAJ57)
CAVTQGGSEKLVF

SEQ ID NO: 30770 - protein, 16 aa, Homo sapiens
  CDR3 for beta chain variable domain of TCR clone 15385 (TRBV29-1, TRBJ2-7)
CGVEDAEDGTAYEQYF

SEQ ID NO: 30771 - protein, 17 aa, Homo sapiens
  CDR3 for alpha chain variable domain of TCR clone 15386 (TRAV3, TRAJ6)
CAVRDGPRAGGSYIPTF

SEQ ID NO: 30772 - protein, 14 aa, Homo sapiens
  CDR3 for beta chain variable domain of TCR clone 15386 (TRBV7-2, TRBJ2-7)
CSSSPKTSFYEQYF

SEQ ID NO: 30773 - protein, 12 aa, Homo sapiens
  CDR3 for alpha chain variable domain of TCR clone 15387 (TRAV12-3, TRAJ17)
CAMTLTGNKLTF

SEQ ID NO: 30774 - protein, 15 aa, Homo sapiens
  CDR3 for beta chain variable domain of TCR clone 15387 (TRBV20-1, TRBJ2-7)
WSARDRVSGMDEQYF

SEQ ID NO: 30775 - protein, 16 aa, Homo sapiens
  CDR3 for alpha chain variable domain of TCR clone 15388 (TRAV8-3, TRAJ8)
CAVPRDGNTGFQKLVF

SEQ ID NO: 30776 - protein, 15 aa, Homo sapiens
  CDR3 for beta chain variable domain of TCR clone 15388 (TRBV6-1, TRBJ2-6)
CASSSRPSGANALTF

SEQ ID NO: 30777 - protein, 11 aa, Homo sapiens
  CDR3 for alpha chain variable domain of TCR clone 15389 (TRAV1-2, TRAJ11)
CAVRGYSTLTF

SEQ ID NO: 30778 - protein, 15 aa, Homo sapiens
  CDR3 for beta chain variable domain of TCR clone 15389 (TRBV3-1, TRBJ2-2)
CTSSQDWTRAGELFF

SEQ ID NO: 30779 - protein, 15 aa, Homo sapiens
  CDR3 for alpha chain variable domain of TCR clone 15390 (TRAV12-3, TRAJ6)
CAMSATTGRSYIPTF

SEQ ID NO: 30780 - protein, 16 aa, Homo sapiens
  CDR3 for beta chain variable domain of TCR clone 15390 (TRBV20-1, TRBJ1-2)
CSASMGQGVANYGYTF

SEQ ID NO: 30781 - protein, 12 aa, Homo sapiens
  CDR3 for alpha chain variable domain of TCR clone 15391 (TRAV8-6, TRAJ7)
CAVFYGSNRLAF

SEQ ID NO: 30782 - protein, 14 aa, Homo sapiens
  CDR3 for beta chain variable domain of TCR clone 15391 (TRBV19, TRBJ2-1)
CASSRLASINEQFF

SEQ ID NO: 30783 - protein, 13 aa, Homo sapiens
  CDR3 for alpha chain variable domain of TCR clone 15392 (TRAV26-1, TRAJ39)
CIVRVVAGNMLTF

SEQ ID NO: 30784 - protein, 14 aa, Homo sapiens
  CDR3 for beta chain variable domain of TCR clone 15392 (TRBV20-1, TRBJ2-5)
CSARRQGIRETQYL

SEQ ID NO: 30785 - protein, 13 aa, Homo sapiens
  CDR3 for alpha chain variable domain of TCR clone 15393 (TRAV13-1, TRAJ5)
CAASDTGGRALTF

SEQ ID NO: 30786 - protein, 12 aa, Homo sapiens
  CDR3 for beta chain variable domain of TCR clone 15393 (TRBV28, TRBJ2-3)
CASSLYRDTQYF

SEQ ID NO: 30787 - protein, 13 aa, Homo sapiens
  CDR3 for alpha chain variable domain of TCR clone 15394 (TRAV2, TRAJ40)
CAVVTSGTYKYIF

SEQ ID NO: 30788 - protein, 15 aa, Homo sapiens
  CDR3 for beta chain variable domain of TCR clone 15394 (TRBV11-3, TRBJ2-3)
RASLKDGREGDTQYF

SEQ ID NO: 30789 - protein, 12 aa, Homo sapiens
  CDR3 for alpha chain variable domain of TCR clone 15395 (TRAV8-3, TRAJ20)
CSVGANDYKLSF

SEQ ID NO: 30790 - protein, 16 aa, Homo sapiens
  CDR3 for beta chain variable domain of TCR clone 15395 (TRBV19, TRBJ2-2)
CASRSPGTGATGELFF

SEQ ID NO: 30791 - protein, 13 aa, Homo sapiens
  CDR3 for alpha chain variable domain of TCR clone 15396 (TRAV21, TRAJ57)
CAVTQGGSEKLVF

SEQ ID NO: 30792 - protein, 16 aa, Homo sapiens
  CDR3 for beta chain variable domain of TCR clone 15396 (TRBV29-1, TRBJ2-7)
CSVEDAEDGAAYEQYF

SEQ ID NO: 30793 - protein, 15 aa, Homo sapiens
  CDR3 for alpha chain variable domain of TCR clone 15397 (TRAV27, TRAJ38)
CAARRNAGNNRKLIW

SEQ ID NO: 30794 - protein, 15 aa, Homo sapiens
  CDR3 for beta chain variable domain of TCR clone 15397 (TRBV27, TRBJ2-1)
CASSNGGGSSNEQFF

SEQ ID NO: 30795 - protein, 18 aa, Homo sapiens
  CDR3 for alpha chain variable domain of TCR clone 15398 (TRAV21, TRAJ52)
CAVRPSPAGGTSYGKLTF

SEQ ID NO: 30796 - protein, 13 aa, Homo sapiens
  CDR3 for beta chain variable domain of TCR clone 15398 (TRBV7-3, TRBJ1-1)
CASSQDWGAEAFS

SEQ ID NO: 30797 - protein, 15 aa, Homo sapiens
  CDR3 for alpha chain variable domain of TCR clone 15399 (TRAV3, TRAJ5)
SAVRDLDTGRRALTF

SEQ ID NO: 30798 - protein, 13 aa, Homo sapiens
  CDR3 for beta chain variable domain of TCR clone 15399 (TRBV12-4, TRBJ2-7)
CASSPTETYEQYF

SEQ ID NO: 30799 - protein, 17 aa, Homo sapiens
  CDR3 for alpha chain variable domain of TCR clone 15400 (TRAV23/DV6, TRAJ12)
CAAIDLGAMDSSYKLIF

SEQ ID NO: 30800 - protein, 14 aa, Homo sapiens
  CDR3 for beta chain variable domain of TCR clone 15400 (TRBV20-1, TRBJ2-1)
CSARRGGSYNEQFF

SEQ ID NO: 30801 - protein, 15 aa, Homo sapiens
  CDR3 for alpha chain variable domain of TCR clone 15401 (TRAV12-3, TRAJ6)
CAMRATTGGSYIPTF

SEQ ID NO: 30802 - protein, 16 aa, Homo sapiens
  CDR3 for beta chain variable domain of TCR clone 15401 (TRBV20-1, TRBJ1-2)
CSASMGQGVANYGYTF

SEQ ID NO: 30803 - protein, 13 aa, Homo sapiens
  CDR3 for alpha chain variable domain of TCR clone 15402 (TRAV21, TRAJ57)
CAATQGGSEKLVF

SEQ ID NO: 30804 - protein, 16 aa, Homo sapiens
  CDR3 for beta chain variable domain of TCR clone 15402 (TRBV29-1, TRBJ2-7)
CSVEDAEDGTAYEQYF

SEQ ID NO: 30805 - protein, 15 aa, Homo sapiens
  CDR3 for alpha chain variable domain of TCR clone 15403 (TRAV26-1, TRAJ29)
CIVRVEESGNTPLVF

SEQ ID NO: 30806 - protein, 15 aa, Homo sapiens
  CDR3 for beta chain variable domain of TCR clone 15403 (TRBV7-9, TRBJ1-5)
CASSQGHQPNQPQHF

SEQ ID NO: 30807 - protein, 12 aa, Homo sapiens
  CDR3 for alpha chain variable domain of TCR clone 15404 (TRAV20, TRAJ49)
CAVNKDGNQFYF

SEQ ID NO: 30808 - protein, 14 aa, Homo sapiens
  CDR3 for beta chain variable domain of TCR clone 15404 (TRBV6-5, TRBJ2-7)
CASSLFPGGYEQYF

SEQ ID NO: 30809 - protein, 13 aa, Homo sapiens
  CDR3 for alpha chain variable domain of TCR clone 15405 (TRAV39, TRAJ58)
CAGEETSGPRLTF

SEQ ID NO: 30810 - protein, 13 aa, Homo sapiens
  CDR3 for beta chain variable domain of TCR clone 15405 (TRBV15, TRBJ2-7)
CATSTTGHYEQYF

SEQ ID NO: 30811 - protein, 17 aa, Homo sapiens
  CDR3 for alpha chain variable domain of TCR clone 15406 (TRAV26-2, TRAJ42)
YILRDVGYGGSQGNLIF

SEQ ID NO: 30812 - protein, 16 aa, Homo sapiens
  CDR3 for beta chain variable domain of TCR clone 15406 (TRBV12-4, TRBJ2-7)
CASSLIGGTGTYEQYF

SEQ ID NO: 30813 - protein, 18 aa, Homo sapiens
  CDR3 for alpha chain variable domain of TCR clone 15407 (TRAV13-1, TRAJ52)
CAASKRSSGGTSYGKLTF

SEQ ID NO: 30814 - protein, 13 aa, Homo sapiens
  CDR3 for beta chain variable domain of TCR clone 15407 (TRBV12-4, TRBJ1-2)
CASSLRQGKGYTF

SEQ ID NO: 30815 - protein, 14 aa, Homo sapiens
  CDR3 for alpha chain variable domain of TCR clone 15408 (TRAV1-2, TRAJ16)
CAVNRFSDGQKLLF

SEQ ID NO: 30816 - protein, 13 aa, Homo sapiens
  CDR3 for beta chain variable domain of TCR clone 15408 (TRBV7-9, TRBJ1-2)
CASSLKQNYGYAF

SEQ ID NO: 30817 - protein, 16 aa, Homo sapiens
  CDR3 for alpha chain variable domain of TCR clone 15409 (TRAV8-4, TRAJ44)
CAVSASLTGTASKLTF

SEQ ID NO: 30818 - protein, 11 aa, Homo sapiens
  CDR3 for beta chain variable domain of TCR clone 15409 (TRBV7-9, TRBJ2-5)
CASSLGETQYF

SEQ ID NO: 30819 - protein, 12 aa, Homo sapiens
  CDR3 for alpha chain variable domain of TCR clone 15410 (TRAV17, TRAJ12)
CATLRSSYKLIF

SEQ ID NO: 30820 - protein, 16 aa, Homo sapiens
  CDR3 for beta chain variable domain of TCR clone 15410 (TRBV28, TRBJ2-7)
CASSLFFETEGPEQYF

SEQ ID NO: 30821 - protein, 14 aa, Homo sapiens
  CDR3 for alpha chain variable domain of TCR clone 15411 (TRAV12-2, TRAJ17)
CAVLFKAAGNKLTF

SEQ ID NO: 30822 - protein, 17 aa, Homo sapiens
  CDR3 for beta chain variable domain of TCR clone 15411 (TRBV20-1, TRBJ2-2)
CSASGSGQGGLTGELFF

SEQ ID NO: 30823 - protein, 12 aa, Homo sapiens
  CDR3 for alpha chain variable domain of TCR clone 15412 (TRAV2, TRAJ9)
CAVGAGGFETIF

SEQ ID NO: 30824 - protein, 16 aa, Homo sapiens
  CDR3 for beta chain variable domain of TCR clone 15412 (TRBV13, TRBJ2-2)
CASSPRTGEHTGELFF

SEQ ID NO: 30825 - protein, 11 aa, Homo sapiens
  CDR3 for alpha chain variable domain of TCR clone 15413 (TRAV1-2, TRAJ20)
CAAANDYKLSF

SEQ ID NO: 30826 - protein, 18 aa, Homo sapiens
  CDR3 for beta chain variable domain of TCR clone 15413 (TRBV20-1, TRBJ2-6)
CSAETTPTHGSGANVLTF

SEQ ID NO: 30827 - protein, 14 aa, Homo sapiens
  CDR3 for alpha chain variable domain of TCR clone 15414 (TRAV12-1, TRAJ17)
CVVNYKAAGNKLTF

SEQ ID NO: 30828 - protein, 17 aa, Homo sapiens
  CDR3 for beta chain variable domain of TCR clone 15414 (TRBV20-1, TRBJ2-1)
CSASSSGLAESYNEQFF

SEQ ID NO: 30829 - protein, 14 aa, Homo sapiens
  CDR3 for alpha chain variable domain of TCR clone 15415 (TRAV1-2, TRAJ8)
CAVREDTGFQKFVF

SEQ ID NO: 30830 - protein, 15 aa, Homo sapiens
  CDR3 for beta chain variable domain of TCR clone 15415 (TRBV6-3, TRBJ2-7)
CASSSPGTVFYEQYF

SEQ ID NO: 30831 - protein, 17 aa, Homo sapiens
  CDR3 for alpha chain variable domain of TCR clone 15416 (TRAV3, TRAJ6)
CAVRDGPRAGGSYIPTF

SEQ ID NO: 30832 - protein, 13 aa, Homo sapiens
  CDR3 for beta chain variable domain of TCR clone 15416 (TRBV12-4, TRBJ2-7)
CASSPTETYEQYF

SEQ ID NO: 30833 - protein, 12 aa, Homo sapiens
  CDR3 for alpha chain variable domain of TCR clone 15417 (TRAV1-2, TRAJ26)
CAVSPYGQNFVF

SEQ ID NO: 30834 - protein, 14 aa, Homo sapiens
  CDR3 for beta chain variable domain of TCR clone 15417 (TRBV5-1, TRBJ2-7)
CASGFASGVNEQYF

SEQ ID NO: 30835 - protein, 18 aa, Homo sapiens
  CDR3 for alpha chain variable domain of TCR clone 15418 (TRAV13-1, TRAJ52)
CAAKNPNAGGTSYGKLTF

SEQ ID NO: 30836 - protein, 14 aa, Homo sapiens
  CDR3 for beta chain variable domain of TCR clone 15418 (TRBV6-1, TRBJ1-3)
CASVQGGGGNTIYF

SEQ ID NO: 30837 - protein, 15 aa, Homo sapiens
  CDR3 for alpha chain variable domain of TCR clone 15419 (TRAV12-1, TRAJ42)
CVVTRDGGSQGNLIF

SEQ ID NO: 30838 - protein, 14 aa, Homo sapiens
  CDR3 for beta chain variable domain of TCR clone 15419 (TRBV11-3, TRBJ2-3)
CASSLGGGANTQYF

SEQ ID NO: 30839 - protein, 14 aa, Homo sapiens
  CDR3 for alpha chain variable domain of TCR clone 15420 (TRAV1-2, TRAJ8)
SAVREDTGFQKLVF

SEQ ID NO: 30840 - protein, 13 aa, Homo sapiens
  CDR3 for beta chain variable domain of TCR clone 15420 (TRBV12-4, TRBJ2-5)
CASRKRGKETQYF

SEQ ID NO: 30841 - protein, 14 aa, Homo sapiens
  CDR3 for alpha chain variable domain of TCR clone 15421 (TRAV8-2, TRAJ37)
CVVSGSGNTGKLIF

SEQ ID NO: 30842 - protein, 15 aa, Homo sapiens
  CDR3 for beta chain variable domain of TCR clone 15421 (TRBV18, TRBJ2-7)
CASSPTVTPNYEQYF

SEQ ID NO: 30843 - protein, 14 aa, Homo sapiens
  CDR3 for alpha chain variable domain of TCR clone 15422 (TRAV12-3, TRAJ10)
SHLPLTGGGNKLTF

SEQ ID NO: 30844 - protein, 14 aa, Homo sapiens
  CDR3 for beta chain variable domain of TCR clone 15422 (TRBV6-1, TRBJ1-3)
CASVQGGGGDTIYF

SEQ ID NO: 30845 - protein, 13 aa, Homo sapiens
  CDR3 for alpha chain variable domain of TCR clone 15423 (TRAV26-2, TRAJ43)
CILRAVNNNDMRF

SEQ ID NO: 30846 - protein, 14 aa, Homo sapiens
  CDR3 for beta chain variable domain of TCR clone 15423 (TRBV7-2, TRBJ2-1)
CQHHGTGIYNEQFF

SEQ ID NO: 30847 - protein, 15 aa, Homo sapiens
  CDR3 for alpha chain variable domain of TCR clone 15424 (TRAV17, TRAJ56)
CATDANTGANSKLTF

SEQ ID NO: 30848 - protein, 14 aa, Homo sapiens
  CDR3 for beta chain variable domain of TCR clone 15424 (TRBV7-2, TRBJ2-7)
CASSPKTSFYEQYF

SEQ ID NO: 30849 - protein, 12 aa, Homo sapiens
  CDR3 for alpha chain variable domain of TCR clone 15425 (TRAV21, TRAJ33)
CAKMDSNYQLIW

SEQ ID NO: 30850 - protein, 16 aa, Homo sapiens
  CDR3 for beta chain variable domain of TCR clone 15425 (TRBV20-1, TRBJ2-2)
CSASASGIPGAGELFF

SEQ ID NO: 30851 - protein, 16 aa, Homo sapiens
  CDR3 for alpha chain variable domain of TCR clone 15426 (TRAV1-2, TRAJ10)
CAVRGVLTGGGNKLTF

SEQ ID NO: 30852 - protein, 16 aa, Homo sapiens
  CDR3 for beta chain variable domain of TCR clone 15426 (TRBV7-3, TRBJ2-1)
CASSKPLAGGYNEQFF

SEQ ID NO: 30853 - protein, 13 aa, Homo sapiens
  CDR3 for alpha chain variable domain of TCR clone 15427 (TRAV2, TRAJ40)
CAVVTPGTYKYIF

SEQ ID NO: 30854 - protein, 15 aa, Homo sapiens
  CDR3 for beta chain variable domain of TCR clone 15427 (TRBV11-3, TRBJ2-3)
CASLKDGREGDTQYF

SEQ ID NO: 30855 - protein, 18 aa, Homo sapiens
  CDR3 for alpha chain variable domain of TCR clone 15428 (TRAV13-1, TRAJ52)
CAAKNPNAGGTSYGKLTF

SEQ ID NO: 30856 - protein, 15 aa, Homo sapiens
  CDR3 for beta chain variable domain of TCR clone 15428 (TRBV6-1, TRBJ2-3)
CASSERGGITDTRYF

SEQ ID NO: 30857 - protein, 11 aa, Homo sapiens
  CDR3 for alpha chain variable domain of TCR clone 15429 (TRAV12-1, TRAJ30)
CVVNGQDKIIF

SEQ ID NO: 30858 - protein, 12 aa, Homo sapiens
  CDR3 for beta chain variable domain of TCR clone 15429 (TRBV27, TRBJ2-2)
CASKLFTGEMFF

SEQ ID NO: 30859 - protein, 13 aa, Homo sapiens
  CDR3 for alpha chain variable domain of TCR clone 15430 (TRAV21, TRAJ57)
CAVTQGGSEKLVS

SEQ ID NO: 30860 - protein, 16 aa, Homo sapiens
  CDR3 for beta chain variable domain of TCR clone 15430 (TRBV29-1, TRBJ2-7)
CSVEDAEDGTAYEQYF

SEQ ID NO: 30861 - protein, 15 aa, Homo sapiens
  CDR3 for alpha chain variable domain of TCR clone 15431 (TRAV26-1, TRAJ44)
CIVRANTGTASKPTF

SEQ ID NO: 30862 - protein, 16 aa, Homo sapiens
  CDR3 for beta chain variable domain of TCR clone 15431 (TRBV7-7, TRBJ2-1)
CASSLASGTSYNEQFF

SEQ ID NO: 30863 - protein, 18 aa, Homo sapiens
  CDR3 for alpha chain variable domain of TCR clone 15432 (TRAV35, TRAJ28)
CAGHNYPLSGAGSYQLTF

SEQ ID NO: 30864 - protein, 12 aa, Homo sapiens
  CDR3 for beta chain variable domain of TCR clone 15432 (TRBV7-9, TRBJ1-1)
CASSSEGTEAFF

SEQ ID NO: 30865 - protein, 14 aa, Homo sapiens
  CDR3 for alpha chain variable domain of TCR clone 15433 (TRAV26-1, TRAJ39)
CIVRCSRAGNMLTF

SEQ ID NO: 30866 - protein, 15 aa, Homo sapiens
  CDR3 for beta chain variable domain of TCR clone 15433 (TRBV7-9, TRBJ1-5)
CASSQGHQPNQPQHF

SEQ ID NO: 30867 - protein, 14 aa, Homo sapiens
  CDR3 for alpha chain variable domain of TCR clone 15434 (TRAV2, TRAJ37)
CAVDFTSNTGKLIF

SEQ ID NO: 30868 - protein, 15 aa, Homo sapiens
  CDR3 for beta chain variable domain of TCR clone 15434 (TRBV20-1, TRBJ2-7)
CSARDRVSGMDEQYF

SEQ ID NO: 30869 - protein, 14 aa, Homo sapiens
  CDR3 for alpha chain variable domain of TCR clone 15435 (TRAV8-3, TRAJ4)
CAVSAAGGYNKLIF

SEQ ID NO: 30870 - protein, 15 aa, Homo sapiens
  CDR3 for beta chain variable domain of TCR clone 15435 (TRBV6-5, TRBJ2-1)
CASSYDAGAGNEQFF

SEQ ID NO: 30871 - protein, 13 aa, Homo sapiens
  CDR3 for alpha chain variable domain of TCR clone 15436 (TRAV2, TRAJ40)
CAVVTSGTYKYIF

SEQ ID NO: 30872 - protein, 16 aa, Homo sapiens
  CDR3 for beta chain variable domain of TCR clone 15436 (TRBV7-6, TRBJ2-1)
CIAVPAAWGGADEQFF

SEQ ID NO: 30873 - protein, 14 aa, Homo sapiens
  CDR3 for alpha chain variable domain of TCR clone 15437 (TRAV13-2, TRAJ43)
CAEIPTYNNNDMRF

SEQ ID NO: 30874 - protein, 15 aa, Homo sapiens
  CDR3 for beta chain variable domain of TCR clone 15437 (TRBV7-9, TRBJ2-2)
CASGPLDTFPGGLFF

SEQ ID NO: 30875 - protein, 13 aa, Homo sapiens
  CDR3 for alpha chain variable domain of TCR clone 15438 (TRAV8-4, TRAJ9)
CAVSETGGFKTIF

SEQ ID NO: 30876 - protein, 14 aa, Homo sapiens
  CDR3 for beta chain variable domain of TCR clone 15438 (TRBV18, TRBJ2-3)
CASSGLVDTDTQYF

SEQ ID NO: 30877 - protein, 17 aa, Homo sapiens
  CDR3 for alpha chain variable domain of TCR clone 15439 (TRAV8-6, TRAJ58)
CAVSSWVGETSGSRLTL

SEQ ID NO: 30878 - protein, 14 aa, Homo sapiens
  CDR3 for beta chain variable domain of TCR clone 15439 (TRBV4-2, TRBJ2-1)
CASGLDRAYNEQFF

SEQ ID NO: 30879 - protein, 15 aa, Homo sapiens
  CDR3 for alpha chain variable domain of TCR clone 15440 (TRAV12-2, TRAJ43)
CAFDMRFGAGTRLTV

SEQ ID NO: 30880 - protein, 18 aa, Homo sapiens
  CDR3 for beta chain variable domain of TCR clone 15440 (TRBV20-1, TRBJ2-3)
CSASGLAGGPGTTDTQYL

SEQ ID NO: 30881 - protein, 15 aa, Homo sapiens
  CDR3 for alpha chain variable domain of TCR clone 15441 (TRAV17, TRAJ45)
CATAELGGGADGLTF

SEQ ID NO: 30882 - protein, 14 aa, Homo sapiens
  CDR3 for beta chain variable domain of TCR clone 15441 (TRBV3-1, TRBJ2-5)
CASSQAVRRETQYF

SEQ ID NO: 30883 - protein, 14 aa, Homo sapiens
  CDR3 for alpha chain variable domain of TCR clone 15442 (TRAV12-2, TRAJ13)
CAVKKTGGYQKDTF

SEQ ID NO: 30884 - protein, 15 aa, Homo sapiens
  CDR3 for beta chain variable domain of TCR clone 15442 (TRBV27, TRBJ2-1)
CASSNGGGSSNEQFF

SEQ ID NO: 30885 - protein, 18 aa, Homo sapiens
  CDR3 for alpha chain variable domain of TCR clone 15443 (TRAV21, TRAJ52)
YAVRPSPAGGTSYGKLTF

SEQ ID NO: 30886 - protein, 17 aa, Homo sapiens
  CDR3 for beta chain variable domain of TCR clone 15443 (TRBV13, TRBJ2-3)
CASSLSRVAGGRNTQYF

SEQ ID NO: 30887 - protein, 14 aa, Homo sapiens
  CDR3 for alpha chain variable domain of TCR clone 15444 (TRAV38-1, TRAJ45)
CASHSGGGSDGLTF

SEQ ID NO: 30888 - protein, 13 aa, Homo sapiens
  CDR3 for beta chain variable domain of TCR clone 15444 (TRBV10-3, TRBJ1-2)
CAISERDSYGYTF

SEQ ID NO: 30889 - protein, 12 aa, Homo sapiens
  CDR3 for alpha chain variable domain of TCR clone 15445 (TRAV8-3, TRAJ26)
CAGDNYGQNFVF

SEQ ID NO: 30890 - protein, 14 aa, Homo sapiens
  CDR3 for beta chain variable domain of TCR clone 15445 (TRBV7-2, TRBJ2-7)
CASSPKTSFYEQYF

SEQ ID NO: 30891 - protein, 13 aa, Homo sapiens
  CDR3 for alpha chain variable domain of TCR clone 15446 (TRAV2, TRAJ40)
CAVVTSGTYEYIF

SEQ ID NO: 30892 - protein, 15 aa, Homo sapiens
  CDR3 for beta chain variable domain of TCR clone 15446 (TRBV11-3, TRBJ2-3)
CASLKDGREGDTQYF

SEQ ID NO: 30893 - protein, 14 aa, Homo sapiens
  CDR3 for alpha chain variable domain of TCR clone 15447 (TRAV10, TRAJ20)
CVVSLSSNDYKLSF

SEQ ID NO: 30894 - protein, 11 aa, Homo sapiens
  CDR3 for beta chain variable domain of TCR clone 15447 (TRBV29-1, TRBJ2-5)
CSEDRTGTQYF

SEQ ID NO: 30895 - protein, 18 aa, Homo sapiens
  CDR3 for alpha chain variable domain of TCR clone 15448 (TRAV21, TRAJ52)
CAVRPSPAGGTSYGKLTF

SEQ ID NO: 30896 - protein, 17 aa, Homo sapiens
  CDR3 for beta chain variable domain of TCR clone 15448 (TRBV13, TRBJ2-3)
CASSLCRVAGGRNTQYF

SEQ ID NO: 30897 - protein, 14 aa, Homo sapiens
  CDR3 for alpha chain variable domain of TCR clone 15449 (TRAV2, TRAJ37)
CAVNFTSNTGKLIF

SEQ ID NO: 30898 - protein, 15 aa, Homo sapiens
  CDR3 for beta chain variable domain of TCR clone 15449 (TRBV20-1, TRBJ1-1)
CSASRGVTGNTEAFF

SEQ ID NO: 30899 - protein, 12 aa, Homo sapiens
  CDR3 for alpha chain variable domain of TCR clone 15450 (TRAV27, TRAJ9)
CAGESGGFKTIF

SEQ ID NO: 30900 - protein, 18 aa, Homo sapiens
  CDR3 for beta chain variable domain of TCR clone 15450 (TRBV10-2, TRBJ2-2)
CISAPAGHRQADAGELFF

SEQ ID NO: 30901 - protein, 14 aa, Homo sapiens
  CDR3 for alpha chain variable domain of TCR clone 15451 (TRAV38-1, TRAJ40)
CALRPTSGTYKYIF

SEQ ID NO: 30902 - protein, 14 aa, Homo sapiens
  CDR3 for beta chain variable domain of TCR clone 15451 (TRBV25-1, TRBJ1-1)
CASTHLGGSTEAFF

SEQ ID NO: 30903 - protein, 12 aa, Homo sapiens
  CDR3 for alpha chain variable domain of TCR clone 15452 (TRAV13-1, TRAJ21)
CAAKEGFNKFYF

SEQ ID NO: 30904 - protein, 22 aa, Homo sapiens
  CDR3 for beta chain variable domain of TCR clone 15452 (TRBV29-1, TRBJ2-5)
TVSNMSPEDSSIYLCSAGTQYF

SEQ ID NO: 30905 - protein, 12 aa, Homo sapiens
  CDR3 for alpha chain variable domain of TCR clone 15453 (TRAV36/DV7, TRAJ54)
CAVVRGAQKLVF

SEQ ID NO: 30906 - protein, 12 aa, Homo sapiens
  CDR3 for beta chain variable domain of TCR clone 15453 (TRBV12-5, TRBJ2-5)
CASGQGVETQYF

SEQ ID NO: 30907 - protein, 12 aa, Homo sapiens
  CDR3 for alpha chain variable domain of TCR clone 15454 (TRAV12-1, TRAJ40)
CVVYSGTYKYIF

SEQ ID NO: 30908 - protein, 13 aa, Homo sapiens
  CDR3 for beta chain variable domain of TCR clone 15454 (TRBV6-5, TRBJ2-2)
CASSLPGVGELFF

SEQ ID NO: 30909 - protein, 16 aa, Homo sapiens
  CDR3 for alpha chain variable domain of TCR clone 15455 (TRAV21, TRAJ52)
CAVTNAGGTSYGELTF

SEQ ID NO: 30910 - protein, 13 aa, Homo sapiens
  CDR3 for beta chain variable domain of TCR clone 15455 (TRBV20-1, TRBJ2-3)
CSARLAGTDTQYF

SEQ ID NO: 30911 - protein, 14 aa, Homo sapiens
  CDR3 for alpha chain variable domain of TCR clone 15456 (TRAV12-2, TRAJ40)
CAVKIPSGTYKYIF

SEQ ID NO: 30912 - protein, 14 aa, Homo sapiens
  CDR3 for beta chain variable domain of TCR clone 15456 (TRBV20-1, TRBJ1-1)
CSAQTRTGGTEAFF

SEQ ID NO: 30913 - protein, 15 aa, Homo sapiens
  CDR3 for alpha chain variable domain of TCR clone 15457 (TRAV14/DV4, TRAJ54)
CAMREHFQGAQKLVF

SEQ ID NO: 30914 - protein, 14 aa, Homo sapiens
  CDR3 for beta chain variable domain of TCR clone 15457 (TRBV6-1, TRBJ1-3)
CASVQGGGGNTIYF

SEQ ID NO: 30915 - protein, 13 aa, Homo sapiens
  CDR3 for alpha chain variable domain of TCR clone 15458 (TRAV12-3, TRAJ43)
CAMIRPNNNDIRF

SEQ ID NO: 30916 - protein, 12 aa, Homo sapiens
  CDR3 for beta chain variable domain of TCR clone 15458 (TRBV11-2, TRBJ2-5)
CASSLGQETQYF

SEQ ID NO: 30917 - protein, 10 aa, Homo sapiens
  CDR3 for alpha chain variable domain of TCR clone 15459 (TRAV26-1, TRAJ22)
SSGSARQLTF

SEQ ID NO: 30918 - protein, 13 aa, Homo sapiens
  CDR3 for beta chain variable domain of TCR clone 15459 (TRBV7-9, TRBJ1-2)
CASSLKQNYGYTF

SEQ ID NO: 30919 - protein, 15 aa, Homo sapiens
  CDR3 for alpha chain variable domain of TCR clone 15460 (TRAV8-3, TRAJ45)
CASSYSGGGADGLTF

SEQ ID NO: 30920 - protein, 15 aa, Homo sapiens
  CDR3 for beta chain variable domain of TCR clone 15460 (TRBV6-3, TRBJ2-7)
CASSSPGTVFYEQYF

SEQ ID NO: 30921 - protein, 12 aa, Homo sapiens
  CDR3 for alpha chain variable domain of TCR clone 15461 (TRAV21, TRAJ33)
CAKMDSNYQLIW

SEQ ID NO: 30922 - protein, 13 aa, Homo sapiens
  CDR3 for beta chain variable domain of TCR clone 15461 (TRBV7-9, TRBJ1-2)
CASSLKQNYGYTF

SEQ ID NO: 30923 - protein, 14 aa, Homo sapiens
  CDR3 for alpha chain variable domain of TCR clone 15462 (TRAV38-1, TRAJ45)
CACYSGGGADGLTF

SEQ ID NO: 30924 - protein, 20 aa, Homo sapiens
  CDR3 for beta chain variable domain of TCR clone 15462 (TRBV28, TRBJ2-1)
CASTPIGRSPGLAGGNEQFF

SEQ ID NO: 30925 - protein, 12 aa, Homo sapiens
  CDR3 for alpha chain variable domain of TCR clone 15463 (TRAV13-2, TRAJ24)
CAETDSWGKLQF

SEQ ID NO: 30926 - protein, 17 aa, Homo sapiens
  CDR3 for beta chain variable domain of TCR clone 15463 (TRBV12-4, TRBJ2-5)
CASSLSSTTGGRETQYF

SEQ ID NO: 30927 - protein, 11 aa, Homo sapiens
  CDR3 for alpha chain variable domain of TCR clone 15464 (TRAV3, TRAJ21)
CPVGNFNKFYF

SEQ ID NO: 30928 - protein, 16 aa, Homo sapiens
  CDR3 for beta chain variable domain of TCR clone 15464 (TRBV19, TRBJ2-1)
CASSKAGPSSYNEQFF

SEQ ID NO: 30929 - protein, 13 aa, Homo sapiens
  CDR3 for alpha chain variable domain of TCR clone 15465 (TRAV3, TRAJ27)
CAVRPLGAGTSTF

SEQ ID NO: 30930 - protein, 13 aa, Homo sapiens
  CDR3 for beta chain variable domain of TCR clone 15465 (TRBV7-9, TRBJ2-3)
CASSPGSTDTQYF

SEQ ID NO: 30931 - protein, 14 aa, Homo sapiens
  CDR3 for alpha chain variable domain of TCR clone 15466 (TRAV1-2, TRAJ15)
CAVRDRQAGTALIF

SEQ ID NO: 30932 - protein, 13 aa, Homo sapiens
  CDR3 for beta chain variable domain of TCR clone 15466 (TRBV20-1, TRBJ2-7)
CSATHTSGYEQYF

SEQ ID NO: 30933 - protein, 18 aa, Homo sapiens
  CDR3 for alpha chain variable domain of TCR clone 15467 (TRAV26-1, TRAJ23)
CIVRVGLEVWNQGGKLIF

SEQ ID NO: 30934 - protein, 15 aa, Homo sapiens
  CDR3 for beta chain variable domain of TCR clone 15467 (TRBV12-4, TRBJ2-5)
CQQFFVRGRQETQYF

SEQ ID NO: 30935 - protein, 14 aa, Homo sapiens
  CDR3 for alpha chain variable domain of TCR clone 15468 (TRAV2, TRAJ37)
CAVDFTSNTGKLII

SEQ ID NO: 30936 - protein, 15 aa, Homo sapiens
  CDR3 for beta chain variable domain of TCR clone 15468 (TRBV20-1, TRBJ1-1)
CSASRGVTGNTEAFF

SEQ ID NO: 30937 - protein, 13 aa, Homo sapiens
  CDR3 for alpha chain variable domain of TCR clone 15469 (TRAV23/DV6, TRAJ16)
CAASGSDGQKLLF

SEQ ID NO: 30938 - protein, 17 aa, Homo sapiens
  CDR3 for beta chain variable domain of TCR clone 15469 (TRBV5-1, TRBJ1-1)
CASSLQGAGTLKLSLDK

SEQ ID NO: 30939 - protein, 20 aa, Homo sapiens
  CDR3 for alpha chain variable domain of TCR clone 15470 (TRAV21, TRAJ4)
AASQPGDSATLAGGYNKLIF

SEQ ID NO: 30940 - protein, 19 aa, Homo sapiens
  CDR3 for beta chain variable domain of TCR clone 15470 (TRBV18, TRBJ1-3)
CASSPLSRTGMSSGNTMYF

SEQ ID NO: 30941 - protein, 12 aa, Homo sapiens
  CDR3 for alpha chain variable domain of TCR clone 15471 (TRAV12-1, TRAJ40)
CVVYSGTYKYIF

SEQ ID NO: 30942 - protein, 18 aa, Homo sapiens
  CDR3 for beta chain variable domain of TCR clone 15471 (TRBV11-2, TRBJ2-3)
CASSLGGASRGAPSTQYF

SEQ ID NO: 30943 - protein, 14 aa, Homo sapiens
  CDR3 for alpha chain variable domain of TCR clone 15472 (TRAV1-2, TRAJ16)
CAVNRFSDGQKLLF

SEQ ID NO: 30944 - protein, 15 aa, Homo sapiens
  CDR3 for beta chain variable domain of TCR clone 15472 (TRBV9, TRBJ1-6)
CASSVAGTGDSPPHF

SEQ ID NO: 30945 - protein, 16 aa, Homo sapiens
  CDR3 for alpha chain variable domain of TCR clone 15473 (TRAV1-2, TRAJ10)
CAVRGVLTGGGNKLTF

SEQ ID NO: 30946 - protein, 12 aa, Homo sapiens
  CDR3 for beta chain variable domain of TCR clone 15473 (TRBV7-8, TRBJ2-7)
CASSLGDREQYV

SEQ ID NO: 30947 - protein, 13 aa, Homo sapiens
  CDR3 for alpha chain variable domain of TCR clone 15474 (TRAV13-1, TRAJ5)
CSASDTGRRALTF

SEQ ID NO: 30948 - protein, 12 aa, Homo sapiens
  CDR3 for beta chain variable domain of TCR clone 15474 (TRBV28, TRBJ2-3)
CASSLYRDTQYF

SEQ ID NO: 30949 - protein, 14 aa, Homo sapiens
  CDR3 for alpha chain variable domain of TCR clone 15475 (TRAV2, TRAJ37)
CAVDFTSNIGKLIF

SEQ ID NO: 30950 - protein, 15 aa, Homo sapiens
  CDR3 for beta chain variable domain of TCR clone 15475 (TRBV20-1, TRBJ1-1)
CSASRGVTGNTEAFF

SEQ ID NO: 30951 - protein, 11 aa, Homo sapiens
  CDR3 for alpha chain variable domain of TCR clone 15476 (TRAV3, TRAJ21)
CAVGNFNKFYF

SEQ ID NO: 30952 - protein, 16 aa, Homo sapiens
  CDR3 for beta chain variable domain of TCR clone 15476 (TRBV19, TRBJ2-1)
CASSKAGPSSDNEQFF

SEQ ID NO: 30953 - protein, 13 aa, Homo sapiens
  CDR3 for alpha chain variable domain of TCR clone 15477 (TRAV13-1, TRAJ15)
CAALYQAGTALIF

SEQ ID NO: 30954 - protein, 15 aa, Homo sapiens
  CDR3 for beta chain variable domain of TCR clone 15477 (TRBV5-1, TRBJ2-1)
CASSPPRAPYNEQFF

SEQ ID NO: 30955 - protein, 14 aa, Homo sapiens
  CDR3 for alpha chain variable domain of TCR clone 15478 (TRAV17, TRAJ57)
CATDPQGGSEKLVF

SEQ ID NO: 30956 - protein, 20 aa, Homo sapiens
  CDR3 for beta chain variable domain of TCR clone 15478 (TRBV7-8, TRBJ2-2)
CASSHLFPGPTIHITGELFF

SEQ ID NO: 30957 - protein, 20 aa, Homo sapiens
  CDR3 for alpha chain variable domain of TCR clone 15479 (TRAV12-1, TRAJ42)
SSVIQPPTSVKGGSQGNLIF

SEQ ID NO: 30958 - protein, 18 aa, Homo sapiens
  CDR3 for beta chain variable domain of TCR clone 15479 (TRBV11-2, TRBJ2-3)
CASSVGGASRGAPNTQYF

SEQ ID NO: 30959 - protein, 14 aa, Homo sapiens
  CDR3 for alpha chain variable domain of TCR clone 15480 (TRAV13-2, TRAJ17)
CAENSKAAGNKLTF

SEQ ID NO: 30960 - protein, 14 aa, Homo sapiens
  CDR3 for beta chain variable domain of TCR clone 15480 (TRBV7-2, TRBJ2-5)
CASSPGGNQETQYF

SEQ ID NO: 30961 - protein, 14 aa, Homo sapiens
  CDR3 for alpha chain variable domain of TCR clone 15481 (TRAV8-4, TRAJ48)
CAVRETFGNEKLTF

SEQ ID NO: 30962 - protein, 14 aa, Homo sapiens
  CDR3 for beta chain variable domain of TCR clone 15481 (TRBV13, TRBJ2-7)
CASSLKGASYEQYF

SEQ ID NO: 30963 - protein, 16 aa, Homo sapiens
  CDR3 for alpha chain variable domain of TCR clone 15482 (TRAV30, TRAJ24)
CGTEIVDADSWGKFQF

SEQ ID NO: 30964 - protein, 15 aa, Homo sapiens
  CDR3 for beta chain variable domain of TCR clone 15482 (TRBV20-1, TRBJ2-4)
CSARDLTGGPNMQYF

SEQ ID NO: 30965 - protein, 12 aa, Homo sapiens
  CDR3 for alpha chain variable domain of TCR clone 15483 (TRAV13-2, TRAJ23)
CAERHRGGKLIF

SEQ ID NO: 30966 - protein, 16 aa, Homo sapiens
  CDR3 for beta chain variable domain of TCR clone 15483 (TRBV20-1, TRBJ1-4)
CGAPGQGLLTNEKLFF

SEQ ID NO: 30967 - protein, 13 aa, Homo sapiens
  CDR3 for alpha chain variable domain of TCR clone 15484 (TRAV8-3, TRAJ28)
CAVVAVGSYQLTF

SEQ ID NO: 30968 - protein, 14 aa, Homo sapiens
  CDR3 for beta chain variable domain of TCR clone 15484 (TRBV7-2, TRBJ2-7)
CASRSQGAAYEQYF

SEQ ID NO: 30969 - protein, 14 aa, Homo sapiens
  CDR3 for alpha chain variable domain of TCR clone 15485 (TRAV2, TRAJ37)
WAVDFTSNTGKLIF

SEQ ID NO: 30970 - protein, 15 aa, Homo sapiens
  CDR3 for beta chain variable domain of TCR clone 15485 (TRBV20-1, TRBJ1-1)
CSASRGVTGNTEAFF

SEQ ID NO: 30971 - protein, 16 aa, Homo sapiens
  CDR3 for alpha chain variable domain of TCR clone 15486 (TRAV8-4, TRAJ28)
CAVESNSGAGSYQLTF

SEQ ID NO: 30972 - protein, 15 aa, Homo sapiens
  CDR3 for beta chain variable domain of TCR clone 15486 (TRBV6-5, TRBJ2-1)
CASRRAQLSYNEQFF

SEQ ID NO: 30973 - protein, 12 aa, Homo sapiens
  CDR3 for alpha chain variable domain of TCR clone 15487 (TRAV12-1, TRAJ40)
CVVYSGTYKYIF

SEQ ID NO: 30974 - protein, 18 aa, Homo sapiens
  CDR3 for beta chain variable domain of TCR clone 15487 (TRBV11-2, TRBJ2-3)
CDSSLGGASRGAPNTQYF

SEQ ID NO: 30975 - protein, 14 aa, Homo sapiens
  CDR3 for alpha chain variable domain of TCR clone 15488 (TRAV2, TRAJ37)
CAVDFTSNTGKLIF

SEQ ID NO: 30976 - protein, 13 aa, Homo sapiens
  CDR3 for beta chain variable domain of TCR clone 15488 (TRBV7-8, TRBJ2-7)
CASSFAGLYEQYF

SEQ ID NO: 30977 - protein, 17 aa, Homo sapiens
  CDR3 for alpha chain variable domain of TCR clone 15489 (TRAV26-1, TRAJ12)
CTIASSELMDSSYKLIF

SEQ ID NO: 30978 - protein, 11 aa, Homo sapiens
  CDR3 for beta chain variable domain of TCR clone 15489 (TRBV7-9, TRBJ2-3)
CASSPPDTQYF

SEQ ID NO: 30979 - protein, 13 aa, Homo sapiens
  CDR3 for alpha chain variable domain of TCR clone 15490 (TRAV12-3, TRAJ54)
CAMSVQGAQKLVF

SEQ ID NO: 30980 - protein, 13 aa, Homo sapiens
  CDR3 for beta chain variable domain of TCR clone 15490 (TRBV2, TRBJ1-6)
CADSGSYNSPLHF

SEQ ID NO: 30981 - protein, 17 aa, Homo sapiens
  CDR3 for alpha chain variable domain of TCR clone 15491 (TRAV3, TRAJ42)
CAVRDRDYGGSQGNLIF

SEQ ID NO: 30982 - protein, 14 aa, Homo sapiens
  CDR3 for beta chain variable domain of TCR clone 15491 (TRBV5-4, TRBJ1-1)
CASSLDSRRDEAFF

SEQ ID NO: 30983 - protein, 15 aa, Homo sapiens
  CDR3 for alpha chain variable domain of TCR clone 15492 (TRAV3, TRAJ20)
CAVRDIKLRDYKLSF

SEQ ID NO: 30984 - protein, 15 aa, Homo sapiens
  CDR3 for beta chain variable domain of TCR clone 15492 (TRBV7-9, TRBJ1-6)
CASSSPGRGNSPLHF

SEQ ID NO: 30985 - protein, 15 aa, Homo sapiens
  CDR3 for alpha chain variable domain of TCR clone 15493 (TRAV8-2, TRAJ40)
CVVFGTTSGTYKYIF

SEQ ID NO: 30986 - protein, 16 aa, Homo sapiens
  CDR3 for beta chain variable domain of TCR clone 15493 (TRBV7-3, TRBJ2-1)
CASSLEGYRSYNEQFF

SEQ ID NO: 30987 - protein, 15 aa, Homo sapiens
  CDR3 for alpha chain variable domain of TCR clone 15494 (TRAV3, TRAJ4)
CAVRDGAGGYNKLIF

SEQ ID NO: 30988 - protein, 16 aa, Homo sapiens
  CDR3 for beta chain variable domain of TCR clone 15494 (TRBV27, TRBJ2-2)
CASSSSGVSNTGELFF

SEQ ID NO: 30989 - protein, 14 aa, Homo sapiens
  CDR3 for alpha chain variable domain of TCR clone 15495 (TRAV9-2, TRAJ39)
CALYIYNAGNMLTF

SEQ ID NO: 30990 - protein, 15 aa, Homo sapiens
  CDR3 for beta chain variable domain of TCR clone 15495 (TRBV11-3, TRBJ2-3)
CASLKDGREGDTQYF

SEQ ID NO: 30991 - protein, 13 aa, Homo sapiens
  CDR3 for alpha chain variable domain of TCR clone 15496 (TRAV16, TRAJ26)
CITVLCLGQNFVF

SEQ ID NO: 30992 - protein, 12 aa, Homo sapiens
  CDR3 for beta chain variable domain of TCR clone 15496 (TRBV11-2, TRBJ2-1)
CASSPGNNEQFL

SEQ ID NO: 30993 - protein, 15 aa, Homo sapiens
  CDR3 for alpha chain variable domain of TCR clone 15497 (TRAV35, TRAJ40)
CAGQLGTSGTYKYIF

SEQ ID NO: 30994 - protein, 14 aa, Homo sapiens
  CDR3 for beta chain variable domain of TCR clone 15497 (TRBV7-3, TRBJ2-1)
CASSLAGGTSEQFF

SEQ ID NO: 30995 - protein, 17 aa, Homo sapiens
  CDR3 for alpha chain variable domain of TCR clone 15498 (TRAV13-1, TRAJ31)
CTPRDRLMFGDGTQLVV

SEQ ID NO: 30996 - protein, 12 aa, Homo sapiens
  CDR3 for beta chain variable domain of TCR clone 15498 (TRBV7-9, TRBJ2-7)
CASSLEGYEQYF

SEQ ID NO: 30997 - protein, 15 aa, Homo sapiens
  CDR3 for alpha chain variable domain of TCR clone 15499 (TRAV27, TRAJ38)
CAACRNAGNNRKLIW

SEQ ID NO: 30998 - protein, 13 aa, Homo sapiens
  CDR3 for beta chain variable domain of TCR clone 15499 (TRBV12-5, TRBJ2-3)
CASGDRQSDTQYF

SEQ ID NO: 30999 - protein, 15 aa, Homo sapiens
  CDR3 for alpha chain variable domain of TCR clone 15500 (TRAV8-3, TRAJ45)
CASSYSGGDADGLTF

SEQ ID NO: 31000 - protein, 13 aa, Homo sapiens
  CDR3 for beta chain variable domain of TCR clone 15500 (TRBV10-3, TRBJ2-7)
CASKLAVNYEQYF

SEQ ID NO: 31001 - protein, 13 aa, Homo sapiens
  CDR3 for alpha chain variable domain of TCR clone 15501 (TRAV21, TRAJ20)
CAVGLRVDYKLSF

SEQ ID NO: 31002 - protein, 13 aa, Homo sapiens
  CDR3 for beta chain variable domain of TCR clone 15501 (TRBV6-1, TRBJ1-1)
CASSRQGNTEAFL

SEQ ID NO: 31003 - protein, 21 aa, Homo sapiens
  CDR3 for alpha chain variable domain of TCR clone 15502 (TRAV16, TRAJ22)
HLKKPFAQEEDSAMYLRQLTF

SEQ ID NO: 31004 - protein, 15 aa, Homo sapiens
  CDR3 for beta chain variable domain of TCR clone 15502 (TRBV7-9, TRBJ1-6)
CASSSPGRGNSPLHF

SEQ ID NO: 31005 - protein, 13 aa, Homo sapiens
  CDR3 for alpha chain variable domain of TCR clone 15503 (TRAV8-3, TRAJ28)
CAVGAVGSYQLTF

SEQ ID NO: 31006 - protein, 15 aa, Homo sapiens
  CDR3 for beta chain variable domain of TCR clone 15503 (TRBV7-9, TRBJ1-5)
CASSQSHQPNQPQHF

SEQ ID NO: 31007 - protein, 14 aa, Homo sapiens
  CDR3 for alpha chain variable domain of TCR clone 15504 (TRAV12-2, TRAJ40)
CAVKILSGTYKYIF

SEQ ID NO: 31008 - protein, 14 aa, Homo sapiens
  CDR3 for beta chain variable domain of TCR clone 15504 (TRBV20-1, TRBJ1-1)
CSAQTRIGGTEAFF

SEQ ID NO: 31009 - protein, 13 aa, Homo sapiens
  CDR3 for alpha chain variable domain of TCR clone 15505 (TRAV9-2, TRAJ9)
CALSKAGGFKTIF

SEQ ID NO: 31010 - protein, 13 aa, Homo sapiens
  CDR3 for beta chain variable domain of TCR clone 15505 (TRBV19, TRBJ1-5)
CASSIGGEQPQHF

SEQ ID NO: 31011 - protein, 13 aa, Homo sapiens
  CDR3 for alpha chain variable domain of TCR clone 15506 (TRAV8-3, TRAJ28)
CAVGAVGSYQLTF

SEQ ID NO: 31012 - protein, 14 aa, Homo sapiens
  CDR3 for beta chain variable domain of TCR clone 15506 (TRBV7-2, TRBJ2-7)
CASRSQGAACEQYF

SEQ ID NO: 31013 - protein, 13 aa, Homo sapiens
  CDR3 for alpha chain variable domain of TCR clone 15507 (TRAV27, TRAJ45)
CRSSGGGADGLTF

SEQ ID NO: 31014 - protein, 17 aa, Homo sapiens
  CDR3 for beta chain variable domain of TCR clone 15507 (TRBV11-2, TRBJ2-1)
CASSLYTPGVEYNEQFF

SEQ ID NO: 31015 - protein, 12 aa, Homo sapiens
  CDR3 for alpha chain variable domain of TCR clone 15508 (TRAV4, TRAJ26)
CLVGDYGQNFVF

SEQ ID NO: 31016 - protein, 16 aa, Homo sapiens
  CDR3 for beta chain variable domain of TCR clone 15508 (TRBV7-2, TRBJ1-2)
CASSSNQDRRGHGDTF

SEQ ID NO: 31017 - protein, 18 aa, Homo sapiens
  CDR3 for alpha chain variable domain of TCR clone 15509 (TRAV12-3, TRAJ52)
CAMSVGGAGGTSYGRLTF

SEQ ID NO: 31018 - protein, 15 aa, Homo sapiens
  CDR3 for beta chain variable domain of TCR clone 15509 (TRBV27, TRBJ1-6)
CASSFDRGLGSPLHF

SEQ ID NO: 31019 - protein, 16 aa, Homo sapiens
  CDR3 for alpha chain variable domain of TCR clone 15510 (TRAV3, TRAJ10)
CAVRNMRAGGGNKLTF

SEQ ID NO: 31020 - protein, 17 aa, Homo sapiens
  CDR3 for beta chain variable domain of TCR clone 15510 (TRBV20-1, TRBJ2-2)
CSASGSGQGGLTGELFF

SEQ ID NO: 31021 - protein, 16 aa, Homo sapiens
  CDR3 for alpha chain variable domain of TCR clone 15511 (TRAV16, TRAJ4)
CALSRMFSGGYNKLIF

SEQ ID NO: 31022 - protein, 14 aa, Homo sapiens
  CDR3 for beta chain variable domain of TCR clone 15511 (TRBV25-1, TRBJ1-1)
CASTHLGGNTEAFF

SEQ ID NO: 31023 - protein, 14 aa, Homo sapiens
  CDR3 for alpha chain variable domain of TCR clone 15512 (TRAV2, TRAJ37)
CSVDFTSNTGKLIF

SEQ ID NO: 31024 - protein, 15 aa, Homo sapiens
  CDR3 for beta chain variable domain of TCR clone 15512 (TRBV20-1, TRBJ1-1)
CSASRGVTGNTEAFF

SEQ ID NO: 31025 - protein, 13 aa, Homo sapiens
  CDR3 for alpha chain variable domain of TCR clone 15513 (TRAV21, TRAJ57)
CAVNQGGSEKLVF

SEQ ID NO: 31026 - protein, 16 aa, Homo sapiens
  CDR3 for beta chain variable domain of TCR clone 15513 (TRBV29-1, TRBJ2-7)
CSVEDAEDGTAYEQYF

SEQ ID NO: 31027 - protein, 13 aa, Homo sapiens
  CDR3 for alpha chain variable domain of TCR clone 15514 (TRAV3, TRAJ27)
CAVSPLGAGKSTF

SEQ ID NO: 31028 - protein, 13 aa, Homo sapiens
  CDR3 for beta chain variable domain of TCR clone 15514 (TRBV7-9, TRBJ2-3)
CASSPGSTDTQYF

SEQ ID NO: 31029 - protein, 13 aa, Homo sapiens
  CDR3 for alpha chain variable domain of TCR clone 15515 (TRAV8-4, TRAJ30)
CAVRVNRDDKIIF

SEQ ID NO: 31030 - protein, 13 aa, Homo sapiens
  CDR3 for beta chain variable domain of TCR clone 15515 (TRBV3-1, TRBJ2-2)
CASLARGSGELFF

SEQ ID NO: 31031 - protein, 17 aa, Homo sapiens
  CDR3 for alpha chain variable domain of TCR clone 15516 (TRAV4, TRAJ42)
CLVGVLNYGGSQGNLIF

SEQ ID NO: 31032 - protein, 12 aa, Homo sapiens
  CDR3 for beta chain variable domain of TCR clone 15516 (TRBV20-1, TRBJ2-1)
CSAQYAYNEQFF

SEQ ID NO: 31033 - protein, 14 aa, Homo sapiens
  CDR3 for alpha chain variable domain of TCR clone 15517 (TRAV2, TRAJ37)
CAIDFTSNTGKLIF

SEQ ID NO: 31034 - protein, 15 aa, Homo sapiens
  CDR3 for beta chain variable domain of TCR clone 15517 (TRBV20-1, TRBJ1-1)
CSASRGVTGNTEAFF

SEQ ID NO: 31035 - protein, 15 aa, Homo sapiens
  CDR3 for alpha chain variable domain of TCR clone 15518 (TRAV26-1, TRAJ29)
CIVRVEGSGNTPLVF

SEQ ID NO: 31036 - protein, 15 aa, Homo sapiens
  CDR3 for beta chain variable domain of TCR clone 15518 (TRBV12-4, TRBJ1-1)
CQQQDRVEANTEAFF

SEQ ID NO: 31037 - protein, 14 aa, Homo sapiens
  CDR3 for alpha chain variable domain of TCR clone 15519 (TRAV1-2, TRAJ8)
CAVREDTGFQKLVF

SEQ ID NO: 31038 - protein, 15 aa, Homo sapiens
  CDR3 for beta chain variable domain of TCR clone 15519 (TRBV6-3, TRBJ2-7)
CASISPGTVFYEQYF

SEQ ID NO: 31039 - protein, 15 aa, Homo sapiens
  CDR3 for alpha chain variable domain of TCR clone 15520 (TRAV12-3, TRAJ6)
CAMSAATGGSYIPTF

SEQ ID NO: 31040 - protein, 16 aa, Homo sapiens
  CDR3 for beta chain variable domain of TCR clone 15520 (TRBV20-1, TRBJ1-2)
CSASMGQGVANYGYTF

SEQ ID NO: 31041 - protein, 14 aa, Homo sapiens
  CDR3 for alpha chain variable domain of TCR clone 15521 (TRAV26-1, TRAJ34)
FIVRVAYNTDKLIF

SEQ ID NO: 31042 - protein, 15 aa, Homo sapiens
  CDR3 for beta chain variable domain of TCR clone 15521 (TRBV20-1, TRBJ2-7)
CSARVPAAYFYEQYF

SEQ ID NO: 31043 - protein, 11 aa, Homo sapiens
  CDR3 for alpha chain variable domain of TCR clone 15522 (TRAV2, TRAJ33)
CAVESNYQLIW

SEQ ID NO: 31044 - protein, 15 aa, Homo sapiens
  CDR3 for beta chain variable domain of TCR clone 15522 (TRBV19, TRBJ1-1)
CASTSGQIHNTEAFF

SEQ ID NO: 31045 - protein, 14 aa, Homo sapiens
  CDR3 for alpha chain variable domain of TCR clone 15523 (TRAV9-2, TRAJ39)
CAFYIYNAGNMLTF

SEQ ID NO: 31046 - protein, 14 aa, Homo sapiens
  CDR3 for beta chain variable domain of TCR clone 15523 (TRBV12-5, TRBJ2-5)
CASGSRTHQETQYF

SEQ ID NO: 31047 - protein, 13 aa, Homo sapiens
  CDR3 for alpha chain variable domain of TCR clone 15524 (TRAV8-3, TRAJ28)
CAVGAVGSYQLTF

SEQ ID NO: 31048 - protein, 14 aa, Homo sapiens
  CDR3 for beta chain variable domain of TCR clone 15524 (TRBV7-2, TRBJ2-7)
CASRSQGAAYEQCF

SEQ ID NO: 31049 - protein, 15 aa, Homo sapiens
  CDR3 for alpha chain variable domain of TCR clone 15525 (TRAV3, TRAJ33)
CPCERLLLWNYQLIW

SEQ ID NO: 31050 - protein, 15 aa, Homo sapiens
  CDR3 for beta chain variable domain of TCR clone 15525 (TRBV20-1, TRBJ1-1)
CSASRGVTGNTEAFF

SEQ ID NO: 31051 - protein, 14 aa, Homo sapiens
  CDR3 for alpha chain variable domain of TCR clone 15526 (TRAV1-2, TRAJ8)
CAVIEDTGFQKLVF

SEQ ID NO: 31052 - protein, 15 aa, Homo sapiens
  CDR3 for beta chain variable domain of TCR clone 15526 (TRBV6-3, TRBJ2-7)
CASSSPGTVFYEQYF

SEQ ID NO: 31053 - protein, 10 aa, Homo sapiens
  CDR3 for alpha chain variable domain of TCR clone 15527 (TRAV1-2, TRAJ31)
CVSEDARLML

SEQ ID NO: 31054 - protein, 14 aa, Homo sapiens
  CDR3 for beta chain variable domain of TCR clone 15527 (TRBV19, TRBJ2-1)
CASPTFVLSGEQFF

SEQ ID NO: 31055 - protein, 14 aa, Homo sapiens
  CDR3 for alpha chain variable domain of TCR clone 15528 (TRAV13-2, TRAJ40)
CAENMGSGTYKYIF

SEQ ID NO: 31056 - protein, 10 aa, Homo sapiens
  CDR3 for beta chain variable domain of TCR clone 15528 (TRBV20-1, TRBJ2-1)
CSASYNEQFF

SEQ ID NO: 31057 - protein, 12 aa, Homo sapiens
  CDR3 for alpha chain variable domain of TCR clone 15529 (TRAV13-1, TRAJ42)
VSYGGSQGNLIF

SEQ ID NO: 31058 - protein, 15 aa, Homo sapiens
  CDR3 for beta chain variable domain of TCR clone 15529 (TRBV20-1, TRBJ2-1)
CSASSAGSSYNEQFF

SEQ ID NO: 31059 - protein, 15 aa, Homo sapiens
  CDR3 for alpha chain variable domain of TCR clone 15530 (TRAV26-1, TRAJ29)
CIVRVEGSGNTPLVF

SEQ ID NO: 31060 - protein, 15 aa, Homo sapiens
  CDR3 for beta chain variable domain of TCR clone 15530 (TRBV7-9, TRBJ1-6)
CASSSPGRGNSPLHF

SEQ ID NO: 31061 - protein, 14 aa, Homo sapiens
  CDR3 for alpha chain variable domain of TCR clone 15531 (TRAV21, TRAJ35)
CAVMPIGFGNVLHC

SEQ ID NO: 31062 - protein, 12 aa, Homo sapiens
  CDR3 for beta chain variable domain of TCR clone 15531 (TRBV7-9, TRBJ2-7)
CARSIKREEQYF

SEQ ID NO: 31063 - protein, 14 aa, Homo sapiens
  CDR3 for alpha chain variable domain of TCR clone 15532 (TRAV17, TRAJ16)
CATADFSGGQKLLF

SEQ ID NO: 31064 - protein, 15 aa, Homo sapiens
  CDR3 for beta chain variable domain of TCR clone 15532 (TRBV18, TRBJ2-1)
CASSPPSASYNEQFF

SEQ ID NO: 31065 - protein, 15 aa, Homo sapiens
  CDR3 for alpha chain variable domain of TCR clone 15533 (TRAV9-2, TRAJ45)
CALSARRGGADGLTF

SEQ ID NO: 31066 - protein, 13 aa, Homo sapiens
  CDR3 for beta chain variable domain of TCR clone 15533 (TRBV18, TRBJ2-5)
CASSLQGQETQYF

SEQ ID NO: 31067 - protein, 10 aa, Homo sapiens
  CDR3 for alpha chain variable domain of TCR clone 15534 (TRAV21, TRAJ43)
CAVRVGDMRF

SEQ ID NO: 31068 - protein, 13 aa, Homo sapiens
  CDR3 for beta chain variable domain of TCR clone 15534 (TRBV20-1, TRBJ2-7)
CSAPGLADYEQYF

SEQ ID NO: 31069 - protein, 13 aa, Homo sapiens
  CDR3 for alpha chain variable domain of TCR clone 15535 (TRAV21, TRAJ15)
CAVRNQAGTALIF

SEQ ID NO: 31070 - protein, 16 aa, Homo sapiens
  CDR3 for beta chain variable domain of TCR clone 15535 (TRBV20-1, TRBJ2-5)
CSPGGTSGGYMETRYF

SEQ ID NO: 31071 - protein, 15 aa, Homo sapiens
  CDR3 for alpha chain variable domain of TCR clone 15536 (TRAV4, TRAJ39)
CLVGPNNNAGNMLTF

SEQ ID NO: 31072 - protein, 13 aa, Homo sapiens
  CDR3 for beta chain variable domain of TCR clone 15536 (TRBV11-2, TRBJ2-5)
CASSSIGEETQYF

SEQ ID NO: 31073 - protein, 23 aa, Homo sapiens
  CDR3 for alpha chain variable domain of TCR clone 15537 (TRAV26-1, TRAJ38)
CIAANAGNNHIQNPDPAVYQLRD

SEQ ID NO: 31074 - protein, 13 aa, Homo sapiens
  CDR3 for beta chain variable domain of TCR clone 15537 (TRBV20-1, TRBJ1-1)
CSARGGGNTEAFF

SEQ ID NO: 31075 - protein, 13 aa, Homo sapiens
  CDR3 for alpha chain variable domain of TCR clone 15538 (TRAV25, TRAJ30)
CAGRVDRDDKIIF

SEQ ID NO: 31076 - protein, 17 aa, Homo sapiens
  CDR3 for beta chain variable domain of TCR clone 15538 (TRBV7-9, TRBJ2-6)
CASSFGAGYSGANDLTF

SEQ ID NO: 31077 - protein, 11 aa, Homo sapiens
  CDR3 for alpha chain variable domain of TCR clone 15539 (TRAV12-1, TRAJ34)
CVVNEGRELIF

SEQ ID NO: 31078 - protein, 12 aa, Homo sapiens
  CDR3 for beta chain variable domain of TCR clone 15539 (TRBV2, TRBJ2-1)
CAYGPPGNEQFF

SEQ ID NO: 31079 - protein, 12 aa, Homo sapiens
  CDR3 for alpha chain variable domain of TCR clone 15540 (TRAV13-2, TRAJ23)
CAERHRGGKLIF

SEQ ID NO: 31080 - protein, 11 aa, Homo sapiens
  CDR3 for beta chain variable domain of TCR clone 15540 (TRBV29-1, TRBJ2-5)
CSEDRTGTQYF

SEQ ID NO: 31081 - protein, 14 aa, Homo sapiens
  CDR3 for alpha chain variable domain of TCR clone 15541 (TRAV8-2, TRAJ4)
CVVSPSGGYNKLIF

SEQ ID NO: 31082 - protein, 13 aa, Homo sapiens
  CDR3 for beta chain variable domain of TCR clone 15541 (TRBV10-3, TRBJ2-7)
CASKLAVNYEQYF

SEQ ID NO: 31083 - protein, 14 aa, Homo sapiens
  CDR3 for alpha chain variable domain of TCR clone 15542 (TRAV13-1, TRAJ35)
CAASKEALGMCCIA

SEQ ID NO: 31084 - protein, 13 aa, Homo sapiens
  CDR3 for beta chain variable domain of TCR clone 15542 (TRBV7-3, TRBJ1-1)
CASSQDWGAEAFF

SEQ ID NO: 31085 - protein, 12 aa, Homo sapiens
  CDR3 for alpha chain variable domain of TCR clone 15543 (TRAV13-1, TRAJ48)
CAANFGNEKLTF

SEQ ID NO: 31086 - protein, 14 aa, Homo sapiens
  CDR3 for beta chain variable domain of TCR clone 15543 (TRBV7-2, TRBJ2-7)
CASSPKTSFYEQYF

SEQ ID NO: 31087 - protein, 16 aa, Homo sapiens
  CDR3 for alpha chain variable domain of TCR clone 15544 (TRAV17, TRAJ28)
CATASVPGAGSYQLTF

SEQ ID NO: 31088 - protein, 11 aa, Homo sapiens
  CDR3 for beta chain variable domain of TCR clone 15544 (TRBV7-9, TRBJ2-5)
CASSLGETQYF

SEQ ID NO: 31089 - protein, 12 aa, Homo sapiens
  CDR3 for alpha chain variable domain of TCR clone 15545 (TRAV13-2, TRAJ23)
CAERHRGGKLIF

SEQ ID NO: 31090 - protein, 16 aa, Homo sapiens
  CDR3 for beta chain variable domain of TCR clone 15545 (TRBV20-1, TRBJ1-4)
CSAPGQGLLTNEKLFF

SEQ ID NO: 31091 - protein, 11 aa, Homo sapiens
  CDR3 for alpha chain variable domain of TCR clone 15546 (TRAV13-1, TRAJ27)
CAAYNAGKSTF

SEQ ID NO: 31092 - protein, 12 aa, Homo sapiens
  CDR3 for beta chain variable domain of TCR clone 15546 (TRBV29-1, TRBJ2-7)
CSVEGASYEQYF

SEQ ID NO: 31093 - protein, 15 aa, Homo sapiens
  CDR3 for alpha chain variable domain of TCR clone 15547 (TRAV3, TRAJ17)
CAVRDTGAAGNKLTF

SEQ ID NO: 31094 - protein, 14 aa, Homo sapiens
  CDR3 for beta chain variable domain of TCR clone 15547 (TRBV19, TRBJ2-1)
CASPTFVLSGEQFF

SEQ ID NO: 31095 - protein, 14 aa, Homo sapiens
  CDR3 for alpha chain variable domain of TCR clone 15548 (TRAV8-6, TRAJ30)
CAVRPVNRDDKIIF

SEQ ID NO: 31096 - protein, 15 aa, Homo sapiens
  CDR3 for beta chain variable domain of TCR clone 15548 (TRBV7-9, TRBJ1-1)
CASSPELGGGTEAFF

SEQ ID NO: 31097 - protein, 13 aa, Homo sapiens
  CDR3 for alpha chain variable domain of TCR clone 15549 (TRAV2, TRAJ40)
CAVVTSGTYKYIF

SEQ ID NO: 31098 - protein, 14 aa, Homo sapiens
  CDR3 for beta chain variable domain of TCR clone 15549 (TRBV20-1, TRBJ1-1)
CSAMGGAANTEAFF

SEQ ID NO: 31099 - protein, 16 aa, Homo sapiens
  CDR3 for alpha chain variable domain of TCR clone 15550 (TRAV12-3, TRAJ53)
CAMSPGSGGSNYKLTF

SEQ ID NO: 31100 - protein, 11 aa, Homo sapiens
  CDR3 for beta chain variable domain of TCR clone 15550 (TRBV29-1, TRBJ2-5)
CNEDRTGTQYF

SEQ ID NO: 31101 - protein, 11 aa, Homo sapiens
  CDR3 for alpha chain variable domain of TCR clone 15551 (TRAV12-3, TRAJ27)
CAMANAGNSTF

SEQ ID NO: 31102 - protein, 13 aa, Homo sapiens
  CDR3 for beta chain variable domain of TCR clone 15551 (TRBV20-1, TRBJ1-1)
CSARVGGNTEAFF

SEQ ID NO: 31103 - protein, 13 aa, Homo sapiens
  CDR3 for alpha chain variable domain of TCR clone 15552 (TRAV3, TRAJ41)
CAVSSNSGYTLNF

SEQ ID NO: 31104 - protein, 13 aa, Homo sapiens
  CDR3 for beta chain variable domain of TCR clone 15552 (TRBV20-1, TRBJ2-2)
CSALSGGAGELFF

SEQ ID NO: 31105 - protein, 17 aa, Homo sapiens
  CDR3 for alpha chain variable domain of TCR clone 15553 (TRAV3, TRAJ42)
CAVRDRDYGGSQGNIIF

SEQ ID NO: 31106 - protein, 15 aa, Homo sapiens
  CDR3 for beta chain variable domain of TCR clone 15553 (TRBV6-6, TRBJ2-7)
CASSYSYGGSYEQYF

SEQ ID NO: 31107 - protein, 12 aa, Homo sapiens
  CDR3 for alpha chain variable domain of TCR clone 15554 (TRAV29/DV5, TRAJ15)
CASNQAGTALIF

SEQ ID NO: 31108 - protein, 16 aa, Homo sapiens
  CDR3 for beta chain variable domain of TCR clone 15554 (TRBV11-3, TRBJ2-5)
CASSSVVAGSTETQYF

SEQ ID NO: 31109 - protein, 14 aa, Homo sapiens
  CDR3 for alpha chain variable domain of TCR clone 15555 (TRAV12-1, TRAJ17)
CVVNYKAAGNKLTF

SEQ ID NO: 31110 - protein, 17 aa, Homo sapiens
  CDR3 for beta chain variable domain of TCR clone 15555 (TRBV20-1, TRBJ2-1)
CSASSSGLAGSYNEHFF

SEQ ID NO: 31111 - protein, 13 aa, Homo sapiens
  CDR3 for alpha chain variable domain of TCR clone 15556 (TRAV27, TRAJ29)
CAGAHSGNTPLVF

SEQ ID NO: 31112 - protein, 14 aa, Homo sapiens
  CDR3 for beta chain variable domain of TCR clone 15556 (TRBV4-1, TRBJ2-7)
CASSPVAGGDEQYF

SEQ ID NO: 31113 - protein, 18 aa, Homo sapiens
  CDR3 for alpha chain variable domain of TCR clone 15557 (TRAV21, TRAJ52)
CAVRPSPAGGTSYGKLTC

SEQ ID NO: 31114 - protein, 17 aa, Homo sapiens
  CDR3 for beta chain variable domain of TCR clone 15557 (TRBV13, TRBJ2-3)
CASSLSRVAGGRNTQYF

SEQ ID NO: 31115 - protein, 12 aa, Homo sapiens
  CDR3 for alpha chain variable domain of TCR clone 15558 (TRAV12-3, TRAJ17)
CAMTLTGNKLTF

SEQ ID NO: 31116 - protein, 15 aa, Homo sapiens
  CDR3 for beta chain variable domain of TCR clone 15558 (TRBV19, TRBJ1-2)
CASSVGQVLNYGYTF

SEQ ID NO: 31117 - protein, 15 aa, Homo sapiens
  CDR3 for alpha chain variable domain of TCR clone 15559 (TRAV26-1, TRAJ29)
CIVRVEGSGNTPLVF

SEQ ID NO: 31118 - protein, 15 aa, Homo sapiens
  CDR3 for beta chain variable domain of TCR clone 15559 (TRBV7-9, TRBJ1-5)
CASSQGHQPNHPQHF

SEQ ID NO: 31119 - protein, 14 aa, Homo sapiens
  CDR3 for alpha chain variable domain of TCR clone 15560 (TRAV26-1, TRAJ38)
CIADNAGNNRKLIW

SEQ ID NO: 31120 - protein, 15 aa, Homo sapiens
  CDR3 for beta chain variable domain of TCR clone 15560 (TRBV7-8, TRBJ2-1)
CASSLHGGPYNEQFF

SEQ ID NO: 31121 - protein, 11 aa, Homo sapiens
  CDR3 for alpha chain variable domain of TCR clone 15561 (TRAV3, TRAJ21)
CAVGNFNKFYF

SEQ ID NO: 31122 - protein, 16 aa, Homo sapiens
  CDR3 for beta chain variable domain of TCR clone 15561 (TRBV19, TRBJ2-1)
CASRKAGPSSYNEQFF

SEQ ID NO: 31123 - protein, 16 aa, Homo sapiens
  CDR3 for alpha chain variable domain of TCR clone 15562 (TRAV30, TRAJ24)
CGTEIVDADSWGKFQF

SEQ ID NO: 31124 - protein, 14 aa, Homo sapiens
  CDR3 for beta chain variable domain of TCR clone 15562 (TRBV12-5, TRBJ2-5)
CAIGSRTHQETQYF

SEQ ID NO: 31125 - protein, 12 aa, Homo sapiens
  CDR3 for alpha chain variable domain of TCR clone 15563 (TRAV2, TRAJ9)
CAVEAGGFKTIF

SEQ ID NO: 31126 - protein, 16 aa, Homo sapiens
  CDR3 for beta chain variable domain of TCR clone 15563 (TRBV13, TRBJ2-2)
CASSPRTGEHTGELFF

SEQ ID NO: 31127 - protein, 20 aa, Homo sapiens
  CDR3 for alpha chain variable domain of TCR clone 15564 (TRAV26-1, TRAJ42)
CCVLLHRQTYYGGSQGNLIF

SEQ ID NO: 31128 - protein, 16 aa, Homo sapiens
  CDR3 for beta chain variable domain of TCR clone 15564 (TRBV7-3, TRBJ2-2)
CASSVKRGTLSGELFF

SEQ ID NO: 31129 - protein, 14 aa, Homo sapiens
  CDR3 for alpha chain variable domain of TCR clone 15565 (TRAV13-1, TRAJ35)
CAASKGGFGNVLHC

SEQ ID NO: 31130 - protein, 13 aa, Homo sapiens
  CDR3 for beta chain variable domain of TCR clone 15565 (TRBV7-3, TRBJ1-1)
FASSQDWGAEAFF

SEQ ID NO: 31131 - protein, 15 aa, Homo sapiens
  CDR3 for alpha chain variable domain of TCR clone 15566 (TRAV25, TRAJ52)
CAGRPGGTGYGKLTF

SEQ ID NO: 31132 - protein, 17 aa, Homo sapiens
  CDR3 for beta chain variable domain of TCR clone 15566 (TRBV7-8, TRBJ2-6)
CASSAGTGGAGANVLTF

SEQ ID NO: 31133 - protein, 17 aa, Homo sapiens
  CDR3 for alpha chain variable domain of TCR clone 15567 (TRAV3, TRAJ6)
CAVRDGPRTGGSYIPTF

SEQ ID NO: 31134 - protein, 14 aa, Homo sapiens
  CDR3 for beta chain variable domain of TCR clone 15567 (TRBV7-2, TRBJ2-7)
CASSPKTSFYEQYF

SEQ ID NO: 31135 - protein, 13 aa, Homo sapiens
  CDR3 for alpha chain variable domain of TCR clone 15568 (TRAV26-1, TRAJ20)
CIVRVGNDYKLSF

SEQ ID NO: 31136 - protein, 16 aa, Homo sapiens
  CDR3 for beta chain variable domain of TCR clone 15568 (TRBV7-9, TRBJ2-3)
CASSLIPTSLTDTQYF

SEQ ID NO: 31137 - protein, 13 aa, Homo sapiens
  CDR3 for alpha chain variable domain of TCR clone 15569 (TRAV12-1, TRAJ16)
CVVDGPDGQKLLF

SEQ ID NO: 31138 - protein, 15 aa, Homo sapiens
  CDR3 for beta chain variable domain of TCR clone 15569 (TRBV6-3, TRBJ2-7)
CASSSPGTVFYEQYF

SEQ ID NO: 31139 - protein, 12 aa, Homo sapiens
  CDR3 for alpha chain variable domain of TCR clone 15570 (TRAV29/DV5, TRAJ54)
CATSRGAQKLVF

SEQ ID NO: 31140 - protein, 15 aa, Homo sapiens
  CDR3 for beta chain variable domain of TCR clone 15570 (TRBV3-1, TRBJ1-2)
CASSRRNPGFYGYTF

SEQ ID NO: 31141 - protein, 13 aa, Homo sapiens
  CDR3 for alpha chain variable domain of TCR clone 15571 (TRAV27, TRAJ41)
CAGEGNSGYALSF

SEQ ID NO: 31142 - protein, 14 aa, Homo sapiens
  CDR3 for beta chain variable domain of TCR clone 15571 (TRBV7-2, TRBJ1-1)
CASSFLTGTTEAFF

SEQ ID NO: 31143 - protein, 14 aa, Homo sapiens
  CDR3 for alpha chain variable domain of TCR clone 15572 (TRAV12-3, TRAJ10)
SRLPLTGGGNKLTF

SEQ ID NO: 31144 - protein, 14 aa, Homo sapiens
  CDR3 for beta chain variable domain of TCR clone 15572 (TRBV6-1, TRBJ1-3)
CASVQGGGGNTIYF

SEQ ID NO: 31145 - protein, 18 aa, Homo sapiens
  CDR3 for alpha chain variable domain of TCR clone 15573 (TRAV21, TRAJ52)
CAVRPSPAGGTSYGKLTF

SEQ ID NO: 31146 - protein, 17 aa, Homo sapiens
  CDR3 for beta chain variable domain of TCR clone 15573 (TRBV13, TRBJ2-3)
CASSLSRVAGGRNTHYF

SEQ ID NO: 31147 - protein, 15 aa, Homo sapiens
  CDR3 for alpha chain variable domain of TCR clone 15574 (TRAV13-2, TRAJ16)
CAENDRFSDGQKLLF

SEQ ID NO: 31148 - protein, 18 aa, Homo sapiens
  CDR3 for beta chain variable domain of TCR clone 15574 (TRBV12-4, TRBJ2-2)
CASSLVAGTRGRTGELFF

SEQ ID NO: 31149 - protein, 15 aa, Homo sapiens
  CDR3 for alpha chain variable domain of TCR clone 15575 (TRAV17, TRAJ57)
CATGPSQGGSEKLVF

SEQ ID NO: 31150 - protein, 16 aa, Homo sapiens
  CDR3 for beta chain variable domain of TCR clone 15575 (TRBV12-4, TRBJ1-5)
CARSRPVGGSNQPQHF

SEQ ID NO: 31151 - protein, 12 aa, Homo sapiens
  CDR3 for alpha chain variable domain of TCR clone 15576 (TRAV3, TRAJ43)
CAVRDPNNDMRF

SEQ ID NO: 31152 - protein, 14 aa, Homo sapiens
  CDR3 for beta chain variable domain of TCR clone 15576 (TRBV19, TRBJ1-1)
CASSIEVSGGSAFF

SEQ ID NO: 31153 - protein, 15 aa, Homo sapiens
  CDR3 for alpha chain variable domain of TCR clone 15577 (TRAV8-3, TRAJ23)
CAVGDRYNQGGRLIF

SEQ ID NO: 31154 - protein, 22 aa, Homo sapiens
  CDR3 for beta chain variable domain of TCR clone 15577 (TRBV29-1, TRBJ2-5)
TVSNMSPEDSSIYLCSAGTQYF

SEQ ID NO: 31155 - protein, 11 aa, Homo sapiens
  CDR3 for alpha chain variable domain of TCR clone 15578 (TRAV12-1, TRAJ43)
CVEYDNNDMRF

SEQ ID NO: 31156 - protein, 14 aa, Homo sapiens
  CDR3 for beta chain variable domain of TCR clone 15578 (TRBV14, TRBJ2-1)
CASSQVQGRGEQFF

SEQ ID NO: 31157 - protein, 14 aa, Homo sapiens
  CDR3 for alpha chain variable domain of TCR clone 15579 (TRAV21, TRAJ21)
CAVKGFGNSNKFYF

SEQ ID NO: 31158 - protein, 13 aa, Homo sapiens
  CDR3 for beta chain variable domain of TCR clone 15579 (TRBV18, TRBJ1-1)
CASSPETKPEAFF

SEQ ID NO: 31159 - protein, 20 aa, Homo sapiens
  CDR3 for alpha chain variable domain of TCR clone 15580 (TRAV12-1, TRAJ42)
SSVIQPPTSVKGGSQGNLIF

SEQ ID NO: 31160 - protein, 18 aa, Homo sapiens
  CDR3 for beta chain variable domain of TCR clone 15580 (TRBV11-2, TRBJ2-3)
CASSFGGASRGAPNTQYF

SEQ ID NO: 31161 - protein, 14 aa, Homo sapiens
  CDR3 for alpha chain variable domain of TCR clone 15581 (TRAV12-2, TRAJ40)
CAVKIPSGTYKYIF

SEQ ID NO: 31162 - protein, 17 aa, Homo sapiens
  CDR3 for beta chain variable domain of TCR clone 15581 (TRBV13, TRBJ2-3)
CASSLSGVAGGRNTQYF

SEQ ID NO: 31163 - protein, 14 aa, Homo sapiens
  CDR3 for alpha chain variable domain of TCR clone 15582 (TRAV8-3, TRAJ26)
CAVAPGNYGQNFVF

SEQ ID NO: 31164 - protein, 15 aa, Homo sapiens
  CDR3 for beta chain variable domain of TCR clone 15582 (TRBV27, TRBJ2-1)
CASSNGGGSSNEQFF

SEQ ID NO: 31165 - protein, 14 aa, Homo sapiens
  CDR3 for alpha chain variable domain of TCR clone 15583 (TRAV26-1, TRAJ39)
CIVRGSRAGNMLTF

SEQ ID NO: 31166 - protein, 15 aa, Homo sapiens
  CDR3 for beta chain variable domain of TCR clone 15583 (TRBV7-9, TRBJ1-5)
CASCQGHQPNQPQHF

SEQ ID NO: 31167 - protein, 15 aa, Homo sapiens
  CDR3 for alpha chain variable domain of TCR clone 15584 (TRAV27, TRAJ38)
CAAHRNAGNNRKLIW

SEQ ID NO: 31168 - protein, 13 aa, Homo sapiens
  CDR3 for beta chain variable domain of TCR clone 15584 (TRBV12-5, TRBJ2-3)
CASGDRQSDTQYF

SEQ ID NO: 31169 - protein, 11 aa, Homo sapiens
  CDR3 for alpha chain variable domain of TCR clone 15585 (TRAV1-1, TRAJ23)
CAVRQGGKLIF

SEQ ID NO: 31170 - protein, 14 aa, Homo sapiens
  CDR3 for beta chain variable domain of TCR clone 15585 (TRBV12-5, TRBJ2-5)
CASGSRTHQETQYF

SEQ ID NO: 31171 - protein, 11 aa, Homo sapiens
  CDR3 for alpha chain variable domain of TCR clone 15586 (TRAV1-1, TRAJ23)
CAVRQGGKLIF

SEQ ID NO: 31172 - protein, 15 aa, Homo sapiens
  CDR3 for beta chain variable domain of TCR clone 15586 (TRBV6-3, TRBJ2-7)
CASSSPGTVFYEQYF

SEQ ID NO: 31173 - protein, 15 aa, Homo sapiens
  CDR3 for alpha chain variable domain of TCR clone 15587 (TRAV12-3, TRAJ6)
CAMSATTGGRYIPTF

SEQ ID NO: 31174 - protein, 16 aa, Homo sapiens
  CDR3 for beta chain variable domain of TCR clone 15587 (TRBV20-1, TRBJ1-2)
CSASMGQGVANYGYTF

SEQ ID NO: 31175 - protein, 21 aa, Homo sapiens
  CDR3 for alpha chain variable domain of TCR clone 15588 (TRAV10, TRAJ34)
CVVSGKHRQAHLWDWDQITSL

SEQ ID NO: 31176 - protein, 14 aa, Homo sapiens
  CDR3 for beta chain variable domain of TCR clone 15588 (TRBV19, TRBJ2-1)
CASPTFVLSGEQFF

SEQ ID NO: 31177 - protein, 13 aa, Homo sapiens
  CDR3 for alpha chain variable domain of TCR clone 15589 (TRAV21, TRAJ27)
CAARPSNAGKSTF

SEQ ID NO: 31178 - protein, 15 aa, Homo sapiens
  CDR3 for beta chain variable domain of TCR clone 15589 (TRBV6-3, TRBJ2-7)
CASSSPGTVFYEQYF

SEQ ID NO: 31179 - protein, 14 aa, Homo sapiens
  CDR3 for alpha chain variable domain of TCR clone 15590 (TRAV12-2, TRAJ17)
CAVLFKAAGNKLTF

SEQ ID NO: 31180 - protein, 17 aa, Homo sapiens
  CDR3 for beta chain variable domain of TCR clone 15590 (TRBV20-1, TRBJ2-2)
CSASGSGQGGLTGELVF

SEQ ID NO: 31181 - protein, 12 aa, Homo sapiens
  CDR3 for alpha chain variable domain of TCR clone 15591 (TRAV13-1, TRAJ15)
CAAGKPGTALIF

SEQ ID NO: 31182 - protein, 16 aa, Homo sapiens
  CDR3 for beta chain variable domain of TCR clone 15591 (TRBV18, TRBJ2-7)
CASSPRVLGTDSEQYF

SEQ ID NO: 31183 - protein, 23 aa, Homo sapiens
  CDR3 for alpha chain variable domain of TCR clone 15592 (TRAV26-1, TRAJ38)
CIADNAGNNHIQNPDPAVYQLRD

SEQ ID NO: 31184 - protein, 14 aa, Homo sapiens
  CDR3 for beta chain variable domain of TCR clone 15592 (TRBV7-3, TRBJ1-1)
CASSLKGGNTEAFF

SEQ ID NO: 31185 - protein, 17 aa, Homo sapiens
  CDR3 for alpha chain variable domain of TCR clone 15593 (TRAV3, TRAJ12)
CAVRDGGRMDSSYKLIF

SEQ ID NO: 31186 - protein, 12 aa, Homo sapiens
  CDR3 for beta chain variable domain of TCR clone 15593 (TRBV7-8, TRBJ2-7)
CASSLGDREQYF

SEQ ID NO: 31187 - protein, 14 aa, Homo sapiens
  CDR3 for alpha chain variable domain of TCR clone 15594 (TRAV8-3, TRAJ4)
CAVGAAGGYNKLIF

SEQ ID NO: 31188 - protein, 15 aa, Homo sapiens
  CDR3 for beta chain variable domain of TCR clone 15594 (TRBV20-1, TRBJ2-7)
CSARDRVSGMDEQYF

SEQ ID NO: 31189 - protein, 14 aa, Homo sapiens
  CDR3 for alpha chain variable domain of TCR clone 15595 (TRAV1-2, TRAJ8)
CAVREDTGFQKLVF

SEQ ID NO: 31190 - protein, 15 aa, Homo sapiens
  CDR3 for beta chain variable domain of TCR clone 15595 (TRBV3-1, TRBJ2-7)
CASSQVRQGAYEQYF

SEQ ID NO: 31191 - protein, 13 aa, Homo sapiens
  CDR3 for alpha chain variable domain of TCR clone 15596 (TRAV12-3, TRAJ33)
CAMSVNSNYQLIW

SEQ ID NO: 31192 - protein, 13 aa, Homo sapiens
  CDR3 for beta chain variable domain of TCR clone 15596 (TRBV7-2, TRBJ2-2)
CASSLAATGELFF

SEQ ID NO: 31193 - protein, 15 aa, Homo sapiens
  CDR3 for alpha chain variable domain of TCR clone 15597 (TRAV26-1, TRAJ29)
CIVRVEGSGNTPRVF

SEQ ID NO: 31194 - protein, 15 aa, Homo sapiens
  CDR3 for beta chain variable domain of TCR clone 15597 (TRBV7-9, TRBJ1-5)
CASSQGHQPNQPQHF

SEQ ID NO: 31195 - protein, 13 aa, Homo sapiens
  CDR3 for alpha chain variable domain of TCR clone 15598 (TRAV2, TRAJ40)
CAVVTSGTYKYIF

SEQ ID NO: 31196 - protein, 15 aa, Homo sapiens
  CDR3 for beta chain variable domain of TCR clone 15598 (TRBV11-3, TRBJ2-3)
CASLKDGRGGDTQYF

SEQ ID NO: 31197 - protein, 14 aa, Homo sapiens
  CDR3 for alpha chain variable domain of TCR clone 15599 (TRAV8-3, TRAJ47)
CAVGVREYGNKLVF

SEQ ID NO: 31198 - protein, 14 aa, Homo sapiens
  CDR3 for beta chain variable domain of TCR clone 15599 (TRBV6-6, TRBJ1-2)
CASSYSDRSYGYTF

SEQ ID NO: 31199 - protein, 14 aa, Homo sapiens
  CDR3 for alpha chain variable domain of TCR clone 15600 (TRAV12-1, TRAJ17)
CVVNYKAAGNNLTF

SEQ ID NO: 31200 - protein, 17 aa, Homo sapiens
  CDR3 for beta chain variable domain of TCR clone 15600 (TRBV20-1, TRBJ2-1)
CSASSSGLAGSYNEQFF

SEQ ID NO: 31201 - protein, 13 aa, Homo sapiens
  CDR3 for alpha chain variable domain of TCR clone 15601 (TRAV17, TRAJ5)
CAPMDTGRRALTF

SEQ ID NO: 31202 - protein, 20 aa, Homo sapiens
  CDR3 for beta chain variable domain of TCR clone 15601 (TRBV6-6, TRBJ2-5)
CASSPGGGLRGDPVLRARHA

SEQ ID NO: 31203 - protein, 14 aa, Homo sapiens
  CDR3 for alpha chain variable domain of TCR clone 15602 (TRAV17, TRAJ16)
CATADFPDGQKLLF

SEQ ID NO: 31204 - protein, 15 aa, Homo sapiens
  CDR3 for beta chain variable domain of TCR clone 15602 (TRBV18, TRBJ2-1)
CASSPPSASYNEQFF

SEQ ID NO: 31205 - protein, 10 aa, Homo sapiens
  CDR3 for alpha chain variable domain of TCR clone 15603 (TRAV9-2, TRAJ49)
CALTGNQFYF

SEQ ID NO: 31206 - protein, 13 aa, Homo sapiens
  CDR3 for beta chain variable domain of TCR clone 15603 (TRBV7-2, TRBJ2-7)
CASSSPSGSEQYF

SEQ ID NO: 31207 - protein, 14 aa, Homo sapiens
  CDR3 for alpha chain variable domain of TCR clone 15604 (TRAV12-3, TRAJ10)
SHLPLTGGGNKLTF

SEQ ID NO: 31208 - protein, 14 aa, Homo sapiens
  CDR3 for beta chain variable domain of TCR clone 15604 (TRBV19, TRBJ2-1)
CANPTFVLSGEQFF

SEQ ID NO: 31209 - protein, 14 aa, Homo sapiens
  CDR3 for alpha chain variable domain of TCR clone 15605 (TRAV1-2, TRAJ8)
CAVRADTGFQKLVF

SEQ ID NO: 31210 - protein, 15 aa, Homo sapiens
  CDR3 for beta chain variable domain of TCR clone 15605 (TRBV6-3, TRBJ2-7)
CASSSPGTVFYEQYF

SEQ ID NO: 31211 - protein, 15 aa, Homo sapiens
  CDR3 for alpha chain variable domain of TCR clone 15606 (TRAV8-3, TRAJ27)
CAVGPSKTDAGKSTF

SEQ ID NO: 31212 - protein, 15 aa, Homo sapiens
  CDR3 for beta chain variable domain of TCR clone 15606 (TRBV27, TRBJ2-1)
CASSNGGGSSNEQFF

SEQ ID NO: 31213 - protein, 14 aa, Homo sapiens
  CDR3 for alpha chain variable domain of TCR clone 15607 (TRAV12-3, TRAJ10)
SHLPLTGGGNKLTF

SEQ ID NO: 31214 - protein, 12 aa, Homo sapiens
  CDR3 for beta chain variable domain of TCR clone 15607 (TRBV5-1, TRBJ2-7)
CASSFRGYEQYF

SEQ ID NO: 31215 - protein, 10 aa, Homo sapiens
  CDR3 for alpha chain variable domain of TCR clone 15608 (TRAV36/DV7, TRAJ48)
CAVGNEKLTF

SEQ ID NO: 31216 - protein, 17 aa, Homo sapiens
  CDR3 for beta chain variable domain of TCR clone 15608 (TRBV13, TRBJ2-3)
CASSLSRVAGGRNTQYF

SEQ ID NO: 31217 - protein, 14 aa, Homo sapiens
  CDR3 for alpha chain variable domain of TCR clone 15609 (TRAV16, TRAJ32)
CALKLGGATNKLIF

SEQ ID NO: 31218 - protein, 13 aa, Homo sapiens
  CDR3 for beta chain variable domain of TCR clone 15609 (TRBV15, TRBJ1-6)
CATSGGLNSPLHF

SEQ ID NO: 31219 - protein, 16 aa, Homo sapiens
  CDR3 for alpha chain variable domain of TCR clone 15610 (TRAV30, TRAJ24)
CGTEIVDADSWGKLQF

SEQ ID NO: 31220 - protein, 15 aa, Homo sapiens
  CDR3 for beta chain variable domain of TCR clone 15610 (TRBV7-9, TRBJ1-4)
CASSARTGGNEKLFF

SEQ ID NO: 31221 - protein, 12 aa, Homo sapiens
  CDR3 for alpha chain variable domain of TCR clone 15611 (TRAV38-1, TRAJ32)
SAPLGATNKLIF

SEQ ID NO: 31222 - protein, 14 aa, Homo sapiens
  CDR3 for beta chain variable domain of TCR clone 15611 (TRBV29-1, TRBJ2-5)
CSVETSGSGETQYF

SEQ ID NO: 31223 - protein, 15 aa, Homo sapiens
  CDR3 for alpha chain variable domain of TCR clone 15612 (TRAV3, TRAJ22)
CAVRDRGGSARQLNF

SEQ ID NO: 31224 - protein, 16 aa, Homo sapiens
  CDR3 for beta chain variable domain of TCR clone 15612 (TRBV5-4, TRBJ2-3)
CASQQPGAGGADTQYF

SEQ ID NO: 31225 - protein, 14 aa, Homo sapiens
  CDR3 for alpha chain variable domain of TCR clone 15613 (TRAV23/DV6, TRAJ26)
CAARGNNYGQNFVF

SEQ ID NO: 31226 - protein, 15 aa, Homo sapiens
  CDR3 for beta chain variable domain of TCR clone 15613 (TRBV11-2, TRBJ1-1)
CASSPSGRLNTEAFF

SEQ ID NO: 31227 - protein, 16 aa, Homo sapiens
  CDR3 for alpha chain variable domain of TCR clone 15614 (TRAV1-2, TRAJ10)
CAVRGVLTGGGNKLAF

SEQ ID NO: 31228 - protein, 12 aa, Homo sapiens
  CDR3 for beta chain variable domain of TCR clone 15614 (TRBV7-8, TRBJ2-7)
CASSLGDREQYF

SEQ ID NO: 31229 - protein, 17 aa, Homo sapiens
  CDR3 for alpha chain variable domain of TCR clone 15615 (TRAV3, TRAJ42)
CAVRDRDYGGSHGNLIF

SEQ ID NO: 31230 - protein, 15 aa, Homo sapiens
  CDR3 for beta chain variable domain of TCR clone 15615 (TRBV6-6, TRBJ2-7)
CASSYSYGGSYEQYF

SEQ ID NO: 31231 - protein, 12 aa, Homo sapiens
  CDR3 for alpha chain variable domain of TCR clone 15616 (TRAV13-2, TRAJ16)
CAASPDGQKLLF

SEQ ID NO: 31232 - protein, 16 aa, Homo sapiens
  CDR3 for beta chain variable domain of TCR clone 15616 (TRBV10-3, TRBJ2-5)
CAISDPSGGAWETQYF

SEQ ID NO: 31233 - protein, 13 aa, Homo sapiens
  CDR3 for alpha chain variable domain of TCR clone 15617 (TRAV12-1, TRAJ16)
CVVSGPDGQKLLF

SEQ ID NO: 31234 - protein, 13 aa, Homo sapiens
  CDR3 for beta chain variable domain of TCR clone 15617 (TRBV2, TRBJ1-1)
CARNPTGGFHAFF

SEQ ID NO: 31235 - protein, 13 aa, Homo sapiens
  CDR3 for alpha chain variable domain of TCR clone 15618 (TRAV12-3, TRAJ4)
CNEQAGGYNKLIS

SEQ ID NO: 31236 - protein, 15 aa, Homo sapiens
  CDR3 for beta chain variable domain of TCR clone 15618 (TRBV5-1, TRBJ1-1)
CASSLSDLGGTEAFF

SEQ ID NO: 31237 - protein, 12 aa, Homo sapiens
  CDR3 for alpha chain variable domain of TCR clone 15619 (TRAV2, TRAJ9)
CAVGSGGFKTIF

SEQ ID NO: 31238 - protein, 16 aa, Homo sapiens
  CDR3 for beta chain variable domain of TCR clone 15619 (TRBV13, TRBJ2-2)
CASSPRTGEHTGELFF

SEQ ID NO: 31239 - protein, 15 aa, Homo sapiens
  CDR3 for alpha chain variable domain of TCR clone 15620 (TRAV13-1, TRAJ36)
CAASIRQTGANNLFF

SEQ ID NO: 31240 - protein, 17 aa, Homo sapiens
  CDR3 for beta chain variable domain of TCR clone 15620 (TRBV20-1, TRBJ2-2)
CSARDRNSGRHTGELFF

SEQ ID NO: 31241 - protein, 11 aa, Homo sapiens
  CDR3 for alpha chain variable domain of TCR clone 15621 (TRAV2, TRAJ13)
CASGGYQKVTF

SEQ ID NO: 31242 - protein, 14 aa, Homo sapiens
  CDR3 for beta chain variable domain of TCR clone 15621 (TRBV4-1, TRBJ2-2)
CASSQAVNTGELFF

SEQ ID NO: 31243 - protein, 12 aa, Homo sapiens
  CDR3 for alpha chain variable domain of TCR clone 15622 (TRAV1-1, TRAJ8)
CAVGTGFQKLVF

SEQ ID NO: 31244 - protein, 15 aa, Homo sapiens
  CDR3 for beta chain variable domain of TCR clone 15622 (TRBV7-9, TRBJ1-4)
CASSRTGGFNEKLFF

SEQ ID NO: 31245 - protein, 15 aa, Homo sapiens
  CDR3 for alpha chain variable domain of TCR clone 15623 (TRAV17, TRAJ57)
CATGPSQGGSEKLVF

SEQ ID NO: 31246 - protein, 13 aa, Homo sapiens
  CDR3 for beta chain variable domain of TCR clone 15623 (TRBV29-1, TRBJ2-1)
CSEGTSGYNEQFF

SEQ ID NO: 31247 - protein, 15 aa, Homo sapiens
  CDR3 for alpha chain variable domain of TCR clone 15624 (TRAV3, TRAJ22)
CAVRDRGGSARQLTF

SEQ ID NO: 31248 - protein, 16 aa, Homo sapiens
  CDR3 for beta chain variable domain of TCR clone 15624 (TRBV5-4, TRBJ2-3)
CASQRPGAGGADTQYF

SEQ ID NO: 31249 - protein, 14 aa, Homo sapiens
  CDR3 for alpha chain variable domain of TCR clone 15625 (TRAV9-2, TRAJ39)
CALYIYNAGNMLTF

SEQ ID NO: 31250 - protein, 16 aa, Homo sapiens
  CDR3 for beta chain variable domain of TCR clone 15625 (TRBV7-2, TRBJ2-6)
CAILSGVSSGANVLTF

SEQ ID NO: 31251 - protein, 14 aa, Homo sapiens
  CDR3 for alpha chain variable domain of TCR clone 15626 (TRAV12-3, TRAJ10)
SHLPLTGGGNKLTF

SEQ ID NO: 31252 - protein, 13 aa, Homo sapiens
  CDR3 for beta chain variable domain of TCR clone 15626 (TRBV12-4, TRBJ1-2)
CASSLRQGKGYTF

SEQ ID NO: 31253 - protein, 15 aa, Homo sapiens
  CDR3 for alpha chain variable domain of TCR clone 15627 (TRAV13-1, TRAJ10)
CAAEVVTGGGNKLTL

SEQ ID NO: 31254 - protein, 13 aa, Homo sapiens
  CDR3 for beta chain variable domain of TCR clone 15627 (TRBV28, TRBJ2-5)
CAGVSRGEETQYF

SEQ ID NO: 31255 - protein, 16 aa, Homo sapiens
  CDR3 for alpha chain variable domain of TCR clone 15628 (TRAV8-3, TRAJ13)
CAVGAYPSGGYQEVTF

SEQ ID NO: 31256 - protein, 15 aa, Homo sapiens
  CDR3 for beta chain variable domain of TCR clone 15628 (TRBV19, TRBJ1-5)
CASSIVWADNQPQHF

SEQ ID NO: 31257 - protein, 12 aa, Homo sapiens
  CDR3 for alpha chain variable domain of TCR clone 15629 (TRAV12-1, TRAJ40)
CVVYSGSYKYIF

SEQ ID NO: 31258 - protein, 18 aa, Homo sapiens
  CDR3 for beta chain variable domain of TCR clone 15629 (TRBV11-2, TRBJ2-3)
CASSLGGASRGAPNTQYF

SEQ ID NO: 31259 - protein, 14 aa, Homo sapiens
  CDR3 for alpha chain variable domain of TCR clone 15630 (TRAV8-4, TRAJ9)
CAVRINTGGFKTIF

SEQ ID NO: 31260 - protein, 13 aa, Homo sapiens
  CDR3 for beta chain variable domain of TCR clone 15630 (TRBV4-1, TRBJ1-1)
CASSQLGTGEAFF

SEQ ID NO: 31261 - protein, 18 aa, Homo sapiens
  CDR3 for alpha chain variable domain of TCR clone 15631 (TRAV13-1, TRAJ52)
CAAKNHNAGGTSYGKLTF

SEQ ID NO: 31262 - protein, 15 aa, Homo sapiens
  CDR3 for beta chain variable domain of TCR clone 15631 (TRBV6-1, TRBJ2-3)
CASSERGGITDTQYF

SEQ ID NO: 31263 - protein, 15 aa, Homo sapiens
  CDR3 for alpha chain variable domain of TCR clone 15632 (TRAV12-3, TRAJ6)
CAMSATSGGSYIPTF

SEQ ID NO: 31264 - protein, 14 aa, Homo sapiens
  CDR3 for beta chain variable domain of TCR clone 15632 (TRBV12-5, TRBJ2-5)
CASGSRTHQETQYF

SEQ ID NO: 31265 - protein, 13 aa, Homo sapiens
  CDR3 for alpha chain variable domain of TCR clone 15633 (TRAV21, TRAJ27)
CAARPGNAGKSTF

SEQ ID NO: 31266 - protein, 14 aa, Homo sapiens
  CDR3 for beta chain variable domain of TCR clone 15633 (TRBV7-6, TRBJ2-3)
CASSLGTVTDTQYC

SEQ ID NO: 31267 - protein, 16 aa, Homo sapiens
  CDR3 for alpha chain variable domain of TCR clone 15634 (TRAV21, TRAJ37)
CAVRTAGSSNTGKLIF

SEQ ID NO: 31268 - protein, 13 aa, Homo sapiens
  CDR3 for beta chain variable domain of TCR clone 15634 (TRBV7-9, TRBJ2-5)
CASPPSGRETQYF

SEQ ID NO: 31269 - protein, 13 aa, Homo sapiens
  CDR3 for alpha chain variable domain of TCR clone 15635 (TRAV8-3, TRAJ28)
CAVGAVGSYQLTF

SEQ ID NO: 31270 - protein, 15 aa, Homo sapiens
  CDR3 for beta chain variable domain of TCR clone 15635 (TRBV7-9, TRBJ1-5)
CASSQGHQTNQPQHF

SEQ ID NO: 31271 - protein, 12 aa, Homo sapiens
  CDR3 for alpha chain variable domain of TCR clone 15636 (TRAV3, TRAJ20)
CAVRDGDYKLSF

SEQ ID NO: 31272 - protein, 13 aa, Homo sapiens
  CDR3 for beta chain variable domain of TCR clone 15636 (TRBV7-9, TRBJ1-2)
CASSLKQNYGYTF

SEQ ID NO: 31273 - protein, 13 aa, Homo sapiens
  CDR3 for alpha chain variable domain of TCR clone 15637 (TRAV13-2, TRAJ15)
CAESNQAGTALIF

SEQ ID NO: 31274 - protein, 14 aa, Homo sapiens
  CDR3 for beta chain variable domain of TCR clone 15637 (TRBV5-7, TRBJ1-5)
CASSLNRLNQPQHF

SEQ ID NO: 31275 - protein, 17 aa, Homo sapiens
  CDR3 for alpha chain variable domain of TCR clone 15638 (TRAV23/DV6, TRAJ57)
CAASSTLSQGGSEKLVF

SEQ ID NO: 31276 - protein, 14 aa, Homo sapiens
  CDR3 for beta chain variable domain of TCR clone 15638 (TRBV25-1, TRBJ1-1)
CASTHLGGNTEAFS

SEQ ID NO: 31277 - protein, 15 aa, Homo sapiens
  CDR3 for alpha chain variable domain of TCR clone 15639 (TRAV3, TRAJ47)
CAVRDIGEYGNKLVL

SEQ ID NO: 31278 - protein, 14 aa, Homo sapiens
  CDR3 for beta chain variable domain of TCR clone 15639 (TRBV13, TRBJ2-5)
CASSLERVGETQYF

SEQ ID NO: 31279 - protein, 12 aa, Homo sapiens
  CDR3 for alpha chain variable domain of TCR clone 15640 (TRAV26-1, TRAJ13)
CIVSRGYQKVTF

SEQ ID NO: 31280 - protein, 16 aa, Homo sapiens
  CDR3 for beta chain variable domain of TCR clone 15640 (TRBV27, TRBJ2-1)
CASSLSKGFGLDEQSF

SEQ ID NO: 31281 - protein, 14 aa, Homo sapiens
  CDR3 for alpha chain variable domain of TCR clone 15641 (TRAV1-2, TRAJ16)
CAVNRFSDGQKLLF

SEQ ID NO: 31282 - protein, 13 aa, Homo sapiens
  CDR3 for beta chain variable domain of TCR clone 15641 (TRBV19, TRBJ1-3)
CASRLSLGNTIYF

SEQ ID NO: 31283 - protein, 15 aa, Homo sapiens
  CDR3 for alpha chain variable domain of TCR clone 15642 (TRAV8-3, TRAJ45)
CASSYSGGGADGLTF

SEQ ID NO: 31284 - protein, 13 aa, Homo sapiens
  CDR3 for beta chain variable domain of TCR clone 15642 (TRBV10-3, TRBJ2-7)
CTSKLAVNYEQYF

SEQ ID NO: 31285 - protein, 15 aa, Homo sapiens
  CDR3 for alpha chain variable domain of TCR clone 15643 (TRAV27, TRAJ38)
CAARRSAGNNRKLIW

SEQ ID NO: 31286 - protein, 13 aa, Homo sapiens
  CDR3 for beta chain variable domain of TCR clone 15643 (TRBV12-5, TRBJ2-3)
CASGDRQSDTQYF

SEQ ID NO: 31287 - protein, 16 aa, Homo sapiens
  CDR3 for alpha chain variable domain of TCR clone 15644 (TRAV3, TRAJ37)
CAVGVRGSGNTGKLIF

SEQ ID NO: 31288 - protein, 16 aa, Homo sapiens
  CDR3 for beta chain variable domain of TCR clone 15644 (TRBV11-2, TRBJ2-7)
CASSPTTGGVSYEQYF

SEQ ID NO: 31289 - protein, 14 aa, Homo sapiens
  CDR3 for alpha chain variable domain of TCR clone 15645 (TRAV21, TRAJ35)
CAVMPIGFGNVLYC

SEQ ID NO: 31290 - protein, 12 aa, Homo sapiens
  CDR3 for beta chain variable domain of TCR clone 15645 (TRBV7-9, TRBJ2-7)
CASSIKREEQYF

SEQ ID NO: 31291 - protein, 12 aa, Homo sapiens
  CDR3 for alpha chain variable domain of TCR clone 15646 (TRAV8-4, TRAJ9)
CAVNTGGFKTIF

SEQ ID NO: 31292 - protein, 15 aa, Homo sapiens
  CDR3 for beta chain variable domain of TCR clone 15646 (TRBV5-4, TRBJ2-1)
CASSSGLAELNEQFF

SEQ ID NO: 31293 - protein, 14 aa, Homo sapiens
  CDR3 for alpha chain variable domain of TCR clone 15647 (TRAV20, TRAJ56)
CAVQFGGADSKLTF

SEQ ID NO: 31294 - protein, 14 aa, Homo sapiens
  CDR3 for beta chain variable domain of TCR clone 15647 (TRBV20-1, TRBJ2-7)
CSAKRGRSSYEQYF

SEQ ID NO: 31295 - protein, 14 aa, Homo sapiens
  CDR3 for alpha chain variable domain of TCR clone 15648 (TRAV20, TRAJ56)
CAVQFVGANSKLTF

SEQ ID NO: 31296 - protein, 14 aa, Homo sapiens
  CDR3 for beta chain variable domain of TCR clone 15648 (TRBV20-1, TRBJ2-7)
CSAKRGRSSYEQYF

SEQ ID NO: 31297 - protein, 14 aa, Homo sapiens
  CDR3 for alpha chain variable domain of TCR clone 15649 (TRAV9-2, TRAJ20)
CALRDPLNDYKLSF

SEQ ID NO: 31298 - protein, 14 aa, Homo sapiens
  CDR3 for beta chain variable domain of TCR clone 15649 (TRBV11-2, TRBJ1-2)
CASSLYRGNYGYTF

SEQ ID NO: 31299 - protein, 13 aa, Homo sapiens
  CDR3 for alpha chain variable domain of TCR clone 15650 (TRAV1-1, TRAJ9)
CAAKNTGGFTTIF

SEQ ID NO: 31300 - protein, 14 aa, Homo sapiens
  CDR3 for beta chain variable domain of TCR clone 15650 (TRBV20-1, TRBJ2-1)
CSAQIGGSANEQFF

SEQ ID NO: 31301 - protein, 14 aa, Homo sapiens
  CDR3 for alpha chain variable domain of TCR clone 15651 (TRAV12-3, TRAJ10)
SHLPLTGGGNKLTF

SEQ ID NO: 31302 - protein, 13 aa, Homo sapiens
  CDR3 for beta chain variable domain of TCR clone 15651 (TRBV19, TRBJ1-5)
CASSIGGEQPQHF

SEQ ID NO: 31303 - protein, 14 aa, Homo sapiens
  CDR3 for alpha chain variable domain of TCR clone 15652 (TRAV1-2, TRAJ6)
CAVRTSGGSYIPTF

SEQ ID NO: 31304 - protein, 14 aa, Homo sapiens
  CDR3 for beta chain variable domain of TCR clone 15652 (TRBV19, TRBJ1-5)
CAAGTGDSNQPQHF

SEQ ID NO: 31305 - protein, 13 aa, Homo sapiens
  CDR3 for alpha chain variable domain of TCR clone 15653 (TRAV38-1, TRAJ42)
CARWGGSQGNLIL

SEQ ID NO: 31306 - protein, 17 aa, Homo sapiens
  CDR3 for beta chain variable domain of TCR clone 15653 (TRBV20-1, TRBJ2-1)
CSARDPLAGVWDNEQFF

SEQ ID NO: 31307 - protein, 11 aa, Homo sapiens
  CDR3 for alpha chain variable domain of TCR clone 15654 (TRAV1-1, TRAJ23)
CAVRQGGKLIF

SEQ ID NO: 31308 - protein, 13 aa, Homo sapiens
  CDR3 for beta chain variable domain of TCR clone 15654 (TRBV10-3, TRBJ2-7)
CASKLAVNYEQYF

SEQ ID NO: 31309 - protein, 17 aa, Homo sapiens
  CDR3 for alpha chain variable domain of TCR clone 15655 (TRAV3, TRAJ6)
CAVRDGPRAGGSYIPTF

SEQ ID NO: 31310 - protein, 14 aa, Homo sapiens
  CDR3 for beta chain variable domain of TCR clone 15655 (TRBV7-2, TRBJ2-7)
CASSPTTSFYEQYF

SEQ ID NO: 31311 - protein, 13 aa, Homo sapiens
  CDR3 for alpha chain variable domain of TCR clone 15656 (TRAV2, TRAJ15)
CAVASQAGTALIF

SEQ ID NO: 31312 - protein, 11 aa, Homo sapiens
  CDR3 for beta chain variable domain of TCR clone 15656 (TRBV27, TRBJ2-3)
CASSLGDTQYF

SEQ ID NO: 31313 - protein, 13 aa, Homo sapiens
  CDR3 for alpha chain variable domain of TCR clone 15657 (TRAV23/DV6, TRAJ16)
CAASGSDGQKLLF

SEQ ID NO: 31314 - protein, 15 aa, Homo sapiens
  CDR3 for beta chain variable domain of TCR clone 15657 (TRBV5-1, TRBJ1-1)
CASSFTGGWNTEAFF

SEQ ID NO: 31315 - protein, 15 aa, Homo sapiens
  CDR3 for alpha chain variable domain of TCR clone 15658 (TRAV27, TRAJ38)
CAARRNAGNNRKLIW

SEQ ID NO: 31316 - protein, 14 aa, Homo sapiens
  CDR3 for beta chain variable domain of TCR clone 15658 (TRBV25-1, TRBJ1-1)
CASTHLGGNTEAFF

SEQ ID NO: 31317 - protein, 15 aa, Homo sapiens
  CDR3 for alpha chain variable domain of TCR clone 15659 (TRAV26-1, TRAJ29)
CIVRVEGSGNTPLVF

SEQ ID NO: 31318 - protein, 15 aa, Homo sapiens
  CDR3 for beta chain variable domain of TCR clone 15659 (TRBV7-9, TRBJ1-5)
CVSSQGHQPNQPQHF

SEQ ID NO: 31319 - protein, 13 aa, Homo sapiens
  CDR3 for alpha chain variable domain of TCR clone 15660 (TRAV17, TRAJ9)
CATDYTGGFKTIF

SEQ ID NO: 31320 - protein, 16 aa, Homo sapiens
  CDR3 for beta chain variable domain of TCR clone 15660 (TRBV7-7, TRBJ2-1)
CAGSLASGTSYNEQFF

SEQ ID NO: 31321 - protein, 14 aa, Homo sapiens
  CDR3 for alpha chain variable domain of TCR clone 15661 (TRAV1-2, TRAJ8)
CAVREDTGFQKLVF

SEQ ID NO: 31322 - protein, 15 aa, Homo sapiens
  CDR3 for beta chain variable domain of TCR clone 15661 (TRBV6-5, TRBJ2-1)
CASSYDAGAGNEQFF

SEQ ID NO: 31323 - protein, 14 aa, Homo sapiens
  CDR3 for alpha chain variable domain of TCR clone 15662 (TRAV12-2, TRAJ17)
CAVLFKAAGNKLIF

SEQ ID NO: 31324 - protein, 17 aa, Homo sapiens
  CDR3 for beta chain variable domain of TCR clone 15662 (TRBV20-1, TRBJ2-2)
CSASGSGQGGLTGELFF

SEQ ID NO: 31325 - protein, 14 aa, Homo sapiens
  CDR3 for alpha chain variable domain of TCR clone 15663 (TRAV35, TRAJ33)
CAGSSQDSNYRLIW

SEQ ID NO: 31326 - protein, 15 aa, Homo sapiens
  CDR3 for beta chain variable domain of TCR clone 15663 (TRBV20-1, TRBJ2-7)
CSAESGTSGAYEQYF

SEQ ID NO: 31327 - protein, 14 aa, Homo sapiens
  CDR3 for alpha chain variable domain of TCR clone 15664 (TRAV1-2, TRAJ16)
CAVNRFSDGQKLLF

SEQ ID NO: 31328 - protein, 15 aa, Homo sapiens
  CDR3 for beta chain variable domain of TCR clone 15664 (TRBV9, TRBJ1-6)
CASSVAGTGDLPLHF

SEQ ID NO: 31329 - protein, 15 aa, Homo sapiens
  CDR3 for alpha chain variable domain of TCR clone 15665 (TRAV23/DV6, TRAJ44)
CAASGGTGTASKLTF

SEQ ID NO: 31330 - protein, 15 aa, Homo sapiens
  CDR3 for beta chain variable domain of TCR clone 15665 (TRBV6-3, TRBJ2-7)
CASSSHGTVFYEQYF

SEQ ID NO: 31331 - protein, 15 aa, Homo sapiens
  CDR3 for alpha chain variable domain of TCR clone 15666 (TRAV35, TRAJ50)
CAGQLRKTSYDKVIF

SEQ ID NO: 31332 - protein, 12 aa, Homo sapiens
  CDR3 for beta chain variable domain of TCR clone 15666 (TRBV5-1, TRBJ2-5)
CASSLGLGTQYF

SEQ ID NO: 31333 - protein, 12 aa, Homo sapiens
  CDR3 for alpha chain variable domain of TCR clone 15667 (TRAV8-3, TRAJ20)
CAVDANDYKLSF

SEQ ID NO: 31334 - protein, 16 aa, Homo sapiens
  CDR3 for beta chain variable domain of TCR clone 15667 (TRBV19, TRBJ2-2)
CASRSPGTGATGELFF

SEQ ID NO: 31335 - protein, 14 aa, Homo sapiens
  CDR3 for alpha chain variable domain of TCR clone 15668 (TRAV26-1, TRAJ39)
CIVRGSRAGNMLNF

SEQ ID NO: 31336 - protein, 15 aa, Homo sapiens
  CDR3 for beta chain variable domain of TCR clone 15668 (TRBV7-9, TRBJ1-5)
CASSQGHQPNQPQHF

SEQ ID NO: 31337 - protein, 13 aa, Homo sapiens
  CDR3 for alpha chain variable domain of TCR clone 15669 (TRAV36/DV7, TRAJ53)
CALSGGSNYKLTF

SEQ ID NO: 31338 - protein, 13 aa, Homo sapiens
  CDR3 for beta chain variable domain of TCR clone 15669 (TRBV28, TRBJ2-4)
CASSQSSKNMQYF

SEQ ID NO: 31339 - protein, 11 aa, Homo sapiens
  CDR3 for alpha chain variable domain of TCR clone 15670 (TRAV26-1, TRAJ22)
CIVRVSFWFCK

SEQ ID NO: 31340 - protein, 13 aa, Homo sapiens
  CDR3 for beta chain variable domain of TCR clone 15670 (TRBV7-9, TRBJ1-2)
CASSLKQNYGYTF

SEQ ID NO: 31341 - protein, 14 aa, Homo sapiens
  CDR3 for alpha chain variable domain of TCR clone 15671 (TRAV1-2, TRAJ16)
CAVNRFSDGQKLLF

SEQ ID NO: 31342 - protein, 16 aa, Homo sapiens
  CDR3 for beta chain variable domain of TCR clone 15671 (TRBV7-2, TRBJ2-5)
CASSSKWLSGQETQYF

SEQ ID NO: 31343 - protein, 14 aa, Homo sapiens
  CDR3 for alpha chain variable domain of TCR clone 15672 (TRAV26-1, TRAJ38)
CIADNAGNNRKLIW

SEQ ID NO: 31344 - protein, 13 aa, Homo sapiens
  CDR3 for beta chain variable domain of TCR clone 15672 (TRBV20-1, TRBJ1-1)
CSARGGGNTEAFC

SEQ ID NO: 31345 - protein, 15 aa, Homo sapiens
  CDR3 for alpha chain variable domain of TCR clone 15673 (TRAV8-6, TRAJ6)
CAVSGESGGSYIPTF

SEQ ID NO: 31346 - protein, 15 aa, Homo sapiens
  CDR3 for beta chain variable domain of TCR clone 15673 (TRBV20-1, TRBJ2-7)
CSARDRVSGMDEQYF

SEQ ID NO: 31347 - protein, 14 aa, Homo sapiens
  CDR3 for alpha chain variable domain of TCR clone 15674 (TRAV12-2, TRAJ40)
CAVKIPSGTYKYIF

SEQ ID NO: 31348 - protein, 16 aa, Homo sapiens
  CDR3 for beta chain variable domain of TCR clone 15674 (TRBV19, TRBJ2-2)
CASRSPGTGATGELFF

SEQ ID NO: 31349 - protein, 15 aa, Homo sapiens
  CDR3 for alpha chain variable domain of TCR clone 15675 (TRAV12-1, TRAJ44)
CVADLPTGTASKLTF

SEQ ID NO: 31350 - protein, 13 aa, Homo sapiens
  CDR3 for beta chain variable domain of TCR clone 15675 (TRBV6-5, TRBJ2-5)
CASGPQGGETQYF

SEQ ID NO: 31351 - protein, 16 aa, Homo sapiens
  CDR3 for alpha chain variable domain of TCR clone 15676 (TRAV12-2, TRAJ18)
CAVTTDRGSTLGRLYF

SEQ ID NO: 31352 - protein, 13 aa, Homo sapiens
  CDR3 for beta chain variable domain of TCR clone 15676 (TRBV19, TRBJ2-3)
CATWGKITDTQYF

SEQ ID NO: 31353 - protein, 18 aa, Homo sapiens
  CDR3 for alpha chain variable domain of TCR clone 15677 (TRAV21, TRAJ52)
CAVRPSPAGGTSYGKLTF

SEQ ID NO: 31354 - protein, 16 aa, Homo sapiens
  CDR3 for beta chain variable domain of TCR clone 15677 (TRBV13, TRBJ2-3)
CQQPLRVAGGRNTQYF

SEQ ID NO: 31355 - protein, 15 aa, Homo sapiens
  CDR3 for alpha chain variable domain of TCR clone 15678 (TRAV3, TRAJ20)
CAVRDIKLSDYKLSF

SEQ ID NO: 31356 - protein, 15 aa, Homo sapiens
  CDR3 for beta chain variable domain of TCR clone 15678 (TRBV7-9, TRBJ1-6)
CASSSPGRGDSPLHF

SEQ ID NO: 31357 - protein, 13 aa, Homo sapiens
  CDR3 for alpha chain variable domain of TCR clone 15679 (TRAV8-3, TRAJ28)
CAVGAVRSYQLTF

SEQ ID NO: 31358 - protein, 14 aa, Homo sapiens
  CDR3 for beta chain variable domain of TCR clone 15679 (TRBV7-2, TRBJ2-7)
CASRSQGAAYEQYF

SEQ ID NO: 31359 - protein, 14 aa, Homo sapiens
  CDR3 for alpha chain variable domain of TCR clone 15680 (TRAV13-1, TRAJ10)
CAAKEPGGGNKLTF

SEQ ID NO: 31360 - protein, 15 aa, Homo sapiens
  CDR3 for beta chain variable domain of TCR clone 15680 (TRBV9, TRBJ1-6)
CASSVAGTGDSPLHF

SEQ ID NO: 31361 - protein, 16 aa, Homo sapiens
  CDR3 for alpha chain variable domain of TCR clone 15681 (TRAV1-2, TRAJ10)
CAVRGGLTGGGNKLTF

SEQ ID NO: 31362 - protein, 12 aa, Homo sapiens
  CDR3 for beta chain variable domain of TCR clone 15681 (TRBV7-8, TRBJ2-7)
CASSLGDREQYF

SEQ ID NO: 31363 - protein, 16 aa, Homo sapiens
  CDR3 for alpha chain variable domain of TCR clone 15682 (TRAV27, TRAJ13)
CAGAKSDPGGYQKVTF

SEQ ID NO: 31364 - protein, 15 aa, Homo sapiens
  CDR3 for beta chain variable domain of TCR clone 15682 (TRBV29-1, TRBJ2-1)
CSVGRHALFYNEQFF

SEQ ID NO: 31365 - protein, 18 aa, Homo sapiens
  CDR3 for alpha chain variable domain of TCR clone 15683 (TRAV13-1, TRAJ52)
CAASKRSAGGTSYGKLTF

SEQ ID NO: 31366 - protein, 12 aa, Homo sapiens
  CDR3 for beta chain variable domain of TCR clone 15683 (TRBV29-1, TRBJ2-3)
CSVTGGADTQYF

SEQ ID NO: 31367 - protein, 13 aa, Homo sapiens
  CDR3 for alpha chain variable domain of TCR clone 15684 (TRAV13-1, TRAJ43)
CAASLSNNNDMRF

SEQ ID NO: 31368 - protein, 15 aa, Homo sapiens
  CDR3 for beta chain variable domain of TCR clone 15684 (TRBV5-1, TRBJ2-1)
YASSQAGYWWNEQFF

SEQ ID NO: 31369 - protein, 14 aa, Homo sapiens
  CDR3 for alpha chain variable domain of TCR clone 15685 (TRAV8-6, TRAJ12)
CAVSRVDSSYKLIF

SEQ ID NO: 31370 - protein, 13 aa, Homo sapiens
  CDR3 for beta chain variable domain of TCR clone 15685 (TRBV12-4, TRBJ1-1)
CASSFSEDTEAFF

SEQ ID NO: 31371 - protein, 17 aa, Homo sapiens
  CDR3 for alpha chain variable domain of TCR clone 15686 (TRAV3, TRAJ6)
CAVRDGPRAGGSYIPSF

SEQ ID NO: 31372 - protein, 14 aa, Homo sapiens
  CDR3 for beta chain variable domain of TCR clone 15686 (TRBV7-2, TRBJ2-7)
CASSPKTSFYEQYF

SEQ ID NO: 31373 - protein, 14 aa, Homo sapiens
  CDR3 for alpha chain variable domain of TCR clone 15687 (TRAV26-1, TRAJ38)
CIADNAGNNRKLIW

SEQ ID NO: 31374 - protein, 15 aa, Homo sapiens
  CDR3 for beta chain variable domain of TCR clone 15687 (TRBV11-3, TRBJ2-7)
CASSPGPASSYEQYF

SEQ ID NO: 31375 - protein, 15 aa, Homo sapiens
  CDR3 for alpha chain variable domain of TCR clone 15688 (TRAV14/DV4, TRAJ47)
CAMREAMEYGNKLVF

SEQ ID NO: 31376 - protein, 15 aa, Homo sapiens
  CDR3 for beta chain variable domain of TCR clone 15688 (TRBV7-2, TRBJ1-5)
CASSSGQGHAQPQHF

SEQ ID NO: 31377 - protein, 11 aa, Homo sapiens
  CDR3 for alpha chain variable domain of TCR clone 15689 (TRAV1-1, TRAJ23)
CAVRQGGKLIF

SEQ ID NO: 31378 - protein, 20 aa, Homo sapiens
  CDR3 for beta chain variable domain of TCR clone 15689 (TRBV7-8, TRBJ2-2)
CDSSHLFPGPTIHITGELFF

SEQ ID NO: 31379 - protein, 14 aa, Homo sapiens
  CDR3 for alpha chain variable domain of TCR clone 15690 (TRAV12-3, TRAJ10)
SHLPLTGGGNKLTF

SEQ ID NO: 31380 - protein, 15 aa, Homo sapiens
  CDR3 for beta chain variable domain of TCR clone 15690 (TRBV5-1, TRBJ2-1)
CASSPPRAPYNEQFF

SEQ ID NO: 31381 - protein, 11 aa, Homo sapiens
  CDR3 for alpha chain variable domain of TCR clone 15691 (TRAV23/DV6, TRAJ9)
CFHTGGFKTIF

SEQ ID NO: 31382 - protein, 14 aa, Homo sapiens
  CDR3 for beta chain variable domain of TCR clone 15691 (TRBV4-1, TRBJ2-2)
CASSQAVNTGELFF

SEQ ID NO: 31383 - protein, 18 aa, Homo sapiens
  CDR3 for alpha chain variable domain of TCR clone 15692 (TRAV27, TRAJ3)
SLVIQASLRGSSASKIIF

SEQ ID NO: 31384 - protein, 15 aa, Homo sapiens
  CDR3 for beta chain variable domain of TCR clone 15692 (TRBV28, TRBJ1-3)
CASSMGWASGNTIYF

SEQ ID NO: 31385 - protein, 20 aa, Homo sapiens
  CDR3 for alpha chain variable domain of TCR clone 15693 (TRAV26-1, TRAJ42)
CCVLLHRQTYYGGSQGNLIF

SEQ ID NO: 31386 - protein, 16 aa, Homo sapiens
  CDR3 for beta chain variable domain of TCR clone 15693 (TRBV7-3, TRBJ2-2)
CASSLKRGTLSGELSF

SEQ ID NO: 31387 - protein, 13 aa, Homo sapiens
  CDR3 for alpha chain variable domain of TCR clone 15694 (TRAV8-3, TRAJ28)
CAVGAVGSYQLPF

SEQ ID NO: 31388 - protein, 15 aa, Homo sapiens
  CDR3 for beta chain variable domain of TCR clone 15694 (TRBV7-9, TRBJ1-5)
CASSQGHQPNQPQHF

SEQ ID NO: 31389 - protein, 13 aa, Homo sapiens
  CDR3 for alpha chain variable domain of TCR clone 15695 (TRAV35, TRAJ42)
RAGFPGSQGNLIF

SEQ ID NO: 31390 - protein, 14 aa, Homo sapiens
  CDR3 for beta chain variable domain of TCR clone 15695 (TRBV19, TRBJ2-1)
CASPTFVLSGEQFF

SEQ ID NO: 31391 - protein, 13 aa, Homo sapiens
  CDR3 for alpha chain variable domain of TCR clone 15696 (TRAV1-2, TRAJ9)
CAALNTGGFKTIF

SEQ ID NO: 31392 - protein, 14 aa, Homo sapiens
  CDR3 for beta chain variable domain of TCR clone 15696 (TRBV4-2, TRBJ2-5)
CASSQDRGRETQYF

SEQ ID NO: 31393 - protein, 12 aa, Homo sapiens
  CDR3 for alpha chain variable domain of TCR clone 15697 (TRAV12-3, TRAJ17)
CAMTLTGNKLTF

SEQ ID NO: 31394 - protein, 15 aa, Homo sapiens
  CDR3 for beta chain variable domain of TCR clone 15697 (TRBV20-1, TRBJ2-7)
CSARDRVSGMDEQNF

SEQ ID NO: 31395 - protein, 15 aa, Homo sapiens
  CDR3 for alpha chain variable domain of TCR clone 15698 (TRAV3, TRAJ3)
CAVRDRDSSASKIIF

SEQ ID NO: 31396 - protein, 14 aa, Homo sapiens
  CDR3 for beta chain variable domain of TCR clone 15698 (TRBV5-4, TRBJ1-1)
CASSLDSRRDEAFF

SEQ ID NO: 31397 - protein, 15 aa, Homo sapiens
  CDR3 for alpha chain variable domain of TCR clone 15699 (TRAV17, TRAJ13)
CATDAGSGGYQKVTF

SEQ ID NO: 31398 - protein, 17 aa, Homo sapiens
  CDR3 for beta chain variable domain of TCR clone 15699 (TRBV11-3, TRBJ2-1)
CASSLYPPGVEYNEQFF

SEQ ID NO: 31399 - protein, 13 aa, Homo sapiens
  CDR3 for alpha chain variable domain of TCR clone 15700 (TRAV13-2, TRAJ13)
CAEMDFGNEKLTF

SEQ ID NO: 31400 - protein, 15 aa, Homo sapiens
  CDR3 for beta chain variable domain of TCR clone 15700 (TRBV7-9, TRBJ1-6)
CASSSPGRGNSPLHF

SEQ ID NO: 31401 - protein, 15 aa, Homo sapiens
  CDR3 for alpha chain variable domain of TCR clone 15701 (TRAV12-2, TRAJ43)
CAFGMRFGAGTRLTV

SEQ ID NO: 31402 - protein, 18 aa, Homo sapiens
  CDR3 for beta chain variable domain of TCR clone 15701 (TRBV20-1, TRBJ2-3)
CSASGLAGGPGTTDTQYF

SEQ ID NO: 31403 - protein, 17 aa, Homo sapiens
  CDR3 for alpha chain variable domain of TCR clone 15702 (TRAV3, TRAJ42)
CAVRDRDYGGSQGNLIF

SEQ ID NO: 31404 - protein, 13 aa, Homo sapiens
  CDR3 for beta chain variable domain of TCR clone 15702 (TRBV7-3, TRBJ1-1)
CASSQDWGAEAFF

SEQ ID NO: 31405 - protein, 15 aa, Homo sapiens
  CDR3 for alpha chain variable domain of TCR clone 15703 (TRAV26-2, TRAJ39)
CSLRGNNNAGNMLTF

SEQ ID NO: 31406 - protein, 15 aa, Homo sapiens
  CDR3 for beta chain variable domain of TCR clone 15703 (TRBV5-4, TRBJ1-1)
CASSPLGWANTEAFF

SEQ ID NO: 31407 - protein, 15 aa, Homo sapiens
  CDR3 for alpha chain variable domain of TCR clone 15704 (TRAV14/DV4, TRAJ12)
CAMREGWDSSYKLIF

SEQ ID NO: 31408 - protein, 16 aa, Homo sapiens
  CDR3 for beta chain variable domain of TCR clone 15704 (TRBV2, TRBJ2-5)
CASGETQGVGEETQYF

SEQ ID NO: 31409 - protein, 12 aa, Homo sapiens
  CDR3 for alpha chain variable domain of TCR clone 15705 (TRAV13-1, TRAJ32)
VADGGATNKLIF

SEQ ID NO: 31410 - protein, 17 aa, Homo sapiens
  CDR3 for beta chain variable domain of TCR clone 15705 (TRBV15, TRBJ1-2)
CATSGREIDVVNYGYTF

SEQ ID NO: 31411 - protein, 13 aa, Homo sapiens
  CDR3 for alpha chain variable domain of TCR clone 15706 (TRAV27, TRAJ41)
CAGEGNSGYALNF

SEQ ID NO: 31412 - protein, 14 aa, Homo sapiens
  CDR3 for beta chain variable domain of TCR clone 15706 (TRBV7-2, TRBJ1-1)
YASSFLTGTTEAFF

SEQ ID NO: 31413 - protein, 13 aa, Homo sapiens
  CDR3 for alpha chain variable domain of TCR clone 15707 (TRAV27, TRAJ45)
CRSSGGGSDGLTF

SEQ ID NO: 31414 - protein, 17 aa, Homo sapiens
  CDR3 for beta chain variable domain of TCR clone 15707 (TRBV11-2, TRBJ2-1)
CASSLYPPGVEYNEQFF

SEQ ID NO: 31415 - protein, 11 aa, Homo sapiens
  CDR3 for alpha chain variable domain of TCR clone 15708 (TRAV3, TRAJ21)
CAVGNFNKFYF

SEQ ID NO: 31416 - protein, 15 aa, Homo sapiens
  CDR3 for beta chain variable domain of TCR clone 15708 (TRBV7-9, TRBJ1-5)
CASSQGHQPNQPQHF

SEQ ID NO: 31417 - protein, 12 aa, Homo sapiens
  CDR3 for alpha chain variable domain of TCR clone 15709 (TRAV12-3, TRAJ17)
CAMTLTGNKLTF

SEQ ID NO: 31418 - protein, 14 aa, Homo sapiens
  CDR3 for beta chain variable domain of TCR clone 15709 (TRBV11-2, TRBJ2-7)
CASSLGAGAYEQYF

SEQ ID NO: 31419 - protein, 15 aa, Homo sapiens
  CDR3 for alpha chain variable domain of TCR clone 15710 (TRAV3, TRAJ5)
CAVRDRKKGRRALTF

SEQ ID NO: 31420 - protein, 15 aa, Homo sapiens
  CDR3 for beta chain variable domain of TCR clone 15710 (TRBV7-8, TRBJ2-1)
CASSLADSLYNEQFF

SEQ ID NO: 31421 - protein, 15 aa, Homo sapiens
  CDR3 for alpha chain variable domain of TCR clone 15711 (TRAV38-2/DV8, TRAJ39)
CAYRTSNNAGNMLTF

SEQ ID NO: 31422 - protein, 14 aa, Homo sapiens
  CDR3 for beta chain variable domain of TCR clone 15711 (TRBV5-1, TRBJ2-5)
CASSLSLNQETQYF

SEQ ID NO: 31423 - protein, 12 aa, Homo sapiens
  CDR3 for alpha chain variable domain of TCR clone 15712 (TRAV12-1, TRAJ40)
CVVHSGTYKYIF

SEQ ID NO: 31424 - protein, 18 aa, Homo sapiens
  CDR3 for beta chain variable domain of TCR clone 15712 (TRBV11-2, TRBJ2-3)
CASSLGGASRGAPNTQYF

SEQ ID NO: 31425 - protein, 18 aa, Homo sapiens
  CDR3 for alpha chain variable domain of TCR clone 15713 (TRAV13-1, TRAJ52)
CAAKDPNAGGTSYGKLTF

SEQ ID NO: 31426 - protein, 18 aa, Homo sapiens
  CDR3 for beta chain variable domain of TCR clone 15713 (TRBV4-1, TRBJ1-4)
CASSPRTGGAWTNEKLFF

SEQ ID NO: 31427 - protein, 14 aa, Homo sapiens
  CDR3 for alpha chain variable domain of TCR clone 15714 (TRAV12-2, TRAJ17)
CAVLFKAAGNKLTF

SEQ ID NO: 31428 - protein, 17 aa, Homo sapiens
  CDR3 for beta chain variable domain of TCR clone 15714 (TRBV20-1, TRBJ2-2)
CSASGSGHGGLTGELFF

SEQ ID NO: 31429 - protein, 14 aa, Homo sapiens
  CDR3 for alpha chain variable domain of TCR clone 15715 (TRAV13-1, TRAJ13)
CAASGVGGYQKVTF

SEQ ID NO: 31430 - protein, 17 aa, Homo sapiens
  CDR3 for beta chain variable domain of TCR clone 15715 (TRBV15, TRBJ1-5)
CATSRAPPGTRNQPQHF

SEQ ID NO: 31431 - protein, 13 aa, Homo sapiens
  CDR3 for alpha chain variable domain of TCR clone 15716 (TRAV8-3, TRAJ28)
CAVGAVGSYQLTF

SEQ ID NO: 31432 - protein, 15 aa, Homo sapiens
  CDR3 for beta chain variable domain of TCR clone 15716 (TRBV7-9, TRBJ1-5)
CASSQGHQPDQPQHF

SEQ ID NO: 31433 - protein, 15 aa, Homo sapiens
  CDR3 for alpha chain variable domain of TCR clone 15717 (TRAV35, TRAJ40)
CAGQLGTSGTHKYIF

SEQ ID NO: 31434 - protein, 14 aa, Homo sapiens
  CDR3 for beta chain variable domain of TCR clone 15717 (TRBV7-3, TRBJ2-1)
CASSLAGGTNEQFF

SEQ ID NO: 31435 - protein, 14 aa, Homo sapiens
  CDR3 for alpha chain variable domain of TCR clone 15718 (TRAV35, TRAJ33)
CAGSSQDSNYQLIW

SEQ ID NO: 31436 - protein, 15 aa, Homo sapiens
  CDR3 for beta chain variable domain of TCR clone 15718 (TRBV20-1, TRBJ2-7)
CGAESGTSGAYEQYF

SEQ ID NO: 31437 - protein, 14 aa, Homo sapiens
  CDR3 for alpha chain variable domain of TCR clone 15719 (TRAV26-1, TRAJ39)
CIVRGSRAGNMLAF

SEQ ID NO: 31438 - protein, 15 aa, Homo sapiens
  CDR3 for beta chain variable domain of TCR clone 15719 (TRBV7-9, TRBJ1-5)
CASSQGHQPNQPQHF

SEQ ID NO: 31439 - protein, 13 aa, Homo sapiens
  CDR3 for alpha chain variable domain of TCR clone 15720 (TRAV20, TRAJ37)
CAGCSSNTGKLIF

SEQ ID NO: 31440 - protein, 11 aa, Homo sapiens
  CDR3 for beta chain variable domain of TCR clone 15720 (TRBV12-4, TRBJ2-3)
CASTATETQYF

SEQ ID NO: 31441 - protein, 14 aa, Homo sapiens
  CDR3 for alpha chain variable domain of TCR clone 15721 (TRAV29/DV5, TRAJ29)
CAASLDSGNTPLVF

SEQ ID NO: 31442 - protein, 14 aa, Homo sapiens
  CDR3 for beta chain variable domain of TCR clone 15721 (TRBV7-2, TRBJ2-1)
CASSLGFSYNEQFF

SEQ ID NO: 31443 - protein, 16 aa, Homo sapiens
  CDR3 for alpha chain variable domain of TCR clone 15722 (TRAV4, TRAJ22)
CLVGDLNSGSARQLTF

SEQ ID NO: 31444 - protein, 17 aa, Homo sapiens
  CDR3 for beta chain variable domain of TCR clone 15722 (TRBV13, TRBJ2-3)
CASSLSRVAGGRNTQYF

SEQ ID NO: 31445 - protein, 14 aa, Homo sapiens
  CDR3 for alpha chain variable domain of TCR clone 15723 (TRAV12-2, TRAJ17)
CAVLFKAAGNKLTF

SEQ ID NO: 31446 - protein, 17 aa, Homo sapiens
  CDR3 for beta chain variable domain of TCR clone 15723 (TRBV20-1, TRBJ2-2)
YSASGSGQGGLTGELFF

SEQ ID NO: 31447 - protein, 14 aa, Homo sapiens
  CDR3 for alpha chain variable domain of TCR clone 15724 (TRAV12-3, TRAJ9)
CAMGPNTGGFKTIF

SEQ ID NO: 31448 - protein, 12 aa, Homo sapiens
  CDR3 for beta chain variable domain of TCR clone 15724 (TRBV19, TRBJ1-5)
CASSIAQQPQHF

SEQ ID NO: 31449 - protein, 12 aa, Homo sapiens
  CDR3 for alpha chain variable domain of TCR clone 15725 (TRAV8-3, TRAJ26)
CAGDNYGQNLVF

SEQ ID NO: 31450 - protein, 12 aa, Homo sapiens
  CDR3 for beta chain variable domain of TCR clone 15725 (TRBV11-2, TRBJ2-1)
CASSPGNNEQFF

SEQ ID NO: 31451 - protein, 16 aa, Homo sapiens
  CDR3 for alpha chain variable domain of TCR clone 15726 (TRAV30, TRAJ24)
CGTETVDADSWGKFQF

SEQ ID NO: 31452 - protein, 15 aa, Homo sapiens
  CDR3 for beta chain variable domain of TCR clone 15726 (TRBV27, TRBJ2-1)
CASSNGGGSSNEQFF

SEQ ID NO: 31453 - protein, 15 aa, Homo sapiens
  CDR3 for alpha chain variable domain of TCR clone 15727 (TRAV23/DV6, TRAJ18)
CAARYRGSTLGRLYF

SEQ ID NO: 31454 - protein, 13 aa, Homo sapiens
  CDR3 for beta chain variable domain of TCR clone 15727 (TRBV7-2, TRBJ2-7)
CASSPPSGSEQYF

SEQ ID NO: 31455 - protein, 15 aa, Homo sapiens
  CDR3 for alpha chain variable domain of TCR clone 15728 (TRAV8-3, TRAJ27)
CAVGASKTNAGKSTF

SEQ ID NO: 31456 - protein, 15 aa, Homo sapiens
  CDR3 for beta chain variable domain of TCR clone 15728 (TRBV7-2, TRBJ2-1)
CASSSGLAGGNEQFF

SEQ ID NO: 31457 - protein, 15 aa, Homo sapiens
  CDR3 for alpha chain variable domain of TCR clone 15729 (TRAV8-3, TRAJ27)
CAVGPSKTNAGKSTF

SEQ ID NO: 31458 - protein, 15 aa, Homo sapiens
  CDR3 for beta chain variable domain of TCR clone 15729 (TRBV7-2, TRBJ2-1)
CASSSGLAGGNGQFF

SEQ ID NO: 31459 - protein, 18 aa, Homo sapiens
  CDR3 for alpha chain variable domain of TCR clone 15730 (TRAV21, TRAJ52)
CAVRPSPAGGTSYGKLTF

SEQ ID NO: 31460 - protein, 12 aa, Homo sapiens
  CDR3 for beta chain variable domain of TCR clone 15730 (TRBV12-4, TRBJ2-7)
CASSLGGYEQYF

SEQ ID NO: 31461 - protein, 16 aa, Homo sapiens
  CDR3 for alpha chain variable domain of TCR clone 15731 (TRAV3, TRAJ18)
CAVRDGRGSTLGRLDF

SEQ ID NO: 31462 - protein, 15 aa, Homo sapiens
  CDR3 for beta chain variable domain of TCR clone 15731 (TRBV7-9, TRBJ1-6)
CASSSPGRGNSPLHF

SEQ ID NO: 31463 - protein, 13 aa, Homo sapiens
  CDR3 for alpha chain variable domain of TCR clone 15732 (TRAV8-3, TRAJ28)
CAVGAVGSYQLTF

SEQ ID NO: 31464 - protein, 14 aa, Homo sapiens
  CDR3 for beta chain variable domain of TCR clone 15732 (TRBV7-2, TRBJ2-7)
CASSPKTSFYEQYF

SEQ ID NO: 31465 - protein, 19 aa, Homo sapiens
  CDR3 for alpha chain variable domain of TCR clone 15733 (TRAV3, TRAJ6)
CAVRDRNPSRSGGSYIPTF

SEQ ID NO: 31466 - protein, 15 aa, Homo sapiens
  CDR3 for beta chain variable domain of TCR clone 15733 (TRBV18, TRBJ2-7)
CASSPTFMDNYEQYF

SEQ ID NO: 31467 - protein, 12 aa, Homo sapiens
  CDR3 for alpha chain variable domain of TCR clone 15734 (TRAV12-3, TRAJ17)
CAMTLTGNKRTF

SEQ ID NO: 31468 - protein, 18 aa, Homo sapiens
  CDR3 for beta chain variable domain of TCR clone 15734 (TRBV4-3, TRBJ1-6)
CASSQETPASSYNSPLHF

SEQ ID NO: 31469 - protein, 14 aa, Homo sapiens
  CDR3 for alpha chain variable domain of TCR clone 15735 (TRAV1-2, TRAJ16)
CAVNRFSDGQQLLF

SEQ ID NO: 31470 - protein, 15 aa, Homo sapiens
  CDR3 for beta chain variable domain of TCR clone 15735 (TRBV7-9, TRBJ1-6)
CASSSPGRGNSPLHF

SEQ ID NO: 31471 - protein, 12 aa, Homo sapiens
  CDR3 for alpha chain variable domain of TCR clone 15736 (TRAV36/DV7, TRAJ54)
CAVVRGAQKLVF

SEQ ID NO: 31472 - protein, 14 aa, Homo sapiens
  CDR3 for beta chain variable domain of TCR clone 15736 (TRBV7-3, TRBJ1-1)
CASSLKGGDTEAFF

SEQ ID NO: 31473 - protein, 14 aa, Homo sapiens
  CDR3 for alpha chain variable domain of TCR clone 15737 (TRAV13-2, TRAJ6)
CAESTSGGSYIPTF

SEQ ID NO: 31474 - protein, 15 aa, Homo sapiens
  CDR3 for beta chain variable domain of TCR clone 15737 (TRBV20-1, TRBJ2-3)
CSATPVMLGTDTQYF

SEQ ID NO: 31475 - protein, 12 aa, Homo sapiens
  CDR3 for alpha chain variable domain of TCR clone 15738 (TRAV17, TRAJ39)
CATGAAGDMLTF

SEQ ID NO: 31476 - protein, 14 aa, Homo sapiens
  CDR3 for beta chain variable domain of TCR clone 15738 (TRBV7-9, TRBJ1-2)
CASSRQGANYGYTF

SEQ ID NO: 31477 - protein, 16 aa, Homo sapiens
  CDR3 for alpha chain variable domain of TCR clone 15739 (TRAV12-2, TRAJ10)
CAVNRVLTGGGNKLTF

SEQ ID NO: 31478 - protein, 17 aa, Homo sapiens
  CDR3 for beta chain variable domain of TCR clone 15739 (TRBV11-2, TRBJ2-1)
CASSLYPPGVEYNEQFF

SEQ ID NO: 31479 - protein, 14 aa, Homo sapiens
  CDR3 for alpha chain variable domain of TCR clone 15740 (TRAV13-1, TRAJ35)
CAASKGGFGNVLHC

SEQ ID NO: 31480 - protein, 13 aa, Homo sapiens
  CDR3 for beta chain variable domain of TCR clone 15740 (TRBV7-3, TRBJ1-1)
CASSQYWGAEAFF

SEQ ID NO: 31481 - protein, 14 aa, Homo sapiens
  CDR3 for alpha chain variable domain of TCR clone 15741 (TRAV27, TRAJ36)
CAGPPKRGANNLFF

SEQ ID NO: 31482 - protein, 15 aa, Homo sapiens
  CDR3 for beta chain variable domain of TCR clone 15741 (TRBV18, TRBJ2-7)
CASPPASTPNYEQYF

SEQ ID NO: 31483 - protein, 15 aa, Homo sapiens
  CDR3 for alpha chain variable domain of TCR clone 15742 (TRAV3, TRAJ3)
CAVRDRDSSASKIIF

SEQ ID NO: 31484 - protein, 18 aa, Homo sapiens
  CDR3 for beta chain variable domain of TCR clone 15742 (TRBV25-1, TRBJ1-2)
CASSGLQNGQGLICGYTF

SEQ ID NO: 31485 - protein, 13 aa, Homo sapiens
  CDR3 for alpha chain variable domain of TCR clone 15743 (TRAV2, TRAJ40)
CAVVTSGTYKYIF

SEQ ID NO: 31486 - protein, 15 aa, Homo sapiens
  CDR3 for beta chain variable domain of TCR clone 15743 (TRBV12-4, TRBJ2-5)
CASSPPTGLQETQYF

SEQ ID NO: 31487 - protein, 15 aa, Homo sapiens
  CDR3 for alpha chain variable domain of TCR clone 15744 (TRAV26-1, TRAJ29)
CIVRVEGSGNTPLVF

SEQ ID NO: 31488 - protein, 15 aa, Homo sapiens
  CDR3 for beta chain variable domain of TCR clone 15744 (TRBV7-9, TRBJ1-5)
CASSQGHQPNKPQHF

SEQ ID NO: 31489 - protein, 13 aa, Homo sapiens
  CDR3 for alpha chain variable domain of TCR clone 15745 (TRAV3, TRAJ21)
CAVRGPDFNKFYF

SEQ ID NO: 31490 - protein, 13 aa, Homo sapiens
  CDR3 for beta chain variable domain of TCR clone 15745 (TRBV9, TRBJ2-1)
CASSPSGGNEQFF

SEQ ID NO: 31491 - protein, 16 aa, Homo sapiens
  CDR3 for alpha chain variable domain of TCR clone 15746 (TRAV21, TRAJ37)
CAVRTAGSSNTGKLIF

SEQ ID NO: 31492 - protein, 13 aa, Homo sapiens
  CDR3 for beta chain variable domain of TCR clone 15746 (TRBV7-9, TRBJ2-5)
CASRPSGRETQYF

SEQ ID NO: 31493 - protein, 12 aa, Homo sapiens
  CDR3 for alpha chain variable domain of TCR clone 15747 (TRAV1-1, TRAJ39)
CAVPVVGNMLTF

SEQ ID NO: 31494 - protein, 17 aa, Homo sapiens
  CDR3 for beta chain variable domain of TCR clone 15747 (TRBV11-2, TRBJ2-1)
CASSLYPPGVEYNEQFF

SEQ ID NO: 31495 - protein, 14 aa, Homo sapiens
  CDR3 for alpha chain variable domain of TCR clone 15748 (TRAV26-1, TRAJ31)
CIVRGGDNNARLMF

SEQ ID NO: 31496 - protein, 14 aa, Homo sapiens
  CDR3 for beta chain variable domain of TCR clone 15748 (TRBV7-2, TRBJ2-5)
CASSPARGTETQYF

SEQ ID NO: 31497 - protein, 14 aa, Homo sapiens
  CDR3 for alpha chain variable domain of TCR clone 15749 (TRAV13-1, TRAJ35)
CATSKGGFGNVLHC

SEQ ID NO: 31498 - protein, 13 aa, Homo sapiens
  CDR3 for beta chain variable domain of TCR clone 15749 (TRBV7-3, TRBJ1-1)
CASSQDWGAEAFF

SEQ ID NO: 31499 - protein, 12 aa, Homo sapiens
  CDR3 for alpha chain variable domain of TCR clone 15750 (TRAV8-3, TRAJ20)
CAVGANDSKLSF

SEQ ID NO: 31500 - protein, 16 aa, Homo sapiens
  CDR3 for beta chain variable domain of TCR clone 15750 (TRBV19, TRBJ2-2)
CASRSPGTGATGELFF

SEQ ID NO: 31501 - protein, 15 aa, Homo sapiens
  CDR3 for alpha chain variable domain of TCR clone 15751 (TRAV17, TRAJ57)
CATGPSRGGSEKLVF

SEQ ID NO: 31502 - protein, 16 aa, Homo sapiens
  CDR3 for beta chain variable domain of TCR clone 15751 (TRBV12-4, TRBJ1-5)
CASSRPVGGSNQPQHF

SEQ ID NO: 31503 - protein, 16 aa, Homo sapiens
  CDR3 for alpha chain variable domain of TCR clone 15752 (TRAV30, TRAJ24)
CGTEIVDADSWGKFQF

SEQ ID NO: 31504 - protein, 14 aa, Homo sapiens
  CDR3 for beta chain variable domain of TCR clone 15752 (TRBV12-5, TRBJ2-5)
CASGSRTHQETEYF

SEQ ID NO: 31505 - protein, 14 aa, Homo sapiens
  CDR3 for alpha chain variable domain of TCR clone 15753 (TRAV12-2, TRAJ13)
CAVKKTGGYQKVTF

SEQ ID NO: 31506 - protein, 15 aa, Homo sapiens
  CDR3 for beta chain variable domain of TCR clone 15753 (TRBV27, TRBJ2-1)
CASSNGGGCSNEQFF

SEQ ID NO: 31507 - protein, 14 aa, Homo sapiens
  CDR3 for alpha chain variable domain of TCR clone 15754 (TRAV35, TRAJ42)
CAGRYGGSQGNLIF

SEQ ID NO: 31508 - protein, 15 aa, Homo sapiens
  CDR3 for beta chain variable domain of TCR clone 15754 (TRBV7-9, TRBJ2-1)
CASSLGWGRANEQLF

SEQ ID NO: 31509 - protein, 14 aa, Homo sapiens
  CDR3 for alpha chain variable domain of TCR clone 15755 (TRAV12-3, TRAJ42)
CAMNYGGSQGNLIF

SEQ ID NO: 31510 - protein, 15 aa, Homo sapiens
  CDR3 for beta chain variable domain of TCR clone 15755 (TRBV5-7, TRBJ1-5)
CASSHGKLWDQPQHF

SEQ ID NO: 31511 - protein, 15 aa, Homo sapiens
  CDR3 for alpha chain variable domain of TCR clone 15756 (TRAV3, TRAJ5)
CAVRDIDTGRRALTF

SEQ ID NO: 31512 - protein, 13 aa, Homo sapiens
  CDR3 for beta chain variable domain of TCR clone 15756 (TRBV12-4, TRBJ2-7)
CASSPTETYEQYF

SEQ ID NO: 31513 - protein, 14 aa, Homo sapiens
  CDR3 for alpha chain variable domain of TCR clone 15757 (TRAV8-2, TRAJ37)
CVVSLTGNTGKLIF

SEQ ID NO: 31514 - protein, 16 aa, Homo sapiens
  CDR3 for beta chain variable domain of TCR clone 15757 (TRBV20-1, TRBJ2-3)
CSAVRDRGPIADTQYF

SEQ ID NO: 31515 - protein, 14 aa, Homo sapiens
  CDR3 for alpha chain variable domain of TCR clone 15758 (TRAV1-2, TRAJ8)
CAVREDTGFQKLVF

SEQ ID NO: 31516 - protein, 12 aa, Homo sapiens
  CDR3 for beta chain variable domain of TCR clone 15758 (TRBV12-4, TRBJ2-7)
CASSLGGYEQYF

SEQ ID NO: 31517 - protein, 14 aa, Homo sapiens
  CDR3 for alpha chain variable domain of TCR clone 15759 (TRAV35, TRAJ13)
CAGSPSGGYQKVTF

SEQ ID NO: 31518 - protein, 13 aa, Homo sapiens
  CDR3 for beta chain variable domain of TCR clone 15759 (TRBV29-1, TRBJ1-1)
CSVGDSRNTEALF

SEQ ID NO: 31519 - protein, 10 aa, Homo sapiens
  CDR3 for alpha chain variable domain of TCR clone 15760 (TRAV23/DV6, TRAJ57)
CAASSTLSRG

SEQ ID NO: 31520 - protein, 14 aa, Homo sapiens
  CDR3 for beta chain variable domain of TCR clone 15760 (TRBV25-1, TRBJ1-1)
CASTHLGGNTEAFF

SEQ ID NO: 31521 - protein, 12 aa, Homo sapiens
  CDR3 for alpha chain variable domain of TCR clone 15761 (TRAV16, TRAJ10)
CSRTGGGNKLTF

SEQ ID NO: 31522 - protein, 12 aa, Homo sapiens
  CDR3 for beta chain variable domain of TCR clone 15761 (TRBV11-3, TRBJ1-1)
CASSHRQGEAFL

SEQ ID NO: 31523 - protein, 12 aa, Homo sapiens
  CDR3 for alpha chain variable domain of TCR clone 15762 (TRAV21, TRAJ33)
CAEMDSNYQLIW

SEQ ID NO: 31524 - protein, 14 aa, Homo sapiens
  CDR3 for beta chain variable domain of TCR clone 15762 (TRBV2, TRBJ2-7)
CASSLTSGGYEQYF

SEQ ID NO: 31525 - protein, 12 aa, Homo sapiens
  CDR3 for alpha chain variable domain of TCR clone 15763 (TRAV21, TRAJ11)
CAATSGYSTLTF

SEQ ID NO: 31526 - protein, 14 aa, Homo sapiens
  CDR3 for beta chain variable domain of TCR clone 15763 (TRBV20-1, TRBJ2-7)
CSAPELAGVGEQYL

SEQ ID NO: 31527 - protein, 15 aa, Homo sapiens
  CDR3 for alpha chain variable domain of TCR clone 15764 (TRAV25, TRAJ52)
CAGTSGGTSYGKLTF

SEQ ID NO: 31528 - protein, 16 aa, Homo sapiens
  CDR3 for beta chain variable domain of TCR clone 15764 (TRBV15, TRBJ1-2)
CATSRGPRTGGGGDTF

SEQ ID NO: 31529 - protein, 14 aa, Homo sapiens
  CDR3 for alpha chain variable domain of TCR clone 15765 (TRAV38-1, TRAJ45)
CAYYSGGGADGLTF

SEQ ID NO: 31530 - protein, 20 aa, Homo sapiens
  CDR3 for beta chain variable domain of TCR clone 15765 (TRBV28, TRBJ2-1)
RASTPIGRSPGLAGGNEQFF

SEQ ID NO: 31531 - protein, 16 aa, Homo sapiens
  CDR3 for alpha chain variable domain of TCR clone 15766 (TRAV14/DV4, TRAJ45)
CAMREGERGGADGLTF

SEQ ID NO: 31532 - protein, 15 aa, Homo sapiens
  CDR3 for beta chain variable domain of TCR clone 15766 (TRBV5-1, TRBJ1-1)
CASSSTTGTNTEAFF

SEQ ID NO: 31533 - protein, 16 aa, Homo sapiens
  CDR3 for alpha chain variable domain of TCR clone 15767 (TRAV3, TRAJ37)
CAVRGKGSGNTGKLIF

SEQ ID NO: 31534 - protein, 13 aa, Homo sapiens
  CDR3 for beta chain variable domain of TCR clone 15767 (TRBV14, TRBJ2-7)
CASSPDRRYEQYF

SEQ ID NO: 31535 - protein, 15 aa, Homo sapiens
  CDR3 for alpha chain variable domain of TCR clone 15768 (TRAV8-3, TRAJ45)
CASSYSGGGADGLTF

SEQ ID NO: 31536 - protein, 13 aa, Homo sapiens
  CDR3 for beta chain variable domain of TCR clone 15768 (TRBV10-3, TRBJ2-7)
CASKLAMNYEQYF

SEQ ID NO: 31537 - protein, 20 aa, Homo sapiens
  CDR3 for alpha chain variable domain of TCR clone 15769 (TRAV12-3, TRAJ41)
SLSIRDSQPSDSATPEALNF

SEQ ID NO: 31538 - protein, 15 aa, Homo sapiens
  CDR3 for beta chain variable domain of TCR clone 15769 (TRBV5-1, TRBJ2-7)
CASSLDLTSSYEQYF

SEQ ID NO: 31539 - protein, 15 aa, Homo sapiens
  CDR3 for alpha chain variable domain of TCR clone 15770 (TRAV21, TRAJ53)
CATLNSGGSNYKLTF

SEQ ID NO: 31540 - protein, 11 aa, Homo sapiens
  CDR3 for beta chain variable domain of TCR clone 15770 (TRBV29-1, TRBJ2-5)
CSEDRTGTQYF

SEQ ID NO: 31541 - protein, 13 aa, Homo sapiens
  CDR3 for alpha chain variable domain of TCR clone 15771 (TRAV13-2, TRAJ48)
CAEMDFGNEKLTF

SEQ ID NO: 31542 - protein, 14 aa, Homo sapiens
  CDR3 for beta chain variable domain of TCR clone 15771 (TRBV18, TRBJ2-7)
CASSPRGGAYEQYF

SEQ ID NO: 31543 - protein, 15 aa, Homo sapiens
  CDR3 for alpha chain variable domain of TCR clone 15772 (TRAV4, TRAJ39)
CLVGPSNNAGNMLTF

SEQ ID NO: 31544 - protein, 13 aa, Homo sapiens
  CDR3 for beta chain variable domain of TCR clone 15772 (TRBV11-2, TRBJ2-5)
CASSSTGEETQYF

SEQ ID NO: 31545 - protein, 15 aa, Homo sapiens
  CDR3 for alpha chain variable domain of TCR clone 15773 (TRAV8-4, TRAJ7)
CAVSGGNYGNNRLAF

SEQ ID NO: 31546 - protein, 15 aa, Homo sapiens
  CDR3 for beta chain variable domain of TCR clone 15773 (TRBV6-4, TRBJ2-1)
CASSSGTSGYNEQFF

SEQ ID NO: 31547 - protein, 12 aa, Homo sapiens
  CDR3 for alpha chain variable domain of TCR clone 15774 (TRAV8-3, TRAJ26)
CAGDNYGQNFVF

SEQ ID NO: 31548 - protein, 17 aa, Homo sapiens
  CDR3 for beta chain variable domain of TCR clone 15774 (TRBV20-1, TRBJ2-2)
CSASGSGQGGLTGELFF

SEQ ID NO: 31549 - protein, 15 aa, Homo sapiens
  CDR3 for alpha chain variable domain of TCR clone 15775 (TRAV3, TRAJ5)
CAVRDRKTGRRARTF

SEQ ID NO: 31550 - protein, 15 aa, Homo sapiens
  CDR3 for beta chain variable domain of TCR clone 15775 (TRBV7-8, TRBJ2-1)
CASSLADSLYNEQFF

SEQ ID NO: 31551 - protein, 12 aa, Homo sapiens
  CDR3 for alpha chain variable domain of TCR clone 15776 (TRAV30, TRAJ43)
CGTEERGNDIRF

SEQ ID NO: 31552 - protein, 13 aa, Homo sapiens
  CDR3 for beta chain variable domain of TCR clone 15776 (TRBV27, TRBJ2-7)
CASSFSQGYEQYF

SEQ ID NO: 31553 - protein, 16 aa, Homo sapiens
  CDR3 for alpha chain variable domain of TCR clone 15777 (TRAV30, TRAJ24)
CGTEIVDADSWGKFQF

SEQ ID NO: 31554 - protein, 15 aa, Homo sapiens
  CDR3 for beta chain variable domain of TCR clone 15777 (TRBV2, TRBJ2-1)
CASSELAGSYNEQFF

SEQ ID NO: 31555 - protein, 15 aa, Homo sapiens
  CDR3 for alpha chain variable domain of TCR clone 15778 (TRAV17, TRAJ56)
CATEPFAGANSKLTF

SEQ ID NO: 31556 - protein, 15 aa, Homo sapiens
  CDR3 for beta chain variable domain of TCR clone 15778 (TRBV28, TRBJ1-5)
CASSRTGGYVQPQHF

SEQ ID NO: 31557 - protein, 12 aa, Homo sapiens
  CDR3 for alpha chain variable domain of TCR clone 15779 (TRAV8-3, TRAJ43)
CAVGAGNNDIRF

SEQ ID NO: 31558 - protein, 14 aa, Homo sapiens
  CDR3 for beta chain variable domain of TCR clone 15779 (TRBV4-2, TRBJ1-5)
CASSRDRGNQPQHF

SEQ ID NO: 31559 - protein, 17 aa, Homo sapiens
  CDR3 for alpha chain variable domain of TCR clone 15780 (TRAV26-1, TRAJ53)
CIVRADDSGGSNYKLTF

SEQ ID NO: 31560 - protein, 15 aa, Homo sapiens
  CDR3 for beta chain variable domain of TCR clone 15780 (TRBV20-1, TRBJ2-7)
CSARVPAAYFYEQYF

SEQ ID NO: 31561 - protein, 15 aa, Homo sapiens
  CDR3 for alpha chain variable domain of TCR clone 15781 (TRAV12-1, TRAJ42)
CVVTRAGGSQGNLIF

SEQ ID NO: 31562 - protein, 14 aa, Homo sapiens
  CDR3 for beta chain variable domain of TCR clone 15781 (TRBV11-2, TRBJ2-3)
CASSLGGGANTQYF

SEQ ID NO: 31563 - protein, 16 aa, Homo sapiens
  CDR3 for alpha chain variable domain of TCR clone 15782 (TRAV19, TRAJ37)
CALLLGGSSNTGKLIF

SEQ ID NO: 31564 - protein, 15 aa, Homo sapiens
  CDR3 for beta chain variable domain of TCR clone 15782 (TRBV19, TRBJ1-1)
CASSGNSHPNTEAFF

SEQ ID NO: 31565 - protein, 14 aa, Homo sapiens
  CDR3 for alpha chain variable domain of TCR clone 15783 (TRAV1-2, TRAJ16)
CAVNRFSDGQKLLF

SEQ ID NO: 31566 - protein, 16 aa, Homo sapiens
  CDR3 for beta chain variable domain of TCR clone 15783 (TRBV6-6, TRBJ2-3)
CASSYSHAGSTDTQYF

SEQ ID NO: 31567 - protein, 14 aa, Homo sapiens
  CDR3 for alpha chain variable domain of TCR clone 15784 (TRAV20, TRAJ42)
CAVQAGESQGNLIF

SEQ ID NO: 31568 - protein, 14 aa, Homo sapiens
  CDR3 for beta chain variable domain of TCR clone 15784 (TRBV28, TRBJ1-2)
CASRIQGANYGYTF

SEQ ID NO: 31569 - protein, 12 aa, Homo sapiens
  CDR3 for alpha chain variable domain of TCR clone 15785 (TRAV12-3, TRAJ17)
CAMTLTGNKLTF

SEQ ID NO: 31570 - protein, 14 aa, Homo sapiens
  CDR3 for beta chain variable domain of TCR clone 15785 (TRBV7-3, TRBJ1-1)
CASSLKGGNTEAFF

SEQ ID NO: 31571 - protein, 15 aa, Homo sapiens
  CDR3 for alpha chain variable domain of TCR clone 15786 (TRAV3, TRAJ5)
CAARDRKTGRRALTF

SEQ ID NO: 31572 - protein, 15 aa, Homo sapiens
  CDR3 for beta chain variable domain of TCR clone 15786 (TRBV7-8, TRBJ2-1)
CASSLADSLYNEQFF

SEQ ID NO: 31573 - protein, 14 aa, Homo sapiens
  CDR3 for alpha chain variable domain of TCR clone 15787 (TRAV16, TRAJ8)
RALLLNTGFQKLVF

SEQ ID NO: 31574 - protein, 15 aa, Homo sapiens
  CDR3 for beta chain variable domain of TCR clone 15787 (TRBV7-7, TRBJ2-2)
CATSKLAKNTGELFF

SEQ ID NO: 31575 - protein, 12 aa, Homo sapiens
  CDR3 for alpha chain variable domain of TCR clone 15788 (TRAV12-3, TRAJ17)
CAMTLTGNKLTF

SEQ ID NO: 31576 - protein, 16 aa, Homo sapiens
  CDR3 for beta chain variable domain of TCR clone 15788 (TRBV20-1, TRBJ1-4)
CSAPGQGLLTNEKLFF

SEQ ID NO: 31577 - protein, 17 aa, Homo sapiens
  CDR3 for alpha chain variable domain of TCR clone 15789 (TRAV3, TRAJ6)
CAVRDGPRAGGSYIPTF

SEQ ID NO: 31578 - protein, 16 aa, Homo sapiens
  CDR3 for beta chain variable domain of TCR clone 15789 (TRBV20-1, TRBJ1-4)
CSAPGQGLLTNEKLFF

SEQ ID NO: 31579 - protein, 12 aa, Homo sapiens
  CDR3 for alpha chain variable domain of TCR clone 15790 (TRAV21, TRAJ33)
CAKMDSNYQLIW

SEQ ID NO: 31580 - protein, 14 aa, Homo sapiens
  CDR3 for beta chain variable domain of TCR clone 15790 (TRBV2, TRBJ2-7)
RASSLTSGGYEQYF

SEQ ID NO: 31581 - protein, 12 aa, Homo sapiens
  CDR3 for alpha chain variable domain of TCR clone 15791 (TRAV12-3, TRAJ17)
CAMTLTGNKLTF

SEQ ID NO: 31582 - protein, 14 aa, Homo sapiens
  CDR3 for beta chain variable domain of TCR clone 15791 (TRBV2, TRBJ2-7)
CASSLTSGGYEQYF

SEQ ID NO: 31583 - protein, 16 aa, Homo sapiens
  CDR3 for alpha chain variable domain of TCR clone 15792 (TRAV4, TRAJ22)
CLVGDLYSGSARQLTS

SEQ ID NO: 31584 - protein, 16 aa, Homo sapiens
  CDR3 for beta chain variable domain of TCR clone 15792 (TRBV7-9, TRBJ2-1)
CASSDVAGGSYNEQFF

SEQ ID NO: 31585 - protein, 16 aa, Homo sapiens
  CDR3 for alpha chain variable domain of TCR clone 15793 (TRAV3, TRAJ18)
CAVRDGRGSTLGRPYF

SEQ ID NO: 31586 - protein, 15 aa, Homo sapiens
  CDR3 for beta chain variable domain of TCR clone 15793 (TRBV7-9, TRBJ1-6)
CASSSPGRGNSPLHF

SEQ ID NO: 31587 - protein, 14 aa, Homo sapiens
  CDR3 for alpha chain variable domain of TCR clone 15794 (TRAV8-2, TRAJ4)
CVVSHSGGYNKLIF

SEQ ID NO: 31588 - protein, 15 aa, Homo sapiens
  CDR3 for beta chain variable domain of TCR clone 15794 (TRBV4-1, TRBJ1-4)
CASSDTGGTNEKLFF

SEQ ID NO: 31589 - protein, 13 aa, Homo sapiens
  CDR3 for alpha chain variable domain of TCR clone 15795 (TRAV20, TRAJ53)
CCAGGGSNYKLTF

SEQ ID NO: 31590 - protein, 12 aa, Homo sapiens
  CDR3 for beta chain variable domain of TCR clone 15795 (TRBV3-1, TRBJ2-2)
CASSLFPGELFF

SEQ ID NO: 31591 - protein, 11 aa, Homo sapiens
  CDR3 for alpha chain variable domain of TCR clone 15796 (TRAV27, TRAJ37)
CAGTQGGKLIF

SEQ ID NO: 31592 - protein, 15 aa, Homo sapiens
  CDR3 for beta chain variable domain of TCR clone 15796 (TRBV5-5, TRBJ2-5)
CASGVAGDLGETQYF

SEQ ID NO: 31593 - protein, 15 aa, Homo sapiens
  CDR3 for alpha chain variable domain of TCR clone 15797 (TRAV8-3, TRAJ11)
CAVGLSNSGYSTLTF

SEQ ID NO: 31594 - protein, 16 aa, Homo sapiens
  CDR3 for beta chain variable domain of TCR clone 15797 (TRBV7-9, TRBJ1-2)
CASSLGFSSGEDGYTF

SEQ ID NO: 31595 - protein, 14 aa, Homo sapiens
  CDR3 for alpha chain variable domain of TCR clone 15798 (TRAV4, TRAJ10)
CLVGDTGGGNKLTF

SEQ ID NO: 31596 - protein, 12 aa, Homo sapiens
  CDR3 for beta chain variable domain of TCR clone 15798 (TRBV11-2, TRBJ2-2)
CASSLGGGELFF

SEQ ID NO: 31597 - protein, 13 aa, Homo sapiens
  CDR3 for alpha chain variable domain of TCR clone 15799 (TRAV8-3, TRAJ28)
CAVGAAGSYQLTF

SEQ ID NO: 31598 - protein, 15 aa, Homo sapiens
  CDR3 for beta chain variable domain of TCR clone 15799 (TRBV7-9, TRBJ1-5)
CASSQGHQPNQPQHF

SEQ ID NO: 31599 - protein, 17 aa, Homo sapiens
  CDR3 for alpha chain variable domain of TCR clone 15800 (TRAV3, TRAJ12)
CAVRDGGRMDSSYKLIF

SEQ ID NO: 31600 - protein, 16 aa, Homo sapiens
  CDR3 for beta chain variable domain of TCR clone 15800 (TRBV9, TRBJ2-2)
CASSAMGKGNTGELFF

SEQ ID NO: 31601 - protein, 10 aa, Homo sapiens
  CDR3 for alpha chain variable domain of TCR clone 15801 (TRAV12-3, TRAJ49)
CAMNDDQFYF

SEQ ID NO: 31602 - protein, 13 aa, Homo sapiens
  CDR3 for beta chain variable domain of TCR clone 15801 (TRBV12-4, TRBJ1-1)
CAGSPGTGFEAFF

SEQ ID NO: 31603 - protein, 14 aa, Homo sapiens
  CDR3 for alpha chain variable domain of TCR clone 15802 (TRAV12-1, TRAJ17)
CVVNYKAAGNKLTF

SEQ ID NO: 31604 - protein, 17 aa, Homo sapiens
  CDR3 for beta chain variable domain of TCR clone 15802 (TRBV20-1, TRBJ2-1)
CSASSSGPAGSYNEQFF

SEQ ID NO: 31605 - protein, 15 aa, Homo sapiens
  CDR3 for alpha chain variable domain of TCR clone 15803 (TRAV26-1, TRAJ44)
FIVRANTGTASKLTF

SEQ ID NO: 31606 - protein, 16 aa, Homo sapiens
  CDR3 for beta chain variable domain of TCR clone 15803 (TRBV7-7, TRBJ2-1)
CASSLASGTSYNEQFF

SEQ ID NO: 31607 - protein, 15 aa, Homo sapiens
  CDR3 for alpha chain variable domain of TCR clone 15804 (TRAV3, TRAJ22)
CAVRDRGGSARQLTF

SEQ ID NO: 31608 - protein, 16 aa, Homo sapiens
  CDR3 for beta chain variable domain of TCR clone 15804 (TRBV7-3, TRBJ2-2)
CASSLKRGTLSGELFF

SEQ ID NO: 31609 - protein, 15 aa, Homo sapiens
  CDR3 for alpha chain variable domain of TCR clone 15805 (TRAV26-1, TRAJ42)
CIVRVRGGSQGNLIF

SEQ ID NO: 31610 - protein, 14 aa, Homo sapiens
  CDR3 for beta chain variable domain of TCR clone 15805 (TRBV19, TRBJ2-2)
CATTGHANTGELFF

SEQ ID NO: 31611 - protein, 14 aa, Homo sapiens
  CDR3 for alpha chain variable domain of TCR clone 15806 (TRAV38-1, TRAJ29)
CAFITPSGNTPLFF

SEQ ID NO: 31612 - protein, 14 aa, Homo sapiens
  CDR3 for beta chain variable domain of TCR clone 15806 (TRBV18, TRBJ2-7)
CASSPRGGAYEQYF

SEQ ID NO: 31613 - protein, 16 aa, Homo sapiens
  CDR3 for alpha chain variable domain of TCR clone 15807 (TRAV35, TRAJ37)
CWAFLRGSSNTGKLIF

SEQ ID NO: 31614 - protein, 13 aa, Homo sapiens
  CDR3 for beta chain variable domain of TCR clone 15807 (TRBV2, TRBJ1-2)
CAGSVRGNYGYTF

SEQ ID NO: 31615 - protein, 14 aa, Homo sapiens
  CDR3 for alpha chain variable domain of TCR clone 15808 (TRAV1-2, TRAJ16)
CAVNRFSDGQKLLF

SEQ ID NO: 31616 - protein, 15 aa, Homo sapiens
  CDR3 for beta chain variable domain of TCR clone 15808 (TRBV9, TRBJ1-6)
CASNVAGTGDSPLHF

SEQ ID NO: 31617 - protein, 12 aa, Homo sapiens
  CDR3 for alpha chain variable domain of TCR clone 15809 (TRAV12-2, TRAJ52)
IGGGTSYGKLTF

SEQ ID NO: 31618 - protein, 16 aa, Homo sapiens
  CDR3 for beta chain variable domain of TCR clone 15809 (TRBV27, TRBJ2-2)
CASSFRGLVRTGELFF

SEQ ID NO: 31619 - protein, 14 aa, Homo sapiens
  CDR3 for alpha chain variable domain of TCR clone 15810 (TRAV12-2, TRAJ13)
CAVKKTGGYQKVTF

SEQ ID NO: 31620 - protein, 13 aa, Homo sapiens
  CDR3 for beta chain variable domain of TCR clone 15810 (TRBV12-4, TRBJ1-2)
CASSLRQGKGYTF

SEQ ID NO: 31621 - protein, 13 aa, Homo sapiens
  CDR3 for alpha chain variable domain of TCR clone 15811 (TRAV39, TRAJ48)
CAAVNLGNEKLTF

SEQ ID NO: 31622 - protein, 12 aa, Homo sapiens
  CDR3 for beta chain variable domain of TCR clone 15811 (TRBV5-5, TRBJ2-5)
CASSYFGETQYF

SEQ ID NO: 31623 - protein, 12 aa, Homo sapiens
  CDR3 for alpha chain variable domain of TCR clone 15812 (TRAV12-1, TRAJ40)
CVVYSGTYKYIF

SEQ ID NO: 31624 - protein, 15 aa, Homo sapiens
  CDR3 for beta chain variable domain of TCR clone 15812 (TRBV9, TRBJ1-6)
CASSVAGTGDSPLHF

SEQ ID NO: 31625 - protein, 14 aa, Homo sapiens
  CDR3 for alpha chain variable domain of TCR clone 15813 (TRAV1-2, TRAJ16)
CAVNRFSDGQKLLF

SEQ ID NO: 31626 - protein, 16 aa, Homo sapiens
  CDR3 for beta chain variable domain of TCR clone 15813 (TRBV7-9, TRBJ2-2)
CASSGFGGANTGELFF

SEQ ID NO: 31627 - protein, 11 aa, Homo sapiens
  CDR3 for alpha chain variable domain of TCR clone 15814 (TRAV2, TRAJ13)
CASGGYQKVTF

SEQ ID NO: 31628 - protein, 16 aa, Homo sapiens
  CDR3 for beta chain variable domain of TCR clone 15814 (TRBV6-1, TRBJ2-5)
CASSETLDRGAETQCF

SEQ ID NO: 31629 - protein, 12 aa, Homo sapiens
  CDR3 for alpha chain variable domain of TCR clone 15815 (TRAV12-3, TRAJ3)
CAIDSSASKIIF

SEQ ID NO: 31630 - protein, 17 aa, Homo sapiens
  CDR3 for beta chain variable domain of TCR clone 15815 (TRBV7-9, TRBJ2-3)
CAGSLEEAGAYPDTQYF

SEQ ID NO: 31631 - protein, 16 aa, Homo sapiens
  CDR3 for alpha chain variable domain of TCR clone 15816 (TRAV13-1, TRAJ48)
CAASIFGNFGNEKLTF

SEQ ID NO: 31632 - protein, 15 aa, Homo sapiens
  CDR3 for beta chain variable domain of TCR clone 15816 (TRBV10-2, TRBJ2-6)
CASSEQGTGANVLTF

SEQ ID NO: 31633 - protein, 14 aa, Homo sapiens
  CDR3 for alpha chain variable domain of TCR clone 15817 (TRAV12-3, TRAJ10)
GHLPLTGGGNKLTF

SEQ ID NO: 31634 - protein, 14 aa, Homo sapiens
  CDR3 for beta chain variable domain of TCR clone 15817 (TRBV6-1, TRBJ1-3)
CASVQGGGGNTIYF

SEQ ID NO: 31635 - protein, 17 aa, Homo sapiens
  CDR3 for alpha chain variable domain of TCR clone 15818 (TRAV16, TRAJ58)
CITVLSNGETSGSRLTF

SEQ ID NO: 31636 - protein, 17 aa, Homo sapiens
  CDR3 for beta chain variable domain of TCR clone 15818 (TRBV18, TRBJ2-1)
CASSKGLSGGADNKQFF

SEQ ID NO: 31637 - protein, 15 aa, Homo sapiens
  CDR3 for alpha chain variable domain of TCR clone 15819 (TRAV16, TRAJ20)
CALKGGLRADYKLSF

SEQ ID NO: 31638 - protein, 16 aa, Homo sapiens
  CDR3 for beta chain variable domain of TCR clone 15819 (TRBV11-3, TRBJ2-2)
CASSSRTSPGTEELFF

SEQ ID NO: 31639 - protein, 13 aa, Homo sapiens
  CDR3 for alpha chain variable domain of TCR clone 15820 (TRAV21, TRAJ27)
CAARPGNAGKSTF

SEQ ID NO: 31640 - protein, 14 aa, Homo sapiens
  CDR3 for beta chain variable domain of TCR clone 15820 (TRBV7-6, TRBJ2-3)
CASSLGTVTDTHYF

SEQ ID NO: 31641 - protein, 19 aa, Homo sapiens
  CDR3 for alpha chain variable domain of TCR clone 15821 (TRAV2, TRAJ20)
ILQVREADAAVCRDCKLSF

SEQ ID NO: 31642 - protein, 16 aa, Homo sapiens
  CDR3 for beta chain variable domain of TCR clone 15821 (TRBV5-1, TRBJ2-5)
CASSLALLRAGETQYF

SEQ ID NO: 31643 - protein, 14 aa, Homo sapiens
  CDR3 for alpha chain variable domain of TCR clone 15822 (TRAV17, TRAJ22)
CATSPSGSARQLTF

SEQ ID NO: 31644 - protein, 15 aa, Homo sapiens
  CDR3 for beta chain variable domain of TCR clone 15822 (TRBV4-1, TRBJ2-5)
YASSQWDLYQETQYF

SEQ ID NO: 31645 - protein, 15 aa, Homo sapiens
  CDR3 for alpha chain variable domain of TCR clone 15823 (TRAV21, TRAJ24)
CAARSPTDSWGKLQF

SEQ ID NO: 31646 - protein, 13 aa, Homo sapiens
  CDR3 for beta chain variable domain of TCR clone 15823 (TRBV11-2, TRBJ2-5)
CASSSTGEETQYF

SEQ ID NO: 31647 - protein, 14 aa, Homo sapiens
  CDR3 for alpha chain variable domain of TCR clone 15824 (TRAV17, TRAJ22)
CATSPSGSSRQLTF

SEQ ID NO: 31648 - protein, 15 aa, Homo sapiens
  CDR3 for beta chain variable domain of TCR clone 15824 (TRBV4-1, TRBJ2-5)
CASSQWDLYQETQYF

SEQ ID NO: 31649 - protein, 14 aa, Homo sapiens
  CDR3 for alpha chain variable domain of TCR clone 15825 (TRAV1-2, TRAJ16)
CAVNRFSDGQKLLF

SEQ ID NO: 31650 - protein, 12 aa, Homo sapiens
  CDR3 for beta chain variable domain of TCR clone 15825 (TRBV28, TRBJ2-3)
CASSLYRDTQYF

SEQ ID NO: 31651 - protein, 14 aa, Homo sapiens
  CDR3 for alpha chain variable domain of TCR clone 15826 (TRAV26-1, TRAJ26)
CIARATFLGQNFVF

SEQ ID NO: 31652 - protein, 16 aa, Homo sapiens
  CDR3 for beta chain variable domain of TCR clone 15826 (TRBV12-4, TRBJ2-7)
CASRSTGTGPSYEQYF

SEQ ID NO: 31653 - protein, 23 aa, Homo sapiens
  CDR3 for alpha chain variable domain of TCR clone 15827 (TRAV26-1, TRAJ38)
CIADNAGNNHIQNPDPAVYQLRD

SEQ ID NO: 31654 - protein, 13 aa, Homo sapiens
  CDR3 for beta chain variable domain of TCR clone 15827 (TRBV20-1, TRBJ1-1)
CSARGGGNTEASF

SEQ ID NO: 31655 - protein, 14 aa, Homo sapiens
  CDR3 for alpha chain variable domain of TCR clone 15828 (TRAV12-1, TRAJ17)
CVVNYKAVGNKLTF

SEQ ID NO: 31656 - protein, 17 aa, Homo sapiens
  CDR3 for beta chain variable domain of TCR clone 15828 (TRBV20-1, TRBJ2-1)
CSASSSGLAGSYNEQFF

SEQ ID NO: 31657 - protein, 11 aa, Homo sapiens
  CDR3 for alpha chain variable domain of TCR clone 15829 (TRAV1-1, TRAJ23)
CAVRQGGKLIF

SEQ ID NO: 31658 - protein, 20 aa, Homo sapiens
  CDR3 for beta chain variable domain of TCR clone 15829 (TRBV7-8, TRBJ2-2)
CASSHLFPGPTINITGELFF

SEQ ID NO: 31659 - protein, 16 aa, Homo sapiens
  CDR3 for alpha chain variable domain of TCR clone 15830 (TRAV38-1, TRAJ32)
CAFMKGGGGATNKLIF

SEQ ID NO: 31660 - protein, 13 aa, Homo sapiens
  CDR3 for beta chain variable domain of TCR clone 15830 (TRBV20-1, TRBJ2-5)
CSAREAFQEAQYF

SEQ ID NO: 31661 - protein, 10 aa, Homo sapiens
  CDR3 for alpha chain variable domain of TCR clone 15831 (TRAV23/DV6, TRAJ57)
CAASSTLPQG

SEQ ID NO: 31662 - protein, 13 aa, Homo sapiens
  CDR3 for beta chain variable domain of TCR clone 15831 (TRBV15, TRBJ1-6)
CATSGGLNSPLHF

SEQ ID NO: 31663 - protein, 15 aa, Homo sapiens
  CDR3 for alpha chain variable domain of TCR clone 15832 (TRAV26-1, TRAJ44)
CIVRANTGTASKLTF

SEQ ID NO: 31664 - protein, 16 aa, Homo sapiens
  CDR3 for beta chain variable domain of TCR clone 15832 (TRBV7-7, TRBJ2-1)
CASSLASGTSCNEQFF

SEQ ID NO: 31665 - protein, 15 aa, Homo sapiens
  CDR3 for alpha chain variable domain of TCR clone 15833 (TRAV4, TRAJ39)
CLVGPNNNAGNMLPF

SEQ ID NO: 31666 - protein, 13 aa, Homo sapiens
  CDR3 for beta chain variable domain of TCR clone 15833 (TRBV11-2, TRBJ2-5)
CASSSTGEETQYF

SEQ ID NO: 31667 - protein, 13 aa, Homo sapiens
  CDR3 for alpha chain variable domain of TCR clone 15834 (TRAV1-1, TRAJ9)
CAAKNTGGFKTIF

SEQ ID NO: 31668 - protein, 14 aa, Homo sapiens
  CDR3 for beta chain variable domain of TCR clone 15834 (TRBV20-1, TRBJ2-1)
CSAQIGRSANEQFF

SEQ ID NO: 31669 - protein, 14 aa, Homo sapiens
  CDR3 for alpha chain variable domain of TCR clone 15835 (TRAV12-3, TRAJ10)
SHLPLTGGGNKLTF

SEQ ID NO: 31670 - protein, 14 aa, Homo sapiens
  CDR3 for beta chain variable domain of TCR clone 15835 (TRBV18, TRBJ2-5)
CASSPGVSQETQYF

SEQ ID NO: 31671 - protein, 14 aa, Homo sapiens
  CDR3 for alpha chain variable domain of TCR clone 15836 (TRAV9-2, TRAJ39)
CALYIYNAGNMLTF

SEQ ID NO: 31672 - protein, 22 aa, Homo sapiens
  CDR3 for beta chain variable domain of TCR clone 15836 (TRBV6-1, TRBJ1-3)
CASVQGGGWKHHIFWRGKLAHC

SEQ ID NO: 31673 - protein, 14 aa, Homo sapiens
  CDR3 for alpha chain variable domain of TCR clone 15837 (TRAV35, TRAJ22)
CAGLRPCSARQLTF

SEQ ID NO: 31674 - protein, 15 aa, Homo sapiens
  CDR3 for beta chain variable domain of TCR clone 15837 (TRBV12-4, TRBJ2-5)
CASSPPTGLQETQYF

SEQ ID NO: 31675 - protein, 15 aa, Homo sapiens
  CDR3 for alpha chain variable domain of TCR clone 15838 (TRAV27, TRAJ38)
CAARRNAGNNRKLIW

SEQ ID NO: 31676 - protein, 13 aa, Homo sapiens
  CDR3 for beta chain variable domain of TCR clone 15838 (TRBV12-5, TRBJ2-3)
CASSDRQSDTQYF

SEQ ID NO: 31677 - protein, 14 aa, Homo sapiens
  CDR3 for alpha chain variable domain of TCR clone 15839 (TRAV8-4, TRAJ13)
CAVTLSGGYQNVTF

SEQ ID NO: 31678 - protein, 14 aa, Homo sapiens
  CDR3 for beta chain variable domain of TCR clone 15839 (TRBV7-2, TRBJ1-2)
CASSQTGSTYGYTF

SEQ ID NO: 31679 - protein, 13 aa, Homo sapiens
  CDR3 for alpha chain variable domain of TCR clone 15840 (TRAV8-3, TRAJ28)
CAVGAVGSYQLTF

SEQ ID NO: 31680 - protein, 15 aa, Homo sapiens
  CDR3 for beta chain variable domain of TCR clone 15840 (TRBV7-9, TRBJ1-5)
CASSQGHRPNQPQHF

SEQ ID NO: 31681 - protein, 15 aa, Homo sapiens
  CDR3 for alpha chain variable domain of TCR clone 15841 (TRAV21, TRAJ53)
CATLNSGGSNYKLTF

SEQ ID NO: 31682 - protein, 16 aa, Homo sapiens
  CDR3 for beta chain variable domain of TCR clone 15841 (TRBV7-3, TRBJ2-2)
CASSLKRGTLSGELFF

SEQ ID NO: 31683 - protein, 11 aa, Homo sapiens
  CDR3 for alpha chain variable domain of TCR clone 15842 (TRAV2, TRAJ33)
CAVDSNYQLIW

SEQ ID NO: 31684 - protein, 15 aa, Homo sapiens
  CDR3 for beta chain variable domain of TCR clone 15842 (TRBV19, TRBJ1-2)
CASSVGQVLNCGYTF

SEQ ID NO: 31685 - protein, 16 aa, Homo sapiens
  CDR3 for alpha chain variable domain of TCR clone 15843 (TRAV12-3, TRAJ53)
CAMSPGSGGSNYKLTS

SEQ ID NO: 31686 - protein, 13 aa, Homo sapiens
  CDR3 for beta chain variable domain of TCR clone 15843 (TRBV7-3, TRBJ1-1)
CASSQDWGAEAFF

SEQ ID NO: 31687 - protein, 13 aa, Homo sapiens
  CDR3 for alpha chain variable domain of TCR clone 15844 (TRAV12-2, TRAJ4)
CAVRSGGYNKLIF

SEQ ID NO: 31688 - protein, 15 aa, Homo sapiens
  CDR3 for beta chain variable domain of TCR clone 15844 (TRBV10-3, TRBJ2-1)
CAISDVQDRAYVQFF

SEQ ID NO: 31689 - protein, 14 aa, Homo sapiens
  CDR3 for alpha chain variable domain of TCR clone 15845 (TRAV8-4, TRAJ57)
CAVSFQGGSEKLVF

SEQ ID NO: 31690 - protein, 13 aa, Homo sapiens
  CDR3 for beta chain variable domain of TCR clone 15845 (TRBV6-5, TRBJ1-1)
CASTRSGNTEAFF

SEQ ID NO: 31691 - protein, 15 aa, Homo sapiens
  CDR3 for alpha chain variable domain of TCR clone 15846 (TRAV12-2, TRAJ53)
CAVNGGGGSNYKLTF

SEQ ID NO: 31692 - protein, 14 aa, Homo sapiens
  CDR3 for beta chain variable domain of TCR clone 15846 (TRBV19, TRBJ2-2)
CDSSTLHRSGELFF

SEQ ID NO: 31693 - protein, 15 aa, Homo sapiens
  CDR3 for alpha chain variable domain of TCR clone 15847 (TRAV12-3, TRAJ6)
CAMSATTGGSYIPTF

SEQ ID NO: 31694 - protein, 14 aa, Homo sapiens
  CDR3 for beta chain variable domain of TCR clone 15847 (TRBV19, TRBJ2-1)
CASPTFVLSGEQFF

SEQ ID NO: 31695 - protein, 13 aa, Homo sapiens
  CDR3 for alpha chain variable domain of TCR clone 15848 (TRAV6, TRAJ45)
SPFSGGGADGLTF

SEQ ID NO: 31696 - protein, 16 aa, Homo sapiens
  CDR3 for beta chain variable domain of TCR clone 15848 (TRBV19, TRBJ2-2)
CASRSPGTGATGELFF

SEQ ID NO: 31697 - protein, 15 aa, Homo sapiens
  CDR3 for alpha chain variable domain of TCR clone 15849 (TRAV29/DV5, TRAJ42)
CAAKADGGSQGNLIF

SEQ ID NO: 31698 - protein, 12 aa, Homo sapiens
  CDR3 for beta chain variable domain of TCR clone 15849 (TRBV11-2, TRBJ2-1)
CASSPGNNEQFF

SEQ ID NO: 31699 - protein, 14 aa, Homo sapiens
  CDR3 for alpha chain variable domain of TCR clone 15850 (TRAV17, TRAJ15)
CATAPNQAGTALIL

SEQ ID NO: 31700 - protein, 14 aa, Homo sapiens
  CDR3 for beta chain variable domain of TCR clone 15850 (TRBV19, TRBJ2-7)
CASSMGQGAIEQYF

SEQ ID NO: 31701 - protein, 18 aa, Homo sapiens
  CDR3 for alpha chain variable domain of TCR clone 15851 (TRAV21, TRAJ52)
CAVRPSPAGGTSYGKLTF

SEQ ID NO: 31702 - protein, 17 aa, Homo sapiens
  CDR3 for beta chain variable domain of TCR clone 15851 (TRBV13, TRBJ2-3)
CASSLSRVAGRRNTQYF

SEQ ID NO: 31703 - protein, 13 aa, Homo sapiens
  CDR3 for alpha chain variable domain of TCR clone 15852 (TRAV25, TRAJ35)
CAGGGALGMCCIA

SEQ ID NO: 31704 - protein, 14 aa, Homo sapiens
  CDR3 for beta chain variable domain of TCR clone 15852 (TRBV6-1, TRBJ2-1)
CASAGGAIKNEQFF

SEQ ID NO: 31705 - protein, 13 aa, Homo sapiens
  CDR3 for alpha chain variable domain of TCR clone 15853 (TRAV27, TRAJ42)
CAGARGSQGNLIF

SEQ ID NO: 31706 - protein, 15 aa, Homo sapiens
  CDR3 for beta chain variable domain of TCR clone 15853 (TRBV10-3, TRBJ2-2)
CAIRADREDTGELFF

SEQ ID NO: 31707 - protein, 14 aa, Homo sapiens
  CDR3 for alpha chain variable domain of TCR clone 15854 (TRAV12-2, TRAJ13)
CAVKKTGGYQKVTF

SEQ ID NO: 31708 - protein, 18 aa, Homo sapiens
  CDR3 for beta chain variable domain of TCR clone 15854 (TRBV20-1, TRBJ2-6)
CSAETTPTHGSGANVLTF

SEQ ID NO: 31709 - protein, 12 aa, Homo sapiens
  CDR3 for alpha chain variable domain of TCR clone 15855 (TRAV12-1, TRAJ40)
CAFYSGTYKYIF

SEQ ID NO: 31710 - protein, 18 aa, Homo sapiens
  CDR3 for beta chain variable domain of TCR clone 15855 (TRBV12-4, TRBJ2-2)
CASSLVAGTRGRTGELFF

SEQ ID NO: 31711 - protein, 14 aa, Homo sapiens
  CDR3 for alpha chain variable domain of TCR clone 15856 (TRAV1-2, TRAJ15)
CAVRDRQAGTALIF

SEQ ID NO: 31712 - protein, 11 aa, Homo sapiens
  CDR3 for beta chain variable domain of TCR clone 15856 (TRBV7-8, TRBJ2-7)
CASSLSLEQYF

SEQ ID NO: 31713 - protein, 19 aa, Homo sapiens
  CDR3 for alpha chain variable domain of TCR clone 15857 (TRAV1-2, TRAJ26)
CLLPLCCERPDNYGQNFVF

SEQ ID NO: 31714 - protein, 14 aa, Homo sapiens
  CDR3 for beta chain variable domain of TCR clone 15857 (TRBV10-1, TRBJ2-5)
CASSESQGAKTQYF

SEQ ID NO: 31715 - protein, 18 aa, Homo sapiens
  CDR3 for alpha chain variable domain of TCR clone 15858 (TRAV12-3, TRAJ52)
CAMSVGGAGGTSYGKLKF

SEQ ID NO: 31716 - protein, 15 aa, Homo sapiens
  CDR3 for beta chain variable domain of TCR clone 15858 (TRBV27, TRBJ1-6)
CASSFDRGLGSPLHF

SEQ ID NO: 31717 - protein, 13 aa, Homo sapiens
  CDR3 for alpha chain variable domain of TCR clone 15859 (TRAV5, TRAJ32)
CADYGGATNKLIF

SEQ ID NO: 31718 - protein, 16 aa, Homo sapiens
  CDR3 for beta chain variable domain of TCR clone 15859 (TRBV4-1, TRBJ2-3)
CASSQSTSGAEDTQYF

SEQ ID NO: 31719 - protein, 10 aa, Homo sapiens
  CDR3 for alpha chain variable domain of TCR clone 15860 (TRAV23/DV6, TRAJ57)
CAASSTLSQG

SEQ ID NO: 31720 - protein, 14 aa, Homo sapiens
  CDR3 for beta chain variable domain of TCR clone 15860 (TRBV25-1, TRBJ1-1)
CASTHLGGSTEAFF

SEQ ID NO: 31721 - protein, 12 aa, Homo sapiens
  CDR3 for alpha chain variable domain of TCR clone 15861 (TRAV17, TRAJ12)
CATLRSSYKLIF

SEQ ID NO: 31722 - protein, 16 aa, Homo sapiens
  CDR3 for beta chain variable domain of TCR clone 15861 (TRBV28, TRBJ2-7)
CASSLSFETGGPEQYF

SEQ ID NO: 31723 - protein, 14 aa, Homo sapiens
  CDR3 for alpha chain variable domain of TCR clone 15862 (TRAV1-2, TRAJ8)
CAVREDTGFQKLVF

SEQ ID NO: 31724 - protein, 15 aa, Homo sapiens
  CDR3 for beta chain variable domain of TCR clone 15862 (TRBV6-3, TRBJ2-7)
CSSSSPGTVFYEQYF

SEQ ID NO: 31725 - protein, 12 aa, Homo sapiens
  CDR3 for alpha chain variable domain of TCR clone 15863 (TRAV12-3, TRAJ17)
CAMTLTGNMLTF

SEQ ID NO: 31726 - protein, 15 aa, Homo sapiens
  CDR3 for beta chain variable domain of TCR clone 15863 (TRBV20-1, TRBJ2-7)
CSARDRVSGMDEQYF

SEQ ID NO: 31727 - protein, 14 aa, Homo sapiens
  CDR3 for alpha chain variable domain of TCR clone 15864 (TRAV13-1, TRAJ35)
CAASKGGFGNVLHC

SEQ ID NO: 31728 - protein, 16 aa, Homo sapiens
  CDR3 for beta chain variable domain of TCR clone 15864 (TRBV12-5, TRBJ2-5)
CASGPRTSGNQETQYF

SEQ ID NO: 31729 - protein, 18 aa, Homo sapiens
  CDR3 for alpha chain variable domain of TCR clone 15865 (TRAV9-2, TRAJ52)
CALSRHNAGGTSYGKLTF

SEQ ID NO: 31730 - protein, 15 aa, Homo sapiens
  CDR3 for beta chain variable domain of TCR clone 15865 (TRBV20-1, TRBJ2-6)
CSARDRGPGANVLTF

SEQ ID NO: 31731 - protein, 13 aa, Homo sapiens
  CDR3 for alpha chain variable domain of TCR clone 15866 (TRAV3, TRAJ27)
CAVRPLGAGKSTC

SEQ ID NO: 31732 - protein, 13 aa, Homo sapiens
  CDR3 for beta chain variable domain of TCR clone 15866 (TRBV7-9, TRBJ2-3)
CASSPGSTDTQYF

SEQ ID NO: 31733 - protein, 14 aa, Homo sapiens
  CDR3 for alpha chain variable domain of TCR clone 15867 (TRAV4, TRAJ32)
CLVGLGGATNKLIF

SEQ ID NO: 31734 - protein, 17 aa, Homo sapiens
  CDR3 for beta chain variable domain of TCR clone 15867 (TRBV6-6, TRBJ2-5)
CASSSPPAGGSGKTQYF

SEQ ID NO: 31735 - protein, 15 aa, Homo sapiens
  CDR3 for alpha chain variable domain of TCR clone 15868 (TRAV27, TRAJ38)
CAARRNAGNNRKLNW

SEQ ID NO: 31736 - protein, 13 aa, Homo sapiens
  CDR3 for beta chain variable domain of TCR clone 15868 (TRBV12-5, TRBJ2-3)
CASGDRQSDTQYF

SEQ ID NO: 31737 - protein, 13 aa, Homo sapiens
  CDR3 for alpha chain variable domain of TCR clone 15869 (TRAV21, TRAJ20)
CAVGLRVDYKLSF

SEQ ID NO: 31738 - protein, 13 aa, Homo sapiens
  CDR3 for beta chain variable domain of TCR clone 15869 (TRBV6-1, TRBJ1-1)
CASSRQGNTEASF

SEQ ID NO: 31739 - protein, 13 aa, Homo sapiens
  CDR3 for alpha chain variable domain of TCR clone 15870 (TRAV13-2, TRAJ48)
CAEMDFGNDKLTF

SEQ ID NO: 31740 - protein, 15 aa, Homo sapiens
  CDR3 for beta chain variable domain of TCR clone 15870 (TRBV7-9, TRBJ1-6)
CASSSPGRGNSPLHF

SEQ ID NO: 31741 - protein, 13 aa, Homo sapiens
  CDR3 for alpha chain variable domain of TCR clone 15871 (TRAV13-1, TRAJ21)
CAASIYNFNKFYF

SEQ ID NO: 31742 - protein, 13 aa, Homo sapiens
  CDR3 for beta chain variable domain of TCR clone 15871 (TRBV27, TRBJ1-4)
CASSLMGNEKLFF

SEQ ID NO: 31743 - protein, 12 aa, Homo sapiens
  CDR3 for alpha chain variable domain of TCR clone 15872 (TRAV12-1, TRAJ40)
CVVYSGTYKYIF

SEQ ID NO: 31744 - protein, 18 aa, Homo sapiens
  CDR3 for beta chain variable domain of TCR clone 15872 (TRBV11-2, TRBJ2-3)
CANSLGGASRGAPNTQYF

SEQ ID NO: 31745 - protein, 14 aa, Homo sapiens
  CDR3 for alpha chain variable domain of TCR clone 15873 (TRAV26-1, TRAJ39)
CIVRGSRAGDMLTF

SEQ ID NO: 31746 - protein, 15 aa, Homo sapiens
  CDR3 for beta chain variable domain of TCR clone 15873 (TRBV7-9, TRBJ1-5)
CASSQGHQPNQPQHF

SEQ ID NO: 31747 - protein, 14 aa, Homo sapiens
  CDR3 for alpha chain variable domain of TCR clone 15874 (TRAV12-3, TRAJ10)
SHLPLTGGGNKLTF

SEQ ID NO: 31748 - protein, 13 aa, Homo sapiens
  CDR3 for beta chain variable domain of TCR clone 15874 (TRBV7-3, TRBJ2-5)
CASSFRGGETQYF

SEQ ID NO: 31749 - protein, 14 aa, Homo sapiens
  CDR3 for alpha chain variable domain of TCR clone 15875 (TRAV3, TRAJ36)
CAVRDRTGANNLFF

SEQ ID NO: 31750 - protein, 16 aa, Homo sapiens
  CDR3 for beta chain variable domain of TCR clone 15875 (TRBV20-1, TRBJ2-6)
CSAREGPGVGANVLTF

SEQ ID NO: 31751 - protein, 20 aa, Homo sapiens
  CDR3 for alpha chain variable domain of TCR clone 15876 (TRAV12-1, TRAJ42)
SSVIQPPTSVKGGSQGNLIF

SEQ ID NO: 31752 - protein, 18 aa, Homo sapiens
  CDR3 for beta chain variable domain of TCR clone 15876 (TRBV11-2, TRBJ2-3)
RASSLGGASRGAPNTQYF

SEQ ID NO: 31753 - protein, 13 aa, Homo sapiens
  CDR3 for alpha chain variable domain of TCR clone 15877 (TRAV8-3, TRAJ36)
CAAGATGANNLFF

SEQ ID NO: 31754 - protein, 15 aa, Homo sapiens
  CDR3 for beta chain variable domain of TCR clone 15877 (TRBV7-2, TRBJ1-2)
CASSPRAGWNYGYTF

SEQ ID NO: 31755 - protein, 15 aa, Homo sapiens
  CDR3 for alpha chain variable domain of TCR clone 15878 (TRAV38-1, TRAJ37)
CALIHGSGNTGKLIF

SEQ ID NO: 31756 - protein, 12 aa, Homo sapiens
  CDR3 for beta chain variable domain of TCR clone 15878 (TRBV7-9, TRBJ2-7)
CASSFGSYEQYF

SEQ ID NO: 31757 - protein, 13 aa, Homo sapiens
  CDR3 for alpha chain variable domain of TCR clone 15879 (TRAV35, TRAJ37)
CAGSSGSTGKLIF

SEQ ID NO: 31758 - protein, 16 aa, Homo sapiens
  CDR3 for beta chain variable domain of TCR clone 15879 (TRBV10-3, TRBJ2-1)
CAISLTSGNSYNEQFF

SEQ ID NO: 31759 - protein, 18 aa, Homo sapiens
  CDR3 for alpha chain variable domain of TCR clone 15880 (TRAV3, TRAJ17)
CAVRARRGGRSCRQQANF

SEQ ID NO: 31760 - protein, 14 aa, Homo sapiens
  CDR3 for beta chain variable domain of TCR clone 15880 (TRBV4-1, TRBJ2-2)
CASSQAVNTGELFF

SEQ ID NO: 31761 - protein, 14 aa, Homo sapiens
  CDR3 for alpha chain variable domain of TCR clone 15881 (TRAV1-1, TRAJ33)
CAVRPEDSNYQLIW

SEQ ID NO: 31762 - protein, 15 aa, Homo sapiens
  CDR3 for beta chain variable domain of TCR clone 15881 (TRBV20-1, TRBJ2-1)
CSARSPGGPGNEQSF

SEQ ID NO: 31763 - protein, 16 aa, Homo sapiens
  CDR3 for alpha chain variable domain of TCR clone 15882 (TRAV16, TRAJ4)
CALSRMFSGGYNKLIF

SEQ ID NO: 31764 - protein, 12 aa, Homo sapiens
  CDR3 for beta chain variable domain of TCR clone 15882 (TRBV11-2, TRBJ2-2)
CASSLGGGELFF

SEQ ID NO: 31765 - protein, 16 aa, Homo sapiens
  CDR3 for alpha chain variable domain of TCR clone 15883 (TRAV30, TRAJ24)
CGTEIVDADGWGKFQF

SEQ ID NO: 31766 - protein, 15 aa, Homo sapiens
  CDR3 for beta chain variable domain of TCR clone 15883 (TRBV20-1, TRBJ2-7)
CSARDRVSGMDEQYF

SEQ ID NO: 31767 - protein, 11 aa, Homo sapiens
  CDR3 for alpha chain variable domain of TCR clone 15884 (TRAV21, TRAJ11)
CAVNGYSTLTF

SEQ ID NO: 31768 - protein, 17 aa, Homo sapiens
  CDR3 for beta chain variable domain of TCR clone 15884 (TRBV7-7, TRBJ1-1)
CASIGDRPNLGVTEAFF

SEQ ID NO: 31769 - protein, 14 aa, Homo sapiens
  CDR3 for alpha chain variable domain of TCR clone 15885 (TRAV20, TRAJ42)
CAVQAGGSQGNLTF

SEQ ID NO: 31770 - protein, 14 aa, Homo sapiens
  CDR3 for beta chain variable domain of TCR clone 15885 (TRBV28, TRBJ1-2)
CASRIQGANYGYTF

SEQ ID NO: 31771 - protein, 14 aa, Homo sapiens
  CDR3 for alpha chain variable domain of TCR clone 15886 (TRAV21, TRAJ52)
CGRAGGTSYGRLTF

SEQ ID NO: 31772 - protein, 14 aa, Homo sapiens
  CDR3 for beta chain variable domain of TCR clone 15886 (TRBV19, TRBJ1-2)
CASSVLGYNYGYTF

SEQ ID NO: 31773 - protein, 14 aa, Homo sapiens
  CDR3 for alpha chain variable domain of TCR clone 15887 (TRAV12-3, TRAJ10)
SHLPLTGGGNKLTF

SEQ ID NO: 31774 - protein, 15 aa, Homo sapiens
  CDR3 for beta chain variable domain of TCR clone 15887 (TRBV3-1, TRBJ2-5)
CASSANLGGPETQYF

SEQ ID NO: 31775 - protein, 11 aa, Homo sapiens
  CDR3 for alpha chain variable domain of TCR clone 15888 (TRAV2, TRAJ33)
CAVESNYQLIW

SEQ ID NO: 31776 - protein, 14 aa, Homo sapiens
  CDR3 for beta chain variable domain of TCR clone 15888 (TRBV25-1, TRBJ1-1)
CASTHLGGNTEAFF

SEQ ID NO: 31777 - protein, 13 aa, Homo sapiens
  CDR3 for alpha chain variable domain of TCR clone 15889 (TRAV1-2, TRAJ9)
FAALNTGGFKTIF

SEQ ID NO: 31778 - protein, 13 aa, Homo sapiens
  CDR3 for beta chain variable domain of TCR clone 15889 (TRBV19, TRBJ1-2)
CASSVPGQDGYTF

SEQ ID NO: 31779 - protein, 14 aa, Homo sapiens
  CDR3 for alpha chain variable domain of TCR clone 15890 (TRAV12-3, TRAJ10)
SHLPLTGGGNKLTF

SEQ ID NO: 31780 - protein, 16 aa, Homo sapiens
  CDR3 for beta chain variable domain of TCR clone 15890 (TRBV2, TRBJ2-1)
CASSVGGSLSYNEQFF

SEQ ID NO: 31781 - protein, 13 aa, Homo sapiens
  CDR3 for alpha chain variable domain of TCR clone 15891 (TRAV13-2, TRAJ53)
CAENMGSNHKLTF

SEQ ID NO: 31782 - protein, 13 aa, Homo sapiens
  CDR3 for beta chain variable domain of TCR clone 15891 (TRBV4-1, TRBJ2-2)
CASSQENTGELFF

SEQ ID NO: 31783 - protein, 11 aa, Homo sapiens
  CDR3 for alpha chain variable domain of TCR clone 15892 (TRAV3, TRAJ21)
CAVGNFNKFYF

SEQ ID NO: 31784 - protein, 16 aa, Homo sapiens
  CDR3 for beta chain variable domain of TCR clone 15892 (TRBV19, TRBJ2-1)
CASSKAGPNSYNEQFF

SEQ ID NO: 31785 - protein, 14 aa, Homo sapiens
  CDR3 for alpha chain variable domain of TCR clone 15893 (TRAV21, TRAJ32)
CCGDYGGATNKLIF

SEQ ID NO: 31786 - protein, 15 aa, Homo sapiens
  CDR3 for beta chain variable domain of TCR clone 15893 (TRBV9, TRBJ1-6)
CASSVAGTGDSPLHF

SEQ ID NO: 31787 - protein, 14 aa, Homo sapiens
  CDR3 for alpha chain variable domain of TCR clone 15894 (TRAV26-1, TRAJ38)
CIADNAGNNRKLIW

SEQ ID NO: 31788 - protein, 13 aa, Homo sapiens
  CDR3 for beta chain variable domain of TCR clone 15894 (TRBV20-1, TRBJ1-1)
CSARGGGNIEAFF

SEQ ID NO: 31789 - protein, 14 aa, Homo sapiens
  CDR3 for alpha chain variable domain of TCR clone 15895 (TRAV9-2, TRAJ39)
CALYIYNAGNMLTF

SEQ ID NO: 31790 - protein, 13 aa, Homo sapiens
  CDR3 for beta chain variable domain of TCR clone 15895 (TRBV5-5, TRBJ1-2)
CASSFWRGEDYTF

SEQ ID NO: 31791 - protein, 15 aa, Homo sapiens
  CDR3 for alpha chain variable domain of TCR clone 15896 (TRAV17, TRAJ57)
CATGPSQGGSEKLVF

SEQ ID NO: 31792 - protein, 15 aa, Homo sapiens
  CDR3 for beta chain variable domain of TCR clone 15896 (TRBV28, TRBJ2-1)
CASSIIAGGRSEQFF

SEQ ID NO: 31793 - protein, 14 aa, Homo sapiens
  CDR3 for alpha chain variable domain of TCR clone 15897 (TRAV1-2, TRAJ16)
CAVNRFSDGQKLLF

SEQ ID NO: 31794 - protein, 13 aa, Homo sapiens
  CDR3 for beta chain variable domain of TCR clone 15897 (TRBV7-9, TRBJ1-2)
CASSLKQNYGDTF

SEQ ID NO: 31795 - protein, 15 aa, Homo sapiens
  CDR3 for alpha chain variable domain of TCR clone 15898 (TRAV8-3, TRAJ27)
CAVGPSKTDAGKSTF

SEQ ID NO: 31796 - protein, 15 aa, Homo sapiens
  CDR3 for beta chain variable domain of TCR clone 15898 (TRBV7-2, TRBJ2-1)
CASSSGLAGGNEQFF

SEQ ID NO: 31797 - protein, 18 aa, Homo sapiens
  CDR3 for alpha chain variable domain of TCR clone 15899 (TRAV21, TRAJ52)
CAVRPSPAGGTSYGKLTF

SEQ ID NO: 31798 - protein, 14 aa, Homo sapiens
  CDR3 for beta chain variable domain of TCR clone 15899 (TRBV18, TRBJ2-7)
CASSPRGGAYEQYF

SEQ ID NO: 31799 - protein, 13 aa, Homo sapiens
  CDR3 for alpha chain variable domain of TCR clone 15900 (TRAV21, TRAJ20)
CAVGLRVDYRLSF

SEQ ID NO: 31800 - protein, 13 aa, Homo sapiens
  CDR3 for beta chain variable domain of TCR clone 15900 (TRBV6-1, TRBJ1-1)
CASSRQGNTEAFF

SEQ ID NO: 31801 - protein, 15 aa, Homo sapiens
  CDR3 for alpha chain variable domain of TCR clone 15901 (TRAV38-1, TRAJ37)
CASIFGSGNTGKLIF

SEQ ID NO: 31802 - protein, 12 aa, Homo sapiens
  CDR3 for beta chain variable domain of TCR clone 15901 (TRBV7-9, TRBJ2-7)
CASSLEGYEQYF

SEQ ID NO: 31803 - protein, 15 aa, Homo sapiens
  CDR3 for alpha chain variable domain of TCR clone 15902 (TRAV8-2, TRAJ40)
CVVLGTTSGTYKYIF

SEQ ID NO: 31804 - protein, 16 aa, Homo sapiens
  CDR3 for beta chain variable domain of TCR clone 15902 (TRBV7-3, TRBJ2-1)
CASSLEGYRSYNGQFF

SEQ ID NO: 31805 - protein, 12 aa, Homo sapiens
  CDR3 for alpha chain variable domain of TCR clone 15903 (TRAV13-2, TRAJ8)
CAPWLGFQKLVF

SEQ ID NO: 31806 - protein, 13 aa, Homo sapiens
  CDR3 for beta chain variable domain of TCR clone 15903 (TRBV7-3, TRBJ1-1)
CASSQDWGAEAFF

SEQ ID NO: 31807 - protein, 19 aa, Homo sapiens
  CDR3 for alpha chain variable domain of TCR clone 15904 (TRAV3, TRAJ6)
CAVRDRNPSRSGGSYIPTL

SEQ ID NO: 31808 - protein, 15 aa, Homo sapiens
  CDR3 for beta chain variable domain of TCR clone 15904 (TRBV18, TRBJ2-7)
CASSPTFMDSYEQYF

SEQ ID NO: 31809 - protein, 14 aa, Homo sapiens
  CDR3 for alpha chain variable domain of TCR clone 15905 (TRAV12-2, TRAJ40)
CAVKIPSGTYKYIF

SEQ ID NO: 31810 - protein, 13 aa, Homo sapiens
  CDR3 for beta chain variable domain of TCR clone 15905 (TRBV19, TRBJ1-2)
CASSVPGQDGYTF

SEQ ID NO: 31811 - protein, 14 aa, Homo sapiens
  CDR3 for alpha chain variable domain of TCR clone 15906 (TRAV29/DV5, TRAJ36)
CAARRKPGANNLFF

SEQ ID NO: 31812 - protein, 14 aa, Homo sapiens
  CDR3 for beta chain variable domain of TCR clone 15906 (TRBV12-5, TRBJ2-5)
CASGSRTHQETQYF

SEQ ID NO: 31813 - protein, 16 aa, Homo sapiens
  CDR3 for alpha chain variable domain of TCR clone 15907 (TRAV16, TRAJ4)
CALSRMFSGGYNKPIF

SEQ ID NO: 31814 - protein, 16 aa, Homo sapiens
  CDR3 for beta chain variable domain of TCR clone 15907 (TRBV24-1, TRBJ2-3)
CATSDPGTGATDTQYF

SEQ ID NO: 31815 - protein, 11 aa, Homo sapiens
  CDR3 for alpha chain variable domain of TCR clone 15908 (TRAV2, TRAJ13)
CASGCYQKVTF

SEQ ID NO: 31816 - protein, 16 aa, Homo sapiens
  CDR3 for beta chain variable domain of TCR clone 15908 (TRBV6-1, TRBJ2-5)
CASSETLDRGAETQYF

SEQ ID NO: 31817 - protein, 11 aa, Homo sapiens
  CDR3 for alpha chain variable domain of TCR clone 15909 (TRAV3, TRAJ21)
CAVGNFNKFYF

SEQ ID NO: 31818 - protein, 16 aa, Homo sapiens
  CDR3 for beta chain variable domain of TCR clone 15909 (TRBV19, TRBJ2-1)
CSSSKAGPSSYNEQFF

SEQ ID NO: 31819 - protein, 14 aa, Homo sapiens
  CDR3 for alpha chain variable domain of TCR clone 15910 (TRAV12-2, TRAJ13)
CAVKKTGGYQKVTF

SEQ ID NO: 31820 - protein, 15 aa, Homo sapiens
  CDR3 for beta chain variable domain of TCR clone 15910 (TRBV27, TRBJ2-1)
GASSNGGGSSNEQFF

SEQ ID NO: 31821 - protein, 18 aa, Homo sapiens
  CDR3 for alpha chain variable domain of TCR clone 15911 (TRAV26-2, TRAJ45)
CILRLWGYSGGGADGLTL

SEQ ID NO: 31822 - protein, 17 aa, Homo sapiens
  CDR3 for beta chain variable domain of TCR clone 15911 (TRBV28, TRBJ2-3)
CASSPTPAGGRVDTQYF

SEQ ID NO: 31823 - protein, 16 aa, Homo sapiens
  CDR3 for alpha chain variable domain of TCR clone 15912 (TRAV3, TRAJ4)
CAVRPSPSVGYNKLIF

SEQ ID NO: 31824 - protein, 12 aa, Homo sapiens
  CDR3 for beta chain variable domain of TCR clone 15912 (TRBV7-9, TRBJ2-7)
CASSQGVYEQYF

SEQ ID NO: 31825 - protein, 10 aa, Homo sapiens
  CDR3 for alpha chain variable domain of TCR clone 15913 (TRAV36/DV7, TRAJ49)
CALTGNQFYF

SEQ ID NO: 31826 - protein, 15 aa, Homo sapiens
  CDR3 for beta chain variable domain of TCR clone 15913 (TRBV11-2, TRBJ2-1)
CASSLGTSGLNEQFF

SEQ ID NO: 31827 - protein, 18 aa, Homo sapiens
  CDR3 for alpha chain variable domain of TCR clone 15914 (TRAV21, TRAJ52)
CAVRPTPAGGTSYGKLTF

SEQ ID NO: 31828 - protein, 17 aa, Homo sapiens
  CDR3 for beta chain variable domain of TCR clone 15914 (TRBV13, TRBJ2-3)
CASSLSRVAGGRNTQYF

SEQ ID NO: 31829 - protein, 11 aa, Homo sapiens
  CDR3 for alpha chain variable domain of TCR clone 15915 (TRAV12-1, TRAJ30)
CVVNGQDKIIF

SEQ ID NO: 31830 - protein, 12 aa, Homo sapiens
  CDR3 for beta chain variable domain of TCR clone 15915 (TRBV27, TRBJ2-2)
CAGKLFTGELFF

SEQ ID NO: 31831 - protein, 12 aa, Homo sapiens
  CDR3 for alpha chain variable domain of TCR clone 15916 (TRAV1-1, TRAJ8)
CAGGTGFQKLVL

SEQ ID NO: 31832 - protein, 15 aa, Homo sapiens
  CDR3 for beta chain variable domain of TCR clone 15916 (TRBV7-9, TRBJ1-4)
CASSRTGGFNEKLFF

SEQ ID NO: 31833 - protein, 15 aa, Homo sapiens
  CDR3 for alpha chain variable domain of TCR clone 15917 (TRAV3, TRAJ3)
CAVRDGHSSASKIIF

SEQ ID NO: 31834 - protein, 14 aa, Homo sapiens
  CDR3 for beta chain variable domain of TCR clone 15917 (TRBV28, TRBJ1-4)
CASSLGTFDEKLFF

SEQ ID NO: 31835 - protein, 14 aa, Homo sapiens
  CDR3 for alpha chain variable domain of TCR clone 15918 (TRAV38-1, TRAJ39)
CAFAHNNAGNMLTF

SEQ ID NO: 31836 - protein, 15 aa, Homo sapiens
  CDR3 for beta chain variable domain of TCR clone 15918 (TRBV19, TRBJ2-6)
CASSIGPSGANVLTF

SEQ ID NO: 31837 - protein, 15 aa, Homo sapiens
  CDR3 for alpha chain variable domain of TCR clone 15919 (TRAV26-1, TRAJ44)
CIVRANTGTASKLTF

SEQ ID NO: 31838 - protein, 16 aa, Homo sapiens
  CDR3 for beta chain variable domain of TCR clone 15919 (TRBV7-7, TRBJ2-1)
CASSLASGTSYNEQFL

SEQ ID NO: 31839 - protein, 14 aa, Homo sapiens
  CDR3 for alpha chain variable domain of TCR clone 15920 (TRAV1-2, TRAJ16)
CAVNRFSDGQKLLF

SEQ ID NO: 31840 - protein, 14 aa, Homo sapiens
  CDR3 for beta chain variable domain of TCR clone 15920 (TRBV6-1, TRBJ2-6)
CASQQGAGANVLTF

SEQ ID NO: 31841 - protein, 13 aa, Homo sapiens
  CDR3 for alpha chain variable domain of TCR clone 15921 (TRAV13-1, TRAJ5)
CAASDTGRRALTL

SEQ ID NO: 31842 - protein, 12 aa, Homo sapiens
  CDR3 for beta chain variable domain of TCR clone 15921 (TRBV28, TRBJ2-3)
CASSLYRDTQYF

SEQ ID NO: 31843 - protein, 15 aa, Homo sapiens
  CDR3 for alpha chain variable domain of TCR clone 15922 (TRAV17, TRAJ35)
CATAFVIGFGNVLHF

SEQ ID NO: 31844 - protein, 15 aa, Homo sapiens
  CDR3 for beta chain variable domain of TCR clone 15922 (TRBV7-9, TRBJ2-7)
CASSLALAEAYEQYF

SEQ ID NO: 31845 - protein, 13 aa, Homo sapiens
  CDR3 for alpha chain variable domain of TCR clone 15923 (TRAV2, TRAJ40)
CAVGTSGTYKYIF

SEQ ID NO: 31846 - protein, 14 aa, Homo sapiens
  CDR3 for beta chain variable domain of TCR clone 15923 (TRBV19, TRBJ2-1)
CASPTFVLSGEQFF

SEQ ID NO: 31847 - protein, 14 aa, Homo sapiens
  CDR3 for alpha chain variable domain of TCR clone 15924 (TRAV12-2, TRAJ24)
CAVTPADSWGKLQF

SEQ ID NO: 31848 - protein, 12 aa, Homo sapiens
  CDR3 for beta chain variable domain of TCR clone 15924 (TRBV3-1, TRBJ2-1)
CASSQGSSEQFF

SEQ ID NO: 31849 - protein, 12 aa, Homo sapiens
  CDR3 for alpha chain variable domain of TCR clone 15925 (TRAV25, TRAJ36)
CAEQTGANNLFF

SEQ ID NO: 31850 - protein, 15 aa, Homo sapiens
  CDR3 for beta chain variable domain of TCR clone 15925 (TRBV6-1, TRBJ1-2)
CASTYEWEANYGYTF

SEQ ID NO: 31851 - protein, 12 aa, Homo sapiens
  CDR3 for alpha chain variable domain of TCR clone 15926 (TRAV21, TRAJ11)
CAATSGYSALTF

SEQ ID NO: 31852 - protein, 14 aa, Homo sapiens
  CDR3 for beta chain variable domain of TCR clone 15926 (TRBV20-1, TRBJ2-7)
CSAPELAGVGEQYF

SEQ ID NO: 31853 - protein, 15 aa, Homo sapiens
  CDR3 for alpha chain variable domain of TCR clone 15927 (TRAV8-6, TRAJ38)
CAVSSNAGNNRKLIW

SEQ ID NO: 31854 - protein, 15 aa, Homo sapiens
  CDR3 for beta chain variable domain of TCR clone 15927 (TRBV6-4, TRBJ2-1)
CASSSGTSGYNEQFF

SEQ ID NO: 31855 - protein, 12 aa, Homo sapiens
  CDR3 for alpha chain variable domain of TCR clone 15928 (TRAV12-3, TRAJ17)
CAMTLTGNKLTF

SEQ ID NO: 31856 - protein, 16 aa, Homo sapiens
  CDR3 for beta chain variable domain of TCR clone 15928 (TRBV7-9, TRBJ1-2)
CASSLGFSSGEDGYTF

SEQ ID NO: 31857 - protein, 13 aa, Homo sapiens
  CDR3 for alpha chain variable domain of TCR clone 15929 (TRAV13-2, TRAJ40)
CAEFTSGTYKYIS

SEQ ID NO: 31858 - protein, 14 aa, Homo sapiens
  CDR3 for beta chain variable domain of TCR clone 15929 (TRBV10-2, TRBJ1-5)
CASSSTGRNQPQHF

SEQ ID NO: 31859 - protein, 12 aa, Homo sapiens
  CDR3 for alpha chain variable domain of TCR clone 15930 (TRAV8-3, TRAJ20)
CAVGANDYKLSF

SEQ ID NO: 31860 - protein, 16 aa, Homo sapiens
  CDR3 for beta chain variable domain of TCR clone 15930 (TRBV19, TRBJ2-2)
CASRSPGTGATGELVF

SEQ ID NO: 31861 - protein, 13 aa, Homo sapiens
  CDR3 for alpha chain variable domain of TCR clone 15931 (TRAV21, TRAJ27)
SAARPGNAGKSTF

SEQ ID NO: 31862 - protein, 14 aa, Homo sapiens
  CDR3 for beta chain variable domain of TCR clone 15931 (TRBV7-6, TRBJ2-3)
CASSLGTVTDTQYF

SEQ ID NO: 31863 - protein, 13 aa, Homo sapiens
  CDR3 for alpha chain variable domain of TCR clone 15932 (TRAV12-3, TRAJ31)
CAMSANNNAGLMF

SEQ ID NO: 31864 - protein, 16 aa, Homo sapiens
  CDR3 for beta chain variable domain of TCR clone 15932 (TRBV7-9, TRBJ1-2)
CASSLGFSSGEDGYTF

SEQ ID NO: 31865 - protein, 15 aa, Homo sapiens
  CDR3 for alpha chain variable domain of TCR clone 15933 (TRAV8-2, TRAJ40)
CVVSDRGSGTYKYIF

SEQ ID NO: 31866 - protein, 16 aa, Homo sapiens
  CDR3 for beta chain variable domain of TCR clone 15933 (TRBV4-3, TRBJ2-1)
CASSPALDRGVNEQFF

SEQ ID NO: 31867 - protein, 12 aa, Homo sapiens
  CDR3 for alpha chain variable domain of TCR clone 15934 (TRAV3, TRAJ20)
CAVRDGDYKPSF

SEQ ID NO: 31868 - protein, 13 aa, Homo sapiens
  CDR3 for beta chain variable domain of TCR clone 15934 (TRBV9, TRBJ2-1)
CASSVGQGGEQFF

SEQ ID NO: 31869 - protein, 14 aa, Homo sapiens
  CDR3 for alpha chain variable domain of TCR clone 15935 (TRAV8-4, TRAJ13)
CAVTLPGGYQKVTF

SEQ ID NO: 31870 - protein, 14 aa, Homo sapiens
  CDR3 for beta chain variable domain of TCR clone 15935 (TRBV7-2, TRBJ1-2)
CASSQTGSTYGYTF

SEQ ID NO: 31871 - protein, 12 aa, Homo sapiens
  CDR3 for alpha chain variable domain of TCR clone 15936 (TRAV21, TRAJ11)
CAATSGYSTLTF

SEQ ID NO: 31872 - protein, 14 aa, Homo sapiens
  CDR3 for beta chain variable domain of TCR clone 15936 (TRBV20-1, TRBJ2-7)
CSAPELAGVGEQYV

SEQ ID NO: 31873 - protein, 15 aa, Homo sapiens
  CDR3 for alpha chain variable domain of TCR clone 15937 (TRAV27, TRAJ38)
CAARRNAGNNRKLIW

SEQ ID NO: 31874 - protein, 14 aa, Homo sapiens
  CDR3 for beta chain variable domain of TCR clone 15937 (TRBV12-5, TRBJ2-5)
CASGSRTHQETQYF

SEQ ID NO: 31875 - protein, 11 aa, Homo sapiens
  CDR3 for alpha chain variable domain of TCR clone 15938 (TRAV12-3, TRAJ43)
CAMSVYNDMRF

SEQ ID NO: 31876 - protein, 13 aa, Homo sapiens
  CDR3 for beta chain variable domain of TCR clone 15938 (TRBV20-1, TRBJ1-1)
CSAPLGGGTEAFF

SEQ ID NO: 31877 - protein, 14 aa, Homo sapiens
  CDR3 for alpha chain variable domain of TCR clone 15939 (TRAV1-2, TRAJ8)
CAVREDTGFQKLVF

SEQ ID NO: 31878 - protein, 15 aa, Homo sapiens
  CDR3 for beta chain variable domain of TCR clone 15939 (TRBV7-2, TRBJ2-1)
CASTHGTGIYNEQFF

SEQ ID NO: 31879 - protein, 17 aa, Homo sapiens
  CDR3 for alpha chain variable domain of TCR clone 15940 (TRAV26-1, TRAJ53)
CIVRVDDSGGSKYKLTF

SEQ ID NO: 31880 - protein, 15 aa, Homo sapiens
  CDR3 for beta chain variable domain of TCR clone 15940 (TRBV20-1, TRBJ2-7)
CSARVPAAYFYEQYF

SEQ ID NO: 31881 - protein, 13 aa, Homo sapiens
  CDR3 for alpha chain variable domain of TCR clone 15941 (TRAV35, TRAJ48)
CAGHEFGNEKLTF

SEQ ID NO: 31882 - protein, 14 aa, Homo sapiens
  CDR3 for beta chain variable domain of TCR clone 15941 (TRBV19, TRBJ2-1)
CASPAFVLSGEQFF

SEQ ID NO: 31883 - protein, 14 aa, Homo sapiens
  CDR3 for alpha chain variable domain of TCR clone 15942 (TRAV20, TRAJ21)
CPYPTTSTNFTLDL

SEQ ID NO: 31884 - protein, 16 aa, Homo sapiens
  CDR3 for beta chain variable domain of TCR clone 15942 (TRBV5-1, TRBJ2-2)
CASSFGDRPNTGELFF

SEQ ID NO: 31885 - protein, 12 aa, Homo sapiens
  CDR3 for alpha chain variable domain of TCR clone 15943 (TRAV13-2, TRAJ23)
CAERHRGGKLIF

SEQ ID NO: 31886 - protein, 15 aa, Homo sapiens
  CDR3 for beta chain variable domain of TCR clone 15943 (TRBV19, TRBJ2-4)
CASSDGGGAKNIQYF

SEQ ID NO: 31887 - protein, 14 aa, Homo sapiens
  CDR3 for alpha chain variable domain of TCR clone 15944 (TRAV38-1, TRAJ45)
CAYYSGGVADGLTF

SEQ ID NO: 31888 - protein, 20 aa, Homo sapiens
  CDR3 for beta chain variable domain of TCR clone 15944 (TRBV28, TRBJ2-1)
CASTPIGRSPGLAGGNEQFF

SEQ ID NO: 31889 - protein, 14 aa, Homo sapiens
  CDR3 for alpha chain variable domain of TCR clone 15945 (TRAV12-3, TRAJ9)
CAMSPNTGGFKTIF

SEQ ID NO: 31890 - protein, 14 aa, Homo sapiens
  CDR3 for beta chain variable domain of TCR clone 15945 (TRBV19, TRBJ1-5)
CASSIAQQPSILVM

SEQ ID NO: 31891 - protein, 15 aa, Homo sapiens
  CDR3 for alpha chain variable domain of TCR clone 15946 (TRAV3, TRAJ5)
CAVRDLDTGRRALTF

SEQ ID NO: 31892 - protein, 13 aa, Homo sapiens
  CDR3 for beta chain variable domain of TCR clone 15946 (TRBV12-4, TRBJ2-7)
RASSPTETYEQYF

SEQ ID NO: 31893 - protein, 13 aa, Homo sapiens
  CDR3 for alpha chain variable domain of TCR clone 15947 (TRAV13-2, TRAJ48)
CAEMDFGNEKLTF

SEQ ID NO: 31894 - protein, 13 aa, Homo sapiens
  CDR3 for beta chain variable domain of TCR clone 15947 (TRBV29-1, TRBJ2-1)
CSVEGGRVNEQFF

SEQ ID NO: 31895 - protein, 16 aa, Homo sapiens
  CDR3 for alpha chain variable domain of TCR clone 15948 (TRAV30, TRAJ24)
CGTEIVDADSWGIFQF

SEQ ID NO: 31896 - protein, 14 aa, Homo sapiens
  CDR3 for beta chain variable domain of TCR clone 15948 (TRBV12-5, TRBJ2-5)
CASGSRTHQETQYF

SEQ ID NO: 31897 - protein, 14 aa, Homo sapiens
  CDR3 for alpha chain variable domain of TCR clone 15949 (TRAV13-1, TRAJ40)
CAASMTSGTYKYTF

SEQ ID NO: 31898 - protein, 13 aa, Homo sapiens
  CDR3 for beta chain variable domain of TCR clone 15949 (TRBV4-1, TRBJ2-5)
CASSQEVQETQYF

SEQ ID NO: 31899 - protein, 17 aa, Homo sapiens
  CDR3 for alpha chain variable domain of TCR clone 15950 (TRAV12-3, TRAJ6)
CAMSARGGAGGSDIPTF

SEQ ID NO: 31900 - protein, 12 aa, Homo sapiens
  CDR3 for beta chain variable domain of TCR clone 15950 (TRBV12-4, TRBJ2-3)
CASSTLPDTQYF

SEQ ID NO: 31901 - protein, 15 aa, Homo sapiens
  CDR3 for alpha chain variable domain of TCR clone 15951 (TRAV13-1, TRAJ44)
CAASRGGGTASKLTF

SEQ ID NO: 31902 - protein, 15 aa, Homo sapiens
  CDR3 for beta chain variable domain of TCR clone 15951 (TRBV18, TRBJ2-1)
CASSPPSASYNEQFF

SEQ ID NO: 31903 - protein, 12 aa, Homo sapiens
  CDR3 for alpha chain variable domain of TCR clone 15952 (TRAV8-3, TRAJ20)
CAVGANDYKLSF

SEQ ID NO: 31904 - protein, 16 aa, Homo sapiens
  CDR3 for beta chain variable domain of TCR clone 15952 (TRBV19, TRBJ2-2)
CASRSPGKGATGELFF

SEQ ID NO: 31905 - protein, 12 aa, Homo sapiens
  CDR3 for alpha chain variable domain of TCR clone 15953 (TRAV12-1, TRAJ40)
CVVYSGTYKYIF

SEQ ID NO: 31906 - protein, 18 aa, Homo sapiens
  CDR3 for beta chain variable domain of TCR clone 15953 (TRBV11-2, TRBJ2-3)
CASSLGGASRGAPNTQYS

SEQ ID NO: 31907 - protein, 15 aa, Homo sapiens
  CDR3 for alpha chain variable domain of TCR clone 15954 (TRAV2, TRAJ9)
CAVEDRGTGGFKTIF

SEQ ID NO: 31908 - protein, 16 aa, Homo sapiens
  CDR3 for beta chain variable domain of TCR clone 15954 (TRBV24-1, TRBJ2-3)
CATGDPGTGATDTQYF

SEQ ID NO: 31909 - protein, 12 aa, Homo sapiens
  CDR3 for alpha chain variable domain of TCR clone 15955 (TRAV12-3, TRAJ17)
CGMTLTGNKLTF

SEQ ID NO: 31910 - protein, 15 aa, Homo sapiens
  CDR3 for beta chain variable domain of TCR clone 15955 (TRBV20-1, TRBJ2-7)
CSARDRVSGMDEQYF

SEQ ID NO: 31911 - protein, 13 aa, Homo sapiens
  CDR3 for alpha chain variable domain of TCR clone 15956 (TRAV25, TRAJ12)
CAGGMDSSYKLIF

SEQ ID NO: 31912 - protein, 12 aa, Homo sapiens
  CDR3 for beta chain variable domain of TCR clone 15956 (TRBV28, TRBJ2-6)
CAIQAGANVLTF

SEQ ID NO: 31913 - protein, 14 aa, Homo sapiens
  CDR3 for alpha chain variable domain of TCR clone 15957 (TRAV12-2, TRAJ40)
CAVKIPSGTYRYIF

SEQ ID NO: 31914 - protein, 14 aa, Homo sapiens
  CDR3 for beta chain variable domain of TCR clone 15957 (TRBV20-1, TRBJ1-1)
CSAQTRIGGTEAFF

SEQ ID NO: 31915 - protein, 18 aa, Homo sapiens
  CDR3 for alpha chain variable domain of TCR clone 15958 (TRAV17, TRAJ45)
CATSLDLYSGGGADGLPF

SEQ ID NO: 31916 - protein, 15 aa, Homo sapiens
  CDR3 for beta chain variable domain of TCR clone 15958 (TRBV11-2, TRBJ2-1)
CASSKNRGLIYEQFF

SEQ ID NO: 31917 - protein, 14 aa, Homo sapiens
  CDR3 for alpha chain variable domain of TCR clone 15959 (TRAV3, TRAJ21)
CAVRDAYNFNKFYF

SEQ ID NO: 31918 - protein, 17 aa, Homo sapiens
  CDR3 for beta chain variable domain of TCR clone 15959 (TRBV6-5, TRBJ2-1)
CASRKNPRTGGHNEQFF

SEQ ID NO: 31919 - protein, 17 aa, Homo sapiens
  CDR3 for alpha chain variable domain of TCR clone 15960 (TRAV3, TRAJ6)
CAVRDGPRAGGSYIPTF

SEQ ID NO: 31920 - protein, 14 aa, Homo sapiens
  CDR3 for beta chain variable domain of TCR clone 15960 (TRBV7-2, TRBJ2-7)
CASSPKISFYEQYF

SEQ ID NO: 31921 - protein, 14 aa, Homo sapiens
  CDR3 for alpha chain variable domain of TCR clone 15961 (TRAV12-3, TRAJ42)
CAMNYGGSQGNLIL

SEQ ID NO: 31922 - protein, 15 aa, Homo sapiens
  CDR3 for beta chain variable domain of TCR clone 15961 (TRBV5-7, TRBJ1-5)
CASSYGKLWDQPQHF

SEQ ID NO: 31923 - protein, 14 aa, Homo sapiens
  CDR3 for alpha chain variable domain of TCR clone 15962 (TRAV12-2, TRAJ53)
CRERGGGSNYKLTF

SEQ ID NO: 31924 - protein, 16 aa, Homo sapiens
  CDR3 for beta chain variable domain of TCR clone 15962 (TRBV6-1, TRBJ1-2)
CASSGAWQGRSHGYTF

SEQ ID NO: 31925 - protein, 13 aa, Homo sapiens
  CDR3 for alpha chain variable domain of TCR clone 15963 (TRAV13-2, TRAJ21)
CAENVGQLQQILL

SEQ ID NO: 31926 - protein, 12 aa, Homo sapiens
  CDR3 for beta chain variable domain of TCR clone 15963 (TRBV11-2, TRBJ2-1)
CASSPGNNEQFF

SEQ ID NO: 31927 - protein, 17 aa, Homo sapiens
  CDR3 for alpha chain variable domain of TCR clone 15964 (TRAV4, TRAJ13)
CLVGVQGSSGGYQKVTF

SEQ ID NO: 31928 - protein, 15 aa, Homo sapiens
  CDR3 for beta chain variable domain of TCR clone 15964 (TRBV9, TRBJ1-6)
CASSVAGTGDSPLHF

SEQ ID NO: 31929 - protein, 13 aa, Homo sapiens
  CDR3 for alpha chain variable domain of TCR clone 15965 (TRAV12-3, TRAJ33)
CAMSVNSNYQLIW

SEQ ID NO: 31930 - protein, 13 aa, Homo sapiens
  CDR3 for beta chain variable domain of TCR clone 15965 (TRBV7-9, TRBJ1-2)
CASSLKQNYGYTF

SEQ ID NO: 31931 - protein, 16 aa, Homo sapiens
  CDR3 for alpha chain variable domain of TCR clone 15966 (TRAV20, TRAJ52)
CAVLPDGGTSYGKLTF

SEQ ID NO: 31932 - protein, 12 aa, Homo sapiens
  CDR3 for beta chain variable domain of TCR clone 15966 (TRBV19, TRBJ2-1)
CASAQISNEQFF

SEQ ID NO: 31933 - protein, 12 aa, Homo sapiens
  CDR3 for alpha chain variable domain of TCR clone 15967 (TRAV3, TRAJ27)
CAVGDGAGKSTF

SEQ ID NO: 31934 - protein, 13 aa, Homo sapiens
  CDR3 for beta chain variable domain of TCR clone 15967 (TRBV10-3, TRBJ1-2)
CAINADLNYGYTF

SEQ ID NO: 31935 - protein, 13 aa, Homo sapiens
  CDR3 for alpha chain variable domain of TCR clone 15968 (TRAV29/DV5, TRAJ54)
CAAHLQGAQKLVF

SEQ ID NO: 31936 - protein, 14 aa, Homo sapiens
  CDR3 for beta chain variable domain of TCR clone 15968 (TRBV18, TRBJ2-5)
CASSPGVSQETQYF

SEQ ID NO: 31937 - protein, 13 aa, Homo sapiens
  CDR3 for alpha chain variable domain of TCR clone 15969 (TRAV21, TRAJ57)
CAVTQGGSEKLVF

SEQ ID NO: 31938 - protein, 16 aa, Homo sapiens
  CDR3 for beta chain variable domain of TCR clone 15969 (TRBV29-1, TRBJ2-7)
CSVEDAEDGTAYEQYS

SEQ ID NO: 31939 - protein, 15 aa, Homo sapiens
  CDR3 for alpha chain variable domain of TCR clone 15970 (TRAV8-3, TRAJ45)
CTSSYSGGGADGLTF

SEQ ID NO: 31940 - protein, 13 aa, Homo sapiens
  CDR3 for beta chain variable domain of TCR clone 15970 (TRBV10-3, TRBJ2-7)
CASKLAVNYEQYF

SEQ ID NO: 31941 - protein, 11 aa, Homo sapiens
  CDR3 for alpha chain variable domain of TCR clone 15971 (TRAV2, TRAJ33)
CAVESNYQLVW

SEQ ID NO: 31942 - protein, 15 aa, Homo sapiens
  CDR3 for beta chain variable domain of TCR clone 15971 (TRBV19, TRBJ1-1)
CASTSGQIQNTEAFF

SEQ ID NO: 31943 - protein, 16 aa, Homo sapiens
  CDR3 for alpha chain variable domain of TCR clone 15972 (TRAV16, TRAJ57)
CAPYLITQGGSEKLVF

SEQ ID NO: 31944 - protein, 17 aa, Homo sapiens
  CDR3 for beta chain variable domain of TCR clone 15972 (TRBV24-1, TRBJ2-4)
CATSDAEARGVRNSQYF

SEQ ID NO: 31945 - protein, 18 aa, Homo sapiens
  CDR3 for alpha chain variable domain of TCR clone 15973 (TRAV21, TRAJ52)
CAVRPSPAGGTSYGKLTF

SEQ ID NO: 31946 - protein, 17 aa, Homo sapiens
  CDR3 for beta chain variable domain of TCR clone 15973 (TRBV13, TRBJ2-3)
CASSLSRVAGGRNRQYF

SEQ ID NO: 31947 - protein, 13 aa, Homo sapiens
  CDR3 for alpha chain variable domain of TCR clone 15974 (TRAV2, TRAJ40)
CAVVTSGTYIYIF

SEQ ID NO: 31948 - protein, 14 aa, Homo sapiens
  CDR3 for beta chain variable domain of TCR clone 15974 (TRBV19, TRBJ2-1)
CASPTFVLSGEQFF

SEQ ID NO: 31949 - protein, 14 aa, Homo sapiens
  CDR3 for alpha chain variable domain of TCR clone 15975 (TRAV35, TRAJ33)
CAGSSQDSNYQLIW

SEQ ID NO: 31950 - protein, 15 aa, Homo sapiens
  CDR3 for beta chain variable domain of TCR clone 15975 (TRBV20-1, TRBJ2-7)
CSAESGASGAYEQYF

SEQ ID NO: 31951 - protein, 15 aa, Homo sapiens
  CDR3 for alpha chain variable domain of TCR clone 15976 (TRAV34, TRAJ38)
CGADFTPGNNRTLIW

SEQ ID NO: 31952 - protein, 16 aa, Homo sapiens
  CDR3 for beta chain variable domain of TCR clone 15976 (TRBV12-5, TRBJ2-5)
CASGPRTSGNQETQYF

SEQ ID NO: 31953 - protein, 14 aa, Homo sapiens
  CDR3 for alpha chain variable domain of TCR clone 15977 (TRAV1-1, TRAJ27)
CAVIYNTNAGKSTF

SEQ ID NO: 31954 - protein, 15 aa, Homo sapiens
  CDR3 for beta chain variable domain of TCR clone 15977 (TRBV7-2, TRBJ2-1)
CASSSGLAGGNEQSF

SEQ ID NO: 31955 - protein, 16 aa, Homo sapiens
  CDR3 for alpha chain variable domain of TCR clone 15978 (TRAV17, TRAJ53)
CATDALSGGGNYKLTS

SEQ ID NO: 31956 - protein, 12 aa, Homo sapiens
  CDR3 for beta chain variable domain of TCR clone 15978 (TRBV5-1, TRBJ2-7)
CASSFRGYEQYF

SEQ ID NO: 31957 - protein, 18 aa, Homo sapiens
  CDR3 for alpha chain variable domain of TCR clone 15979 (TRAV13-1, TRAJ52)
CAASKRSAGGTSYRKLTF

SEQ ID NO: 31958 - protein, 13 aa, Homo sapiens
  CDR3 for beta chain variable domain of TCR clone 15979 (TRBV12-4, TRBJ1-2)
CASSLRQGKGYTF

SEQ ID NO: 31959 - protein, 17 aa, Homo sapiens
  CDR3 for alpha chain variable domain of TCR clone 15980 (TRAV17, TRAJ28)
CATDPRRGGAGSYQLPF

SEQ ID NO: 31960 - protein, 16 aa, Homo sapiens
  CDR3 for beta chain variable domain of TCR clone 15980 (TRBV25-1, TRBJ1-1)
CASSGDRDRGRIEAFF

SEQ ID NO: 31961 - protein, 14 aa, Homo sapiens
  CDR3 for alpha chain variable domain of TCR clone 15981 (TRAV25, TRAJ27)
CAGEHLTNAGKSTF

SEQ ID NO: 31962 - protein, 14 aa, Homo sapiens
  CDR3 for beta chain variable domain of TCR clone 15981 (TRBV4-2, TRBJ1-2)
CASSPGGSNYGYTF

SEQ ID NO: 31963 - protein, 17 aa, Homo sapiens
  CDR3 for alpha chain variable domain of TCR clone 15982 (TRAV3, TRAJ6)
CAVRDGPRAGGSYIPTV

SEQ ID NO: 31964 - protein, 20 aa, Homo sapiens
  CDR3 for beta chain variable domain of TCR clone 15982 (TRBV28, TRBJ2-1)
CASTPIGRSPGLAGGNEQFF

SEQ ID NO: 31965 - protein, 15 aa, Homo sapiens
  CDR3 for alpha chain variable domain of TCR clone 15983 (TRAV3, TRAJ3)
CAVRDRDSRASKIIF

SEQ ID NO: 31966 - protein, 18 aa, Homo sapiens
  CDR3 for beta chain variable domain of TCR clone 15983 (TRBV25-1, TRBJ1-2)
CASSGLQNGQGLIFGYTF

SEQ ID NO: 31967 - protein, 16 aa, Homo sapiens
  CDR3 for alpha chain variable domain of TCR clone 15984 (TRAV21, TRAJ52)
CAVTNAGGTSYGKLTF

SEQ ID NO: 31968 - protein, 20 aa, Homo sapiens
  CDR3 for beta chain variable domain of TCR clone 15984 (TRBV7-8, TRBJ2-2)
CASSHLFPGPTIHITGELFF

SEQ ID NO: 31969 - protein, 12 aa, Homo sapiens
  CDR3 for alpha chain variable domain of TCR clone 15985 (TRAV12-3, TRAJ17)
CAMTLTGNKLTF

SEQ ID NO: 31970 - protein, 19 aa, Homo sapiens
  CDR3 for beta chain variable domain of TCR clone 15985 (TRBV7-2, TRBJ2-3)
CASSFLSRNWGGGTDTQYF

SEQ ID NO: 31971 - protein, 15 aa, Homo sapiens
  CDR3 for alpha chain variable domain of TCR clone 15986 (TRAV8-4, TRAJ3)
CAVSEPYSSASKIIF

SEQ ID NO: 31972 - protein, 14 aa, Homo sapiens
  CDR3 for beta chain variable domain of TCR clone 15986 (TRBV7-2, TRBJ2-5)
CQQLKEQGRETQYF

SEQ ID NO: 31973 - protein, 18 aa, Homo sapiens
  CDR3 for alpha chain variable domain of TCR clone 15987 (TRAV26-1, TRAJ52)
CIVRVEGAGGTSYGKLTF

SEQ ID NO: 31974 - protein, 13 aa, Homo sapiens
  CDR3 for beta chain variable domain of TCR clone 15987 (TRBV7-3, TRBJ1-2)
CASSLKRGYGYTL

SEQ ID NO: 31975 - protein, 14 aa, Homo sapiens
  CDR3 for alpha chain variable domain of TCR clone 15988 (TRAV26-1, TRAJ38)
CIADNAGNNRKLFW

SEQ ID NO: 31976 - protein, 13 aa, Homo sapiens
  CDR3 for beta chain variable domain of TCR clone 15988 (TRBV20-1, TRBJ1-1)
CSARGGGNTEAFF

SEQ ID NO: 31977 - protein, 14 aa, Homo sapiens
  CDR3 for alpha chain variable domain of TCR clone 15989 (TRAV1-2, TRAJ16)
CAVNRFSDGQKLLF

SEQ ID NO: 31978 - protein, 12 aa, Homo sapiens
  CDR3 for beta chain variable domain of TCR clone 15989 (TRBV2, TRBJ2-1)
CAYGPPGNEQFF

SEQ ID NO: 31979 - protein, 19 aa, Homo sapiens
  CDR3 for alpha chain variable domain of TCR clone 15990 (TRAV26-1, TRAJ52)
CIVRAHRNAGGTSYGKLTF

SEQ ID NO: 31980 - protein, 15 aa, Homo sapiens
  CDR3 for beta chain variable domain of TCR clone 15990 (TRBV29-1, TRBJ2-1)
CSGRDRKSSYNKQFF

SEQ ID NO: 31981 - protein, 16 aa, Homo sapiens
  CDR3 for alpha chain variable domain of TCR clone 15991 (TRAV13-2, TRAJ45)
CAENRGSGGGADGLTF

SEQ ID NO: 31982 - protein, 14 aa, Homo sapiens
  CDR3 for beta chain variable domain of TCR clone 15991 (TRBV19, TRBJ2-2)
CASKRAPNTGELFF

SEQ ID NO: 31983 - protein, 12 aa, Homo sapiens
  CDR3 for alpha chain variable domain of TCR clone 15992 (TRAV2, TRAJ9)
CAVGAVGFKTIF

SEQ ID NO: 31984 - protein, 16 aa, Homo sapiens
  CDR3 for beta chain variable domain of TCR clone 15992 (TRBV13, TRBJ2-2)
CASSPRTGEHTGELFF

SEQ ID NO: 31985 - protein, 15 aa, Homo sapiens
  CDR3 for alpha chain variable domain of TCR clone 15993 (TRAV25, TRAJ52)
CAGRPGGTSYGKLTF

SEQ ID NO: 31986 - protein, 17 aa, Homo sapiens
  CDR3 for beta chain variable domain of TCR clone 15993 (TRBV7-8, TRBJ2-6)
CASSAGIGGAGANVLTF

SEQ ID NO: 31987 - protein, 11 aa, Homo sapiens
  CDR3 for alpha chain variable domain of TCR clone 15994 (TRAV21, TRAJ11)
CAVNRYSTLTF

SEQ ID NO: 31988 - protein, 11 aa, Homo sapiens
  CDR3 for beta chain variable domain of TCR clone 15994 (TRBV19, TRBJ1-1)
CASSIGSEAFF

SEQ ID NO: 31989 - protein, 14 aa, Homo sapiens
  CDR3 for alpha chain variable domain of TCR clone 15995 (TRAV8-1, TRAJ5)
CAVRTDTGRRALTF

SEQ ID NO: 31990 - protein, 16 aa, Homo sapiens
  CDR3 for beta chain variable domain of TCR clone 15995 (TRBV6-1, TRBJ2-5)
CASSETLDRGAETQYF

SEQ ID NO: 31991 - protein, 16 aa, Homo sapiens
  CDR3 for alpha chain variable domain of TCR clone 15996 (TRAV30, TRAJ24)
CGTEIVDADSWGKFQF

SEQ ID NO: 31992 - protein, 14 aa, Homo sapiens
  CDR3 for beta chain variable domain of TCR clone 15996 (TRBV12-5, TRBJ2-5)
CACGSRTHQETQYF

SEQ ID NO: 31993 - protein, 14 aa, Homo sapiens
  CDR3 for alpha chain variable domain of TCR clone 15997 (TRAV1-2, TRAJ16)
CAVNRFSDGQKLLF

SEQ ID NO: 31994 - protein, 17 aa, Homo sapiens
  CDR3 for beta chain variable domain of TCR clone 15997 (TRBV24-1, TRBJ2-1)
CATSDVSTSGTYNEQFF

SEQ ID NO: 31995 - protein, 15 aa, Homo sapiens
  CDR3 for alpha chain variable domain of TCR clone 15998 (TRAV3, TRAJ29)
CAVRDLYPGNTPLVF

SEQ ID NO: 31996 - protein, 17 aa, Homo sapiens
  CDR3 for beta chain variable domain of TCR clone 15998 (TRBV20-1, TRBJ2-1)
CSARDPLAGVWDNEQFF

SEQ ID NO: 31997 - protein, 15 aa, Homo sapiens
  CDR3 for alpha chain variable domain of TCR clone 15999 (TRAV26-1, TRAJ29)
CIVRVEGSGNTPLVF

SEQ ID NO: 31998 - protein, 15 aa, Homo sapiens
  CDR3 for beta chain variable domain of TCR clone 15999 (TRBV6-3, TRBJ2-1)
CASSAGLAGNNEQFF

SEQ ID NO: 31999 - protein, 15 aa, Homo sapiens
  CDR3 for alpha chain variable domain of TCR clone 16000 (TRAV12-1, TRAJ44)
CVADLPTGTASKLTF

SEQ ID NO: 32000 - protein, 13 aa, Homo sapiens
  CDR3 for beta chain variable domain of TCR clone 16000 (TRBV6-5, TRBJ2-5)
CASRPQGGETQYF

SEQ ID NO: 32001 - protein, 15 aa, Homo sapiens
  CDR3 for alpha chain variable domain of TCR clone 16001 (TRAV21, TRAJ53)
CATLNSGGSNYKLTF

SEQ ID NO: 32002 - protein, 17 aa, Homo sapiens
  CDR3 for beta chain variable domain of TCR clone 16001 (TRBV11-3, TRBJ2-5)
CASSLPGVRGGKETQYF

SEQ ID NO: 32003 - protein, 14 aa, Homo sapiens
  CDR3 for alpha chain variable domain of TCR clone 16002 (TRAV12-3, TRAJ10)
SHLPPTGGGNKLTF

SEQ ID NO: 32004 - protein, 14 aa, Homo sapiens
  CDR3 for beta chain variable domain of TCR clone 16002 (TRBV6-1, TRBJ1-3)
CASVQGGGGNTIYF

SEQ ID NO: 32005 - protein, 11 aa, Homo sapiens
  CDR3 for alpha chain variable domain of TCR clone 16003 (TRAV21, TRAJ34)
CAVTNTDKLIF

SEQ ID NO: 32006 - protein, 16 aa, Homo sapiens
  CDR3 for beta chain variable domain of TCR clone 16003 (TRBV18, TRBJ1-1)
CASSPGVGGRGGEASF

SEQ ID NO: 32007 - protein, 15 aa, Homo sapiens
  CDR3 for alpha chain variable domain of TCR clone 16004 (TRAV2, TRAJ13)
CATPSYSGGYQKVTF

SEQ ID NO: 32008 - protein, 13 aa, Homo sapiens
  CDR3 for beta chain variable domain of TCR clone 16004 (TRBV14, TRBJ1-5)
CASSQGRRGPQHF

SEQ ID NO: 32009 - protein, 12 aa, Homo sapiens
  CDR3 for alpha chain variable domain of TCR clone 16005 (TRAV8-6, TRAJ43)
CAVSHNNDDMRF

SEQ ID NO: 32010 - protein, 14 aa, Homo sapiens
  CDR3 for beta chain variable domain of TCR clone 16005 (TRBV10-3, TRBJ1-1)
CAISDGSGVTEAFF

SEQ ID NO: 32011 - protein, 14 aa, Homo sapiens
  CDR3 for alpha chain variable domain of TCR clone 16006 (TRAV21, TRAJ35)
CAVMPIGFGNVLHC

SEQ ID NO: 32012 - protein, 12 aa, Homo sapiens
  CDR3 for beta chain variable domain of TCR clone 16006 (TRBV7-9, TRBJ2-7)
CASSVKREEQYF

SEQ ID NO: 32013 - protein, 13 aa, Homo sapiens
  CDR3 for alpha chain variable domain of TCR clone 16007 (TRAV12-3, TRAJ33)
CAMSVNSNYQLIW

SEQ ID NO: 32014 - protein, 13 aa, Homo sapiens
  CDR3 for beta chain variable domain of TCR clone 16007 (TRBV5-1, TRBJ1-1)
CASSADWDTEAFF

SEQ ID NO: 32015 - protein, 13 aa, Homo sapiens
  CDR3 for alpha chain variable domain of TCR clone 16008 (TRAV20, TRAJ37)
CAGCSSNTGKLIF

SEQ ID NO: 32016 - protein, 11 aa, Homo sapiens
  CDR3 for beta chain variable domain of TCR clone 16008 (TRBV12-4, TRBJ2-3)
CASTATGTQYF

SEQ ID NO: 32017 - protein, 12 aa, Homo sapiens
  CDR3 for alpha chain variable domain of TCR clone 16009 (TRAV36/DV7, TRAJ54)
CAVVRGAQKLVF

SEQ ID NO: 32018 - protein, 14 aa, Homo sapiens
  CDR3 for beta chain variable domain of TCR clone 16009 (TRBV7-3, TRBJ1-1)
CASSLKGGNTGAFF

SEQ ID NO: 32019 - protein, 14 aa, Homo sapiens
  CDR3 for alpha chain variable domain of TCR clone 16010 (TRAV17, TRAJ37)
CATDGPSNTGKLIF

SEQ ID NO: 32020 - protein, 13 aa, Homo sapiens
  CDR3 for beta chain variable domain of TCR clone 16010 (TRBV11-2, TRBJ2-1)
CASSLDLVNEQFF

SEQ ID NO: 32021 - protein, 13 aa, Homo sapiens
  CDR3 for alpha chain variable domain of TCR clone 16011 (TRAV27, TRAJ41)
CAGEGNSGNALNF

SEQ ID NO: 32022 - protein, 14 aa, Homo sapiens
  CDR3 for beta chain variable domain of TCR clone 16011 (TRBV7-2, TRBJ1-1)
CASSFLTGTTEAFF

SEQ ID NO: 32023 - protein, 10 aa, Homo sapiens
  CDR3 for alpha chain variable domain of TCR clone 16012 (TRAV23/DV6, TRAJ57)
CAASSTLSQG

SEQ ID NO: 32024 - protein, 14 aa, Homo sapiens
  CDR3 for beta chain variable domain of TCR clone 16012 (TRBV25-1, TRBJ1-1)
CASTHLGGNTEDFF

SEQ ID NO: 32025 - protein, 13 aa, Homo sapiens
  CDR3 for alpha chain variable domain of TCR clone 16013 (TRAV35, TRAJ43)
CAGYPYNNNDMRF

SEQ ID NO: 32026 - protein, 15 aa, Homo sapiens
  CDR3 for beta chain variable domain of TCR clone 16013 (TRBV25-1, TRBJ1-4)
RASSKRIATNEKLFF

SEQ ID NO: 32027 - protein, 12 aa, Homo sapiens
  CDR3 for alpha chain variable domain of TCR clone 16014 (TRAV13-1, TRAJ21)
CAAKEGFNKFYF

SEQ ID NO: 32028 - protein, 16 aa, Homo sapiens
  CDR3 for beta chain variable domain of TCR clone 16014 (TRBV12-5, TRBJ2-5)
CASGPRTSGNQETQYF

SEQ ID NO: 32029 - protein, 14 aa, Homo sapiens
  CDR3 for alpha chain variable domain of TCR clone 16015 (TRAV8-2, TRAJ11)
WVVSEKSGYSTLTF

SEQ ID NO: 32030 - protein, 16 aa, Homo sapiens
  CDR3 for beta chain variable domain of TCR clone 16015 (TRBV28, TRBJ2-1)
CASSSPEYPRDNEQFF

SEQ ID NO: 32031 - protein, 12 aa, Homo sapiens
  CDR3 for alpha chain variable domain of TCR clone 16016 (TRAV13-1, TRAJ15)
CAASQAGTALTF

SEQ ID NO: 32032 - protein, 14 aa, Homo sapiens
  CDR3 for beta chain variable domain of TCR clone 16016 (TRBV19, TRBJ2-2)
CASSTLHRSGELFF

SEQ ID NO: 32033 - protein, 13 aa, Homo sapiens
  CDR3 for alpha chain variable domain of TCR clone 16017 (TRAV23/DV6, TRAJ22)
CAPYPGSARQLTF

SEQ ID NO: 32034 - protein, 15 aa, Homo sapiens
  CDR3 for beta chain variable domain of TCR clone 16017 (TRBV11-2, TRBJ1-6)
CASSLDPWAVSPLHF

SEQ ID NO: 32035 - protein, 15 aa, Homo sapiens
  CDR3 for alpha chain variable domain of TCR clone 16018 (TRAV26-1, TRAJ22)
CIVRVSFWFCKATGL

SEQ ID NO: 32036 - protein, 13 aa, Homo sapiens
  CDR3 for beta chain variable domain of TCR clone 16018 (TRBV7-9, TRBJ1-2)
CASSLKQNYGYTF

SEQ ID NO: 32037 - protein, 16 aa, Homo sapiens
  CDR3 for alpha chain variable domain of TCR clone 16019 (TRAV16, TRAJ4)
CALSRMFSGGCNKLIF

SEQ ID NO: 32038 - protein, 16 aa, Homo sapiens
  CDR3 for beta chain variable domain of TCR clone 16019 (TRBV24-1, TRBJ2-3)
CATSDPGTGATDTQYF

SEQ ID NO: 32039 - protein, 13 aa, Homo sapiens
  CDR3 for alpha chain variable domain of TCR clone 16020 (TRAV3, TRAJ27)
CAVRTLGAGKSTF

SEQ ID NO: 32040 - protein, 13 aa, Homo sapiens
  CDR3 for beta chain variable domain of TCR clone 16020 (TRBV7-9, TRBJ2-3)
CASSPGSTDTQYF

SEQ ID NO: 32041 - protein, 14 aa, Homo sapiens
  CDR3 for alpha chain variable domain of TCR clone 16021 (TRAV1-2, TRAJ16)
CAVNRFSDGQKLLF

SEQ ID NO: 32042 - protein, 12 aa, Homo sapiens
  CDR3 for beta chain variable domain of TCR clone 16021 (TRBV19, TRBJ1-5)
CASSIAQQPQHF

SEQ ID NO: 32043 - protein, 14 aa, Homo sapiens
  CDR3 for alpha chain variable domain of TCR clone 16022 (TRAV1-2, TRAJ16)
CAVNRFSDGQKLLF

SEQ ID NO: 32044 - protein, 19 aa, Homo sapiens
  CDR3 for beta chain variable domain of TCR clone 16022 (TRBV28, TRBJ2-7)
CASSYSGTSRLGWVYEQYF

SEQ ID NO: 32045 - protein, 12 aa, Homo sapiens
  CDR3 for alpha chain variable domain of TCR clone 16023 (TRAV17, TRAJ12)
CATLRSSYKLIF

SEQ ID NO: 32046 - protein, 16 aa, Homo sapiens
  CDR3 for beta chain variable domain of TCR clone 16023 (TRBV28, TRBJ2-7)
CASSLFFETGGTEQYF

SEQ ID NO: 32047 - protein, 18 aa, Homo sapiens
  CDR3 for alpha chain variable domain of TCR clone 16024 (TRAV29/DV5, TRAJ52)
CAAGFRGAGGTSYVKLTF

SEQ ID NO: 32048 - protein, 16 aa, Homo sapiens
  CDR3 for beta chain variable domain of TCR clone 16024 (TRBV7-3, TRBJ2-2)
CASSLKRGTLSGELFF

SEQ ID NO: 32049 - protein, 19 aa, Homo sapiens
  CDR3 for alpha chain variable domain of TCR clone 16025 (TRAV26-1, TRAJ52)
CIVRAHRNAGGTSYGKLTF

SEQ ID NO: 32050 - protein, 15 aa, Homo sapiens
  CDR3 for beta chain variable domain of TCR clone 16025 (TRBV29-1, TRBJ2-1)
CSGRDRKSAYNEQFF

SEQ ID NO: 32051 - protein, 15 aa, Homo sapiens
  CDR3 for alpha chain variable domain of TCR clone 16026 (TRAV10, TRAJ18)
CVVSEEGSTLGRLYF

SEQ ID NO: 32052 - protein, 15 aa, Homo sapiens
  CDR3 for beta chain variable domain of TCR clone 16026 (TRBV19, TRBJ2-7)
CASSIASGGFYEQYF

SEQ ID NO: 32053 - protein, 12 aa, Homo sapiens
  CDR3 for alpha chain variable domain of TCR clone 16027 (TRAV22, TRAJ22)
CAPGGSARQLTF

SEQ ID NO: 32054 - protein, 16 aa, Homo sapiens
  CDR3 for beta chain variable domain of TCR clone 16027 (TRBV20-1, TRBJ1-4)
CSAPGQGLLTNEKLFF

SEQ ID NO: 32055 - protein, 11 aa, Homo sapiens
  CDR3 for alpha chain variable domain of TCR clone 16028 (TRAV12-3, TRAJ43)
CAMSVSNDMRF

SEQ ID NO: 32056 - protein, 15 aa, Homo sapiens
  CDR3 for beta chain variable domain of TCR clone 16028 (TRBV9, TRBJ1-6)
CASSVAGTGDSPLHF

SEQ ID NO: 32057 - protein, 14 aa, Homo sapiens
  CDR3 for alpha chain variable domain of TCR clone 16029 (TRAV12-2, TRAJ40)
CAVKIPSETYKYIF

SEQ ID NO: 32058 - protein, 14 aa, Homo sapiens
  CDR3 for beta chain variable domain of TCR clone 16029 (TRBV20-1, TRBJ1-1)
CSAQTRIGGTEAFF

SEQ ID NO: 32059 - protein, 14 aa, Homo sapiens
  CDR3 for alpha chain variable domain of TCR clone 16030 (TRAV1-2, TRAJ16)
CAVNRFSDGQKLPF

SEQ ID NO: 32060 - protein, 13 aa, Homo sapiens
  CDR3 for beta chain variable domain of TCR clone 16030 (TRBV4-1, TRBJ2-1)
CASSQAGGDEQFF

SEQ ID NO: 32061 - protein, 12 aa, Homo sapiens
  CDR3 for alpha chain variable domain of TCR clone 16031 (TRAV8-3, TRAJ20)
CAVGANDYNLSF

SEQ ID NO: 32062 - protein, 16 aa, Homo sapiens
  CDR3 for beta chain variable domain of TCR clone 16031 (TRBV19, TRBJ2-2)
CASRSPGTGATGELFF

SEQ ID NO: 32063 - protein, 13 aa, Homo sapiens
  CDR3 for alpha chain variable domain of TCR clone 16032 (TRAV21, TRAJ20)
CAVGLRVDYKLSF

SEQ ID NO: 32064 - protein, 14 aa, Homo sapiens
  CDR3 for beta chain variable domain of TCR clone 16032 (TRBV7-2, TRBJ2-7)
CASSPKTSFYEQYF

SEQ ID NO: 32065 - protein, 13 aa, Homo sapiens
  CDR3 for alpha chain variable domain of TCR clone 16033 (TRAV12-2, TRAJ39)
CAVNNNVGNMLTF

SEQ ID NO: 32066 - protein, 13 aa, Homo sapiens
  CDR3 for beta chain variable domain of TCR clone 16033 (TRBV2, TRBJ1-5)
CATAGPGNQPQHF

SEQ ID NO: 32067 - protein, 12 aa, Homo sapiens
  CDR3 for alpha chain variable domain of TCR clone 16034 (TRAV8-3, TRAJ26)
CSGDNYGQNFVF

SEQ ID NO: 32068 - protein, 15 aa, Homo sapiens
  CDR3 for beta chain variable domain of TCR clone 16034 (TRBV9, TRBJ2-1)
CASSLAGSSYNEQFF

SEQ ID NO: 32069 - protein, 19 aa, Homo sapiens
  CDR3 for alpha chain variable domain of TCR clone 16035 (TRAV3, TRAJ6)
CAVRDRNPSRSGGSYIPTF

SEQ ID NO: 32070 - protein, 15 aa, Homo sapiens
  CDR3 for beta chain variable domain of TCR clone 16035 (TRBV18, TRBJ2-7)
CASSPTFMGSYEQYF

SEQ ID NO: 32071 - protein, 13 aa, Homo sapiens
  CDR3 for alpha chain variable domain of TCR clone 16036 (TRAV27, TRAJ40)
CAGVLASTYKYIF

SEQ ID NO: 32072 - protein, 16 aa, Homo sapiens
  CDR3 for beta chain variable domain of TCR clone 16036 (TRBV11-3, TRBJ2-3)
CASSSISGAGTDTQYF

SEQ ID NO: 32073 - protein, 13 aa, Homo sapiens
  CDR3 for alpha chain variable domain of TCR clone 16037 (TRAV3, TRAJ21)
CAVREPDFNKFYF

SEQ ID NO: 32074 - protein, 13 aa, Homo sapiens
  CDR3 for beta chain variable domain of TCR clone 16037 (TRBV7-9, TRBJ1-2)
CASSLKQNYGYTF

SEQ ID NO: 32075 - protein, 15 aa, Homo sapiens
  CDR3 for alpha chain variable domain of TCR clone 16038 (TRAV8-3, TRAJ11)
CAVCLLNSGYSTLTF

SEQ ID NO: 32076 - protein, 16 aa, Homo sapiens
  CDR3 for beta chain variable domain of TCR clone 16038 (TRBV7-9, TRBJ1-2)
CASSLGFSSGEDGYTF

SEQ ID NO: 32077 - protein, 15 aa, Homo sapiens
  CDR3 for alpha chain variable domain of TCR clone 16039 (TRAV8-3, TRAJ11)
CAVGLLNSGYRTLTF

SEQ ID NO: 32078 - protein, 16 aa, Homo sapiens
  CDR3 for beta chain variable domain of TCR clone 16039 (TRBV7-9, TRBJ1-2)
CASSLGFSSGEDGYTF

SEQ ID NO: 32079 - protein, 15 aa, Homo sapiens
  CDR3 for alpha chain variable domain of TCR clone 16040 (TRAV26-1, TRAJ42)
FIVRVKGGSQGNLTF

SEQ ID NO: 32080 - protein, 14 aa, Homo sapiens
  CDR3 for beta chain variable domain of TCR clone 16040 (TRBV19, TRBJ2-2)
CATTGHANTGELFF

SEQ ID NO: 32081 - protein, 10 aa, Homo sapiens
  CDR3 for alpha chain variable domain of TCR clone 16041 (TRAV8-4, TRAJ43)
CAVSADDIRF

SEQ ID NO: 32082 - protein, 15 aa, Homo sapiens
  CDR3 for beta chain variable domain of TCR clone 16041 (TRBV5-1, TRBJ2-3)
CASSVTSGSTDTQYF

SEQ ID NO: 32083 - protein, 11 aa, Homo sapiens
  CDR3 for alpha chain variable domain of TCR clone 16042 (TRAV1-2, TRAJ20)
CAVANDYKLSF

SEQ ID NO: 32084 - protein, 18 aa, Homo sapiens
  CDR3 for beta chain variable domain of TCR clone 16042 (TRBV20-1, TRBJ2-6)
GSAETTPTHGSGANVLTF

SEQ ID NO: 32085 - protein, 11 aa, Homo sapiens
  CDR3 for alpha chain variable domain of TCR clone 16043 (TRAV1-2, TRAJ20)
CAVANDYKLSF

SEQ ID NO: 32086 - protein, 18 aa, Homo sapiens
  CDR3 for beta chain variable domain of TCR clone 16043 (TRBV20-1, TRBJ2-6)
CSAETTPTHGSGANALTF

SEQ ID NO: 32087 - protein, 13 aa, Homo sapiens
  CDR3 for alpha chain variable domain of TCR clone 16044 (TRAV1-2, TRAJ9)
CAALNTRGFKTIF

SEQ ID NO: 32088 - protein, 13 aa, Homo sapiens
  CDR3 for beta chain variable domain of TCR clone 16044 (TRBV19, TRBJ1-2)
CASSVPGQDGYTF

SEQ ID NO: 32089 - protein, 11 aa, Homo sapiens
  CDR3 for alpha chain variable domain of TCR clone 16045 (TRAV1-2, TRAJ31)
CAVNNNARLMF

SEQ ID NO: 32090 - protein, 15 aa, Homo sapiens
  CDR3 for beta chain variable domain of TCR clone 16045 (TRBV28, TRBJ2-1)
CASNIIAGGRSEQFF

SEQ ID NO: 32091 - protein, 12 aa, Homo sapiens
  CDR3 for alpha chain variable domain of TCR clone 16046 (TRAV12-2, TRAJ9)
CAVNTGGFKTIF

SEQ ID NO: 32092 - protein, 15 aa, Homo sapiens
  CDR3 for beta chain variable domain of TCR clone 16046 (TRBV4-2, TRBJ1-3)
CASSQDGAQGNTIYF

SEQ ID NO: 32093 - protein, 16 aa, Homo sapiens
  CDR3 for alpha chain variable domain of TCR clone 16047 (TRAV26-1, TRAJ37)
CIVRGDGSGNTGKLTF

SEQ ID NO: 32094 - protein, 17 aa, Homo sapiens
  CDR3 for beta chain variable domain of TCR clone 16047 (TRBV4-1, TRBJ2-7)
CASSRDPLGVRGGEQYF

SEQ ID NO: 32095 - protein, 15 aa, Homo sapiens
  CDR3 for alpha chain variable domain of TCR clone 16048 (TRAV12-1, TRAJ44)
CVADLPTGTASKLTF

SEQ ID NO: 32096 - protein, 13 aa, Homo sapiens
  CDR3 for beta chain variable domain of TCR clone 16048 (TRBV6-5, TRBJ2-5)
CASSPQGGGTQYF

SEQ ID NO: 32097 - protein, 13 aa, Homo sapiens
  CDR3 for alpha chain variable domain of TCR clone 16049 (TRAV8-6, TRAJ16)
CAVSSPDGQKLLF

SEQ ID NO: 32098 - protein, 16 aa, Homo sapiens
  CDR3 for beta chain variable domain of TCR clone 16049 (TRBV5-6, TRBJ2-3)
CASSSLGGAITDTQYF

SEQ ID NO: 32099 - protein, 14 aa, Homo sapiens
  CDR3 for alpha chain variable domain of TCR clone 16050 (TRAV1-2, TRAJ16)
CAVNRFSDGQKLLF

SEQ ID NO: 32100 - protein, 18 aa, Homo sapiens
  CDR3 for beta chain variable domain of TCR clone 16050 (TRBV12-4, TRBJ2-2)
CASSLVAGTRGRTGELFF

SEQ ID NO: 32101 - protein, 14 aa, Homo sapiens
  CDR3 for alpha chain variable domain of TCR clone 16051 (TRAV12-2, TRAJ13)
CAVKKTGGYQKVTF

SEQ ID NO: 32102 - protein, 15 aa, Homo sapiens
  CDR3 for beta chain variable domain of TCR clone 16051 (TRBV27, TRBJ2-1)
CASSNGGGSSNKQFF

SEQ ID NO: 32103 - protein, 11 aa, Homo sapiens
  CDR3 for alpha chain variable domain of TCR clone 16052 (TRAV3, TRAJ21)
CAVGNFNKFYF

SEQ ID NO: 32104 - protein, 13 aa, Homo sapiens
  CDR3 for beta chain variable domain of TCR clone 16052 (TRBV4-2, TRBJ1-1)
CASSQAGNTEAFF

SEQ ID NO: 32105 - protein, 13 aa, Homo sapiens
  CDR3 for alpha chain variable domain of TCR clone 16053 (TRAV2, TRAJ40)
CAVVTSGTYKYIF

SEQ ID NO: 32106 - protein, 12 aa, Homo sapiens
  CDR3 for beta chain variable domain of TCR clone 16053 (TRBV6-3, TRBJ2-7)
CAGSLTPYEQYF

SEQ ID NO: 32107 - protein, 12 aa, Homo sapiens
  CDR3 for alpha chain variable domain of TCR clone 16054 (TRAV12-2, TRAJ43)
CAVNVNNNDMRF

SEQ ID NO: 32108 - protein, 14 aa, Homo sapiens
  CDR3 for beta chain variable domain of TCR clone 16054 (TRBV25-1, TRBJ2-2)
CASSELGLPGELFL

SEQ ID NO: 32109 - protein, 15 aa, Homo sapiens
  CDR3 for alpha chain variable domain of TCR clone 16055 (TRAV21, TRAJ24)
CAARSSTDSWGNLQF

SEQ ID NO: 32110 - protein, 13 aa, Homo sapiens
  CDR3 for beta chain variable domain of TCR clone 16055 (TRBV11-2, TRBJ2-5)
CASSSTGEETQYF

SEQ ID NO: 32111 - protein, 12 aa, Homo sapiens
  CDR3 for alpha chain variable domain of TCR clone 16056 (TRAV12-3, TRAJ17)
CAMTLTGNKLTF

SEQ ID NO: 32112 - protein, 15 aa, Homo sapiens
  CDR3 for beta chain variable domain of TCR clone 16056 (TRBV20-1, TRBJ2-7)
CSARDRVSGMDEEYF

SEQ ID NO: 32113 - protein, 15 aa, Homo sapiens
  CDR3 for alpha chain variable domain of TCR clone 16057 (TRAV4, TRAJ39)
CLVGPNNNAGNMLTF

SEQ ID NO: 32114 - protein, 15 aa, Homo sapiens
  CDR3 for beta chain variable domain of TCR clone 16057 (TRBV7-2, TRBJ2-2)
CASRRPGQNTGELFF

SEQ ID NO: 32115 - protein, 17 aa, Homo sapiens
  CDR3 for alpha chain variable domain of TCR clone 16058 (TRAV3, TRAJ6)
CAVRDGPRAGGSYIPTF

SEQ ID NO: 32116 - protein, 14 aa, Homo sapiens
  CDR3 for beta chain variable domain of TCR clone 16058 (TRBV4-2, TRBJ2-1)
CASGLDRAYNEQFF

SEQ ID NO: 32117 - protein, 13 aa, Homo sapiens
  CDR3 for alpha chain variable domain of TCR clone 16059 (TRAV8-3, TRAJ37)
CAVPSSNTGKLIF

SEQ ID NO: 32118 - protein, 12 aa, Homo sapiens
  CDR3 for beta chain variable domain of TCR clone 16059 (TRBV11-3, TRBJ2-1)
CASSPGNNEQFF

SEQ ID NO: 32119 - protein, 10 aa, Homo sapiens
  CDR3 for alpha chain variable domain of TCR clone 16060 (TRAV25, TRAJ52)
CAGTSGGTSY

SEQ ID NO: 32120 - protein, 16 aa, Homo sapiens
  CDR3 for beta chain variable domain of TCR clone 16060 (TRBV15, TRBJ1-2)
CATSRGPRTGGGGYTF

SEQ ID NO: 32121 - protein, 17 aa, Homo sapiens
  CDR3 for alpha chain variable domain of TCR clone 16061 (TRAV3, TRAJ6)
CAVRVGPRAGGSYIPTF

SEQ ID NO: 32122 - protein, 14 aa, Homo sapiens
  CDR3 for beta chain variable domain of TCR clone 16061 (TRBV7-2, TRBJ2-7)
CASSPKTSFYEQYF

SEQ ID NO: 32123 - protein, 13 aa, Homo sapiens
  CDR3 for alpha chain variable domain of TCR clone 16062 (TRAV20, TRAJ37)
CAGCSSNTGKLIF

SEQ ID NO: 32124 - protein, 14 aa, Homo sapiens
  CDR3 for beta chain variable domain of TCR clone 16062 (TRBV19, TRBJ2-1)
CASPTFVLSGEQFF

SEQ ID NO: 32125 - protein, 16 aa, Homo sapiens
  CDR3 for alpha chain variable domain of TCR clone 16063 (TRAV1-2, TRAJ10)
CAVSGVLTGGGNKLTF

SEQ ID NO: 32126 - protein, 12 aa, Homo sapiens
  CDR3 for beta chain variable domain of TCR clone 16063 (TRBV7-8, TRBJ2-7)
CASSLGDREQYF

SEQ ID NO: 32127 - protein, 15 aa, Homo sapiens
  CDR3 for alpha chain variable domain of TCR clone 16064 (TRAV8-3, TRAJ23)
CAVGDRYNQGGKLIF

SEQ ID NO: 32128 - protein, 19 aa, Homo sapiens
  CDR3 for beta chain variable domain of TCR clone 16064 (TRBV4-1, TRBJ1-4)
CASSQEGPRGVEEKLFLAV

SEQ ID NO: 32129 - protein, 12 aa, Homo sapiens
  CDR3 for alpha chain variable domain of TCR clone 16065 (TRAV12-1, TRAJ40)
CVVYSGTYKYIF

SEQ ID NO: 32130 - protein, 18 aa, Homo sapiens
  CDR3 for beta chain variable domain of TCR clone 16065 (TRBV11-2, TRBJ2-3)
CASSLGGASRWAPNTQYF

SEQ ID NO: 32131 - protein, 15 aa, Homo sapiens
  CDR3 for alpha chain variable domain of TCR clone 16066 (TRAV26-1, TRAJ29)
CIVRVERSGNTPLVF

SEQ ID NO: 32132 - protein, 15 aa, Homo sapiens
  CDR3 for beta chain variable domain of TCR clone 16066 (TRBV7-9, TRBJ1-5)
CASSQGHQPNQPQHF

SEQ ID NO: 32133 - protein, 10 aa, Homo sapiens
  CDR3 for alpha chain variable domain of TCR clone 16067 (TRAV16, TRAJ26)
CAPGELWSEF

SEQ ID NO: 32134 - protein, 15 aa, Homo sapiens
  CDR3 for beta chain variable domain of TCR clone 16067 (TRBV7-2, TRBJ2-3)
CASSLTGTSTDTQYF

SEQ ID NO: 32135 - protein, 13 aa, Homo sapiens
  CDR3 for alpha chain variable domain of TCR clone 16068 (TRAV26-2, TRAJ43)
CILRAVNNNDMRL

SEQ ID NO: 32136 - protein, 15 aa, Homo sapiens
  CDR3 for beta chain variable domain of TCR clone 16068 (TRBV7-2, TRBJ2-1)
CASTHGTGIYNEQFF

SEQ ID NO: 32137 - protein, 13 aa, Homo sapiens
  CDR3 for alpha chain variable domain of TCR clone 16069 (TRAV21, TRAJ57)
CAVTQGGSEKMVF

SEQ ID NO: 32138 - protein, 16 aa, Homo sapiens
  CDR3 for beta chain variable domain of TCR clone 16069 (TRBV29-1, TRBJ2-7)
CSVEDAEDGTAYEQYF

SEQ ID NO: 32139 - protein, 18 aa, Homo sapiens
  CDR3 for alpha chain variable domain of TCR clone 16070 (TRAV13-1, TRAJ52)
CAAKNPNAGVTSYGKLTF

SEQ ID NO: 32140 - protein, 15 aa, Homo sapiens
  CDR3 for beta chain variable domain of TCR clone 16070 (TRBV6-1, TRBJ2-3)
CASSERGGITDTQYF

SEQ ID NO: 32141 - protein, 15 aa, Homo sapiens
  CDR3 for alpha chain variable domain of TCR clone 16071 (TRAV3, TRAJ22)
CAVRDRGGSARQPTF

SEQ ID NO: 32142 - protein, 16 aa, Homo sapiens
  CDR3 for beta chain variable domain of TCR clone 16071 (TRBV5-4, TRBJ2-3)
CASQQPGAGGADTQYF

SEQ ID NO: 32143 - protein, 14 aa, Homo sapiens
  CDR3 for alpha chain variable domain of TCR clone 16072 (TRAV12-1, TRAJ17)
CVVNYKAAGNKLTF

SEQ ID NO: 32144 - protein, 12 aa, Homo sapiens
  CDR3 for beta chain variable domain of TCR clone 16072 (TRBV24-1, TRBJ1-1)
CATLYPDTEAFF

SEQ ID NO: 32145 - protein, 14 aa, Homo sapiens
  CDR3 for alpha chain variable domain of TCR clone 16073 (TRAV12-2, TRAJ13)
CAVKKTGGYQKVTF

SEQ ID NO: 32146 - protein, 14 aa, Homo sapiens
  CDR3 for beta chain variable domain of TCR clone 16073 (TRBV7-2, TRBJ2-7)
CASGPKTSFYEQYF

SEQ ID NO: 32147 - protein, 12 aa, Homo sapiens
  CDR3 for alpha chain variable domain of TCR clone 16074 (TRAV12-3, TRAJ17)
CAMTLTGNKLTF

SEQ ID NO: 32148 - protein, 14 aa, Homo sapiens
  CDR3 for beta chain variable domain of TCR clone 16074 (TRBV28, TRBJ2-1)
CASSPSTGYNEQFF

SEQ ID NO: 32149 - protein, 14 aa, Homo sapiens
  CDR3 for alpha chain variable domain of TCR clone 16075 (TRAV14/DV4, TRAJ11)
CAMRETSGYSTLTF

SEQ ID NO: 32150 - protein, 16 aa, Homo sapiens
  CDR3 for beta chain variable domain of TCR clone 16075 (TRBV5-1, TRBJ2-2)
CASSLGGTGSTGELFF

SEQ ID NO: 32151 - protein, 13 aa, Homo sapiens
  CDR3 for alpha chain variable domain of TCR clone 16076 (TRAV21, TRAJ57)
CAVTQGGSEKLVF

SEQ ID NO: 32152 - protein, 16 aa, Homo sapiens
  CDR3 for beta chain variable domain of TCR clone 16076 (TRBV29-1, TRBJ2-7)
CSVADAEDGTAYEQYF

SEQ ID NO: 32153 - protein, 13 aa, Homo sapiens
  CDR3 for alpha chain variable domain of TCR clone 16077 (TRAV27, TRAJ3)
ASLRGSSASKLIF

SEQ ID NO: 32154 - protein, 15 aa, Homo sapiens
  CDR3 for beta chain variable domain of TCR clone 16077 (TRBV28, TRBJ1-3)
CASSMGWASGNTIYF

SEQ ID NO: 32155 - protein, 15 aa, Homo sapiens
  CDR3 for alpha chain variable domain of TCR clone 16078 (TRAV21, TRAJ24)
CAARSSTDSWGKLQF

SEQ ID NO: 32156 - protein, 13 aa, Homo sapiens
  CDR3 for beta chain variable domain of TCR clone 16078 (TRBV11-2, TRBJ2-5)
CASSPTGEETQYF

SEQ ID NO: 32157 - protein, 14 aa, Homo sapiens
  CDR3 for alpha chain variable domain of TCR clone 16079 (TRAV38-1, TRAJ40)
CALRPTSGTYKYIF

SEQ ID NO: 32158 - protein, 14 aa, Homo sapiens
  CDR3 for beta chain variable domain of TCR clone 16079 (TRBV25-1, TRBJ1-1)
CASTQLGGNTEAFF

SEQ ID NO: 32159 - protein, 16 aa, Homo sapiens
  CDR3 for alpha chain variable domain of TCR clone 16080 (TRAV30, TRAJ24)
CGTEIVDADSWGKFQF

SEQ ID NO: 32160 - protein, 14 aa, Homo sapiens
  CDR3 for beta chain variable domain of TCR clone 16080 (TRBV12-5, TRBJ2-5)
CASGSRSHQETQYF

SEQ ID NO: 32161 - protein, 15 aa, Homo sapiens
  CDR3 for alpha chain variable domain of TCR clone 16081 (TRAV3, TRAJ5)
CAVRDRETGRRALTF

SEQ ID NO: 32162 - protein, 15 aa, Homo sapiens
  CDR3 for beta chain variable domain of TCR clone 16081 (TRBV7-8, TRBJ2-1)
CASSLADSLYNEQFF

SEQ ID NO: 32163 - protein, 12 aa, Homo sapiens
  CDR3 for alpha chain variable domain of TCR clone 16082 (TRAV17, TRAJ12)
CATLRSSYKLIF

SEQ ID NO: 32164 - protein, 16 aa, Homo sapiens
  CDR3 for beta chain variable domain of TCR clone 16082 (TRBV28, TRBJ2-7)
CASSLFVETGGPEQYF

SEQ ID NO: 32165 - protein, 14 aa, Homo sapiens
  CDR3 for alpha chain variable domain of TCR clone 16083 (TRAV8-3, TRAJ36)
CAVGPITGANNLFF

SEQ ID NO: 32166 - protein, 15 aa, Homo sapiens
  CDR3 for beta chain variable domain of TCR clone 16083 (TRBV4-1, TRBJ2-1)
CASSQDPGNYNERFF

SEQ ID NO: 32167 - protein, 15 aa, Homo sapiens
  CDR3 for alpha chain variable domain of TCR clone 16084 (TRAV38-1, TRAJ37)
CAFIHGSGNTGKLIF

SEQ ID NO: 32168 - protein, 12 aa, Homo sapiens
  CDR3 for beta chain variable domain of TCR clone 16084 (TRBV7-9, TRBJ2-7)
CASSFGSHEQYF

SEQ ID NO: 32169 - protein, 14 aa, Homo sapiens
  CDR3 for alpha chain variable domain of TCR clone 16085 (TRAV26-1, TRAJ48)
CIVRTNFGNEKLTF

SEQ ID NO: 32170 - protein, 12 aa, Homo sapiens
  CDR3 for beta chain variable domain of TCR clone 16085 (TRBV20-1, TRBJ2-7)
RSASSGANEQYF

SEQ ID NO: 32171 - protein, 14 aa, Homo sapiens
  CDR3 for alpha chain variable domain of TCR clone 16086 (TRAV1-2, TRAJ16)
CAVNRFSDGQKLLF

SEQ ID NO: 32172 - protein, 15 aa, Homo sapiens
  CDR3 for beta chain variable domain of TCR clone 16086 (TRBV7-9, TRBJ1-6)
CASSSPGRGNSPLHV

SEQ ID NO: 32173 - protein, 12 aa, Homo sapiens
  CDR3 for alpha chain variable domain of TCR clone 16087 (TRAV13-1, TRAJ21)
CAAKEGFNKFYF

SEQ ID NO: 32174 - protein, 14 aa, Homo sapiens
  CDR3 for beta chain variable domain of TCR clone 16087 (TRBV12-5, TRBJ2-5)
CASGSRTHQETQYF

SEQ ID NO: 32175 - protein, 16 aa, Homo sapiens
  CDR3 for alpha chain variable domain of TCR clone 16088 (TRAV27, TRAJ13)
CAGAKSDSGGYQKVTF

SEQ ID NO: 32176 - protein, 15 aa, Homo sapiens
  CDR3 for beta chain variable domain of TCR clone 16088 (TRBV29-1, TRBJ2-1)
CSVGRHALFYDEQFF

SEQ ID NO: 32177 - protein, 12 aa, Homo sapiens
  CDR3 for alpha chain variable domain of TCR clone 16089 (TRAV26-2, TRAJ21)
YILKGNFNKFYF

SEQ ID NO: 32178 - protein, 14 aa, Homo sapiens
  CDR3 for beta chain variable domain of TCR clone 16089 (TRBV7-9, TRBJ1-1)
CASTPLQSYTEAFF

SEQ ID NO: 32179 - protein, 12 aa, Homo sapiens
  CDR3 for alpha chain variable domain of TCR clone 16090 (TRAV29/DV5, TRAJ43)
CAAPYNNNDMRF

SEQ ID NO: 32180 - protein, 14 aa, Homo sapiens
  CDR3 for beta chain variable domain of TCR clone 16090 (TRBV5-1, TRBJ2-2)
CASSLIEGAGELFF

SEQ ID NO: 32181 - protein, 15 aa, Homo sapiens
  CDR3 for alpha chain variable domain of TCR clone 16091 (TRAV27, TRAJ38)
CAARRNAGNNRKLIW

SEQ ID NO: 32182 - protein, 13 aa, Homo sapiens
  CDR3 for beta chain variable domain of TCR clone 16091 (TRBV12-5, TRBJ2-3)
CVSGDRQSDTQYF

SEQ ID NO: 32183 - protein, 14 aa, Homo sapiens
  CDR3 for alpha chain variable domain of TCR clone 16092 (TRAV9-2, TRAJ8)
CATTPNTGFQKLVF

SEQ ID NO: 32184 - protein, 16 aa, Homo sapiens
  CDR3 for beta chain variable domain of TCR clone 16092 (TRBV27, TRBJ1-4)
CASSRNAGIGNEKLFF

SEQ ID NO: 32185 - protein, 14 aa, Homo sapiens
  CDR3 for alpha chain variable domain of TCR clone 16093 (TRAV2, TRAJ37)
CAVDFTSNAGKLIF

SEQ ID NO: 32186 - protein, 15 aa, Homo sapiens
  CDR3 for beta chain variable domain of TCR clone 16093 (TRBV20-1, TRBJ1-1)
CSASRGVTGNTEAFF

SEQ ID NO: 32187 - protein, 14 aa, Homo sapiens
  CDR3 for alpha chain variable domain of TCR clone 16094 (TRAV29/DV5, TRAJ36)
CAARRKTGADNLFF

SEQ ID NO: 32188 - protein, 14 aa, Homo sapiens
  CDR3 for beta chain variable domain of TCR clone 16094 (TRBV12-5, TRBJ2-5)
CASGSRTHQETQYF

SEQ ID NO: 32189 - protein, 12 aa, Homo sapiens
  CDR3 for alpha chain variable domain of TCR clone 16095 (TRAV13-1, TRAJ21)
CAAKEGFNRFYF

SEQ ID NO: 32190 - protein, 14 aa, Homo sapiens
  CDR3 for beta chain variable domain of TCR clone 16095 (TRBV5-4, TRBJ1-1)
CASSLDSRRDEAFF

SEQ ID NO: 32191 - protein, 14 aa, Homo sapiens
  CDR3 for alpha chain variable domain of TCR clone 16096 (TRAV12-3, TRAJ10)
SHLPLTGGGNKLTF

SEQ ID NO: 32192 - protein, 12 aa, Homo sapiens
  CDR3 for beta chain variable domain of TCR clone 16096 (TRBV12-4, TRBJ1-3)
CASSFSGNTIYF

SEQ ID NO: 32193 - protein, 12 aa, Homo sapiens
  CDR3 for alpha chain variable domain of TCR clone 16097 (TRAV36/DV7, TRAJ54)
CAVVRGAQKPVF

SEQ ID NO: 32194 - protein, 14 aa, Homo sapiens
  CDR3 for beta chain variable domain of TCR clone 16097 (TRBV7-3, TRBJ1-1)
CASSLKGGNTEAFF

SEQ ID NO: 32195 - protein, 14 aa, Homo sapiens
  CDR3 for alpha chain variable domain of TCR clone 16098 (TRAV1-1, TRAJ30)
CAVRSLNRDDKIIF

SEQ ID NO: 32196 - protein, 14 aa, Homo sapiens
  CDR3 for beta chain variable domain of TCR clone 16098 (TRBV12-5, TRBJ2-5)
CASGSRTHQETQYF

SEQ ID NO: 32197 - protein, 11 aa, Homo sapiens
  CDR3 for alpha chain variable domain of TCR clone 16099 (TRAV2, TRAJ13)
CASGGYQKVTF

SEQ ID NO: 32198 - protein, 13 aa, Homo sapiens
  CDR3 for beta chain variable domain of TCR clone 16099 (TRBV12-5, TRBJ2-3)
CASGDRQSDTQYF

SEQ ID NO: 32199 - protein, 13 aa, Homo sapiens
  CDR3 for alpha chain variable domain of TCR clone 16100 (TRAV38-1, TRAJ42)
CARWGGSQGNLIF

SEQ ID NO: 32200 - protein, 17 aa, Homo sapiens
  CDR3 for beta chain variable domain of TCR clone 16100 (TRBV20-1, TRBJ2-1)
CSARDTLAGVWDNEQFF

SEQ ID NO: 32201 - protein, 15 aa, Homo sapiens
  CDR3 for alpha chain variable domain of TCR clone 16101 (TRAV21, TRAJ53)
CAALNSGGSNYKLTF

SEQ ID NO: 32202 - protein, 16 aa, Homo sapiens
  CDR3 for beta chain variable domain of TCR clone 16101 (TRBV9, TRBJ2-1)
CASSVGGGGNYNEQFF

SEQ ID NO: 32203 - protein, 15 aa, Homo sapiens
  CDR3 for alpha chain variable domain of TCR clone 16102 (TRAV38-2/DV8, TRAJ28)
CAYRTSGAGSYQLTF

SEQ ID NO: 32204 - protein, 13 aa, Homo sapiens
  CDR3 for beta chain variable domain of TCR clone 16102 (TRBV5-1, TRBJ1-5)
CASSLAQDQPQHF

SEQ ID NO: 32205 - protein, 12 aa, Homo sapiens
  CDR3 for alpha chain variable domain of TCR clone 16103 (TRAV17, TRAJ57)
CATDGGSEKLVF

SEQ ID NO: 32206 - protein, 13 aa, Homo sapiens
  CDR3 for beta chain variable domain of TCR clone 16103 (TRBV7-9, TRBJ2-7)
CAGSFAGAYEQYF

SEQ ID NO: 32207 - protein, 15 aa, Homo sapiens
  CDR3 for alpha chain variable domain of TCR clone 16104 (TRAV26-1, TRAJ29)
CIVRVEGSGYTPLVF

SEQ ID NO: 32208 - protein, 15 aa, Homo sapiens
  CDR3 for beta chain variable domain of TCR clone 16104 (TRBV7-9, TRBJ1-5)
CASSQGHQPNQPQHF

SEQ ID NO: 32209 - protein, 18 aa, Homo sapiens
  CDR3 for alpha chain variable domain of TCR clone 16105 (TRAV13-1, TRAJ52)
CAAKNPNAGGTSYGKLTF

SEQ ID NO: 32210 - protein, 13 aa, Homo sapiens
  CDR3 for beta chain variable domain of TCR clone 16105 (TRBV7-9, TRBJ1-2)
CASSLKQNYGYTF

SEQ ID NO: 32211 - protein, 13 aa, Homo sapiens
  CDR3 for alpha chain variable domain of TCR clone 16106 (TRAV13-2, TRAJ13)
CAERPGGYQKVTF

SEQ ID NO: 32212 - protein, 12 aa, Homo sapiens
  CDR3 for beta chain variable domain of TCR clone 16106 (TRBV5-4, TRBJ2-5)
CASSSTRETQYF

SEQ ID NO: 32213 - protein, 16 aa, Homo sapiens
  CDR3 for alpha chain variable domain of TCR clone 16107 (TRAV16, TRAJ4)
CALGRMFSGGYNKLIF

SEQ ID NO: 32214 - protein, 16 aa, Homo sapiens
  CDR3 for beta chain variable domain of TCR clone 16107 (TRBV24-1, TRBJ2-3)
CATSDPGTGATDTQYF

SEQ ID NO: 32215 - protein, 13 aa, Homo sapiens
  CDR3 for alpha chain variable domain of TCR clone 16108 (TRAV21, TRAJ57)
CAVAQGGSEKLVF

SEQ ID NO: 32216 - protein, 16 aa, Homo sapiens
  CDR3 for beta chain variable domain of TCR clone 16108 (TRBV29-1, TRBJ2-7)
CSVEDAEDGTAYEQYF

SEQ ID NO: 32217 - protein, 16 aa, Homo sapiens
  CDR3 for alpha chain variable domain of TCR clone 16109 (TRAV12-3, TRAJ53)
CAMSPGSGGSNYKLTF

SEQ ID NO: 32218 - protein, 16 aa, Homo sapiens
  CDR3 for beta chain variable domain of TCR clone 16109 (TRBV4-2, TRBJ1-1)
CASSQAGFGMNTEALF

SEQ ID NO: 32219 - protein, 11 aa, Homo sapiens
  CDR3 for alpha chain variable domain of TCR clone 16110 (TRAV12-3, TRAJ43)
CAMSVSNDMRF

SEQ ID NO: 32220 - protein, 13 aa, Homo sapiens
  CDR3 for beta chain variable domain of TCR clone 16110 (TRBV20-1, TRBJ1-1)
RSAPLGGGTEAFF

SEQ ID NO: 32221 - protein, 15 aa, Homo sapiens
  CDR3 for alpha chain variable domain of TCR clone 16111 (TRAV3, TRAJ47)
CAVRDIGEYGNELVF

SEQ ID NO: 32222 - protein, 14 aa, Homo sapiens
  CDR3 for beta chain variable domain of TCR clone 16111 (TRBV13, TRBJ2-5)
CASSLERVGETQYF

SEQ ID NO: 32223 - protein, 14 aa, Homo sapiens
  CDR3 for alpha chain variable domain of TCR clone 16112 (TRAV1-2, TRAJ16)
CAVNRFSDGQKLLF

SEQ ID NO: 32224 - protein, 16 aa, Homo sapiens
  CDR3 for beta chain variable domain of TCR clone 16112 (TRBV7-3, TRBJ2-1)
CASSLEGYRSYNEQFF

SEQ ID NO: 32225 - protein, 16 aa, Homo sapiens
  CDR3 for alpha chain variable domain of TCR clone 16113 (TRAV30, TRAJ24)
CGTEIVDADSWGKFQF

SEQ ID NO: 32226 - protein, 12 aa, Homo sapiens
  CDR3 for beta chain variable domain of TCR clone 16113 (TRBV12-5, TRBJ2-5)
CASGQGVETQYF

SEQ ID NO: 32227 - protein, 14 aa, Homo sapiens
  CDR3 for alpha chain variable domain of TCR clone 16114 (TRAV34, TRAJ22)
CGADTSGSARQLTF

SEQ ID NO: 32228 - protein, 15 aa, Homo sapiens
  CDR3 for beta chain variable domain of TCR clone 16114 (TRBV27, TRBJ2-1)
CASSNGGGSSNEQFF

SEQ ID NO: 32229 - protein, 12 aa, Homo sapiens
  CDR3 for alpha chain variable domain of TCR clone 16115 (TRAV12-3, TRAJ17)
CAMTLTGNKLTF

SEQ ID NO: 32230 - protein, 16 aa, Homo sapiens
  CDR3 for beta chain variable domain of TCR clone 16115 (TRBV27, TRBJ2-2)
CASSSSGVSNTGELFF

SEQ ID NO: 32231 - protein, 10 aa, Homo sapiens
  CDR3 for alpha chain variable domain of TCR clone 16116 (TRAV30, TRAJ24)
CGTEIVMLTA

SEQ ID NO: 32232 - protein, 14 aa, Homo sapiens
  CDR3 for beta chain variable domain of TCR clone 16116 (TRBV12-5, TRBJ2-5)
CASGSRTHQETQYF

SEQ ID NO: 32233 - protein, 11 aa, Homo sapiens
  CDR3 for alpha chain variable domain of TCR clone 16117 (TRAV1-1, TRAJ23)
CAVRHGGKLIF

SEQ ID NO: 32234 - protein, 20 aa, Homo sapiens
  CDR3 for beta chain variable domain of TCR clone 16117 (TRBV7-8, TRBJ2-2)
CASSHLFPGPTIHITGELFF

SEQ ID NO: 32235 - protein, 14 aa, Homo sapiens
  CDR3 for alpha chain variable domain of TCR clone 16118 (TRAV8-3, TRAJ4)
CAVGAAGGYNKLIF

SEQ ID NO: 32236 - protein, 15 aa, Homo sapiens
  CDR3 for beta chain variable domain of TCR clone 16118 (TRBV6-5, TRBJ2-1)
CASSYGAGAGNEQFF

SEQ ID NO: 32237 - protein, 14 aa, Homo sapiens
  CDR3 for alpha chain variable domain of TCR clone 16119 (TRAV8-3, TRAJ9)
CAVVYNTGGFKTTF

SEQ ID NO: 32238 - protein, 14 aa, Homo sapiens
  CDR3 for beta chain variable domain of TCR clone 16119 (TRBV7-3, TRBJ2-2)
CASSSGGYTGELFF

SEQ ID NO: 32239 - protein, 16 aa, Homo sapiens
  CDR3 for alpha chain variable domain of TCR clone 16120 (TRAV3, TRAJ37)
CAVGPHGSGNTGKLIF

SEQ ID NO: 32240 - protein, 16 aa, Homo sapiens
  CDR3 for beta chain variable domain of TCR clone 16120 (TRBV9, TRBJ1-2)
CASSVEEKVSPYGYTF

SEQ ID NO: 32241 - protein, 14 aa, Homo sapiens
  CDR3 for alpha chain variable domain of TCR clone 16121 (TRAV12-2, TRAJ40)
CAVKIPSGTYKYIF

SEQ ID NO: 32242 - protein, 13 aa, Homo sapiens
  CDR3 for beta chain variable domain of TCR clone 16121 (TRBV7-3, TRBJ1-1)
CASSQDWGAEAFF

SEQ ID NO: 32243 - protein, 15 aa, Homo sapiens
  CDR3 for alpha chain variable domain of TCR clone 16122 (TRAV26-1, TRAJ29)
CIVRVEGSGHTPLVF

SEQ ID NO: 32244 - protein, 15 aa, Homo sapiens
  CDR3 for beta chain variable domain of TCR clone 16122 (TRBV7-9, TRBJ1-5)
CASSQGHQPNQPQHF

SEQ ID NO: 32245 - protein, 10 aa, Homo sapiens
  CDR3 for alpha chain variable domain of TCR clone 16123 (TRAV8-4, TRAJ39)
CAVSGNMLTF

SEQ ID NO: 32246 - protein, 14 aa, Homo sapiens
  CDR3 for beta chain variable domain of TCR clone 16123 (TRBV6-9, TRBJ1-5)
CASSYPTGGQPQHF

SEQ ID NO: 32247 - protein, 15 aa, Homo sapiens
  CDR3 for alpha chain variable domain of TCR clone 16124 (TRAV3, TRAJ5)
CAVRDRKTGRRALNF

SEQ ID NO: 32248 - protein, 15 aa, Homo sapiens
  CDR3 for beta chain variable domain of TCR clone 16124 (TRBV7-8, TRBJ2-1)
CASSLADSLYNEQFF

SEQ ID NO: 32249 - protein, 14 aa, Homo sapiens
  CDR3 for alpha chain variable domain of TCR clone 16125 (TRAV1-2, TRAJ8)
CAVRKDTGFQKLVF

SEQ ID NO: 32250 - protein, 15 aa, Homo sapiens
  CDR3 for beta chain variable domain of TCR clone 16125 (TRBV6-3, TRBJ2-7)
CASSSPGTVFYEQYF

SEQ ID NO: 32251 - protein, 14 aa, Homo sapiens
  CDR3 for alpha chain variable domain of TCR clone 16126 (TRAV12-2, TRAJ45)
CAVNKGGGADGLTF

SEQ ID NO: 32252 - protein, 16 aa, Homo sapiens
  CDR3 for beta chain variable domain of TCR clone 16126 (TRBV20-1, TRBJ1-1)
CSARALTQGMNTEAFF

SEQ ID NO: 32253 - protein, 10 aa, Homo sapiens
  CDR3 for alpha chain variable domain of TCR clone 16127 (TRAV16, TRAJ22)
SAIYLRQLTF

SEQ ID NO: 32254 - protein, 15 aa, Homo sapiens
  CDR3 for beta chain variable domain of TCR clone 16127 (TRBV7-9, TRBJ1-6)
CASSSPGRGNSPLHF

SEQ ID NO: 32255 - protein, 13 aa, Homo sapiens
  CDR3 for alpha chain variable domain of TCR clone 16128 (TRAV12-2, TRAJ9)
CAVIRGGGFKTIF

SEQ ID NO: 32256 - protein, 16 aa, Homo sapiens
  CDR3 for beta chain variable domain of TCR clone 16128 (TRBV7-2, TRBJ2-7)
CASSSQGLAPTYEQYF

SEQ ID NO: 32257 - protein, 15 aa, Homo sapiens
  CDR3 for alpha chain variable domain of TCR clone 16129 (TRAV2, TRAJ9)
CAVAALNTGGLKTIF

SEQ ID NO: 32258 - protein, 15 aa, Homo sapiens
  CDR3 for beta chain variable domain of TCR clone 16129 (TRBV6-3, TRBJ2-7)
CASSSPGTVFYEQYF

SEQ ID NO: 32259 - protein, 15 aa, Homo sapiens
  CDR3 for alpha chain variable domain of TCR clone 16130 (TRAV21, TRAJ53)
CATLNSGGSNYKLTF

SEQ ID NO: 32260 - protein, 17 aa, Homo sapiens
  CDR3 for beta chain variable domain of TCR clone 16130 (TRBV13, TRBJ2-3)
CASSLSRVAGGRNTQYF

SEQ ID NO: 32261 - protein, 13 aa, Homo sapiens
  CDR3 for alpha chain variable domain of TCR clone 16131 (TRAV8-3, TRAJ43)
CAVGPDNNNGMRF

SEQ ID NO: 32262 - protein, 14 aa, Homo sapiens
  CDR3 for beta chain variable domain of TCR clone 16131 (TRBV19, TRBJ2-1)
CASPTFVLSGEQFF

SEQ ID NO: 32263 - protein, 15 aa, Homo sapiens
  CDR3 for alpha chain variable domain of TCR clone 16132 (TRAV26-1, TRAJ29)
CVVRVEGSGNTPLVF

SEQ ID NO: 32264 - protein, 14 aa, Homo sapiens
  CDR3 for beta chain variable domain of TCR clone 16132 (TRBV18, TRBJ2-5)
CASSPGVSQETQYF

SEQ ID NO: 32265 - protein, 11 aa, Homo sapiens
  CDR3 for alpha chain variable domain of TCR clone 16133 (TRAV35, TRAJ34)
CWARNTDKLIL

SEQ ID NO: 32266 - protein, 14 aa, Homo sapiens
  CDR3 for beta chain variable domain of TCR clone 16133 (TRBV5-1, TRBJ2-7)
CASSRGESLYEQYF

SEQ ID NO: 32267 - protein, 14 aa, Homo sapiens
  CDR3 for alpha chain variable domain of TCR clone 16134 (TRAV12-2, TRAJ13)
CAVKKTGGYQKVTF

SEQ ID NO: 32268 - protein, 12 aa, Homo sapiens
  CDR3 for beta chain variable domain of TCR clone 16134 (TRBV11-3, TRBJ2-2)
CASSLGGGELFF

SEQ ID NO: 32269 - protein, 14 aa, Homo sapiens
  CDR3 for alpha chain variable domain of TCR clone 16135 (TRAV12-2, TRAJ40)
CAVKIPSGTYKYIF

SEQ ID NO: 32270 - protein, 14 aa, Homo sapiens
  CDR3 for beta chain variable domain of TCR clone 16135 (TRBV20-1, TRBJ1-1)
CSAQTRIGGTESFF

SEQ ID NO: 32271 - protein, 11 aa, Homo sapiens
  CDR3 for alpha chain variable domain of TCR clone 16136 (TRAV12-3, TRAJ27)
CAVANAGKSTF

SEQ ID NO: 32272 - protein, 13 aa, Homo sapiens
  CDR3 for beta chain variable domain of TCR clone 16136 (TRBV20-1, TRBJ1-1)
CSARVGGNTEAFF

SEQ ID NO: 32273 - protein, 15 aa, Homo sapiens
  CDR3 for alpha chain variable domain of TCR clone 16137 (TRAV38-2/DV8, TRAJ31)
CAYRRALNNNARLMF

SEQ ID NO: 32274 - protein, 13 aa, Homo sapiens
  CDR3 for beta chain variable domain of TCR clone 16137 (TRBV28, TRBJ2-1)
CASRSGGLNEQFF

SEQ ID NO: 32275 - protein, 15 aa, Homo sapiens
  CDR3 for alpha chain variable domain of TCR clone 16138 (TRAV8-2, TRAJ23)
CVVSPLITREESLSS

SEQ ID NO: 32276 - protein, 16 aa, Homo sapiens
  CDR3 for beta chain variable domain of TCR clone 16138 (TRBV20-1, TRBJ2-1)
CSARDHLAGGRGEQFF

SEQ ID NO: 32277 - protein, 15 aa, Homo sapiens
  CDR3 for alpha chain variable domain of TCR clone 16139 (TRAV26-1, TRAJ29)
CIVRVEGSGNTPLVF

SEQ ID NO: 32278 - protein, 14 aa, Homo sapiens
  CDR3 for beta chain variable domain of TCR clone 16139 (TRBV12-5, TRBJ2-5)
CASGSRTHQETQYF

SEQ ID NO: 32279 - protein, 15 aa, Homo sapiens
  CDR3 for alpha chain variable domain of TCR clone 16140 (TRAV8-3, TRAJ27)
CAVGPSKTNAGKSTS

SEQ ID NO: 32280 - protein, 16 aa, Homo sapiens
  CDR3 for beta chain variable domain of TCR clone 16140 (TRBV6-6, TRBJ2-1)
CASSLLSDSSYNEQFF

SEQ ID NO: 32281 - protein, 14 aa, Homo sapiens
  CDR3 for alpha chain variable domain of TCR clone 16141 (TRAV8-3, TRAJ9)
CAVVYNTGGFKTIF

SEQ ID NO: 32282 - protein, 14 aa, Homo sapiens
  CDR3 for beta chain variable domain of TCR clone 16141 (TRBV7-3, TRBJ2-2)
CASSSGGYTGELSF

SEQ ID NO: 32283 - protein, 14 aa, Homo sapiens
  CDR3 for alpha chain variable domain of TCR clone 16142 (TRAV8-3, TRAJ4)
CAVGAASGYNKLIF

SEQ ID NO: 32284 - protein, 15 aa, Homo sapiens
  CDR3 for beta chain variable domain of TCR clone 16142 (TRBV6-5, TRBJ2-1)
CASSYDAGAGNEQFF

SEQ ID NO: 32285 - protein, 14 aa, Homo sapiens
  CDR3 for alpha chain variable domain of TCR clone 16143 (TRAV12-2, TRAJ40)
CTVKIPSGTYKYIF

SEQ ID NO: 32286 - protein, 14 aa, Homo sapiens
  CDR3 for beta chain variable domain of TCR clone 16143 (TRBV20-1, TRBJ1-1)
CSAQTRIGGTEAFF

SEQ ID NO: 32287 - protein, 14 aa, Homo sapiens
  CDR3 for alpha chain variable domain of TCR clone 16144 (TRAV9-2, TRAJ39)
CALYIYNAGNMLTF

SEQ ID NO: 32288 - protein, 14 aa, Homo sapiens
  CDR3 for beta chain variable domain of TCR clone 16144 (TRBV7-8, TRBJ2-3)
CASSFKSSTDTQYF

SEQ ID NO: 32289 - protein, 14 aa, Homo sapiens
  CDR3 for alpha chain variable domain of TCR clone 16145 (TRAV2, TRAJ9)
CAVEDRSGGFKTIF

SEQ ID NO: 32290 - protein, 15 aa, Homo sapiens
  CDR3 for beta chain variable domain of TCR clone 16145 (TRBV7-9, TRBJ1-5)
CASSQGHQPNQPQHF

SEQ ID NO: 32291 - protein, 12 aa, Homo sapiens
  CDR3 for alpha chain variable domain of TCR clone 16146 (TRAV13-2, TRAJ22)
CAERGSARQLTF

SEQ ID NO: 32292 - protein, 11 aa, Homo sapiens
  CDR3 for beta chain variable domain of TCR clone 16146 (TRBV28, TRBJ2-7)
CASSWDYEQYF

SEQ ID NO: 32293 - protein, 14 aa, Homo sapiens
  CDR3 for alpha chain variable domain of TCR clone 16147 (TRAV1-2, TRAJ16)
CAVNRFSDGQKLLF

SEQ ID NO: 32294 - protein, 14 aa, Homo sapiens
  CDR3 for beta chain variable domain of TCR clone 16147 (TRBV15, TRBJ2-3)
CATRSGTSTDTQYF

SEQ ID NO: 32295 - protein, 12 aa, Homo sapiens
  CDR3 for alpha chain variable domain of TCR clone 16148 (TRAV8-3, TRAJ26)
CAGDNYGQNFAF

SEQ ID NO: 32296 - protein, 15 aa, Homo sapiens
  CDR3 for beta chain variable domain of TCR clone 16148 (TRBV9, TRBJ2-1)
CASSLAGSSYNEQFF

SEQ ID NO: 32297 - protein, 12 aa, Homo sapiens
  CDR3 for alpha chain variable domain of TCR clone 16149 (TRAV8-3, TRAJ20)
CAVGANDYKLSF

SEQ ID NO: 32298 - protein, 12 aa, Homo sapiens
  CDR3 for beta chain variable domain of TCR clone 16149 (TRBV11-2, TRBJ2-2)
CASSLGGGELFF

SEQ ID NO: 32299 - protein, 14 aa, Homo sapiens
  CDR3 for alpha chain variable domain of TCR clone 16150 (TRAV12-2, TRAJ13)
CAVKKTGGYQKVTF

SEQ ID NO: 32300 - protein, 17 aa, Homo sapiens
  CDR3 for beta chain variable domain of TCR clone 16150 (TRBV7-3, TRBJ2-3)
CASSLMKRMRGADTQYF

SEQ ID NO: 32301 - protein, 22 aa, Homo sapiens
  CDR3 for alpha chain variable domain of TCR clone 16151 (TRAV27, TRAJ3)
SLQPSLVIQASLRGSSASKIIF

SEQ ID NO: 32302 - protein, 15 aa, Homo sapiens
  CDR3 for beta chain variable domain of TCR clone 16151 (TRBV28, TRBJ1-3)
CASSMGWASGNTIYF

SEQ ID NO: 32303 - protein, 15 aa, Homo sapiens
  CDR3 for alpha chain variable domain of TCR clone 16152 (TRAV8-3, TRAJ27)
CAVGPSKTNAGKSNF

SEQ ID NO: 32304 - protein, 15 aa, Homo sapiens
  CDR3 for beta chain variable domain of TCR clone 16152 (TRBV7-2, TRBJ2-1)
CASSSGLAGGNEQFF

SEQ ID NO: 32305 - protein, 17 aa, Homo sapiens
  CDR3 for alpha chain variable domain of TCR clone 16153 (TRAV36/DV7, TRAJ52)
CAVAQRAGGTSYGKLTF

SEQ ID NO: 32306 - protein, 13 aa, Homo sapiens
  CDR3 for beta chain variable domain of TCR clone 16153 (TRBV20-1, TRBJ1-1)
CSAGTVGNTEAFF

SEQ ID NO: 32307 - protein, 13 aa, Homo sapiens
  CDR3 for alpha chain variable domain of TCR clone 16154 (TRAV2, TRAJ15)
CAVASQAGTALIF

SEQ ID NO: 32308 - protein, 13 aa, Homo sapiens
  CDR3 for beta chain variable domain of TCR clone 16154 (TRBV10-3, TRBJ2-7)
CASKLAVNYEQYF

SEQ ID NO: 32309 - protein, 15 aa, Homo sapiens
  CDR3 for alpha chain variable domain of TCR clone 16155 (TRAV26-1, TRAJ29)
CIVRVEGSGNTPLVF

SEQ ID NO: 32310 - protein, 13 aa, Homo sapiens
  CDR3 for beta chain variable domain of TCR clone 16155 (TRBV10-3, TRBJ2-7)
CASKLAVNYEQYF

SEQ ID NO: 32311 - protein, 16 aa, Homo sapiens
  CDR3 for alpha chain variable domain of TCR clone 16156 (TRAV12-2, TRAJ45)
CAVIFLSGGGADGLTF

SEQ ID NO: 32312 - protein, 19 aa, Homo sapiens
  CDR3 for beta chain variable domain of TCR clone 16156 (TRBV28, TRBJ2-4)
CASSFRPGGPAHSKNIQYF

SEQ ID NO: 32313 - protein, 13 aa, Homo sapiens
  CDR3 for alpha chain variable domain of TCR clone 16157 (TRAV22, TRAJ29)
CAVGGSGNTPLVF

SEQ ID NO: 32314 - protein, 13 aa, Homo sapiens
  CDR3 for beta chain variable domain of TCR clone 16157 (TRBV10-3, TRBJ1-2)
CAISERDSYGYTF

SEQ ID NO: 32315 - protein, 14 aa, Homo sapiens
  CDR3 for alpha chain variable domain of TCR clone 16158 (TRAV1-2, TRAJ16)
CAVNRFLDGQKLLF

SEQ ID NO: 32316 - protein, 15 aa, Homo sapiens
  CDR3 for beta chain variable domain of TCR clone 16158 (TRBV9, TRBJ1-6)
CASSVAGTGDSPLHF

SEQ ID NO: 32317 - protein, 16 aa, Homo sapiens
  CDR3 for alpha chain variable domain of TCR clone 16159 (TRAV12-2, TRAJ43)
CAGDDMRFGAGTRLTV

SEQ ID NO: 32318 - protein, 16 aa, Homo sapiens
  CDR3 for beta chain variable domain of TCR clone 16159 (TRBV2, TRBJ2-4)
CASSEAPGGEQNSQYF

SEQ ID NO: 32319 - protein, 11 aa, Homo sapiens
  CDR3 for alpha chain variable domain of TCR clone 16160 (TRAV3, TRAJ21)
CAVGNFNKFYF

SEQ ID NO: 32320 - protein, 16 aa, Homo sapiens
  CDR3 for beta chain variable domain of TCR clone 16160 (TRBV19, TRBJ2-1)
CASSKTGPSSYNEQFF

SEQ ID NO: 32321 - protein, 16 aa, Homo sapiens
  CDR3 for alpha chain variable domain of TCR clone 16161 (TRAV30, TRAJ24)
CGTEIVDADSWGKFQF

SEQ ID NO: 32322 - protein, 14 aa, Homo sapiens
  CDR3 for beta chain variable domain of TCR clone 16161 (TRBV11-2, TRBJ2-7)
CASSLGAGAYGQYF

SEQ ID NO: 32323 - protein, 13 aa, Homo sapiens
  CDR3 for alpha chain variable domain of TCR clone 16162 (TRAV27, TRAJ45)
CRSAGGGADGLTF

SEQ ID NO: 32324 - protein, 17 aa, Homo sapiens
  CDR3 for beta chain variable domain of TCR clone 16162 (TRBV11-2, TRBJ2-1)
CASSLYPPGVEYNEQFF

SEQ ID NO: 32325 - protein, 15 aa, Homo sapiens
  CDR3 for alpha chain variable domain of TCR clone 16163 (TRAV26-1, TRAJ29)
CIGRVEGSGNTPLVF

SEQ ID NO: 32326 - protein, 15 aa, Homo sapiens
  CDR3 for beta chain variable domain of TCR clone 16163 (TRBV7-9, TRBJ1-5)
CASSQGHQPNQPQHF

SEQ ID NO: 32327 - protein, 13 aa, Homo sapiens
  CDR3 for alpha chain variable domain of TCR clone 16164 (TRAV26-2, TRAJ43)
CILRAVNNNDMCF

SEQ ID NO: 32328 - protein, 15 aa, Homo sapiens
  CDR3 for beta chain variable domain of TCR clone 16164 (TRBV7-2, TRBJ2-1)
CASTHGTGIYNEQFF

SEQ ID NO: 32329 - protein, 14 aa, Homo sapiens
  CDR3 for alpha chain variable domain of TCR clone 16165 (TRAV12-2, TRAJ13)
CAVKKTGGYQKVTF

SEQ ID NO: 32330 - protein, 15 aa, Homo sapiens
  CDR3 for beta chain variable domain of TCR clone 16165 (TRBV27, TRBJ2-1)
CASSNGGGSSNEKFF

SEQ ID NO: 32331 - protein, 17 aa, Homo sapiens
  CDR3 for alpha chain variable domain of TCR clone 16166 (TRAV23/DV6, TRAJ57)
CAASSTLSQVGSEKLVF

SEQ ID NO: 32332 - protein, 14 aa, Homo sapiens
  CDR3 for beta chain variable domain of TCR clone 16166 (TRBV25-1, TRBJ1-1)
CASTHLGGNTEAFF

SEQ ID NO: 32333 - protein, 14 aa, Homo sapiens
  CDR3 for alpha chain variable domain of TCR clone 16167 (TRAV9-2, TRAJ39)
CALYIYNAGNMLTF

SEQ ID NO: 32334 - protein, 17 aa, Homo sapiens
  CDR3 for beta chain variable domain of TCR clone 16167 (TRBV10-1, TRBJ2-1)
CASSPQRAGGPFNEQFF

SEQ ID NO: 32335 - protein, 12 aa, Homo sapiens
  CDR3 for alpha chain variable domain of TCR clone 16168 (TRAV3, TRAJ43)
CAVRDPNNDMRF

SEQ ID NO: 32336 - protein, 14 aa, Homo sapiens
  CDR3 for beta chain variable domain of TCR clone 16168 (TRBV5-1, TRBJ2-3)
CASSLFGPTDTQYS

SEQ ID NO: 32337 - protein, 12 aa, Homo sapiens
  CDR3 for alpha chain variable domain of TCR clone 16169 (TRAV21, TRAJ3)
CCFYSSASKIIF

SEQ ID NO: 32338 - protein, 16 aa, Homo sapiens
  CDR3 for beta chain variable domain of TCR clone 16169 (TRBV19, TRBJ2-1)
CASSKAGPSPYNEQFF

SEQ ID NO: 32339 - protein, 14 aa, Homo sapiens
  CDR3 for alpha chain variable domain of TCR clone 16170 (TRAV2, TRAJ9)
CAVEDRSGGFKTIF

SEQ ID NO: 32340 - protein, 15 aa, Homo sapiens
  CDR3 for beta chain variable domain of TCR clone 16170 (TRBV28, TRBJ2-1)
CASSIIAGGRSEQFF

SEQ ID NO: 32341 - protein, 14 aa, Homo sapiens
  CDR3 for alpha chain variable domain of TCR clone 16171 (TRAV35, TRAJ22)
CAGLRPGSARQLTF

SEQ ID NO: 32342 - protein, 15 aa, Homo sapiens
  CDR3 for beta chain variable domain of TCR clone 16171 (TRBV12-4, TRBJ2-5)
CASSPPTGLRETQYF

SEQ ID NO: 32343 - protein, 13 aa, Homo sapiens
  CDR3 for alpha chain variable domain of TCR clone 16172 (TRAV2, TRAJ40)
CAVVTSGTYKYIF

SEQ ID NO: 32344 - protein, 15 aa, Homo sapiens
  CDR3 for beta chain variable domain of TCR clone 16172 (TRBV7-9, TRBJ1-6)
CASSSPGRGNSPLHF

SEQ ID NO: 32345 - protein, 16 aa, Homo sapiens
  CDR3 for alpha chain variable domain of TCR clone 16173 (TRAV30, TRAJ24)
CGTEIVDADSWGKFQF

SEQ ID NO: 32346 - protein, 14 aa, Homo sapiens
  CDR3 for beta chain variable domain of TCR clone 16173 (TRBV12-5, TRBJ2-5)
CASGSRTHEETQYF

SEQ ID NO: 32347 - protein, 12 aa, Homo sapiens
  CDR3 for alpha chain variable domain of TCR clone 16174 (TRAV17, TRAJ57)
CATDGGSEKLVF

SEQ ID NO: 32348 - protein, 13 aa, Homo sapiens
  CDR3 for beta chain variable domain of TCR clone 16174 (TRBV7-9, TRBJ2-7)
CASSCAGAYEQYF

SEQ ID NO: 32349 - protein, 14 aa, Homo sapiens
  CDR3 for alpha chain variable domain of TCR clone 16175 (TRAV38-1, TRAJ40)
CALRPTSGTYKYLF

SEQ ID NO: 32350 - protein, 14 aa, Homo sapiens
  CDR3 for beta chain variable domain of TCR clone 16175 (TRBV25-1, TRBJ1-1)
CASTHLGGNTEAFF

SEQ ID NO: 32351 - protein, 18 aa, Homo sapiens
  CDR3 for alpha chain variable domain of TCR clone 16176 (TRAV21, TRAJ52)
CAVRPSPAGGTSYGKLTF

SEQ ID NO: 32352 - protein, 15 aa, Homo sapiens
  CDR3 for beta chain variable domain of TCR clone 16176 (TRBV6-6, TRBJ2-7)
CASSYSYGGSYEQYF

SEQ ID NO: 32353 - protein, 18 aa, Homo sapiens
  CDR3 for alpha chain variable domain of TCR clone 16177 (TRAV21, TRAJ52)
CAVRPSPAGGTSYGKLTF

SEQ ID NO: 32354 - protein, 20 aa, Homo sapiens
  CDR3 for beta chain variable domain of TCR clone 16177 (TRBV28, TRBJ2-1)
CASTPIGRSPGLAGGNEQFF

SEQ ID NO: 32355 - protein, 18 aa, Homo sapiens
  CDR3 for alpha chain variable domain of TCR clone 16178 (TRAV13-1, TRAJ52)
CAASKRSAGGTSYGKLTF

SEQ ID NO: 32356 - protein, 13 aa, Homo sapiens
  CDR3 for beta chain variable domain of TCR clone 16178 (TRBV12-4, TRBJ1-2)
CASSLQQGKGYTF

SEQ ID NO: 32357 - protein, 16 aa, Homo sapiens
  CDR3 for alpha chain variable domain of TCR clone 16179 (TRAV8-2, TRAJ50)
CVVSDHMKTSYDKVIF

SEQ ID NO: 32358 - protein, 15 aa, Homo sapiens
  CDR3 for beta chain variable domain of TCR clone 16179 (TRBV7-2, TRBJ2-5)
CASSVASGSGETQYF

SEQ ID NO: 32359 - protein, 14 aa, Homo sapiens
  CDR3 for alpha chain variable domain of TCR clone 16180 (TRAV12-2, TRAJ40)
CAVKIPSGTYKYIF

SEQ ID NO: 32360 - protein, 14 aa, Homo sapiens
  CDR3 for beta chain variable domain of TCR clone 16180 (TRBV20-1, TRBJ1-1)
CSAQTRIGGNEAFF

SEQ ID NO: 32361 - protein, 14 aa, Homo sapiens
  CDR3 for alpha chain variable domain of TCR clone 16181 (TRAV2, TRAJ22)
CAVVRGGSARQLTF

SEQ ID NO: 32362 - protein, 12 aa, Homo sapiens
  CDR3 for beta chain variable domain of TCR clone 16181 (TRBV19, TRBJ2-1)
CASSMQDTEQFF

SEQ ID NO: 32363 - protein, 12 aa, Homo sapiens
  CDR3 for alpha chain variable domain of TCR clone 16182 (TRAV12-3, TRAJ17)
CAMTLTRNKLTF

SEQ ID NO: 32364 - protein, 15 aa, Homo sapiens
  CDR3 for beta chain variable domain of TCR clone 16182 (TRBV20-1, TRBJ2-7)
CSARDRVSGMDEQYF

SEQ ID NO: 32365 - protein, 15 aa, Homo sapiens
  CDR3 for alpha chain variable domain of TCR clone 16183 (TRAV13-1, TRAJ3)
CAASKLASSASKITF

SEQ ID NO: 32366 - protein, 16 aa, Homo sapiens
  CDR3 for beta chain variable domain of TCR clone 16183 (TRBV25-1, TRBJ1-5)
CASGAPTVNSNQPQHF

SEQ ID NO: 32367 - protein, 17 aa, Homo sapiens
  CDR3 for alpha chain variable domain of TCR clone 16184 (TRAV4, TRAJ42)
CLVGVLNYGGGQGNLIF

SEQ ID NO: 32368 - protein, 12 aa, Homo sapiens
  CDR3 for beta chain variable domain of TCR clone 16184 (TRBV20-1, TRBJ2-1)
CSAQYTYNEQFF

SEQ ID NO: 32369 - protein, 10 aa, Homo sapiens
  CDR3 for alpha chain variable domain of TCR clone 16185 (TRAV16, TRAJ22)
SATYLRQLTF

SEQ ID NO: 32370 - protein, 15 aa, Homo sapiens
  CDR3 for beta chain variable domain of TCR clone 16185 (TRBV7-9, TRBJ1-6)
CASSSPGRGNSPLHF

SEQ ID NO: 32371 - protein, 13 aa, Homo sapiens
  CDR3 for alpha chain variable domain of TCR clone 16186 (TRAV3, TRAJ15)
CAVRDQAGTALIF

SEQ ID NO: 32372 - protein, 15 aa, Homo sapiens
  CDR3 for beta chain variable domain of TCR clone 16186 (TRBV11-1, TRBJ2-7)
CASSLNDGASYEQYF

SEQ ID NO: 32373 - protein, 16 aa, Homo sapiens
  CDR3 for alpha chain variable domain of TCR clone 16187 (TRAV30, TRAJ24)
CGTEIVDADSWGKFQF

SEQ ID NO: 32374 - protein, 18 aa, Homo sapiens
  CDR3 for beta chain variable domain of TCR clone 16187 (TRBV12-5, TRBJ2-5)
CASGSRTHKRPSTSGQAR

SEQ ID NO: 32375 - protein, 14 aa, Homo sapiens
  CDR3 for alpha chain variable domain of TCR clone 16188 (TRAV17, TRAJ54)
CATDANQGAQELVF

SEQ ID NO: 32376 - protein, 12 aa, Homo sapiens
  CDR3 for beta chain variable domain of TCR clone 16188 (TRBV6-3, TRBJ2-1)
CASSGSYNEQFF

SEQ ID NO: 32377 - protein, 15 aa, Homo sapiens
  CDR3 for alpha chain variable domain of TCR clone 16189 (TRAV26-1, TRAJ22)
CIVRVSFWFCKATDL

SEQ ID NO: 32378 - protein, 13 aa, Homo sapiens
  CDR3 for beta chain variable domain of TCR clone 16189 (TRBV7-9, TRBJ1-2)
CASSLKQDYGYTF

SEQ ID NO: 32379 - protein, 13 aa, Homo sapiens
  CDR3 for alpha chain variable domain of TCR clone 16190 (TRAV8-3, TRAJ28)
CAVGAVGSYQLTF

SEQ ID NO: 32380 - protein, 15 aa, Homo sapiens
  CDR3 for beta chain variable domain of TCR clone 16190 (TRBV7-9, TRBJ1-5)
CASSQGHLPNQPQHF

SEQ ID NO: 32381 - protein, 14 aa, Homo sapiens
  CDR3 for alpha chain variable domain of TCR clone 16191 (TRAV26-1, TRAJ34)
CIVRVAYNTDKLIF

SEQ ID NO: 32382 - protein, 15 aa, Homo sapiens
  CDR3 for beta chain variable domain of TCR clone 16191 (TRBV20-1, TRBJ2-7)
YSARVPAAYFYEQYF

SEQ ID NO: 32383 - protein, 12 aa, Homo sapiens
  CDR3 for alpha chain variable domain of TCR clone 16192 (TRAV8-3, TRAJ20)
CAVGANDYKLSS

SEQ ID NO: 32384 - protein, 16 aa, Homo sapiens
  CDR3 for beta chain variable domain of TCR clone 16192 (TRBV19, TRBJ2-2)
CASRSPGTGATGELFF

SEQ ID NO: 32385 - protein, 15 aa, Homo sapiens
  CDR3 for alpha chain variable domain of TCR clone 16193 (TRAV26-1, TRAJ29)
CIVRVEGSGNTPLVF

SEQ ID NO: 32386 - protein, 15 aa, Homo sapiens
  CDR3 for beta chain variable domain of TCR clone 16193 (TRBV7-9, TRBJ1-5)
CASIQGHQPNQPQHF

SEQ ID NO: 32387 - protein, 14 aa, Homo sapiens
  CDR3 for alpha chain variable domain of TCR clone 16194 (TRAV20, TRAJ42)
CAVQAGGSQGNLIF

SEQ ID NO: 32388 - protein, 14 aa, Homo sapiens
  CDR3 for beta chain variable domain of TCR clone 16194 (TRBV28, TRBJ1-2)
CASRIQGANYGYTL

SEQ ID NO: 32389 - protein, 13 aa, Homo sapiens
  CDR3 for alpha chain variable domain of TCR clone 16195 (TRAV21, TRAJ27)
CAARPGNAGKSTL

SEQ ID NO: 32390 - protein, 20 aa, Homo sapiens
  CDR3 for beta chain variable domain of TCR clone 16195 (TRBV7-8, TRBJ2-2)
CASSHLFPGPTIHITGELFF

SEQ ID NO: 32391 - protein, 16 aa, Homo sapiens
  CDR3 for alpha chain variable domain of TCR clone 16196 (TRAV23/DV6, TRAJ9)
CAASIGGNTGGFKTIL

SEQ ID NO: 32392 - protein, 14 aa, Homo sapiens
  CDR3 for beta chain variable domain of TCR clone 16196 (TRBV9, TRBJ2-7)
CASSVGVGSYEQYF

SEQ ID NO: 32393 - protein, 15 aa, Homo sapiens
  CDR3 for alpha chain variable domain of TCR clone 16197 (TRAV26-1, TRAJ22)
CIVRVSFWFCKSTDL

SEQ ID NO: 32394 - protein, 13 aa, Homo sapiens
  CDR3 for beta chain variable domain of TCR clone 16197 (TRBV7-9, TRBJ1-2)
CASSLKQNYGYTF

SEQ ID NO: 32395 - protein, 13 aa, Homo sapiens
  CDR3 for alpha chain variable domain of TCR clone 16198 (TRAV1-1, TRAJ9)
FAAKNTGGFKTIF

SEQ ID NO: 32396 - protein, 14 aa, Homo sapiens
  CDR3 for beta chain variable domain of TCR clone 16198 (TRBV20-1, TRBJ2-1)
CSAQIGGSANEQFF

SEQ ID NO: 32397 - protein, 11 aa, Homo sapiens
  CDR3 for alpha chain variable domain of TCR clone 16199 (TRAV29/DV5, TRAJ37)
CATSNTGKLIF

SEQ ID NO: 32398 - protein, 12 aa, Homo sapiens
  CDR3 for beta chain variable domain of TCR clone 16199 (TRBV29-1, TRBJ2-3)
CSVTGGADTQYF

SEQ ID NO: 32399 - protein, 15 aa, Homo sapiens
  CDR3 for alpha chain variable domain of TCR clone 16200 (TRAV27, TRAJ38)
CAALRNAGNNRKLIW

SEQ ID NO: 32400 - protein, 13 aa, Homo sapiens
  CDR3 for beta chain variable domain of TCR clone 16200 (TRBV12-5, TRBJ2-3)
CASGDRQSDTQYF

SEQ ID NO: 32401 - protein, 11 aa, Homo sapiens
  CDR3 for alpha chain variable domain of TCR clone 16201 (TRAV21, TRAJ34)
CAVTNTDKLIF

SEQ ID NO: 32402 - protein, 13 aa, Homo sapiens
  CDR3 for beta chain variable domain of TCR clone 16201 (TRBV7-9, TRBJ1-2)
CASSLKQNYGYTF

SEQ ID NO: 32403 - protein, 14 aa, Homo sapiens
  CDR3 for alpha chain variable domain of TCR clone 16202 (TRAV1-2, TRAJ8)
CAVREDTGFQKLVF

SEQ ID NO: 32404 - protein, 12 aa, Homo sapiens
  CDR3 for beta chain variable domain of TCR clone 16202 (TRBV19, TRBJ1-2)
CASSPDVYGYTF

SEQ ID NO: 32405 - protein, 10 aa, Homo sapiens
  CDR3 for alpha chain variable domain of TCR clone 16203 (TRAV23/DV6, TRAJ57)
CAASSTLSQG

SEQ ID NO: 32406 - protein, 14 aa, Homo sapiens
  CDR3 for beta chain variable domain of TCR clone 16203 (TRBV25-1, TRBJ1-1)
CAGTHLGGNTEAFF

SEQ ID NO: 32407 - protein, 12 aa, Homo sapiens
  CDR3 for alpha chain variable domain of TCR clone 16204 (TRAV13-2, TRAJ23)
CAERHRGGKLIS

SEQ ID NO: 32408 - protein, 16 aa, Homo sapiens
  CDR3 for beta chain variable domain of TCR clone 16204 (TRBV20-1, TRBJ1-4)
CSAPGQGLLTNEKLFF

SEQ ID NO: 32409 - protein, 14 aa, Homo sapiens
  CDR3 for alpha chain variable domain of TCR clone 16205 (TRAV3, TRAJ21)
CAVESQANFNKFYF

SEQ ID NO: 32410 - protein, 18 aa, Homo sapiens
  CDR3 for beta chain variable domain of TCR clone 16205 (TRBV7-9, TRBJ2-1)
CASSLAVSGTSGRNEQFF

SEQ ID NO: 32411 - protein, 18 aa, Homo sapiens
  CDR3 for alpha chain variable domain of TCR clone 16206 (TRAV26-2, TRAJ45)
CILRVDKYSGGGADGLTF

SEQ ID NO: 32412 - protein, 16 aa, Homo sapiens
  CDR3 for beta chain variable domain of TCR clone 16206 (TRBV2, TRBJ1-4)
CASNFLQGATNEKLFF

SEQ ID NO: 32413 - protein, 10 aa, Homo sapiens
  CDR3 for alpha chain variable domain of TCR clone 16207 (TRAV12-3, TRAJ49)
CAMNDDQFYF

SEQ ID NO: 32414 - protein, 13 aa, Homo sapiens
  CDR3 for beta chain variable domain of TCR clone 16207 (TRBV12-4, TRBJ1-1)
CASSPGTGFEASF

SEQ ID NO: 32415 - protein, 11 aa, Homo sapiens
  CDR3 for alpha chain variable domain of TCR clone 16208 (TRAV29/DV5, TRAJ49)
CAAFTGNQFYF

SEQ ID NO: 32416 - protein, 15 aa, Homo sapiens
  CDR3 for beta chain variable domain of TCR clone 16208 (TRBV4-2, TRBJ1-1)
CASSQLQGASAEAFF

SEQ ID NO: 32417 - protein, 12 aa, Homo sapiens
  CDR3 for alpha chain variable domain of TCR clone 16209 (TRAV21, TRAJ33)
CAKMDRNYQLIW

SEQ ID NO: 32418 - protein, 14 aa, Homo sapiens
  CDR3 for beta chain variable domain of TCR clone 16209 (TRBV2, TRBJ2-7)
CASSLTSGGYEQYF

SEQ ID NO: 32419 - protein, 13 aa, Homo sapiens
  CDR3 for alpha chain variable domain of TCR clone 16210 (TRAV29/DV5, TRAJ31)
CAASRNNNARLMF

SEQ ID NO: 32420 - protein, 14 aa, Homo sapiens
  CDR3 for beta chain variable domain of TCR clone 16210 (TRBV12-4, TRBJ2-3)
CASSLGQGTDTQYF

SEQ ID NO: 32421 - protein, 14 aa, Homo sapiens
  CDR3 for alpha chain variable domain of TCR clone 16211 (TRAV2, TRAJ9)
CAVEDRSGGFKTIF

SEQ ID NO: 32422 - protein, 15 aa, Homo sapiens
  CDR3 for beta chain variable domain of TCR clone 16211 (TRBV19, TRBJ1-1)
CASTSGQIQNTEAFF

SEQ ID NO: 32423 - protein, 23 aa, Homo sapiens
  CDR3 for alpha chain variable domain of TCR clone 16212 (TRAV3, TRAJ38)
CAVRDCLNAGNNHIQNPDPAVYQ

SEQ ID NO: 32424 - protein, 19 aa, Homo sapiens
  CDR3 for beta chain variable domain of TCR clone 16212 (TRBV7-2, TRBJ2-3)
CASSFLSRNWGGGTDTQYF

SEQ ID NO: 32425 - protein, 12 aa, Homo sapiens
  CDR3 for alpha chain variable domain of TCR clone 16213 (TRAV8-3, TRAJ20)
CAVGANDYKLSF

SEQ ID NO: 32426 - protein, 16 aa, Homo sapiens
  CDR3 for beta chain variable domain of TCR clone 16213 (TRBV19, TRBJ2-2)
CASRSPGTGAIGELFF

SEQ ID NO: 32427 - protein, 16 aa, Homo sapiens
  CDR3 for alpha chain variable domain of TCR clone 16214 (TRAV23/DV6, TRAJ9)
CAAGIGGNTGGFKTIF

SEQ ID NO: 32428 - protein, 14 aa, Homo sapiens
  CDR3 for beta chain variable domain of TCR clone 16214 (TRBV9, TRBJ2-7)
CASSVGVGSYEQYF

SEQ ID NO: 32429 - protein, 14 aa, Homo sapiens
  CDR3 for alpha chain variable domain of TCR clone 16215 (TRAV12-2, TRAJ5)
CAVNRSAGRRALTF

SEQ ID NO: 32430 - protein, 12 aa, Homo sapiens
  CDR3 for beta chain variable domain of TCR clone 16215 (TRBV19, TRBJ1-5)
CASSIAQQPQHF

SEQ ID NO: 32431 - protein, 14 aa, Homo sapiens
  CDR3 for alpha chain variable domain of TCR clone 16216 (TRAV1-2, TRAJ8)
CAVREDTGFQKLVF

SEQ ID NO: 32432 - protein, 15 aa, Homo sapiens
  CDR3 for beta chain variable domain of TCR clone 16216 (TRBV6-3, TRBJ2-7)
CASSSPGTVFYEQYC

SEQ ID NO: 32433 - protein, 13 aa, Homo sapiens
  CDR3 for alpha chain variable domain of TCR clone 16217 (TRAV22, TRAJ43)
CAVVAFDNNDMRF

SEQ ID NO: 32434 - protein, 14 aa, Homo sapiens
  CDR3 for beta chain variable domain of TCR clone 16217 (TRBV2, TRBJ2-7)
CASSVLGAAYEQYF

SEQ ID NO: 32435 - protein, 11 aa, Homo sapiens
  CDR3 for alpha chain variable domain of TCR clone 16218 (TRAV17, TRAJ9)
CATTGGFKTTF

SEQ ID NO: 32436 - protein, 14 aa, Homo sapiens
  CDR3 for beta chain variable domain of TCR clone 16218 (TRBV7-9, TRBJ2-2)
CASSGLADTGELFF

SEQ ID NO: 32437 - protein, 13 aa, Homo sapiens
  CDR3 for alpha chain variable domain of TCR clone 16219 (TRAV13-2, TRAJ13)
CAERPGGYQKVTF

SEQ ID NO: 32438 - protein, 13 aa, Homo sapiens
  CDR3 for beta chain variable domain of TCR clone 16219 (TRBV10-3, TRBJ2-7)
CASKLAVNYEQYF

SEQ ID NO: 32439 - protein, 13 aa, Homo sapiens
  CDR3 for alpha chain variable domain of TCR clone 16220 (TRAV12-1, TRAJ9)
CVVRNTGGFKTIF

SEQ ID NO: 32440 - protein, 14 aa, Homo sapiens
  CDR3 for beta chain variable domain of TCR clone 16220 (TRBV20-1, TRBJ2-1)
CSAQIGGPANEQFF

SEQ ID NO: 32441 - protein, 14 aa, Homo sapiens
  CDR3 for alpha chain variable domain of TCR clone 16221 (TRAV2, TRAJ41)
CAVGPSNSGYALNF

SEQ ID NO: 32442 - protein, 13 aa, Homo sapiens
  CDR3 for beta chain variable domain of TCR clone 16221 (TRBV4-1, TRBJ2-1)
CASSQEVQYEQFF

SEQ ID NO: 32443 - protein, 12 aa, Homo sapiens
  CDR3 for alpha chain variable domain of TCR clone 16222 (TRAV1-1, TRAJ8)
CAGGTGFQKLVF

SEQ ID NO: 32444 - protein, 15 aa, Homo sapiens
  CDR3 for beta chain variable domain of TCR clone 16222 (TRBV7-9, TRBJ1-4)
CASSRTGGFNEKLLF

SEQ ID NO: 32445 - protein, 14 aa, Homo sapiens
  CDR3 for alpha chain variable domain of TCR clone 16223 (TRAV12-2, TRAJ17)
CAVLFKAAGDKLTF

SEQ ID NO: 32446 - protein, 17 aa, Homo sapiens
  CDR3 for beta chain variable domain of TCR clone 16223 (TRBV20-1, TRBJ2-2)
CSASGSGQGGLTGELFF

SEQ ID NO: 32447 - protein, 17 aa, Homo sapiens
  CDR3 for alpha chain variable domain of TCR clone 16224 (TRAV3, TRAJ6)
CAVRDGPGAGGSYIPTF

SEQ ID NO: 32448 - protein, 15 aa, Homo sapiens
  CDR3 for beta chain variable domain of TCR clone 16224 (TRBV11-3, TRBJ2-7)
CASSPGPASSYEQYF

SEQ ID NO: 32449 - protein, 17 aa, Homo sapiens
  CDR3 for alpha chain variable domain of TCR clone 16225 (TRAV3, TRAJ38)
CAVRGCLNAGNNRKLIW

SEQ ID NO: 32450 - protein, 14 aa, Homo sapiens
  CDR3 for beta chain variable domain of TCR clone 16225 (TRBV5-5, TRBJ1-5)
CASSGQGVDQPQHF

SEQ ID NO: 32451 - protein, 17 aa, Homo sapiens
  CDR3 for alpha chain variable domain of TCR clone 16226 (TRAV13-1, TRAJ44)
CAASRGAALPVNSPLGL

SEQ ID NO: 32452 - protein, 14 aa, Homo sapiens
  CDR3 for beta chain variable domain of TCR clone 16226 (TRBV7-2, TRBJ2-5)
CASSPRGSSETQYF

SEQ ID NO: 32453 - protein, 14 aa, Homo sapiens
  CDR3 for alpha chain variable domain of TCR clone 16227 (TRAV12-3, TRAJ10)
SHLPLTGGGNKLTF

SEQ ID NO: 32454 - protein, 13 aa, Homo sapiens
  CDR3 for beta chain variable domain of TCR clone 16227 (TRBV7-7, TRBJ2-3)
CASSLSRADTQYF

SEQ ID NO: 32455 - protein, 16 aa, Homo sapiens
  CDR3 for alpha chain variable domain of TCR clone 16228 (TRAV27, TRAJ13)
CAGAKSDSGGYQKVTF

SEQ ID NO: 32456 - protein, 15 aa, Homo sapiens
  CDR3 for beta chain variable domain of TCR clone 16228 (TRBV29-1, TRBJ2-1)
CSVGRHALFYNEQFF

SEQ ID NO: 32457 - protein, 13 aa, Homo sapiens
  CDR3 for alpha chain variable domain of TCR clone 16229 (TRAV1-2, TRAJ9)
CAALNTGGFKTIF

SEQ ID NO: 32458 - protein, 13 aa, Homo sapiens
  CDR3 for beta chain variable domain of TCR clone 16229 (TRBV19, TRBJ1-2)
CASSVSGQDGYTF

SEQ ID NO: 32459 - protein, 12 aa, Homo sapiens
  CDR3 for alpha chain variable domain of TCR clone 16230 (TRAV13-1, TRAJ21)
CAAKEGFNKFYF

SEQ ID NO: 32460 - protein, 17 aa, Homo sapiens
  CDR3 for beta chain variable domain of TCR clone 16230 (TRBV11-2, TRBJ2-1)
CASSLYPPGVEYNEQFF

SEQ ID NO: 32461 - protein, 14 aa, Homo sapiens
  CDR3 for alpha chain variable domain of TCR clone 16231 (TRAV26-1, TRAJ39)
CIVRGSRAGNMLTF

SEQ ID NO: 32462 - protein, 15 aa, Homo sapiens
  CDR3 for beta chain variable domain of TCR clone 16231 (TRBV7-9, TRBJ1-5)
CASSQGHQPNQPQHL

SEQ ID NO: 32463 - protein, 12 aa, Homo sapiens
  CDR3 for alpha chain variable domain of TCR clone 16232 (TRAV12-3, TRAJ17)
CAMTLTGNKLTF

SEQ ID NO: 32464 - protein, 12 aa, Homo sapiens
  CDR3 for beta chain variable domain of TCR clone 16232 (TRBV12-4, TRBJ2-7)
CASSLGGHEQYF

SEQ ID NO: 32465 - protein, 15 aa, Homo sapiens
  CDR3 for alpha chain variable domain of TCR clone 16233 (TRAV26-1, TRAJ29)
CIVRVEGSGNTPLVF

SEQ ID NO: 32466 - protein, 14 aa, Homo sapiens
  CDR3 for beta chain variable domain of TCR clone 16233 (TRBV18, TRBJ2-5)
CASSPGVSQETRYF

SEQ ID NO: 32467 - protein, 14 aa, Homo sapiens
  CDR3 for alpha chain variable domain of TCR clone 16234 (TRAV26-1, TRAJ39)
CIVRGSRAGNMLTV

SEQ ID NO: 32468 - protein, 15 aa, Homo sapiens
  CDR3 for beta chain variable domain of TCR clone 16234 (TRBV7-9, TRBJ1-5)
CASSQGHQPNQPQHF

SEQ ID NO: 32469 - protein, 13 aa, Homo sapiens
  CDR3 for alpha chain variable domain of TCR clone 16235 (TRAV21, TRAJ57)
CAVTQGGSETLVF

SEQ ID NO: 32470 - protein, 16 aa, Homo sapiens
  CDR3 for beta chain variable domain of TCR clone 16235 (TRBV29-1, TRBJ2-7)
CSVEDAEDGTAYEQYF

SEQ ID NO: 32471 - protein, 14 aa, Homo sapiens
  CDR3 for alpha chain variable domain of TCR clone 16236 (TRAV35, TRAJ22)
CAGLRPGSSRQLTF

SEQ ID NO: 32472 - protein, 15 aa, Homo sapiens
  CDR3 for beta chain variable domain of TCR clone 16236 (TRBV12-4, TRBJ2-5)
CASSPPTGLQETQYF

SEQ ID NO: 32473 - protein, 14 aa, Homo sapiens
  CDR3 for alpha chain variable domain of TCR clone 16237 (TRAV13-1, TRAJ35)
CAASKGGFGNVLHC

SEQ ID NO: 32474 - protein, 16 aa, Homo sapiens
  CDR3 for beta chain variable domain of TCR clone 16237 (TRBV24-1, TRBJ2-3)
CATSDAISGITDTQYF

SEQ ID NO: 32475 - protein, 12 aa, Homo sapiens
  CDR3 for alpha chain variable domain of TCR clone 16238 (TRAV21, TRAJ13)
PGPSEGYQKVTF

SEQ ID NO: 32476 - protein, 15 aa, Homo sapiens
  CDR3 for beta chain variable domain of TCR clone 16238 (TRBV7-9, TRBJ1-6)
CASSSPGRGNSPLHF

SEQ ID NO: 32477 - protein, 13 aa, Homo sapiens
  CDR3 for alpha chain variable domain of TCR clone 16239 (TRAV10, TRAJ40)
CVVSALGTYKYIF

SEQ ID NO: 32478 - protein, 15 aa, Homo sapiens
  CDR3 for beta chain variable domain of TCR clone 16239 (TRBV27, TRBJ2-1)
RASSNGGGSSNEQFF

SEQ ID NO: 32479 - protein, 18 aa, Homo sapiens
  CDR3 for alpha chain variable domain of TCR clone 16240 (TRAV21, TRAJ52)
CAVRPSPAGGTSYGKLTF

SEQ ID NO: 32480 - protein, 17 aa, Homo sapiens
  CDR3 for beta chain variable domain of TCR clone 16240 (TRBV13, TRBJ2-3)
CASSLSRVAGERNTQYF

SEQ ID NO: 32481 - protein, 14 aa, Homo sapiens
  CDR3 for alpha chain variable domain of TCR clone 16241 (TRAV13-1, TRAJ35)
CAASKGGFGNVLHC

SEQ ID NO: 32482 - protein, 13 aa, Homo sapiens
  CDR3 for beta chain variable domain of TCR clone 16241 (TRBV7-3, TRBJ1-1)
CVSSQDWGAEAFF

SEQ ID NO: 32483 - protein, 11 aa, Homo sapiens
  CDR3 for alpha chain variable domain of TCR clone 16242 (TRAV2, TRAJ33)
CAVDSNYQLIW

SEQ ID NO: 32484 - protein, 15 aa, Homo sapiens
  CDR3 for beta chain variable domain of TCR clone 16242 (TRBV19, TRBJ1-2)
CASSVGQVPNYGYTF

SEQ ID NO: 32485 - protein, 13 aa, Homo sapiens
  CDR3 for alpha chain variable domain of TCR clone 16243 (TRAV2, TRAJ15)
CAVASQAGTALIF

SEQ ID NO: 32486 - protein, 16 aa, Homo sapiens
  CDR3 for beta chain variable domain of TCR clone 16243 (TRBV5-1, TRBJ1-1)
CASSSGGNSSNTEAFF

SEQ ID NO: 32487 - protein, 16 aa, Homo sapiens
  CDR3 for alpha chain variable domain of TCR clone 16244 (TRAV13-1, TRAJ58)
CAASSPYAPSGSRLTF

SEQ ID NO: 32488 - protein, 16 aa, Homo sapiens
  CDR3 for beta chain variable domain of TCR clone 16244 (TRBV11-2, TRBJ1-2)
CASSLDTGGADYGYTF

SEQ ID NO: 32489 - protein, 13 aa, Homo sapiens
  CDR3 for alpha chain variable domain of TCR clone 16245 (TRAV24, TRAJ53)
CAFGGGSNYKLTF

SEQ ID NO: 32490 - protein, 15 aa, Homo sapiens
  CDR3 for beta chain variable domain of TCR clone 16245 (TRBV4-1, TRBJ1-4)
CASSQTGGQAEKLFF

SEQ ID NO: 32491 - protein, 13 aa, Homo sapiens
  CDR3 for alpha chain variable domain of TCR clone 16246 (TRAV1-1, TRAJ9)
CAAKNTGGFKTIF

SEQ ID NO: 32492 - protein, 14 aa, Homo sapiens
  CDR3 for beta chain variable domain of TCR clone 16246 (TRBV20-1, TRBJ2-1)
CSAQIGGSDNEQFF

SEQ ID NO: 32493 - protein, 13 aa, Homo sapiens
  CDR3 for alpha chain variable domain of TCR clone 16247 (TRAV21, TRAJ57)
CAVTQGGSEKLVF

SEQ ID NO: 32494 - protein, 12 aa, Homo sapiens
  CDR3 for beta chain variable domain of TCR clone 16247 (TRBV11-2, TRBJ2-2)
CASSLGGGELFF

SEQ ID NO: 32495 - protein, 17 aa, Homo sapiens
  CDR3 for alpha chain variable domain of TCR clone 16248 (TRAV3, TRAJ6)
CAVRDGPRARGSYIPTF

SEQ ID NO: 32496 - protein, 20 aa, Homo sapiens
  CDR3 for beta chain variable domain of TCR clone 16248 (TRBV28, TRBJ2-1)
CASTPIGRSPGLAGGNEQFF

SEQ ID NO: 32497 - protein, 15 aa, Homo sapiens
  CDR3 for alpha chain variable domain of TCR clone 16249 (TRAV17, TRAJ57)
CATGPSQGGSEKLVF

SEQ ID NO: 32498 - protein, 13 aa, Homo sapiens
  CDR3 for beta chain variable domain of TCR clone 16249 (TRBV10-3, TRBJ2-7)
CASKLAVNYEQYF

SEQ ID NO: 32499 - protein, 13 aa, Homo sapiens
  CDR3 for alpha chain variable domain of TCR clone 16250 (TRAV17, TRAJ26)
CATVDNYGQNFVF

SEQ ID NO: 32500 - protein, 13 aa, Homo sapiens
  CDR3 for beta chain variable domain of TCR clone 16250 (TRBV7-9, TRBJ1-2)
CASSLKQNYGYTF

SEQ ID NO: 32501 - protein, 14 aa, Homo sapiens
  CDR3 for alpha chain variable domain of TCR clone 16251 (TRAV35, TRAJ22)
CAGLRPGSARQLTF

SEQ ID NO: 32502 - protein, 15 aa, Homo sapiens
  CDR3 for beta chain variable domain of TCR clone 16251 (TRBV12-4, TRBJ2-5)
CTSSPPTGLQETQYF

SEQ ID NO: 32503 - protein, 15 aa, Homo sapiens
  CDR3 for alpha chain variable domain of TCR clone 16252 (TRAV12-3, TRAJ6)
CAMSATTGGSYIPTF

SEQ ID NO: 32504 - protein, 16 aa, Homo sapiens
  CDR3 for beta chain variable domain of TCR clone 16252 (TRBV20-1, TRBJ1-2)
CSASMGQGVANYGYNF

SEQ ID NO: 32505 - protein, 15 aa, Homo sapiens
  CDR3 for alpha chain variable domain of TCR clone 16253 (TRAV12-2, TRAJ20)
CAVKGGFGAETTVTV

SEQ ID NO: 32506 - protein, 13 aa, Homo sapiens
  CDR3 for beta chain variable domain of TCR clone 16253 (TRBV12-4, TRBJ2-7)
CASSPGQLYEQYF

SEQ ID NO: 32507 - protein, 14 aa, Homo sapiens
  CDR3 for alpha chain variable domain of TCR clone 16254 (TRAV12-2, TRAJ13)
CAVKKTGGYQKVTF

SEQ ID NO: 32508 - protein, 13 aa, Homo sapiens
  CDR3 for beta chain variable domain of TCR clone 16254 (TRBV12-4, TRBJ1-2)
CTSVSAVSYGYTF

SEQ ID NO: 32509 - protein, 10 aa, Homo sapiens
  CDR3 for alpha chain variable domain of TCR clone 16255 (TRAV26-1, TRAJ40)
CIAGTYKYTF

SEQ ID NO: 32510 - protein, 15 aa, Homo sapiens
  CDR3 for beta chain variable domain of TCR clone 16255 (TRBV19, TRBJ2-1)
CASSSPGVPLDEQFF

SEQ ID NO: 32511 - protein, 15 aa, Homo sapiens
  CDR3 for alpha chain variable domain of TCR clone 16256 (TRAV12-1, TRAJ48)
CVVNPLGFGNEKLTF

SEQ ID NO: 32512 - protein, 15 aa, Homo sapiens
  CDR3 for beta chain variable domain of TCR clone 16256 (TRBV20-1, TRBJ2-1)
CSATSSGTSGGEQFF

SEQ ID NO: 32513 - protein, 17 aa, Homo sapiens
  CDR3 for alpha chain variable domain of TCR clone 16257 (TRAV23/DV6, TRAJ57)
CAASSTLSQGGSEKLVF

SEQ ID NO: 32514 - protein, 14 aa, Homo sapiens
  CDR3 for beta chain variable domain of TCR clone 16257 (TRBV25-1, TRBJ1-1)
CASTHLGGNTEASF

SEQ ID NO: 32515 - protein, 14 aa, Homo sapiens
  CDR3 for alpha chain variable domain of TCR clone 16258 (TRAV1-2, TRAJ8)
CAVREDTGFQKLEF

SEQ ID NO: 32516 - protein, 15 aa, Homo sapiens
  CDR3 for beta chain variable domain of TCR clone 16258 (TRBV6-3, TRBJ2-7)
CASSSPGTVFYEQYF

SEQ ID NO: 32517 - protein, 14 aa, Homo sapiens
  CDR3 for alpha chain variable domain of TCR clone 16259 (TRAV3, TRAJ21)
CAVRDPYNFNKFYF

SEQ ID NO: 32518 - protein, 15 aa, Homo sapiens
  CDR3 for beta chain variable domain of TCR clone 16259 (TRBV29-1, TRBJ2-5)
CSVEGLAVNQETQYF

SEQ ID NO: 32519 - protein, 14 aa, Homo sapiens
  CDR3 for alpha chain variable domain of TCR clone 16260 (TRAV8-3, TRAJ4)
CAVGTAGGYNKLIF

SEQ ID NO: 32520 - protein, 15 aa, Homo sapiens
  CDR3 for beta chain variable domain of TCR clone 16260 (TRBV6-5, TRBJ2-1)
CASSYDAGAGNEQFF

SEQ ID NO: 32521 - protein, 14 aa, Homo sapiens
  CDR3 for alpha chain variable domain of TCR clone 16261 (TRAV17, TRAJ22)
CATVLSGSARQLTF

SEQ ID NO: 32522 - protein, 14 aa, Homo sapiens
  CDR3 for beta chain variable domain of TCR clone 16261 (TRBV12-4, TRBJ2-5)
CASSLGDRGETQYF

SEQ ID NO: 32523 - protein, 17 aa, Homo sapiens
  CDR3 for alpha chain variable domain of TCR clone 16262 (TRAV3, TRAJ6)
CAVRDGPRAGGSYIPTF

SEQ ID NO: 32524 - protein, 14 aa, Homo sapiens
  CDR3 for beta chain variable domain of TCR clone 16262 (TRBV7-9, TRBJ2-1)
CASSPRDSLYEQFF

SEQ ID NO: 32525 - protein, 11 aa, Homo sapiens
  CDR3 for alpha chain variable domain of TCR clone 16263 (TRAV17, TRAJ9)
CATTGGFKTIF

SEQ ID NO: 32526 - protein, 14 aa, Homo sapiens
  CDR3 for beta chain variable domain of TCR clone 16263 (TRBV7-9, TRBJ2-2)
CAGSGLADTGELFF

SEQ ID NO: 32527 - protein, 15 aa, Homo sapiens
  CDR3 for alpha chain variable domain of TCR clone 16264 (TRAV17, TRAJ57)
CATGTSQGGSEKLVF

SEQ ID NO: 32528 - protein, 16 aa, Homo sapiens
  CDR3 for beta chain variable domain of TCR clone 16264 (TRBV12-4, TRBJ1-5)
CASSRPVGGSNQPQHF

SEQ ID NO: 32529 - protein, 14 aa, Homo sapiens
  CDR3 for alpha chain variable domain of TCR clone 16265 (TRAV20, TRAJ20)
CAVQAGSNDYKLSF

SEQ ID NO: 32530 - protein, 16 aa, Homo sapiens
  CDR3 for beta chain variable domain of TCR clone 16265 (TRBV7-3, TRBJ2-2)
CASSLKRGTLSGELFF

SEQ ID NO: 32531 - protein, 12 aa, Homo sapiens
  CDR3 for alpha chain variable domain of TCR clone 16266 (TRAV2, TRAJ31)
CAVEDNNARLMF

SEQ ID NO: 32532 - protein, 15 aa, Homo sapiens
  CDR3 for beta chain variable domain of TCR clone 16266 (TRBV10-3, TRBJ2-1)
CHQWSGDGGGGEQFF

SEQ ID NO: 32533 - protein, 14 aa, Homo sapiens
  CDR3 for alpha chain variable domain of TCR clone 16267 (TRAV29/DV5, TRAJ36)
CAARRKTGANNLLF

SEQ ID NO: 32534 - protein, 14 aa, Homo sapiens
  CDR3 for beta chain variable domain of TCR clone 16267 (TRBV12-5, TRBJ2-5)
CASGSRTHQETQYF

SEQ ID NO: 32535 - protein, 14 aa, Homo sapiens
  CDR3 for alpha chain variable domain of TCR clone 16268 (TRAV26-1, TRAJ34)
CIVRVAYNTDKLIF

SEQ ID NO: 32536 - protein, 15 aa, Homo sapiens
  CDR3 for beta chain variable domain of TCR clone 16268 (TRBV20-1, TRBJ2-7)
CSARVPAAYFYEKYF

SEQ ID NO: 32537 - protein, 22 aa, Homo sapiens
  CDR3 for alpha chain variable domain of TCR clone 16269 (TRAV27, TRAJ38)
CAARRNAGNNHIQNPDPAVYQL

SEQ ID NO: 32538 - protein, 12 aa, Homo sapiens
  CDR3 for beta chain variable domain of TCR clone 16269 (TRBV29-1, TRBJ2-3)
CSVTGGADTQYF

SEQ ID NO: 32539 - protein, 14 aa, Homo sapiens
  CDR3 for alpha chain variable domain of TCR clone 16270 (TRAV26-1, TRAJ54)
CIVRRTQGAQKLVF

SEQ ID NO: 32540 - protein, 23 aa, Homo sapiens
  CDR3 for beta chain variable domain of TCR clone 16270 (TRBV7-8, TRBJ2-3)
CASRNSGTSGKNWLAQIRSILAQ

SEQ ID NO: 32541 - protein, 14 aa, Homo sapiens
  CDR3 for alpha chain variable domain of TCR clone 16271 (TRAV12-2, TRAJ40)
CAVKIPSGTYKYIF

SEQ ID NO: 32542 - protein, 14 aa, Homo sapiens
  CDR3 for beta chain variable domain of TCR clone 16271 (TRBV20-1, TRBJ1-1)
CSAQTRIEGTEAFF

SEQ ID NO: 32543 - protein, 14 aa, Homo sapiens
  CDR3 for alpha chain variable domain of TCR clone 16272 (TRAV12-1, TRAJ12)
CVVTRMDSSYKLIF

SEQ ID NO: 32544 - protein, 13 aa, Homo sapiens
  CDR3 for beta chain variable domain of TCR clone 16272 (TRBV20-1, TRBJ1-1)
CSARGGGDTEAFF

SEQ ID NO: 32545 - protein, 14 aa, Homo sapiens
  CDR3 for alpha chain variable domain of TCR clone 16273 (TRAV12-2, TRAJ13)
CAVKKTGGYQKVTF

SEQ ID NO: 32546 - protein, 13 aa, Homo sapiens
  CDR3 for beta chain variable domain of TCR clone 16273 (TRBV7-2, TRBJ2-2)
CASSLAVTGELFF

SEQ ID NO: 32547 - protein, 14 aa, Homo sapiens
  CDR3 for alpha chain variable domain of TCR clone 16274 (TRAV12-1, TRAJ17)
CVVNYKAAGNKLTF

SEQ ID NO: 32548 - protein, 17 aa, Homo sapiens
  CDR3 for beta chain variable domain of TCR clone 16274 (TRBV20-1, TRBJ2-1)
CSASSSGIAGSYNEQFF

SEQ ID NO: 32549 - protein, 13 aa, Homo sapiens
  CDR3 for alpha chain variable domain of TCR clone 16275 (TRAV8-2, TRAJ26)
CVVTLLLGSEFCL

SEQ ID NO: 32550 - protein, 15 aa, Homo sapiens
  CDR3 for beta chain variable domain of TCR clone 16275 (TRBV11-2, TRBJ2-2)
CASSSDRVNAGELFF

SEQ ID NO: 32551 - protein, 17 aa, Homo sapiens
  CDR3 for alpha chain variable domain of TCR clone 16276 (TRAV23/DV6, TRAJ57)
WAASSTLSQGGSEKLVF

SEQ ID NO: 32552 - protein, 14 aa, Homo sapiens
  CDR3 for beta chain variable domain of TCR clone 16276 (TRBV25-1, TRBJ1-1)
CASTHLGGNTEAFF

SEQ ID NO: 32553 - protein, 13 aa, Homo sapiens
  CDR3 for alpha chain variable domain of TCR clone 16277 (TRAV17, TRAJ9)
CATDYTGGFKTIF

SEQ ID NO: 32554 - protein, 16 aa, Homo sapiens
  CDR3 for beta chain variable domain of TCR clone 16277 (TRBV7-7, TRBJ2-1)
CASSLASGTSYNEQLF

SEQ ID NO: 32555 - protein, 16 aa, Homo sapiens
  CDR3 for alpha chain variable domain of TCR clone 16278 (TRAV3, TRAJ40)
CAVRDRIASGTYKYIF

SEQ ID NO: 32556 - protein, 14 aa, Homo sapiens
  CDR3 for beta chain variable domain of TCR clone 16278 (TRBV4-1, TRBJ1-6)
CASSPGSDSSPLHF

SEQ ID NO: 32557 - protein, 11 aa, Homo sapiens
  CDR3 for alpha chain variable domain of TCR clone 16279 (TRAV12-3, TRAJ43)
CAVSVSNDMRF

SEQ ID NO: 32558 - protein, 13 aa, Homo sapiens
  CDR3 for beta chain variable domain of TCR clone 16279 (TRBV20-1, TRBJ1-1)
CSAPLGGGTEAFF

SEQ ID NO: 32559 - protein, 14 aa, Homo sapiens
  CDR3 for alpha chain variable domain of TCR clone 16280 (TRAV12-1, TRAJ12)
CVVTRMDSSYKLIF

SEQ ID NO: 32560 - protein, 16 aa, Homo sapiens
  CDR3 for beta chain variable domain of TCR clone 16280 (TRBV4-1, TRBJ2-7)
CASSPVAGGTSSTSGR

SEQ ID NO: 32561 - protein, 14 aa, Homo sapiens
  CDR3 for alpha chain variable domain of TCR clone 16281 (TRAV12-1, TRAJ17)
CVVNYKAAGNKLTF

SEQ ID NO: 32562 - protein, 17 aa, Homo sapiens
  CDR3 for beta chain variable domain of TCR clone 16281 (TRBV20-1, TRBJ2-1)
CSASSLGLAGSYNEQFF

SEQ ID NO: 32563 - protein, 10 aa, Homo sapiens
  CDR3 for alpha chain variable domain of TCR clone 16282 (TRAV23/DV6, TRAJ57)
CAASSILSQG

SEQ ID NO: 32564 - protein, 14 aa, Homo sapiens
  CDR3 for beta chain variable domain of TCR clone 16282 (TRBV25-1, TRBJ1-1)
CASTHLGGNTEAFF

SEQ ID NO: 32565 - protein, 12 aa, Homo sapiens
  CDR3 for alpha chain variable domain of TCR clone 16283 (TRAV12-3, TRAJ17)
CAMTLTGNKLTF

SEQ ID NO: 32566 - protein, 15 aa, Homo sapiens
  CDR3 for beta chain variable domain of TCR clone 16283 (TRBV10-2, TRBJ2-6)
CASSEQGTGANDLTF

SEQ ID NO: 32567 - protein, 14 aa, Homo sapiens
  CDR3 for alpha chain variable domain of TCR clone 16284 (TRAV12-3, TRAJ9)
CAMSPNTGGLKTIF

SEQ ID NO: 32568 - protein, 12 aa, Homo sapiens
  CDR3 for beta chain variable domain of TCR clone 16284 (TRBV19, TRBJ1-5)
CASSIAQQPQHF

SEQ ID NO: 32569 - protein, 15 aa, Homo sapiens
  CDR3 for alpha chain variable domain of TCR clone 16285 (TRAV8-4, TRAJ3)
CAVTGENLVQQCFQD

SEQ ID NO: 32570 - protein, 15 aa, Homo sapiens
  CDR3 for beta chain variable domain of TCR clone 16285 (TRBV6-5, TRBJ2-1)
CASSYDAGAGNEQFF

SEQ ID NO: 32571 - protein, 14 aa, Homo sapiens
  CDR3 for alpha chain variable domain of TCR clone 16286 (TRAV12-3, TRAJ10)
SHLPLTGGGNKLTF

SEQ ID NO: 32572 - protein, 15 aa, Homo sapiens
  CDR3 for beta chain variable domain of TCR clone 16286 (TRBV2, TRBJ2-1)
CASSELAGSYNEQFF

SEQ ID NO: 32573 - protein, 12 aa, Homo sapiens
  CDR3 for alpha chain variable domain of TCR clone 16287 (TRAV13-2, TRAJ23)
CAERHRGGKLIF

SEQ ID NO: 32574 - protein, 16 aa, Homo sapiens
  CDR3 for beta chain variable domain of TCR clone 16287 (TRBV20-1, TRBJ1-4)
CSAPGQGLLTNGKLFF

SEQ ID NO: 32575 - protein, 15 aa, Homo sapiens
  CDR3 for alpha chain variable domain of TCR clone 16288 (TRAV27, TRAJ38)
CAARRKAGNNRKLIW

SEQ ID NO: 32576 - protein, 13 aa, Homo sapiens
  CDR3 for beta chain variable domain of TCR clone 16288 (TRBV12-5, TRBJ2-3)
CASGDRQSDTQYF

SEQ ID NO: 32577 - protein, 15 aa, Homo sapiens
  CDR3 for alpha chain variable domain of TCR clone 16289 (TRAV26-1, TRAJ29)
CIVRVEGSGNTLLVF

SEQ ID NO: 32578 - protein, 15 aa, Homo sapiens
  CDR3 for beta chain variable domain of TCR clone 16289 (TRBV7-9, TRBJ1-5)
CASSQGHQPNQPQHF

SEQ ID NO: 32579 - protein, 13 aa, Homo sapiens
  CDR3 for alpha chain variable domain of TCR clone 16290 (TRAV2, TRAJ40)
CAVVTSGTYKYIF

SEQ ID NO: 32580 - protein, 15 aa, Homo sapiens
  CDR3 for beta chain variable domain of TCR clone 16290 (TRBV11-3, TRBJ2-3)
CASMKDGREGDTQYF

SEQ ID NO: 32581 - protein, 14 aa, Homo sapiens
  CDR3 for alpha chain variable domain of TCR clone 16291 (TRAV8-4, TRAJ13)
CAVTLSGGYQKVTF

SEQ ID NO: 32582 - protein, 14 aa, Homo sapiens
  CDR3 for beta chain variable domain of TCR clone 16291 (TRBV7-2, TRBJ1-2)
CASSQTGSTYGYTL

SEQ ID NO: 32583 - protein, 13 aa, Homo sapiens
  CDR3 for alpha chain variable domain of TCR clone 16292 (TRAV29/DV5, TRAJ29)
CAASAAGNTPLVF

SEQ ID NO: 32584 - protein, 15 aa, Homo sapiens
  CDR3 for beta chain variable domain of TCR clone 16292 (TRBV28, TRBJ2-1)
CASSIIAGGRSEQFF

SEQ ID NO: 32585 - protein, 19 aa, Homo sapiens
  CDR3 for alpha chain variable domain of TCR clone 16293 (TRAV27, TRAJ41)
CAVRTQIPDIQNPDPAVYQ

SEQ ID NO: 32586 - protein, 16 aa, Homo sapiens
  CDR3 for beta chain variable domain of TCR clone 16293 (TRBV5-1, TRBJ2-3)
CASSLGLAVYTDTQYF

SEQ ID NO: 32587 - protein, 17 aa, Homo sapiens
  CDR3 for alpha chain variable domain of TCR clone 16294 (TRAV3, TRAJ42)
CAVRYRDYGGSQGNLIF

SEQ ID NO: 32588 - protein, 15 aa, Homo sapiens
  CDR3 for beta chain variable domain of TCR clone 16294 (TRBV6-6, TRBJ2-7)
CASSYSYGGSYEQYF

SEQ ID NO: 32589 - protein, 16 aa, Homo sapiens
  CDR3 for alpha chain variable domain of TCR clone 16295 (TRAV4, TRAJ22)
CLVGDLYSGSARQLTF

SEQ ID NO: 32590 - protein, 19 aa, Homo sapiens
  CDR3 for beta chain variable domain of TCR clone 16295 (TRBV25-1, TRBJ2-2)
CAILVYRVDRGRKTGELFF

SEQ ID NO: 32591 - protein, 13 aa, Homo sapiens
  CDR3 for alpha chain variable domain of TCR clone 16296 (TRAV27, TRAJ41)
CAGEGNSGYAINF

SEQ ID NO: 32592 - protein, 14 aa, Homo sapiens
  CDR3 for beta chain variable domain of TCR clone 16296 (TRBV7-2, TRBJ1-1)
CASSFLTGTTEAFF

SEQ ID NO: 32593 - protein, 15 aa, Homo sapiens
  CDR3 for alpha chain variable domain of TCR clone 16297 (TRAV25, TRAJ52)
CAGRPGGTSHGKLTF

SEQ ID NO: 32594 - protein, 17 aa, Homo sapiens
  CDR3 for beta chain variable domain of TCR clone 16297 (TRBV7-8, TRBJ2-6)
CASSAGTGGAGANVLTF

SEQ ID NO: 32595 - protein, 14 aa, Homo sapiens
  CDR3 for alpha chain variable domain of TCR clone 16298 (TRAV12-2, TRAJ17)
CAVLFKSAGNKLTF

SEQ ID NO: 32596 - protein, 17 aa, Homo sapiens
  CDR3 for beta chain variable domain of TCR clone 16298 (TRBV20-1, TRBJ2-2)
CSASGSGQGGLTGELFF

SEQ ID NO: 32597 - protein, 13 aa, Homo sapiens
  CDR3 for alpha chain variable domain of TCR clone 16299 (TRAV17, TRAJ9)
CATDYTGGFKTVF

SEQ ID NO: 32598 - protein, 16 aa, Homo sapiens
  CDR3 for beta chain variable domain of TCR clone 16299 (TRBV7-7, TRBJ2-1)
CASSLASGTSYNEQFF

SEQ ID NO: 32599 - protein, 16 aa, Homo sapiens
  CDR3 for alpha chain variable domain of TCR clone 16300 (TRAV30, TRAJ24)
CGTEIVDADSWGKFQF

SEQ ID NO: 32600 - protein, 19 aa, Homo sapiens
  CDR3 for beta chain variable domain of TCR clone 16300 (TRBV25-1, TRBJ2-2)
CATLVYRVDRGRKTGELFF

SEQ ID NO: 32601 - protein, 14 aa, Homo sapiens
  CDR3 for alpha chain variable domain of TCR clone 16301 (TRAV8-2, TRAJ4)
CVVSPSGGYNKLIF

SEQ ID NO: 32602 - protein, 13 aa, Homo sapiens
  CDR3 for beta chain variable domain of TCR clone 16301 (TRBV27, TRBJ2-1)
CASRTLGVGEQFF

SEQ ID NO: 32603 - protein, 14 aa, Homo sapiens
  CDR3 for alpha chain variable domain of TCR clone 16302 (TRAV29/DV5, TRAJ48)
CAAMALFGNEKLTF

SEQ ID NO: 32604 - protein, 15 aa, Homo sapiens
  CDR3 for beta chain variable domain of TCR clone 16302 (TRBV7-2, TRBJ2-1)
CASTHGTGVYNEQFF

SEQ ID NO: 32605 - protein, 13 aa, Homo sapiens
  CDR3 for alpha chain variable domain of TCR clone 16303 (TRAV27, TRAJ41)
CAGEGNAGYALNF

SEQ ID NO: 32606 - protein, 14 aa, Homo sapiens
  CDR3 for beta chain variable domain of TCR clone 16303 (TRBV7-2, TRBJ1-1)
CASSFLTGTTEAFF

SEQ ID NO: 32607 - protein, 10 aa, Homo sapiens
  CDR3 for alpha chain variable domain of TCR clone 16304 (TRAV16, TRAJ22)
SAMYLRQLTF

SEQ ID NO: 32608 - protein, 15 aa, Homo sapiens
  CDR3 for beta chain variable domain of TCR clone 16304 (TRBV7-9, TRBJ1-6)
CASSSPGRGKSPLHF

SEQ ID NO: 32609 - protein, 14 aa, Homo sapiens
  CDR3 for alpha chain variable domain of TCR clone 16305 (TRAV38-1, TRAJ29)
CAFITPSGNTPLVF

SEQ ID NO: 32610 - protein, 14 aa, Homo sapiens
  CDR3 for beta chain variable domain of TCR clone 16305 (TRBV18, TRBJ2-7)
RASSPRGGAYEQYF

SEQ ID NO: 32611 - protein, 16 aa, Homo sapiens
  CDR3 for alpha chain variable domain of TCR clone 16306 (TRAV4, TRAJ22)
CLVGDLYSGSARQLTF

SEQ ID NO: 32612 - protein, 15 aa, Homo sapiens
  CDR3 for beta chain variable domain of TCR clone 16306 (TRBV11-3, TRBJ2-3)
CASLKDGREGDTQYF

SEQ ID NO: 32613 - protein, 14 aa, Homo sapiens
  CDR3 for alpha chain variable domain of TCR clone 16307 (TRAV12-2, TRAJ40)
CAVKIPSGTYKYIF

SEQ ID NO: 32614 - protein, 15 aa, Homo sapiens
  CDR3 for beta chain variable domain of TCR clone 16307 (TRBV9, TRBJ1-6)
CASSVAGTGDSPLHF

SEQ ID NO: 32615 - protein, 12 aa, Homo sapiens
  CDR3 for alpha chain variable domain of TCR clone 16308 (TRAV35, TRAJ54)
CWGSQGAQKLVF

SEQ ID NO: 32616 - protein, 12 aa, Homo sapiens
  CDR3 for beta chain variable domain of TCR clone 16308 (TRBV14, TRBJ2-7)
CASSLYKDEQYF

SEQ ID NO: 32617 - protein, 14 aa, Homo sapiens
  CDR3 for alpha chain variable domain of TCR clone 16309 (TRAV13-1, TRAJ35)
CAASKGGFGNVLHC

SEQ ID NO: 32618 - protein, 13 aa, Homo sapiens
  CDR3 for beta chain variable domain of TCR clone 16309 (TRBV7-3, TRBJ1-1)
CASSLDWGAEAFF

SEQ ID NO: 32619 - protein, 11 aa, Homo sapiens
  CDR3 for alpha chain variable domain of TCR clone 16310 (TRAV1-1, TRAJ23)
CAVRQGGKLIF

SEQ ID NO: 32620 - protein, 12 aa, Homo sapiens
  CDR3 for beta chain variable domain of TCR clone 16310 (TRBV14, TRBJ2-7)
CASSRLKGEQYF

SEQ ID NO: 32621 - protein, 14 aa, Homo sapiens
  CDR3 for alpha chain variable domain of TCR clone 16311 (TRAV8-2, TRAJ4)
CVVSPSGGYNKLIF

SEQ ID NO: 32622 - protein, 15 aa, Homo sapiens
  CDR3 for beta chain variable domain of TCR clone 16311 (TRBV4-1, TRBJ1-4)
CASSDTGGTNEKLSF

SEQ ID NO: 32623 - protein, 14 aa, Homo sapiens
  CDR3 for alpha chain variable domain of TCR clone 16312 (TRAV21, TRAJ35)
CAVMPMGFGNVLHC

SEQ ID NO: 32624 - protein, 12 aa, Homo sapiens
  CDR3 for beta chain variable domain of TCR clone 16312 (TRBV7-9, TRBJ2-7)
CASSIKREEQYF

SEQ ID NO: 32625 - protein, 16 aa, Homo sapiens
  CDR3 for alpha chain variable domain of TCR clone 16313 (TRAV1-2, TRAJ10)
CAVRGVLTGRGNKLTF

SEQ ID NO: 32626 - protein, 12 aa, Homo sapiens
  CDR3 for beta chain variable domain of TCR clone 16313 (TRBV7-8, TRBJ2-7)
CASSLGDREQYF

SEQ ID NO: 32627 - protein, 12 aa, Homo sapiens
  CDR3 for alpha chain variable domain of TCR clone 16314 (TRAV21, TRAJ33)
CAKMDSNDQLIW

SEQ ID NO: 32628 - protein, 14 aa, Homo sapiens
  CDR3 for beta chain variable domain of TCR clone 16314 (TRBV2, TRBJ2-7)
CASSLTSGGYEQYF

SEQ ID NO: 32629 - protein, 11 aa, Homo sapiens
  CDR3 for alpha chain variable domain of TCR clone 16315 (TRAV1-1, TRAJ23)
CTVRQGGKLIF

SEQ ID NO: 32630 - protein, 20 aa, Homo sapiens
  CDR3 for beta chain variable domain of TCR clone 16315 (TRBV7-8, TRBJ2-2)
CASSHLFPGPTIHITGELFF

SEQ ID NO: 32631 - protein, 13 aa, Homo sapiens
  CDR3 for alpha chain variable domain of TCR clone 16316 (TRAV23/DV6, TRAJ50)
CAASKERRDKVIF

SEQ ID NO: 32632 - protein, 17 aa, Homo sapiens
  CDR3 for beta chain variable domain of TCR clone 16316 (TRBV20-1, TRBJ2-1)
CSAPPRLAGTRYNEQFF

SEQ ID NO: 32633 - protein, 14 aa, Homo sapiens
  CDR3 for alpha chain variable domain of TCR clone 16317 (TRAV12-2, TRAJ13)
CAVKKTGGYQKVTF

SEQ ID NO: 32634 - protein, 14 aa, Homo sapiens
  CDR3 for beta chain variable domain of TCR clone 16317 (TRBV7-3, TRBJ2-3)
CASSSLHTSDTQYF

SEQ ID NO: 32635 - protein, 15 aa, Homo sapiens
  CDR3 for alpha chain variable domain of TCR clone 16318 (TRAV8-3, TRAJ40)
CAAPSLGSGTYTYIF

SEQ ID NO: 32636 - protein, 16 aa, Homo sapiens
  CDR3 for beta chain variable domain of TCR clone 16318 (TRBV7-3, TRBJ2-3)
CASSLSGYRPEDTQYF

SEQ ID NO: 32637 - protein, 15 aa, Homo sapiens
  CDR3 for alpha chain variable domain of TCR clone 16319 (TRAV12-1, TRAJ9)
RVVSFGDTGGFKTIF

SEQ ID NO: 32638 - protein, 13 aa, Homo sapiens
  CDR3 for beta chain variable domain of TCR clone 16319 (TRBV2, TRBJ1-4)
CASSERAGEKLFF

SEQ ID NO: 32639 - protein, 15 aa, Homo sapiens
  CDR3 for alpha chain variable domain of TCR clone 16320 (TRAV8-3, TRAJ11)
CAVGRLNSGYSTLTF

SEQ ID NO: 32640 - protein, 16 aa, Homo sapiens
  CDR3 for beta chain variable domain of TCR clone 16320 (TRBV7-9, TRBJ1-2)
CASSLGFSSGEDGYTF

SEQ ID NO: 32641 - protein, 13 aa, Homo sapiens
  CDR3 for alpha chain variable domain of TCR clone 16321 (TRAV27, TRAJ6)
CAGGTRGSYIPTF

SEQ ID NO: 32642 - protein, 14 aa, Homo sapiens
  CDR3 for beta chain variable domain of TCR clone 16321 (TRBV5-1, TRBJ2-7)
CAGSRGESLYEQYF

SEQ ID NO: 32643 - protein, 13 aa, Homo sapiens
  CDR3 for alpha chain variable domain of TCR clone 16322 (TRAV21, TRAJ27)
CAARPGNAGKSTF

SEQ ID NO: 32644 - protein, 14 aa, Homo sapiens
  CDR3 for beta chain variable domain of TCR clone 16322 (TRBV7-6, TRBJ2-3)
CASSIGTVTDTQYF

SEQ ID NO: 32645 - protein, 14 aa, Homo sapiens
  CDR3 for alpha chain variable domain of TCR clone 16323 (TRAV1-2, TRAJ16)
CAVKRFSDGQKLLF

SEQ ID NO: 32646 - protein, 15 aa, Homo sapiens
  CDR3 for beta chain variable domain of TCR clone 16323 (TRBV9, TRBJ1-6)
CASSVAGTGDSPLHF

SEQ ID NO: 32647 - protein, 14 aa, Homo sapiens
  CDR3 for alpha chain variable domain of TCR clone 16324 (TRAV17, TRAJ57)
CATDPQGGSEKLVF

SEQ ID NO: 32648 - protein, 12 aa, Homo sapiens
  CDR3 for beta chain variable domain of TCR clone 16324 (TRBV11-2, TRBJ2-2)
CASSLGGGELFF

SEQ ID NO: 32649 - protein, 15 aa, Homo sapiens
  CDR3 for alpha chain variable domain of TCR clone 16325 (TRAV8-3, TRAJ27)
CAVGPSKTNAGKSTF

SEQ ID NO: 32650 - protein, 14 aa, Homo sapiens
  CDR3 for beta chain variable domain of TCR clone 16325 (TRBV19, TRBJ2-1)
CASPTFVLSGEQFF

SEQ ID NO: 32651 - protein, 16 aa, Homo sapiens
  CDR3 for alpha chain variable domain of TCR clone 16326 (TRAV8-3, TRAJ13)
CAVGAYPSGGYQNVTF

SEQ ID NO: 32652 - protein, 15 aa, Homo sapiens
  CDR3 for beta chain variable domain of TCR clone 16326 (TRBV19, TRBJ1-5)
CASSIVWADNQPQHF

SEQ ID NO: 32653 - protein, 15 aa, Homo sapiens
  CDR3 for alpha chain variable domain of TCR clone 16327 (TRAV17, TRAJ56)
RATEPFTGANSKLTF

SEQ ID NO: 32654 - protein, 15 aa, Homo sapiens
  CDR3 for beta chain variable domain of TCR clone 16327 (TRBV28, TRBJ1-5)
CASSRTGGYVQPQHF

SEQ ID NO: 32655 - protein, 14 aa, Homo sapiens
  CDR3 for alpha chain variable domain of TCR clone 16328 (TRAV8-3, TRAJ4)
CAVGAAGGYNKMIF

SEQ ID NO: 32656 - protein, 15 aa, Homo sapiens
  CDR3 for beta chain variable domain of TCR clone 16328 (TRBV6-5, TRBJ2-1)
CASSYDAGAGNEQFF

SEQ ID NO: 32657 - protein, 18 aa, Homo sapiens
  CDR3 for alpha chain variable domain of TCR clone 16329 (TRAV13-1, TRAJ52)
CAAKNPNAGGTSYGKMTF

SEQ ID NO: 32658 - protein, 15 aa, Homo sapiens
  CDR3 for beta chain variable domain of TCR clone 16329 (TRBV6-1, TRBJ2-3)
CASSERGGITDTQYF

SEQ ID NO: 32659 - protein, 11 aa, Homo sapiens
  CDR3 for alpha chain variable domain of TCR clone 16330 (TRAV2, TRAJ13)
CASGVYQKVTF

SEQ ID NO: 32660 - protein, 16 aa, Homo sapiens
  CDR3 for beta chain variable domain of TCR clone 16330 (TRBV6-1, TRBJ2-5)
CASSETLDRGAETQYF

SEQ ID NO: 32661 - protein, 12 aa, Homo sapiens
  CDR3 for alpha chain variable domain of TCR clone 16331 (TRAV13-1, TRAJ21)
CAAKEGFNKFYF

SEQ ID NO: 32662 - protein, 14 aa, Homo sapiens
  CDR3 for beta chain variable domain of TCR clone 16331 (TRBV5-4, TRBJ1-1)
CASSLDSRRDEALF

SEQ ID NO: 32663 - protein, 14 aa, Homo sapiens
  CDR3 for alpha chain variable domain of TCR clone 16332 (TRAV13-1, TRAJ35)
CAASKGGFGNVLPC

SEQ ID NO: 32664 - protein, 13 aa, Homo sapiens
  CDR3 for beta chain variable domain of TCR clone 16332 (TRBV7-3, TRBJ1-1)
CASSQDWGAEAFF

SEQ ID NO: 32665 - protein, 12 aa, Homo sapiens
  CDR3 for alpha chain variable domain of TCR clone 16333 (TRAV13-1, TRAJ15)
CAASQAGTALIF

SEQ ID NO: 32666 - protein, 14 aa, Homo sapiens
  CDR3 for beta chain variable domain of TCR clone 16333 (TRBV19, TRBJ2-2)
CAGSTLHRSGELFF

SEQ ID NO: 32667 - protein, 14 aa, Homo sapiens
  CDR3 for alpha chain variable domain of TCR clone 16334 (TRAV13-1, TRAJ13)
CAASRVGGYQKVTF

SEQ ID NO: 32668 - protein, 17 aa, Homo sapiens
  CDR3 for beta chain variable domain of TCR clone 16334 (TRBV15, TRBJ1-5)
CATSSAPPGTRNQPQHF

SEQ ID NO: 32669 - protein, 11 aa, Homo sapiens
  CDR3 for alpha chain variable domain of TCR clone 16335 (TRAV29/DV5, TRAJ49)
CAAVPGNQFYF

SEQ ID NO: 32670 - protein, 13 aa, Homo sapiens
  CDR3 for beta chain variable domain of TCR clone 16335 (TRBV27, TRBJ1-1)
CASSLSIGAEAFF

SEQ ID NO: 32671 - protein, 15 aa, Homo sapiens
  CDR3 for alpha chain variable domain of TCR clone 16336 (TRAV8-3, TRAJ27)
CAVGPSKTNAGKSTF

SEQ ID NO: 32672 - protein, 15 aa, Homo sapiens
  CDR3 for beta chain variable domain of TCR clone 16336 (TRBV7-2, TRBJ2-1)
CAGSSGLAGGNEQFF

SEQ ID NO: 32673 - protein, 15 aa, Homo sapiens
  CDR3 for alpha chain variable domain of TCR clone 16337 (TRAV8-3, TRAJ45)
CASSYSGGGADGLTF

SEQ ID NO: 32674 - protein, 13 aa, Homo sapiens
  CDR3 for beta chain variable domain of TCR clone 16337 (TRBV10-3, TRBJ2-7)
CDSKLAVNYEQYF

SEQ ID NO: 32675 - protein, 13 aa, Homo sapiens
  CDR3 for alpha chain variable domain of TCR clone 16338 (TRAV36/DV7, TRAJ48)
CAVPNFGNEKSTF

SEQ ID NO: 32676 - protein, 15 aa, Homo sapiens
  CDR3 for beta chain variable domain of TCR clone 16338 (TRBV4-3, TRBJ2-3)
CASSLGTRSSDTQYF

SEQ ID NO: 32677 - protein, 12 aa, Homo sapiens
  CDR3 for alpha chain variable domain of TCR clone 16339 (TRAV12-2, TRAJ44)
CAVGGTASKLTF

SEQ ID NO: 32678 - protein, 14 aa, Homo sapiens
  CDR3 for beta chain variable domain of TCR clone 16339 (TRBV9, TRBJ2-2)
CASSGRERSGELFF

SEQ ID NO: 32679 - protein, 15 aa, Homo sapiens
  CDR3 for alpha chain variable domain of TCR clone 16340 (TRAV3, TRAJ5)
CAVRDLDTGRRALTF

SEQ ID NO: 32680 - protein, 13 aa, Homo sapiens
  CDR3 for beta chain variable domain of TCR clone 16340 (TRBV12-4, TRBJ2-7)
CTSSPTETYEQYF

SEQ ID NO: 32681 - protein, 14 aa, Homo sapiens
  CDR3 for alpha chain variable domain of TCR clone 16341 (TRAV1-2, TRAJ16)
CAVNRFSDGQKLLF

SEQ ID NO: 32682 - protein, 15 aa, Homo sapiens
  CDR3 for beta chain variable domain of TCR clone 16341 (TRBV7-3, TRBJ1-6)
CASSLGRGAGSPLHF

SEQ ID NO: 32683 - protein, 12 aa, Homo sapiens
  CDR3 for alpha chain variable domain of TCR clone 16342 (TRAV12-1, TRAJ40)
CVVYSGTYTYIF

SEQ ID NO: 32684 - protein, 18 aa, Homo sapiens
  CDR3 for beta chain variable domain of TCR clone 16342 (TRBV11-2, TRBJ2-3)
CASSLGGASRGAPNTQYF

SEQ ID NO: 32685 - protein, 15 aa, Homo sapiens
  CDR3 for alpha chain variable domain of TCR clone 16343 (TRAV40, TRAJ48)
CLLFISNFGNEKLTF

SEQ ID NO: 32686 - protein, 13 aa, Homo sapiens
  CDR3 for beta chain variable domain of TCR clone 16343 (TRBV19, TRBJ1-5)
CASSINLNQPQHF

SEQ ID NO: 32687 - protein, 10 aa, Homo sapiens
  CDR3 for alpha chain variable domain of TCR clone 16344 (TRAV12-3, TRAJ49)
CAMNDDQFYL

SEQ ID NO: 32688 - protein, 13 aa, Homo sapiens
  CDR3 for beta chain variable domain of TCR clone 16344 (TRBV12-4, TRBJ1-1)
CASSPGTGFEAFF

SEQ ID NO: 32689 - protein, 15 aa, Homo sapiens
  CDR3 for alpha chain variable domain of TCR clone 16345 (TRAV4, TRAJ39)
CLVGPNNNAGNMLTF

SEQ ID NO: 32690 - protein, 14 aa, Homo sapiens
  CDR3 for beta chain variable domain of TCR clone 16345 (TRBV19, TRBJ2-7)
CASNFRGTFTGMYF

SEQ ID NO: 32691 - protein, 13 aa, Homo sapiens
  CDR3 for alpha chain variable domain of TCR clone 16346 (TRAV2, TRAJ29)
CAAGNSGNTPLVF

SEQ ID NO: 32692 - protein, 16 aa, Homo sapiens
  CDR3 for beta chain variable domain of TCR clone 16346 (TRBV7-9, TRBJ1-2)
CASSPGGGAINYGHTF

SEQ ID NO: 32693 - protein, 14 aa, Homo sapiens
  CDR3 for alpha chain variable domain of TCR clone 16347 (TRAV1-2, TRAJ16)
CAVNRFSDGQKLLF

SEQ ID NO: 32694 - protein, 15 aa, Homo sapiens
  CDR3 for beta chain variable domain of TCR clone 16347 (TRBV7-9, TRBJ1-6)
CASSSPGRGNSPLRF

SEQ ID NO: 32695 - protein, 15 aa, Homo sapiens
  CDR3 for alpha chain variable domain of TCR clone 16348 (TRAV17, TRAJ16)
CATALRFSDGQKLLF

SEQ ID NO: 32696 - protein, 12 aa, Homo sapiens
  CDR3 for beta chain variable domain of TCR clone 16348 (TRBV2, TRBJ2-7)
CASSDPDHEQYF

SEQ ID NO: 32697 - protein, 17 aa, Homo sapiens
  CDR3 for alpha chain variable domain of TCR clone 16349 (TRAV26-1, TRAJ53)
CIVRVDDSGGSNYKLTF

SEQ ID NO: 32698 - protein, 15 aa, Homo sapiens
  CDR3 for beta chain variable domain of TCR clone 16349 (TRBV20-1, TRBJ2-7)
RSARVPAAYFYEQYF

SEQ ID NO: 32699 - protein, 14 aa, Homo sapiens
  CDR3 for alpha chain variable domain of TCR clone 16350 (TRAV38-1, TRAJ40)
CALRPTSGTYKYIF

SEQ ID NO: 32700 - protein, 14 aa, Homo sapiens
  CDR3 for beta chain variable domain of TCR clone 16350 (TRBV25-1, TRBJ1-1)
CASTHPGGNTEAFF

SEQ ID NO: 32701 - protein, 13 aa, Homo sapiens
  CDR3 for alpha chain variable domain of TCR clone 16351 (TRAV1-2, TRAJ9)
CAVLNTGSFKTIF

SEQ ID NO: 32702 - protein, 14 aa, Homo sapiens
  CDR3 for beta chain variable domain of TCR clone 16351 (TRBV20-1, TRBJ2-3)
CSARGGTSTDTQYF

SEQ ID NO: 32703 - protein, 18 aa, Homo sapiens
  CDR3 for alpha chain variable domain of TCR clone 16352 (TRAV29/DV5, TRAJ53)
CSVPLCSKRGGSNYKLTF

SEQ ID NO: 32704 - protein, 17 aa, Homo sapiens
  CDR3 for beta chain variable domain of TCR clone 16352 (TRBV7-8, TRBJ2-6)
CASSAGTGGAGANVLTF

SEQ ID NO: 32705 - protein, 16 aa, Homo sapiens
  CDR3 for alpha chain variable domain of TCR clone 16353 (TRAV4, TRAJ18)
CCVLLIGGSTLGRLYF

SEQ ID NO: 32706 - protein, 14 aa, Homo sapiens
  CDR3 for beta chain variable domain of TCR clone 16353 (TRBV18, TRBJ1-2)
CASSPSGRDYGCTF

SEQ ID NO: 32707 - protein, 16 aa, Homo sapiens
  CDR3 for alpha chain variable domain of TCR clone 16354 (TRAV12-2, TRAJ13)
CAVDSAGAGGYQKVTF

SEQ ID NO: 32708 - protein, 13 aa, Homo sapiens
  CDR3 for beta chain variable domain of TCR clone 16354 (TRBV20-1, TRBJ2-7)
CSARPSTNYEQYF

SEQ ID NO: 32709 - protein, 15 aa, Homo sapiens
  CDR3 for alpha chain variable domain of TCR clone 16355 (TRAV27, TRAJ38)
CAGRFNAGNNRKLIW

SEQ ID NO: 32710 - protein, 13 aa, Homo sapiens
  CDR3 for beta chain variable domain of TCR clone 16355 (TRBV12-5, TRBJ2-3)
CASQKRGTDTQYF

SEQ ID NO: 32711 - protein, 15 aa, Homo sapiens
  CDR3 for alpha chain variable domain of TCR clone 16356 (TRAV3, TRAJ4)
CAVRDGTGGYNKLIF

SEQ ID NO: 32712 - protein, 19 aa, Homo sapiens
  CDR3 for beta chain variable domain of TCR clone 16356 (TRBV27, TRBJ2-2)
CTSAPAVLAGYRTPGSCFF

SEQ ID NO: 32713 - protein, 15 aa, Homo sapiens
  CDR3 for alpha chain variable domain of TCR clone 16357 (TRAV3, TRAJ20)
CSVRDIKLSDYKLSF

SEQ ID NO: 32714 - protein, 15 aa, Homo sapiens
  CDR3 for beta chain variable domain of TCR clone 16357 (TRBV7-9, TRBJ1-6)
CASSSPGRGNSPLHF

SEQ ID NO: 32715 - protein, 12 aa, Homo sapiens
  CDR3 for alpha chain variable domain of TCR clone 16358 (TRAV21, TRAJ23)
CAVMLQGGKLIF

SEQ ID NO: 32716 - protein, 16 aa, Homo sapiens
  CDR3 for beta chain variable domain of TCR clone 16358 (TRBV7-9, TRBJ1-4)
CAITEGEANEKLFLAV

SEQ ID NO: 32717 - protein, 12 aa, Homo sapiens
  CDR3 for alpha chain variable domain of TCR clone 16359 (TRAV13-2, TRAJ23)
RAERHRGGKLIF

SEQ ID NO: 32718 - protein, 16 aa, Homo sapiens
  CDR3 for beta chain variable domain of TCR clone 16359 (TRBV20-1, TRBJ1-4)
CSAPGQGLLTNEKLFF

SEQ ID NO: 32719 - protein, 15 aa, Homo sapiens
  CDR3 for alpha chain variable domain of TCR clone 16360 (TRAV12-3, TRAJ6)
CAMSATTGGSYIPKF

SEQ ID NO: 32720 - protein, 16 aa, Homo sapiens
  CDR3 for beta chain variable domain of TCR clone 16360 (TRBV20-1, TRBJ1-2)
CSASMGQGVANYGYTF

SEQ ID NO: 32721 - protein, 12 aa, Homo sapiens
  CDR3 for alpha chain variable domain of TCR clone 16361 (TRAV12-2, TRAJ4)
GWPEGGYNKLIF

SEQ ID NO: 32722 - protein, 14 aa, Homo sapiens
  CDR3 for beta chain variable domain of TCR clone 16361 (TRBV7-2, TRBJ2-7)
CASSPKTSFYEQYF

SEQ ID NO: 32723 - protein, 13 aa, Homo sapiens
  CDR3 for alpha chain variable domain of TCR clone 16362 (TRAV13-2, TRAJ48)
CAEMGFGNEKLTF

SEQ ID NO: 32724 - protein, 15 aa, Homo sapiens
  CDR3 for beta chain variable domain of TCR clone 16362 (TRBV7-9, TRBJ1-6)
CASSSPGRGNSPLHF

SEQ ID NO: 32725 - protein, 13 aa, Homo sapiens
  CDR3 for alpha chain variable domain of TCR clone 16363 (TRAV35, TRAJ42)
CAGFPGSHGNLIF

SEQ ID NO: 32726 - protein, 13 aa, Homo sapiens
  CDR3 for beta chain variable domain of TCR clone 16363 (TRBV29-1, TRBJ2-1)
CSVEGGRVNEQFF

SEQ ID NO: 32727 - protein, 18 aa, Homo sapiens
  CDR3 for alpha chain variable domain of TCR clone 16364 (TRAV13-1, TRAJ52)
CAAKNPNAGGTSYGKLTF

SEQ ID NO: 32728 - protein, 17 aa, Homo sapiens
  CDR3 for beta chain variable domain of TCR clone 16364 (TRBV13, TRBJ2-3)
CASSLSRVAGGRNTQYF

SEQ ID NO: 32729 - protein, 15 aa, Homo sapiens
  CDR3 for alpha chain variable domain of TCR clone 16365 (TRAV8-2, TRAJ4)
CVVSEFSGGYNKLIF

SEQ ID NO: 32730 - protein, 19 aa, Homo sapiens
  CDR3 for beta chain variable domain of TCR clone 16365 (TRBV6-3, TRBJ1-5)
CASSYVQGAPFSASQPQHF

SEQ ID NO: 32731 - protein, 15 aa, Homo sapiens
  CDR3 for alpha chain variable domain of TCR clone 16366 (TRAV21, TRAJ52)
CATRGGGTSYGKLTF

SEQ ID NO: 32732 - protein, 14 aa, Homo sapiens
  CDR3 for beta chain variable domain of TCR clone 16366 (TRBV28, TRBJ2-3)
CASSSAPSTDAQYF

SEQ ID NO: 32733 - protein, 13 aa, Homo sapiens
  CDR3 for alpha chain variable domain of TCR clone 16367 (TRAV13-1, TRAJ39)
CAASIWAGNMLTF

SEQ ID NO: 32734 - protein, 15 aa, Homo sapiens
  CDR3 for beta chain variable domain of TCR clone 16367 (TRBV7-9, TRBJ1-1)
CASSLLEQGGTEAFL

SEQ ID NO: 32735 - protein, 14 aa, Homo sapiens
  CDR3 for alpha chain variable domain of TCR clone 16368 (TRAV1-2, TRAJ16)
CAVNRFSDGQKLLF

SEQ ID NO: 32736 - protein, 16 aa, Homo sapiens
  CDR3 for beta chain variable domain of TCR clone 16368 (TRBV9, TRBJ2-1)
CASSVGGGGNYNEQFS

SEQ ID NO: 32737 - protein, 15 aa, Homo sapiens
  CDR3 for alpha chain variable domain of TCR clone 16369 (TRAV8-3, TRAJ11)
CAVGLLNSGYSTLTF

SEQ ID NO: 32738 - protein, 13 aa, Homo sapiens
  CDR3 for beta chain variable domain of TCR clone 16369 (TRBV7-9, TRBJ1-2)
CASSLKQNYGYTF

SEQ ID NO: 32739 - protein, 18 aa, Homo sapiens
  CDR3 for alpha chain variable domain of TCR clone 16370 (TRAV21, TRAJ52)
CAVRPSPAGGTSYGKLTF

SEQ ID NO: 32740 - protein, 15 aa, Homo sapiens
  CDR3 for beta chain variable domain of TCR clone 16370 (TRBV7-9, TRBJ2-7)
CASSSSGLAAYEQYF

SEQ ID NO: 32741 - protein, 15 aa, Homo sapiens
  CDR3 for alpha chain variable domain of TCR clone 16371 (TRAV12-3, TRAJ6)
CAMSATTGGSYIPTF

SEQ ID NO: 32742 - protein, 16 aa, Homo sapiens
  CDR3 for beta chain variable domain of TCR clone 16371 (TRBV7-3, TRBJ2-2)
CASSLKRGTLSGELFF

SEQ ID NO: 32743 - protein, 11 aa, Homo sapiens
  CDR3 for alpha chain variable domain of TCR clone 16372 (TRAV12-3, TRAJ27)
CAMANAGKSTF

SEQ ID NO: 32744 - protein, 13 aa, Homo sapiens
  CDR3 for beta chain variable domain of TCR clone 16372 (TRBV20-1, TRBJ1-1)
CSARVGGNTGAFF

SEQ ID NO: 32745 - protein, 14 aa, Homo sapiens
  CDR3 for alpha chain variable domain of TCR clone 16373 (TRAV13-1, TRAJ4)
CAASFSGGYNKLIF

SEQ ID NO: 32746 - protein, 14 aa, Homo sapiens
  CDR3 for beta chain variable domain of TCR clone 16373 (TRBV6-1, TRBJ1-3)
CASVQGGGGNTIYF

SEQ ID NO: 32747 - protein, 13 aa, Homo sapiens
  CDR3 for alpha chain variable domain of TCR clone 16374 (TRAV38-1, TRAJ42)
CARWGGSQGNRIF

SEQ ID NO: 32748 - protein, 17 aa, Homo sapiens
  CDR3 for beta chain variable domain of TCR clone 16374 (TRBV20-1, TRBJ2-1)
CSARDPLAGVWDNEQFF

SEQ ID NO: 32749 - protein, 15 aa, Homo sapiens
  CDR3 for alpha chain variable domain of TCR clone 16375 (TRAV3, TRAJ20)
CAVRDIQLSDYKLSF

SEQ ID NO: 32750 - protein, 15 aa, Homo sapiens
  CDR3 for beta chain variable domain of TCR clone 16375 (TRBV7-9, TRBJ1-6)
CASSSPGRGNSPLHF

SEQ ID NO: 32751 - protein, 17 aa, Homo sapiens
  CDR3 for alpha chain variable domain of TCR clone 16376 (TRAV13-1, TRAJ52)
CAAGRNAGGTSYGKLTF

SEQ ID NO: 32752 - protein, 13 aa, Homo sapiens
  CDR3 for beta chain variable domain of TCR clone 16376 (TRBV7-2, TRBJ1-1)
CASNLKGAKVASF

SEQ ID NO: 32753 - protein, 12 aa, Homo sapiens
  CDR3 for alpha chain variable domain of TCR clone 16377 (TRAV12-3, TRAJ17)
CAMTLTGNKLTF

SEQ ID NO: 32754 - protein, 15 aa, Homo sapiens
  CDR3 for beta chain variable domain of TCR clone 16377 (TRBV4-1, TRBJ2-7)
CASSQQGQGFDEQYF

SEQ ID NO: 32755 - protein, 12 aa, Homo sapiens
  CDR3 for alpha chain variable domain of TCR clone 16378 (TRAV13-2, TRAJ23)
CAERHRGGKLIF

SEQ ID NO: 32756 - protein, 13 aa, Homo sapiens
  CDR3 for beta chain variable domain of TCR clone 16378 (TRBV7-3, TRBJ1-1)
CASSQDWGAEAFF

SEQ ID NO: 32757 - protein, 16 aa, Homo sapiens
  CDR3 for alpha chain variable domain of TCR clone 16379 (TRAV14/DV4, TRAJ53)
CAMREGGGGSNYKLTF

SEQ ID NO: 32758 - protein, 15 aa, Homo sapiens
  CDR3 for beta chain variable domain of TCR clone 16379 (TRBV12-4, TRBJ2-5)
CASSPPTGLQETQYF

SEQ ID NO: 32759 - protein, 12 aa, Homo sapiens
  CDR3 for alpha chain variable domain of TCR clone 16380 (TRAV12-1, TRAJ40)
CMVYSGTYKYIF

SEQ ID NO: 32760 - protein, 18 aa, Homo sapiens
  CDR3 for beta chain variable domain of TCR clone 16380 (TRBV11-2, TRBJ2-3)
CASSLGGASRGAPNTQYF

SEQ ID NO: 32761 - protein, 17 aa, Homo sapiens
  CDR3 for alpha chain variable domain of TCR clone 16381 (TRAV13-1, TRAJ31)
CAPRDRLMFGDGPQLVV

SEQ ID NO: 32762 - protein, 12 aa, Homo sapiens
  CDR3 for beta chain variable domain of TCR clone 16381 (TRBV7-9, TRBJ2-7)
CASSLEGYEQYF

SEQ ID NO: 32763 - protein, 16 aa, Homo sapiens
  CDR3 for alpha chain variable domain of TCR clone 16382 (TRAV23/DV6, TRAJ34)
CAASGALSYNTDKLIF

SEQ ID NO: 32764 - protein, 15 aa, Homo sapiens
  CDR3 for beta chain variable domain of TCR clone 16382 (TRBV10-3, TRBJ1-2)
CAISESTSRGYGYTF

SEQ ID NO: 32765 - protein, 14 aa, Homo sapiens
  CDR3 for alpha chain variable domain of TCR clone 16383 (TRAV1-2, TRAJ16)
CAVNRFSDGEKLLF

SEQ ID NO: 32766 - protein, 15 aa, Homo sapiens
  CDR3 for beta chain variable domain of TCR clone 16383 (TRBV9, TRBJ1-6)
CASSVAGTGDSPLHF

SEQ ID NO: 32767 - protein, 14 aa, Homo sapiens
  CDR3 for alpha chain variable domain of TCR clone 16384 (TRAV2, TRAJ9)
CAVEDRSGGFKTIF

SEQ ID NO: 32768 - protein, 11 aa, Homo sapiens
  CDR3 for beta chain variable domain of TCR clone 16384 (TRBV29-1, TRBJ2-5)
CSEDRTGTQYF

SEQ ID NO: 32769 - protein, 15 aa, Homo sapiens
  CDR3 for alpha chain variable domain of TCR clone 16385 (TRAV3, TRAJ3)
CAVRDRDSSASKIIL

SEQ ID NO: 32770 - protein, 18 aa, Homo sapiens
  CDR3 for beta chain variable domain of TCR clone 16385 (TRBV25-1, TRBJ1-2)
CASSGLQNGQGLIFGYTF

SEQ ID NO: 32771 - protein, 16 aa, Homo sapiens
  CDR3 for alpha chain variable domain of TCR clone 16386 (TRAV12-2, TRAJ43)
CAGDDMRFGAGTRLTV

SEQ ID NO: 32772 - protein, 16 aa, Homo sapiens
  CDR3 for beta chain variable domain of TCR clone 16386 (TRBV2, TRBJ2-4)
CASSEAPGGEQNMQYF

SEQ ID NO: 32773 - protein, 13 aa, Homo sapiens
  CDR3 for alpha chain variable domain of TCR clone 16387 (TRAV17, TRAJ40)
CATRSPGTYKYIF

SEQ ID NO: 32774 - protein, 13 aa, Homo sapiens
  CDR3 for beta chain variable domain of TCR clone 16387 (TRBV28, TRBJ2-5)
CASSSRNQETQYF

SEQ ID NO: 32775 - protein, 14 aa, Homo sapiens
  CDR3 for alpha chain variable domain of TCR clone 16388 (TRAV12-2, TRAJ17)
CAVLFKAAGNKLTF

SEQ ID NO: 32776 - protein, 17 aa, Homo sapiens
  CDR3 for beta chain variable domain of TCR clone 16388 (TRBV20-1, TRBJ2-2)
CSASGSGQGRLTGELFF

SEQ ID NO: 32777 - protein, 13 aa, Homo sapiens
  CDR3 for alpha chain variable domain of TCR clone 16389 (TRAV13-2, TRAJ48)
CAEIDFGNEKLTF

SEQ ID NO: 32778 - protein, 15 aa, Homo sapiens
  CDR3 for beta chain variable domain of TCR clone 16389 (TRBV7-9, TRBJ1-6)
CASSSPGRGNSPLHF

SEQ ID NO: 32779 - protein, 15 aa, Homo sapiens
  CDR3 for alpha chain variable domain of TCR clone 16390 (TRAV12-2, TRAJ53)
CAVNGGGGSNYKLTF

SEQ ID NO: 32780 - protein, 14 aa, Homo sapiens
  CDR3 for beta chain variable domain of TCR clone 16390 (TRBV7-6, TRBJ2-3)
CASSLGTVTDTQYF

SEQ ID NO: 32781 - protein, 17 aa, Homo sapiens
  CDR3 for alpha chain variable domain of TCR clone 16391 (TRAV8-6, TRAJ58)
CALSSWVGETSGSRLTF

SEQ ID NO: 32782 - protein, 14 aa, Homo sapiens
  CDR3 for beta chain variable domain of TCR clone 16391 (TRBV4-2, TRBJ2-1)
CASGLDRAYNEQFF

SEQ ID NO: 32783 - protein, 13 aa, Homo sapiens
  CDR3 for alpha chain variable domain of TCR clone 16392 (TRAV21, TRAJ27)
CAARPGNAGKSTF

SEQ ID NO: 32784 - protein, 14 aa, Homo sapiens
  CDR3 for beta chain variable domain of TCR clone 16392 (TRBV4-1, TRBJ2-2)
CASSQAVNTGELFF

SEQ ID NO: 32785 - protein, 10 aa, Homo sapiens
  CDR3 for alpha chain variable domain of TCR clone 16393 (TRAV1-1, TRAJ26)
CAVNGQNFVF

SEQ ID NO: 32786 - protein, 15 aa, Homo sapiens
  CDR3 for beta chain variable domain of TCR clone 16393 (TRBV9, TRBJ1-6)
CASSVAGTGDSPLHF

SEQ ID NO: 32787 - protein, 17 aa, Homo sapiens
  CDR3 for alpha chain variable domain of TCR clone 16394 (TRAV13-1, TRAJ52)
CAASSGAGVTSYGKLTF

SEQ ID NO: 32788 - protein, 15 aa, Homo sapiens
  CDR3 for beta chain variable domain of TCR clone 16394 (TRBV2, TRBJ2-1)
CASSELAGSYNEQFF

SEQ ID NO: 32789 - protein, 14 aa, Homo sapiens
  CDR3 for alpha chain variable domain of TCR clone 16395 (TRAV1-2, TRAJ16)
RAVNRFSDGQKLLF

SEQ ID NO: 32790 - protein, 15 aa, Homo sapiens
  CDR3 for beta chain variable domain of TCR clone 16395 (TRBV7-9, TRBJ1-6)
CASSSPGRGNSPLHF

SEQ ID NO: 32791 - protein, 14 aa, Homo sapiens
  CDR3 for alpha chain variable domain of TCR clone 16396 (TRAV2, TRAJ9)
CAVEDRSGGFKTIF

SEQ ID NO: 32792 - protein, 16 aa, Homo sapiens
  CDR3 for beta chain variable domain of TCR clone 16396 (TRBV19, TRBJ2-1)
CASSKAGPSSYNEQFF

SEQ ID NO: 32793 - protein, 16 aa, Homo sapiens
  CDR3 for alpha chain variable domain of TCR clone 16397 (TRAV30, TRAJ24)
CGTEIVDADSWGKFQF

SEQ ID NO: 32794 - protein, 14 aa, Homo sapiens
  CDR3 for beta chain variable domain of TCR clone 16397 (TRBV12-5, TRBJ2-5)
CASGSRTDQETQYF

SEQ ID NO: 32795 - protein, 20 aa, Homo sapiens
  CDR3 for alpha chain variable domain of TCR clone 16398 (TRAV12-1, TRAJ42)
SSVIQPPTSVKGGSQGNLIF

SEQ ID NO: 32796 - protein, 18 aa, Homo sapiens
  CDR3 for beta chain variable domain of TCR clone 16398 (TRBV11-2, TRBJ2-3)
CASSLGRASRGAPNTQYF

SEQ ID NO: 32797 - protein, 11 aa, Homo sapiens
  CDR3 for alpha chain variable domain of TCR clone 16399 (TRAV21, TRAJ34)
CAVTNTDKLIF

SEQ ID NO: 32798 - protein, 14 aa, Homo sapiens
  CDR3 for beta chain variable domain of TCR clone 16399 (TRBV12-4, TRBJ2-1)
CARSLGQGASEQFF

SEQ ID NO: 32799 - protein, 12 aa, Homo sapiens
  CDR3 for alpha chain variable domain of TCR clone 16400 (TRAV29/DV5, TRAJ49)
CAATDTGNPFYF

SEQ ID NO: 32800 - protein, 12 aa, Homo sapiens
  CDR3 for beta chain variable domain of TCR clone 16400 (TRBV12-4, TRBJ2-7)
CASSLGGYEQYF

SEQ ID NO: 32801 - protein, 15 aa, Homo sapiens
  CDR3 for alpha chain variable domain of TCR clone 16401 (TRAV25, TRAJ52)
CAGRPGGTSYGRLTF

SEQ ID NO: 32802 - protein, 17 aa, Homo sapiens
  CDR3 for beta chain variable domain of TCR clone 16401 (TRBV7-8, TRBJ2-6)
CASSAGTGGAGANVLTF

SEQ ID NO: 32803 - protein, 20 aa, Homo sapiens
  CDR3 for alpha chain variable domain of TCR clone 16402 (TRAV2, TRAJ9)
CAVGPEASKLSLEQEQDYLL

SEQ ID NO: 32804 - protein, 16 aa, Homo sapiens
  CDR3 for beta chain variable domain of TCR clone 16402 (TRBV13, TRBJ2-2)
CASSPRTGEHTGELFF

SEQ ID NO: 32805 - protein, 15 aa, Homo sapiens
  CDR3 for alpha chain variable domain of TCR clone 16403 (TRAV8-3, TRAJ27)
CAVGPSKTNAGKSAF

SEQ ID NO: 32806 - protein, 15 aa, Homo sapiens
  CDR3 for beta chain variable domain of TCR clone 16403 (TRBV7-2, TRBJ2-1)
CASSSGLAGGNEQFF

SEQ ID NO: 32807 - protein, 11 aa, Homo sapiens
  CDR3 for alpha chain variable domain of TCR clone 16404 (TRAV3, TRAJ21)
CAVGNYNKFYF

SEQ ID NO: 32808 - protein, 16 aa, Homo sapiens
  CDR3 for beta chain variable domain of TCR clone 16404 (TRBV19, TRBJ2-1)
CASSKAGPSSYNEQFF

SEQ ID NO: 32809 - protein, 14 aa, Homo sapiens
  CDR3 for alpha chain variable domain of TCR clone 16405 (TRAV8-3, TRAJ4)
CAVDAAGGYNKLIF

SEQ ID NO: 32810 - protein, 15 aa, Homo sapiens
  CDR3 for beta chain variable domain of TCR clone 16405 (TRBV6-5, TRBJ2-1)
CASSYDAGAGNEQFF

SEQ ID NO: 32811 - protein, 15 aa, Homo sapiens
  CDR3 for alpha chain variable domain of TCR clone 16406 (TRAV3, TRAJ5)
CAVRDRKTGRRALTF

SEQ ID NO: 32812 - protein, 15 aa, Homo sapiens
  CDR3 for beta chain variable domain of TCR clone 16406 (TRBV7-8, TRBJ2-1)
CASSLADGLYNEQFF

SEQ ID NO: 32813 - protein, 16 aa, Homo sapiens
  CDR3 for alpha chain variable domain of TCR clone 16407 (TRAV12-3, TRAJ58)
CAMTDTEETSGSRLTF

SEQ ID NO: 32814 - protein, 13 aa, Homo sapiens
  CDR3 for beta chain variable domain of TCR clone 16407 (TRBV23-1, TRBJ2-7)
GTGLRWGGYEQYF

SEQ ID NO: 32815 - protein, 11 aa, Homo sapiens
  CDR3 for alpha chain variable domain of TCR clone 16408 (TRAV8-3, TRAJ34)
CAIPGKLIFGT

SEQ ID NO: 32816 - protein, 15 aa, Homo sapiens
  CDR3 for beta chain variable domain of TCR clone 16408 (TRBV5-7, TRBJ2-1)
CASSRRLAGDNEQFF

SEQ ID NO: 32817 - protein, 22 aa, Homo sapiens
  CDR3 for alpha chain variable domain of TCR clone 16409 (TRAV8-2, TRAJ45)
HLTKPSAHVSDAAEYSADGLTF

SEQ ID NO: 32818 - protein, 13 aa, Homo sapiens
  CDR3 for beta chain variable domain of TCR clone 16409 (TRBV7-3, TRBJ2-1)
CASSPVAYNEQFF

SEQ ID NO: 32819 - protein, 16 aa, Homo sapiens
  CDR3 for alpha chain variable domain of TCR clone 16410 (TRAV3, TRAJ37)
CAVRPHGSGNTGKLIF

SEQ ID NO: 32820 - protein, 13 aa, Homo sapiens
  CDR3 for beta chain variable domain of TCR clone 16410 (TRBV19, TRBJ1-2)
CASSVPGQDGYTF

SEQ ID NO: 32821 - protein, 10 aa, Homo sapiens
  CDR3 for alpha chain variable domain of TCR clone 16411 (TRAV26-1, TRAJ40)
CIAGTYKYIF

SEQ ID NO: 32822 - protein, 15 aa, Homo sapiens
  CDR3 for beta chain variable domain of TCR clone 16411 (TRBV19, TRBJ2-1)
CASSSPGVPLDGQFF

SEQ ID NO: 32823 - protein, 12 aa, Homo sapiens
  CDR3 for alpha chain variable domain of TCR clone 16412 (TRAV8-3, TRAJ20)
CAVGANDYKLSF

SEQ ID NO: 32824 - protein, 16 aa, Homo sapiens
  CDR3 for beta chain variable domain of TCR clone 16412 (TRBV19, TRBJ2-2)
CTSRSPGTGATGELFF

SEQ ID NO: 32825 - protein, 18 aa, Homo sapiens
  CDR3 for alpha chain variable domain of TCR clone 16413 (TRAV13-1, TRAJ52)
CAASKRSAGGTSYGKLTF

SEQ ID NO: 32826 - protein, 13 aa, Homo sapiens
  CDR3 for beta chain variable domain of TCR clone 16413 (TRBV3-1, TRBJ1-1)
CASSPGVITEAFF

SEQ ID NO: 32827 - protein, 13 aa, Homo sapiens
  CDR3 for alpha chain variable domain of TCR clone 16414 (TRAV21, TRAJ27)
CAVRPGNAGKSTF

SEQ ID NO: 32828 - protein, 13 aa, Homo sapiens
  CDR3 for beta chain variable domain of TCR clone 16414 (TRBV7-3, TRBJ1-1)
CASSQDWGAEAFF

SEQ ID NO: 32829 - protein, 16 aa, Homo sapiens
  CDR3 for alpha chain variable domain of TCR clone 16415 (TRAV30, TRAJ24)
CGTETVDADSWGKFQF

SEQ ID NO: 32830 - protein, 14 aa, Homo sapiens
  CDR3 for beta chain variable domain of TCR clone 16415 (TRBV7-2, TRBJ1-2)
CASSQTGSTYGYTF

SEQ ID NO: 32831 - protein, 14 aa, Homo sapiens
  CDR3 for alpha chain variable domain of TCR clone 16416 (TRAV13-1, TRAJ35)
YAASKGGFGNVLHC

SEQ ID NO: 32832 - protein, 13 aa, Homo sapiens
  CDR3 for beta chain variable domain of TCR clone 16416 (TRBV7-3, TRBJ1-1)
CASSQDWGAEAFF

SEQ ID NO: 32833 - protein, 13 aa, Homo sapiens
  CDR3 for alpha chain variable domain of TCR clone 16417 (TRAV12-3, TRAJ13)
CAMGTGGYQKVTF

SEQ ID NO: 32834 - protein, 16 aa, Homo sapiens
  CDR3 for beta chain variable domain of TCR clone 16417 (TRBV9, TRBJ2-1)
CASSVGGGGNYNEQFL

SEQ ID NO: 32835 - protein, 14 aa, Homo sapiens
  CDR3 for alpha chain variable domain of TCR clone 16418 (TRAV3, TRAJ20)
CAVRDSFNDYKLSF

SEQ ID NO: 32836 - protein, 15 aa, Homo sapiens
  CDR3 for beta chain variable domain of TCR clone 16418 (TRBV11-3, TRBJ2-3)
CASLKDGREGDTQYF

SEQ ID NO: 32837 - protein, 17 aa, Homo sapiens
  CDR3 for alpha chain variable domain of TCR clone 16419 (TRAV12-3, TRAJ6)
CAMSARGGAGGSYIPTF

SEQ ID NO: 32838 - protein, 12 aa, Homo sapiens
  CDR3 for beta chain variable domain of TCR clone 16419 (TRBV12-4, TRBJ2-3)
CASSTLPDTRYF

SEQ ID NO: 32839 - protein, 12 aa, Homo sapiens
  CDR3 for alpha chain variable domain of TCR clone 16420 (TRAV12-3, TRAJ41)
CAMSYSGYVLNF

SEQ ID NO: 32840 - protein, 13 aa, Homo sapiens
  CDR3 for beta chain variable domain of TCR clone 16420 (TRBV7-3, TRBJ2-1)
CASSLDSYNEQFF

SEQ ID NO: 32841 - protein, 23 aa, Homo sapiens
  CDR3 for alpha chain variable domain of TCR clone 16421 (TRAV8-1, TRAJ6)
CAVNTPPEEATYLHLEEEPALLF

SEQ ID NO: 32842 - protein, 14 aa, Homo sapiens
  CDR3 for beta chain variable domain of TCR clone 16421 (TRBV12-4, TRBJ2-1)
CASSLGQGASEQFF

SEQ ID NO: 32843 - protein, 11 aa, Homo sapiens
  CDR3 for alpha chain variable domain of TCR clone 16422 (TRAV12-3, TRAJ43)
CAMSVSNDMRF

SEQ ID NO: 32844 - protein, 13 aa, Homo sapiens
  CDR3 for beta chain variable domain of TCR clone 16422 (TRBV20-1, TRBJ1-1)
CSAPLGGGTEDFF

SEQ ID NO: 32845 - protein, 15 aa, Homo sapiens
  CDR3 for alpha chain variable domain of TCR clone 16423 (TRAV23/DV6, TRAJ15)
CAALPAGRNCSDLLE

SEQ ID NO: 32846 - protein, 14 aa, Homo sapiens
  CDR3 for beta chain variable domain of TCR clone 16423 (TRBV7-9, TRBJ1-2)
CASSRQGANYGYTF

SEQ ID NO: 32847 - protein, 14 aa, Homo sapiens
  CDR3 for alpha chain variable domain of TCR clone 16424 (TRAV29/DV5, TRAJ54)
CAASAKQGAQKLVF

SEQ ID NO: 32848 - protein, 14 aa, Homo sapiens
  CDR3 for beta chain variable domain of TCR clone 16424 (TRBV7-9, TRBJ2-7)
CASSPSGGQNEQYF

SEQ ID NO: 32849 - protein, 12 aa, Homo sapiens
  CDR3 for alpha chain variable domain of TCR clone 16425 (TRAV8-3, TRAJ4)
PAFSGGYNKLIF

SEQ ID NO: 32850 - protein, 13 aa, Homo sapiens
  CDR3 for beta chain variable domain of TCR clone 16425 (TRBV20-1, TRBJ1-3)
CSAGAYSGNTMYF

SEQ ID NO: 32851 - protein, 10 aa, Homo sapiens
  CDR3 for alpha chain variable domain of TCR clone 16426 (TRAV30, TRAJ48)
CGIGNEKLTF

SEQ ID NO: 32852 - protein, 15 aa, Homo sapiens
  CDR3 for beta chain variable domain of TCR clone 16426 (TRBV20-1, TRBJ2-7)
CSARDRVSGMDEQYF

SEQ ID NO: 32853 - protein, 11 aa, Homo sapiens
  CDR3 for alpha chain variable domain of TCR clone 16427 (TRAV2, TRAJ33)
CAVESNHQLIW

SEQ ID NO: 32854 - protein, 15 aa, Homo sapiens
  CDR3 for beta chain variable domain of TCR clone 16427 (TRBV19, TRBJ1-1)
CASTSGQIQNTEAFF

SEQ ID NO: 32855 - protein, 16 aa, Homo sapiens
  CDR3 for alpha chain variable domain of TCR clone 16428 (TRAV4, TRAJ18)
CCVLLIGGSTLGRLYF

SEQ ID NO: 32856 - protein, 12 aa, Homo sapiens
  CDR3 for beta chain variable domain of TCR clone 16428 (TRBV6-3, TRBJ2-7)
CASSPTPYEQYF

SEQ ID NO: 32857 - protein, 15 aa, Homo sapiens
  CDR3 for alpha chain variable domain of TCR clone 16429 (TRAV12-2, TRAJ43)
CAFDMRFGAGTRLTV

SEQ ID NO: 32858 - protein, 18 aa, Homo sapiens
  CDR3 for beta chain variable domain of TCR clone 16429 (TRBV14, TRBJ2-3)
CASSQDRGVSQIRSILAQ

SEQ ID NO: 32859 - protein, 12 aa, Homo sapiens
  CDR3 for alpha chain variable domain of TCR clone 16430 (TRAV12-2, TRAJ8)
CAVNTGFQKLVF

SEQ ID NO: 32860 - protein, 15 aa, Homo sapiens
  CDR3 for beta chain variable domain of TCR clone 16430 (TRBV7-8, TRBJ1-5)
CASSLERRGLEPRHF

SEQ ID NO: 32861 - protein, 13 aa, Homo sapiens
  CDR3 for alpha chain variable domain of TCR clone 16431 (TRAV3, TRAJ27)
CAVRPLGAGKSTF

SEQ ID NO: 32862 - protein, 13 aa, Homo sapiens
  CDR3 for beta chain variable domain of TCR clone 16431 (TRBV7-9, TRBJ2-3)
CASSPGSTDTQYV

SEQ ID NO: 32863 - protein, 13 aa, Homo sapiens
  CDR3 for alpha chain variable domain of TCR clone 16432 (TRAV3, TRAJ20)
CCEAFCNDYKLSF

SEQ ID NO: 32864 - protein, 15 aa, Homo sapiens
  CDR3 for beta chain variable domain of TCR clone 16432 (TRBV19, TRBJ2-6)
RASVRRDSGANVLTF

SEQ ID NO: 32865 - protein, 11 aa, Homo sapiens
  CDR3 for alpha chain variable domain of TCR clone 16433 (TRAV1-1, TRAJ23)
CAVRQGGKLIF

SEQ ID NO: 32866 - protein, 15 aa, Homo sapiens
  CDR3 for beta chain variable domain of TCR clone 16433 (TRBV28, TRBJ2-1)
CASSIIAGGRSEQFF

SEQ ID NO: 32867 - protein, 11 aa, Homo sapiens
  CDR3 for alpha chain variable domain of TCR clone 16434 (TRAV12-1, TRAJ34)
CVVNKGRELIF

SEQ ID NO: 32868 - protein, 13 aa, Homo sapiens
  CDR3 for beta chain variable domain of TCR clone 16434 (TRBV6-1, TRBJ1-1)
CASSRQGNTEAFF

SEQ ID NO: 32869 - protein, 12 aa, Homo sapiens
  CDR3 for alpha chain variable domain of TCR clone 16435 (TRAV23/DV6, TRAJ53)
CATSKLGSGGSN

SEQ ID NO: 32870 - protein, 14 aa, Homo sapiens
  CDR3 for beta chain variable domain of TCR clone 16435 (TRBV7-9, TRBJ2-3)
CASSLEQGTNTQYF

SEQ ID NO: 32871 - protein, 15 aa, Homo sapiens
  CDR3 for alpha chain variable domain of TCR clone 16436 (TRAV35, TRAJ40)
CAGQLGTSGTYKYIF

SEQ ID NO: 32872 - protein, 14 aa, Homo sapiens
  CDR3 for beta chain variable domain of TCR clone 16436 (TRBV7-3, TRBJ2-1)
CASSLAGGANEQFF

SEQ ID NO: 32873 - protein, 14 aa, Homo sapiens
  CDR3 for alpha chain variable domain of TCR clone 16437 (TRAV16, TRAJ33)
CALSAMDSNYQLIW

SEQ ID NO: 32874 - protein, 12 aa, Homo sapiens
  CDR3 for beta chain variable domain of TCR clone 16437 (TRBV5-1, TRBJ1-2)
RASSQDTYGYTF

SEQ ID NO: 32875 - protein, 14 aa, Homo sapiens
  CDR3 for alpha chain variable domain of TCR clone 16438 (TRAV12-2, TRAJ13)
CAVKKTGGYQKVTF

SEQ ID NO: 32876 - protein, 12 aa, Homo sapiens
  CDR3 for beta chain variable domain of TCR clone 16438 (TRBV12-4, TRBJ1-2)
CASSVIWLHLRF

SEQ ID NO: 32877 - protein, 13 aa, Homo sapiens
  CDR3 for alpha chain variable domain of TCR clone 16439 (TRAV8-3, TRAJ28)
CAVGAVGSHQLTF

SEQ ID NO: 32878 - protein, 14 aa, Homo sapiens
  CDR3 for beta chain variable domain of TCR clone 16439 (TRBV7-2, TRBJ2-7)
CASRSQGAAYEQYF

SEQ ID NO: 32879 - protein, 14 aa, Homo sapiens
  CDR3 for alpha chain variable domain of TCR clone 16440 (TRAV12-3, TRAJ56)
CAMSVTGANSKLTF

SEQ ID NO: 32880 - protein, 17 aa, Homo sapiens
  CDR3 for beta chain variable domain of TCR clone 16440 (TRBV20-1, TRBJ2-3)
CSASLRGRGGSADTQYF

SEQ ID NO: 32881 - protein, 15 aa, Homo sapiens
  CDR3 for alpha chain variable domain of TCR clone 16441 (TRAV36/DV7, TRAJ54)
CAVEKPVQGAQKLVF

SEQ ID NO: 32882 - protein, 14 aa, Homo sapiens
  CDR3 for beta chain variable domain of TCR clone 16441 (TRBV12-4, TRBJ1-1)
CASSSARGYTEAFF

SEQ ID NO: 32883 - protein, 13 aa, Homo sapiens
  CDR3 for alpha chain variable domain of TCR clone 16442 (TRAV8-6, TRAJ49)
CAVITNTGNKFYF

SEQ ID NO: 32884 - protein, 14 aa, Homo sapiens
  CDR3 for beta chain variable domain of TCR clone 16442 (TRBV5-1, TRBJ2-7)
CASSRGESLYEQYF

SEQ ID NO: 32885 - protein, 17 aa, Homo sapiens
  CDR3 for alpha chain variable domain of TCR clone 16443 (TRAV3, TRAJ42)
CAVRDRAYGGSQGNLIF

SEQ ID NO: 32886 - protein, 15 aa, Homo sapiens
  CDR3 for beta chain variable domain of TCR clone 16443 (TRBV6-6, TRBJ2-7)
CASSYSYGGSYEQYF

SEQ ID NO: 32887 - protein, 15 aa, Homo sapiens
  CDR3 for alpha chain variable domain of TCR clone 16444 (TRAV8-6, TRAJ10)
CAVSDQAGGGNKLTF

SEQ ID NO: 32888 - protein, 14 aa, Homo sapiens
  CDR3 for beta chain variable domain of TCR clone 16444 (TRBV7-8, TRBJ2-3)
CASSLEAGTDTQYF

SEQ ID NO: 32889 - protein, 15 aa, Homo sapiens
  CDR3 for alpha chain variable domain of TCR clone 16445 (TRAV8-3, TRAJ45)
SASSYSGGGADGLTF

SEQ ID NO: 32890 - protein, 13 aa, Homo sapiens
  CDR3 for beta chain variable domain of TCR clone 16445 (TRBV10-3, TRBJ2-7)
CASKLAVNYEQYF

SEQ ID NO: 32891 - protein, 18 aa, Homo sapiens
  CDR3 for alpha chain variable domain of TCR clone 16446 (TRAV13-1, TRAJ52)
CAAKNPNAGGTSYGKLTF

SEQ ID NO: 32892 - protein, 16 aa, Homo sapiens
  CDR3 for beta chain variable domain of TCR clone 16446 (TRBV12-4, TRBJ1-5)
CASSRPVGGSNQPQHF

SEQ ID NO: 32893 - protein, 12 aa, Homo sapiens
  CDR3 for alpha chain variable domain of TCR clone 16447 (TRAV1-2, TRAJ33)
CAALDSNYQLIW

SEQ ID NO: 32894 - protein, 13 aa, Homo sapiens
  CDR3 for beta chain variable domain of TCR clone 16447 (TRBV7-2, TRBJ2-7)
CASSFGQEKEQYL

SEQ ID NO: 32895 - protein, 13 aa, Homo sapiens
  CDR3 for alpha chain variable domain of TCR clone 16448 (TRAV13-2, TRAJ21)
CAENVGQLQQILL

SEQ ID NO: 32896 - protein, 15 aa, Homo sapiens
  CDR3 for beta chain variable domain of TCR clone 16448 (TRBV20-1, TRBJ2-7)
CSARDRVSGMDEQYF

SEQ ID NO: 32897 - protein, 14 aa, Homo sapiens
  CDR3 for alpha chain variable domain of TCR clone 16449 (TRAV1-2, TRAJ16)
CAVNRFSDGQKLLF

SEQ ID NO: 32898 - protein, 14 aa, Homo sapiens
  CDR3 for beta chain variable domain of TCR clone 16449 (TRBV7-9, TRBJ2-2)
CASSLVQDTGELFF

SEQ ID NO: 32899 - protein, 11 aa, Homo sapiens
  CDR3 for alpha chain variable domain of TCR clone 16450 (TRAV2, TRAJ13)
CASGGYQKVTF

SEQ ID NO: 32900 - protein, 15 aa, Homo sapiens
  CDR3 for beta chain variable domain of TCR clone 16450 (TRBV4-1, TRBJ1-4)
CASSDTGGTNEKLFF

SEQ ID NO: 32901 - protein, 13 aa, Homo sapiens
  CDR3 for alpha chain variable domain of TCR clone 16451 (TRAV2, TRAJ20)
CAVEDPSEYKLSF

SEQ ID NO: 32902 - protein, 16 aa, Homo sapiens
  CDR3 for beta chain variable domain of TCR clone 16451 (TRBV25-1, TRBJ2-7)
CASSELTGGGIYGQYF

SEQ ID NO: 32903 - protein, 15 aa, Homo sapiens
  CDR3 for alpha chain variable domain of TCR clone 16452 (TRAV12-2, TRAJ45)
CAVKRTGGGADGLTF

SEQ ID NO: 32904 - protein, 16 aa, Homo sapiens
  CDR3 for beta chain variable domain of TCR clone 16452 (TRBV28, TRBJ2-3)
CASSSFGTGGTDTQYF

SEQ ID NO: 32905 - protein, 17 aa, Homo sapiens
  CDR3 for alpha chain variable domain of TCR clone 16453 (TRAV8-6, TRAJ58)
CAVSSWVGETSGSRLTF

SEQ ID NO: 32906 - protein, 15 aa, Homo sapiens
  CDR3 for beta chain variable domain of TCR clone 16453 (TRBV9, TRBJ1-6)
CASSVAGTGDSPLHF

SEQ ID NO: 32907 - protein, 12 aa, Homo sapiens
  CDR3 for alpha chain variable domain of TCR clone 16454 (TRAV12-1, TRAJ40)
CVVYSGTYKYIF

SEQ ID NO: 32908 - protein, 18 aa, Homo sapiens
  CDR3 for beta chain variable domain of TCR clone 16454 (TRBV11-2, TRBJ2-3)
CASSLRGASRGAPNTQYF

SEQ ID NO: 32909 - protein, 16 aa, Homo sapiens
  CDR3 for alpha chain variable domain of TCR clone 16455 (TRAV30, TRAJ24)
CGTEIVDADSWGKFQF

SEQ ID NO: 32910 - protein, 13 aa, Homo sapiens
  CDR3 for beta chain variable domain of TCR clone 16455 (TRBV20-1, TRBJ1-1)
CSALPGGHTEAFF

SEQ ID NO: 32911 - protein, 12 aa, Homo sapiens
  CDR3 for alpha chain variable domain of TCR clone 16456 (TRAV12-1, TRAJ40)
CVVYSVTYKYIF

SEQ ID NO: 32912 - protein, 18 aa, Homo sapiens
  CDR3 for beta chain variable domain of TCR clone 16456 (TRBV11-2, TRBJ2-3)
CASSLGGASRGAPNTQYF

SEQ ID NO: 32913 - protein, 13 aa, Homo sapiens
  CDR3 for alpha chain variable domain of TCR clone 16457 (TRAV8-6, TRAJ24)
CAVSSDSWGKLQF

SEQ ID NO: 32914 - protein, 15 aa, Homo sapiens
  CDR3 for beta chain variable domain of TCR clone 16457 (TRBV6-1, TRBJ1-3)
CASSDFGFSGNTIYF

SEQ ID NO: 32915 - protein, 18 aa, Homo sapiens
  CDR3 for alpha chain variable domain of TCR clone 16458 (TRAV29/DV5, TRAJ52)
CAAGFRVAGGTSYGKLTF

SEQ ID NO: 32916 - protein, 16 aa, Homo sapiens
  CDR3 for beta chain variable domain of TCR clone 16458 (TRBV7-3, TRBJ2-2)
CASSLKRGTLSGELFF

SEQ ID NO: 32917 - protein, 13 aa, Homo sapiens
  CDR3 for alpha chain variable domain of TCR clone 16459 (TRAV17, TRAJ9)
CATDYTGGFKTIF

SEQ ID NO: 32918 - protein, 14 aa, Homo sapiens
  CDR3 for beta chain variable domain of TCR clone 16459 (TRBV19, TRBJ2-5)
CASSITGQQETQYF

SEQ ID NO: 32919 - protein, 15 aa, Homo sapiens
  CDR3 for alpha chain variable domain of TCR clone 16460 (TRAV3, TRAJ3)
CAVRDRDSSASKILF

SEQ ID NO: 32920 - protein, 18 aa, Homo sapiens
  CDR3 for beta chain variable domain of TCR clone 16460 (TRBV25-1, TRBJ1-2)
CASSGLQNGQGLIFGYTF

SEQ ID NO: 32921 - protein, 12 aa, Homo sapiens
  CDR3 for alpha chain variable domain of TCR clone 16461 (TRAV39, TRAJ21)
CAVLYNFNKFYF

SEQ ID NO: 32922 - protein, 18 aa, Homo sapiens
  CDR3 for beta chain variable domain of TCR clone 16461 (TRBV27, TRBJ2-5)
CASSPWKGQVRTLETQYF

SEQ ID NO: 32923 - protein, 15 aa, Homo sapiens
  CDR3 for alpha chain variable domain of TCR clone 16462 (TRAV3, TRAJ5)
CAVGDRKTGRRALTF

SEQ ID NO: 32924 - protein, 15 aa, Homo sapiens
  CDR3 for beta chain variable domain of TCR clone 16462 (TRBV7-8, TRBJ2-1)
CASSLADSLYNEQFF

SEQ ID NO: 32925 - protein, 15 aa, Homo sapiens
  CDR3 for alpha chain variable domain of TCR clone 16463 (TRAV17, TRAJ57)
CATGPSQGGSEKLVF

SEQ ID NO: 32926 - protein, 16 aa, Homo sapiens
  CDR3 for beta chain variable domain of TCR clone 16463 (TRBV12-4, TRBJ1-5)
CASSRPVGGSDQPQHF

SEQ ID NO: 32927 - protein, 15 aa, Homo sapiens
  CDR3 for alpha chain variable domain of TCR clone 16464 (TRAV26-1, TRAJ44)
CIVRANTGAASKLTF

SEQ ID NO: 32928 - protein, 16 aa, Homo sapiens
  CDR3 for beta chain variable domain of TCR clone 16464 (TRBV7-7, TRBJ2-1)
CASSLASGTSYNEQFF

SEQ ID NO: 32929 - protein, 13 aa, Homo sapiens
  CDR3 for alpha chain variable domain of TCR clone 16465 (TRAV8-3, TRAJ28)
CAVGAVGSYQLTV

SEQ ID NO: 32930 - protein, 14 aa, Homo sapiens
  CDR3 for beta chain variable domain of TCR clone 16465 (TRBV7-2, TRBJ2-7)
CASRSQGAAYEQYF

SEQ ID NO: 32931 - protein, 16 aa, Homo sapiens
  CDR3 for alpha chain variable domain of TCR clone 16466 (TRAV26-1, TRAJ37)
CIVRGDGSGNTGKLIF

SEQ ID NO: 32932 - protein, 17 aa, Homo sapiens
  CDR3 for beta chain variable domain of TCR clone 16466 (TRBV4-1, TRBJ2-7)
CASSRGPLGVRGGEQYF

SEQ ID NO: 32933 - protein, 16 aa, Homo sapiens
  CDR3 for alpha chain variable domain of TCR clone 16467 (TRAV12-1, TRAJ42)
CVVTPYYGGSQGNPIF

SEQ ID NO: 32934 - protein, 18 aa, Homo sapiens
  CDR3 for beta chain variable domain of TCR clone 16467 (TRBV24-1, TRBJ2-3)
CATSDLPRLAGGADTQYF

SEQ ID NO: 32935 - protein, 14 aa, Homo sapiens
  CDR3 for alpha chain variable domain of TCR clone 16468 (TRAV12-3, TRAJ10)
SHLPLTGGGNKLTF

SEQ ID NO: 32936 - protein, 15 aa, Homo sapiens
  CDR3 for beta chain variable domain of TCR clone 16468 (TRBV28, TRBJ1-3)
CASSMGWASGNTIYF

SEQ ID NO: 32937 - protein, 12 aa, Homo sapiens
  CDR3 for alpha chain variable domain of TCR clone 16469 (TRAV21, TRAJ33)
CAKMDSNYQLIW

SEQ ID NO: 32938 - protein, 14 aa, Homo sapiens
  CDR3 for beta chain variable domain of TCR clone 16469 (TRBV2, TRBJ2-7)
CASSITSGGYEQYF

SEQ ID NO: 32939 - protein, 13 aa, Homo sapiens
  CDR3 for alpha chain variable domain of TCR clone 16470 (TRAV21, TRAJ27)
CAARPGNAGKSTF

SEQ ID NO: 32940 - protein, 14 aa, Homo sapiens
  CDR3 for beta chain variable domain of TCR clone 16470 (TRBV7-6, TRBJ2-3)
FASSLGTVTDTQYF

SEQ ID NO: 32941 - protein, 14 aa, Homo sapiens
  CDR3 for alpha chain variable domain of TCR clone 16471 (TRAV3, TRAJ22)
CAVRDFGSARQLTF

SEQ ID NO: 32942 - protein, 13 aa, Homo sapiens
  CDR3 for beta chain variable domain of TCR clone 16471 (TRBV11-2, TRBJ2-5)
CASGHGAKETQYF

SEQ ID NO: 32943 - protein, 11 aa, Homo sapiens
  CDR3 for alpha chain variable domain of TCR clone 16472 (TRAV12-3, TRAJ27)
CAMANAGKSTF

SEQ ID NO: 32944 - protein, 13 aa, Homo sapiens
  CDR3 for beta chain variable domain of TCR clone 16472 (TRBV20-1, TRBJ1-1)
CSARVGGNTEAFF

SEQ ID NO: 32945 - protein, 13 aa, Homo sapiens
  CDR3 for alpha chain variable domain of TCR clone 16473 (TRAV12-3, TRAJ47)
CAMKKEYGNKLVF

SEQ ID NO: 32946 - protein, 16 aa, Homo sapiens
  CDR3 for beta chain variable domain of TCR clone 16473 (TRBV20-1, TRBJ1-2)
CSASMGQGVANYGYTF

SEQ ID NO: 32947 - protein, 12 aa, Homo sapiens
  CDR3 for alpha chain variable domain of TCR clone 16474 (TRAV12-1, TRAJ40)
CVFYSGTYKYIF

SEQ ID NO: 32948 - protein, 18 aa, Homo sapiens
  CDR3 for beta chain variable domain of TCR clone 16474 (TRBV12-4, TRBJ2-2)
CASSSVAGTRGRTGELFF

SEQ ID NO: 32949 - protein, 13 aa, Homo sapiens
  CDR3 for alpha chain variable domain of TCR clone 16475 (TRAV21, TRAJ57)
CAVIEGGSEKLVF

SEQ ID NO: 32950 - protein, 15 aa, Homo sapiens
  CDR3 for beta chain variable domain of TCR clone 16475 (TRBV10-3, TRBJ2-5)
CTISEFGRGQETQYF

SEQ ID NO: 32951 - protein, 11 aa, Homo sapiens
  CDR3 for alpha chain variable domain of TCR clone 16476 (TRAV21, TRAJ34)
CAVTNTDKLIF

SEQ ID NO: 32952 - protein, 15 aa, Homo sapiens
  CDR3 for beta chain variable domain of TCR clone 16476 (TRBV9, TRBJ1-6)
CASSVAGTGDSPLHF

SEQ ID NO: 32953 - protein, 14 aa, Homo sapiens
  CDR3 for alpha chain variable domain of TCR clone 16477 (TRAV2, TRAJ9)
CAVEDRSGGFKTIF

SEQ ID NO: 32954 - protein, 20 aa, Homo sapiens
  CDR3 for beta chain variable domain of TCR clone 16477 (TRBV7-8, TRBJ2-2)
CASSHLFPGPTIHITGELFF

SEQ ID NO: 32955 - protein, 15 aa, Homo sapiens
  CDR3 for alpha chain variable domain of TCR clone 16478 (TRAV12-1, TRAJ44)
CVADLPTGTDSKLTF

SEQ ID NO: 32956 - protein, 13 aa, Homo sapiens
  CDR3 for beta chain variable domain of TCR clone 16478 (TRBV6-5, TRBJ2-5)
CASSPQGGETQYF

SEQ ID NO: 32957 - protein, 12 aa, Homo sapiens
  CDR3 for alpha chain variable domain of TCR clone 16479 (TRAV13-2, TRAJ23)
CAERHRGGKLIF

SEQ ID NO: 32958 - protein, 16 aa, Homo sapiens
  CDR3 for beta chain variable domain of TCR clone 16479 (TRBV20-1, TRBJ1-4)
RSAPGQGLLTNEKLFF

SEQ ID NO: 32959 - protein, 14 aa, Homo sapiens
  CDR3 for alpha chain variable domain of TCR clone 16480 (TRAV1-2, TRAJ16)
CAVNRFSDDQKLLF

SEQ ID NO: 32960 - protein, 12 aa, Homo sapiens
  CDR3 for beta chain variable domain of TCR clone 16480 (TRBV28, TRBJ2-6)
CAIQAGANVLTF

SEQ ID NO: 32961 - protein, 16 aa, Homo sapiens
  CDR3 for alpha chain variable domain of TCR clone 16481 (TRAV14/DV4, TRAJ8)
CAMREGQYTGFQKLVF

SEQ ID NO: 32962 - protein, 15 aa, Homo sapiens
  CDR3 for beta chain variable domain of TCR clone 16481 (TRBV28, TRBJ1-3)
CASGATGNSGNTIYF

SEQ ID NO: 32963 - protein, 16 aa, Homo sapiens
  CDR3 for alpha chain variable domain of TCR clone 16482 (TRAV8-3, TRAJ13)
RAVGAYPSGGYQKVTF

SEQ ID NO: 32964 - protein, 15 aa, Homo sapiens
  CDR3 for beta chain variable domain of TCR clone 16482 (TRBV19, TRBJ1-5)
CASSIVWADNQPQHF

SEQ ID NO: 32965 - protein, 13 aa, Homo sapiens
  CDR3 for alpha chain variable domain of TCR clone 16483 (TRAV8-3, TRAJ28)
CAVGAVGSYQLAF

SEQ ID NO: 32966 - protein, 15 aa, Homo sapiens
  CDR3 for beta chain variable domain of TCR clone 16483 (TRBV7-9, TRBJ1-5)
CASSQGHQPNQPQHF

SEQ ID NO: 32967 - protein, 13 aa, Homo sapiens
  CDR3 for alpha chain variable domain of TCR clone 16484 (TRAV12-2, TRAJ20)
RAVYPSNDYKLSF

SEQ ID NO: 32968 - protein, 15 aa, Homo sapiens
  CDR3 for beta chain variable domain of TCR clone 16484 (TRBV27, TRBJ2-5)
CASSLYPRGGETQYF

SEQ ID NO: 32969 - protein, 12 aa, Homo sapiens
  CDR3 for alpha chain variable domain of TCR clone 16485 (TRAV26-2, TRAJ21)
CILKGNFNKFYF

SEQ ID NO: 32970 - protein, 20 aa, Homo sapiens
  CDR3 for beta chain variable domain of TCR clone 16485 (TRBV7-8, TRBJ2-2)
CASSHLFPGPTIHITGELFF

SEQ ID NO: 32971 - protein, 10 aa, Homo sapiens
  CDR3 for alpha chain variable domain of TCR clone 16486 (TRAV23/DV6, TRAJ57)
CAASSTISQG

SEQ ID NO: 32972 - protein, 14 aa, Homo sapiens
  CDR3 for beta chain variable domain of TCR clone 16486 (TRBV25-1, TRBJ1-1)
CASTHLGGNTEAFF

SEQ ID NO: 32973 - protein, 13 aa, Homo sapiens
  CDR3 for alpha chain variable domain of TCR clone 16487 (TRAV12-2, TRAJ37)
CAGGSGNTGKLIF

SEQ ID NO: 32974 - protein, 14 aa, Homo sapiens
  CDR3 for beta chain variable domain of TCR clone 16487 (TRBV6-1, TRBJ2-6)
CTSQQGAGANVLTF

SEQ ID NO: 32975 - protein, 14 aa, Homo sapiens
  CDR3 for alpha chain variable domain of TCR clone 16488 (TRAV20, TRAJ42)
CAVQAGGSQGNRIF

SEQ ID NO: 32976 - protein, 14 aa, Homo sapiens
  CDR3 for beta chain variable domain of TCR clone 16488 (TRBV28, TRBJ1-2)
CASRIQGANYGYTF

SEQ ID NO: 32977 - protein, 13 aa, Homo sapiens
  CDR3 for alpha chain variable domain of TCR clone 16489 (TRAV21, TRAJ57)
CAVTQGGSEKLVF

SEQ ID NO: 32978 - protein, 16 aa, Homo sapiens
  CDR3 for beta chain variable domain of TCR clone 16489 (TRBV29-1, TRBJ2-7)
CSAEDAEDGTAYEQYF

SEQ ID NO: 32979 - protein, 12 aa, Homo sapiens
  CDR3 for alpha chain variable domain of TCR clone 16490 (TRAV2, TRAJ36)
RIGETGANNLFF

SEQ ID NO: 32980 - protein, 14 aa, Homo sapiens
  CDR3 for beta chain variable domain of TCR clone 16490 (TRBV7-9, TRBJ2-5)
CASSLDTAQETQYF

SEQ ID NO: 32981 - protein, 11 aa, Homo sapiens
  CDR3 for alpha chain variable domain of TCR clone 16491 (TRAV21, TRAJ34)
CAHYNTDKLIF

SEQ ID NO: 32982 - protein, 13 aa, Homo sapiens
  CDR3 for beta chain variable domain of TCR clone 16491 (TRBV7-9, TRBJ1-2)
CASSLKQNYGYTF

SEQ ID NO: 32983 - protein, 14 aa, Homo sapiens
  CDR3 for alpha chain variable domain of TCR clone 16492 (TRAV17, TRAJ5)
CATVALTGRRALTF

SEQ ID NO: 32984 - protein, 14 aa, Homo sapiens
  CDR3 for beta chain variable domain of TCR clone 16492 (TRBV28, TRBJ2-7)
CASSPYGMAYEQYL

SEQ ID NO: 32985 - protein, 15 aa, Homo sapiens
  CDR3 for alpha chain variable domain of TCR clone 16493 (TRAV35, TRAJ40)
CAGQLGTSGTYKYTF

SEQ ID NO: 32986 - protein, 14 aa, Homo sapiens
  CDR3 for beta chain variable domain of TCR clone 16493 (TRBV7-3, TRBJ2-1)
CASSLAGGTNEQFF

SEQ ID NO: 32987 - protein, 11 aa, Homo sapiens
  CDR3 for alpha chain variable domain of TCR clone 16494 (TRAV12-3, TRAJ27)
CAMANAGKSTF

SEQ ID NO: 32988 - protein, 13 aa, Homo sapiens
  CDR3 for beta chain variable domain of TCR clone 16494 (TRBV20-1, TRBJ1-1)
YSARVGGNTEAFF

SEQ ID NO: 32989 - protein, 15 aa, Homo sapiens
  CDR3 for alpha chain variable domain of TCR clone 16495 (TRAV29/DV5, TRAJ53)
CAASASGGSNYKLTF

SEQ ID NO: 32990 - protein, 19 aa, Homo sapiens
  CDR3 for beta chain variable domain of TCR clone 16495 (TRBV5-1, TRBJ2-3)
CASSLWLAGGIATTDTQYF

SEQ ID NO: 32991 - protein, 15 aa, Homo sapiens
  CDR3 for alpha chain variable domain of TCR clone 16496 (TRAV8-3, TRAJ11)
CAVGLLNSGYSTLTF

SEQ ID NO: 32992 - protein, 16 aa, Homo sapiens
  CDR3 for beta chain variable domain of TCR clone 16496 (TRBV7-9, TRBJ1-2)
CASSLGFSPGEDGYTF

SEQ ID NO: 32993 - protein, 13 aa, Homo sapiens
  CDR3 for alpha chain variable domain of TCR clone 16497 (TRAV13-1, TRAJ39)
CAASIWAGNMLTL

SEQ ID NO: 32994 - protein, 15 aa, Homo sapiens
  CDR3 for beta chain variable domain of TCR clone 16497 (TRBV7-9, TRBJ1-1)
CASSLLEQGGTEAFF

SEQ ID NO: 32995 - protein, 15 aa, Homo sapiens
  CDR3 for alpha chain variable domain of TCR clone 16498 (TRAV3, TRAJ22)
CAVRDRGGSARQLTL

SEQ ID NO: 32996 - protein, 16 aa, Homo sapiens
  CDR3 for beta chain variable domain of TCR clone 16498 (TRBV5-4, TRBJ2-3)
CASQQPGAGGADTQYF

SEQ ID NO: 32997 - protein, 14 aa, Homo sapiens
  CDR3 for alpha chain variable domain of TCR clone 16499 (TRAV17, TRAJ54)
CATDADQGAQKLVF

SEQ ID NO: 32998 - protein, 12 aa, Homo sapiens
  CDR3 for beta chain variable domain of TCR clone 16499 (TRBV6-3, TRBJ2-1)
CASSGSYNEQFF

SEQ ID NO: 32999 - protein, 13 aa, Homo sapiens
  CDR3 for alpha chain variable domain of TCR clone 16500 (TRAV13-1, TRAJ21)
CAASIYNFNKFYF

SEQ ID NO: 33000 - protein, 14 aa, Homo sapiens
  CDR3 for beta chain variable domain of TCR clone 16500 (TRBV7-6, TRBJ2-3)
CASSLGTVTDTQYF

SEQ ID NO: 33001 - protein, 18 aa, Homo sapiens
  CDR3 for alpha chain variable domain of TCR clone 16501 (TRAV13-1, TRAJ52)
CAAKNPNAGGTSYGKLTF

SEQ ID NO: 33002 - protein, 14 aa, Homo sapiens
  CDR3 for beta chain variable domain of TCR clone 16501 (TRBV12-4, TRBJ2-5)
CASSSGLGKETQYF

SEQ ID NO: 33003 - protein, 10 aa, Homo sapiens
  CDR3 for alpha chain variable domain of TCR clone 16502 (TRAV23/DV6, TRAJ57)
CAASSTLSQG

SEQ ID NO: 33004 - protein, 14 aa, Homo sapiens
  CDR3 for beta chain variable domain of TCR clone 16502 (TRBV25-1, TRBJ1-1)
CVSTHLGGNTEAFF

SEQ ID NO: 33005 - protein, 14 aa, Homo sapiens
  CDR3 for alpha chain variable domain of TCR clone 16503 (TRAV2, TRAJ37)
CAVDFTSNTGKPIF

SEQ ID NO: 33006 - protein, 15 aa, Homo sapiens
  CDR3 for beta chain variable domain of TCR clone 16503 (TRBV20-1, TRBJ1-1)
CSASRGVTGNTEAFF

SEQ ID NO: 33007 - protein, 11 aa, Homo sapiens
  CDR3 for alpha chain variable domain of TCR clone 16504 (TRAV21, TRAJ31)
CAVRNNARLMF

SEQ ID NO: 33008 - protein, 17 aa, Homo sapiens
  CDR3 for beta chain variable domain of TCR clone 16504 (TRBV28, TRBJ1-5)
CASSLSWLVSSNRPQHF

SEQ ID NO: 33009 - protein, 10 aa, Homo sapiens
  CDR3 for alpha chain variable domain of TCR clone 16505 (TRAV21, TRAJ43)
CAVSANDMRS

SEQ ID NO: 33010 - protein, 13 aa, Homo sapiens
  CDR3 for beta chain variable domain of TCR clone 16505 (TRBV7-2, TRBJ1-2)
CASSLDGIYGYTF

SEQ ID NO: 33011 - protein, 15 aa, Homo sapiens
  CDR3 for alpha chain variable domain of TCR clone 16506 (TRAV2, TRAJ15)
CAVGDRGQAGTALIF

SEQ ID NO: 33012 - protein, 13 aa, Homo sapiens
  CDR3 for beta chain variable domain of TCR clone 16506 (TRBV10-2, TRBJ2-7)
CASGASGGYEQYF

SEQ ID NO: 33013 - protein, 14 aa, Homo sapiens
  CDR3 for alpha chain variable domain of TCR clone 16507 (TRAV35, TRAJ22)
CAGLRPGSARQLTF

SEQ ID NO: 33014 - protein, 15 aa, Homo sapiens
  CDR3 for beta chain variable domain of TCR clone 16507 (TRBV12-4, TRBJ2-5)
CASSPSTGLQETQYF

SEQ ID NO: 33015 - protein, 16 aa, Homo sapiens
  CDR3 for alpha chain variable domain of TCR clone 16508 (TRAV12-1, TRAJ48)
CVVNMVSNFGNEKLTF

SEQ ID NO: 33016 - protein, 18 aa, Homo sapiens
  CDR3 for beta chain variable domain of TCR clone 16508 (TRBV11-2, TRBJ2-6)
CASSLDPFLGTGANVLTF

SEQ ID NO: 33017 - protein, 14 aa, Homo sapiens
  CDR3 for alpha chain variable domain of TCR clone 16509 (TRAV13-1, TRAJ40)
CAASMTSGTYKYIF

SEQ ID NO: 33018 - protein, 15 aa, Homo sapiens
  CDR3 for beta chain variable domain of TCR clone 16509 (TRBV7-3, TRBJ2-1)
CASGPTGGGEVEQFF

SEQ ID NO: 33019 - protein, 18 aa, Homo sapiens
  CDR3 for alpha chain variable domain of TCR clone 16510 (TRAV29/DV5, TRAJ52)
CAAGFRGAGGTSYGKLPF

SEQ ID NO: 33020 - protein, 16 aa, Homo sapiens
  CDR3 for beta chain variable domain of TCR clone 16510 (TRBV7-3, TRBJ2-2)
CASSLKRGTLSGELFF

SEQ ID NO: 33021 - protein, 14 aa, Homo sapiens
  CDR3 for alpha chain variable domain of TCR clone 16511 (TRAV12-2, TRAJ40)
CAVKIPSGTYKYIF

SEQ ID NO: 33022 - protein, 14 aa, Homo sapiens
  CDR3 for beta chain variable domain of TCR clone 16511 (TRBV7-2, TRBJ2-7)
CASSPKTSFYEQYF

SEQ ID NO: 33023 - protein, 14 aa, Homo sapiens
  CDR3 for alpha chain variable domain of TCR clone 16512 (TRAV12-1, TRAJ17)
CVVNYKAAGNKLTF

SEQ ID NO: 33024 - protein, 17 aa, Homo sapiens
  CDR3 for beta chain variable domain of TCR clone 16512 (TRBV20-1, TRBJ2-1)
CSASSSGLTGSYNEQFF

SEQ ID NO: 33025 - protein, 14 aa, Homo sapiens
  CDR3 for alpha chain variable domain of TCR clone 16513 (TRAV8-3, TRAJ35)
CAVVPQGFGNVLHF

SEQ ID NO: 33026 - protein, 15 aa, Homo sapiens
  CDR3 for beta chain variable domain of TCR clone 16513 (TRBV6-1, TRBJ2-2)
CASSAGQGYTGELFF

SEQ ID NO: 33027 - protein, 15 aa, Homo sapiens
  CDR3 for alpha chain variable domain of TCR clone 16514 (TRAV38-1, TRAJ37)
CAFIFGSGNTGTLIF

SEQ ID NO: 33028 - protein, 12 aa, Homo sapiens
  CDR3 for beta chain variable domain of TCR clone 16514 (TRBV7-9, TRBJ2-7)
CASSLEGYEQYF

SEQ ID NO: 33029 - protein, 15 aa, Homo sapiens
  CDR3 for alpha chain variable domain of TCR clone 16515 (TRAV3, TRAJ20)
CAVRDIKLSDYKRSF

SEQ ID NO: 33030 - protein, 15 aa, Homo sapiens
  CDR3 for beta chain variable domain of TCR clone 16515 (TRBV7-9, TRBJ1-6)
CASSSPGRGNSPLHF

SEQ ID NO: 33031 - protein, 18 aa, Homo sapiens
  CDR3 for alpha chain variable domain of TCR clone 16516 (TRAV21, TRAJ52)
CAVWPSPAGGTSYGKLTF

SEQ ID NO: 33032 - protein, 17 aa, Homo sapiens
  CDR3 for beta chain variable domain of TCR clone 16516 (TRBV13, TRBJ2-3)
CASSLSRVAGGRNTQYF

SEQ ID NO: 33033 - protein, 11 aa, Homo sapiens
  CDR3 for alpha chain variable domain of TCR clone 16517 (TRAV12-3, TRAJ27)
CAMPMQANQPL

SEQ ID NO: 33034 - protein, 13 aa, Homo sapiens
  CDR3 for beta chain variable domain of TCR clone 16517 (TRBV20-1, TRBJ1-1)
CSARVGGNTEAFF

SEQ ID NO: 33035 - protein, 17 aa, Homo sapiens
  CDR3 for alpha chain variable domain of TCR clone 16518 (TRAV13-1, TRAJ28)
CAASPPYSGAGSYQLTF

SEQ ID NO: 33036 - protein, 15 aa, Homo sapiens
  CDR3 for beta chain variable domain of TCR clone 16518 (TRBV6-3, TRBJ2-7)
CASSSPGTVFYEQYF

SEQ ID NO: 33037 - protein, 15 aa, Homo sapiens
  CDR3 for alpha chain variable domain of TCR clone 16519 (TRAV3, TRAJ47)
CAVRDIGEYGSKLVF

SEQ ID NO: 33038 - protein, 14 aa, Homo sapiens
  CDR3 for beta chain variable domain of TCR clone 16519 (TRBV13, TRBJ2-5)
CASSLERVGETQYF

SEQ ID NO: 33039 - protein, 11 aa, Homo sapiens
  CDR3 for alpha chain variable domain of TCR clone 16520 (TRAV3, TRAJ21)
CAVGNFNKFYF

SEQ ID NO: 33040 - protein, 16 aa, Homo sapiens
  CDR3 for beta chain variable domain of TCR clone 16520 (TRBV19, TRBJ2-1)
CASSKSGPSSYNEQFF

SEQ ID NO: 33041 - protein, 13 aa, Homo sapiens
  CDR3 for alpha chain variable domain of TCR clone 16521 (TRAV20, TRAJ37)
CAGCSSNTGKLVF

SEQ ID NO: 33042 - protein, 11 aa, Homo sapiens
  CDR3 for beta chain variable domain of TCR clone 16521 (TRBV12-4, TRBJ2-3)
CASTATDTQYF

SEQ ID NO: 33043 - protein, 11 aa, Homo sapiens
  CDR3 for alpha chain variable domain of TCR clone 16522 (TRAV12-3, TRAJ43)
CAMSVSNDMRF

SEQ ID NO: 33044 - protein, 13 aa, Homo sapiens
  CDR3 for beta chain variable domain of TCR clone 16522 (TRBV20-1, TRBJ1-1)
CSAPLGGDTEAFF

SEQ ID NO: 33045 - protein, 13 aa, Homo sapiens
  CDR3 for alpha chain variable domain of TCR clone 16523 (TRAV8-1, TRAJ23)
CAATGGQGGKLIF

SEQ ID NO: 33046 - protein, 14 aa, Homo sapiens
  CDR3 for beta chain variable domain of TCR clone 16523 (TRBV20-1, TRBJ1-1)
CSAQTRIGGTEAFF

SEQ ID NO: 33047 - protein, 14 aa, Homo sapiens
  CDR3 for alpha chain variable domain of TCR clone 16524 (TRAV13-1, TRAJ26)
CAASRGNYGQNFVF

SEQ ID NO: 33048 - protein, 13 aa, Homo sapiens
  CDR3 for beta chain variable domain of TCR clone 16524 (TRBV19, TRBJ1-2)
CASSPGTGVGYTF

SEQ ID NO: 33049 - protein, 10 aa, Homo sapiens
  CDR3 for alpha chain variable domain of TCR clone 16525 (TRAV13-2, TRAJ49)
CEGTGNQFYF

SEQ ID NO: 33050 - protein, 13 aa, Homo sapiens
  CDR3 for beta chain variable domain of TCR clone 16525 (TRBV9, TRBJ2-7)
CASSVLQAGEQYF

SEQ ID NO: 33051 - protein, 12 aa, Homo sapiens
  CDR3 for alpha chain variable domain of TCR clone 16526 (TRAV8-3, TRAJ20)
CAVGANDYKLSF

SEQ ID NO: 33052 - protein, 16 aa, Homo sapiens
  CDR3 for beta chain variable domain of TCR clone 16526 (TRBV19, TRBJ2-2)
CASRSTGTGATGELFF

SEQ ID NO: 33053 - protein, 11 aa, Homo sapiens
  CDR3 for alpha chain variable domain of TCR clone 16527 (TRAV2, TRAJ13)
CASGGYQKVTF

SEQ ID NO: 33054 - protein, 16 aa, Homo sapiens
  CDR3 for beta chain variable domain of TCR clone 16527 (TRBV6-1, TRBJ2-5)
CASSDTLDRGAETQYF

SEQ ID NO: 33055 - protein, 13 aa, Homo sapiens
  CDR3 for alpha chain variable domain of TCR clone 16528 (TRAV27, TRAJ3)
ASLRGSSASKIIF

SEQ ID NO: 33056 - protein, 15 aa, Homo sapiens
  CDR3 for beta chain variable domain of TCR clone 16528 (TRBV28, TRBJ1-3)
CASSMGWASGNTTYF

SEQ ID NO: 33057 - protein, 13 aa, Homo sapiens
  CDR3 for alpha chain variable domain of TCR clone 16529 (TRAV12-3, TRAJ40)
CAMSDSGTYKYIF

SEQ ID NO: 33058 - protein, 16 aa, Homo sapiens
  CDR3 for beta chain variable domain of TCR clone 16529 (TRBV7-3, TRBJ2-1)
CASSLEGYRSYNEQFF

SEQ ID NO: 33059 - protein, 15 aa, Homo sapiens
  CDR3 for alpha chain variable domain of TCR clone 16530 (TRAV12-2, TRAJ53)
CAVNGGGGSNYKLTF

SEQ ID NO: 33060 - protein, 15 aa, Homo sapiens
  CDR3 for beta chain variable domain of TCR clone 16530 (TRBV7-2, TRBJ2-1)
CASSFQLALYNEQFF

SEQ ID NO: 33061 - protein, 14 aa, Homo sapiens
  CDR3 for alpha chain variable domain of TCR clone 16531 (TRAV12-3, TRAJ42)
CAMNYGGSQGNLIF

SEQ ID NO: 33062 - protein, 15 aa, Homo sapiens
  CDR3 for beta chain variable domain of TCR clone 16531 (TRBV5-7, TRBJ1-5)
CASSYGKLWDQTQHF

SEQ ID NO: 33063 - protein, 16 aa, Homo sapiens
  CDR3 for alpha chain variable domain of TCR clone 16532 (TRAV30, TRAJ24)
CGTEIVDADSWGKFQF

SEQ ID NO: 33064 - protein, 14 aa, Homo sapiens
  CDR3 for beta chain variable domain of TCR clone 16532 (TRBV12-5, TRBJ2-5)
CASGSRTHQETQDF

SEQ ID NO: 33065 - protein, 14 aa, Homo sapiens
  CDR3 for alpha chain variable domain of TCR clone 16533 (TRAV8-3, TRAJ28)
CAVVPGAGSYQLTF

SEQ ID NO: 33066 - protein, 13 aa, Homo sapiens
  CDR3 for beta chain variable domain of TCR clone 16533 (TRBV6-3, TRBJ2-2)
CRGMTVDTGELFF

SEQ ID NO: 33067 - protein, 14 aa, Homo sapiens
  CDR3 for alpha chain variable domain of TCR clone 16534 (TRAV38-1, TRAJ40)
CALRPTSGTYKYIF

SEQ ID NO: 33068 - protein, 15 aa, Homo sapiens
  CDR3 for beta chain variable domain of TCR clone 16534 (TRBV9, TRBJ2-1)
CASSLAGSSYNEQFF

SEQ ID NO: 33069 - protein, 13 aa, Homo sapiens
  CDR3 for alpha chain variable domain of TCR clone 16535 (TRAV1-2, TRAJ9)
CAALNTGGFKTIF

SEQ ID NO: 33070 - protein, 13 aa, Homo sapiens
  CDR3 for beta chain variable domain of TCR clone 16535 (TRBV19, TRBJ1-2)
CASSVPGQDSYTF

SEQ ID NO: 33071 - protein, 14 aa, Homo sapiens
  CDR3 for alpha chain variable domain of TCR clone 16536 (TRAV17, TRAJ18)
CAFDRGSTLGRLYF

SEQ ID NO: 33072 - protein, 15 aa, Homo sapiens
  CDR3 for beta chain variable domain of TCR clone 16536 (TRBV5-1, TRBJ2-1)
CASSLVGTVKNEQFF

SEQ ID NO: 33073 - protein, 14 aa, Homo sapiens
  CDR3 for alpha chain variable domain of TCR clone 16537 (TRAV13-1, TRAJ44)
CAAKATGTASKLTF

SEQ ID NO: 33074 - protein, 13 aa, Homo sapiens
  CDR3 for beta chain variable domain of TCR clone 16537 (TRBV5-5, TRBJ1-2)
CASSVWRGEDYTF

SEQ ID NO: 33075 - protein, 16 aa, Homo sapiens
  CDR3 for alpha chain variable domain of TCR clone 16538 (TRAV14/DV4, TRAJ17)
CAMREAGRAAGNKLTF

SEQ ID NO: 33076 - protein, 17 aa, Homo sapiens
  CDR3 for beta chain variable domain of TCR clone 16538 (TRBV13, TRBJ2-3)
CASSLSRVAGGRNTQYF

SEQ ID NO: 33077 - protein, 15 aa, Homo sapiens
  CDR3 for alpha chain variable domain of TCR clone 16539 (TRAV12-2, TRAJ53)
CAVNGGGGSNDKLTF

SEQ ID NO: 33078 - protein, 13 aa, Homo sapiens
  CDR3 for beta chain variable domain of TCR clone 16539 (TRBV3-1, TRBJ1-1)
CASSPGVITEAFF

SEQ ID NO: 33079 - protein, 14 aa, Homo sapiens
  CDR3 for alpha chain variable domain of TCR clone 16540 (TRAV20, TRAJ56)
CAVQFGRANSKLTF

SEQ ID NO: 33080 - protein, 14 aa, Homo sapiens
  CDR3 for beta chain variable domain of TCR clone 16540 (TRBV20-1, TRBJ2-7)
CSAKRGRSSYEQYF

SEQ ID NO: 33081 - protein, 14 aa, Homo sapiens
  CDR3 for alpha chain variable domain of TCR clone 16541 (TRAV1-2, TRAJ16)
CAVNRFSDGQKLLF

SEQ ID NO: 33082 - protein, 15 aa, Homo sapiens
  CDR3 for beta chain variable domain of TCR clone 16541 (TRBV9, TRBJ1-6)
CARSVAGTGDSPLHF

SEQ ID NO: 33083 - protein, 15 aa, Homo sapiens
  CDR3 for alpha chain variable domain of TCR clone 16542 (TRAV26-1, TRAJ22)
CIVRVSFWFCKATDI

SEQ ID NO: 33084 - protein, 13 aa, Homo sapiens
  CDR3 for beta chain variable domain of TCR clone 16542 (TRBV7-9, TRBJ1-2)
CASSLKQNYGYTF

SEQ ID NO: 33085 - protein, 13 aa, Homo sapiens
  CDR3 for alpha chain variable domain of TCR clone 16543 (TRAV17, TRAJ9)
CATDYTGGFKTIF

SEQ ID NO: 33086 - protein, 14 aa, Homo sapiens
  CDR3 for beta chain variable domain of TCR clone 16543 (TRBV19, TRBJ2-5)
CAGSMTGQQETQYF

SEQ ID NO: 33087 - protein, 14 aa, Homo sapiens
  CDR3 for alpha chain variable domain of TCR clone 16544 (TRAV2, TRAJ37)
CAVDFTSNTGKLIF

SEQ ID NO: 33088 - protein, 11 aa, Homo sapiens
  CDR3 for beta chain variable domain of TCR clone 16544 (TRBV29-1, TRBJ2-5)
CSEDRTGTQYF

SEQ ID NO: 33089 - protein, 12 aa, Homo sapiens
  CDR3 for alpha chain variable domain of TCR clone 16545 (TRAV12-3, TRAJ17)
CAMTLTGNKLTF

SEQ ID NO: 33090 - protein, 15 aa, Homo sapiens
  CDR3 for beta chain variable domain of TCR clone 16545 (TRBV20-1, TRBJ2-1)
CSARDRVSGMDEQFF

SEQ ID NO: 33091 - protein, 15 aa, Homo sapiens
  CDR3 for alpha chain variable domain of TCR clone 16546 (TRAV1-2, TRAJ28)
CAVQYSGAGSYQLTF

SEQ ID NO: 33092 - protein, 12 aa, Homo sapiens
  CDR3 for beta chain variable domain of TCR clone 16546 (TRBV7-8, TRBJ2-7)
CASSLGDREQYF

SEQ ID NO: 33093 - protein, 12 aa, Homo sapiens
  CDR3 for alpha chain variable domain of TCR clone 16547 (TRAV13-1, TRAJ21)
CAAKEGFNKFYF

SEQ ID NO: 33094 - protein, 14 aa, Homo sapiens
  CDR3 for beta chain variable domain of TCR clone 16547 (TRBV5-4, TRBJ1-1)
CASSLDSRRDGAFF

SEQ ID NO: 33095 - protein, 16 aa, Homo sapiens
  CDR3 for alpha chain variable domain of TCR clone 16548 (TRAV12-3, TRAJ53)
CAMSPGSGGSNYKLTF

SEQ ID NO: 33096 - protein, 11 aa, Homo sapiens
  CDR3 for beta chain variable domain of TCR clone 16548 (TRBV29-1, TRBJ2-5)
CSEDRPGTQYF

SEQ ID NO: 33097 - protein, 16 aa, Homo sapiens
  CDR3 for alpha chain variable domain of TCR clone 16549 (TRAV27, TRAJ13)
CAGAKSDSGGYRKVTF

SEQ ID NO: 33098 - protein, 15 aa, Homo sapiens
  CDR3 for beta chain variable domain of TCR clone 16549 (TRBV29-1, TRBJ2-1)
CSVGRHALFYNEQFF

SEQ ID NO: 33099 - protein, 14 aa, Homo sapiens
  CDR3 for alpha chain variable domain of TCR clone 16550 (TRAV13-1, TRAJ44)
CAAKATGTASKLTF

SEQ ID NO: 33100 - protein, 16 aa, Homo sapiens
  CDR3 for beta chain variable domain of TCR clone 16550 (TRBV20-1, TRBJ1-4)
CSAPGQGLLTNEKLFF

SEQ ID NO: 33101 - protein, 13 aa, Homo sapiens
  CDR3 for alpha chain variable domain of TCR clone 16551 (TRAV13-2, TRAJ53)
CAENMGSNYKLTF

SEQ ID NO: 33102 - protein, 13 aa, Homo sapiens
  CDR3 for beta chain variable domain of TCR clone 16551 (TRBV4-1, TRBJ2-2)
CASSQENTGEPFF

SEQ ID NO: 33103 - protein, 14 aa, Homo sapiens
  CDR3 for alpha chain variable domain of TCR clone 16552 (TRAV35, TRAJ33)
CAGSSQDSNYQLIW

SEQ ID NO: 33104 - protein, 15 aa, Homo sapiens
  CDR3 for beta chain variable domain of TCR clone 16552 (TRBV20-1, TRBJ2-7)
CSAESGTSGAYGQYF

SEQ ID NO: 33105 - protein, 14 aa, Homo sapiens
  CDR3 for alpha chain variable domain of TCR clone 16553 (TRAV3, TRAJ9)
CAVRLNTGGFKNIF

SEQ ID NO: 33106 - protein, 15 aa, Homo sapiens
  CDR3 for beta chain variable domain of TCR clone 16553 (TRBV7-2, TRBJ2-1)
CASSLASGRVNEQFF

SEQ ID NO: 33107 - protein, 14 aa, Homo sapiens
  CDR3 for alpha chain variable domain of TCR clone 16554 (TRAV26-1, TRAJ38)
YIADNAGNNRKLIW

SEQ ID NO: 33108 - protein, 13 aa, Homo sapiens
  CDR3 for beta chain variable domain of TCR clone 16554 (TRBV20-1, TRBJ1-1)
CSARGGGNTEAFF

SEQ ID NO: 33109 - protein, 17 aa, Homo sapiens
  CDR3 for alpha chain variable domain of TCR clone 16555 (TRAV4, TRAJ42)
CLVGVLNYGGSQGNLIL

SEQ ID NO: 33110 - protein, 12 aa, Homo sapiens
  CDR3 for beta chain variable domain of TCR clone 16555 (TRBV20-1, TRBJ2-1)
CSAQYTYNEQFF

SEQ ID NO: 33111 - protein, 13 aa, Homo sapiens
  CDR3 for alpha chain variable domain of TCR clone 16556 (TRAV27, TRAJ45)
CMSSGGGADGLAF

SEQ ID NO: 33112 - protein, 17 aa, Homo sapiens
  CDR3 for beta chain variable domain of TCR clone 16556 (TRBV11-2, TRBJ2-1)
CASSLYPPGVEYNEQFF

SEQ ID NO: 33113 - protein, 14 aa, Homo sapiens
  CDR3 for alpha chain variable domain of TCR clone 16557 (TRAV13-1, TRAJ35)
CAASKGDFGNVLHC

SEQ ID NO: 33114 - protein, 13 aa, Homo sapiens
  CDR3 for beta chain variable domain of TCR clone 16557 (TRBV7-3, TRBJ1-1)
CASSQDWGAEAFF

SEQ ID NO: 33115 - protein, 16 aa, Homo sapiens
  CDR3 for alpha chain variable domain of TCR clone 16558 (TRAV14/DV4, )
CADIQNPDPAVYQLRD

SEQ ID NO: 33116 - protein, 13 aa, Homo sapiens
  CDR3 for beta chain variable domain of TCR clone 16558 (TRBV29-1, TRBJ1-3)
CSVEGGSGNTIYF

SEQ ID NO: 33117 - protein, 15 aa, Homo sapiens
  CDR3 for alpha chain variable domain of TCR clone 16559 (TRAV35, TRAJ50)
CAGQLRKTSYDKLIF

SEQ ID NO: 33118 - protein, 12 aa, Homo sapiens
  CDR3 for beta chain variable domain of TCR clone 16559 (TRBV5-1, TRBJ2-5)
CASSLGLETQYF

SEQ ID NO: 33119 - protein, 14 aa, Homo sapiens
  CDR3 for alpha chain variable domain of TCR clone 16560 (TRAV4, TRAJ17)
CLVGDMAAGNKLTF

SEQ ID NO: 33120 - protein, 16 aa, Homo sapiens
  CDR3 for beta chain variable domain of TCR clone 16560 (TRBV4-1, TRBJ2-7)
CASSPVAGGTSSTSGR

SEQ ID NO: 33121 - protein, 16 aa, Homo sapiens
  CDR3 for alpha chain variable domain of TCR clone 16561 (TRAV26-1, )
CIDIQNPDPAGYQLRD

SEQ ID NO: 33122 - protein, 19 aa, Homo sapiens
  CDR3 for beta chain variable domain of TCR clone 16561 (TRBV19, TRBJ2-5)
CASSIGQVTDFFLGETQYF

SEQ ID NO: 33123 - protein, 14 aa, Homo sapiens
  CDR3 for alpha chain variable domain of TCR clone 16562 (TRAV12-2, TRAJ13)
CAVKKTGGYQKVTF

SEQ ID NO: 33124 - protein, 18 aa, Homo sapiens
  CDR3 for beta chain variable domain of TCR clone 16562 (TRBV7-9, TRBJ2-7)
CASSLTTSGSRTWYEQYF

SEQ ID NO: 33125 - protein, 17 aa, Homo sapiens
  CDR3 for alpha chain variable domain of TCR clone 16563 (TRAV12-2, TRAJ53)
CAPLTDSQEGSNYKLTF

SEQ ID NO: 33126 - protein, 14 aa, Homo sapiens
  CDR3 for beta chain variable domain of TCR clone 16563 (TRBV7-2, TRBJ2-7)
CASSLDPGPYEQYF

SEQ ID NO: 33127 - protein, 17 aa, Homo sapiens
  CDR3 for alpha chain variable domain of TCR clone 16564 (TRAV3, TRAJ6)
CAVRDGPRAGGSYIPTF

SEQ ID NO: 33128 - protein, 14 aa, Homo sapiens
  CDR3 for beta chain variable domain of TCR clone 16564 (TRBV7-8, TRBJ2-3)
CASSLEAGTDTQYF

SEQ ID NO: 33129 - protein, 15 aa, Homo sapiens
  CDR3 for alpha chain variable domain of TCR clone 16565 (TRAV12-3, TRAJ6)
CAMSATTGGSYIPTF

SEQ ID NO: 33130 - protein, 16 aa, Homo sapiens
  CDR3 for beta chain variable domain of TCR clone 16565 (TRBV20-1, TRBJ1-2)
CSASMGQGAANYGYTF

SEQ ID NO: 33131 - protein, 15 aa, Homo sapiens
  CDR3 for alpha chain variable domain of TCR clone 16566 (TRAV26-1, TRAJ44)
CIVRANTGTASKLTF

SEQ ID NO: 33132 - protein, 16 aa, Homo sapiens
  CDR3 for beta chain variable domain of TCR clone 16566 (TRBV7-7, TRBJ2-1)
CASSLASGTYYNEQFF

SEQ ID NO: 33133 - protein, 12 aa, Homo sapiens
  CDR3 for alpha chain variable domain of TCR clone 16567 (TRAV2, TRAJ31)
CAVEDNNARLMF

SEQ ID NO: 33134 - protein, 15 aa, Homo sapiens
  CDR3 for beta chain variable domain of TCR clone 16567 (TRBV9, TRBJ1-6)
CASSVAGTGDSPLHF

SEQ ID NO: 33135 - protein, 13 aa, Homo sapiens
  CDR3 for alpha chain variable domain of TCR clone 16568 (TRAV12-2, TRAJ39)
CAVNNNAGNMLTF

SEQ ID NO: 33136 - protein, 13 aa, Homo sapiens
  CDR3 for beta chain variable domain of TCR clone 16568 (TRBV2, TRBJ1-5)
CATAGPGNQTQHF

SEQ ID NO: 33137 - protein, 15 aa, Homo sapiens
  CDR3 for alpha chain variable domain of TCR clone 16569 (TRAV2, TRAJ15)
CAVDDRGQAGTALIF

SEQ ID NO: 33138 - protein, 13 aa, Homo sapiens
  CDR3 for beta chain variable domain of TCR clone 16569 (TRBV10-2, TRBJ2-7)
CASGASGGYEQYF

SEQ ID NO: 33139 - protein, 15 aa, Homo sapiens
  CDR3 for alpha chain variable domain of TCR clone 16570 (TRAV13-1, TRAJ17)
CAASIERAAGNKLTF

SEQ ID NO: 33140 - protein, 13 aa, Homo sapiens
  CDR3 for beta chain variable domain of TCR clone 16570 (TRBV27, TRBJ2-1)
CASRTLGVGEQFF

SEQ ID NO: 33141 - protein, 13 aa, Homo sapiens
  CDR3 for alpha chain variable domain of TCR clone 16571 (TRAV8-3, TRAJ36)
CAVGATGANNLFF

SEQ ID NO: 33142 - protein, 15 aa, Homo sapiens
  CDR3 for beta chain variable domain of TCR clone 16571 (TRBV7-2, TRBJ1-2)
CAGSPRAGWNYGYTF

SEQ ID NO: 33143 - protein, 15 aa, Homo sapiens
  CDR3 for alpha chain variable domain of TCR clone 16572 (TRAV26-1, TRAJ44)
CIVRANTGTASRLTF

SEQ ID NO: 33144 - protein, 16 aa, Homo sapiens
  CDR3 for beta chain variable domain of TCR clone 16572 (TRBV7-7, TRBJ2-1)
CASSLASGTSYNEQFF

SEQ ID NO: 33145 - protein, 15 aa, Homo sapiens
  CDR3 for alpha chain variable domain of TCR clone 16573 (TRAV4, TRAJ39)
CLVGPNNNAGNMLTF

SEQ ID NO: 33146 - protein, 14 aa, Homo sapiens
  CDR3 for beta chain variable domain of TCR clone 16573 (TRBV7-6, TRBJ2-3)
CASSLGTVTDTQYF

SEQ ID NO: 33147 - protein, 13 aa, Homo sapiens
  CDR3 for alpha chain variable domain of TCR clone 16574 (TRAV2, TRAJ47)
CAVDREYGNKLVF

SEQ ID NO: 33148 - protein, 17 aa, Homo sapiens
  CDR3 for beta chain variable domain of TCR clone 16574 (TRBV15, TRBJ1-5)
CATSRVRGIYSNQPQHF

SEQ ID NO: 33149 - protein, 14 aa, Homo sapiens
  CDR3 for alpha chain variable domain of TCR clone 16575 (TRAV1-2, TRAJ16)
CAVNRFSDGQKLLF

SEQ ID NO: 33150 - protein, 14 aa, Homo sapiens
  CDR3 for beta chain variable domain of TCR clone 16575 (TRBV12-4, TRBJ2-3)
CASTIAGWGDTQYF

SEQ ID NO: 33151 - protein, 11 aa, Homo sapiens
  CDR3 for alpha chain variable domain of TCR clone 16576 (TRAV12-3, TRAJ43)
CSMSVSNDMRF

SEQ ID NO: 33152 - protein, 13 aa, Homo sapiens
  CDR3 for beta chain variable domain of TCR clone 16576 (TRBV20-1, TRBJ1-1)
CSAPLGGGTEAFF

SEQ ID NO: 33153 - protein, 15 aa, Homo sapiens
  CDR3 for alpha chain variable domain of TCR clone 16577 (TRAV12-3, TRAJ6)
CAMSATTGGSYIPTF

SEQ ID NO: 33154 - protein, 16 aa, Homo sapiens
  CDR3 for beta chain variable domain of TCR clone 16577 (TRBV20-1, TRBJ1-2)
CSASMGQGVANYGCTF

SEQ ID NO: 33155 - protein, 14 aa, Homo sapiens
  CDR3 for alpha chain variable domain of TCR clone 16578 (TRAV13-2, TRAJ37)
CAEKISGNTGKLIF

SEQ ID NO: 33156 - protein, 14 aa, Homo sapiens
  CDR3 for beta chain variable domain of TCR clone 16578 (TRBV7-7, TRBJ2-2)
CASSKGENTGELFF

SEQ ID NO: 33157 - protein, 14 aa, Homo sapiens
  CDR3 for alpha chain variable domain of TCR clone 16579 (TRAV26-1, TRAJ39)
CIVRGSRAGNMLTF

SEQ ID NO: 33158 - protein, 15 aa, Homo sapiens
  CDR3 for beta chain variable domain of TCR clone 16579 (TRBV7-9, TRBJ1-5)
CASGQGHQPNQPQHF

SEQ ID NO: 33159 - protein, 13 aa, Homo sapiens
  CDR3 for alpha chain variable domain of TCR clone 16580 (TRAV3, TRAJ43)
CAVKARNNNDIRF

SEQ ID NO: 33160 - protein, 16 aa, Homo sapiens
  CDR3 for beta chain variable domain of TCR clone 16580 (TRBV7-9, TRBJ2-3)
CASSFSVAGGTDTQYF

SEQ ID NO: 33161 - protein, 15 aa, Homo sapiens
  CDR3 for alpha chain variable domain of TCR clone 16581 (TRAV12-3, TRAJ49)
CAMAVTPNTGNQFYF

SEQ ID NO: 33162 - protein, 18 aa, Homo sapiens
  CDR3 for beta chain variable domain of TCR clone 16581 (TRBV4-1, TRBJ1-5)
CASSHDPRGQGLNQPQHF

SEQ ID NO: 33163 - protein, 13 aa, Homo sapiens
  CDR3 for alpha chain variable domain of TCR clone 16582 (TRAV8-3, TRAJ36)
CAVGATGANNIFF

SEQ ID NO: 33164 - protein, 15 aa, Homo sapiens
  CDR3 for beta chain variable domain of TCR clone 16582 (TRBV7-2, TRBJ1-2)
CASSPRAGWNYGYTF

SEQ ID NO: 33165 - protein, 14 aa, Homo sapiens
  CDR3 for alpha chain variable domain of TCR clone 16583 (TRAV1-2, TRAJ16)
CTVNRFSDGQKLLF

SEQ ID NO: 33166 - protein, 15 aa, Homo sapiens
  CDR3 for beta chain variable domain of TCR clone 16583 (TRBV9, TRBJ1-6)
CASSVAGTGDSPLHF

SEQ ID NO: 33167 - protein, 17 aa, Homo sapiens
  CDR3 for alpha chain variable domain of TCR clone 16584 (TRAV3, TRAJ6)
CAVRDGPRAGGSYIPTF

SEQ ID NO: 33168 - protein, 15 aa, Homo sapiens
  CDR3 for beta chain variable domain of TCR clone 16584 (TRBV5-1, TRBJ2-3)
CASSVTSGSTDTQYF

SEQ ID NO: 33169 - protein, 14 aa, Homo sapiens
  CDR3 for alpha chain variable domain of TCR clone 16585 (TRAV20, TRAJ56)
CAVQFGGANSKPTF

SEQ ID NO: 33170 - protein, 14 aa, Homo sapiens
  CDR3 for beta chain variable domain of TCR clone 16585 (TRBV20-1, TRBJ2-7)
CSAKRGRSSYEQYF

SEQ ID NO: 33171 - protein, 11 aa, Homo sapiens
  CDR3 for alpha chain variable domain of TCR clone 16586 (TRAV12-3, TRAJ43)
CAMSVSTDMRF

SEQ ID NO: 33172 - protein, 13 aa, Homo sapiens
  CDR3 for beta chain variable domain of TCR clone 16586 (TRBV20-1, TRBJ1-1)
CSAPLGGGTEAFF

SEQ ID NO: 33173 - protein, 12 aa, Homo sapiens
  CDR3 for alpha chain variable domain of TCR clone 16587 (TRAV13-2, TRAJ23)
CAERHRGGKPIF

SEQ ID NO: 33174 - protein, 16 aa, Homo sapiens
  CDR3 for beta chain variable domain of TCR clone 16587 (TRBV20-1, TRBJ1-4)
CSAPGQGLLTNEKLFF

SEQ ID NO: 33175 - protein, 14 aa, Homo sapiens
  CDR3 for alpha chain variable domain of TCR clone 16588 (TRAV2, TRAJ37)
CAVDFTSTTGKLIF

SEQ ID NO: 33176 - protein, 15 aa, Homo sapiens
  CDR3 for beta chain variable domain of TCR clone 16588 (TRBV20-1, TRBJ1-1)
CSASRGVTGNTEAFF

SEQ ID NO: 33177 - protein, 14 aa, Homo sapiens
  CDR3 for alpha chain variable domain of TCR clone 16589 (TRAV1-2, TRAJ8)
CAVREDTGFQKLVF

SEQ ID NO: 33178 - protein, 16 aa, Homo sapiens
  CDR3 for beta chain variable domain of TCR clone 16589 (TRBV19, TRBJ2-2)
CASRSPGTGATGELFF

SEQ ID NO: 33179 - protein, 15 aa, Homo sapiens
  CDR3 for alpha chain variable domain of TCR clone 16590 (TRAV8-3, TRAJ45)
CVSSYSGGGADGLTF

SEQ ID NO: 33180 - protein, 13 aa, Homo sapiens
  CDR3 for beta chain variable domain of TCR clone 16590 (TRBV10-3, TRBJ2-7)
CASKLAVNYEQYF

SEQ ID NO: 33181 - protein, 15 aa, Homo sapiens
  CDR3 for alpha chain variable domain of TCR clone 16591 (TRAV17, TRAJ57)
CATGPSQGGSEKLVF

SEQ ID NO: 33182 - protein, 16 aa, Homo sapiens
  CDR3 for beta chain variable domain of TCR clone 16591 (TRBV12-4, TRBJ1-5)
RASSRPVGGSNQPQHF

SEQ ID NO: 33183 - protein, 13 aa, Homo sapiens
  CDR3 for alpha chain variable domain of TCR clone 16592 (TRAV21, TRAJ49)
CAVRQSTGNQFYF

SEQ ID NO: 33184 - protein, 14 aa, Homo sapiens
  CDR3 for beta chain variable domain of TCR clone 16592 (TRBV6-1, TRBJ1-3)
CASVQGGGGNTIYF

SEQ ID NO: 33185 - protein, 14 aa, Homo sapiens
  CDR3 for alpha chain variable domain of TCR clone 16593 (TRAV26-1, TRAJ38)
CIADNAGNNRKLIW

SEQ ID NO: 33186 - protein, 13 aa, Homo sapiens
  CDR3 for beta chain variable domain of TCR clone 16593 (TRBV20-1, TRBJ1-1)
CSARGGWNTEAFF

SEQ ID NO: 33187 - protein, 13 aa, Homo sapiens
  CDR3 for alpha chain variable domain of TCR clone 16594 (TRAV20, TRAJ37)
CAVCSSNTGKLIF

SEQ ID NO: 33188 - protein, 11 aa, Homo sapiens
  CDR3 for beta chain variable domain of TCR clone 16594 (TRBV12-4, TRBJ2-3)
CASTATDTQYF

SEQ ID NO: 33189 - protein, 14 aa, Homo sapiens
  CDR3 for alpha chain variable domain of TCR clone 16595 (TRAV16, TRAJ33)
CALSAMDSNYQLIW

SEQ ID NO: 33190 - protein, 17 aa, Homo sapiens
  CDR3 for beta chain variable domain of TCR clone 16595 (TRBV25-1, TRBJ2-7)
CASSDAGVVFSSYEQYF

SEQ ID NO: 33191 - protein, 15 aa, Homo sapiens
  CDR3 for alpha chain variable domain of TCR clone 16596 (TRAV2, TRAJ9)
CAVEDRGTGGSKTIF

SEQ ID NO: 33192 - protein, 16 aa, Homo sapiens
  CDR3 for beta chain variable domain of TCR clone 16596 (TRBV24-1, TRBJ2-3)
CATSDPGTGATDTQYF

SEQ ID NO: 33193 - protein, 15 aa, Homo sapiens
  CDR3 for alpha chain variable domain of TCR clone 16597 (TRAV12-2, TRAJ23)
CAVNTLYNQGGKLIF

SEQ ID NO: 33194 - protein, 15 aa, Homo sapiens
  CDR3 for beta chain variable domain of TCR clone 16597 (TRBV9, TRBJ2-6)
CASSVALSGANVLTF

SEQ ID NO: 33195 - protein, 16 aa, Homo sapiens
  CDR3 for alpha chain variable domain of TCR clone 16598 (TRAV21, TRAJ37)
CAVCTAGSSNTGKLIF

SEQ ID NO: 33196 - protein, 13 aa, Homo sapiens
  CDR3 for beta chain variable domain of TCR clone 16598 (TRBV7-9, TRBJ2-5)
CASLPSGRETQYF

SEQ ID NO: 33197 - protein, 13 aa, Homo sapiens
  CDR3 for alpha chain variable domain of TCR clone 16599 (TRAV21, TRAJ20)
CAVGLRVDYKLSF

SEQ ID NO: 33198 - protein, 14 aa, Homo sapiens
  CDR3 for beta chain variable domain of TCR clone 16599 (TRBV12-5, TRBJ2-5)
CASGSRTHQETQYF

SEQ ID NO: 33199 - protein, 14 aa, Homo sapiens
  CDR3 for alpha chain variable domain of TCR clone 16600 (TRAV12-2, TRAJ13)
CAVNPSGGYLKVTF

SEQ ID NO: 33200 - protein, 14 aa, Homo sapiens
  CDR3 for beta chain variable domain of TCR clone 16600 (TRBV12-4, TRBJ1-1)
CASSLGTGGTEAFF

SEQ ID NO: 33201 - protein, 15 aa, Homo sapiens
  CDR3 for alpha chain variable domain of TCR clone 16601 (TRAV26-1, TRAJ22)
CIVRVSFWFCKATDL

SEQ ID NO: 33202 - protein, 13 aa, Homo sapiens
  CDR3 for beta chain variable domain of TCR clone 16601 (TRBV7-9, TRBJ1-2)
CAGSLKQNYGYTF

SEQ ID NO: 33203 - protein, 15 aa, Homo sapiens
  CDR3 for alpha chain variable domain of TCR clone 16602 (TRAV25, TRAJ52)
CAGRTGGTSYGKLTF

SEQ ID NO: 33204 - protein, 17 aa, Homo sapiens
  CDR3 for beta chain variable domain of TCR clone 16602 (TRBV7-8, TRBJ2-6)
CASSAGTGGAGANVLTF

SEQ ID NO: 33205 - protein, 15 aa, Homo sapiens
  CDR3 for alpha chain variable domain of TCR clone 16603 (TRAV4, TRAJ39)
CLVGPNNNAGNMLAF

SEQ ID NO: 33206 - protein, 13 aa, Homo sapiens
  CDR3 for beta chain variable domain of TCR clone 16603 (TRBV11-2, TRBJ2-5)
CASSSTGEETQYF

SEQ ID NO: 33207 - protein, 15 aa, Homo sapiens
  CDR3 for alpha chain variable domain of TCR clone 16604 (TRAV3, TRAJ3)
CAVRDRDSSASKITF

SEQ ID NO: 33208 - protein, 18 aa, Homo sapiens
  CDR3 for beta chain variable domain of TCR clone 16604 (TRBV25-1, TRBJ1-2)
CASSGLQNGQGLIFGYTF

SEQ ID NO: 33209 - protein, 12 aa, Homo sapiens
  CDR3 for alpha chain variable domain of TCR clone 16605 (TRAV12-1, TRAJ40)
CVVYSGTYKYIF

SEQ ID NO: 33210 - protein, 14 aa, Homo sapiens
  CDR3 for beta chain variable domain of TCR clone 16605 (TRBV7-2, TRBJ2-7)
CASSPKTSFYEQYF

SEQ ID NO: 33211 - protein, 11 aa, Homo sapiens
  CDR3 for alpha chain variable domain of TCR clone 16606 (TRAV1-1, TRAJ23)
CAVRQGEKLIF

SEQ ID NO: 33212 - protein, 20 aa, Homo sapiens
  CDR3 for beta chain variable domain of TCR clone 16606 (TRBV7-8, TRBJ2-2)
CASSHLFPGPTIHITGELFF

SEQ ID NO: 33213 - protein, 11 aa, Homo sapiens
  CDR3 for alpha chain variable domain of TCR clone 16607 (TRAV2, TRAJ13)
CASGGYQKVTF

SEQ ID NO: 33214 - protein, 16 aa, Homo sapiens
  CDR3 for beta chain variable domain of TCR clone 16607 (TRBV6-1, TRBJ2-5)
CASSETLDRGAENQYF

SEQ ID NO: 33215 - protein, 14 aa, Homo sapiens
  CDR3 for alpha chain variable domain of TCR clone 16608 (TRAV1-2, TRAJ16)
CAVNRFSDGQKLLF

SEQ ID NO: 33216 - protein, 15 aa, Homo sapiens
  CDR3 for beta chain variable domain of TCR clone 16608 (TRBV20-1, TRBJ1-1)
CSARDPRGEYTEAFF

SEQ ID NO: 33217 - protein, 18 aa, Homo sapiens
  CDR3 for alpha chain variable domain of TCR clone 16609 (TRAV13-1, TRAJ52)
CAAKNPNAGGTSYGKLKF

SEQ ID NO: 33218 - protein, 15 aa, Homo sapiens
  CDR3 for beta chain variable domain of TCR clone 16609 (TRBV6-1, TRBJ2-3)
CASSERGGITDTQYF

SEQ ID NO: 33219 - protein, 15 aa, Homo sapiens
  CDR3 for alpha chain variable domain of TCR clone 16610 (TRAV3, TRAJ3)
CAVRDRDSSASTIIF

SEQ ID NO: 33220 - protein, 18 aa, Homo sapiens
  CDR3 for beta chain variable domain of TCR clone 16610 (TRBV25-1, TRBJ1-2)
CASSGLQNGQGLIFGYTF

SEQ ID NO: 33221 - protein, 18 aa, Homo sapiens
  CDR3 for alpha chain variable domain of TCR clone 16611 (TRAV13-1, TRAJ52)
CAASKRSAGGTSYGKLTF

SEQ ID NO: 33222 - protein, 13 aa, Homo sapiens
  CDR3 for beta chain variable domain of TCR clone 16611 (TRBV12-4, TRBJ1-2)
CASSLRQEKGYTF

SEQ ID NO: 33223 - protein, 16 aa, Homo sapiens
  CDR3 for alpha chain variable domain of TCR clone 16612 (TRAV3, TRAJ37)
CAVRPHGSGSTGKLIF

SEQ ID NO: 33224 - protein, 16 aa, Homo sapiens
  CDR3 for beta chain variable domain of TCR clone 16612 (TRBV9, TRBJ1-2)
CASSVEEKVSPYGYTF

SEQ ID NO: 33225 - protein, 11 aa, Homo sapiens
  CDR3 for alpha chain variable domain of TCR clone 16613 (TRAV17, TRAJ9)
CGFTGGFKTIF

SEQ ID NO: 33226 - protein, 14 aa, Homo sapiens
  CDR3 for beta chain variable domain of TCR clone 16613 (TRBV7-9, TRBJ2-2)
CASSLVQDTGELFL

SEQ ID NO: 33227 - protein, 17 aa, Homo sapiens
  CDR3 for alpha chain variable domain of TCR clone 16614 (TRAV3, TRAJ6)
CAVRDGPRAGGSYIPTF

SEQ ID NO: 33228 - protein, 20 aa, Homo sapiens
  CDR3 for beta chain variable domain of TCR clone 16614 (TRBV28, TRBJ2-1)
CASTPIGQSPGLAGGNEQFF

SEQ ID NO: 33229 - protein, 13 aa, Homo sapiens
  CDR3 for alpha chain variable domain of TCR clone 16615 (TRAV27, TRAJ41)
CAGEGNSGYALNF

SEQ ID NO: 33230 - protein, 14 aa, Homo sapiens
  CDR3 for beta chain variable domain of TCR clone 16615 (TRBV7-2, TRBJ1-1)
CASSLLTGTTEAFF

SEQ ID NO: 33231 - protein, 12 aa, Homo sapiens
  CDR3 for alpha chain variable domain of TCR clone 16616 (TRAV26-1, TRAJ17)
CIVRSAGNKLTF

SEQ ID NO: 33232 - protein, 15 aa, Homo sapiens
  CDR3 for beta chain variable domain of TCR clone 16616 (TRBV27, TRBJ2-1)
CASSNGGGSSNEQFF

SEQ ID NO: 33233 - protein, 12 aa, Homo sapiens
  CDR3 for alpha chain variable domain of TCR clone 16617 (TRAV8-3, TRAJ26)
CAGDYYGQNFVF

SEQ ID NO: 33234 - protein, 15 aa, Homo sapiens
  CDR3 for beta chain variable domain of TCR clone 16617 (TRBV5-1, TRBJ2-3)
CASSVTSGSTDTQYF

SEQ ID NO: 33235 - protein, 15 aa, Homo sapiens
  CDR3 for alpha chain variable domain of TCR clone 16618 (TRAV12-3, TRAJ6)
CAMSATTGGSYIPTF

SEQ ID NO: 33236 - protein, 14 aa, Homo sapiens
  CDR3 for beta chain variable domain of TCR clone 16618 (TRBV7-2, TRBJ2-7)
CASSPKTSFYEQYF

SEQ ID NO: 33237 - protein, 15 aa, Homo sapiens
  CDR3 for alpha chain variable domain of TCR clone 16619 (TRAV14/DV4, TRAJ33)
CAMREDMDSNYQLIW

SEQ ID NO: 33238 - protein, 16 aa, Homo sapiens
  CDR3 for beta chain variable domain of TCR clone 16619 (TRBV20-1, TRBJ1-4)
CSAPGQGLLTNEKLFF

SEQ ID NO: 33239 - protein, 11 aa, Homo sapiens
  CDR3 for alpha chain variable domain of TCR clone 16620 (TRAV13-2, TRAJ23)
CAESPRGKLIF

SEQ ID NO: 33240 - protein, 15 aa, Homo sapiens
  CDR3 for beta chain variable domain of TCR clone 16620 (TRBV27, TRBJ2-1)
CASSNGGGSSNEQFF

SEQ ID NO: 33241 - protein, 15 aa, Homo sapiens
  CDR3 for alpha chain variable domain of TCR clone 16621 (TRAV25, TRAJ52)
CAGRPGGTSYGKLTF

SEQ ID NO: 33242 - protein, 17 aa, Homo sapiens
  CDR3 for beta chain variable domain of TCR clone 16621 (TRBV7-8, TRBJ2-6)
CAGSAGTGGAGANVLTF

SEQ ID NO: 33243 - protein, 15 aa, Homo sapiens
  CDR3 for alpha chain variable domain of TCR clone 16622 (TRAV26-1, TRAJ29)
CIVRVQGSGNTPLVF

SEQ ID NO: 33244 - protein, 14 aa, Homo sapiens
  CDR3 for beta chain variable domain of TCR clone 16622 (TRBV18, TRBJ2-5)
CASSPGVSQETQYF

SEQ ID NO: 33245 - protein, 14 aa, Homo sapiens
  CDR3 for alpha chain variable domain of TCR clone 16623 (TRAV19, TRAJ49)
CALSEANTGNQFYF

SEQ ID NO: 33246 - protein, 14 aa, Homo sapiens
  CDR3 for beta chain variable domain of TCR clone 16623 (TRBV4-1, TRBJ1-2)
CASSQDGQVRGYTF

SEQ ID NO: 33247 - protein, 14 aa, Homo sapiens
  CDR3 for alpha chain variable domain of TCR clone 16624 (TRAV20, TRAJ56)
CAVKFGGANSKLTF

SEQ ID NO: 33248 - protein, 14 aa, Homo sapiens
  CDR3 for beta chain variable domain of TCR clone 16624 (TRBV20-1, TRBJ2-7)
CSAKRGRSSYEQYF

SEQ ID NO: 33249 - protein, 16 aa, Homo sapiens
  CDR3 for alpha chain variable domain of TCR clone 16625 (TRAV30, TRAJ24)
CGTEIVDADSWGKFQF

SEQ ID NO: 33250 - protein, 14 aa, Homo sapiens
  CDR3 for beta chain variable domain of TCR clone 16625 (TRBV12-5, TRBJ2-1)
CASGSRTHQETQYF

SEQ ID NO: 33251 - protein, 10 aa, Homo sapiens
  CDR3 for alpha chain variable domain of TCR clone 16626 (TRAV23/DV6, TRAJ57)
CAARSTLSQG

SEQ ID NO: 33252 - protein, 14 aa, Homo sapiens
  CDR3 for beta chain variable domain of TCR clone 16626 (TRBV25-1, TRBJ1-1)
CASTHLGGNTEAFF

SEQ ID NO: 33253 - protein, 17 aa, Homo sapiens
  CDR3 for alpha chain variable domain of TCR clone 16627 (TRAV3, TRAJ6)
CAVRDGPRAGGSYIPTF

SEQ ID NO: 33254 - protein, 13 aa, Homo sapiens
  CDR3 for beta chain variable domain of TCR clone 16627 (TRBV19, TRBJ1-2)
CASSQGQVYGYTF

SEQ ID NO: 33255 - protein, 16 aa, Homo sapiens
  CDR3 for alpha chain variable domain of TCR clone 16628 (TRAV8-3, TRAJ13)
CAVGAYPSGGYQRVTF

SEQ ID NO: 33256 - protein, 15 aa, Homo sapiens
  CDR3 for beta chain variable domain of TCR clone 16628 (TRBV19, TRBJ1-5)
CASSIVWADNQPQHF

SEQ ID NO: 33257 - protein, 16 aa, Homo sapiens
  CDR3 for alpha chain variable domain of TCR clone 16629 (TRAV4, TRAJ22)
CLVGDLYSGSARQLTF

SEQ ID NO: 33258 - protein, 16 aa, Homo sapiens
  CDR3 for beta chain variable domain of TCR clone 16629 (TRBV7-9, TRBJ2-1)
CASSDVAGGSYNEQLF

SEQ ID NO: 33259 - protein, 15 aa, Homo sapiens
  CDR3 for alpha chain variable domain of TCR clone 16630 (TRAV13-1, TRAJ17)
CAASIERAAGNKLTF

SEQ ID NO: 33260 - protein, 12 aa, Homo sapiens
  CDR3 for beta chain variable domain of TCR clone 16630 (TRBV5-6, TRBJ1-1)
CASSLGRGKAFF

SEQ ID NO: 33261 - protein, 16 aa, Homo sapiens
  CDR3 for alpha chain variable domain of TCR clone 16631 (TRAV30, TRAJ24)
CGTEIVDADSWGKFQF

SEQ ID NO: 33262 - protein, 13 aa, Homo sapiens
  CDR3 for beta chain variable domain of TCR clone 16631 (TRBV7-2, TRBJ2-2)
CASSLAVTGELFF

SEQ ID NO: 33263 - protein, 17 aa, Homo sapiens
  CDR3 for alpha chain variable domain of TCR clone 16632 (TRAV8-6, TRAJ58)
CAASSWVGETSGSRLTF

SEQ ID NO: 33264 - protein, 14 aa, Homo sapiens
  CDR3 for beta chain variable domain of TCR clone 16632 (TRBV4-2, TRBJ2-1)
CASGLDRAYNEQFF

SEQ ID NO: 33265 - protein, 15 aa, Homo sapiens
  CDR3 for alpha chain variable domain of TCR clone 16633 (TRAV12-3, TRAJ6)
CAMSATTGGSYIPTF

SEQ ID NO: 33266 - protein, 16 aa, Homo sapiens
  CDR3 for beta chain variable domain of TCR clone 16633 (TRBV20-1, TRBJ1-2)
CSASRGQGVANYGYTF

SEQ ID NO: 33267 - protein, 13 aa, Homo sapiens
  CDR3 for alpha chain variable domain of TCR clone 16634 (TRAV2, TRAJ40)
CAVVSSGTYKYIF

SEQ ID NO: 33268 - protein, 15 aa, Homo sapiens
  CDR3 for beta chain variable domain of TCR clone 16634 (TRBV11-3, TRBJ2-3)
CASLKDGREGDTQYF

SEQ ID NO: 33269 - protein, 13 aa, Homo sapiens
  CDR3 for alpha chain variable domain of TCR clone 16635 (TRAV8-3, TRAJ28)
CAVGAVGSYQLTF

SEQ ID NO: 33270 - protein, 15 aa, Homo sapiens
  CDR3 for beta chain variable domain of TCR clone 16635 (TRBV7-9, TRBJ1-5)
CASSQGHQPNQAQHF

SEQ ID NO: 33271 - protein, 14 aa, Homo sapiens
  CDR3 for alpha chain variable domain of TCR clone 16636 (TRAV1-2, TRAJ16)
CAVNRFSDGQKLLF

SEQ ID NO: 33272 - protein, 16 aa, Homo sapiens
  CDR3 for beta chain variable domain of TCR clone 16636 (TRBV5-4, TRBJ2-7)
CASSQNEIAGAYEQYF

SEQ ID NO: 33273 - protein, 16 aa, Homo sapiens
  CDR3 for alpha chain variable domain of TCR clone 16637 (TRAV1-2, TRAJ10)
CAVRGVLTGGGNKLTF

SEQ ID NO: 33274 - protein, 12 aa, Homo sapiens
  CDR3 for beta chain variable domain of TCR clone 16637 (TRBV7-8, TRBJ2-7)
CAGSLGDREQYF

SEQ ID NO: 33275 - protein, 14 aa, Homo sapiens
  CDR3 for alpha chain variable domain of TCR clone 16638 (TRAV24, TRAJ6)
CAFAASGGSYIPTF

SEQ ID NO: 33276 - protein, 15 aa, Homo sapiens
  CDR3 for beta chain variable domain of TCR clone 16638 (TRBV7-2, TRBJ2-3)
CASSPRGLSTDTQYF

SEQ ID NO: 33277 - protein, 15 aa, Homo sapiens
  CDR3 for alpha chain variable domain of TCR clone 16639 (TRAV38-1, TRAJ28)
CAFWGVGAGSYQLTF

SEQ ID NO: 33278 - protein, 15 aa, Homo sapiens
  CDR3 for beta chain variable domain of TCR clone 16639 (TRBV12-4, TRBJ2-2)
CASSPQPGSTGELFF

SEQ ID NO: 33279 - protein, 17 aa, Homo sapiens
  CDR3 for alpha chain variable domain of TCR clone 16640 (TRAV13-1, TRAJ31)
CAPRDRLMFGDGTQLVV

SEQ ID NO: 33280 - protein, 16 aa, Homo sapiens
  CDR3 for beta chain variable domain of TCR clone 16640 (TRBV28, TRBJ2-7)
CASSLFFETGGPEQYF

SEQ ID NO: 33281 - protein, 16 aa, Homo sapiens
  CDR3 for alpha chain variable domain of TCR clone 16641 (TRAV30, TRAJ24)
CGTEIVDADSWGKFQF

SEQ ID NO: 33282 - protein, 15 aa, Homo sapiens
  CDR3 for beta chain variable domain of TCR clone 16641 (TRBV7-9, TRBJ1-4)
CASSARTGGNEELFF

SEQ ID NO: 33283 - protein, 16 aa, Homo sapiens
  CDR3 for alpha chain variable domain of TCR clone 16642 (TRAV4, TRAJ22)
CLVGDPYSGSARQLTF

SEQ ID NO: 33284 - protein, 16 aa, Homo sapiens
  CDR3 for beta chain variable domain of TCR clone 16642 (TRBV7-9, TRBJ2-1)
CASSDVAGGSYNEQFF

SEQ ID NO: 33285 - protein, 15 aa, Homo sapiens
  CDR3 for alpha chain variable domain of TCR clone 16643 (TRAV3, TRAJ4)
CAVRDGTGGYNKLIV

SEQ ID NO: 33286 - protein, 16 aa, Homo sapiens
  CDR3 for beta chain variable domain of TCR clone 16643 (TRBV27, TRBJ2-2)
CASSSSGVSNTGELFF

SEQ ID NO: 33287 - protein, 12 aa, Homo sapiens
  CDR3 for alpha chain variable domain of TCR clone 16644 (TRAV12-1, TRAJ40)
CVVYSGTYKYIF

SEQ ID NO: 33288 - protein, 18 aa, Homo sapiens
  CDR3 for beta chain variable domain of TCR clone 16644 (TRBV11-2, TRBJ2-3)
CASSLGGASREAPNTQYF

SEQ ID NO: 33289 - protein, 12 aa, Homo sapiens
  CDR3 for alpha chain variable domain of TCR clone 16645 (TRAV8-3, TRAJ20)
CVVGANDYKLSF

SEQ ID NO: 33290 - protein, 16 aa, Homo sapiens
  CDR3 for beta chain variable domain of TCR clone 16645 (TRBV19, TRBJ2-2)
CASRSPGTGATGELFF

SEQ ID NO: 33291 - protein, 15 aa, Homo sapiens
  CDR3 for alpha chain variable domain of TCR clone 16646 (TRAV17, TRAJ16)
CATALRFSDGQKLPF

SEQ ID NO: 33292 - protein, 15 aa, Homo sapiens
  CDR3 for beta chain variable domain of TCR clone 16646 (TRBV20-1, TRBJ1-1)
CSASRGVTGNTEAFF

SEQ ID NO: 33293 - protein, 14 aa, Homo sapiens
  CDR3 for alpha chain variable domain of TCR clone 16647 (TRAV17, TRAJ31)
CATDAEDNNARLMF

SEQ ID NO: 33294 - protein, 15 aa, Homo sapiens
  CDR3 for beta chain variable domain of TCR clone 16647 (TRBV27, TRBJ2-1)
CASSNGGGSSNEQFF

SEQ ID NO: 33295 - protein, 12 aa, Homo sapiens
  CDR3 for alpha chain variable domain of TCR clone 16648 (TRAV12-1, TRAJ40)
CVFYSGTYKYIF

SEQ ID NO: 33296 - protein, 18 aa, Homo sapiens
  CDR3 for beta chain variable domain of TCR clone 16648 (TRBV12-4, TRBJ2-2)
CASSLVAGTRGRTGELLF

SEQ ID NO: 33297 - protein, 12 aa, Homo sapiens
  CDR3 for alpha chain variable domain of TCR clone 16649 (TRAV26-2, TRAJ21)
CILKGNFNKFYF

SEQ ID NO: 33298 - protein, 15 aa, Homo sapiens
  CDR3 for beta chain variable domain of TCR clone 16649 (TRBV5-1, TRBJ2-1)
CASSPPRAPYNEQFF

SEQ ID NO: 33299 - protein, 15 aa, Homo sapiens
  CDR3 for alpha chain variable domain of TCR clone 16650 (TRAV29/DV5, TRAJ24)
CAASGATDSWGKFQF

SEQ ID NO: 33300 - protein, 14 aa, Homo sapiens
  CDR3 for beta chain variable domain of TCR clone 16650 (TRBV7-2, TRBJ1-1)
CASSFLTGTTEAFF

SEQ ID NO: 33301 - protein, 15 aa, Homo sapiens
  CDR3 for alpha chain variable domain of TCR clone 16651 (TRAV12-2, TRAJ52)
CAAPGGGTSYGKLTF

SEQ ID NO: 33302 - protein, 15 aa, Homo sapiens
  CDR3 for beta chain variable domain of TCR clone 16651 (TRBV11-2, TRBJ2-2)
CASRGLAANTGELFF

SEQ ID NO: 33303 - protein, 11 aa, Homo sapiens
  CDR3 for alpha chain variable domain of TCR clone 16652 (TRAV2, TRAJ33)
CAVESNYQLIW

SEQ ID NO: 33304 - protein, 15 aa, Homo sapiens
  CDR3 for beta chain variable domain of TCR clone 16652 (TRBV19, TRBJ1-1)
CASTSGQIQNTEASF

SEQ ID NO: 33305 - protein, 13 aa, Homo sapiens
  CDR3 for alpha chain variable domain of TCR clone 16653 (TRAV27, TRAJ41)
CAGEGKSGYALNF

SEQ ID NO: 33306 - protein, 14 aa, Homo sapiens
  CDR3 for beta chain variable domain of TCR clone 16653 (TRBV7-2, TRBJ1-1)
CASSFLTGTTEAFF

SEQ ID NO: 33307 - protein, 14 aa, Homo sapiens
  CDR3 for alpha chain variable domain of TCR clone 16654 (TRAV12-1, TRAJ17)
CVVNYKAAGNKLTF

SEQ ID NO: 33308 - protein, 14 aa, Homo sapiens
  CDR3 for beta chain variable domain of TCR clone 16654 (TRBV25-1, TRBJ1-1)
CASTHLGGNTEAFF

SEQ ID NO: 33309 - protein, 12 aa, Homo sapiens
  CDR3 for alpha chain variable domain of TCR clone 16655 (TRAV21, TRAJ33)
CAKMDSSYQLIW

SEQ ID NO: 33310 - protein, 14 aa, Homo sapiens
  CDR3 for beta chain variable domain of TCR clone 16655 (TRBV2, TRBJ2-7)
CASSLTSGGYEQYF

SEQ ID NO: 33311 - protein, 11 aa, Homo sapiens
  CDR3 for alpha chain variable domain of TCR clone 16656 (TRAV1-1, TRAJ23)
CAVRQGGKLLF

SEQ ID NO: 33312 - protein, 20 aa, Homo sapiens
  CDR3 for beta chain variable domain of TCR clone 16656 (TRBV7-8, TRBJ2-2)
CASSHLFPGPTIHITGELFF

SEQ ID NO: 33313 - protein, 11 aa, Homo sapiens
  CDR3 for alpha chain variable domain of TCR clone 16657 (TRAV12-1, TRAJ15)
CVVNAGTALIF

SEQ ID NO: 33314 - protein, 13 aa, Homo sapiens
  CDR3 for beta chain variable domain of TCR clone 16657 (TRBV2, TRBJ2-5)
CASSPRGGGAQYF

SEQ ID NO: 33315 - protein, 14 aa, Homo sapiens
  CDR3 for alpha chain variable domain of TCR clone 16658 (TRAV12-2, TRAJ17)
CAVLFEAAGNKLTF

SEQ ID NO: 33316 - protein, 15 aa, Homo sapiens
  CDR3 for beta chain variable domain of TCR clone 16658 (TRBV5-1, TRBJ2-1)
CASSPPRAPYNEQFF

SEQ ID NO: 33317 - protein, 15 aa, Homo sapiens
  CDR3 for alpha chain variable domain of TCR clone 16659 (TRAV3, TRAJ5)
CAGRDRKTGRRALTF

SEQ ID NO: 33318 - protein, 15 aa, Homo sapiens
  CDR3 for beta chain variable domain of TCR clone 16659 (TRBV7-8, TRBJ2-1)
CASSLADSLYNEQFF

SEQ ID NO: 33319 - protein, 15 aa, Homo sapiens
  CDR3 for alpha chain variable domain of TCR clone 16660 (TRAV21, TRAJ53)
CATLNSGGSNYKLTF

SEQ ID NO: 33320 - protein, 16 aa, Homo sapiens
  CDR3 for beta chain variable domain of TCR clone 16660 (TRBV20-1, TRBJ1-2)
CSASMGQGVANYDYTF

SEQ ID NO: 33321 - protein, 15 aa, Homo sapiens
  CDR3 for alpha chain variable domain of TCR clone 16661 (TRAV12-2, TRAJ42)
CAVNSHGGSQGNPIL

SEQ ID NO: 33322 - protein, 13 aa, Homo sapiens
  CDR3 for beta chain variable domain of TCR clone 16661 (TRBV27, TRBJ1-1)
CASSVSANTEAFF

SEQ ID NO: 33323 - protein, 15 aa, Homo sapiens
  CDR3 for alpha chain variable domain of TCR clone 16662 (TRAV16, TRAJ12)
CSKWLLRDSSYKLIF

SEQ ID NO: 33324 - protein, 13 aa, Homo sapiens
  CDR3 for beta chain variable domain of TCR clone 16662 (TRBV4-2, TRBJ1-1)
CASSQAGNTEAFF

SEQ ID NO: 33325 - protein, 14 aa, Homo sapiens
  CDR3 for alpha chain variable domain of TCR clone 16663 (TRAV12-2, TRAJ13)
CAVKKTGGYQKVTF

SEQ ID NO: 33326 - protein, 15 aa, Homo sapiens
  CDR3 for beta chain variable domain of TCR clone 16663 (TRBV12-4, TRBJ2-1)
CASSNGGGSSNEQFF

SEQ ID NO: 33327 - protein, 14 aa, Homo sapiens
  CDR3 for alpha chain variable domain of TCR clone 16664 (TRAV12-3, TRAJ10)
SHLPLTGGGNKLTF

SEQ ID NO: 33328 - protein, 13 aa, Homo sapiens
  CDR3 for beta chain variable domain of TCR clone 16664 (TRBV20-1, TRBJ1-1)
CSARGGGNTEAFF

SEQ ID NO: 33329 - protein, 13 aa, Homo sapiens
  CDR3 for alpha chain variable domain of TCR clone 16665 (TRAV13-1, TRAJ16)
CAARYQMARSCSL

SEQ ID NO: 33330 - protein, 13 aa, Homo sapiens
  CDR3 for beta chain variable domain of TCR clone 16665 (TRBV4-1, TRBJ2-1)
CASSQAGGDEQFF

SEQ ID NO: 33331 - protein, 19 aa, Homo sapiens
  CDR3 for alpha chain variable domain of TCR clone 16666 (TRAV3, TRAJ6)
CAVRDRNPSRSGGSYIPTF

SEQ ID NO: 33332 - protein, 15 aa, Homo sapiens
  CDR3 for beta chain variable domain of TCR clone 16666 (TRBV28, TRBJ2-5)
CASSPGQGSIETQYF

SEQ ID NO: 33333 - protein, 15 aa, Homo sapiens
  CDR3 for alpha chain variable domain of TCR clone 16667 (TRAV8-3, TRAJ45)
CASSYSGGGADGLTF

SEQ ID NO: 33334 - protein, 13 aa, Homo sapiens
  CDR3 for beta chain variable domain of TCR clone 16667 (TRBV10-3, TRBJ2-7)
CASKLAVNYEQCF

SEQ ID NO: 33335 - protein, 15 aa, Homo sapiens
  CDR3 for alpha chain variable domain of TCR clone 16668 (TRAV8-3, TRAJ27)
RAVGPSKTNAGKSTF

SEQ ID NO: 33336 - protein, 15 aa, Homo sapiens
  CDR3 for beta chain variable domain of TCR clone 16668 (TRBV7-2, TRBJ2-1)
CASSSGLAGGNEQFF

SEQ ID NO: 33337 - protein, 14 aa, Homo sapiens
  CDR3 for alpha chain variable domain of TCR clone 16669 (TRAV8-4, TRAJ13)
CAVTLSGGYQKVTF

SEQ ID NO: 33338 - protein, 15 aa, Homo sapiens
  CDR3 for beta chain variable domain of TCR clone 16669 (TRBV11-3, TRBJ2-3)
CASLKDGREGDTQYF

SEQ ID NO: 33339 - protein, 17 aa, Homo sapiens
  CDR3 for alpha chain variable domain of TCR clone 16670 (TRAV4, TRAJ18)
CLVGERSVGSTLGRRYF

SEQ ID NO: 33340 - protein, 14 aa, Homo sapiens
  CDR3 for beta chain variable domain of TCR clone 16670 (TRBV6-5, TRBJ1-2)
CASSYDGTGGGYTF

SEQ ID NO: 33341 - protein, 11 aa, Homo sapiens
  CDR3 for alpha chain variable domain of TCR clone 16671 (TRAV2, TRAJ21)
CAVFNFNKFYF

SEQ ID NO: 33342 - protein, 14 aa, Homo sapiens
  CDR3 for beta chain variable domain of TCR clone 16671 (TRBV6-3, TRBJ2-5)
CASSYSLREKTQYF

SEQ ID NO: 33343 - protein, 14 aa, Homo sapiens
  CDR3 for alpha chain variable domain of TCR clone 16672 (TRAV35, TRAJ33)
CAGSSQDSNYQLIW

SEQ ID NO: 33344 - protein, 15 aa, Homo sapiens
  CDR3 for beta chain variable domain of TCR clone 16672 (TRBV20-1, TRBJ2-7)
CSAEAGTSGAYEQYF

SEQ ID NO: 33345 - protein, 13 aa, Homo sapiens
  CDR3 for alpha chain variable domain of TCR clone 16673 (TRAV20, TRAJ37)
CAGCSSKTGKLIF

SEQ ID NO: 33346 - protein, 11 aa, Homo sapiens
  CDR3 for beta chain variable domain of TCR clone 16673 (TRBV12-4, TRBJ2-3)
CASTATDTQYF

SEQ ID NO: 33347 - protein, 17 aa, Homo sapiens
  CDR3 for alpha chain variable domain of TCR clone 16674 (TRAV23/DV6, TRAJ57)
CAASSTLSQGGSEKLFF

SEQ ID NO: 33348 - protein, 14 aa, Homo sapiens
  CDR3 for beta chain variable domain of TCR clone 16674 (TRBV25-1, TRBJ1-1)
CASTHLGGNTEAFF

SEQ ID NO: 33349 - protein, 14 aa, Homo sapiens
  CDR3 for alpha chain variable domain of TCR clone 16675 (TRAV25, TRAJ35)
CARRMEGFGNVLHC

SEQ ID NO: 33350 - protein, 13 aa, Homo sapiens
  CDR3 for beta chain variable domain of TCR clone 16675 (TRBV7-2, TRBJ1-4)
CASSVAGLEKLFF

SEQ ID NO: 33351 - protein, 13 aa, Homo sapiens
  CDR3 for alpha chain variable domain of TCR clone 16676 (TRAV27, TRAJ41)
CAGEGNYGYALNF

SEQ ID NO: 33352 - protein, 14 aa, Homo sapiens
  CDR3 for beta chain variable domain of TCR clone 16676 (TRBV7-2, TRBJ1-1)
CASSFLTGTTEAFF

SEQ ID NO: 33353 - protein, 13 aa, Homo sapiens
  CDR3 for alpha chain variable domain of TCR clone 16677 (TRAV20, TRAJ37)
CAGCSSNTCKLIF

SEQ ID NO: 33354 - protein, 11 aa, Homo sapiens
  CDR3 for beta chain variable domain of TCR clone 16677 (TRBV12-4, TRBJ2-3)
CASTATDTQYF

SEQ ID NO: 33355 - protein, 15 aa, Homo sapiens
  CDR3 for alpha chain variable domain of TCR clone 16678 (TRAV12-3, TRAJ6)
CAMSATTGGSYIPTL

SEQ ID NO: 33356 - protein, 16 aa, Homo sapiens
  CDR3 for beta chain variable domain of TCR clone 16678 (TRBV20-1, TRBJ1-2)
CSASMGQGVANYGYTF

SEQ ID NO: 33357 - protein, 13 aa, Homo sapiens
  CDR3 for alpha chain variable domain of TCR clone 16679 (TRAV12-1, TRAJ22)
CVVYSGSARQLTF

SEQ ID NO: 33358 - protein, 16 aa, Homo sapiens
  CDR3 for beta chain variable domain of TCR clone 16679 (TRBV5-1, TRBJ2-1)
CASSLADIESYNEQFF

SEQ ID NO: 33359 - protein, 15 aa, Homo sapiens
  CDR3 for alpha chain variable domain of TCR clone 16680 (TRAV8-2, TRAJ40)
CVVLGTTSGTYKYIF

SEQ ID NO: 33360 - protein, 16 aa, Homo sapiens
  CDR3 for beta chain variable domain of TCR clone 16680 (TRBV7-3, TRBJ2-1)
CAGSLEGYRSYNEQFF

SEQ ID NO: 33361 - protein, 15 aa, Homo sapiens
  CDR3 for alpha chain variable domain of TCR clone 16681 (TRAV25, TRAJ52)
CAGRPGGTNYGKLTF

SEQ ID NO: 33362 - protein, 17 aa, Homo sapiens
  CDR3 for beta chain variable domain of TCR clone 16681 (TRBV7-8, TRBJ2-6)
CASSAGTGGAGANVLTF

SEQ ID NO: 33363 - protein, 14 aa, Homo sapiens
  CDR3 for alpha chain variable domain of TCR clone 16682 (TRAV26-1, TRAJ45)
CTEVTGGGADGLTF

SEQ ID NO: 33364 - protein, 13 aa, Homo sapiens
  CDR3 for beta chain variable domain of TCR clone 16682 (TRBV7-6, TRBJ1-2)
CASSLVADYGYTF

SEQ ID NO: 33365 - protein, 13 aa, Homo sapiens
  CDR3 for alpha chain variable domain of TCR clone 16683 (TRAV22, TRAJ29)
CAVGGSGNTPLVF

SEQ ID NO: 33366 - protein, 13 aa, Homo sapiens
  CDR3 for beta chain variable domain of TCR clone 16683 (TRBV4-2, TRBJ1-1)
CASSQAENTEAFF

SEQ ID NO: 33367 - protein, 18 aa, Homo sapiens
  CDR3 for alpha chain variable domain of TCR clone 16684 (TRAV12-3, TRAJ52)
CAMSVGGAGGTSYGKLTF

SEQ ID NO: 33368 - protein, 17 aa, Homo sapiens
  CDR3 for beta chain variable domain of TCR clone 16684 (TRBV11-2, TRBJ2-1)
CASSLYPPGVEYNEQFF

SEQ ID NO: 33369 - protein, 14 aa, Homo sapiens
  CDR3 for alpha chain variable domain of TCR clone 16685 (TRAV26-1, TRAJ39)
CIVRGSRAGNMLTF

SEQ ID NO: 33370 - protein, 14 aa, Homo sapiens
  CDR3 for beta chain variable domain of TCR clone 16685 (TRBV6-1, TRBJ1-3)
CASVQGGGGNTIYF

SEQ ID NO: 33371 - protein, 13 aa, Homo sapiens
  CDR3 for alpha chain variable domain of TCR clone 16686 (TRAV35, TRAJ48)
CAGHEFGNEKLAF

SEQ ID NO: 33372 - protein, 14 aa, Homo sapiens
  CDR3 for beta chain variable domain of TCR clone 16686 (TRBV19, TRBJ2-1)
CASPTFVLSGEQFF

SEQ ID NO: 33373 - protein, 15 aa, Homo sapiens
  CDR3 for alpha chain variable domain of TCR clone 16687 (TRAV3, TRAJ3)
CAVRGRDSSASKIIF

SEQ ID NO: 33374 - protein, 18 aa, Homo sapiens
  CDR3 for beta chain variable domain of TCR clone 16687 (TRBV25-1, TRBJ1-2)
CASSGLQNGQGLIFGYTF

SEQ ID NO: 33375 - protein, 12 aa, Homo sapiens
  CDR3 for alpha chain variable domain of TCR clone 16688 (TRAV8-3, TRAJ20)
CAVGANDYKFSF

SEQ ID NO: 33376 - protein, 16 aa, Homo sapiens
  CDR3 for beta chain variable domain of TCR clone 16688 (TRBV19, TRBJ2-2)
CASRSPGTGATGELFF

SEQ ID NO: 33377 - protein, 14 aa, Homo sapiens
  CDR3 for alpha chain variable domain of TCR clone 16689 (TRAV20, TRAJ56)
CAVQFGGANGKLTF

SEQ ID NO: 33378 - protein, 14 aa, Homo sapiens
  CDR3 for beta chain variable domain of TCR clone 16689 (TRBV20-1, TRBJ2-7)
CSAKRGRSSYEQYF

SEQ ID NO: 33379 - protein, 18 aa, Homo sapiens
  CDR3 for alpha chain variable domain of TCR clone 16690 (TRAV21, TRAJ52)
CDVRPSPAGGTSYGKLTF

SEQ ID NO: 33380 - protein, 17 aa, Homo sapiens
  CDR3 for beta chain variable domain of TCR clone 16690 (TRBV13, TRBJ2-3)
CASSLSRVAGGRNTQYF

SEQ ID NO: 33381 - protein, 15 aa, Homo sapiens
  CDR3 for alpha chain variable domain of TCR clone 16691 (TRAV3, TRAJ17)
CAVSPKEAAGNKPTF

SEQ ID NO: 33382 - protein, 12 aa, Homo sapiens
  CDR3 for beta chain variable domain of TCR clone 16691 (TRBV7-9, TRBJ1-6)
CASSLMTSPLHF

SEQ ID NO: 33383 - protein, 16 aa, Homo sapiens
  CDR3 for alpha chain variable domain of TCR clone 16692 (TRAV3, TRAJ21)
CAVRDIERGSFNKFYF

SEQ ID NO: 33384 - protein, 13 aa, Homo sapiens
  CDR3 for beta chain variable domain of TCR clone 16692 (TRBV27, TRBJ2-7)
CASSLTTGYEQYF

SEQ ID NO: 33385 - protein, 13 aa, Homo sapiens
  CDR3 for alpha chain variable domain of TCR clone 16693 (TRAV13-1, TRAJ40)
CAASKGGTYKYIF

SEQ ID NO: 33386 - protein, 13 aa, Homo sapiens
  CDR3 for beta chain variable domain of TCR clone 16693 (TRBV12-4, TRBJ2-5)
CASSSVPQETQYF

SEQ ID NO: 33387 - protein, 12 aa, Homo sapiens
  CDR3 for alpha chain variable domain of TCR clone 16694 (TRAV12-3, TRAJ17)
CAMTLTGNKLTF

SEQ ID NO: 33388 - protein, 16 aa, Homo sapiens
  CDR3 for beta chain variable domain of TCR clone 16694 (TRBV6-1, TRBJ2-5)
CASSETLDRGAETQYF

SEQ ID NO: 33389 - protein, 12 aa, Homo sapiens
  CDR3 for alpha chain variable domain of TCR clone 16695 (TRAV12-3, TRAJ17)
CAMTLTGNKLTF

SEQ ID NO: 33390 - protein, 14 aa, Homo sapiens
  CDR3 for beta chain variable domain of TCR clone 16695 (TRBV5-4, TRBJ1-1)
CASSLDSRRDEAFF

SEQ ID NO: 33391 - protein, 16 aa, Homo sapiens
  CDR3 for alpha chain variable domain of TCR clone 16696 (TRAV3, TRAJ10)
CAVRDMRAGGGNKLTF

SEQ ID NO: 33392 - protein, 17 aa, Homo sapiens
  CDR3 for beta chain variable domain of TCR clone 16696 (TRBV11-2, TRBJ2-1)
CASSLYPPGVEYNEQFF

SEQ ID NO: 33393 - protein, 15 aa, Homo sapiens
  CDR3 for alpha chain variable domain of TCR clone 16697 (TRAV17, TRAJ57)
CATGPSQGGSEKMVF

SEQ ID NO: 33394 - protein, 16 aa, Homo sapiens
  CDR3 for beta chain variable domain of TCR clone 16697 (TRBV12-4, TRBJ1-5)
CASSRPVGGSNQPQHF

SEQ ID NO: 33395 - protein, 16 aa, Homo sapiens
  CDR3 for alpha chain variable domain of TCR clone 16698 (TRAV12-3, TRAJ58)
CAMTDTEETSGSRLTF

SEQ ID NO: 33396 - protein, 15 aa, Homo sapiens
  CDR3 for beta chain variable domain of TCR clone 16698 (TRBV11-3, TRBJ2-3)
CASLKDGREGDTQYF

SEQ ID NO: 33397 - protein, 12 aa, Homo sapiens
  CDR3 for alpha chain variable domain of TCR clone 16699 (TRAV12-3, TRAJ42)
CAPGGSQGNPIF

SEQ ID NO: 33398 - protein, 13 aa, Homo sapiens
  CDR3 for beta chain variable domain of TCR clone 16699 (TRBV5-7, TRBJ2-6)
CASTSSGANVLTF

SEQ ID NO: 33399 - protein, 11 aa, Homo sapiens
  CDR3 for alpha chain variable domain of TCR clone 16700 (TRAV12-1, TRAJ30)
CVVDGQDKIIF

SEQ ID NO: 33400 - protein, 12 aa, Homo sapiens
  CDR3 for beta chain variable domain of TCR clone 16700 (TRBV27, TRBJ2-2)
CASKLFTGELFF

SEQ ID NO: 33401 - protein, 14 aa, Homo sapiens
  CDR3 for alpha chain variable domain of TCR clone 16701 (TRAV12-3, TRAJ57)
CAMSAWGGSEKLVF

SEQ ID NO: 33402 - protein, 14 aa, Homo sapiens
  CDR3 for beta chain variable domain of TCR clone 16701 (TRBV7-9, TRBJ2-5)
CASSLDTAQETQYF

SEQ ID NO: 33403 - protein, 14 aa, Homo sapiens
  CDR3 for alpha chain variable domain of TCR clone 16702 (TRAV8-3, TRAJ4)
RAVGAAGGYNKLIF

SEQ ID NO: 33404 - protein, 15 aa, Homo sapiens
  CDR3 for beta chain variable domain of TCR clone 16702 (TRBV6-5, TRBJ2-1)
CASSYDAGAGNEQFF

SEQ ID NO: 33405 - protein, 12 aa, Homo sapiens
  CDR3 for alpha chain variable domain of TCR clone 16703 (TRAV30, TRAJ43)
CGTEERGNDMRF

SEQ ID NO: 33406 - protein, 13 aa, Homo sapiens
  CDR3 for beta chain variable domain of TCR clone 16703 (TRBV27, TRBJ2-7)
CASSLSQGYEQYF

SEQ ID NO: 33407 - protein, 17 aa, Homo sapiens
  CDR3 for alpha chain variable domain of TCR clone 16704 (TRAV3, TRAJ6)
CAVRDGPRAGGSYIPTF

SEQ ID NO: 33408 - protein, 20 aa, Homo sapiens
  CDR3 for beta chain variable domain of TCR clone 16704 (TRBV28, TRBJ2-1)
CASTPIGRSPGLAGGSEQFF

SEQ ID NO: 33409 - protein, 14 aa, Homo sapiens
  CDR3 for alpha chain variable domain of TCR clone 16705 (TRAV21, TRAJ15)
CAVSLNQAGTALIF

SEQ ID NO: 33410 - protein, 11 aa, Homo sapiens
  CDR3 for beta chain variable domain of TCR clone 16705 (TRBV20-1, TRBJ2-7)
RSARTSYEQYF

SEQ ID NO: 33411 - protein, 10 aa, Homo sapiens
  CDR3 for alpha chain variable domain of TCR clone 16706 (TRAV12-3, TRAJ49)
CATNDDQFYF

SEQ ID NO: 33412 - protein, 13 aa, Homo sapiens
  CDR3 for beta chain variable domain of TCR clone 16706 (TRBV12-4, TRBJ1-1)
CASSPGTGFEAFF

SEQ ID NO: 33413 - protein, 21 aa, Homo sapiens
  CDR3 for alpha chain variable domain of TCR clone 16707 (TRAV1-1, TRAJ6)
CLLLLRCERLERTGGSYIPTF

SEQ ID NO: 33414 - protein, 19 aa, Homo sapiens
  CDR3 for beta chain variable domain of TCR clone 16707 (TRBV7-2, TRBJ2-5)
CASSLSGGGGDPVLRARHA

SEQ ID NO: 33415 - protein, 13 aa, Homo sapiens
  CDR3 for alpha chain variable domain of TCR clone 16708 (TRAV1-1, TRAJ9)
CAAKNTGGFETIF

SEQ ID NO: 33416 - protein, 14 aa, Homo sapiens
  CDR3 for beta chain variable domain of TCR clone 16708 (TRBV20-1, TRBJ2-1)
CSAQIGGSANEQFF

SEQ ID NO: 33417 - protein, 13 aa, Homo sapiens
  CDR3 for alpha chain variable domain of TCR clone 16709 (TRAV8-6, TRAJ44)
RDSYTGTASKLTF

SEQ ID NO: 33418 - protein, 13 aa, Homo sapiens
  CDR3 for beta chain variable domain of TCR clone 16709 (TRBV27, TRBJ2-7)
CASSFSQGYEQYF

SEQ ID NO: 33419 - protein, 12 aa, Homo sapiens
  CDR3 for alpha chain variable domain of TCR clone 16710 (TRAV13-2, TRAJ23)
CAERHRGGKLIF

SEQ ID NO: 33420 - protein, 16 aa, Homo sapiens
  CDR3 for beta chain variable domain of TCR clone 16710 (TRBV20-1, TRBJ1-4)
CSAPGQGLLTNEKPFF

SEQ ID NO: 33421 - protein, 15 aa, Homo sapiens
  CDR3 for alpha chain variable domain of TCR clone 16711 (TRAV23/DV6, TRAJ18)
CAASHAGSTLGRLYF

SEQ ID NO: 33422 - protein, 12 aa, Homo sapiens
  CDR3 for beta chain variable domain of TCR clone 16711 (TRBV20-1, TRBJ1-3)
CSATVSGNTIYF

SEQ ID NO: 33423 - protein, 10 aa, Homo sapiens
  CDR3 for alpha chain variable domain of TCR clone 16712 (TRAV1-2, TRAJ23)
CAGQGGKLIF

SEQ ID NO: 33424 - protein, 14 aa, Homo sapiens
  CDR3 for beta chain variable domain of TCR clone 16712 (TRBV7-8, TRBJ2-3)
CASSLEAGTDTQYF

SEQ ID NO: 33425 - protein, 11 aa, Homo sapiens
  CDR3 for alpha chain variable domain of TCR clone 16713 (TRAV1-2, TRAJ20)
CAVANDYKLSF

SEQ ID NO: 33426 - protein, 18 aa, Homo sapiens
  CDR3 for beta chain variable domain of TCR clone 16713 (TRBV20-1, TRBJ2-6)
RSAETTPTHGSGANVLTF

SEQ ID NO: 33427 - protein, 13 aa, Homo sapiens
  CDR3 for alpha chain variable domain of TCR clone 16714 (TRAV12-1, TRAJ31)
CVVNMNNNARLMF

SEQ ID NO: 33428 - protein, 15 aa, Homo sapiens
  CDR3 for beta chain variable domain of TCR clone 16714 (TRBV4-1, TRBJ1-2)
CASSQGQGAAYGYAF

SEQ ID NO: 33429 - protein, 14 aa, Homo sapiens
  CDR3 for alpha chain variable domain of TCR clone 16715 (TRAV8-3, TRAJ4)
CAVGAAGGYNKLIF

SEQ ID NO: 33430 - protein, 16 aa, Homo sapiens
  CDR3 for beta chain variable domain of TCR clone 16715 (TRBV12-5, TRBJ2-5)
CASGPRTSGNQETQYF

SEQ ID NO: 33431 - protein, 16 aa, Homo sapiens
  CDR3 for alpha chain variable domain of TCR clone 16716 (TRAV3, TRAJ21)
CAVREIERGNFNKFYF

SEQ ID NO: 33432 - protein, 13 aa, Homo sapiens
  CDR3 for beta chain variable domain of TCR clone 16716 (TRBV27, TRBJ2-7)
CASSLTTGYEQYF

SEQ ID NO: 33433 - protein, 14 aa, Homo sapiens
  CDR3 for alpha chain variable domain of TCR clone 16717 (TRAV1-2, TRAJ16)
CAVNRFSDGQKLLF

SEQ ID NO: 33434 - protein, 15 aa, Homo sapiens
  CDR3 for beta chain variable domain of TCR clone 16717 (TRBV28, TRBJ2-7)
CASSPGGRGFYEQYF

SEQ ID NO: 33435 - protein, 19 aa, Homo sapiens
  CDR3 for alpha chain variable domain of TCR clone 16718 (TRAV3, TRAJ6)
CAVRDRNPSRSGGSYITTF

SEQ ID NO: 33436 - protein, 15 aa, Homo sapiens
  CDR3 for beta chain variable domain of TCR clone 16718 (TRBV18, TRBJ2-7)
CASSPTFMDSYEQYF

SEQ ID NO: 33437 - protein, 14 aa, Homo sapiens
  CDR3 for alpha chain variable domain of TCR clone 16719 (TRAV12-2, TRAJ40)
CAVKIPSGTYKYIF

SEQ ID NO: 33438 - protein, 16 aa, Homo sapiens
  CDR3 for beta chain variable domain of TCR clone 16719 (TRBV7-3, TRBJ2-2)
CASSLKRGTLSGELFF

SEQ ID NO: 33439 - protein, 13 aa, Homo sapiens
  CDR3 for alpha chain variable domain of TCR clone 16720 (TRAV21, TRAJ27)
CAARPGNAGKSTF

SEQ ID NO: 33440 - protein, 14 aa, Homo sapiens
  CDR3 for beta chain variable domain of TCR clone 16720 (TRBV7-6, TRBJ2-3)
CACSLGTVTDTQYF

SEQ ID NO: 33441 - protein, 12 aa, Homo sapiens
  CDR3 for alpha chain variable domain of TCR clone 16721 (TRAV13-2, TRAJ8)
CAPWLGFQKLVF

SEQ ID NO: 33442 - protein, 13 aa, Homo sapiens
  CDR3 for beta chain variable domain of TCR clone 16721 (TRBV7-9, TRBJ1-2)
CASSLKQNYGYTF

SEQ ID NO: 33443 - protein, 15 aa, Homo sapiens
  CDR3 for alpha chain variable domain of TCR clone 16722 (TRAV17, TRAJ57)
CATGPSQGGSEKLVF

SEQ ID NO: 33444 - protein, 14 aa, Homo sapiens
  CDR3 for beta chain variable domain of TCR clone 16722 (TRBV12-5, TRBJ2-5)
CASGSRTQQETQYF

SEQ ID NO: 33445 - protein, 14 aa, Homo sapiens
  CDR3 for alpha chain variable domain of TCR clone 16723 (TRAV21, TRAJ35)
CAVMPIGFGNVLHC

SEQ ID NO: 33446 - protein, 12 aa, Homo sapiens
  CDR3 for beta chain variable domain of TCR clone 16723 (TRBV7-9, TRBJ2-7)
CASSIKREEQCF

SEQ ID NO: 33447 - protein, 16 aa, Homo sapiens
  CDR3 for alpha chain variable domain of TCR clone 16724 (TRAV30, TRAJ24)
CGTEIVDADSWGKFQF

SEQ ID NO: 33448 - protein, 12 aa, Homo sapiens
  CDR3 for beta chain variable domain of TCR clone 16724 (TRBV7-9, TRBJ2-7)
CASSLEGYEQYF

SEQ ID NO: 33449 - protein, 13 aa, Homo sapiens
  CDR3 for alpha chain variable domain of TCR clone 16725 (TRAV13-2, TRAJ48)
CAEMDFGNEKLTF

SEQ ID NO: 33450 - protein, 15 aa, Homo sapiens
  CDR3 for beta chain variable domain of TCR clone 16725 (TRBV7-9, TRBJ1-6)
CASSSPGRGSSPLHF

SEQ ID NO: 33451 - protein, 14 aa, Homo sapiens
  CDR3 for alpha chain variable domain of TCR clone 16726 (TRAV21, TRAJ45)
CAVSSGGGADGLTF

SEQ ID NO: 33452 - protein, 15 aa, Homo sapiens
  CDR3 for beta chain variable domain of TCR clone 16726 (TRBV6-1, TRBJ2-4)
CASSEAVWTINSQYF

SEQ ID NO: 33453 - protein, 18 aa, Homo sapiens
  CDR3 for alpha chain variable domain of TCR clone 16727 (TRAV12-3, TRAJ52)
CAMSRTNAGGTSYGKLTL

SEQ ID NO: 33454 - protein, 17 aa, Homo sapiens
  CDR3 for beta chain variable domain of TCR clone 16727 (TRBV7-3, TRBJ2-3)
CASSLMKRMRGADTQYF

SEQ ID NO: 33455 - protein, 13 aa, Homo sapiens
  CDR3 for alpha chain variable domain of TCR clone 16728 (TRAV2, TRAJ40)
CAVVTSGTYKYIF

SEQ ID NO: 33456 - protein, 15 aa, Homo sapiens
  CDR3 for beta chain variable domain of TCR clone 16728 (TRBV4-1, TRBJ1-4)
CASSDTGGTNEKLFF

SEQ ID NO: 33457 - protein, 14 aa, Homo sapiens
  CDR3 for alpha chain variable domain of TCR clone 16729 (TRAV13-1, TRAJ44)
CAAKATGTASKLTF

SEQ ID NO: 33458 - protein, 13 aa, Homo sapiens
  CDR3 for beta chain variable domain of TCR clone 16729 (TRBV5-5, TRBJ1-2)
CASSFWRGEDYTL

SEQ ID NO: 33459 - protein, 14 aa, Homo sapiens
  CDR3 for alpha chain variable domain of TCR clone 16730 (TRAV2, TRAJ37)
CAVDFTSNTGKLIF

SEQ ID NO: 33460 - protein, 16 aa, Homo sapiens
  CDR3 for beta chain variable domain of TCR clone 16730 (TRBV20-1, TRBJ1-4)
CSAPGQGLLTNEKLFF

SEQ ID NO: 33461 - protein, 16 aa, Homo sapiens
  CDR3 for alpha chain variable domain of TCR clone 16731 (TRAV6, TRAJ37)
CSLAFHGSGNTGKLIF

SEQ ID NO: 33462 - protein, 18 aa, Homo sapiens
  CDR3 for beta chain variable domain of TCR clone 16731 (TRBV4-3, TRBJ1-2)
CASSQDGQSAPSDYGYTF

SEQ ID NO: 33463 - protein, 11 aa, Homo sapiens
  CDR3 for alpha chain variable domain of TCR clone 16732 (TRAV17, TRAJ43)
CATPRSNDMRF

SEQ ID NO: 33464 - protein, 15 aa, Homo sapiens
  CDR3 for beta chain variable domain of TCR clone 16732 (TRBV11-2, TRBJ2-1)
YASSLGTSGLNEQFF

SEQ ID NO: 33465 - protein, 14 aa, Homo sapiens
  CDR3 for alpha chain variable domain of TCR clone 16733 (TRAV12-1, TRAJ17)
CVVNYKAAGNKLTF

SEQ ID NO: 33466 - protein, 17 aa, Homo sapiens
  CDR3 for beta chain variable domain of TCR clone 16733 (TRBV20-1, TRBJ2-1)
FSASSSGLAGSYNEQFF

SEQ ID NO: 33467 - protein, 14 aa, Homo sapiens
  CDR3 for alpha chain variable domain of TCR clone 16734 (TRAV2, TRAJ37)
CVVDFTSNTGKLIF

SEQ ID NO: 33468 - protein, 15 aa, Homo sapiens
  CDR3 for beta chain variable domain of TCR clone 16734 (TRBV20-1, TRBJ1-1)
CSASRGVTGNTEAFF

SEQ ID NO: 33469 - protein, 15 aa, Homo sapiens
  CDR3 for alpha chain variable domain of TCR clone 16735 (TRAV3, TRAJ47)
CAVRDIGECGNKLVF

SEQ ID NO: 33470 - protein, 14 aa, Homo sapiens
  CDR3 for beta chain variable domain of TCR clone 16735 (TRBV13, TRBJ2-5)
CASSLERVGETQYF

SEQ ID NO: 33471 - protein, 15 aa, Homo sapiens
  CDR3 for alpha chain variable domain of TCR clone 16736 (TRAV8-3, TRAJ45)
CASSYSGGGADGLTF

SEQ ID NO: 33472 - protein, 13 aa, Homo sapiens
  CDR3 for beta chain variable domain of TCR clone 16736 (TRBV10-3, TRBJ2-7)
CASKIAVNYEQYF

SEQ ID NO: 33473 - protein, 15 aa, Homo sapiens
  CDR3 for alpha chain variable domain of TCR clone 16737 (TRAV26-1, TRAJ29)
CIVRVEGSGNTPLVF

SEQ ID NO: 33474 - protein, 15 aa, Homo sapiens
  CDR3 for beta chain variable domain of TCR clone 16737 (TRBV7-9, TRBJ1-5)
CASSQGYQPNQPQHF

SEQ ID NO: 33475 - protein, 13 aa, Homo sapiens
  CDR3 for alpha chain variable domain of TCR clone 16738 (TRAV38-2/DV8, TRAJ29)
CAYRTPGNTPLVF

SEQ ID NO: 33476 - protein, 15 aa, Homo sapiens
  CDR3 for beta chain variable domain of TCR clone 16738 (TRBV6-4, TRBJ2-4)
CASPGTELAKNIQYF

SEQ ID NO: 33477 - protein, 11 aa, Homo sapiens
  CDR3 for alpha chain variable domain of TCR clone 16739 (TRAV3, TRAJ21)
CAVGNFNKFYF

SEQ ID NO: 33478 - protein, 15 aa, Homo sapiens
  CDR3 for beta chain variable domain of TCR clone 16739 (TRBV7-9, TRBJ1-6)
CASSSPGRGNSPLHF

SEQ ID NO: 33479 - protein, 14 aa, Homo sapiens
  CDR3 for alpha chain variable domain of TCR clone 16740 (TRAV1-2, TRAJ6)
CAVSLSGGSYIPTF

SEQ ID NO: 33480 - protein, 15 aa, Homo sapiens
  CDR3 for beta chain variable domain of TCR clone 16740 (TRBV28, TRBJ2-7)
CASSPGGRGFYEQYF

SEQ ID NO: 33481 - protein, 17 aa, Homo sapiens
  CDR3 for alpha chain variable domain of TCR clone 16741 (TRAV3, TRAJ6)
CAVRDGPRAGGSYIHTF

SEQ ID NO: 33482 - protein, 20 aa, Homo sapiens
  CDR3 for beta chain variable domain of TCR clone 16741 (TRBV28, TRBJ2-1)
CASTPIGRSPGLAGGNEQFF

SEQ ID NO: 33483 - protein, 11 aa, Homo sapiens
  CDR3 for alpha chain variable domain of TCR clone 16742 (TRAV1-2, TRAJ31)
CAVNSNARLMF

SEQ ID NO: 33484 - protein, 15 aa, Homo sapiens
  CDR3 for beta chain variable domain of TCR clone 16742 (TRBV28, TRBJ2-1)
CASSIIAGGRSEQFF

SEQ ID NO: 33485 - protein, 11 aa, Homo sapiens
  CDR3 for alpha chain variable domain of TCR clone 16743 (TRAV9-2, TRAJ11)
CVPAGYSTLTF

SEQ ID NO: 33486 - protein, 15 aa, Homo sapiens
  CDR3 for beta chain variable domain of TCR clone 16743 (TRBV20-1, TRBJ1-5)
CSARSGPSMNQPQHF

SEQ ID NO: 33487 - protein, 14 aa, Homo sapiens
  CDR3 for alpha chain variable domain of TCR clone 16744 (TRAV26-1, TRAJ49)
CIVRPSNTGNQFYF

SEQ ID NO: 33488 - protein, 15 aa, Homo sapiens
  CDR3 for beta chain variable domain of TCR clone 16744 (TRBV19, TRBJ1-1)
CASMGFRDANTEAFF

SEQ ID NO: 33489 - protein, 17 aa, Homo sapiens
  CDR3 for alpha chain variable domain of TCR clone 16745 (TRAV3, TRAJ6)
CAVRDGPRGGGSYIPTF

SEQ ID NO: 33490 - protein, 14 aa, Homo sapiens
  CDR3 for beta chain variable domain of TCR clone 16745 (TRBV7-2, TRBJ2-7)
CASSPKTSFYEQYF

SEQ ID NO: 33491 - protein, 15 aa, Homo sapiens
  CDR3 for alpha chain variable domain of TCR clone 16746 (TRAV34, TRAJ38)
CGADFTPGNNRKLLW

SEQ ID NO: 33492 - protein, 16 aa, Homo sapiens
  CDR3 for beta chain variable domain of TCR clone 16746 (TRBV12-5, TRBJ2-5)
CASGPRTSGNQETQYF

SEQ ID NO: 33493 - protein, 13 aa, Homo sapiens
  CDR3 for alpha chain variable domain of TCR clone 16747 (TRAV8-3, TRAJ28)
CAVGAVGSDQLTF

SEQ ID NO: 33494 - protein, 14 aa, Homo sapiens
  CDR3 for beta chain variable domain of TCR clone 16747 (TRBV7-2, TRBJ2-7)
CASRSQGAAYEQYF

SEQ ID NO: 33495 - protein, 14 aa, Homo sapiens
  CDR3 for alpha chain variable domain of TCR clone 16748 (TRAV26-1, TRAJ38)
CIADNAGNNRELIW

SEQ ID NO: 33496 - protein, 13 aa, Homo sapiens
  CDR3 for beta chain variable domain of TCR clone 16748 (TRBV20-1, TRBJ1-1)
CSARGGGNTEAFF

SEQ ID NO: 33497 - protein, 15 aa, Homo sapiens
  CDR3 for alpha chain variable domain of TCR clone 16749 (TRAV29/DV5, TRAJ42)
CAAKTDGGSKGNLIF

SEQ ID NO: 33498 - protein, 15 aa, Homo sapiens
  CDR3 for beta chain variable domain of TCR clone 16749 (TRBV5-1, TRBJ2-2)
CASSSQGGNTGELFF

SEQ ID NO: 33499 - protein, 11 aa, Homo sapiens
  CDR3 for alpha chain variable domain of TCR clone 16750 (TRAV8-4, TRAJ34)
CAVSWTYKLIF

SEQ ID NO: 33500 - protein, 14 aa, Homo sapiens
  CDR3 for beta chain variable domain of TCR clone 16750 (TRBV7-9, TRBJ2-3)
CASSLEDGTDTQYF

SEQ ID NO: 33501 - protein, 19 aa, Homo sapiens
  CDR3 for alpha chain variable domain of TCR clone 16751 (TRAV3, TRAJ6)
CAVRDGPGQEEATYLHLEE

SEQ ID NO: 33502 - protein, 20 aa, Homo sapiens
  CDR3 for beta chain variable domain of TCR clone 16751 (TRBV28, TRBJ2-1)
CASTPIGRSPGLAGGNEQFF

SEQ ID NO: 33503 - protein, 11 aa, Homo sapiens
  CDR3 for alpha chain variable domain of TCR clone 16752 (TRAV4, TRAJ31)
CLVGDNARLMF

SEQ ID NO: 33504 - protein, 16 aa, Homo sapiens
  CDR3 for beta chain variable domain of TCR clone 16752 (TRBV7-2, TRBJ2-5)
CASSSKWWSGQETQYF

SEQ ID NO: 33505 - protein, 14 aa, Homo sapiens
  CDR3 for alpha chain variable domain of TCR clone 16753 (TRAV13-1, TRAJ44)
CAAKATGTASKLTF

SEQ ID NO: 33506 - protein, 16 aa, Homo sapiens
  CDR3 for beta chain variable domain of TCR clone 16753 (TRBV24-1, TRBJ2-3)
CATSDPGTGATDTQYF

SEQ ID NO: 33507 - protein, 20 aa, Homo sapiens
  CDR3 for alpha chain variable domain of TCR clone 16754 (TRAV1-1, TRAJ4)
CLLLLRCEGFLSGGYNKLIF

SEQ ID NO: 33508 - protein, 16 aa, Homo sapiens
  CDR3 for beta chain variable domain of TCR clone 16754 (TRBV28, TRBJ1-4)
CASSPPYRGRSEKLSF

SEQ ID NO: 33509 - protein, 12 aa, Homo sapiens
  CDR3 for alpha chain variable domain of TCR clone 16755 (TRAV27, TRAJ13)
CAGVRGYQKVTF

SEQ ID NO: 33510 - protein, 16 aa, Homo sapiens
  CDR3 for beta chain variable domain of TCR clone 16755 (TRBV28, TRBJ2-1)
CASSSSYSGGLNEQFF

SEQ ID NO: 33511 - protein, 14 aa, Homo sapiens
  CDR3 for alpha chain variable domain of TCR clone 16756 (TRAV12-2, TRAJ13)
CAVKKTGGYQKVTF

SEQ ID NO: 33512 - protein, 15 aa, Homo sapiens
  CDR3 for beta chain variable domain of TCR clone 16756 (TRBV11-3, TRBJ2-3)
CASLKDGREGDTQYF

SEQ ID NO: 33513 - protein, 13 aa, Homo sapiens
  CDR3 for alpha chain variable domain of TCR clone 16757 (TRAV26-1, TRAJ40)
CIAATSGTYKYIF

SEQ ID NO: 33514 - protein, 16 aa, Homo sapiens
  CDR3 for beta chain variable domain of TCR clone 16757 (TRBV7-2, TRBJ2-2)
CASSLYRGPNTGELFF

SEQ ID NO: 33515 - protein, 12 aa, Homo sapiens
  CDR3 for alpha chain variable domain of TCR clone 16758 (TRAV21, TRAJ33)
CAKMDSNYQLIW

SEQ ID NO: 33516 - protein, 14 aa, Homo sapiens
  CDR3 for beta chain variable domain of TCR clone 16758 (TRBV25-1, TRBJ1-1)
CASTHLGGNTEAFF

SEQ ID NO: 33517 - protein, 13 aa, Homo sapiens
  CDR3 for alpha chain variable domain of TCR clone 16759 (TRAV2, TRAJ40)
CAVVTSGTYKYIF

SEQ ID NO: 33518 - protein, 14 aa, Homo sapiens
  CDR3 for beta chain variable domain of TCR clone 16759 (TRBV7-6, TRBJ2-3)
CASSLGTVTDTQYF

SEQ ID NO: 33519 - protein, 11 aa, Homo sapiens
  CDR3 for alpha chain variable domain of TCR clone 16760 (TRAV12-3, TRAJ26)
CAMSHGQNFVF

SEQ ID NO: 33520 - protein, 15 aa, Homo sapiens
  CDR3 for beta chain variable domain of TCR clone 16760 (TRBV15, TRBJ1-3)
CATSRDRGPGNTIYF

SEQ ID NO: 33521 - protein, 13 aa, Homo sapiens
  CDR3 for alpha chain variable domain of TCR clone 16761 (TRAV8-6, TRAJ21)
CAVSPSSLNKFYF

SEQ ID NO: 33522 - protein, 14 aa, Homo sapiens
  CDR3 for beta chain variable domain of TCR clone 16761 (TRBV7-9, TRBJ2-5)
CASSLDTAQETQCF

SEQ ID NO: 33523 - protein, 11 aa, Homo sapiens
  CDR3 for alpha chain variable domain of TCR clone 16762 (TRAV2, TRAJ23)
CAVGTRGKLIF

SEQ ID NO: 33524 - protein, 14 aa, Homo sapiens
  CDR3 for beta chain variable domain of TCR clone 16762 (TRBV2, TRBJ2-3)
CASSEGQNTDTQYF

SEQ ID NO: 33525 - protein, 18 aa, Homo sapiens
  CDR3 for alpha chain variable domain of TCR clone 16763 (TRAV12-3, TRAJ52)
CAMSVGGAGGTSYGKLTL

SEQ ID NO: 33526 - protein, 15 aa, Homo sapiens
  CDR3 for beta chain variable domain of TCR clone 16763 (TRBV27, TRBJ1-6)
CASSFDRGLGSPLHF

SEQ ID NO: 33527 - protein, 15 aa, Homo sapiens
  CDR3 for alpha chain variable domain of TCR clone 16764 (TRAV3, TRAJ13)
CAVRVYSGGYQKVTF

SEQ ID NO: 33528 - protein, 15 aa, Homo sapiens
  CDR3 for beta chain variable domain of TCR clone 16764 (TRBV5-7, TRBJ1-2)
CASSLGVAANYGYAF

SEQ ID NO: 33529 - protein, 13 aa, Homo sapiens
  CDR3 for alpha chain variable domain of TCR clone 16765 (TRAV35, TRAJ42)
CAGFPGSQGNLIF

SEQ ID NO: 33530 - protein, 14 aa, Homo sapiens
  CDR3 for beta chain variable domain of TCR clone 16765 (TRBV19, TRBJ2-1)
CASPTVVLSGEQFF

SEQ ID NO: 33531 - protein, 13 aa, Homo sapiens
  CDR3 for alpha chain variable domain of TCR clone 16766 (TRAV12-2, TRAJ39)
CAGNNNAGNMLTF

SEQ ID NO: 33532 - protein, 13 aa, Homo sapiens
  CDR3 for beta chain variable domain of TCR clone 16766 (TRBV2, TRBJ1-5)
CATAGPGNQPQHF

SEQ ID NO: 33533 - protein, 12 aa, Homo sapiens
  CDR3 for alpha chain variable domain of TCR clone 16767 (TRAV17, TRAJ57)
CATDGGSEKLVF

SEQ ID NO: 33534 - protein, 13 aa, Homo sapiens
  CDR3 for beta chain variable domain of TCR clone 16767 (TRBV7-9, TRBJ2-7)
CASSFAGAHEQYF

SEQ ID NO: 33535 - protein, 12 aa, Homo sapiens
  CDR3 for alpha chain variable domain of TCR clone 16768 (TRAV12-1, TRAJ40)
CVFYSGTCKYIF

SEQ ID NO: 33536 - protein, 18 aa, Homo sapiens
  CDR3 for beta chain variable domain of TCR clone 16768 (TRBV12-4, TRBJ2-2)
CASSLVAGTRGRTGELFF

SEQ ID NO: 33537 - protein, 14 aa, Homo sapiens
  CDR3 for alpha chain variable domain of TCR clone 16769 (TRAV12-2, TRAJ40)
CAVKNPSGTYKYIF

SEQ ID NO: 33538 - protein, 14 aa, Homo sapiens
  CDR3 for beta chain variable domain of TCR clone 16769 (TRBV20-1, TRBJ1-1)
CSAQTRIGGTEAFF

SEQ ID NO: 33539 - protein, 13 aa, Homo sapiens
  CDR3 for alpha chain variable domain of TCR clone 16770 (TRAV38-1, TRAJ42)
CARRGGSQGNLIF

SEQ ID NO: 33540 - protein, 17 aa, Homo sapiens
  CDR3 for beta chain variable domain of TCR clone 16770 (TRBV20-1, TRBJ2-1)
CSARDPLAGVWDNEQFF

SEQ ID NO: 33541 - protein, 13 aa, Homo sapiens
  CDR3 for alpha chain variable domain of TCR clone 16771 (TRAV12-2, TRAJ20)
CAMYPSNDYKLSF

SEQ ID NO: 33542 - protein, 15 aa, Homo sapiens
  CDR3 for beta chain variable domain of TCR clone 16771 (TRBV27, TRBJ2-5)
CASSLYPRGGETQYF

SEQ ID NO: 33543 - protein, 14 aa, Homo sapiens
  CDR3 for alpha chain variable domain of TCR clone 16772 (TRAV20, TRAJ56)
CAVQFGGANSKLTF

SEQ ID NO: 33544 - protein, 14 aa, Homo sapiens
  CDR3 for beta chain variable domain of TCR clone 16772 (TRBV20-1, TRBJ2-7)
CGAKRGRSSYEQYF

SEQ ID NO: 33545 - protein, 13 aa, Homo sapiens
  CDR3 for alpha chain variable domain of TCR clone 16773 (TRAV20, TRAJ37)
CAGCSSNTGKLIF

SEQ ID NO: 33546 - protein, 11 aa, Homo sapiens
  CDR3 for beta chain variable domain of TCR clone 16773 (TRBV12-4, TRBJ2-3)
CASTATDTQYL

SEQ ID NO: 33547 - protein, 18 aa, Homo sapiens
  CDR3 for alpha chain variable domain of TCR clone 16774 (TRAV21, TRAJ52)
CAVRPSPAGGTSYGKLTF

SEQ ID NO: 33548 - protein, 13 aa, Homo sapiens
  CDR3 for beta chain variable domain of TCR clone 16774 (TRBV12-4, TRBJ1-1)
CASSPGTGFEAFF

SEQ ID NO: 33549 - protein, 13 aa, Homo sapiens
  CDR3 for alpha chain variable domain of TCR clone 16775 (TRAV16, TRAJ26)
CITVLCLGQNFVF

SEQ ID NO: 33550 - protein, 12 aa, Homo sapiens
  CDR3 for beta chain variable domain of TCR clone 16775 (TRBV11-3, TRBJ2-1)
CASSPGNNEQFF

SEQ ID NO: 33551 - protein, 12 aa, Homo sapiens
  CDR3 for alpha chain variable domain of TCR clone 16776 (TRAV2, TRAJ9)
CAVGAGGFKTIF

SEQ ID NO: 33552 - protein, 16 aa, Homo sapiens
  CDR3 for beta chain variable domain of TCR clone 16776 (TRBV13, TRBJ2-2)
CASGPRTGEHTGELFF

SEQ ID NO: 33553 - protein, 14 aa, Homo sapiens
  CDR3 for alpha chain variable domain of TCR clone 16777 (TRAV17, TRAJ22)
CATSPSGSARQLTF

SEQ ID NO: 33554 - protein, 15 aa, Homo sapiens
  CDR3 for beta chain variable domain of TCR clone 16777 (TRBV4-1, TRBJ2-5)
CASSRWDLYQETQYF

SEQ ID NO: 33555 - protein, 11 aa, Homo sapiens
  CDR3 for alpha chain variable domain of TCR clone 16778 (TRAV2, TRAJ23)
CAVETRGKLIF

SEQ ID NO: 33556 - protein, 14 aa, Homo sapiens
  CDR3 for beta chain variable domain of TCR clone 16778 (TRBV2, TRBJ2-3)
CASSEGQNTDTRYF

SEQ ID NO: 33557 - protein, 12 aa, Homo sapiens
  CDR3 for alpha chain variable domain of TCR clone 16779 (TRAV12-1, TRAJ40)
CVVPSGTYKYIF

SEQ ID NO: 33558 - protein, 15 aa, Homo sapiens
  CDR3 for beta chain variable domain of TCR clone 16779 (TRBV12-4, TRBJ2-1)
CASGPLSGRNNEQFF

SEQ ID NO: 33559 - protein, 17 aa, Homo sapiens
  CDR3 for alpha chain variable domain of TCR clone 16780 (TRAV8-6, TRAJ58)
CAVSSWVGETSGSSLTF

SEQ ID NO: 33560 - protein, 14 aa, Homo sapiens
  CDR3 for beta chain variable domain of TCR clone 16780 (TRBV4-2, TRBJ2-1)
CASGLDRAYNEQFF

SEQ ID NO: 33561 - protein, 14 aa, Homo sapiens
  CDR3 for alpha chain variable domain of TCR clone 16781 (TRAV23/DV6, TRAJ8)
CAASKATGFQKPVF

SEQ ID NO: 33562 - protein, 15 aa, Homo sapiens
  CDR3 for beta chain variable domain of TCR clone 16781 (TRBV28, TRBJ2-3)
CASSPDRQGANTQYF

SEQ ID NO: 33563 - protein, 14 aa, Homo sapiens
  CDR3 for alpha chain variable domain of TCR clone 16782 (TRAV12-2, TRAJ5)
CAVNRSTGRRALTF

SEQ ID NO: 33564 - protein, 12 aa, Homo sapiens
  CDR3 for beta chain variable domain of TCR clone 16782 (TRBV19, TRBJ1-5)
CASSIAQQHQHF

SEQ ID NO: 33565 - protein, 17 aa, Homo sapiens
  CDR3 for alpha chain variable domain of TCR clone 16783 (TRAV12-3, TRAJ6)
CAISARGGAGGSYIPTF

SEQ ID NO: 33566 - protein, 12 aa, Homo sapiens
  CDR3 for beta chain variable domain of TCR clone 16783 (TRBV12-4, TRBJ2-3)
CASSTLPDTQYF

SEQ ID NO: 33567 - protein, 16 aa, Homo sapiens
  CDR3 for alpha chain variable domain of TCR clone 16784 (TRAV12-3, TRAJ53)
CAMSPGSGGSNYKLTF

SEQ ID NO: 33568 - protein, 11 aa, Homo sapiens
  CDR3 for beta chain variable domain of TCR clone 16784 (TRBV29-1, TRBJ2-5)
CSEDRTRTQYF

SEQ ID NO: 33569 - protein, 17 aa, Homo sapiens
  CDR3 for alpha chain variable domain of TCR clone 16785 (TRAV8-3, TRAJ42)
CCGAGMNYGGSQENLIF

SEQ ID NO: 33570 - protein, 11 aa, Homo sapiens
  CDR3 for beta chain variable domain of TCR clone 16785 (TRBV7-2, TRBJ2-3)
CASSSSDTQYF

SEQ ID NO: 33571 - protein, 14 aa, Homo sapiens
  CDR3 for alpha chain variable domain of TCR clone 16786 (TRAV35, TRAJ22)
CAGLRPGSARQLTF

SEQ ID NO: 33572 - protein, 15 aa, Homo sapiens
  CDR3 for beta chain variable domain of TCR clone 16786 (TRBV12-4, TRBJ2-5)
YASSPPTGLQETQYF

SEQ ID NO: 33573 - protein, 12 aa, Homo sapiens
  CDR3 for alpha chain variable domain of TCR clone 16787 (TRAV17, TRAJ4)
CATDGGYNELIF

SEQ ID NO: 33574 - protein, 13 aa, Homo sapiens
  CDR3 for beta chain variable domain of TCR clone 16787 (TRBV29-1, TRBJ2-2)
CSTTGVNTGELFF

SEQ ID NO: 33575 - protein, 13 aa, Homo sapiens
  CDR3 for alpha chain variable domain of TCR clone 16788 (TRAV3, TRAJ21)
CAVREPDFNKFYF

SEQ ID NO: 33576 - protein, 13 aa, Homo sapiens
  CDR3 for beta chain variable domain of TCR clone 16788 (TRBV9, TRBJ2-1)
CASSPSGGSEQFF

SEQ ID NO: 33577 - protein, 14 aa, Homo sapiens
  CDR3 for alpha chain variable domain of TCR clone 16789 (TRAV12-1, TRAJ17)
CVVNYKAAGNKLTF

SEQ ID NO: 33578 - protein, 15 aa, Homo sapiens
  CDR3 for beta chain variable domain of TCR clone 16789 (TRBV7-2, TRBJ2-1)
CASTHGAGIYNEQFF

SEQ ID NO: 33579 - protein, 11 aa, Homo sapiens
  CDR3 for alpha chain variable domain of TCR clone 16790 (TRAV2, TRAJ13)
CASGGYQTVTF

SEQ ID NO: 33580 - protein, 16 aa, Homo sapiens
  CDR3 for beta chain variable domain of TCR clone 16790 (TRBV6-1, TRBJ2-5)
CASSETLDRGAETQYF

SEQ ID NO: 33581 - protein, 21 aa, Homo sapiens
  CDR3 for alpha chain variable domain of TCR clone 16791 (TRAV1-1, TRAJ22)
CLLLLRCERSGSSGSARQLTF

SEQ ID NO: 33582 - protein, 13 aa, Homo sapiens
  CDR3 for beta chain variable domain of TCR clone 16791 (TRBV27, TRBJ2-7)
CASGRGGAYEQYF

SEQ ID NO: 33583 - protein, 14 aa, Homo sapiens
  CDR3 for alpha chain variable domain of TCR clone 16792 (TRAV12-3, TRAJ10)
SHLPLTGGGNKLTF

SEQ ID NO: 33584 - protein, 14 aa, Homo sapiens
  CDR3 for beta chain variable domain of TCR clone 16792 (TRBV6-1, TRBJ1-3)
CASVQGRGGNTIYF

SEQ ID NO: 33585 - protein, 13 aa, Homo sapiens
  CDR3 for alpha chain variable domain of TCR clone 16793 (TRAV3, TRAJ27)
CAVRPLGAGKSTF

SEQ ID NO: 33586 - protein, 13 aa, Homo sapiens
  CDR3 for beta chain variable domain of TCR clone 16793 (TRBV7-9, TRBJ2-3)
CASSPGSTDTQCF

SEQ ID NO: 33587 - protein, 12 aa, Homo sapiens
  CDR3 for alpha chain variable domain of TCR clone 16794 (TRAV17, TRAJ39)
CATGAAGNMLAF

SEQ ID NO: 33588 - protein, 14 aa, Homo sapiens
  CDR3 for beta chain variable domain of TCR clone 16794 (TRBV7-9, TRBJ1-2)
CASSRQGANYGYTF

SEQ ID NO: 33589 - protein, 13 aa, Homo sapiens
  CDR3 for alpha chain variable domain of TCR clone 16795 (TRAV25, TRAJ35)
CAGGGGFGNVLHC

SEQ ID NO: 33590 - protein, 14 aa, Homo sapiens
  CDR3 for beta chain variable domain of TCR clone 16795 (TRBV6-1, TRBJ2-1)
CASAGGAIKNEQFF

SEQ ID NO: 33591 - protein, 14 aa, Homo sapiens
  CDR3 for alpha chain variable domain of TCR clone 16796 (TRAV12-1, TRAJ17)
CVVNYKAAGNKLTF

SEQ ID NO: 33592 - protein, 14 aa, Homo sapiens
  CDR3 for beta chain variable domain of TCR clone 16796 (TRBV19, TRBJ2-1)
CASPTFVLSGEQFF

SEQ ID NO: 33593 - protein, 12 aa, Homo sapiens
  CDR3 for alpha chain variable domain of TCR clone 16797 (TRAV2, TRAJ9)
CAVGAGGFKTIF

SEQ ID NO: 33594 - protein, 16 aa, Homo sapiens
  CDR3 for beta chain variable domain of TCR clone 16797 (TRBV13, TRBJ2-2)
CASSPRTGEHTGELVF

SEQ ID NO: 33595 - protein, 14 aa, Homo sapiens
  CDR3 for alpha chain variable domain of TCR clone 16798 (TRAV9-2, TRAJ39)
CALYIYNAGNMLTF

SEQ ID NO: 33596 - protein, 15 aa, Homo sapiens
  CDR3 for beta chain variable domain of TCR clone 16798 (TRBV19, TRBJ1-6)
CASSTQGAVGSPLHF

SEQ ID NO: 33597 - protein, 14 aa, Homo sapiens
  CDR3 for alpha chain variable domain of TCR clone 16799 (TRAV12-2, TRAJ13)
CAVKKTGGYQKVTF

SEQ ID NO: 33598 - protein, 14 aa, Homo sapiens
  CDR3 for beta chain variable domain of TCR clone 16799 (TRBV7-2, TRBJ1-1)
CASSFLTGTTEAFF

SEQ ID NO: 33599 - protein, 20 aa, Homo sapiens
  CDR3 for alpha chain variable domain of TCR clone 16800 (TRAV26-1, TRAJ42)
CCVLLHRQTYYGGSQGNLIF

SEQ ID NO: 33600 - protein, 16 aa, Homo sapiens
  CDR3 for beta chain variable domain of TCR clone 16800 (TRBV7-3, TRBJ2-2)
CASSLKRGALSGELFF

SEQ ID NO: 33601 - protein, 11 aa, Homo sapiens
  CDR3 for alpha chain variable domain of TCR clone 16801 (TRAV17, TRAJ9)
CATTGGFKTIL

SEQ ID NO: 33602 - protein, 14 aa, Homo sapiens
  CDR3 for beta chain variable domain of TCR clone 16801 (TRBV7-9, TRBJ2-2)
CASSGLADTGELFF

SEQ ID NO: 33603 - protein, 14 aa, Homo sapiens
  CDR3 for alpha chain variable domain of TCR clone 16802 (TRAV12-3, TRAJ10)
SHLPLTGGGNKLTF

SEQ ID NO: 33604 - protein, 12 aa, Homo sapiens
  CDR3 for beta chain variable domain of TCR clone 16802 (TRBV12-4, TRBJ2-7)
CASSLGGYEQYF

SEQ ID NO: 33605 - protein, 18 aa, Homo sapiens
  CDR3 for alpha chain variable domain of TCR clone 16803 (TRAV21, TRAJ52)
CAVRPSPAGGTSYGKLTF

SEQ ID NO: 33606 - protein, 17 aa, Homo sapiens
  CDR3 for beta chain variable domain of TCR clone 16803 (TRBV13, TRBJ2-3)
CASSFSRVAGGRNTQYF

SEQ ID NO: 33607 - protein, 13 aa, Homo sapiens
  CDR3 for alpha chain variable domain of TCR clone 16804 (TRAV8-3, TRAJ28)
CAVGAVGSYKLTF

SEQ ID NO: 33608 - protein, 14 aa, Homo sapiens
  CDR3 for beta chain variable domain of TCR clone 16804 (TRBV7-2, TRBJ2-7)
CASRSQGAAYEQYF

SEQ ID NO: 33609 - protein, 14 aa, Homo sapiens
  CDR3 for alpha chain variable domain of TCR clone 16805 (TRAV12-1, TRAJ17)
CVVNYKAAGNKLTF

SEQ ID NO: 33610 - protein, 17 aa, Homo sapiens
  CDR3 for beta chain variable domain of TCR clone 16805 (TRBV20-1, TRBJ2-1)
CSSSSSGLAGSYNEQFF

SEQ ID NO: 33611 - protein, 15 aa, Homo sapiens
  CDR3 for alpha chain variable domain of TCR clone 16806 (TRAV27, TRAJ38)
CAARRNTGNNRKLIW

SEQ ID NO: 33612 - protein, 13 aa, Homo sapiens
  CDR3 for beta chain variable domain of TCR clone 16806 (TRBV12-5, TRBJ2-3)
CASGDRQSDTQYF

SEQ ID NO: 33613 - protein, 14 aa, Homo sapiens
  CDR3 for alpha chain variable domain of TCR clone 16807 (TRAV3, TRAJ7)
CAVREEEREQQTRF

SEQ ID NO: 33614 - protein, 12 aa, Homo sapiens
  CDR3 for beta chain variable domain of TCR clone 16807 (TRBV7-8, TRBJ2-7)
CASSLGDREQYL

SEQ ID NO: 33615 - protein, 12 aa, Homo sapiens
  CDR3 for alpha chain variable domain of TCR clone 16808 (TRAV12-3, TRAJ17)
CAMTLTGNKLTF

SEQ ID NO: 33616 - protein, 14 aa, Homo sapiens
  CDR3 for beta chain variable domain of TCR clone 16808 (TRBV7-8, TRBJ2-3)
CASSLEAGTDTQYF

SEQ ID NO: 33617 - protein, 13 aa, Homo sapiens
  CDR3 for alpha chain variable domain of TCR clone 16809 (TRAV27, TRAJ45)
CRSSGGGADGLTF

SEQ ID NO: 33618 - protein, 14 aa, Homo sapiens
  CDR3 for beta chain variable domain of TCR clone 16809 (TRBV19, TRBJ2-1)
CASPTFVLSGEQFF

SEQ ID NO: 33619 - protein, 14 aa, Homo sapiens
  CDR3 for alpha chain variable domain of TCR clone 16810 (TRAV1-2, TRAJ16)
CAVNRFSDGQKLLF

SEQ ID NO: 33620 - protein, 16 aa, Homo sapiens
  CDR3 for beta chain variable domain of TCR clone 16810 (TRBV20-1, TRBJ1-4)
CSAPGQGLLTNEKLLF

SEQ ID NO: 33621 - protein, 17 aa, Homo sapiens
  CDR3 for alpha chain variable domain of TCR clone 16811 (TRAV3, TRAJ6)
CAVRDGPRAGGSYIPPF

SEQ ID NO: 33622 - protein, 14 aa, Homo sapiens
  CDR3 for beta chain variable domain of TCR clone 16811 (TRBV7-2, TRBJ2-7)
CASSPKTSFYEQYF

SEQ ID NO: 33623 - protein, 12 aa, Homo sapiens
  CDR3 for alpha chain variable domain of TCR clone 16812 (TRAV3, TRAJ43)
CAVRDPNNDMRF

SEQ ID NO: 33624 - protein, 15 aa, Homo sapiens
  CDR3 for beta chain variable domain of TCR clone 16812 (TRBV27, TRBJ1-5)
CASSLGTGSDQPQHF

SEQ ID NO: 33625 - protein, 15 aa, Homo sapiens
  CDR3 for alpha chain variable domain of TCR clone 16813 (TRAV3, TRAJ5)
CAVRDRKTGRRALTF

SEQ ID NO: 33626 - protein, 15 aa, Homo sapiens
  CDR3 for beta chain variable domain of TCR clone 16813 (TRBV7-8, TRBJ2-1)
CASSLADSLYNERFF

SEQ ID NO: 33627 - protein, 12 aa, Homo sapiens
  CDR3 for alpha chain variable domain of TCR clone 16814 (TRAV10, TRAJ31)
CVVRAHRARLMF

SEQ ID NO: 33628 - protein, 13 aa, Homo sapiens
  CDR3 for beta chain variable domain of TCR clone 16814 (TRBV7-3, TRBJ2-7)
CASSKRRGGEQYF

SEQ ID NO: 33629 - protein, 14 aa, Homo sapiens
  CDR3 for alpha chain variable domain of TCR clone 16815 (TRAV26-1, TRAJ38)
CIAGNAGNNRKLIW

SEQ ID NO: 33630 - protein, 13 aa, Homo sapiens
  CDR3 for beta chain variable domain of TCR clone 16815 (TRBV20-1, TRBJ1-1)
CSARGGGNTEAFF

SEQ ID NO: 33631 - protein, 14 aa, Homo sapiens
  CDR3 for alpha chain variable domain of TCR clone 16816 (TRAV13-1, TRAJ35)
SAASKGGFGNVLHC

SEQ ID NO: 33632 - protein, 13 aa, Homo sapiens
  CDR3 for beta chain variable domain of TCR clone 16816 (TRBV7-3, TRBJ1-1)
CASSQDWGAEAFF

SEQ ID NO: 33633 - protein, 15 aa, Homo sapiens
  CDR3 for alpha chain variable domain of TCR clone 16817 (TRAV26-1, TRAJ29)
CIVRVEGSGNTPLVF

SEQ ID NO: 33634 - protein, 15 aa, Homo sapiens
  CDR3 for beta chain variable domain of TCR clone 16817 (TRBV7-9, TRBJ1-5)
CASSQGHQLNQPQHF

SEQ ID NO: 33635 - protein, 12 aa, Homo sapiens
  CDR3 for alpha chain variable domain of TCR clone 16818 (TRAV13-1, TRAJ53)
AASGGSNYKLTF

SEQ ID NO: 33636 - protein, 13 aa, Homo sapiens
  CDR3 for beta chain variable domain of TCR clone 16818 (TRBV5-1, TRBJ1-5)
CASSLGSNQPQHF

SEQ ID NO: 33637 - protein, 15 aa, Homo sapiens
  CDR3 for alpha chain variable domain of TCR clone 16819 (TRAV12-1, TRAJ26)
CVVNSWVTMVRILSL

SEQ ID NO: 33638 - protein, 15 aa, Homo sapiens
  CDR3 for beta chain variable domain of TCR clone 16819 (TRBV6-3, TRBJ2-3)
RLIHYSVGQADTQYF

SEQ ID NO: 33639 - protein, 15 aa, Homo sapiens
  CDR3 for alpha chain variable domain of TCR clone 16820 (TRAV8-3, TRAJ11)
CAVGLFNSGYSTLTF

SEQ ID NO: 33640 - protein, 16 aa, Homo sapiens
  CDR3 for beta chain variable domain of TCR clone 16820 (TRBV7-9, TRBJ1-2)
CASSLGFSSGEDGYTF

SEQ ID NO: 33641 - protein, 17 aa, Homo sapiens
  CDR3 for alpha chain variable domain of TCR clone 16821 (TRAV3, TRAJ6)
CAVRDGPRAGGSYIPTF

SEQ ID NO: 33642 - protein, 14 aa, Homo sapiens
  CDR3 for beta chain variable domain of TCR clone 16821 (TRBV7-2, TRBJ1-1)
CASSFLTGTTEAFF

SEQ ID NO: 33643 - protein, 18 aa, Homo sapiens
  CDR3 for alpha chain variable domain of TCR clone 16822 (TRAV21, TRAJ52)
CAVRPSPAGGTSYGKLTF

SEQ ID NO: 33644 - protein, 13 aa, Homo sapiens
  CDR3 for beta chain variable domain of TCR clone 16822 (TRBV4-1, TRBJ2-1)
CASSQAGGDEQFF

SEQ ID NO: 33645 - protein, 13 aa, Homo sapiens
  CDR3 for alpha chain variable domain of TCR clone 16823 (TRAV1-2, TRAJ9)
CAALNTGGFKTIF

SEQ ID NO: 33646 - protein, 13 aa, Homo sapiens
  CDR3 for beta chain variable domain of TCR clone 16823 (TRBV10-3, TRBJ2-7)
CASKLAVNYEQYF

SEQ ID NO: 33647 - protein, 10 aa, Homo sapiens
  CDR3 for alpha chain variable domain of TCR clone 16824 (TRAV38-2/DV8, TRAJ40)
CASGTYKYIF

SEQ ID NO: 33648 - protein, 14 aa, Homo sapiens
  CDR3 for beta chain variable domain of TCR clone 16824 (TRBV7-9, TRBJ2-1)
CASSPRDSLYGQFF

SEQ ID NO: 33649 - protein, 12 aa, Homo sapiens
  CDR3 for alpha chain variable domain of TCR clone 16825 (TRAV3, TRAJ26)
CAVRDYGQNFVF

SEQ ID NO: 33650 - protein, 16 aa, Homo sapiens
  CDR3 for beta chain variable domain of TCR clone 16825 (TRBV11-2, TRBJ1-2)
CASSTSGREANYGYTF

SEQ ID NO: 33651 - protein, 16 aa, Homo sapiens
  CDR3 for alpha chain variable domain of TCR clone 16826 (TRAV13-1, TRAJ13)
CTAFFLGVARKLPLEL

SEQ ID NO: 33652 - protein, 15 aa, Homo sapiens
  CDR3 for beta chain variable domain of TCR clone 16826 (TRBV7-8, TRBJ2-1)
CASSLADSLYNEQFF

SEQ ID NO: 33653 - protein, 14 aa, Homo sapiens
  CDR3 for alpha chain variable domain of TCR clone 16827 (TRAV26-1, TRAJ34)
CIVRVAYNTDKLIL

SEQ ID NO: 33654 - protein, 15 aa, Homo sapiens
  CDR3 for beta chain variable domain of TCR clone 16827 (TRBV20-1, TRBJ2-7)
CSARVPAAYFYEQYF

SEQ ID NO: 33655 - protein, 14 aa, Homo sapiens
  CDR3 for alpha chain variable domain of TCR clone 16828 (TRAV12-3, TRAJ9)
CAMSPNTGGFKTIF

SEQ ID NO: 33656 - protein, 15 aa, Homo sapiens
  CDR3 for beta chain variable domain of TCR clone 16828 (TRBV11-3, TRBJ2-3)
CASLKDGREGDTQYF

SEQ ID NO: 33657 - protein, 14 aa, Homo sapiens
  CDR3 for alpha chain variable domain of TCR clone 16829 (TRAV12-2, TRAJ17)
CAVNIKAAGNKLTF

SEQ ID NO: 33658 - protein, 14 aa, Homo sapiens
  CDR3 for beta chain variable domain of TCR clone 16829 (TRBV19, TRBJ2-1)
CASPTFVLSGEQFF

SEQ ID NO: 33659 - protein, 11 aa, Homo sapiens
  CDR3 for alpha chain variable domain of TCR clone 16830 (TRAV1-2, TRAJ20)
CAVANDYKLSF

SEQ ID NO: 33660 - protein, 18 aa, Homo sapiens
  CDR3 for beta chain variable domain of TCR clone 16830 (TRBV20-1, TRBJ2-6)
CSAETAPTHGSGANVLTF

SEQ ID NO: 33661 - protein, 15 aa, Homo sapiens
  CDR3 for alpha chain variable domain of TCR clone 16831 (TRAV26-1, TRAJ22)
CIVRVSFWFCQATDL

SEQ ID NO: 33662 - protein, 13 aa, Homo sapiens
  CDR3 for beta chain variable domain of TCR clone 16831 (TRBV7-9, TRBJ1-2)
CASSLKQNYGYTF

SEQ ID NO: 33663 - protein, 16 aa, Homo sapiens
  CDR3 for alpha chain variable domain of TCR clone 16832 (TRAV14/DV4, TRAJ53)
CAMREGGGGSNYKLTF

SEQ ID NO: 33664 - protein, 13 aa, Homo sapiens
  CDR3 for beta chain variable domain of TCR clone 16832 (TRBV10-2, TRBJ2-7)
CASGASGGYEQYF

SEQ ID NO: 33665 - protein, 11 aa, Homo sapiens
  CDR3 for alpha chain variable domain of TCR clone 16833 (TRAV3, TRAJ21)
CAVGNFNKFYF

SEQ ID NO: 33666 - protein, 12 aa, Homo sapiens
  CDR3 for beta chain variable domain of TCR clone 16833 (TRBV7-8, TRBJ2-7)
CASSLGDREQYF

SEQ ID NO: 33667 - protein, 13 aa, Homo sapiens
  CDR3 for alpha chain variable domain of TCR clone 16834 (TRAV2, TRAJ29)
CAAQNSGSTPLVF

SEQ ID NO: 33668 - protein, 14 aa, Homo sapiens
  CDR3 for beta chain variable domain of TCR clone 16834 (TRBV7-9, TRBJ2-4)
CASSLAMGGNIQYF

SEQ ID NO: 33669 - protein, 17 aa, Homo sapiens
  CDR3 for alpha chain variable domain of TCR clone 16835 (TRAV3, TRAJ6)
CAVRDGPRAGGGYIPTF

SEQ ID NO: 33670 - protein, 14 aa, Homo sapiens
  CDR3 for beta chain variable domain of TCR clone 16835 (TRBV19, TRBJ2-1)
CASPTFVLSGEQFF

SEQ ID NO: 33671 - protein, 13 aa, Homo sapiens
  CDR3 for alpha chain variable domain of TCR clone 16836 (TRAV1-2, TRAJ12)
CAVSMDSSYKLIF

SEQ ID NO: 33672 - protein, 15 aa, Homo sapiens
  CDR3 for beta chain variable domain of TCR clone 16836 (TRBV6-3, TRBJ2-7)
CASSSPGTVFYEQYF

SEQ ID NO: 33673 - protein, 12 aa, Homo sapiens
  CDR3 for alpha chain variable domain of TCR clone 16837 (TRAV29/DV5, TRAJ49)
CAATDTGNQFYF

SEQ ID NO: 33674 - protein, 15 aa, Homo sapiens
  CDR3 for beta chain variable domain of TCR clone 16837 (TRBV27, TRBJ2-5)
CASSLYPRGGETQYF

SEQ ID NO: 33675 - protein, 12 aa, Homo sapiens
  CDR3 for alpha chain variable domain of TCR clone 16838 (TRAV12-1, TRAJ40)
CVFYSGTYKYIF

SEQ ID NO: 33676 - protein, 18 aa, Homo sapiens
  CDR3 for beta chain variable domain of TCR clone 16838 (TRBV12-4, TRBJ2-2)
CASSVVAGTRGRTGELFF

SEQ ID NO: 33677 - protein, 13 aa, Homo sapiens
  CDR3 for alpha chain variable domain of TCR clone 16839 (TRAV30, TRAJ24)
CGTVTDSWGKLQL

SEQ ID NO: 33678 - protein, 15 aa, Homo sapiens
  CDR3 for beta chain variable domain of TCR clone 16839 (TRBV25-1, TRBJ1-4)
CASSPGDSTNEKLFF

SEQ ID NO: 33679 - protein, 16 aa, Homo sapiens
  CDR3 for alpha chain variable domain of TCR clone 16840 (TRAV26-1, TRAJ37)
CIVRGDGSGNTGQLIF

SEQ ID NO: 33680 - protein, 17 aa, Homo sapiens
  CDR3 for beta chain variable domain of TCR clone 16840 (TRBV4-1, TRBJ2-7)
CASSRDPLGVRGGEQYF

SEQ ID NO: 33681 - protein, 14 aa, Homo sapiens
  CDR3 for alpha chain variable domain of TCR clone 16841 (TRAV1-2, TRAJ8)
CAVREDTDFQKLVF

SEQ ID NO: 33682 - protein, 15 aa, Homo sapiens
  CDR3 for beta chain variable domain of TCR clone 16841 (TRBV6-3, TRBJ2-7)
CASSSPGTVFYEQYF

SEQ ID NO: 33683 - protein, 11 aa, Homo sapiens
  CDR3 for alpha chain variable domain of TCR clone 16842 (TRAV2, TRAJ33)
CAVDSNYQLIW

SEQ ID NO: 33684 - protein, 15 aa, Homo sapiens
  CDR3 for beta chain variable domain of TCR clone 16842 (TRBV19, TRBJ1-2)
CASSVGQVLNHGYTF

SEQ ID NO: 33685 - protein, 11 aa, Homo sapiens
  CDR3 for alpha chain variable domain of TCR clone 16843 (TRAV1-1, TRAJ23)
CAVRQGGKLIF

SEQ ID NO: 33686 - protein, 20 aa, Homo sapiens
  CDR3 for beta chain variable domain of TCR clone 16843 (TRBV7-8, TRBJ2-2)
CASSHLFPGPTIHITGELFV

SEQ ID NO: 33687 - protein, 12 aa, Homo sapiens
  CDR3 for alpha chain variable domain of TCR clone 16844 (TRAV8-3, TRAJ26)
CAGDNYGQNFVF

SEQ ID NO: 33688 - protein, 15 aa, Homo sapiens
  CDR3 for beta chain variable domain of TCR clone 16844 (TRBV9, TRBJ2-1)
CASSLAGSSYNEQLF

SEQ ID NO: 33689 - protein, 15 aa, Homo sapiens
  CDR3 for alpha chain variable domain of TCR clone 16845 (TRAV17, TRAJ57)
CATGPSQGGSEKLAF

SEQ ID NO: 33690 - protein, 14 aa, Homo sapiens
  CDR3 for beta chain variable domain of TCR clone 16845 (TRBV12-5, TRBJ2-5)
CASGSRTHQETQYF

SEQ ID NO: 33691 - protein, 14 aa, Homo sapiens
  CDR3 for alpha chain variable domain of TCR clone 16846 (TRAV8-2, TRAJ4)
CVVSPSGGYNNLIF

SEQ ID NO: 33692 - protein, 15 aa, Homo sapiens
  CDR3 for beta chain variable domain of TCR clone 16846 (TRBV4-1, TRBJ1-4)
CASSDTGGTNEKLFF

SEQ ID NO: 33693 - protein, 11 aa, Homo sapiens
  CDR3 for alpha chain variable domain of TCR clone 16847 (TRAV12-1, TRAJ21)
CVVYNFNKFYF

SEQ ID NO: 33694 - protein, 19 aa, Homo sapiens
  CDR3 for beta chain variable domain of TCR clone 16847 (TRBV9, TRBJ2-2)
CISVPAAPWEKGTPGSCFF

SEQ ID NO: 33695 - protein, 13 aa, Homo sapiens
  CDR3 for alpha chain variable domain of TCR clone 16848 (TRAV13-1, TRAJ41)
CAAILNSGYALNF

SEQ ID NO: 33696 - protein, 14 aa, Homo sapiens
  CDR3 for beta chain variable domain of TCR clone 16848 (TRBV20-1, TRBJ1-1)
CSARDRRTNTEAFF

SEQ ID NO: 33697 - protein, 14 aa, Homo sapiens
  CDR3 for alpha chain variable domain of TCR clone 16849 (TRAV26-1, TRAJ38)
CIADNAGNNRKLIW

SEQ ID NO: 33698 - protein, 14 aa, Homo sapiens
  CDR3 for beta chain variable domain of TCR clone 16849 (TRBV4-2, TRBJ2-1)
CASGLDRAYNEQFF

SEQ ID NO: 33699 - protein, 15 aa, Homo sapiens
  CDR3 for alpha chain variable domain of TCR clone 16850 (TRAV38-2/DV8, TRAJ31)
CAYRSPRNNNARLMF

SEQ ID NO: 33700 - protein, 13 aa, Homo sapiens
  CDR3 for beta chain variable domain of TCR clone 16850 (TRBV27, TRBJ2-7)
CASSPSRDYEQYF

SEQ ID NO: 33701 - protein, 18 aa, Homo sapiens
  CDR3 for alpha chain variable domain of TCR clone 16851 (TRAV13-1, TRAJ52)
CAAKNPNAGGTSHGKLTF

SEQ ID NO: 33702 - protein, 15 aa, Homo sapiens
  CDR3 for beta chain variable domain of TCR clone 16851 (TRBV6-1, TRBJ2-3)
CASSERGGITDTQYF

SEQ ID NO: 33703 - protein, 14 aa, Homo sapiens
  CDR3 for alpha chain variable domain of TCR clone 16852 (TRAV13-1, TRAJ35)
CAASKGGFGNVLHC

SEQ ID NO: 33704 - protein, 13 aa, Homo sapiens
  CDR3 for beta chain variable domain of TCR clone 16852 (TRBV7-3, TRBJ1-1)
CASSKDWGAEAFF

SEQ ID NO: 33705 - protein, 13 aa, Homo sapiens
  CDR3 for alpha chain variable domain of TCR clone 16853 (TRAV20, TRAJ37)
CAGCSSNPGKLIF

SEQ ID NO: 33706 - protein, 11 aa, Homo sapiens
  CDR3 for beta chain variable domain of TCR clone 16853 (TRBV12-4, TRBJ2-3)
CASTATDTQYF

SEQ ID NO: 33707 - protein, 17 aa, Homo sapiens
  CDR3 for alpha chain variable domain of TCR clone 16854 (TRAV3, TRAJ38)
CAVRDCLNAGNNRKLIW

SEQ ID NO: 33708 - protein, 14 aa, Homo sapiens
  CDR3 for beta chain variable domain of TCR clone 16854 (TRBV5-5, TRBJ1-5)
CASSGQGVDQHQHF

SEQ ID NO: 33709 - protein, 11 aa, Homo sapiens
  CDR3 for alpha chain variable domain of TCR clone 16855 (TRAV1-2, TRAJ40)
CAVPGAYKYIF

SEQ ID NO: 33710 - protein, 16 aa, Homo sapiens
  CDR3 for beta chain variable domain of TCR clone 16855 (TRBV29-1, TRBJ2-7)
CSVEVVGTSGSYEQYF

SEQ ID NO: 33711 - protein, 12 aa, Homo sapiens
  CDR3 for alpha chain variable domain of TCR clone 16856 (TRAV2, TRAJ9)
CAVGAGGFKAIF

SEQ ID NO: 33712 - protein, 16 aa, Homo sapiens
  CDR3 for beta chain variable domain of TCR clone 16856 (TRBV13, TRBJ2-2)
CASSPRTGEHTGELFF

SEQ ID NO: 33713 - protein, 15 aa, Homo sapiens
  CDR3 for alpha chain variable domain of TCR clone 16857 (TRAV39, TRAJ32)
CAVDMEGGATNKLIF

SEQ ID NO: 33714 - protein, 13 aa, Homo sapiens
  CDR3 for beta chain variable domain of TCR clone 16857 (TRBV7-2, TRBJ2-7)
CASSSPSGSEQYF

SEQ ID NO: 33715 - protein, 16 aa, Homo sapiens
  CDR3 for alpha chain variable domain of TCR clone 16858 (TRAV8-6, TRAJ27)
CAVSASLTPMQANQPL

SEQ ID NO: 33716 - protein, 16 aa, Homo sapiens
  CDR3 for beta chain variable domain of TCR clone 16858 (TRBV10-3, TRBJ2-5)
CAISDPSGGAWETQYF

SEQ ID NO: 33717 - protein, 15 aa, Homo sapiens
  CDR3 for alpha chain variable domain of TCR clone 16859 (TRAV26-1, TRAJ29)
CIVRVEGSVNTPLVF

SEQ ID NO: 33718 - protein, 14 aa, Homo sapiens
  CDR3 for beta chain variable domain of TCR clone 16859 (TRBV18, TRBJ2-5)
CASSPGVSQETQYF

SEQ ID NO: 33719 - protein, 12 aa, Homo sapiens
  CDR3 for alpha chain variable domain of TCR clone 16860 (TRAV12-2, TRAJ44)
CAVTGTASKLTF

SEQ ID NO: 33720 - protein, 17 aa, Homo sapiens
  CDR3 for beta chain variable domain of TCR clone 16860 (TRBV20-1, TRBJ1-1)
CSARGAGGGLGNTEAFF

SEQ ID NO: 33721 - protein, 12 aa, Homo sapiens
  CDR3 for alpha chain variable domain of TCR clone 16861 (TRAV21, TRAJ33)
CAKMYSNYQLIW

SEQ ID NO: 33722 - protein, 14 aa, Homo sapiens
  CDR3 for beta chain variable domain of TCR clone 16861 (TRBV2, TRBJ2-7)
CASSLTSGGYEQYF

SEQ ID NO: 33723 - protein, 14 aa, Homo sapiens
  CDR3 for alpha chain variable domain of TCR clone 16862 (TRAV8-2, TRAJ4)
CVVSPSGGYHKLIF

SEQ ID NO: 33724 - protein, 15 aa, Homo sapiens
  CDR3 for beta chain variable domain of TCR clone 16862 (TRBV4-1, TRBJ1-4)
CASSDTGGTNEKLFF

SEQ ID NO: 33725 - protein, 13 aa, Homo sapiens
  CDR3 for alpha chain variable domain of TCR clone 16863 (TRAV38-2/DV8, TRAJ34)
CAYRNYNTDKPIF

SEQ ID NO: 33726 - protein, 15 aa, Homo sapiens
  CDR3 for beta chain variable domain of TCR clone 16863 (TRBV20-1, TRBJ2-5)
CSAEGTGGLQETQYF

SEQ ID NO: 33727 - protein, 14 aa, Homo sapiens
  CDR3 for alpha chain variable domain of TCR clone 16864 (TRAV1-2, TRAJ24)
CAVLTTDSWGKFQF

SEQ ID NO: 33728 - protein, 13 aa, Homo sapiens
  CDR3 for beta chain variable domain of TCR clone 16864 (TRBV6-5, TRBJ1-2)
CASSSYGTLGYTF

SEQ ID NO: 33729 - protein, 13 aa, Homo sapiens
  CDR3 for alpha chain variable domain of TCR clone 16865 (TRAV12-2, TRAJ20)
CAVYPSNDYKLSF

SEQ ID NO: 33730 - protein, 15 aa, Homo sapiens
  CDR3 for beta chain variable domain of TCR clone 16865 (TRBV27, TRBJ2-5)
CASSLYPRGGEAQYF

SEQ ID NO: 33731 - protein, 11 aa, Homo sapiens
  CDR3 for alpha chain variable domain of TCR clone 16866 (TRAV21, TRAJ34)
CAVTNTDRLIF

SEQ ID NO: 33732 - protein, 16 aa, Homo sapiens
  CDR3 for beta chain variable domain of TCR clone 16866 (TRBV18, TRBJ1-1)
CASSPGVGGRGGEAFF

SEQ ID NO: 33733 - protein, 14 aa, Homo sapiens
  CDR3 for alpha chain variable domain of TCR clone 16867 (TRAV12-2, TRAJ13)
CAVKKTGGYQKVTF

SEQ ID NO: 33734 - protein, 14 aa, Homo sapiens
  CDR3 for beta chain variable domain of TCR clone 16867 (TRBV7-2, TRBJ2-7)
CASSPRTSFYEQYF

SEQ ID NO: 33735 - protein, 16 aa, Homo sapiens
  CDR3 for alpha chain variable domain of TCR clone 16868 (TRAV1-2, TRAJ6)
CAVRNIASGGSYIPTF

SEQ ID NO: 33736 - protein, 15 aa, Homo sapiens
  CDR3 for beta chain variable domain of TCR clone 16868 (TRBV15, TRBJ1-5)
CATSRDPVSNQPQHF

SEQ ID NO: 33737 - protein, 13 aa, Homo sapiens
  CDR3 for alpha chain variable domain of TCR clone 16869 (TRAV1-2, TRAJ9)
CAAKNTGGFKTIF

SEQ ID NO: 33738 - protein, 14 aa, Homo sapiens
  CDR3 for beta chain variable domain of TCR clone 16869 (TRBV20-1, TRBJ2-1)
CSAQIGGSANEQFF

SEQ ID NO: 33739 - protein, 13 aa, Homo sapiens
  CDR3 for alpha chain variable domain of TCR clone 16870 (TRAV13-2, TRAJ48)
CAAMDFGNEKLTF

SEQ ID NO: 33740 - protein, 15 aa, Homo sapiens
  CDR3 for beta chain variable domain of TCR clone 16870 (TRBV7-9, TRBJ1-6)
CASSSPGRGNSPLHF

SEQ ID NO: 33741 - protein, 11 aa, Homo sapiens
  CDR3 for alpha chain variable domain of TCR clone 16871 (TRAV21, TRAJ11)
CAVNGYSTLTF

SEQ ID NO: 33742 - protein, 11 aa, Homo sapiens
  CDR3 for beta chain variable domain of TCR clone 16871 (TRBV19, TRBJ1-1)
CASSTGSGAFF

SEQ ID NO: 33743 - protein, 14 aa, Homo sapiens
  CDR3 for alpha chain variable domain of TCR clone 16872 (TRAV2, TRAJ37)
CTVDFTSNTGKLIF

SEQ ID NO: 33744 - protein, 15 aa, Homo sapiens
  CDR3 for beta chain variable domain of TCR clone 16872 (TRBV20-1, TRBJ1-1)
CSASRGVTGNTEAFF

SEQ ID NO: 33745 - protein, 11 aa, Homo sapiens
  CDR3 for alpha chain variable domain of TCR clone 16873 (TRAV12-3, TRAJ27)
CAMANAGKSTF

SEQ ID NO: 33746 - protein, 13 aa, Homo sapiens
  CDR3 for beta chain variable domain of TCR clone 16873 (TRBV20-1, TRBJ1-1)
CSARVGGNTEASF

SEQ ID NO: 33747 - protein, 16 aa, Homo sapiens
  CDR3 for alpha chain variable domain of TCR clone 16874 (TRAV26-1, TRAJ53)
CIVRVAMRGSNYKLTF

SEQ ID NO: 33748 - protein, 16 aa, Homo sapiens
  CDR3 for beta chain variable domain of TCR clone 16874 (TRBV28, TRBJ2-7)
CASSLFFETGGPEQYF

SEQ ID NO: 33749 - protein, 13 aa, Homo sapiens
  CDR3 for alpha chain variable domain of TCR clone 16875 (TRAV8-3, TRAJ28)
CSVGAVGSYQLTF

SEQ ID NO: 33750 - protein, 14 aa, Homo sapiens
  CDR3 for beta chain variable domain of TCR clone 16875 (TRBV7-2, TRBJ2-7)
CASRSQGAAYEQYF

SEQ ID NO: 33751 - protein, 14 aa, Homo sapiens
  CDR3 for alpha chain variable domain of TCR clone 16876 (TRAV12-3, TRAJ10)
SHLPLTGGGNKLTF

SEQ ID NO: 33752 - protein, 13 aa, Homo sapiens
  CDR3 for beta chain variable domain of TCR clone 16876 (TRBV12-4, TRBJ2-2)
CASSITGSGELFF

SEQ ID NO: 33753 - protein, 15 aa, Homo sapiens
  CDR3 for alpha chain variable domain of TCR clone 16877 (TRAV26-1, TRAJ29)
CIVRVEGSGNTPLVF

SEQ ID NO: 33754 - protein, 14 aa, Homo sapiens
  CDR3 for beta chain variable domain of TCR clone 16877 (TRBV18, TRBJ2-5)
CASSPGVYQETQYF

SEQ ID NO: 33755 - protein, 15 aa, Homo sapiens
  CDR3 for alpha chain variable domain of TCR clone 16878 (TRAV2, TRAJ9)
CAVEDRGTGGFKTIF

SEQ ID NO: 33756 - protein, 13 aa, Homo sapiens
  CDR3 for beta chain variable domain of TCR clone 16878 (TRBV7-9, TRBJ1-2)
CASSLKQNYGYTF

SEQ ID NO: 33757 - protein, 10 aa, Homo sapiens
  CDR3 for alpha chain variable domain of TCR clone 16879 (TRAV26-1, TRAJ40)
RIAGTYKYIF

SEQ ID NO: 33758 - protein, 15 aa, Homo sapiens
  CDR3 for beta chain variable domain of TCR clone 16879 (TRBV19, TRBJ2-1)
CASSSPGVPLDEQFF

SEQ ID NO: 33759 - protein, 14 aa, Homo sapiens
  CDR3 for alpha chain variable domain of TCR clone 16880 (TRAV13-2, TRAJ17)
CAENSKAAGNKLTF

SEQ ID NO: 33760 - protein, 14 aa, Homo sapiens
  CDR3 for beta chain variable domain of TCR clone 16880 (TRBV12-5, TRBJ2-5)
CASGSRTHQETQYF

SEQ ID NO: 33761 - protein, 13 aa, Homo sapiens
  CDR3 for alpha chain variable domain of TCR clone 16881 (TRAV13-1, TRAJ49)
CAAVVRGGNQFYF

SEQ ID NO: 33762 - protein, 16 aa, Homo sapiens
  CDR3 for beta chain variable domain of TCR clone 16881 (TRBV7-3, TRBJ2-1)
CASSLTVESSYNEQFF

SEQ ID NO: 33763 - protein, 15 aa, Homo sapiens
  CDR3 for alpha chain variable domain of TCR clone 16882 (TRAV26-1, TRAJ22)
CIVRVSFWFCNATDL

SEQ ID NO: 33764 - protein, 13 aa, Homo sapiens
  CDR3 for beta chain variable domain of TCR clone 16882 (TRBV7-9, TRBJ1-2)
CASSLKQNYGYTF

SEQ ID NO: 33765 - protein, 12 aa, Homo sapiens
  CDR3 for alpha chain variable domain of TCR clone 16883 (TRAV12-3, TRAJ17)
CAMTLTGNKLTF

SEQ ID NO: 33766 - protein, 15 aa, Homo sapiens
  CDR3 for beta chain variable domain of TCR clone 16883 (TRBV20-1, TRBJ2-7)
CSARHRVSGMDEQYF

SEQ ID NO: 33767 - protein, 17 aa, Homo sapiens
  CDR3 for alpha chain variable domain of TCR clone 16884 (TRAV3, TRAJ42)
CAVRDRDYGGSQGNLIF

SEQ ID NO: 33768 - protein, 15 aa, Homo sapiens
  CDR3 for beta chain variable domain of TCR clone 16884 (TRBV6-6, TRBJ2-7)
CASSYLYGGSYEQYF

SEQ ID NO: 33769 - protein, 14 aa, Homo sapiens
  CDR3 for alpha chain variable domain of TCR clone 16885 (TRAV17, TRAJ45)
CATASGGGADGLTF

SEQ ID NO: 33770 - protein, 15 aa, Homo sapiens
  CDR3 for beta chain variable domain of TCR clone 16885 (TRBV11-3, TRBJ2-1)
CASSRNRGLMYEQFF

SEQ ID NO: 33771 - protein, 12 aa, Homo sapiens
  CDR3 for alpha chain variable domain of TCR clone 16886 (TRAV27, TRAJ33)
CAGEDSNYQLIW

SEQ ID NO: 33772 - protein, 16 aa, Homo sapiens
  CDR3 for beta chain variable domain of TCR clone 16886 (TRBV7-3, TRBJ1-3)
CQQPAGKGAPGNTIYF

SEQ ID NO: 33773 - protein, 10 aa, Homo sapiens
  CDR3 for alpha chain variable domain of TCR clone 16887 (TRAV12-2, TRAJ20)
CAVYPYKLSF

SEQ ID NO: 33774 - protein, 14 aa, Homo sapiens
  CDR3 for beta chain variable domain of TCR clone 16887 (TRBV10-3, TRBJ2-2)
CAISEVSHSGELFF

SEQ ID NO: 33775 - protein, 16 aa, Homo sapiens
  CDR3 for alpha chain variable domain of TCR clone 16888 (TRAV27, TRAJ13)
CAGAKSDSGGYQKVTF

SEQ ID NO: 33776 - protein, 15 aa, Homo sapiens
  CDR3 for beta chain variable domain of TCR clone 16888 (TRBV29-1, TRBJ2-1)
CSVGRHALFYNEQFF

SEQ ID NO: 33777 - protein, 12 aa, Homo sapiens
  CDR3 for alpha chain variable domain of TCR clone 16889 (TRAV27, TRAJ9)
CAGESGGFKTIF

SEQ ID NO: 33778 - protein, 11 aa, Homo sapiens
  CDR3 for beta chain variable domain of TCR clone 16889 (TRBV10-2, TRBJ2-2)
CASSASTSRCR

SEQ ID NO: 33779 - protein, 13 aa, Homo sapiens
  CDR3 for alpha chain variable domain of TCR clone 16890 (TRAV35, TRAJ42)
CAGFPGSQGDLIF

SEQ ID NO: 33780 - protein, 14 aa, Homo sapiens
  CDR3 for beta chain variable domain of TCR clone 16890 (TRBV19, TRBJ2-1)
CASPTFVLSGEQFF

SEQ ID NO: 33781 - protein, 14 aa, Homo sapiens
  CDR3 for alpha chain variable domain of TCR clone 16891 (TRAV2, TRAJ37)
CAVDFTNNTGKLIF

SEQ ID NO: 33782 - protein, 15 aa, Homo sapiens
  CDR3 for beta chain variable domain of TCR clone 16891 (TRBV20-1, TRBJ1-1)
CSASRGVTGYTEAFF

SEQ ID NO: 33783 - protein, 13 aa, Homo sapiens
  CDR3 for alpha chain variable domain of TCR clone 16892 (TRAV8-3, TRAJ28)
CAVGAVGSYQLTF

SEQ ID NO: 33784 - protein, 15 aa, Homo sapiens
  CDR3 for beta chain variable domain of TCR clone 16892 (TRBV7-9, TRBJ1-5)
CASSRGHQPNQPQHF

SEQ ID NO: 33785 - protein, 14 aa, Homo sapiens
  CDR3 for alpha chain variable domain of TCR clone 16893 (TRAV35, TRAJ42)
CAGRYGGSQGNLIF

SEQ ID NO: 33786 - protein, 14 aa, Homo sapiens
  CDR3 for beta chain variable domain of TCR clone 16893 (TRBV7-9, TRBJ2-1)
CQQLRLGRANEQFF

SEQ ID NO: 33787 - protein, 12 aa, Homo sapiens
  CDR3 for alpha chain variable domain of TCR clone 16894 (TRAV23/DV6, TRAJ31)
CAARRIGARLMF

SEQ ID NO: 33788 - protein, 13 aa, Homo sapiens
  CDR3 for beta chain variable domain of TCR clone 16894 (TRBV28, TRBJ2-7)
CAGKAGGVYEQYF

SEQ ID NO: 33789 - protein, 12 aa, Homo sapiens
  CDR3 for alpha chain variable domain of TCR clone 16895 (TRAV8-3, TRAJ20)
CAVDFNDYKLSF

SEQ ID NO: 33790 - protein, 13 aa, Homo sapiens
  CDR3 for beta chain variable domain of TCR clone 16895 (TRBV5-6, TRBJ2-3)
CASSLGRTDTQYF

SEQ ID NO: 33791 - protein, 14 aa, Homo sapiens
  CDR3 for alpha chain variable domain of TCR clone 16896 (TRAV8-3, TRAJ4)
CAVGAAGGYNKLIF

SEQ ID NO: 33792 - protein, 15 aa, Homo sapiens
  CDR3 for beta chain variable domain of TCR clone 16896 (TRBV6-5, TRBJ2-1)
RASSYDAGAGNEQFF

SEQ ID NO: 33793 - protein, 14 aa, Homo sapiens
  CDR3 for alpha chain variable domain of TCR clone 16897 (TRAV12-3, TRAJ10)
SHLPLTGGGNKLTF

SEQ ID NO: 33794 - protein, 15 aa, Homo sapiens
  CDR3 for beta chain variable domain of TCR clone 16897 (TRBV7-9, TRBJ1-5)
CASSQGHQPNQPQHF

SEQ ID NO: 33795 - protein, 14 aa, Homo sapiens
  CDR3 for alpha chain variable domain of TCR clone 16898 (TRAV5, TRAJ40)
CAESSGSGTYKYIF

SEQ ID NO: 33796 - protein, 14 aa, Homo sapiens
  CDR3 for beta chain variable domain of TCR clone 16898 (TRBV27, TRBJ2-5)
CASSSLKGWETQYF

SEQ ID NO: 33797 - protein, 12 aa, Homo sapiens
  CDR3 for alpha chain variable domain of TCR clone 16899 (TRAV38-2/DV8, TRAJ43)
CAYTINNNDMRF

SEQ ID NO: 33798 - protein, 15 aa, Homo sapiens
  CDR3 for beta chain variable domain of TCR clone 16899 (TRBV6-1, TRBJ1-4)
CASSLLDRANEKLFF

SEQ ID NO: 33799 - protein, 14 aa, Homo sapiens
  CDR3 for alpha chain variable domain of TCR clone 16900 (TRAV1-2, TRAJ16)
CAVNRFSDGQKLLF

SEQ ID NO: 33800 - protein, 14 aa, Homo sapiens
  CDR3 for beta chain variable domain of TCR clone 16900 (TRBV7-7, TRBJ2-2)
CATRQDSDTGELFF

SEQ ID NO: 33801 - protein, 12 aa, Homo sapiens
  CDR3 for alpha chain variable domain of TCR clone 16901 (TRAV2, TRAJ9)
CAVGAGGFKTIF

SEQ ID NO: 33802 - protein, 14 aa, Homo sapiens
  CDR3 for beta chain variable domain of TCR clone 16901 (TRBV12-5, TRBJ2-5)
CASGSRTHQETQYF

SEQ ID NO: 33803 - protein, 11 aa, Homo sapiens
  CDR3 for alpha chain variable domain of TCR clone 16902 (TRAV23/DV6, TRAJ58)
CAARLLRGETS

SEQ ID NO: 33804 - protein, 12 aa, Homo sapiens
  CDR3 for beta chain variable domain of TCR clone 16902 (TRBV7-8, TRBJ2-7)
CASSLGDREQYF

SEQ ID NO: 33805 - protein, 12 aa, Homo sapiens
  CDR3 for alpha chain variable domain of TCR clone 16903 (TRAV12-1, TRAJ40)
CVVYSGTYKYIF

SEQ ID NO: 33806 - protein, 18 aa, Homo sapiens
  CDR3 for beta chain variable domain of TCR clone 16903 (TRBV11-2, TRBJ2-3)
GASSLGGASRGAPNTQYF

SEQ ID NO: 33807 - protein, 13 aa, Homo sapiens
  CDR3 for alpha chain variable domain of TCR clone 16904 (TRAV16, TRAJ28)
CAPTGAGGYQLTF

SEQ ID NO: 33808 - protein, 16 aa, Homo sapiens
  CDR3 for beta chain variable domain of TCR clone 16904 (TRBV28, TRBJ1-5)
CASSLTGQGWNQPQHF

SEQ ID NO: 33809 - protein, 17 aa, Homo sapiens
  CDR3 for alpha chain variable domain of TCR clone 16905 (TRAV1-1, TRAJ11)
CAGYSTLTFGKGTMLLV

SEQ ID NO: 33810 - protein, 15 aa, Homo sapiens
  CDR3 for beta chain variable domain of TCR clone 16905 (TRBV6-5, TRBJ2-1)
CASRGDFDSYNEQFF

SEQ ID NO: 33811 - protein, 14 aa, Homo sapiens
  CDR3 for alpha chain variable domain of TCR clone 16906 (TRAV12-3, TRAJ12)
CAMSEVDSSYKLIF

SEQ ID NO: 33812 - protein, 15 aa, Homo sapiens
  CDR3 for beta chain variable domain of TCR clone 16906 (TRBV20-1, TRBJ2-7)
CSARDRVSGMDEQYF

SEQ ID NO: 33813 - protein, 18 aa, Homo sapiens
  CDR3 for alpha chain variable domain of TCR clone 16907 (TRAV13-1, TRAJ52)
CAASKRSAGGTSYGKLKF

SEQ ID NO: 33814 - protein, 13 aa, Homo sapiens
  CDR3 for beta chain variable domain of TCR clone 16907 (TRBV12-4, TRBJ1-2)
CASSLRQGKGYTF

SEQ ID NO: 33815 - protein, 14 aa, Homo sapiens
  CDR3 for alpha chain variable domain of TCR clone 16908 (TRAV13-2, TRAJ42)
CGEWVGGSQGNLIF

SEQ ID NO: 33816 - protein, 13 aa, Homo sapiens
  CDR3 for beta chain variable domain of TCR clone 16908 (TRBV19, TRBJ1-2)
CASSVPGQDGYTF

SEQ ID NO: 33817 - protein, 13 aa, Homo sapiens
  CDR3 for alpha chain variable domain of TCR clone 16909 (TRAV13-1, TRAJ12)
CSKYMGSSYKLIF

SEQ ID NO: 33818 - protein, 15 aa, Homo sapiens
  CDR3 for beta chain variable domain of TCR clone 16909 (TRBV3-1, TRBJ1-2)
CASSHTGQGGYGYTF

SEQ ID NO: 33819 - protein, 20 aa, Homo sapiens
  CDR3 for alpha chain variable domain of TCR clone 16910 (TRAV26-1, TRAJ42)
CCVLLHRQTYYVGSQGNLIF

SEQ ID NO: 33820 - protein, 16 aa, Homo sapiens
  CDR3 for beta chain variable domain of TCR clone 16910 (TRBV7-3, TRBJ2-2)
CASSLKRGTLSGELFF

SEQ ID NO: 33821 - protein, 15 aa, Homo sapiens
  CDR3 for alpha chain variable domain of TCR clone 16911 (TRAV23/DV6, TRAJ18)
CAARYRGSALGRLYF

SEQ ID NO: 33822 - protein, 13 aa, Homo sapiens
  CDR3 for beta chain variable domain of TCR clone 16911 (TRBV7-2, TRBJ2-7)
CASSSPSGSEQYF

SEQ ID NO: 33823 - protein, 17 aa, Homo sapiens
  CDR3 for alpha chain variable domain of TCR clone 16912 (TRAV3, TRAJ6)
CAVRDAPRAGGSYIPTF

SEQ ID NO: 33824 - protein, 14 aa, Homo sapiens
  CDR3 for beta chain variable domain of TCR clone 16912 (TRBV7-2, TRBJ2-7)
CASSPKTSFYEQYF

SEQ ID NO: 33825 - protein, 11 aa, Homo sapiens
  CDR3 for alpha chain variable domain of TCR clone 16913 (TRAV12-3, TRAJ43)
CAMRVSNDMRF

SEQ ID NO: 33826 - protein, 13 aa, Homo sapiens
  CDR3 for beta chain variable domain of TCR clone 16913 (TRBV20-1, TRBJ1-1)
CSAPLGGGTEAFF

SEQ ID NO: 33827 - protein, 15 aa, Homo sapiens
  CDR3 for alpha chain variable domain of TCR clone 16914 (TRAV8-3, TRAJ27)
CAVGPSKTNAGKPTF

SEQ ID NO: 33828 - protein, 15 aa, Homo sapiens
  CDR3 for beta chain variable domain of TCR clone 16914 (TRBV7-2, TRBJ2-1)
CASSSGLAGGNEQFF

SEQ ID NO: 33829 - protein, 14 aa, Homo sapiens
  CDR3 for alpha chain variable domain of TCR clone 16915 (TRAV13-2, TRAJ45)
CAEMSGGGADGLTF

SEQ ID NO: 33830 - protein, 11 aa, Homo sapiens
  CDR3 for beta chain variable domain of TCR clone 16915 (TRBV7-3, TRBJ2-5)
CVSSLSETQYF

SEQ ID NO: 33831 - protein, 14 aa, Homo sapiens
  CDR3 for alpha chain variable domain of TCR clone 16916 (TRAV26-1, TRAJ39)
CIVRGSGAGNMLTF

SEQ ID NO: 33832 - protein, 15 aa, Homo sapiens
  CDR3 for beta chain variable domain of TCR clone 16916 (TRBV7-9, TRBJ1-5)
CASSQGHQPNQPQHF

SEQ ID NO: 33833 - protein, 11 aa, Homo sapiens
  CDR3 for alpha chain variable domain of TCR clone 16917 (TRAV12-3, TRAJ43)
CAMSVSNDMRF

SEQ ID NO: 33834 - protein, 13 aa, Homo sapiens
  CDR3 for beta chain variable domain of TCR clone 16917 (TRBV20-1, TRBJ1-1)
CSAPLGGGTGAFF

SEQ ID NO: 33835 - protein, 13 aa, Homo sapiens
  CDR3 for alpha chain variable domain of TCR clone 16918 (TRAV2, TRAJ40)
CAVDTSGTYKYIF

SEQ ID NO: 33836 - protein, 14 aa, Homo sapiens
  CDR3 for beta chain variable domain of TCR clone 16918 (TRBV19, TRBJ2-1)
CASPTFVLSGEQFF

SEQ ID NO: 33837 - protein, 15 aa, Homo sapiens
  CDR3 for alpha chain variable domain of TCR clone 16919 (TRAV8-3, TRAJ45)
CASSYSGGGADGLTF

SEQ ID NO: 33838 - protein, 13 aa, Homo sapiens
  CDR3 for beta chain variable domain of TCR clone 16919 (TRBV10-3, TRBJ2-7)
CASKLAVNYEKYF

SEQ ID NO: 33839 - protein, 23 aa, Homo sapiens
  CDR3 for alpha chain variable domain of TCR clone 16920 (TRAV12-2, TRAJ43)
SLLIRDSQPSDSATYLRAFDMRF

SEQ ID NO: 33840 - protein, 18 aa, Homo sapiens
  CDR3 for beta chain variable domain of TCR clone 16920 (TRBV20-1, TRBJ2-3)
CSASGLAGGPGTTDTQYF

SEQ ID NO: 33841 - protein, 15 aa, Homo sapiens
  CDR3 for alpha chain variable domain of TCR clone 16921 (TRAV3, TRAJ20)
CAVRDIKLSDYKLSF

SEQ ID NO: 33842 - protein, 15 aa, Homo sapiens
  CDR3 for beta chain variable domain of TCR clone 16921 (TRBV7-9, TRBJ1-6)
CASSSPGRGKSPLHF

SEQ ID NO: 33843 - protein, 11 aa, Homo sapiens
  CDR3 for alpha chain variable domain of TCR clone 16922 (TRAV2, TRAJ33)
CAVDSNYQLIW

SEQ ID NO: 33844 - protein, 15 aa, Homo sapiens
  CDR3 for beta chain variable domain of TCR clone 16922 (TRBV19, TRBJ1-2)
CASSVGRVLNYGYTF

SEQ ID NO: 33845 - protein, 15 aa, Homo sapiens
  CDR3 for alpha chain variable domain of TCR clone 16923 (TRAV17, TRAJ13)
CATDAGAGGYQKVTF

SEQ ID NO: 33846 - protein, 17 aa, Homo sapiens
  CDR3 for beta chain variable domain of TCR clone 16923 (TRBV11-2, TRBJ2-1)
CASSLYPPGVEYNEQFF

SEQ ID NO: 33847 - protein, 14 aa, Homo sapiens
  CDR3 for alpha chain variable domain of TCR clone 16924 (TRAV13-1, TRAJ44)
CAAKATGTASKPTF

SEQ ID NO: 33848 - protein, 17 aa, Homo sapiens
  CDR3 for beta chain variable domain of TCR clone 16924 (TRBV7-3, TRBJ2-3)
CASSLMKRMRGADTQYF

SEQ ID NO: 33849 - protein, 14 aa, Homo sapiens
  CDR3 for alpha chain variable domain of TCR clone 16925 (TRAV12-2, TRAJ5)
CAVNRSTGRRAPTF

SEQ ID NO: 33850 - protein, 12 aa, Homo sapiens
  CDR3 for beta chain variable domain of TCR clone 16925 (TRBV19, TRBJ1-5)
CASSIAQQPQHF

SEQ ID NO: 33851 - protein, 14 aa, Homo sapiens
  CDR3 for alpha chain variable domain of TCR clone 16926 (TRAV38-1, TRAJ45)
CAYYSGGGADGLTF

SEQ ID NO: 33852 - protein, 20 aa, Homo sapiens
  CDR3 for beta chain variable domain of TCR clone 16926 (TRBV28, TRBJ2-1)
CARTPIGRSPGLAGGNEQFF

SEQ ID NO: 33853 - protein, 14 aa, Homo sapiens
  CDR3 for alpha chain variable domain of TCR clone 16927 (TRAV13-1, TRAJ44)
CAAKATGTASKLTF

SEQ ID NO: 33854 - protein, 17 aa, Homo sapiens
  CDR3 for beta chain variable domain of TCR clone 16927 (TRBV7-3, TRBJ2-3)
CASSSMKRMRGADTQYF

SEQ ID NO: 33855 - protein, 12 aa, Homo sapiens
  CDR3 for alpha chain variable domain of TCR clone 16928 (TRAV12-1, TRAJ40)
CVVYSGTYKYIF

SEQ ID NO: 33856 - protein, 14 aa, Homo sapiens
  CDR3 for beta chain variable domain of TCR clone 16928 (TRBV12-5, TRBJ2-5)
CASGSRTHQETQYF

SEQ ID NO: 33857 - protein, 14 aa, Homo sapiens
  CDR3 for alpha chain variable domain of TCR clone 16929 (TRAV13-1, TRAJ44)
CAAKATGTASKLTF

SEQ ID NO: 33858 - protein, 14 aa, Homo sapiens
  CDR3 for beta chain variable domain of TCR clone 16929 (TRBV19, TRBJ2-2)
CTSSTLHRSGELFF

SEQ ID NO: 33859 - protein, 16 aa, Homo sapiens
  CDR3 for alpha chain variable domain of TCR clone 16930 (TRAV27, TRAJ13)
CAGAKSDSGGYQKVTF

SEQ ID NO: 33860 - protein, 15 aa, Homo sapiens
  CDR3 for beta chain variable domain of TCR clone 16930 (TRBV29-1, TRBJ2-1)
CSVGRHALLYNEQFF

SEQ ID NO: 33861 - protein, 10 aa, Homo sapiens
  CDR3 for alpha chain variable domain of TCR clone 16931 (TRAV1-2, TRAJ23)
CAGQGGKLIF

SEQ ID NO: 33862 - protein, 18 aa, Homo sapiens
  CDR3 for beta chain variable domain of TCR clone 16931 (TRBV11-2, TRBJ1-1)
CASSLRQGGNTRKLSLDK

SEQ ID NO: 33863 - protein, 16 aa, Homo sapiens
  CDR3 for alpha chain variable domain of TCR clone 16932 (TRAV21, TRAJ45)
CAVSWGSGGGADGLTF

SEQ ID NO: 33864 - protein, 16 aa, Homo sapiens
  CDR3 for beta chain variable domain of TCR clone 16932 (TRBV11-2, TRBJ1-2)
CASSLDTGGADYGYTF

SEQ ID NO: 33865 - protein, 17 aa, Homo sapiens
  CDR3 for alpha chain variable domain of TCR clone 16933 (TRAV3, TRAJ6)
CAVRDGPRAGGSYIPTF

SEQ ID NO: 33866 - protein, 14 aa, Homo sapiens
  CDR3 for beta chain variable domain of TCR clone 16933 (TRBV7-2, TRBJ2-7)
CASSPKTNFYEQYF

SEQ ID NO: 33867 - protein, 11 aa, Homo sapiens
  CDR3 for alpha chain variable domain of TCR clone 16934 (TRAV21, TRAJ11)
CAVNGHSTLTF

SEQ ID NO: 33868 - protein, 11 aa, Homo sapiens
  CDR3 for beta chain variable domain of TCR clone 16934 (TRBV19, TRBJ1-1)
CASSIGSEAFF

SEQ ID NO: 33869 - protein, 14 aa, Homo sapiens
  CDR3 for alpha chain variable domain of TCR clone 16935 (TRAV8-2, TRAJ4)
CVVSPSGGDNKLIF

SEQ ID NO: 33870 - protein, 15 aa, Homo sapiens
  CDR3 for beta chain variable domain of TCR clone 16935 (TRBV4-1, TRBJ1-4)
CASSDTGGTNEKLFF

SEQ ID NO: 33871 - protein, 13 aa, Homo sapiens
  CDR3 for alpha chain variable domain of TCR clone 16936 (TRAV17, TRAJ4)
CATKSGGYNKLIF

SEQ ID NO: 33872 - protein, 14 aa, Homo sapiens
  CDR3 for beta chain variable domain of TCR clone 16936 (TRBV20-1, TRBJ1-5)
CSARDDRGNQTQHF

SEQ ID NO: 33873 - protein, 14 aa, Homo sapiens
  CDR3 for alpha chain variable domain of TCR clone 16937 (TRAV26-1, TRAJ34)
CIVRVVYNTDKLIF

SEQ ID NO: 33874 - protein, 15 aa, Homo sapiens
  CDR3 for beta chain variable domain of TCR clone 16937 (TRBV20-1, TRBJ2-7)
CSARVPAAYFYEQYF

SEQ ID NO: 33875 - protein, 13 aa, Homo sapiens
  CDR3 for alpha chain variable domain of TCR clone 16938 (TRAV21, TRAJ27)
CAARPGNAGKSTF

SEQ ID NO: 33876 - protein, 12 aa, Homo sapiens
  CDR3 for beta chain variable domain of TCR clone 16938 (TRBV7-8, TRBJ2-7)
CASSLGDREQYF

SEQ ID NO: 33877 - protein, 14 aa, Homo sapiens
  CDR3 for alpha chain variable domain of TCR clone 16939 (TRAV12-2, TRAJ17)
CAVLFKAAGNKLTF

SEQ ID NO: 33878 - protein, 17 aa, Homo sapiens
  CDR3 for beta chain variable domain of TCR clone 16939 (TRBV20-1, TRBJ2-2)
CSASGSGQGGLTRELFF

SEQ ID NO: 33879 - protein, 16 aa, Homo sapiens
  CDR3 for alpha chain variable domain of TCR clone 16940 (TRAV12-2, TRAJ52)
CRLANAGGTSYGKLTF

SEQ ID NO: 33880 - protein, 14 aa, Homo sapiens
  CDR3 for beta chain variable domain of TCR clone 16940 (TRBV5-1, TRBJ2-7)
CASSRGESLYEQYF

SEQ ID NO: 33881 - protein, 14 aa, Homo sapiens
  CDR3 for alpha chain variable domain of TCR clone 16941 (TRAV26-1, TRAJ38)
CLADNAGNNRKLIW

SEQ ID NO: 33882 - protein, 13 aa, Homo sapiens
  CDR3 for beta chain variable domain of TCR clone 16941 (TRBV20-1, TRBJ1-1)
CSARGGGNTEAFF

SEQ ID NO: 33883 - protein, 10 aa, Homo sapiens
  CDR3 for alpha chain variable domain of TCR clone 16942 (TRAV16, TRAJ22)
SAMYLRQLTL

SEQ ID NO: 33884 - protein, 15 aa, Homo sapiens
  CDR3 for beta chain variable domain of TCR clone 16942 (TRBV7-9, TRBJ1-6)
CASSSPGRGNSPLHF

SEQ ID NO: 33885 - protein, 14 aa, Homo sapiens
  CDR3 for alpha chain variable domain of TCR clone 16943 (TRAV26-1, TRAJ39)
CIVRGSRAGNMLTF

SEQ ID NO: 33886 - protein, 15 aa, Homo sapiens
  CDR3 for beta chain variable domain of TCR clone 16943 (TRBV7-9, TRBJ1-5)
CASSQGHQPSQPQHF

SEQ ID NO: 33887 - protein, 11 aa, Homo sapiens
  CDR3 for alpha chain variable domain of TCR clone 16944 (TRAV1-1, TRAJ23)
CAVRQGGKLIF

SEQ ID NO: 33888 - protein, 20 aa, Homo sapiens
  CDR3 for beta chain variable domain of TCR clone 16944 (TRBV7-8, TRBJ2-2)
CASSHSFPGPTIHITGELFF

SEQ ID NO: 33889 - protein, 13 aa, Homo sapiens
  CDR3 for alpha chain variable domain of TCR clone 16945 (TRAV13-1, TRAJ21)
CAASIYNFNKFYF

SEQ ID NO: 33890 - protein, 13 aa, Homo sapiens
  CDR3 for beta chain variable domain of TCR clone 16945 (TRBV27, TRBJ1-4)
CASSVMGDEKLFF

SEQ ID NO: 33891 - protein, 15 aa, Homo sapiens
  CDR3 for alpha chain variable domain of TCR clone 16946 (TRAV14/DV4, TRAJ49)
CAMREGMNTGNQFYF

SEQ ID NO: 33892 - protein, 14 aa, Homo sapiens
  CDR3 for beta chain variable domain of TCR clone 16946 (TRBV20-1, TRBJ2-7)
CSAPELAGVGEQYF

SEQ ID NO: 33893 - protein, 16 aa, Homo sapiens
  CDR3 for alpha chain variable domain of TCR clone 16947 (TRAV17, TRAJ36)
CATVSLNWGKQPLLWD

SEQ ID NO: 33894 - protein, 13 aa, Homo sapiens
  CDR3 for beta chain variable domain of TCR clone 16947 (TRBV4-1, TRBJ1-1)
CASSQLGTGEAFL

SEQ ID NO: 33895 - protein, 13 aa, Homo sapiens
  CDR3 for alpha chain variable domain of TCR clone 16948 (TRAV27, TRAJ45)
CRSSGGGADGLTF

SEQ ID NO: 33896 - protein, 17 aa, Homo sapiens
  CDR3 for beta chain variable domain of TCR clone 16948 (TRBV11-2, TRBJ2-1)
CASSLYHPGVEYNEQFF

SEQ ID NO: 33897 - protein, 14 aa, Homo sapiens
  CDR3 for alpha chain variable domain of TCR clone 16949 (TRAV17, TRAJ22)
CATSPSGSARKLTF

SEQ ID NO: 33898 - protein, 15 aa, Homo sapiens
  CDR3 for beta chain variable domain of TCR clone 16949 (TRBV4-1, TRBJ2-5)
CASSQWDLYQETQYF

SEQ ID NO: 33899 - protein, 13 aa, Homo sapiens
  CDR3 for alpha chain variable domain of TCR clone 16950 (TRAV3, TRAJ27)
CAVRPLGAGKSTF

SEQ ID NO: 33900 - protein, 14 aa, Homo sapiens
  CDR3 for beta chain variable domain of TCR clone 16950 (TRBV19, TRBJ2-1)
CASPTFVLSGEQFF

SEQ ID NO: 33901 - protein, 16 aa, Homo sapiens
  CDR3 for alpha chain variable domain of TCR clone 16951 (TRAV1-2, TRAJ10)
CAVRGVLTGGGNKLTF

SEQ ID NO: 33902 - protein, 13 aa, Homo sapiens
  CDR3 for beta chain variable domain of TCR clone 16951 (TRBV7-3, TRBJ1-1)
CASSQDWGAEAFF

SEQ ID NO: 33903 - protein, 13 aa, Homo sapiens
  CDR3 for alpha chain variable domain of TCR clone 16952 (TRAV2, TRAJ15)
CAVASQAGTALIF

SEQ ID NO: 33904 - protein, 15 aa, Homo sapiens
  CDR3 for beta chain variable domain of TCR clone 16952 (TRBV9, TRBJ1-6)
CASSVAGTGDSPLHF

SEQ ID NO: 33905 - protein, 12 aa, Homo sapiens
  CDR3 for alpha chain variable domain of TCR clone 16953 (TRAV8-3, TRAJ20)
CAVGAKDYKLSF

SEQ ID NO: 33906 - protein, 16 aa, Homo sapiens
  CDR3 for beta chain variable domain of TCR clone 16953 (TRBV19, TRBJ2-2)
CASRSPGTGATGELFF

SEQ ID NO: 33907 - protein, 12 aa, Homo sapiens
  CDR3 for alpha chain variable domain of TCR clone 16954 (TRAV12-3, TRAJ17)
CAMTLTGNKLTF

SEQ ID NO: 33908 - protein, 15 aa, Homo sapiens
  CDR3 for beta chain variable domain of TCR clone 16954 (TRBV19, TRBJ1-1)
CASTSGQIQNTEAFF

SEQ ID NO: 33909 - protein, 13 aa, Homo sapiens
  CDR3 for alpha chain variable domain of TCR clone 16955 (TRAV1-1, TRAJ9)
CAAKNTRGFKTIF

SEQ ID NO: 33910 - protein, 14 aa, Homo sapiens
  CDR3 for beta chain variable domain of TCR clone 16955 (TRBV20-1, TRBJ2-1)
CSAQIGGSANEQFF

SEQ ID NO: 33911 - protein, 14 aa, Homo sapiens
  CDR3 for alpha chain variable domain of TCR clone 16956 (TRAV12-2, TRAJ40)
CAVKIPSATYKYIF

SEQ ID NO: 33912 - protein, 14 aa, Homo sapiens
  CDR3 for beta chain variable domain of TCR clone 16956 (TRBV20-1, TRBJ1-1)
CSAQTRIGGTEAFF

SEQ ID NO: 33913 - protein, 15 aa, Homo sapiens
  CDR3 for alpha chain variable domain of TCR clone 16957 (TRAV23/DV6, TRAJ45)
CAAGSAGGGADGLTF

SEQ ID NO: 33914 - protein, 13 aa, Homo sapiens
  CDR3 for beta chain variable domain of TCR clone 16957 (TRBV3-1, TRBJ2-2)
CASRQTNTGELFF

SEQ ID NO: 33915 - protein, 13 aa, Homo sapiens
  CDR3 for alpha chain variable domain of TCR clone 16958 (TRAV8-3, TRAJ28)
CAVGAVGSYKLTF

SEQ ID NO: 33916 - protein, 15 aa, Homo sapiens
  CDR3 for beta chain variable domain of TCR clone 16958 (TRBV7-9, TRBJ1-5)
CASSQGHQPNQPQHF

SEQ ID NO: 33917 - protein, 13 aa, Homo sapiens
  CDR3 for alpha chain variable domain of TCR clone 16959 (TRAV2, TRAJ40)
CAVVTSGTYKYIF

SEQ ID NO: 33918 - protein, 14 aa, Homo sapiens
  CDR3 for beta chain variable domain of TCR clone 16959 (TRBV19, TRBJ2-1)
CASPTFVLSVEQFF

SEQ ID NO: 33919 - protein, 15 aa, Homo sapiens
  CDR3 for alpha chain variable domain of TCR clone 16960 (TRAV3, TRAJ5)
CAVRDRKTGRGALTF

SEQ ID NO: 33920 - protein, 15 aa, Homo sapiens
  CDR3 for beta chain variable domain of TCR clone 16960 (TRBV7-8, TRBJ2-1)
CASSLADSLYNEQFF

SEQ ID NO: 33921 - protein, 13 aa, Homo sapiens
  CDR3 for alpha chain variable domain of TCR clone 16961 (TRAV2, TRAJ15)
CAVASQAGTALIF

SEQ ID NO: 33922 - protein, 15 aa, Homo sapiens
  CDR3 for beta chain variable domain of TCR clone 16961 (TRBV7-2, TRBJ1-1)
CASSPQGGANTEAFF

SEQ ID NO: 33923 - protein, 13 aa, Homo sapiens
  CDR3 for alpha chain variable domain of TCR clone 16962 (TRAV23/DV6, TRAJ58)
CAASEIGGSRLTF

SEQ ID NO: 33924 - protein, 15 aa, Homo sapiens
  CDR3 for beta chain variable domain of TCR clone 16962 (TRBV19, TRBJ1-1)
CASASGQIQNTEAFF

SEQ ID NO: 33925 - protein, 14 aa, Homo sapiens
  CDR3 for alpha chain variable domain of TCR clone 16963 (TRAV1-2, TRAJ16)
CAFNRFSDGQKLLF

SEQ ID NO: 33926 - protein, 15 aa, Homo sapiens
  CDR3 for beta chain variable domain of TCR clone 16963 (TRBV9, TRBJ1-6)
CASSVAGTGDSPLHF

SEQ ID NO: 33927 - protein, 14 aa, Homo sapiens
  CDR3 for alpha chain variable domain of TCR clone 16964 (TRAV12-1, TRAJ12)
CVVTRMDSSYKLIF

SEQ ID NO: 33928 - protein, 13 aa, Homo sapiens
  CDR3 for beta chain variable domain of TCR clone 16964 (TRBV20-1, TRBJ1-1)
CNARGGGNTEAFF

SEQ ID NO: 33929 - protein, 11 aa, Homo sapiens
  CDR3 for alpha chain variable domain of TCR clone 16965 (TRAV12-3, TRAJ49)
CAANTGNQFYF

SEQ ID NO: 33930 - protein, 15 aa, Homo sapiens
  CDR3 for beta chain variable domain of TCR clone 16965 (TRBV11-2, TRBJ2-1)
CAGSLGTSGLNEQFF

SEQ ID NO: 33931 - protein, 13 aa, Homo sapiens
  CDR3 for alpha chain variable domain of TCR clone 16966 (TRAV1-2, TRAJ9)
CADLNTGGFKTIF

SEQ ID NO: 33932 - protein, 13 aa, Homo sapiens
  CDR3 for beta chain variable domain of TCR clone 16966 (TRBV19, TRBJ1-2)
CASSVPGQDGYTF

SEQ ID NO: 33933 - protein, 14 aa, Homo sapiens
  CDR3 for alpha chain variable domain of TCR clone 16967 (TRAV8-3, TRAJ4)
CAVGAAGGYNKLMF

SEQ ID NO: 33934 - protein, 15 aa, Homo sapiens
  CDR3 for beta chain variable domain of TCR clone 16967 (TRBV6-5, TRBJ2-1)
CASSYDAGAGNEQFF

SEQ ID NO: 33935 - protein, 13 aa, Homo sapiens
  CDR3 for alpha chain variable domain of TCR clone 16968 (TRAV3, TRAJ27)
FAVRPLGAGKSTF

SEQ ID NO: 33936 - protein, 13 aa, Homo sapiens
  CDR3 for beta chain variable domain of TCR clone 16968 (TRBV7-9, TRBJ2-3)
CASSPGSTDTQYF

SEQ ID NO: 33937 - protein, 13 aa, Homo sapiens
  CDR3 for alpha chain variable domain of TCR clone 16969 (TRAV21, TRAJ27)
CAARPGNAGKSTI

SEQ ID NO: 33938 - protein, 14 aa, Homo sapiens
  CDR3 for beta chain variable domain of TCR clone 16969 (TRBV7-6, TRBJ2-3)
CASSLGTVTDTQYF

SEQ ID NO: 33939 - protein, 12 aa, Homo sapiens
  CDR3 for alpha chain variable domain of TCR clone 16970 (TRAV26-1, TRAJ36)
CIVGVRADNLFF

SEQ ID NO: 33940 - protein, 13 aa, Homo sapiens
  CDR3 for beta chain variable domain of TCR clone 16970 (TRBV11-2, TRBJ2-5)
CASSRGPSETQYF

SEQ ID NO: 33941 - protein, 15 aa, Homo sapiens
  CDR3 for alpha chain variable domain of TCR clone 16971 (TRAV8-2, TRAJ40)
CVVLGTTSGTYKSIF

SEQ ID NO: 33942 - protein, 16 aa, Homo sapiens
  CDR3 for beta chain variable domain of TCR clone 16971 (TRBV7-3, TRBJ2-1)
CASSLEGYRSYNEQFF

SEQ ID NO: 33943 - protein, 14 aa, Homo sapiens
  CDR3 for alpha chain variable domain of TCR clone 16972 (TRAV3, TRAJ9)
CAVRDDTGGFKTIF

SEQ ID NO: 33944 - protein, 13 aa, Homo sapiens
  CDR3 for beta chain variable domain of TCR clone 16972 (TRBV27, TRBJ2-7)
CASSFVSSYEQYF

SEQ ID NO: 33945 - protein, 17 aa, Homo sapiens
  CDR3 for alpha chain variable domain of TCR clone 16973 (TRAV23/DV6, TRAJ57)
CAASSTLSQGGSETLVF

SEQ ID NO: 33946 - protein, 14 aa, Homo sapiens
  CDR3 for beta chain variable domain of TCR clone 16973 (TRBV25-1, TRBJ1-1)
CASTHLGGNTEAFF

SEQ ID NO: 33947 - protein, 12 aa, Homo sapiens
  CDR3 for alpha chain variable domain of TCR clone 16974 (TRAV12-3, TRAJ17)
CAMTLTGNKLTF

SEQ ID NO: 33948 - protein, 15 aa, Homo sapiens
  CDR3 for beta chain variable domain of TCR clone 16974 (TRBV9, TRBJ2-1)
CASSLAGSSYNEQFF

SEQ ID NO: 33949 - protein, 14 aa, Homo sapiens
  CDR3 for alpha chain variable domain of TCR clone 16975 (TRAV12-2, TRAJ17)
CALLFKAAGNKLTF

SEQ ID NO: 33950 - protein, 17 aa, Homo sapiens
  CDR3 for beta chain variable domain of TCR clone 16975 (TRBV20-1, TRBJ2-2)
CSASGSGQGGLTGELFF

SEQ ID NO: 33951 - protein, 18 aa, Homo sapiens
  CDR3 for alpha chain variable domain of TCR clone 16976 (TRAV21, TRAJ52)
CAVRPSPAGGTSYGKLTF

SEQ ID NO: 33952 - protein, 17 aa, Homo sapiens
  CDR3 for beta chain variable domain of TCR clone 16976 (TRBV13, TRBJ2-3)
CASSLSRVSGGRNTQYF

SEQ ID NO: 33953 - protein, 23 aa, Homo sapiens
  CDR3 for alpha chain variable domain of TCR clone 16977 (TRAV26-1, TRAJ38)
CIADNAGNNHIQNPDPAVSQLRD

SEQ ID NO: 33954 - protein, 13 aa, Homo sapiens
  CDR3 for beta chain variable domain of TCR clone 16977 (TRBV20-1, TRBJ1-1)
CSARGGGNTEAFF

SEQ ID NO: 33955 - protein, 17 aa, Homo sapiens
  CDR3 for alpha chain variable domain of TCR clone 16978 (TRAV8-4, TRAJ8)
CAVSDGEANTGFQKLVF

SEQ ID NO: 33956 - protein, 16 aa, Homo sapiens
  CDR3 for beta chain variable domain of TCR clone 16978 (TRBV3-1, TRBJ2-2)
CASSHYSGRSTGELFF

SEQ ID NO: 33957 - protein, 13 aa, Homo sapiens
  CDR3 for alpha chain variable domain of TCR clone 16979 (TRAV2, TRAJ40)
CAVVTSGTYKYVF

SEQ ID NO: 33958 - protein, 16 aa, Homo sapiens
  CDR3 for beta chain variable domain of TCR clone 16979 (TRBV12-5, TRBJ2-5)
CASGPRTSGNQETQYF

SEQ ID NO: 33959 - protein, 15 aa, Homo sapiens
  CDR3 for alpha chain variable domain of TCR clone 16980 (TRAV8-2, TRAJ40)
CVVLGTTSGTYKYIF

SEQ ID NO: 33960 - protein, 16 aa, Homo sapiens
  CDR3 for beta chain variable domain of TCR clone 16980 (TRBV7-3, TRBJ2-1)
CASSLEGYRAYNEQFF

SEQ ID NO: 33961 - protein, 16 aa, Homo sapiens
  CDR3 for alpha chain variable domain of TCR clone 16981 (TRAV1-2, TRAJ10)
CAVRGVLTGGGNKLTF

SEQ ID NO: 33962 - protein, 12 aa, Homo sapiens
  CDR3 for beta chain variable domain of TCR clone 16981 (TRBV7-8, TRBJ2-7)
CASSPGDREQYF

SEQ ID NO: 33963 - protein, 17 aa, Homo sapiens
  CDR3 for alpha chain variable domain of TCR clone 16982 (TRAV3, TRAJ42)
CAVRDRDYGGSQGNLIF

SEQ ID NO: 33964 - protein, 12 aa, Homo sapiens
  CDR3 for beta chain variable domain of TCR clone 16982 (TRBV19, TRBJ1-5)
CASSIAQQPQHF

SEQ ID NO: 33965 - protein, 12 aa, Homo sapiens
  CDR3 for alpha chain variable domain of TCR clone 16983 (TRAV13-1, TRAJ27)
CAAKSDAGKSTF

SEQ ID NO: 33966 - protein, 14 aa, Homo sapiens
  CDR3 for beta chain variable domain of TCR clone 16983 (TRBV20-1, TRBJ2-3)
CSARGGTSTDTQYF

SEQ ID NO: 33967 - protein, 12 aa, Homo sapiens
  CDR3 for alpha chain variable domain of TCR clone 16984 (TRAV2, TRAJ9)
CAVGAGGFKTIF

SEQ ID NO: 33968 - protein, 16 aa, Homo sapiens
  CDR3 for beta chain variable domain of TCR clone 16984 (TRBV13, TRBJ2-2)
CASSPRTWEHTGELFF

SEQ ID NO: 33969 - protein, 15 aa, Homo sapiens
  CDR3 for alpha chain variable domain of TCR clone 16985 (TRAV34, TRAJ38)
CGADFTPGNNRKLIW

SEQ ID NO: 33970 - protein, 14 aa, Homo sapiens
  CDR3 for beta chain variable domain of TCR clone 16985 (TRBV19, TRBJ2-7)
CASNFRDTFTGMYF

SEQ ID NO: 33971 - protein, 13 aa, Homo sapiens
  CDR3 for alpha chain variable domain of TCR clone 16986 (TRAV12-3, TRAJ35)
CAMAIGFGNVLHC

SEQ ID NO: 33972 - protein, 15 aa, Homo sapiens
  CDR3 for beta chain variable domain of TCR clone 16986 (TRBV20-1, TRBJ2-1)
CSTRGSGTYYNEQFF

SEQ ID NO: 33973 - protein, 12 aa, Homo sapiens
  CDR3 for alpha chain variable domain of TCR clone 16987 (TRAV2, TRAJ31)
CAAEDNNARLMF

SEQ ID NO: 33974 - protein, 16 aa, Homo sapiens
  CDR3 for beta chain variable domain of TCR clone 16987 (TRBV10-3, TRBJ2-1)
CAISGVGDGGGGEQFF

SEQ ID NO: 33975 - protein, 13 aa, Homo sapiens
  CDR3 for alpha chain variable domain of TCR clone 16988 (TRAV13-2, TRAJ53)
CAENMGSNYKLKF

SEQ ID NO: 33976 - protein, 13 aa, Homo sapiens
  CDR3 for beta chain variable domain of TCR clone 16988 (TRBV4-1, TRBJ2-2)
CASSQENTGELFF

SEQ ID NO: 33977 - protein, 15 aa, Homo sapiens
  CDR3 for alpha chain variable domain of TCR clone 16989 (TRAV8-3, TRAJ11)
CAVGLLNSGHSTLTF

SEQ ID NO: 33978 - protein, 16 aa, Homo sapiens
  CDR3 for beta chain variable domain of TCR clone 16989 (TRBV7-9, TRBJ1-2)
CASSLGFSSGEDGYTF

SEQ ID NO: 33979 - protein, 14 aa, Homo sapiens
  CDR3 for alpha chain variable domain of TCR clone 16990 (TRAV21, TRAJ35)
CAMMPIGFGNVLHC

SEQ ID NO: 33980 - protein, 12 aa, Homo sapiens
  CDR3 for beta chain variable domain of TCR clone 16990 (TRBV7-9, TRBJ2-7)
CASSIKREEQYF

SEQ ID NO: 33981 - protein, 14 aa, Homo sapiens
  CDR3 for alpha chain variable domain of TCR clone 16991 (TRAV9-2, TRAJ39)
CALYIYNAGNMLTF

SEQ ID NO: 33982 - protein, 13 aa, Homo sapiens
  CDR3 for beta chain variable domain of TCR clone 16991 (TRBV4-1, TRBJ2-7)
CASSWTGGYEQYF

SEQ ID NO: 33983 - protein, 11 aa, Homo sapiens
  CDR3 for alpha chain variable domain of TCR clone 16992 (TRAV3, TRAJ21)
GAVGNFNKFYF

SEQ ID NO: 33984 - protein, 16 aa, Homo sapiens
  CDR3 for beta chain variable domain of TCR clone 16992 (TRBV19, TRBJ2-1)
CASSKAGPSSYNEQFF

SEQ ID NO: 33985 - protein, 11 aa, Homo sapiens
  CDR3 for alpha chain variable domain of TCR clone 16993 (TRAV1-1, TRAJ23)
CAVRQGGKLIF

SEQ ID NO: 33986 - protein, 14 aa, Homo sapiens
  CDR3 for beta chain variable domain of TCR clone 16993 (TRBV5-7, TRBJ1-2)
CASSLVRGDYGYTF

SEQ ID NO: 33987 - protein, 14 aa, Homo sapiens
  CDR3 for alpha chain variable domain of TCR clone 16994 (TRAV1-2, TRAJ16)
CAGNRFSDGQKLLF

SEQ ID NO: 33988 - protein, 15 aa, Homo sapiens
  CDR3 for beta chain variable domain of TCR clone 16994 (TRBV9, TRBJ1-6)
CASSVAGTGDSPLHF

SEQ ID NO: 33989 - protein, 13 aa, Homo sapiens
  CDR3 for alpha chain variable domain of TCR clone 16995 (TRAV21, TRAJ15)
CAVANQAGTALIF

SEQ ID NO: 33990 - protein, 12 aa, Homo sapiens
  CDR3 for beta chain variable domain of TCR clone 16995 (TRBV11-2, TRBJ2-2)
CASSLGGGELFF

SEQ ID NO: 33991 - protein, 14 aa, Homo sapiens
  CDR3 for alpha chain variable domain of TCR clone 16996 (TRAV1-2, TRAJ16)
CAVNRFSDGQKLLF

SEQ ID NO: 33992 - protein, 13 aa, Homo sapiens
  CDR3 for beta chain variable domain of TCR clone 16996 (TRBV4-1, TRBJ2-1)
CASSQEVQYEQFF

SEQ ID NO: 33993 - protein, 15 aa, Homo sapiens
  CDR3 for alpha chain variable domain of TCR clone 16997 (TRAV17, TRAJ57)
CATGPSQGGAEKLVF

SEQ ID NO: 33994 - protein, 14 aa, Homo sapiens
  CDR3 for beta chain variable domain of TCR clone 16997 (TRBV12-5, TRBJ2-5)
CASGSRTHQETQYF

SEQ ID NO: 33995 - protein, 18 aa, Homo sapiens
  CDR3 for alpha chain variable domain of TCR clone 16998 (TRAV13-1, TRAJ52)
CAAKNPNAGGTSYGKLTF

SEQ ID NO: 33996 - protein, 17 aa, Homo sapiens
  CDR3 for beta chain variable domain of TCR clone 16998 (TRBV4-1, TRBJ2-7)
CASSPFLTSGGVVEQYF

SEQ ID NO: 33997 - protein, 14 aa, Homo sapiens
  CDR3 for alpha chain variable domain of TCR clone 16999 (TRAV21, TRAJ35)
CAVMPIGSGNVLHC

SEQ ID NO: 33998 - protein, 12 aa, Homo sapiens
  CDR3 for beta chain variable domain of TCR clone 16999 (TRBV7-9, TRBJ2-7)
CASSIKREEQYF

SEQ ID NO: 33999 - protein, 15 aa, Homo sapiens
  CDR3 for alpha chain variable domain of TCR clone 17000 (TRAV27, TRAJ38)
CAARRNAVNNRKLIW

SEQ ID NO: 34000 - protein, 13 aa, Homo sapiens
  CDR3 for beta chain variable domain of TCR clone 17000 (TRBV12-5, TRBJ2-3)
CASGDRQSDTQYF

SEQ ID NO: 34001 - protein, 11 aa, Homo sapiens
  CDR3 for alpha chain variable domain of TCR clone 17001 (TRAV12-3, TRAJ43)
CAMSVSNGMRF

SEQ ID NO: 34002 - protein, 13 aa, Homo sapiens
  CDR3 for beta chain variable domain of TCR clone 17001 (TRBV20-1, TRBJ1-1)
CSAPLGGGTEAFF

SEQ ID NO: 34003 - protein, 11 aa, Homo sapiens
  CDR3 for alpha chain variable domain of TCR clone 17002 (TRAV12-3, TRAJ43)
CAMSVSNEMRF

SEQ ID NO: 34004 - protein, 13 aa, Homo sapiens
  CDR3 for beta chain variable domain of TCR clone 17002 (TRBV20-1, TRBJ1-1)
CSAPLGGGTEAFF

SEQ ID NO: 34005 - protein, 12 aa, Homo sapiens
  CDR3 for alpha chain variable domain of TCR clone 17003 (TRAV21, TRAJ33)
CAKMDSNYQLIW

SEQ ID NO: 34006 - protein, 14 aa, Homo sapiens
  CDR3 for beta chain variable domain of TCR clone 17003 (TRBV19, TRBJ2-1)
CASPTFVLSGEQFF

SEQ ID NO: 34007 - protein, 14 aa, Homo sapiens
  CDR3 for alpha chain variable domain of TCR clone 17004 (TRAV8-4, TRAJ13)
CAVTLSGGYQKVTF

SEQ ID NO: 34008 - protein, 16 aa, Homo sapiens
  CDR3 for beta chain variable domain of TCR clone 17004 (TRBV19, TRBJ1-1)
CASSPTRFWPGTEAFF

SEQ ID NO: 34009 - protein, 14 aa, Homo sapiens
  CDR3 for alpha chain variable domain of TCR clone 17005 (TRAV1-2, TRAJ8)
CAVREDTGFQKLVF

SEQ ID NO: 34010 - protein, 14 aa, Homo sapiens
  CDR3 for beta chain variable domain of TCR clone 17005 (TRBV12-4, TRBJ1-6)
CASSGGQLNSPLHF

SEQ ID NO: 34011 - protein, 16 aa, Homo sapiens
  CDR3 for alpha chain variable domain of TCR clone 17006 (TRAV30, TRAJ24)
CRTEIVDADSWGKFQF

SEQ ID NO: 34012 - protein, 14 aa, Homo sapiens
  CDR3 for beta chain variable domain of TCR clone 17006 (TRBV12-5, TRBJ2-5)
CASGSRTHQETQYF

SEQ ID NO: 34013 - protein, 14 aa, Homo sapiens
  CDR3 for alpha chain variable domain of TCR clone 17007 (TRAV1-1, TRAJ27)
CAVIYNTNAGKSTF

SEQ ID NO: 34014 - protein, 15 aa, Homo sapiens
  CDR3 for beta chain variable domain of TCR clone 17007 (TRBV7-2, TRBJ2-1)
CASSPGLAGGNEQFF

SEQ ID NO: 34015 - protein, 11 aa, Homo sapiens
  CDR3 for alpha chain variable domain of TCR clone 17008 (TRAV2, TRAJ33)
CAVESNYQLIW

SEQ ID NO: 34016 - protein, 15 aa, Homo sapiens
  CDR3 for beta chain variable domain of TCR clone 17008 (TRBV19, TRBJ1-1)
CAGTSGQIQNTEAFF

SEQ ID NO: 34017 - protein, 16 aa, Homo sapiens
  CDR3 for alpha chain variable domain of TCR clone 17009 (TRAV16, TRAJ4)
CALSRMFSGVYNKLIF

SEQ ID NO: 34018 - protein, 16 aa, Homo sapiens
  CDR3 for beta chain variable domain of TCR clone 17009 (TRBV24-1, TRBJ2-3)
CATSDPGTGATDTQYF

SEQ ID NO: 34019 - protein, 16 aa, Homo sapiens
  CDR3 for alpha chain variable domain of TCR clone 17010 (TRAV3, TRAJ37)
CAVRPHGSGNTGKLTF

SEQ ID NO: 34020 - protein, 16 aa, Homo sapiens
  CDR3 for beta chain variable domain of TCR clone 17010 (TRBV9, TRBJ1-2)
CASSVEEKVSPYGYTF

SEQ ID NO: 34021 - protein, 13 aa, Homo sapiens
  CDR3 for alpha chain variable domain of TCR clone 17011 (TRAV12-3, TRAJ46)
CAMKKSSGDKLTF

SEQ ID NO: 34022 - protein, 17 aa, Homo sapiens
  CDR3 for beta chain variable domain of TCR clone 17011 (TRBV3-1, TRBJ2-5)
CASSQGPAGMYQETQYF

SEQ ID NO: 34023 - protein, 12 aa, Homo sapiens
  CDR3 for alpha chain variable domain of TCR clone 17012 (TRAV21, TRAJ13)
PGPSGGYQKVTF

SEQ ID NO: 34024 - protein, 15 aa, Homo sapiens
  CDR3 for beta chain variable domain of TCR clone 17012 (TRBV7-9, TRBJ1-6)
CASSSPGRGNSPLLF

SEQ ID NO: 34025 - protein, 14 aa, Homo sapiens
  CDR3 for alpha chain variable domain of TCR clone 17013 (TRAV35, TRAJ22)
CAGLRPGSARQLTF

SEQ ID NO: 34026 - protein, 15 aa, Homo sapiens
  CDR3 for beta chain variable domain of TCR clone 17013 (TRBV12-4, TRBJ2-5)
CASSPQTGLQETQYF

SEQ ID NO: 34027 - protein, 15 aa, Homo sapiens
  CDR3 for alpha chain variable domain of TCR clone 17014 (TRAV3, TRAJ4)
CAVRDGTGGYNKLIF

SEQ ID NO: 34028 - protein, 13 aa, Homo sapiens
  CDR3 for beta chain variable domain of TCR clone 17014 (TRBV7-9, TRBJ1-2)
CASSLKQNYGYTF

SEQ ID NO: 34029 - protein, 11 aa, Homo sapiens
  CDR3 for alpha chain variable domain of TCR clone 17015 (TRAV21, TRAJ11)
CAVNGYSALTF

SEQ ID NO: 34030 - protein, 11 aa, Homo sapiens
  CDR3 for beta chain variable domain of TCR clone 17015 (TRBV19, TRBJ1-1)
CASSIGSEAFF

SEQ ID NO: 34031 - protein, 12 aa, Homo sapiens
  CDR3 for alpha chain variable domain of TCR clone 17016 (TRAV1-1, TRAJ39)
CAVPVVGNMLTF

SEQ ID NO: 34032 - protein, 14 aa, Homo sapiens
  CDR3 for beta chain variable domain of TCR clone 17016 (TRBV19, TRBJ2-1)
CASPTFVLSGEQFF

SEQ ID NO: 34033 - protein, 14 aa, Homo sapiens
  CDR3 for alpha chain variable domain of TCR clone 17017 (TRAV26-1, TRAJ38)
CIADNSGNNRKLIW

SEQ ID NO: 34034 - protein, 13 aa, Homo sapiens
  CDR3 for beta chain variable domain of TCR clone 17017 (TRBV20-1, TRBJ1-1)
CSARGGGNTEAFF

SEQ ID NO: 34035 - protein, 16 aa, Homo sapiens
  CDR3 for alpha chain variable domain of TCR clone 17018 (TRAV21, TRAJ37)
CAVRTAGASNTGKLIF

SEQ ID NO: 34036 - protein, 13 aa, Homo sapiens
  CDR3 for beta chain variable domain of TCR clone 17018 (TRBV7-9, TRBJ2-5)
CASLPSGRETQYF

SEQ ID NO: 34037 - protein, 16 aa, Homo sapiens
  CDR3 for alpha chain variable domain of TCR clone 17019 (TRAV16, TRAJ4)
CALSRMFSGGYNKLIF

SEQ ID NO: 34038 - protein, 16 aa, Homo sapiens
  CDR3 for beta chain variable domain of TCR clone 17019 (TRBV24-1, TRBJ2-3)
CATSDPGTGATDTRYF

SEQ ID NO: 34039 - protein, 13 aa, Homo sapiens
  CDR3 for alpha chain variable domain of TCR clone 17020 (TRAV21, TRAJ57)
CALTQGGSEKLVF

SEQ ID NO: 34040 - protein, 16 aa, Homo sapiens
  CDR3 for beta chain variable domain of TCR clone 17020 (TRBV29-1, TRBJ2-7)
CSVEDAEDGTAYEQYF

SEQ ID NO: 34041 - protein, 14 aa, Homo sapiens
  CDR3 for alpha chain variable domain of TCR clone 17021 (TRAV12-1, TRAJ17)
CVVNYKAAGNKLTF

SEQ ID NO: 34042 - protein, 15 aa, Homo sapiens
  CDR3 for beta chain variable domain of TCR clone 17021 (TRBV27, TRBJ2-1)
CASSNGGGSSNEQFF

SEQ ID NO: 34043 - protein, 17 aa, Homo sapiens
  CDR3 for alpha chain variable domain of TCR clone 17022 (TRAV13-1, TRAJ52)
CAASSGAGGTSYGKLTF

SEQ ID NO: 34044 - protein, 15 aa, Homo sapiens
  CDR3 for beta chain variable domain of TCR clone 17022 (TRBV2, TRBJ2-1)
CASSGLAGSYNEQFF

SEQ ID NO: 34045 - protein, 12 aa, Homo sapiens
  CDR3 for alpha chain variable domain of TCR clone 17023 (TRAV12-1, TRAJ40)
CVVYLGTYKYIF

SEQ ID NO: 34046 - protein, 18 aa, Homo sapiens
  CDR3 for beta chain variable domain of TCR clone 17023 (TRBV11-2, TRBJ2-3)
CASSLGGASRGAPNTQYF

SEQ ID NO: 34047 - protein, 14 aa, Homo sapiens
  CDR3 for alpha chain variable domain of TCR clone 17024 (TRAV1-2, TRAJ16)
CAVNRFSDGQKLLF

SEQ ID NO: 34048 - protein, 15 aa, Homo sapiens
  CDR3 for beta chain variable domain of TCR clone 17024 (TRBV7-9, TRBJ1-6)
CAGSSPGRGNSPLHF

SEQ ID NO: 34049 - protein, 14 aa, Homo sapiens
  CDR3 for alpha chain variable domain of TCR clone 17025 (TRAV35, TRAJ22)
CAGLRPGSARQLTF

SEQ ID NO: 34050 - protein, 15 aa, Homo sapiens
  CDR3 for beta chain variable domain of TCR clone 17025 (TRBV12-4, TRBJ2-5)
CASSPTTGLQETQYF

SEQ ID NO: 34051 - protein, 16 aa, Homo sapiens
  CDR3 for alpha chain variable domain of TCR clone 17026 (TRAV3, TRAJ18)
CAVRDGGGSTLGRLYF

SEQ ID NO: 34052 - protein, 15 aa, Homo sapiens
  CDR3 for beta chain variable domain of TCR clone 17026 (TRBV7-9, TRBJ1-6)
CASSSPGRGNSPLHF

SEQ ID NO: 34053 - protein, 15 aa, Homo sapiens
  CDR3 for alpha chain variable domain of TCR clone 17027 (TRAV17, TRAJ57)
CATGPSQGGSDKLVF

SEQ ID NO: 34054 - protein, 14 aa, Homo sapiens
  CDR3 for beta chain variable domain of TCR clone 17027 (TRBV12-5, TRBJ2-5)
CASGSRTHQETQYF

SEQ ID NO: 34055 - protein, 11 aa, Homo sapiens
  CDR3 for alpha chain variable domain of TCR clone 17028 (TRAV3, TRAJ21)
CAVGNFNKFYF

SEQ ID NO: 34056 - protein, 13 aa, Homo sapiens
  CDR3 for beta chain variable domain of TCR clone 17028 (TRBV20-1, TRBJ2-2)
CSASAAGTGELLF

SEQ ID NO: 34057 - protein, 16 aa, Homo sapiens
  CDR3 for alpha chain variable domain of TCR clone 17029 (TRAV1-1, TRAJ34)
CAVREGITPTSSSLGL

SEQ ID NO: 34058 - protein, 18 aa, Homo sapiens
  CDR3 for beta chain variable domain of TCR clone 17029 (TRBV25-1, TRBJ1-2)
CASSGLQNGQGLIFGYTF

SEQ ID NO: 34059 - protein, 11 aa, Homo sapiens
  CDR3 for alpha chain variable domain of TCR clone 17030 (TRAV3, TRAJ21)
CAVGNFNKFYF

SEQ ID NO: 34060 - protein, 14 aa, Homo sapiens
  CDR3 for beta chain variable domain of TCR clone 17030 (TRBV7-6, TRBJ2-3)
CASSLGTVTDTQYF

SEQ ID NO: 34061 - protein, 14 aa, Homo sapiens
  CDR3 for alpha chain variable domain of TCR clone 17031 (TRAV29/DV5, TRAJ36)
CAARRKTGAKNLFF

SEQ ID NO: 34062 - protein, 14 aa, Homo sapiens
  CDR3 for beta chain variable domain of TCR clone 17031 (TRBV12-5, TRBJ2-5)
CASGSRTHQETQYF

SEQ ID NO: 34063 - protein, 14 aa, Homo sapiens
  CDR3 for alpha chain variable domain of TCR clone 17032 (TRAV1-2, TRAJ16)
CAVNRSSDGQKLLF

SEQ ID NO: 34064 - protein, 12 aa, Homo sapiens
  CDR3 for beta chain variable domain of TCR clone 17032 (TRBV5-1, TRBJ2-5)
CASSWDQETQYF

SEQ ID NO: 34065 - protein, 10 aa, Homo sapiens
  CDR3 for alpha chain variable domain of TCR clone 17033 (TRAV21, TRAJ31)
CAVDNARLMF

SEQ ID NO: 34066 - protein, 13 aa, Homo sapiens
  CDR3 for beta chain variable domain of TCR clone 17033 (TRBV4-1, TRBJ1-1)
CASSRRMNTEAFF

SEQ ID NO: 34067 - protein, 13 aa, Homo sapiens
  CDR3 for alpha chain variable domain of TCR clone 17034 (TRAV3, TRAJ15)
CAVRDQAGTALIF

SEQ ID NO: 34068 - protein, 15 aa, Homo sapiens
  CDR3 for beta chain variable domain of TCR clone 17034 (TRBV11-1, TRBJ2-7)
CASSLSYGASYEQYF

SEQ ID NO: 34069 - protein, 12 aa, Homo sapiens
  CDR3 for alpha chain variable domain of TCR clone 17035 (TRAV12-3, TRAJ17)
CAMTLTGNKLTF

SEQ ID NO: 34070 - protein, 14 aa, Homo sapiens
  CDR3 for beta chain variable domain of TCR clone 17035 (TRBV20-1, TRBJ2-3)
CSARGGTSTDTQYF

SEQ ID NO: 34071 - protein, 16 aa, Homo sapiens
  CDR3 for alpha chain variable domain of TCR clone 17036 (TRAV3, TRAJ27)
CAVRDPQGTNAGKSTF

SEQ ID NO: 34072 - protein, 17 aa, Homo sapiens
  CDR3 for beta chain variable domain of TCR clone 17036 (TRBV4-1, TRBJ2-7)
CASSQGRGLQTSYEQYL

SEQ ID NO: 34073 - protein, 14 aa, Homo sapiens
  CDR3 for alpha chain variable domain of TCR clone 17037 (TRAV8-2, TRAJ4)
CVVSPSGGYNKLIF

SEQ ID NO: 34074 - protein, 15 aa, Homo sapiens
  CDR3 for beta chain variable domain of TCR clone 17037 (TRBV4-1, TRBJ1-4)
CASSDTGGTNDKLFF

SEQ ID NO: 34075 - protein, 17 aa, Homo sapiens
  CDR3 for alpha chain variable domain of TCR clone 17038 (TRAV23/DV6, TRAJ57)
CAASSTLSQGGSEKLAF

SEQ ID NO: 34076 - protein, 14 aa, Homo sapiens
  CDR3 for beta chain variable domain of TCR clone 17038 (TRBV25-1, TRBJ1-1)
CASTHLGGNTEAFF

SEQ ID NO: 34077 - protein, 11 aa, Homo sapiens
  CDR3 for alpha chain variable domain of TCR clone 17039 (TRAV2, TRAJ23)
CAVETRGKLIF

SEQ ID NO: 34078 - protein, 13 aa, Homo sapiens
  CDR3 for beta chain variable domain of TCR clone 17039 (TRBV12-5, TRBJ2-3)
CASGDRQSDTQYF

SEQ ID NO: 34079 - protein, 11 aa, Homo sapiens
  CDR3 for alpha chain variable domain of TCR clone 17040 (TRAV17, TRAJ49)
CATDAGNQLYF

SEQ ID NO: 34080 - protein, 16 aa, Homo sapiens
  CDR3 for beta chain variable domain of TCR clone 17040 (TRBV7-2, TRBJ1-2)
CASSPTSGTSLGGYTF

SEQ ID NO: 34081 - protein, 18 aa, Homo sapiens
  CDR3 for alpha chain variable domain of TCR clone 17041 (TRAV21, TRAJ52)
CAVSPSPAGGTSYGKLTF

SEQ ID NO: 34082 - protein, 13 aa, Homo sapiens
  CDR3 for beta chain variable domain of TCR clone 17041 (TRBV7-3, TRBJ1-1)
CASSQDWGAEAFF

SEQ ID NO: 34083 - protein, 13 aa, Homo sapiens
  CDR3 for alpha chain variable domain of TCR clone 17042 (TRAV13-1, TRAJ12)
CAASPGSSYKLIF

SEQ ID NO: 34084 - protein, 16 aa, Homo sapiens
  CDR3 for beta chain variable domain of TCR clone 17042 (TRBV15, TRBJ2-1)
CATSRERLAGAYEQFF

SEQ ID NO: 34085 - protein, 15 aa, Homo sapiens
  CDR3 for alpha chain variable domain of TCR clone 17043 (TRAV21, TRAJ24)
CAARSSTDSWGKLQF

SEQ ID NO: 34086 - protein, 13 aa, Homo sapiens
  CDR3 for beta chain variable domain of TCR clone 17043 (TRBV11-2, TRBJ2-5)
CASSSTGKETQYF

SEQ ID NO: 34087 - protein, 13 aa, Homo sapiens
  CDR3 for alpha chain variable domain of TCR clone 17044 (TRAV12-3, TRAJ54)
CALVPQGAQKLVF

SEQ ID NO: 34088 - protein, 15 aa, Homo sapiens
  CDR3 for beta chain variable domain of TCR clone 17044 (TRBV4-1, TRBJ2-2)
CASSQDSRGTGELFS

SEQ ID NO: 34089 - protein, 10 aa, Homo sapiens
  CDR3 for alpha chain variable domain of TCR clone 17045 (TRAV23/DV6, TRAJ57)
CAASSTLSQG

SEQ ID NO: 34090 - protein, 12 aa, Homo sapiens
  CDR3 for beta chain variable domain of TCR clone 17045 (TRBV12-4, TRBJ2-7)
CASSLGGYEQYF

SEQ ID NO: 34091 - protein, 11 aa, Homo sapiens
  CDR3 for alpha chain variable domain of TCR clone 17046 (TRAV1-2, TRAJ31)
CAVNNNARLMF

SEQ ID NO: 34092 - protein, 15 aa, Homo sapiens
  CDR3 for beta chain variable domain of TCR clone 17046 (TRBV28, TRBJ2-1)
CASSIIAGGGSEQFF

SEQ ID NO: 34093 - protein, 18 aa, Homo sapiens
  CDR3 for alpha chain variable domain of TCR clone 17047 (TRAV21, TRAJ52)
CAVRPSPAGGTSYGKLTF

SEQ ID NO: 34094 - protein, 14 aa, Homo sapiens
  CDR3 for beta chain variable domain of TCR clone 17047 (TRBV7-9, TRBJ2-1)
CASSPRDSLYEQFF

SEQ ID NO: 34095 - protein, 12 aa, Homo sapiens
  CDR3 for alpha chain variable domain of TCR clone 17048 (TRAV9-2, TRAJ36)
CALKKGANNLFF

SEQ ID NO: 34096 - protein, 14 aa, Homo sapiens
  CDR3 for beta chain variable domain of TCR clone 17048 (TRBV28, TRBJ1-1)
CASSSEQGYTEAFF

SEQ ID NO: 34097 - protein, 15 aa, Homo sapiens
  CDR3 for alpha chain variable domain of TCR clone 17049 (TRAV3, TRAJ22)
CAVRDRGGSARQLTF

SEQ ID NO: 34098 - protein, 12 aa, Homo sapiens
  CDR3 for beta chain variable domain of TCR clone 17049 (TRBV7-8, TRBJ2-7)
CASSLGDREQYF

SEQ ID NO: 34099 - protein, 12 aa, Homo sapiens
  CDR3 for alpha chain variable domain of TCR clone 17050 (TRAV25, TRAJ38)
CAGTGNNRKLIW

SEQ ID NO: 34100 - protein, 14 aa, Homo sapiens
  CDR3 for beta chain variable domain of TCR clone 17050 (TRBV5-4, TRBJ1-1)
CVSSLDSRRDEAFF

SEQ ID NO: 34101 - protein, 14 aa, Homo sapiens
  CDR3 for alpha chain variable domain of TCR clone 17051 (TRAV35, TRAJ22)
SAGLRPGSARQLTF

SEQ ID NO: 34102 - protein, 15 aa, Homo sapiens
  CDR3 for beta chain variable domain of TCR clone 17051 (TRBV12-4, TRBJ2-5)
CASSPPTGLQETQYF

SEQ ID NO: 34103 - protein, 16 aa, Homo sapiens
  CDR3 for alpha chain variable domain of TCR clone 17052 (TRAV23/DV6, TRAJ9)
CAASIGGNTGGFKTIF

SEQ ID NO: 34104 - protein, 14 aa, Homo sapiens
  CDR3 for beta chain variable domain of TCR clone 17052 (TRBV19, TRBJ2-5)
CASSSSGIQETQYF

SEQ ID NO: 34105 - protein, 14 aa, Homo sapiens
  CDR3 for alpha chain variable domain of TCR clone 17053 (TRAV38-1, TRAJ40)
CALRPTSGTYKYIF

SEQ ID NO: 34106 - protein, 14 aa, Homo sapiens
  CDR3 for beta chain variable domain of TCR clone 17053 (TRBV25-1, TRBJ1-1)
CASAHLGGNTEAFF

SEQ ID NO: 34107 - protein, 15 aa, Homo sapiens
  CDR3 for alpha chain variable domain of TCR clone 17054 (TRAV38-1, TRAJ37)
CAFIFVSGNTGKLIF

SEQ ID NO: 34108 - protein, 12 aa, Homo sapiens
  CDR3 for beta chain variable domain of TCR clone 17054 (TRBV7-9, TRBJ2-7)
CASSLEGYEQYF

SEQ ID NO: 34109 - protein, 15 aa, Homo sapiens
  CDR3 for alpha chain variable domain of TCR clone 17055 (TRAV8-4, TRAJ9)
CAVSDRETGGFKTIF

SEQ ID NO: 34110 - protein, 13 aa, Homo sapiens
  CDR3 for beta chain variable domain of TCR clone 17055 (TRBV9, TRBJ2-1)
CASSPSGGSEQFL

SEQ ID NO: 34111 - protein, 12 aa, Homo sapiens
  CDR3 for alpha chain variable domain of TCR clone 17056 (TRAV12-3, TRAJ17)
CAMTLTGNKLTF

SEQ ID NO: 34112 - protein, 15 aa, Homo sapiens
  CDR3 for beta chain variable domain of TCR clone 17056 (TRBV20-1, TRBJ2-7)
CSGRDRVSGMDEQYF

SEQ ID NO: 34113 - protein, 23 aa, Homo sapiens
  CDR3 for alpha chain variable domain of TCR clone 17057 (TRAV26-1, TRAJ38)
CIADNAGNNHIQNPDPAVYKLRD

SEQ ID NO: 34114 - protein, 13 aa, Homo sapiens
  CDR3 for beta chain variable domain of TCR clone 17057 (TRBV20-1, TRBJ1-1)
CSARGGGNTEAFF

SEQ ID NO: 34115 - protein, 14 aa, Homo sapiens
  CDR3 for alpha chain variable domain of TCR clone 17058 (TRAV13-1, TRAJ40)
CAASRASGTYKHIF

SEQ ID NO: 34116 - protein, 13 aa, Homo sapiens
  CDR3 for beta chain variable domain of TCR clone 17058 (TRBV29-1, TRBJ2-7)
CSVGRTGGYEQYF

SEQ ID NO: 34117 - protein, 14 aa, Homo sapiens
  CDR3 for alpha chain variable domain of TCR clone 17059 (TRAV1-2, TRAJ16)
CAVNRFSDGQRLLF

SEQ ID NO: 34118 - protein, 15 aa, Homo sapiens
  CDR3 for beta chain variable domain of TCR clone 17059 (TRBV12-4, TRBJ2-5)
CASSPPTGLQETQYF

SEQ ID NO: 34119 - protein, 12 aa, Homo sapiens
  CDR3 for alpha chain variable domain of TCR clone 17060 (TRAV1-1, TRAJ8)
CAGGTGFQKLLF

SEQ ID NO: 34120 - protein, 15 aa, Homo sapiens
  CDR3 for beta chain variable domain of TCR clone 17060 (TRBV7-9, TRBJ1-4)
CASSRTGGFNEKLFF

SEQ ID NO: 34121 - protein, 14 aa, Homo sapiens
  CDR3 for alpha chain variable domain of TCR clone 17061 (TRAV38-1, TRAJ45)
CAYYSGGGADGLTF

SEQ ID NO: 34122 - protein, 20 aa, Homo sapiens
  CDR3 for beta chain variable domain of TCR clone 17061 (TRBV28, TRBJ2-1)
CASTPIGRSPGLAGGNKQFF

SEQ ID NO: 34123 - protein, 14 aa, Homo sapiens
  CDR3 for alpha chain variable domain of TCR clone 17062 (TRAV21, TRAJ52)
CGRAGGTSYGKLTF

SEQ ID NO: 34124 - protein, 14 aa, Homo sapiens
  CDR3 for beta chain variable domain of TCR clone 17062 (TRBV19, TRBJ1-2)
CASSVLGYNYGYAF

SEQ ID NO: 34125 - protein, 12 aa, Homo sapiens
  CDR3 for alpha chain variable domain of TCR clone 17063 (TRAV34, TRAJ27)
CGADTNAGKSTF

SEQ ID NO: 34126 - protein, 14 aa, Homo sapiens
  CDR3 for beta chain variable domain of TCR clone 17063 (TRBV4-1, TRBJ2-2)
CASSQAVNTGELFF

SEQ ID NO: 34127 - protein, 12 aa, Homo sapiens
  CDR3 for alpha chain variable domain of TCR clone 17064 (TRAV2, TRAJ5)
CALDTGRRALTF

SEQ ID NO: 34128 - protein, 15 aa, Homo sapiens
  CDR3 for beta chain variable domain of TCR clone 17064 (TRBV10-3, TRBJ2-1)
CAISDVQDRAYVQFF

SEQ ID NO: 34129 - protein, 11 aa, Homo sapiens
  CDR3 for alpha chain variable domain of TCR clone 17065 (TRAV2, TRAJ33)
CAVESNYQLIW

SEQ ID NO: 34130 - protein, 15 aa, Homo sapiens
  CDR3 for beta chain variable domain of TCR clone 17065 (TRBV19, TRBJ1-1)
CASASGQIQNTEAFF

SEQ ID NO: 34131 - protein, 15 aa, Homo sapiens
  CDR3 for alpha chain variable domain of TCR clone 17066 (TRAV22, TRAJ45)
CAAKYSGGGADGLTF

SEQ ID NO: 34132 - protein, 13 aa, Homo sapiens
  CDR3 for beta chain variable domain of TCR clone 17066 (TRBV19, TRBJ1-2)
CASSVPGQDGYTF

SEQ ID NO: 34133 - protein, 10 aa, Homo sapiens
  CDR3 for alpha chain variable domain of TCR clone 17067 (TRAV23/DV6, TRAJ57)
CAASSTLSQG

SEQ ID NO: 34134 - protein, 13 aa, Homo sapiens
  CDR3 for beta chain variable domain of TCR clone 17067 (TRBV12-4, TRBJ1-2)
CASSSGLTVISTF

SEQ ID NO: 34135 - protein, 14 aa, Homo sapiens
  CDR3 for alpha chain variable domain of TCR clone 17068 (TRAV12-1, TRAJ17)
CVVNYKAAGNKLTF

SEQ ID NO: 34136 - protein, 17 aa, Homo sapiens
  CDR3 for beta chain variable domain of TCR clone 17068 (TRBV20-1, TRBJ2-1)
CSASASGLAGSYNEQFF

SEQ ID NO: 34137 - protein, 16 aa, Homo sapiens
  CDR3 for alpha chain variable domain of TCR clone 17069 (TRAV30, TRAJ24)
CGTEIVDADSWGKFQF

SEQ ID NO: 34138 - protein, 12 aa, Homo sapiens
  CDR3 for beta chain variable domain of TCR clone 17069 (TRBV19, TRBJ1-5)
CASSIAQQPQHF

SEQ ID NO: 34139 - protein, 14 aa, Homo sapiens
  CDR3 for alpha chain variable domain of TCR clone 17070 (TRAV12-2, TRAJ17)
CAVLFKAAGNKLTF

SEQ ID NO: 34140 - protein, 17 aa, Homo sapiens
  CDR3 for beta chain variable domain of TCR clone 17070 (TRBV20-1, TRBJ2-2)
CGASGSGQGGLTGELFF

SEQ ID NO: 34141 - protein, 11 aa, Homo sapiens
  CDR3 for alpha chain variable domain of TCR clone 17071 (TRAV2, TRAJ13)
CASGGYQKVTF

SEQ ID NO: 34142 - protein, 16 aa, Homo sapiens
  CDR3 for beta chain variable domain of TCR clone 17071 (TRBV6-1, TRBJ2-5)
CASSETLGRGAETQYF

SEQ ID NO: 34143 - protein, 16 aa, Homo sapiens
  CDR3 for alpha chain variable domain of TCR clone 17072 (TRAV30, TRAJ24)
CGTEIVDADSWGKFQF

SEQ ID NO: 34144 - protein, 14 aa, Homo sapiens
  CDR3 for beta chain variable domain of TCR clone 17072 (TRBV12-5, TRBJ2-5)
CASGSRTHQESQYF

SEQ ID NO: 34145 - protein, 18 aa, Homo sapiens
  CDR3 for alpha chain variable domain of TCR clone 17073 (TRAV21, TRAJ52)
CAVRPSPAGGTSYGKLTF

SEQ ID NO: 34146 - protein, 14 aa, Homo sapiens
  CDR3 for beta chain variable domain of TCR clone 17073 (TRBV4-1, TRBJ2-2)
CASSQAMNTGELFF

SEQ ID NO: 34147 - protein, 16 aa, Homo sapiens
  CDR3 for alpha chain variable domain of TCR clone 17074 (TRAV12-1, TRAJ21)
CVVLSGYFGSGTKLNV

SEQ ID NO: 34148 - protein, 13 aa, Homo sapiens
  CDR3 for beta chain variable domain of TCR clone 17074 (TRBV20-1, TRBJ1-1)
CSARAGGNTEAFF

SEQ ID NO: 34149 - protein, 14 aa, Homo sapiens
  CDR3 for alpha chain variable domain of TCR clone 17075 (TRAV12-2, TRAJ13)
CAVKKTGGYQKVTF

SEQ ID NO: 34150 - protein, 15 aa, Homo sapiens
  CDR3 for beta chain variable domain of TCR clone 17075 (TRBV6-1, TRBJ2-3)
CASSERGGITDTQYF

SEQ ID NO: 34151 - protein, 13 aa, Homo sapiens
  CDR3 for alpha chain variable domain of TCR clone 17076 (TRAV8-3, TRAJ28)
CAVGTVGSYQLTF

SEQ ID NO: 34152 - protein, 15 aa, Homo sapiens
  CDR3 for beta chain variable domain of TCR clone 17076 (TRBV7-9, TRBJ1-5)
CASSQGHQPNQPQHF

SEQ ID NO: 34153 - protein, 15 aa, Homo sapiens
  CDR3 for alpha chain variable domain of TCR clone 17077 (TRAV8-3, TRAJ27)
CAVGPSKTNAGKSTF

SEQ ID NO: 34154 - protein, 15 aa, Homo sapiens
  CDR3 for beta chain variable domain of TCR clone 17077 (TRBV27, TRBJ2-1)
CASSNGGGPSNEQFF

SEQ ID NO: 34155 - protein, 15 aa, Homo sapiens
  CDR3 for alpha chain variable domain of TCR clone 17078 (TRAV2, TRAJ15)
CAVEDRGQAGTALLF

SEQ ID NO: 34156 - protein, 13 aa, Homo sapiens
  CDR3 for beta chain variable domain of TCR clone 17078 (TRBV10-2, TRBJ2-7)
CASGASGGYEQYF

SEQ ID NO: 34157 - protein, 13 aa, Homo sapiens
  CDR3 for alpha chain variable domain of TCR clone 17079 (TRAV1-1, TRAJ13)
CAVNSGGYRKVTF

SEQ ID NO: 34158 - protein, 12 aa, Homo sapiens
  CDR3 for beta chain variable domain of TCR clone 17079 (TRBV28, TRBJ2-1)
CASSVQINEQFF

SEQ ID NO: 34159 - protein, 10 aa, Homo sapiens
  CDR3 for alpha chain variable domain of TCR clone 17080 (TRAV38-2/DV8, TRAJ40)
CASGTYKYIF

SEQ ID NO: 34160 - protein, 14 aa, Homo sapiens
  CDR3 for beta chain variable domain of TCR clone 17080 (TRBV7-9, TRBJ2-1)
CASSPRDSLYEQFL

SEQ ID NO: 34161 - protein, 15 aa, Homo sapiens
  CDR3 for alpha chain variable domain of TCR clone 17081 (TRAV8-3, TRAJ45)
CASSYSGGGADGLTF

SEQ ID NO: 34162 - protein, 18 aa, Homo sapiens
  CDR3 for beta chain variable domain of TCR clone 17081 (TRBV18, TRBJ1-3)
CASSPRGGAGPSGNTMYF

SEQ ID NO: 34163 - protein, 13 aa, Homo sapiens
  CDR3 for alpha chain variable domain of TCR clone 17082 (TRAV13-2, TRAJ48)
CAEMDFGNEKLTF

SEQ ID NO: 34164 - protein, 15 aa, Homo sapiens
  CDR3 for beta chain variable domain of TCR clone 17082 (TRBV7-9, TRBJ1-6)
CASSSPGCGNSPLHF

SEQ ID NO: 34165 - protein, 15 aa, Homo sapiens
  CDR3 for alpha chain variable domain of TCR clone 17083 (TRAV3, TRAJ5)
CAVRDLDTGRRALTF

SEQ ID NO: 34166 - protein, 14 aa, Homo sapiens
  CDR3 for beta chain variable domain of TCR clone 17083 (TRBV25-1, TRBJ1-4)
CASSGGGRPEKLFF

SEQ ID NO: 34167 - protein, 12 aa, Homo sapiens
  CDR3 for alpha chain variable domain of TCR clone 17084 (TRAV8-3, TRAJ20)
CAVGANEYKLSF

SEQ ID NO: 34168 - protein, 16 aa, Homo sapiens
  CDR3 for beta chain variable domain of TCR clone 17084 (TRBV19, TRBJ2-2)
CASRSPGTGATGELFF

SEQ ID NO: 34169 - protein, 15 aa, Homo sapiens
  CDR3 for alpha chain variable domain of TCR clone 17085 (TRAV17, TRAJ23)
CATDAEDNQGGKLIF

SEQ ID NO: 34170 - protein, 12 aa, Homo sapiens
  CDR3 for beta chain variable domain of TCR clone 17085 (TRBV2, TRBJ2-1)
CAKREGYNEQLF

SEQ ID NO: 34171 - protein, 11 aa, Homo sapiens
  CDR3 for alpha chain variable domain of TCR clone 17086 (TRAV13-2, TRAJ26)
CAEIPGQNFVF

SEQ ID NO: 34172 - protein, 13 aa, Homo sapiens
  CDR3 for beta chain variable domain of TCR clone 17086 (TRBV7-6, TRBJ1-2)
CASSLVADYGYTF

SEQ ID NO: 34173 - protein, 13 aa, Homo sapiens
  CDR3 for alpha chain variable domain of TCR clone 17087 (TRAV13-2, TRAJ13)
CAERPGGYQKVTF

SEQ ID NO: 34174 - protein, 13 aa, Homo sapiens
  CDR3 for beta chain variable domain of TCR clone 17087 (TRBV7-9, TRBJ1-2)
CASSLKQNYGYTF

SEQ ID NO: 34175 - protein, 12 aa, Homo sapiens
  CDR3 for alpha chain variable domain of TCR clone 17088 (TRAV12-3, TRAJ17)
CAMTLTGNKLTF

SEQ ID NO: 34176 - protein, 15 aa, Homo sapiens
  CDR3 for beta chain variable domain of TCR clone 17088 (TRBV25-1, TRBJ1-4)
CASSPGDSTNEKLFF

SEQ ID NO: 34177 - protein, 13 aa, Homo sapiens
  CDR3 for alpha chain variable domain of TCR clone 17089 (TRAV1-2, TRAJ9)
CAALNTGGFKTIF

SEQ ID NO: 34178 - protein, 13 aa, Homo sapiens
  CDR3 for beta chain variable domain of TCR clone 17089 (TRBV19, TRBJ1-2)
CASSVPGQNGYTF

SEQ ID NO: 34179 - protein, 14 aa, Homo sapiens
  CDR3 for alpha chain variable domain of TCR clone 17090 (TRAV1-2, TRAJ16)
CAVNRFSDGQKLLF

SEQ ID NO: 34180 - protein, 15 aa, Homo sapiens
  CDR3 for beta chain variable domain of TCR clone 17090 (TRBV2, TRBJ2-7)
CASSEGLARSYEQYF

SEQ ID NO: 34181 - protein, 15 aa, Homo sapiens
  CDR3 for alpha chain variable domain of TCR clone 17091 (TRAV8-3, TRAJ40)
CAAPSLGSGTYRYIF

SEQ ID NO: 34182 - protein, 13 aa, Homo sapiens
  CDR3 for beta chain variable domain of TCR clone 17091 (TRBV10-3, TRBJ2-7)
CASKLAVNYEQYF

SEQ ID NO: 34183 - protein, 16 aa, Homo sapiens
  CDR3 for alpha chain variable domain of TCR clone 17092 (TRAV29/DV5, TRAJ39)
CAASLLFNNAGNMLTF

SEQ ID NO: 34184 - protein, 16 aa, Homo sapiens
  CDR3 for beta chain variable domain of TCR clone 17092 (TRBV19, TRBJ2-6)
CASSMSGLSGANILTF

SEQ ID NO: 34185 - protein, 14 aa, Homo sapiens
  CDR3 for alpha chain variable domain of TCR clone 17093 (TRAV13-1, TRAJ35)
CAASKGGFGNVLHC

SEQ ID NO: 34186 - protein, 17 aa, Homo sapiens
  CDR3 for beta chain variable domain of TCR clone 17093 (TRBV11-2, TRBJ2-1)
CASSLYPPGVEYNEQFF

SEQ ID NO: 34187 - protein, 14 aa, Homo sapiens
  CDR3 for alpha chain variable domain of TCR clone 17094 (TRAV17, TRAJ22)
CAASPSGSARQLTF

SEQ ID NO: 34188 - protein, 15 aa, Homo sapiens
  CDR3 for beta chain variable domain of TCR clone 17094 (TRBV4-1, TRBJ2-5)
CASSQWDLYQETQYF

SEQ ID NO: 34189 - protein, 15 aa, Homo sapiens
  CDR3 for alpha chain variable domain of TCR clone 17095 (TRAV27, TRAJ38)
CAARRNAGYNRKLIW

SEQ ID NO: 34190 - protein, 13 aa, Homo sapiens
  CDR3 for beta chain variable domain of TCR clone 17095 (TRBV12-5, TRBJ2-3)
CASGDRQSDTQYF

SEQ ID NO: 34191 - protein, 18 aa, Homo sapiens
  CDR3 for alpha chain variable domain of TCR clone 17096 (TRAV21, TRAJ52)
CAVRPSPAGGTNYGKLTF

SEQ ID NO: 34192 - protein, 17 aa, Homo sapiens
  CDR3 for beta chain variable domain of TCR clone 17096 (TRBV13, TRBJ2-3)
CASSLSRVAGGRNTQYF

SEQ ID NO: 34193 - protein, 14 aa, Homo sapiens
  CDR3 for alpha chain variable domain of TCR clone 17097 (TRAV12-2, TRAJ17)
CAVLFKAAGIKLTF

SEQ ID NO: 34194 - protein, 17 aa, Homo sapiens
  CDR3 for beta chain variable domain of TCR clone 17097 (TRBV20-1, TRBJ2-2)
CSASGSGQGGLTGELFF

SEQ ID NO: 34195 - protein, 14 aa, Homo sapiens
  CDR3 for alpha chain variable domain of TCR clone 17098 (TRAV38-1, TRAJ40)
CALRPTSGTYKYIF

SEQ ID NO: 34196 - protein, 14 aa, Homo sapiens
  CDR3 for beta chain variable domain of TCR clone 17098 (TRBV25-1, TRBJ1-1)
RASTHLGGNTEAFF

SEQ ID NO: 34197 - protein, 15 aa, Homo sapiens
  CDR3 for alpha chain variable domain of TCR clone 17099 (TRAV17, TRAJ57)
CATGPSQGGSAKLVF

SEQ ID NO: 34198 - protein, 14 aa, Homo sapiens
  CDR3 for beta chain variable domain of TCR clone 17099 (TRBV12-5, TRBJ2-5)
CASGSRTHQETQYF

SEQ ID NO: 34199 - protein, 14 aa, Homo sapiens
  CDR3 for alpha chain variable domain of TCR clone 17100 (TRAV13-2, TRAJ27)
CAENIEPGNTPLVF

SEQ ID NO: 34200 - protein, 14 aa, Homo sapiens
  CDR3 for beta chain variable domain of TCR clone 17100 (TRBV19, TRBJ2-2)
CATTGHANTGELFF

SEQ ID NO: 34201 - protein, 14 aa, Homo sapiens
  CDR3 for alpha chain variable domain of TCR clone 17101 (TRAV35, TRAJ22)
CAGLRPGSARQLTF

SEQ ID NO: 34202 - protein, 15 aa, Homo sapiens
  CDR3 for beta chain variable domain of TCR clone 17101 (TRBV12-4, TRBJ2-5)
CARSPPTGLQETQYF

SEQ ID NO: 34203 - protein, 10 aa, Homo sapiens
  CDR3 for alpha chain variable domain of TCR clone 17102 (TRAV19, TRAJ45)
PGGGADGLTF

SEQ ID NO: 34204 - protein, 15 aa, Homo sapiens
  CDR3 for beta chain variable domain of TCR clone 17102 (TRBV20-1, TRBJ2-7)
CSARDRVSGMDEQYF

SEQ ID NO: 34205 - protein, 14 aa, Homo sapiens
  CDR3 for alpha chain variable domain of TCR clone 17103 (TRAV12-1, TRAJ17)
CVVNYKAAGNKLTF

SEQ ID NO: 34206 - protein, 17 aa, Homo sapiens
  CDR3 for beta chain variable domain of TCR clone 17103 (TRBV20-1, TRBJ2-1)
CSASSSWLAGSYNEQFF

SEQ ID NO: 34207 - protein, 17 aa, Homo sapiens
  CDR3 for alpha chain variable domain of TCR clone 17104 (TRAV23/DV6, TRAJ57)
CAASSTLSQGGSEKLVF

SEQ ID NO: 34208 - protein, 14 aa, Homo sapiens
  CDR3 for beta chain variable domain of TCR clone 17104 (TRBV25-1, TRBJ1-1)
CAGTHLGGNTEAFF

SEQ ID NO: 34209 - protein, 13 aa, Homo sapiens
  CDR3 for alpha chain variable domain of TCR clone 17105 (TRAV30, TRAJ24)
CGTVTDSWGKLQL

SEQ ID NO: 34210 - protein, 14 aa, Homo sapiens
  CDR3 for beta chain variable domain of TCR clone 17105 (TRBV6-3, TRBJ2-2)
CASTYTPDTGELFF

SEQ ID NO: 34211 - protein, 12 aa, Homo sapiens
  CDR3 for alpha chain variable domain of TCR clone 17106 (TRAV8-3, TRAJ9)
CAVGAGGFKTIF

SEQ ID NO: 34212 - protein, 16 aa, Homo sapiens
  CDR3 for beta chain variable domain of TCR clone 17106 (TRBV13, TRBJ2-2)
CASSPRTGEHTGELFF

SEQ ID NO: 34213 - protein, 17 aa, Homo sapiens
  CDR3 for alpha chain variable domain of TCR clone 17107 (TRAV8-6, TRAJ58)
CAVSSWVGETSGSRLPF

SEQ ID NO: 34214 - protein, 14 aa, Homo sapiens
  CDR3 for beta chain variable domain of TCR clone 17107 (TRBV4-2, TRBJ2-1)
CASGLDRAYNEQFF

SEQ ID NO: 34215 - protein, 11 aa, Homo sapiens
  CDR3 for alpha chain variable domain of TCR clone 17108 (TRAV17, TRAJ36)
CAPTGANDLFF

SEQ ID NO: 34216 - protein, 13 aa, Homo sapiens
  CDR3 for beta chain variable domain of TCR clone 17108 (TRBV20-1, TRBJ1-1)
CSAPPGGHTEAFF

SEQ ID NO: 34217 - protein, 15 aa, Homo sapiens
  CDR3 for alpha chain variable domain of TCR clone 17109 (TRAV34, TRAJ38)
CGADFTPGNNRKRIW

SEQ ID NO: 34218 - protein, 16 aa, Homo sapiens
  CDR3 for beta chain variable domain of TCR clone 17109 (TRBV12-5, TRBJ2-5)
CASGPRTSGNQETQYF

SEQ ID NO: 34219 - protein, 12 aa, Homo sapiens
  CDR3 for alpha chain variable domain of TCR clone 17110 (TRAV29/DV5, TRAJ34)
CAASGNTDKLIF

SEQ ID NO: 34220 - protein, 20 aa, Homo sapiens
  CDR3 for beta chain variable domain of TCR clone 17110 (TRBV19, TRBJ2-7)
CASTQVAPESLRAVLRAGHQ

SEQ ID NO: 34221 - protein, 14 aa, Homo sapiens
  CDR3 for alpha chain variable domain of TCR clone 17111 (TRAV21, TRAJ35)
CAVMPIGFGNVLHC

SEQ ID NO: 34222 - protein, 13 aa, Homo sapiens
  CDR3 for beta chain variable domain of TCR clone 17111 (TRBV13, TRBJ2-5)
CASSPEVGETQYF

SEQ ID NO: 34223 - protein, 13 aa, Homo sapiens
  CDR3 for alpha chain variable domain of TCR clone 17112 (TRAV12-1, TRAJ26)
CVVRRNYGQNFVF

SEQ ID NO: 34224 - protein, 15 aa, Homo sapiens
  CDR3 for beta chain variable domain of TCR clone 17112 (TRBV28, TRBJ2-1)
CASSIIAGGRSEQLF

SEQ ID NO: 34225 - protein, 18 aa, Homo sapiens
  CDR3 for alpha chain variable domain of TCR clone 17113 (TRAV9-2, TRAJ52)
CALSRHNAGGTSYGKLTF

SEQ ID NO: 34226 - protein, 14 aa, Homo sapiens
  CDR3 for beta chain variable domain of TCR clone 17113 (TRBV16, TRBJ1-1)
CASSQAGPNTEAFF

SEQ ID NO: 34227 - protein, 15 aa, Homo sapiens
  CDR3 for alpha chain variable domain of TCR clone 17114 (TRAV27, TRAJ38)
CAARRNAGNNRKQIW

SEQ ID NO: 34228 - protein, 13 aa, Homo sapiens
  CDR3 for beta chain variable domain of TCR clone 17114 (TRBV12-5, TRBJ2-3)
CASGDRQSDTQYF

SEQ ID NO: 34229 - protein, 16 aa, Homo sapiens
  CDR3 for alpha chain variable domain of TCR clone 17115 (TRAV16, TRAJ52)
CSLSAAGGTSYGKLTF

SEQ ID NO: 34230 - protein, 12 aa, Homo sapiens
  CDR3 for beta chain variable domain of TCR clone 17115 (TRBV12-4, TRBJ1-3)
CASSFSGNTIYF

SEQ ID NO: 34231 - protein, 23 aa, Homo sapiens
  CDR3 for alpha chain variable domain of TCR clone 17116 (TRAV26-1, TRAJ38)
CIADNAGNNHIRNPDPAVYQLRD

SEQ ID NO: 34232 - protein, 13 aa, Homo sapiens
  CDR3 for beta chain variable domain of TCR clone 17116 (TRBV20-1, TRBJ1-1)
CSARGGGNTEAFF

SEQ ID NO: 34233 - protein, 17 aa, Homo sapiens
  CDR3 for alpha chain variable domain of TCR clone 17117 (TRAV8-6, TRAJ8)
CAVEEGIENTGFQKLVF

SEQ ID NO: 34234 - protein, 12 aa, Homo sapiens
  CDR3 for beta chain variable domain of TCR clone 17117 (TRBV19, TRBJ1-4)
CASKDWPGGLFF

SEQ ID NO: 34235 - protein, 17 aa, Homo sapiens
  CDR3 for alpha chain variable domain of TCR clone 17118 (TRAV3, TRAJ6)
CAVRDGPRAGGSYIPTF

SEQ ID NO: 34236 - protein, 16 aa, Homo sapiens
  CDR3 for beta chain variable domain of TCR clone 17118 (TRBV7-8, TRBJ2-4)
CASSAERTLAKNIQYF

SEQ ID NO: 34237 - protein, 14 aa, Homo sapiens
  CDR3 for alpha chain variable domain of TCR clone 17119 (TRAV9-2, TRAJ39)
CALYIYNAGNMLTF

SEQ ID NO: 34238 - protein, 15 aa, Homo sapiens
  CDR3 for beta chain variable domain of TCR clone 17119 (TRBV7-9, TRBJ1-5)
CASSQGHQPNQPQHF

SEQ ID NO: 34239 - protein, 14 aa, Homo sapiens
  CDR3 for alpha chain variable domain of TCR clone 17120 (TRAV9-2, TRAJ39)
CALYIYNAGNMLTF

SEQ ID NO: 34240 - protein, 13 aa, Homo sapiens
  CDR3 for beta chain variable domain of TCR clone 17120 (TRBV7-3, TRBJ2-1)
CASSLDSYNEQFF

SEQ ID NO: 34241 - protein, 12 aa, Homo sapiens
  CDR3 for alpha chain variable domain of TCR clone 17121 (TRAV13-1, TRAJ21)
CAAKEGFNKFYF

SEQ ID NO: 34242 - protein, 15 aa, Homo sapiens
  CDR3 for beta chain variable domain of TCR clone 17121 (TRBV2, TRBJ2-7)
CASSEGLARSYEQYF

SEQ ID NO: 34243 - protein, 18 aa, Homo sapiens
  CDR3 for alpha chain variable domain of TCR clone 17122 (TRAV21, TRAJ52)
CAVRPSPAGGTSYGKLTF

SEQ ID NO: 34244 - protein, 15 aa, Homo sapiens
  CDR3 for beta chain variable domain of TCR clone 17122 (TRBV28, TRBJ2-1)
CASSIIAGGRSEQFF

SEQ ID NO: 34245 - protein, 17 aa, Homo sapiens
  CDR3 for alpha chain variable domain of TCR clone 17123 (TRAV3, TRAJ38)
CAVRDCLNAGNNRKLIL

SEQ ID NO: 34246 - protein, 13 aa, Homo sapiens
  CDR3 for beta chain variable domain of TCR clone 17123 (TRBV23-1, TRBJ1-4)
CASRGKFNEKLFF

SEQ ID NO: 34247 - protein, 13 aa, Homo sapiens
  CDR3 for alpha chain variable domain of TCR clone 17124 (TRAV1-2, TRAJ9)
CAALNTGGFKTIF

SEQ ID NO: 34248 - protein, 13 aa, Homo sapiens
  CDR3 for beta chain variable domain of TCR clone 17124 (TRBV19, TRBJ1-2)
CANSVPGQDGYTF

SEQ ID NO: 34249 - protein, 14 aa, Homo sapiens
  CDR3 for alpha chain variable domain of TCR clone 17125 (TRAV12-2, TRAJ13)
CAVKKTGGYQKVTF

SEQ ID NO: 34250 - protein, 15 aa, Homo sapiens
  CDR3 for beta chain variable domain of TCR clone 17125 (TRBV27, TRBJ2-1)
CASSNGGESSNEQFF

SEQ ID NO: 34251 - protein, 17 aa, Homo sapiens
  CDR3 for alpha chain variable domain of TCR clone 17126 (TRAV13-1, TRAJ31)
CAPRDRLMFGDGTQMVV

SEQ ID NO: 34252 - protein, 12 aa, Homo sapiens
  CDR3 for beta chain variable domain of TCR clone 17126 (TRBV7-9, TRBJ2-7)
CASSLEGYEQYF

SEQ ID NO: 34253 - protein, 12 aa, Homo sapiens
  CDR3 for alpha chain variable domain of TCR clone 17127 (TRAV12-3, TRAJ17)
CAMTLTGNKVTF

SEQ ID NO: 34254 - protein, 15 aa, Homo sapiens
  CDR3 for beta chain variable domain of TCR clone 17127 (TRBV20-1, TRBJ2-7)
CSARDRVSGMDEQYF

SEQ ID NO: 34255 - protein, 14 aa, Homo sapiens
  CDR3 for alpha chain variable domain of TCR clone 17128 (TRAV2, TRAJ37)
CAVDFTSNTGKLIF

SEQ ID NO: 34256 - protein, 15 aa, Homo sapiens
  CDR3 for beta chain variable domain of TCR clone 17128 (TRBV20-1, TRBJ1-1)
CSASRGVTGNTESFF

SEQ ID NO: 34257 - protein, 13 aa, Homo sapiens
  CDR3 for alpha chain variable domain of TCR clone 17129 (TRAV2, TRAJ40)
CAVVTSGTYKYIF

SEQ ID NO: 34258 - protein, 14 aa, Homo sapiens
  CDR3 for beta chain variable domain of TCR clone 17129 (TRBV19, TRBJ2-1)
CASPTFVLSGEQFY

SEQ ID NO: 34259 - protein, 12 aa, Homo sapiens
  CDR3 for alpha chain variable domain of TCR clone 17130 (TRAV17, TRAJ58)
CGEETSGSRLTF

SEQ ID NO: 34260 - protein, 14 aa, Homo sapiens
  CDR3 for beta chain variable domain of TCR clone 17130 (TRBV2, TRBJ2-1)
CASSEQMRESEQFF

SEQ ID NO: 34261 - protein, 16 aa, Homo sapiens
  CDR3 for alpha chain variable domain of TCR clone 17131 (TRAV12-3, TRAJ53)
CAMSPGSGGSNYKQTF

SEQ ID NO: 34262 - protein, 11 aa, Homo sapiens
  CDR3 for beta chain variable domain of TCR clone 17131 (TRBV29-1, TRBJ2-5)
CSEDRTGTQYF

SEQ ID NO: 34263 - protein, 16 aa, Homo sapiens
  CDR3 for alpha chain variable domain of TCR clone 17132 (TRAV17, TRAJ28)
CATAPVSGAGSYQLTF

SEQ ID NO: 34264 - protein, 11 aa, Homo sapiens
  CDR3 for beta chain variable domain of TCR clone 17132 (TRBV7-9, TRBJ2-5)
CASSLGETQYF

SEQ ID NO: 34265 - protein, 15 aa, Homo sapiens
  CDR3 for alpha chain variable domain of TCR clone 17133 (TRAV23/DV6, TRAJ42)
CAARGYGGSQGNLIF

SEQ ID NO: 34266 - protein, 13 aa, Homo sapiens
  CDR3 for beta chain variable domain of TCR clone 17133 (TRBV7-2, TRBJ1-5)
CASSTQGSQPQHF

SEQ ID NO: 34267 - protein, 14 aa, Homo sapiens
  CDR3 for alpha chain variable domain of TCR clone 17134 (TRAV12-2, TRAJ40)
CAVKIPSGTYKYIF

SEQ ID NO: 34268 - protein, 14 aa, Homo sapiens
  CDR3 for beta chain variable domain of TCR clone 17134 (TRBV20-1, TRBJ1-1)
CSAQTRIGCTEAFF

SEQ ID NO: 34269 - protein, 15 aa, Homo sapiens
  CDR3 for alpha chain variable domain of TCR clone 17135 (TRAV25, TRAJ52)
CAGSPGGTSYGKLTF

SEQ ID NO: 34270 - protein, 17 aa, Homo sapiens
  CDR3 for beta chain variable domain of TCR clone 17135 (TRBV7-8, TRBJ2-6)
CASSAGTGGAGANVLTF

SEQ ID NO: 34271 - protein, 14 aa, Homo sapiens
  CDR3 for alpha chain variable domain of TCR clone 17136 (TRAV12-3, TRAJ10)
SHLPLTGGGDKLTF

SEQ ID NO: 34272 - protein, 14 aa, Homo sapiens
  CDR3 for beta chain variable domain of TCR clone 17136 (TRBV6-1, TRBJ1-3)
CASVQGGGGNTIYF

SEQ ID NO: 34273 - protein, 13 aa, Homo sapiens
  CDR3 for alpha chain variable domain of TCR clone 17137 (TRAV26-2, TRAJ43)
FILRAVNNNDMRF

SEQ ID NO: 34274 - protein, 15 aa, Homo sapiens
  CDR3 for beta chain variable domain of TCR clone 17137 (TRBV7-2, TRBJ2-1)
CASTHGTGIYNEQFF

SEQ ID NO: 34275 - protein, 14 aa, Homo sapiens
  CDR3 for alpha chain variable domain of TCR clone 17138 (TRAV26-1, TRAJ39)
CIVRGSRAGKMLTF

SEQ ID NO: 34276 - protein, 15 aa, Homo sapiens
  CDR3 for beta chain variable domain of TCR clone 17138 (TRBV7-9, TRBJ1-5)
CASSQGHQPNQPQHF

SEQ ID NO: 34277 - protein, 14 aa, Homo sapiens
  CDR3 for alpha chain variable domain of TCR clone 17139 (TRAV9-2, TRAJ39)
CALYIYNAGNMLTF

SEQ ID NO: 34278 - protein, 18 aa, Homo sapiens
  CDR3 for beta chain variable domain of TCR clone 17139 (TRBV11-2, TRBJ2-3)
CASSLGGASRGAPNTQYF

SEQ ID NO: 34279 - protein, 13 aa, Homo sapiens
  CDR3 for alpha chain variable domain of TCR clone 17140 (TRAV1-2, TRAJ9)
CAALNTGGFKTIF

SEQ ID NO: 34280 - protein, 17 aa, Homo sapiens
  CDR3 for beta chain variable domain of TCR clone 17140 (TRBV11-2, TRBJ2-1)
CASSLYPPGVEYNEQFF

SEQ ID NO: 34281 - protein, 11 aa, Homo sapiens
  CDR3 for alpha chain variable domain of TCR clone 17141 (TRAV2, TRAJ33)
CAVDRNYQLIW

SEQ ID NO: 34282 - protein, 14 aa, Homo sapiens
  CDR3 for beta chain variable domain of TCR clone 17141 (TRBV11-2, TRBJ2-3)
CASSRLARTDTQYF

SEQ ID NO: 34283 - protein, 14 aa, Homo sapiens
  CDR3 for alpha chain variable domain of TCR clone 17142 (TRAV13-1, TRAJ39)
CAASYNNAGNMLTF

SEQ ID NO: 34284 - protein, 17 aa, Homo sapiens
  CDR3 for beta chain variable domain of TCR clone 17142 (TRBV11-2, TRBJ2-7)
CASSLPGQRATSSTSGR

SEQ ID NO: 34285 - protein, 12 aa, Homo sapiens
  CDR3 for alpha chain variable domain of TCR clone 17143 (TRAV13-1, TRAJ21)
CAAKEGLNKFYF

SEQ ID NO: 34286 - protein, 14 aa, Homo sapiens
  CDR3 for beta chain variable domain of TCR clone 17143 (TRBV7-2, TRBJ2-7)
CASSPKTSFYEQYF

SEQ ID NO: 34287 - protein, 13 aa, Homo sapiens
  CDR3 for alpha chain variable domain of TCR clone 17144 (TRAV13-1, TRAJ5)
CAASDTGRRALTF

SEQ ID NO: 34288 - protein, 12 aa, Homo sapiens
  CDR3 for beta chain variable domain of TCR clone 17144 (TRBV28, TRBJ2-3)
CASSLYRDTQYL

SEQ ID NO: 34289 - protein, 14 aa, Homo sapiens
  CDR3 for alpha chain variable domain of TCR clone 17145 (TRAV38-1, TRAJ40)
CALHPTSGTYKYIF

SEQ ID NO: 34290 - protein, 14 aa, Homo sapiens
  CDR3 for beta chain variable domain of TCR clone 17145 (TRBV25-1, TRBJ1-1)
CASTHLGGNTEAFF

SEQ ID NO: 34291 - protein, 14 aa, Homo sapiens
  CDR3 for alpha chain variable domain of TCR clone 17146 (TRAV29/DV5, TRAJ45)
CRKGSGGGADGLTF

SEQ ID NO: 34292 - protein, 14 aa, Homo sapiens
  CDR3 for beta chain variable domain of TCR clone 17146 (TRBV10-3, TRBJ2-3)
CAISEKGLGDTQYF

SEQ ID NO: 34293 - protein, 14 aa, Homo sapiens
  CDR3 for alpha chain variable domain of TCR clone 17147 (TRAV8-3, TRAJ6)
CAVGASGGSYILTF

SEQ ID NO: 34294 - protein, 17 aa, Homo sapiens
  CDR3 for beta chain variable domain of TCR clone 17147 (TRBV18, TRBJ2-2)
CASSPSDPWQNTGELFF

SEQ ID NO: 34295 - protein, 17 aa, Homo sapiens
  CDR3 for alpha chain variable domain of TCR clone 17148 (TRAV8-6, TRAJ58)
CAVSSWVGETSGSRLTF

SEQ ID NO: 34296 - protein, 14 aa, Homo sapiens
  CDR3 for beta chain variable domain of TCR clone 17148 (TRBV4-2, TRBJ2-1)
RASGLDRAYNEQFF

SEQ ID NO: 34297 - protein, 11 aa, Homo sapiens
  CDR3 for alpha chain variable domain of TCR clone 17149 (TRAV12-1, TRAJ15)
CVVNAGTALIF

SEQ ID NO: 34298 - protein, 16 aa, Homo sapiens
  CDR3 for beta chain variable domain of TCR clone 17149 (TRBV28, TRBJ2-1)
CASSSRARDSYNEQFF

SEQ ID NO: 34299 - protein, 12 aa, Homo sapiens
  CDR3 for alpha chain variable domain of TCR clone 17150 (TRAV3, TRAJ20)
CAVRDPDYKLSF

SEQ ID NO: 34300 - protein, 15 aa, Homo sapiens
  CDR3 for beta chain variable domain of TCR clone 17150 (TRBV4-1, TRBJ2-7)
CASSQQGQGFDEQYF

SEQ ID NO: 34301 - protein, 15 aa, Homo sapiens
  CDR3 for alpha chain variable domain of TCR clone 17151 (TRAV9-2, TRAJ39)
CALSDRNNAGNMLTF

SEQ ID NO: 34302 - protein, 15 aa, Homo sapiens
  CDR3 for beta chain variable domain of TCR clone 17151 (TRBV10-3, TRBJ2-2)
CAISPGRTNTGELFY

SEQ ID NO: 34303 - protein, 13 aa, Homo sapiens
  CDR3 for alpha chain variable domain of TCR clone 17152 (TRAV38-1, TRAJ42)
CARGGGSQGNLIF

SEQ ID NO: 34304 - protein, 10 aa, Homo sapiens
  CDR3 for beta chain variable domain of TCR clone 17152 (TRBV2, TRBJ2-5)
CASSAATQYF

SEQ ID NO: 34305 - protein, 14 aa, Homo sapiens
  CDR3 for alpha chain variable domain of TCR clone 17153 (TRAV12-3, TRAJ10)
SHLPLTGGGNKLTF

SEQ ID NO: 34306 - protein, 13 aa, Homo sapiens
  CDR3 for beta chain variable domain of TCR clone 17153 (TRBV15, TRBJ1-6)
CATSGGLNSPLHF

SEQ ID NO: 34307 - protein, 14 aa, Homo sapiens
  CDR3 for alpha chain variable domain of TCR clone 17154 (TRAV12-2, TRAJ53)
CAGKGGGSNYKLTF

SEQ ID NO: 34308 - protein, 14 aa, Homo sapiens
  CDR3 for beta chain variable domain of TCR clone 17154 (TRBV7-7, TRBJ2-2)
CATRQDSDTGELFF

SEQ ID NO: 34309 - protein, 15 aa, Homo sapiens
  CDR3 for alpha chain variable domain of TCR clone 17155 (TRAV35, TRAJ20)
CAGQLVGSNDYKLSF

SEQ ID NO: 34310 - protein, 13 aa, Homo sapiens
  CDR3 for beta chain variable domain of TCR clone 17155 (TRBV19, TRBJ2-7)
CASRKTGTHEQYF

SEQ ID NO: 34311 - protein, 11 aa, Homo sapiens
  CDR3 for alpha chain variable domain of TCR clone 17156 (TRAV1-2, TRAJ20)
CAVANDYKLSF

SEQ ID NO: 34312 - protein, 14 aa, Homo sapiens
  CDR3 for beta chain variable domain of TCR clone 17156 (TRBV7-2, TRBJ2-7)
CASSPKTSFYEQYF

SEQ ID NO: 34313 - protein, 10 aa, Homo sapiens
  CDR3 for alpha chain variable domain of TCR clone 17157 (TRAV16, TRAJ22)
SAMYPRQLTF

SEQ ID NO: 34314 - protein, 15 aa, Homo sapiens
  CDR3 for beta chain variable domain of TCR clone 17157 (TRBV7-9, TRBJ1-6)
CASSSPGRGNSPLHF

SEQ ID NO: 34315 - protein, 11 aa, Homo sapiens
  CDR3 for alpha chain variable domain of TCR clone 17158 (TRAV3, TRAJ21)
CAVGNFNKFYF

SEQ ID NO: 34316 - protein, 16 aa, Homo sapiens
  CDR3 for beta chain variable domain of TCR clone 17158 (TRBV19, TRBJ2-1)
GASSKAGPSSYNEQFF

SEQ ID NO: 34317 - protein, 14 aa, Homo sapiens
  CDR3 for alpha chain variable domain of TCR clone 17159 (TRAV12-2, TRAJ13)
CAVKKTGGYQKVTF

SEQ ID NO: 34318 - protein, 17 aa, Homo sapiens
  CDR3 for beta chain variable domain of TCR clone 17159 (TRBV28, TRBJ2-5)
CASSRQGGLAGAETQYF

SEQ ID NO: 34319 - protein, 15 aa, Homo sapiens
  CDR3 for alpha chain variable domain of TCR clone 17160 (TRAV25, TRAJ53)
CPTSNSGGSNYKLTF

SEQ ID NO: 34320 - protein, 15 aa, Homo sapiens
  CDR3 for beta chain variable domain of TCR clone 17160 (TRBV20-1, TRBJ2-7)
CSARDRVSGMDEQYF

SEQ ID NO: 34321 - protein, 16 aa, Homo sapiens
  CDR3 for alpha chain variable domain of TCR clone 17161 (TRAV16, TRAJ52)
CALRGVGGTSYGKLTF

SEQ ID NO: 34322 - protein, 14 aa, Homo sapiens
  CDR3 for beta chain variable domain of TCR clone 17161 (TRBV19, TRBJ1-2)
CASSLQGQAYGYTF

SEQ ID NO: 34323 - protein, 13 aa, Homo sapiens
  CDR3 for alpha chain variable domain of TCR clone 17162 (TRAV13-1, TRAJ21)
CAASIYNFNKFYF

SEQ ID NO: 34324 - protein, 13 aa, Homo sapiens
  CDR3 for beta chain variable domain of TCR clone 17162 (TRBV27, TRBJ1-4)
CASSLMGDEELFF

SEQ ID NO: 34325 - protein, 14 aa, Homo sapiens
  CDR3 for alpha chain variable domain of TCR clone 17163 (TRAV12-3, TRAJ10)
SHLPLTGGGSKLTF

SEQ ID NO: 34326 - protein, 14 aa, Homo sapiens
  CDR3 for beta chain variable domain of TCR clone 17163 (TRBV6-1, TRBJ1-3)
CASVQGGGGNTIYF

SEQ ID NO: 34327 - protein, 16 aa, Homo sapiens
  CDR3 for alpha chain variable domain of TCR clone 17164 (TRAV30, TRAJ24)
CGTEIVDADSWGKFQV

SEQ ID NO: 34328 - protein, 12 aa, Homo sapiens
  CDR3 for beta chain variable domain of TCR clone 17164 (TRBV11-2, TRBJ2-2)
CASSLGGGELFF

SEQ ID NO: 34329 - protein, 14 aa, Homo sapiens
  CDR3 for alpha chain variable domain of TCR clone 17165 (TRAV1-2, TRAJ8)
CAVREDTGFQKLVF

SEQ ID NO: 34330 - protein, 15 aa, Homo sapiens
  CDR3 for beta chain variable domain of TCR clone 17165 (TRBV3-1, TRBJ2-5)
CASSANLGGPETQYF

SEQ ID NO: 34331 - protein, 14 aa, Homo sapiens
  CDR3 for alpha chain variable domain of TCR clone 17166 (TRAV8-3, TRAJ4)
CAVGVAGGYNKLIF

SEQ ID NO: 34332 - protein, 15 aa, Homo sapiens
  CDR3 for beta chain variable domain of TCR clone 17166 (TRBV6-5, TRBJ2-1)
CASSYDAGAGNEQFF

SEQ ID NO: 34333 - protein, 17 aa, Homo sapiens
  CDR3 for alpha chain variable domain of TCR clone 17167 (TRAV13-1, TRAJ31)
CAPRDRLMFGGGTQLVV

SEQ ID NO: 34334 - protein, 12 aa, Homo sapiens
  CDR3 for beta chain variable domain of TCR clone 17167 (TRBV7-9, TRBJ2-7)
CASSLEGYEQYF

SEQ ID NO: 34335 - protein, 14 aa, Homo sapiens
  CDR3 for alpha chain variable domain of TCR clone 17168 (TRAV12-2, TRAJ17)
CAVLFKAAGNKLTF

SEQ ID NO: 34336 - protein, 12 aa, Homo sapiens
  CDR3 for beta chain variable domain of TCR clone 17168 (TRBV12-4, TRBJ1-2)
CASSFIWLHLRF

SEQ ID NO: 34337 - protein, 22 aa, Homo sapiens
  CDR3 for alpha chain variable domain of TCR clone 17169 (TRAV13-1, TRAJ37)
CAARIGGLWQHRQTNLWARDNF

SEQ ID NO: 34338 - protein, 14 aa, Homo sapiens
  CDR3 for beta chain variable domain of TCR clone 17169 (TRBV27, TRBJ2-2)
CASSLGAATGELFF

SEQ ID NO: 34339 - protein, 17 aa, Homo sapiens
  CDR3 for alpha chain variable domain of TCR clone 17170 (TRAV3, TRAJ42)
CAVRDRDYGGSQGNLIF

SEQ ID NO: 34340 - protein, 15 aa, Homo sapiens
  CDR3 for beta chain variable domain of TCR clone 17170 (TRBV6-6, TRBJ2-7)
CASSYSYGGSCEQYF

SEQ ID NO: 34341 - protein, 13 aa, Homo sapiens
  CDR3 for alpha chain variable domain of TCR clone 17171 (TRAV8-3, TRAJ28)
CAVGAVGSYQLTS

SEQ ID NO: 34342 - protein, 15 aa, Homo sapiens
  CDR3 for beta chain variable domain of TCR clone 17171 (TRBV7-9, TRBJ1-5)
CASSQGHQPNQPQHF

SEQ ID NO: 34343 - protein, 14 aa, Homo sapiens
  CDR3 for alpha chain variable domain of TCR clone 17172 (TRAV20, TRAJ42)
CAVQAGGSQGNLLF

SEQ ID NO: 34344 - protein, 14 aa, Homo sapiens
  CDR3 for beta chain variable domain of TCR clone 17172 (TRBV28, TRBJ1-2)
CASRIQGANYGYTF

SEQ ID NO: 34345 - protein, 12 aa, Homo sapiens
  CDR3 for alpha chain variable domain of TCR clone 17173 (TRAV16, TRAJ10)
CSRTGGGNKLTF

SEQ ID NO: 34346 - protein, 14 aa, Homo sapiens
  CDR3 for beta chain variable domain of TCR clone 17173 (TRBV7-8, TRBJ1-2)
CASSPDSLSYGYTF

SEQ ID NO: 34347 - protein, 14 aa, Homo sapiens
  CDR3 for alpha chain variable domain of TCR clone 17174 (TRAV2, TRAJ37)
CAVDFTSNTGKLIF

SEQ ID NO: 34348 - protein, 15 aa, Homo sapiens
  CDR3 for beta chain variable domain of TCR clone 17174 (TRBV20-1, TRBJ1-1)
CSASRGVTGNTEAFV

SEQ ID NO: 34349 - protein, 13 aa, Homo sapiens
  CDR3 for alpha chain variable domain of TCR clone 17175 (TRAV13-1, TRAJ21)
CAASIYNFNKLYF

SEQ ID NO: 34350 - protein, 13 aa, Homo sapiens
  CDR3 for beta chain variable domain of TCR clone 17175 (TRBV27, TRBJ1-4)
CASSLMGDEKLFF

SEQ ID NO: 34351 - protein, 10 aa, Homo sapiens
  CDR3 for alpha chain variable domain of TCR clone 17176 (TRAV13-1, TRAJ7)
LIGGNNRLAF

SEQ ID NO: 34352 - protein, 16 aa, Homo sapiens
  CDR3 for beta chain variable domain of TCR clone 17176 (TRBV4-1, TRBJ1-2)
CASSQDAGRVLYGYTF

SEQ ID NO: 34353 - protein, 13 aa, Homo sapiens
  CDR3 for alpha chain variable domain of TCR clone 17177 (TRAV17, TRAJ9)
CATDYTGGFKAIF

SEQ ID NO: 34354 - protein, 14 aa, Homo sapiens
  CDR3 for beta chain variable domain of TCR clone 17177 (TRBV19, TRBJ2-5)
CASSMTGQQETQYF

SEQ ID NO: 34355 - protein, 15 aa, Homo sapiens
  CDR3 for alpha chain variable domain of TCR clone 17178 (TRAV38-1, TRAJ37)
CAFIHGSGNTGKLIL

SEQ ID NO: 34356 - protein, 12 aa, Homo sapiens
  CDR3 for beta chain variable domain of TCR clone 17178 (TRBV7-9, TRBJ2-7)
CASSFGSYEQYF

SEQ ID NO: 34357 - protein, 14 aa, Homo sapiens
  CDR3 for alpha chain variable domain of TCR clone 17179 (TRAV13-2, TRAJ9)
CAENLETGGFKTIF

SEQ ID NO: 34358 - protein, 16 aa, Homo sapiens
  CDR3 for beta chain variable domain of TCR clone 17179 (TRBV4-2, TRBJ2-3)
CASSQELAGDTDTQYF

SEQ ID NO: 34359 - protein, 21 aa, Homo sapiens
  CDR3 for alpha chain variable domain of TCR clone 17180 (TRAV1-1, TRAJ22)
CLLLLRCERSGSSGSARQLTF

SEQ ID NO: 34360 - protein, 12 aa, Homo sapiens
  CDR3 for beta chain variable domain of TCR clone 17180 (TRBV5-5, TRBJ2-5)
CASSYFGETQYF

SEQ ID NO: 34361 - protein, 14 aa, Homo sapiens
  CDR3 for alpha chain variable domain of TCR clone 17181 (TRAV12-2, TRAJ17)
CAVLFKAAGNKLTF

SEQ ID NO: 34362 - protein, 17 aa, Homo sapiens
  CDR3 for beta chain variable domain of TCR clone 17181 (TRBV20-1, TRBJ2-2)
FSASGSGQGGLTGELFF

SEQ ID NO: 34363 - protein, 13 aa, Homo sapiens
  CDR3 for alpha chain variable domain of TCR clone 17182 (TRAV21, TRAJ20)
CAVGLRVDYKLSF

SEQ ID NO: 34364 - protein, 15 aa, Homo sapiens
  CDR3 for beta chain variable domain of TCR clone 17182 (TRBV9, TRBJ1-6)
CASSVAGTGDSPLHF

SEQ ID NO: 34365 - protein, 23 aa, Homo sapiens
  CDR3 for alpha chain variable domain of TCR clone 17183 (TRAV26-1, TRAJ38)
CIADNAGNNHIQNPDPAVYQLRD

SEQ ID NO: 34366 - protein, 12 aa, Homo sapiens
  CDR3 for beta chain variable domain of TCR clone 17183 (TRBV11-3, TRBJ2-2)
CASSLGGGELFF

SEQ ID NO: 34367 - protein, 13 aa, Homo sapiens
  CDR3 for alpha chain variable domain of TCR clone 17184 (TRAV1-1, TRAJ9)
CAAKNAGGFKTIF

SEQ ID NO: 34368 - protein, 14 aa, Homo sapiens
  CDR3 for beta chain variable domain of TCR clone 17184 (TRBV20-1, TRBJ2-1)
CSAQIGGSANEQFF

SEQ ID NO: 34369 - protein, 16 aa, Homo sapiens
  CDR3 for alpha chain variable domain of TCR clone 17185 (TRAV26-1, TRAJ37)
CIVRGDGSGNTGKLIF

SEQ ID NO: 34370 - protein, 17 aa, Homo sapiens
  CDR3 for beta chain variable domain of TCR clone 17185 (TRBV4-1, TRBJ2-7)
CASSRAPLGVRGGEQYF

SEQ ID NO: 34371 - protein, 16 aa, Homo sapiens
  CDR3 for alpha chain variable domain of TCR clone 17186 (TRAV36/DV7, TRAJ41)
CAVDDLNSNSGYALNF

SEQ ID NO: 34372 - protein, 14 aa, Homo sapiens
  CDR3 for beta chain variable domain of TCR clone 17186 (TRBV6-3, TRBJ2-5)
CASSYSLREKTQYF

SEQ ID NO: 34373 - protein, 15 aa, Homo sapiens
  CDR3 for alpha chain variable domain of TCR clone 17187 (TRAV25, TRAJ53)
CPTSNSGGSNYKLTF

SEQ ID NO: 34374 - protein, 14 aa, Homo sapiens
  CDR3 for beta chain variable domain of TCR clone 17187 (TRBV11-3, TRBJ2-3)
CASSRLARTDTQYF

SEQ ID NO: 34375 - protein, 13 aa, Homo sapiens
  CDR3 for alpha chain variable domain of TCR clone 17188 (TRAV13-1, TRAJ39)
CSKYSNAGNMLTF

SEQ ID NO: 34376 - protein, 13 aa, Homo sapiens
  CDR3 for beta chain variable domain of TCR clone 17188 (TRBV11-3, TRBJ2-1)
CASSSRRVDEQFF

SEQ ID NO: 34377 - protein, 11 aa, Homo sapiens
  CDR3 for alpha chain variable domain of TCR clone 17189 (TRAV12-3, TRAJ43)
CAISVSNDMRF

SEQ ID NO: 34378 - protein, 13 aa, Homo sapiens
  CDR3 for beta chain variable domain of TCR clone 17189 (TRBV20-1, TRBJ1-1)
CSAPLGGGTEAFF

SEQ ID NO: 34379 - protein, 17 aa, Homo sapiens
  CDR3 for alpha chain variable domain of TCR clone 17190 (TRAV19, TRAJ28)
CALSEASSGAGSYQLTF

SEQ ID NO: 34380 - protein, 20 aa, Homo sapiens
  CDR3 for beta chain variable domain of TCR clone 17190 (TRBV28, TRBJ2-1)
CASTPIGRSPGLAGGNEQFF

SEQ ID NO: 34381 - protein, 14 aa, Homo sapiens
  CDR3 for alpha chain variable domain of TCR clone 17191 (TRAV12-2, TRAJ5)
CAVNRPTGRRALTF

SEQ ID NO: 34382 - protein, 12 aa, Homo sapiens
  CDR3 for beta chain variable domain of TCR clone 17191 (TRBV19, TRBJ1-5)
CASSIAQQPQHF

SEQ ID NO: 34383 - protein, 14 aa, Homo sapiens
  CDR3 for alpha chain variable domain of TCR clone 17192 (TRAV12-3, TRAJ10)
SHLPLTGGGNKLTF

SEQ ID NO: 34384 - protein, 16 aa, Homo sapiens
  CDR3 for beta chain variable domain of TCR clone 17192 (TRBV19, TRBJ2-2)
CASRSPGTGATGELFF

SEQ ID NO: 34385 - protein, 14 aa, Homo sapiens
  CDR3 for alpha chain variable domain of TCR clone 17193 (TRAV20, TRAJ42)
CAVQAGGSQGNLIF

SEQ ID NO: 34386 - protein, 14 aa, Homo sapiens
  CDR3 for beta chain variable domain of TCR clone 17193 (TRBV28, TRBJ1-2)
CASRIQGANYGYSF

SEQ ID NO: 34387 - protein, 14 aa, Homo sapiens
  CDR3 for alpha chain variable domain of TCR clone 17194 (TRAV35, TRAJ13)
CAGRSPGGYQKVTF

SEQ ID NO: 34388 - protein, 14 aa, Homo sapiens
  CDR3 for beta chain variable domain of TCR clone 17194 (TRBV19, TRBJ2-2)
CASSMVGLSGEPFF

SEQ ID NO: 34389 - protein, 14 aa, Homo sapiens
  CDR3 for alpha chain variable domain of TCR clone 17195 (TRAV1-2, TRAJ16)
CAVNRFSDGQKLLF

SEQ ID NO: 34390 - protein, 12 aa, Homo sapiens
  CDR3 for beta chain variable domain of TCR clone 17195 (TRBV7-9, TRBJ1-1)
CASSLVRGEAFF

SEQ ID NO: 34391 - protein, 14 aa, Homo sapiens
  CDR3 for alpha chain variable domain of TCR clone 17196 (TRAV13-1, TRAJ35)
GAASKGGFGNVLHC

SEQ ID NO: 34392 - protein, 13 aa, Homo sapiens
  CDR3 for beta chain variable domain of TCR clone 17196 (TRBV7-3, TRBJ1-1)
CASSQDWGAEAFF

SEQ ID NO: 34393 - protein, 12 aa, Homo sapiens
  CDR3 for alpha chain variable domain of TCR clone 17197 (TRAV17, TRAJ12)
CATLRSSYKLIF

SEQ ID NO: 34394 - protein, 16 aa, Homo sapiens
  CDR3 for beta chain variable domain of TCR clone 17197 (TRBV28, TRBJ2-7)
CASSLFFETGGPEQHF

SEQ ID NO: 34395 - protein, 14 aa, Homo sapiens
  CDR3 for alpha chain variable domain of TCR clone 17198 (TRAV35, TRAJ22)
CAGLRPGSARQLTF

SEQ ID NO: 34396 - protein, 15 aa, Homo sapiens
  CDR3 for beta chain variable domain of TCR clone 17198 (TRBV12-4, TRBJ2-5)
CASSTPTGLQETQYF

SEQ ID NO: 34397 - protein, 10 aa, Homo sapiens
  CDR3 for alpha chain variable domain of TCR clone 17199 (TRAV12-3, TRAJ49)
CAMNDDQFYF

SEQ ID NO: 34398 - protein, 13 aa, Homo sapiens
  CDR3 for beta chain variable domain of TCR clone 17199 (TRBV12-4, TRBJ1-1)
CASGPGTGFEAFF

SEQ ID NO: 34399 - protein, 13 aa, Homo sapiens
  CDR3 for alpha chain variable domain of TCR clone 17200 (TRAV8-2, TRAJ13)
YVVSDLRYQKVTF

SEQ ID NO: 34400 - protein, 14 aa, Homo sapiens
  CDR3 for beta chain variable domain of TCR clone 17200 (TRBV25-1, TRBJ1-1)
CASTHLGGNTEAFF

SEQ ID NO: 34401 - protein, 12 aa, Homo sapiens
  CDR3 for alpha chain variable domain of TCR clone 17201 (TRAV17, TRAJ39)
CATGAAGSMLTF

SEQ ID NO: 34402 - protein, 14 aa, Homo sapiens
  CDR3 for beta chain variable domain of TCR clone 17201 (TRBV7-9, TRBJ1-2)
CASSRQGANYGYTF

SEQ ID NO: 34403 - protein, 10 aa, Homo sapiens
  CDR3 for alpha chain variable domain of TCR clone 17202 (TRAV3, TRAJ23)
CAVSGGKLIF

SEQ ID NO: 34404 - protein, 17 aa, Homo sapiens
  CDR3 for beta chain variable domain of TCR clone 17202 (TRBV11-2, TRBJ2-1)
CASSLYPPGVEYNEQFF

SEQ ID NO: 34405 - protein, 10 aa, Homo sapiens
  CDR3 for alpha chain variable domain of TCR clone 17203 (TRAV13-1, TRAJ27)
CAPLARQINL

SEQ ID NO: 34406 - protein, 13 aa, Homo sapiens
  CDR3 for beta chain variable domain of TCR clone 17203 (TRBV28, TRBJ1-1)
YASSKQGWTEAFF

SEQ ID NO: 34407 - protein, 10 aa, Homo sapiens
  CDR3 for alpha chain variable domain of TCR clone 17204 (TRAV26-1, TRAJ40)
CIAGTYKYIF

SEQ ID NO: 34408 - protein, 15 aa, Homo sapiens
  CDR3 for beta chain variable domain of TCR clone 17204 (TRBV19, TRBJ2-1)
CASSSLGVPLDEQFF

SEQ ID NO: 34409 - protein, 13 aa, Homo sapiens
  CDR3 for alpha chain variable domain of TCR clone 17205 (TRAV3, TRAJ21)
CAVREPDFNRFYF

SEQ ID NO: 34410 - protein, 13 aa, Homo sapiens
  CDR3 for beta chain variable domain of TCR clone 17205 (TRBV9, TRBJ2-1)
CASSPSGGNEQFF

SEQ ID NO: 34411 - protein, 16 aa, Homo sapiens
  CDR3 for alpha chain variable domain of TCR clone 17206 (TRAV30, TRAJ24)
CGTEIVDADSWGKFQF

SEQ ID NO: 34412 - protein, 15 aa, Homo sapiens
  CDR3 for beta chain variable domain of TCR clone 17206 (TRBV20-1, TRBJ2-7)
CSARDRVAGMDEQYF

SEQ ID NO: 34413 - protein, 12 aa, Homo sapiens
  CDR3 for alpha chain variable domain of TCR clone 17207 (TRAV2, TRAJ10)
CASTGGGNKLTF

SEQ ID NO: 34414 - protein, 14 aa, Homo sapiens
  CDR3 for beta chain variable domain of TCR clone 17207 (TRBV7-2, TRBJ2-2)
CAGRGQGAAGELFF

SEQ ID NO: 34415 - protein, 16 aa, Homo sapiens
  CDR3 for alpha chain variable domain of TCR clone 17208 (TRAV4, TRAJ22)
CLVGDLYSGSARQLTF

SEQ ID NO: 34416 - protein, 16 aa, Homo sapiens
  CDR3 for beta chain variable domain of TCR clone 17208 (TRBV7-9, TRBJ2-1)
CASSDVAGGAYNEQFF

SEQ ID NO: 34417 - protein, 14 aa, Homo sapiens
  CDR3 for alpha chain variable domain of TCR clone 17209 (TRAV9-2, TRAJ39)
CALYIYNAGNMLTF

SEQ ID NO: 34418 - protein, 15 aa, Homo sapiens
  CDR3 for beta chain variable domain of TCR clone 17209 (TRBV2, TRBJ2-1)
CASSELAGSYNEQFF

SEQ ID NO: 34419 - protein, 14 aa, Homo sapiens
  CDR3 for alpha chain variable domain of TCR clone 17210 (TRAV35, TRAJ22)
CAGLRPGSARQLTF

SEQ ID NO: 34420 - protein, 15 aa, Homo sapiens
  CDR3 for beta chain variable domain of TCR clone 17210 (TRBV12-4, TRBJ2-5)
CASSPPTGLQETKYF

SEQ ID NO: 34421 - protein, 14 aa, Homo sapiens
  CDR3 for alpha chain variable domain of TCR clone 17211 (TRAV17, TRAJ12)
CATDEKDSSYKLIF

SEQ ID NO: 34422 - protein, 15 aa, Homo sapiens
  CDR3 for beta chain variable domain of TCR clone 17211 (TRBV28, TRBJ2-1)
CASSIIAGGRSEQFF

SEQ ID NO: 34423 - protein, 16 aa, Homo sapiens
  CDR3 for alpha chain variable domain of TCR clone 17212 (TRAV12-3, TRAJ53)
CAMSPGSGDSNYKLTF

SEQ ID NO: 34424 - protein, 11 aa, Homo sapiens
  CDR3 for beta chain variable domain of TCR clone 17212 (TRBV29-1, TRBJ2-5)
CSEDRTGTQYF

SEQ ID NO: 34425 - protein, 15 aa, Homo sapiens
  CDR3 for alpha chain variable domain of TCR clone 17213 (TRAV17, TRAJ22)
CATVAPSGSARQLTF

SEQ ID NO: 34426 - protein, 16 aa, Homo sapiens
  CDR3 for beta chain variable domain of TCR clone 17213 (TRBV7-2, TRBJ2-5)
CASSPGGARRGETQYF

SEQ ID NO: 34427 - protein, 15 aa, Homo sapiens
  CDR3 for alpha chain variable domain of TCR clone 17214 (TRAV23/DV6, TRAJ12)
CAAIDLGAMDSSYKL

SEQ ID NO: 34428 - protein, 14 aa, Homo sapiens
  CDR3 for beta chain variable domain of TCR clone 17214 (TRBV6-1, TRBJ1-3)
CASVQGGGGNTIYF

SEQ ID NO: 34429 - protein, 14 aa, Homo sapiens
  CDR3 for alpha chain variable domain of TCR clone 17215 (TRAV12-2, TRAJ13)
CAVKKTGGYQKVTF

SEQ ID NO: 34430 - protein, 15 aa, Homo sapiens
  CDR3 for beta chain variable domain of TCR clone 17215 (TRBV10-2, TRBJ2-6)
CASSEQGTGANVLTF

SEQ ID NO: 34431 - protein, 14 aa, Homo sapiens
  CDR3 for alpha chain variable domain of TCR clone 17216 (TRAV12-3, TRAJ10)
SHLPLTGGGNKLTF

SEQ ID NO: 34432 - protein, 13 aa, Homo sapiens
  CDR3 for beta chain variable domain of TCR clone 17216 (TRBV7-2, TRBJ2-2)
CASSLAVTGELFF

SEQ ID NO: 34433 - protein, 15 aa, Homo sapiens
  CDR3 for alpha chain variable domain of TCR clone 17217 (TRAV2, TRAJ22)
CAVPSRGGSARQLTF

SEQ ID NO: 34434 - protein, 11 aa, Homo sapiens
  CDR3 for beta chain variable domain of TCR clone 17217 (TRBV27, TRBJ2-3)
CASSLGGTQYF

SEQ ID NO: 34435 - protein, 13 aa, Homo sapiens
  CDR3 for alpha chain variable domain of TCR clone 17218 (TRAV17, TRAJ15)
CATDARAGTALIF

SEQ ID NO: 34436 - protein, 15 aa, Homo sapiens
  CDR3 for beta chain variable domain of TCR clone 17218 (TRBV20-1, TRBJ2-7)
CGARDRVSGMDEQYF

SEQ ID NO: 34437 - protein, 12 aa, Homo sapiens
  CDR3 for alpha chain variable domain of TCR clone 17219 (TRAV3, TRAJ43)
CAVRDPNNDMRF

SEQ ID NO: 34438 - protein, 15 aa, Homo sapiens
  CDR3 for beta chain variable domain of TCR clone 17219 (TRBV27, TRBJ1-5)
CASSLGTGFDQHQHF

SEQ ID NO: 34439 - protein, 15 aa, Homo sapiens
  CDR3 for alpha chain variable domain of TCR clone 17220 (TRAV21, TRAJ53)
CATLNSGGSNYKLTF

SEQ ID NO: 34440 - protein, 14 aa, Homo sapiens
  CDR3 for beta chain variable domain of TCR clone 17220 (TRBV25-1, TRBJ1-1)
CASTHLGGNTEAFF

SEQ ID NO: 34441 - protein, 15 aa, Homo sapiens
  CDR3 for alpha chain variable domain of TCR clone 17221 (TRAV8-4, TRAJ10)
CAVSDQMGGGNKLTF

SEQ ID NO: 34442 - protein, 13 aa, Homo sapiens
  CDR3 for beta chain variable domain of TCR clone 17221 (TRBV14, TRBJ2-7)
CASSQDRRYEQYF

SEQ ID NO: 34443 - protein, 14 aa, Homo sapiens
  CDR3 for alpha chain variable domain of TCR clone 17222 (TRAV35, TRAJ33)
CWPRGGDSNYQLIW

SEQ ID NO: 34444 - protein, 11 aa, Homo sapiens
  CDR3 for beta chain variable domain of TCR clone 17222 (TRBV10-3, TRBJ2-7)
CAISEGLEQYF

SEQ ID NO: 34445 - protein, 14 aa, Homo sapiens
  CDR3 for alpha chain variable domain of TCR clone 17223 (TRAV1-2, TRAJ8)
CAVREDTGFQKLVF

SEQ ID NO: 34446 - protein, 15 aa, Homo sapiens
  CDR3 for beta chain variable domain of TCR clone 17223 (TRBV6-3, TRBJ2-7)
CASSSPWTVFYEQYF

SEQ ID NO: 34447 - protein, 12 aa, Homo sapiens
  CDR3 for alpha chain variable domain of TCR clone 17224 (TRAV21, TRAJ13)
PGPSGGYQKITF

SEQ ID NO: 34448 - protein, 15 aa, Homo sapiens
  CDR3 for beta chain variable domain of TCR clone 17224 (TRBV7-9, TRBJ1-6)
CASSSPGRGNSPLHF

SEQ ID NO: 34449 - protein, 16 aa, Homo sapiens
  CDR3 for alpha chain variable domain of TCR clone 17225 (TRAV30, TRAJ24)
CGTEIVDADSWGKFQF

SEQ ID NO: 34450 - protein, 14 aa, Homo sapiens
  CDR3 for beta chain variable domain of TCR clone 17225 (TRBV12-5, TRBJ2-5)
CASGSRTHQATQYF

SEQ ID NO: 34451 - protein, 11 aa, Homo sapiens
  CDR3 for alpha chain variable domain of TCR clone 17226 (TRAV1-1, TRAJ23)
CAVRQGGKLIF

SEQ ID NO: 34452 - protein, 14 aa, Homo sapiens
  CDR3 for beta chain variable domain of TCR clone 17226 (TRBV6-1, TRBJ1-3)
CASVQGGGGNTIYF

SEQ ID NO: 34453 - protein, 12 aa, Homo sapiens
  CDR3 for alpha chain variable domain of TCR clone 17227 (TRAV17, TRAJ57)
CATDGGSEKLVF

SEQ ID NO: 34454 - protein, 13 aa, Homo sapiens
  CDR3 for beta chain variable domain of TCR clone 17227 (TRBV7-9, TRBJ2-7)
CASGFAGAYEQYF

SEQ ID NO: 34455 - protein, 14 aa, Homo sapiens
  CDR3 for alpha chain variable domain of TCR clone 17228 (TRAV12-2, TRAJ40)
CAVTIPSGTYKYIF

SEQ ID NO: 34456 - protein, 14 aa, Homo sapiens
  CDR3 for beta chain variable domain of TCR clone 17228 (TRBV20-1, TRBJ1-1)
CSAQTRIGGTEAFF

SEQ ID NO: 34457 - protein, 14 aa, Homo sapiens
  CDR3 for alpha chain variable domain of TCR clone 17229 (TRAV12-2, TRAJ11)
CAVNRGSGYSTLTF

SEQ ID NO: 34458 - protein, 10 aa, Homo sapiens
  CDR3 for beta chain variable domain of TCR clone 17229 (TRBV20-1, TRBJ2-5)
CSARFETQYF

SEQ ID NO: 34459 - protein, 13 aa, Homo sapiens
  CDR3 for alpha chain variable domain of TCR clone 17230 (TRAV20, TRAJ37)
CAGCSSNTGKLIF

SEQ ID NO: 34460 - protein, 17 aa, Homo sapiens
  CDR3 for beta chain variable domain of TCR clone 17230 (TRBV13, TRBJ2-3)
CASSLSRVAGGRNTQYF

SEQ ID NO: 34461 - protein, 16 aa, Homo sapiens
  CDR3 for alpha chain variable domain of TCR clone 17231 (TRAV23/DV6, TRAJ35)
CAASMRLRGFGNVLHC

SEQ ID NO: 34462 - protein, 15 aa, Homo sapiens
  CDR3 for beta chain variable domain of TCR clone 17231 (TRBV11-3, TRBJ2-3)
CASLKDGREGDTQYF

SEQ ID NO: 34463 - protein, 13 aa, Homo sapiens
  CDR3 for alpha chain variable domain of TCR clone 17232 (TRAV8-3, TRAJ28)
CAVGAVGSYQLPF

SEQ ID NO: 34464 - protein, 14 aa, Homo sapiens
  CDR3 for beta chain variable domain of TCR clone 17232 (TRBV7-2, TRBJ2-7)
CASRSQGAAYEQYF

SEQ ID NO: 34465 - protein, 13 aa, Homo sapiens
  CDR3 for alpha chain variable domain of TCR clone 17233 (TRAV13-1, TRAJ20)
CAARVSNDYKPSF

SEQ ID NO: 34466 - protein, 12 aa, Homo sapiens
  CDR3 for beta chain variable domain of TCR clone 17233 (TRBV20-1, TRBJ2-1)
CSARLGTDEQFF

SEQ ID NO: 34467 - protein, 14 aa, Homo sapiens
  CDR3 for alpha chain variable domain of TCR clone 17234 (TRAV1-2, TRAJ16)
CAVNRFSDGQKLLF

SEQ ID NO: 34468 - protein, 15 aa, Homo sapiens
  CDR3 for beta chain variable domain of TCR clone 17234 (TRBV6-1, TRBJ2-4)
CASSEAVWTINIQYF

SEQ ID NO: 34469 - protein, 11 aa, Homo sapiens
  CDR3 for alpha chain variable domain of TCR clone 17235 (TRAV1-1, TRAJ45)
YSGGGADGLTF

SEQ ID NO: 34470 - protein, 15 aa, Homo sapiens
  CDR3 for beta chain variable domain of TCR clone 17235 (TRBV19, TRBJ2-1)
CASSIGLAGWDEQFF

SEQ ID NO: 34471 - protein, 17 aa, Homo sapiens
  CDR3 for alpha chain variable domain of TCR clone 17236 (TRAV13-1, TRAJ28)
CAASPPYSGAGSYQLTF

SEQ ID NO: 34472 - protein, 12 aa, Homo sapiens
  CDR3 for beta chain variable domain of TCR clone 17236 (TRBV11-3, TRBJ2-2)
CASSLPTGELFF

SEQ ID NO: 34473 - protein, 11 aa, Homo sapiens
  CDR3 for alpha chain variable domain of TCR clone 17237 (TRAV1-2, TRAJ20)
CAVANDYKLSF

SEQ ID NO: 34474 - protein, 15 aa, Homo sapiens
  CDR3 for beta chain variable domain of TCR clone 17237 (TRBV6-5, TRBJ1-2)
CASSYSQAFNYGYTF

SEQ ID NO: 34475 - protein, 13 aa, Homo sapiens
  CDR3 for alpha chain variable domain of TCR clone 17238 (TRAV8-3, TRAJ28)
CAVGAVGSYQLAF

SEQ ID NO: 34476 - protein, 14 aa, Homo sapiens
  CDR3 for beta chain variable domain of TCR clone 17238 (TRBV7-2, TRBJ2-7)
CASRSQGAAYEQYF

SEQ ID NO: 34477 - protein, 15 aa, Homo sapiens
  CDR3 for alpha chain variable domain of TCR clone 17239 (TRAV27, TRAJ38)
CAARRNAGNNRKLIW

SEQ ID NO: 34478 - protein, 15 aa, Homo sapiens
  CDR3 for beta chain variable domain of TCR clone 17239 (TRBV20-1, TRBJ2-7)
CSARDRVSGMDEQYF

SEQ ID NO: 34479 - protein, 11 aa, Homo sapiens
  CDR3 for alpha chain variable domain of TCR clone 17240 (TRAV2, TRAJ21)
CAVFNFNKFYF

SEQ ID NO: 34480 - protein, 14 aa, Homo sapiens
  CDR3 for beta chain variable domain of TCR clone 17240 (TRBV15, TRBJ2-3)
CATRRGTSTDTQYF

SEQ ID NO: 34481 - protein, 14 aa, Homo sapiens
  CDR3 for alpha chain variable domain of TCR clone 17241 (TRAV35, TRAJ22)
CAGLRPGSARQLTL

SEQ ID NO: 34482 - protein, 13 aa, Homo sapiens
  CDR3 for beta chain variable domain of TCR clone 17241 (TRBV20-1, TRBJ1-1)
CSARGGGNTEAFF

SEQ ID NO: 34483 - protein, 15 aa, Homo sapiens
  CDR3 for alpha chain variable domain of TCR clone 17242 (TRAV27, TRAJ38)
CAARRNAGNNRKLIW

SEQ ID NO: 34484 - protein, 13 aa, Homo sapiens
  CDR3 for beta chain variable domain of TCR clone 17242 (TRBV12-5, TRBJ2-3)
CASGDRQPDTQYF

SEQ ID NO: 34485 - protein, 13 aa, Homo sapiens
  CDR3 for alpha chain variable domain of TCR clone 17243 (TRAV16, TRAJ28)
CALTGAGSYQLTF

SEQ ID NO: 34486 - protein, 16 aa, Homo sapiens
  CDR3 for beta chain variable domain of TCR clone 17243 (TRBV15, TRBJ2-7)
CATSRDGGIPSYEQYF

SEQ ID NO: 34487 - protein, 13 aa, Homo sapiens
  CDR3 for alpha chain variable domain of TCR clone 17244 (TRAV3, TRAJ20)
CAVRSLNDYKLSF

SEQ ID NO: 34488 - protein, 13 aa, Homo sapiens
  CDR3 for beta chain variable domain of TCR clone 17244 (TRBV6-1, TRBJ2-1)
CAGMDPTNNEQLF

SEQ ID NO: 34489 - protein, 15 aa, Homo sapiens
  CDR3 for alpha chain variable domain of TCR clone 17245 (TRAV26-1, TRAJ29)
CIVRVEGSGNTPLVF

SEQ ID NO: 34490 - protein, 14 aa, Homo sapiens
  CDR3 for beta chain variable domain of TCR clone 17245 (TRBV18, TRBJ2-5)
CAISPGVSQETQYF

SEQ ID NO: 34491 - protein, 16 aa, Homo sapiens
  CDR3 for alpha chain variable domain of TCR clone 17246 (TRAV1-2, TRAJ10)
CAVRGVLTGGGNKLTF

SEQ ID NO: 34492 - protein, 17 aa, Homo sapiens
  CDR3 for beta chain variable domain of TCR clone 17246 (TRBV13, TRBJ2-3)
CASSLSRVAGGRNTQYF

SEQ ID NO: 34493 - protein, 12 aa, Homo sapiens
  CDR3 for alpha chain variable domain of TCR clone 17247 (TRAV12-3, TRAJ17)
CAMTLTGNKLTF

SEQ ID NO: 34494 - protein, 15 aa, Homo sapiens
  CDR3 for beta chain variable domain of TCR clone 17247 (TRBV7-2, TRBJ2-1)
CASSSGLAGGNEQFF

SEQ ID NO: 34495 - protein, 14 aa, Homo sapiens
  CDR3 for alpha chain variable domain of TCR clone 17248 (TRAV29/DV5, TRAJ5)
CAASGDTGRRALTF

SEQ ID NO: 34496 - protein, 12 aa, Homo sapiens
  CDR3 for beta chain variable domain of TCR clone 17248 (TRBV29-1, TRBJ2-3)
CSVTGGADTQYF

SEQ ID NO: 34497 - protein, 12 aa, Homo sapiens
  CDR3 for alpha chain variable domain of TCR clone 17249 (TRAV8-3, TRAJ26)
CAGGNYGQNFVF

SEQ ID NO: 34498 - protein, 15 aa, Homo sapiens
  CDR3 for beta chain variable domain of TCR clone 17249 (TRBV9, TRBJ2-1)
CASSLAGSSYNEQFF

SEQ ID NO: 34499 - protein, 13 aa, Homo sapiens
  CDR3 for alpha chain variable domain of TCR clone 17250 (TRAV8-3, TRAJ36)
CAVGATGANNLFF

SEQ ID NO: 34500 - protein, 15 aa, Homo sapiens
  CDR3 for beta chain variable domain of TCR clone 17250 (TRBV7-2, TRBJ1-2)
CASSPRAGWNYGYIF

SEQ ID NO: 34501 - protein, 13 aa, Homo sapiens
  CDR3 for alpha chain variable domain of TCR clone 17251 (TRAV1-1, TRAJ9)
YAAKNTGGFKTIF

SEQ ID NO: 34502 - protein, 14 aa, Homo sapiens
  CDR3 for beta chain variable domain of TCR clone 17251 (TRBV20-1, TRBJ2-1)
CSAQIGGSANEQFF

SEQ ID NO: 34503 - protein, 14 aa, Homo sapiens
  CDR3 for alpha chain variable domain of TCR clone 17252 (TRAV19, TRAJ9)
CALSGDTGGFKTIF

SEQ ID NO: 34504 - protein, 13 aa, Homo sapiens
  CDR3 for beta chain variable domain of TCR clone 17252 (TRBV12-4, TRBJ2-1)
CASSFHSGSEQFF

SEQ ID NO: 34505 - protein, 13 aa, Homo sapiens
  CDR3 for alpha chain variable domain of TCR clone 17253 (TRAV8-3, TRAJ36)
CAVGATGANNLFF

SEQ ID NO: 34506 - protein, 15 aa, Homo sapiens
  CDR3 for beta chain variable domain of TCR clone 17253 (TRBV7-2, TRBJ1-2)
CTSSPRAGWNYGYTF

SEQ ID NO: 34507 - protein, 12 aa, Homo sapiens
  CDR3 for alpha chain variable domain of TCR clone 17254 (TRAV26-2, TRAJ21)
CILKGNFNKFYF

SEQ ID NO: 34508 - protein, 14 aa, Homo sapiens
  CDR3 for beta chain variable domain of TCR clone 17254 (TRBV7-9, TRBJ1-1)
CASTPLQSYTEALF

SEQ ID NO: 34509 - protein, 12 aa, Homo sapiens
  CDR3 for alpha chain variable domain of TCR clone 17255 (TRAV13-1, TRAJ21)
CAAKEGFNKFYF

SEQ ID NO: 34510 - protein, 14 aa, Homo sapiens
  CDR3 for beta chain variable domain of TCR clone 17255 (TRBV5-4, TRBJ1-1)
CASSLDSRRDEAFL

SEQ ID NO: 34511 - protein, 13 aa, Homo sapiens
  CDR3 for alpha chain variable domain of TCR clone 17256 (TRAV20, TRAJ37)
CAGCSSNTGTLIF

SEQ ID NO: 34512 - protein, 11 aa, Homo sapiens
  CDR3 for beta chain variable domain of TCR clone 17256 (TRBV12-4, TRBJ2-3)
CASTATDTQYF

SEQ ID NO: 34513 - protein, 14 aa, Homo sapiens
  CDR3 for alpha chain variable domain of TCR clone 17257 (TRAV26-1, TRAJ48)
CIIRTNFGNEKLTF

SEQ ID NO: 34514 - protein, 12 aa, Homo sapiens
  CDR3 for beta chain variable domain of TCR clone 17257 (TRBV20-1, TRBJ2-7)
CSASSGANEQYF

SEQ ID NO: 34515 - protein, 19 aa, Homo sapiens
  CDR3 for alpha chain variable domain of TCR clone 17258 (TRAV13-1, TRAJ52)
CAASPYQNAGGTSYGKLTF

SEQ ID NO: 34516 - protein, 15 aa, Homo sapiens
  CDR3 for beta chain variable domain of TCR clone 17258 (TRBV7-2, TRBJ2-1)
CASTHGTGIYNEQFF

SEQ ID NO: 34517 - protein, 13 aa, Homo sapiens
  CDR3 for alpha chain variable domain of TCR clone 17259 (TRAV3, TRAJ27)
CAARPLGAGKSTF

SEQ ID NO: 34518 - protein, 13 aa, Homo sapiens
  CDR3 for beta chain variable domain of TCR clone 17259 (TRBV7-9, TRBJ2-3)
CASSPGSTDTQYF

SEQ ID NO: 34519 - protein, 12 aa, Homo sapiens
  CDR3 for alpha chain variable domain of TCR clone 17260 (TRAV8-3, TRAJ26)
CAGDNYGQNFVF

SEQ ID NO: 34520 - protein, 15 aa, Homo sapiens
  CDR3 for beta chain variable domain of TCR clone 17260 (TRBV9, TRBJ1-6)
CASSVAGTGDSPLHF

SEQ ID NO: 34521 - protein, 15 aa, Homo sapiens
  CDR3 for alpha chain variable domain of TCR clone 17261 (TRAV20, TRAJ43)
CAVQAGKSSNNDIRF

SEQ ID NO: 34522 - protein, 14 aa, Homo sapiens
  CDR3 for beta chain variable domain of TCR clone 17261 (TRBV27, TRBJ2-1)
CASRHLGGGKEQFF

SEQ ID NO: 34523 - protein, 14 aa, Homo sapiens
  CDR3 for alpha chain variable domain of TCR clone 17262 (TRAV1-2, TRAJ16)
CAVNRFSDGQKLLF

SEQ ID NO: 34524 - protein, 15 aa, Homo sapiens
  CDR3 for beta chain variable domain of TCR clone 17262 (TRBV9, TRBJ1-6)
CASSVSGTGDSPLHF

SEQ ID NO: 34525 - protein, 15 aa, Homo sapiens
  CDR3 for alpha chain variable domain of TCR clone 17263 (TRAV23/DV6, TRAJ18)
CAARYRGSTMGRLYF

SEQ ID NO: 34526 - protein, 13 aa, Homo sapiens
  CDR3 for beta chain variable domain of TCR clone 17263 (TRBV7-2, TRBJ2-7)
CASSSPSGSEQYF

SEQ ID NO: 34527 - protein, 13 aa, Homo sapiens
  CDR3 for alpha chain variable domain of TCR clone 17264 (TRAV2, TRAJ40)
CAVVTSGTYKYIF

SEQ ID NO: 34528 - protein, 14 aa, Homo sapiens
  CDR3 for beta chain variable domain of TCR clone 17264 (TRBV6-1, TRBJ1-3)
CASVQGGGGNTIYF

SEQ ID NO: 34529 - protein, 13 aa, Homo sapiens
  CDR3 for alpha chain variable domain of TCR clone 17265 (TRAV27, TRAJ45)
CRSSGGGADGLTF

SEQ ID NO: 34530 - protein, 12 aa, Homo sapiens
  CDR3 for beta chain variable domain of TCR clone 17265 (TRBV11-2, TRBJ2-2)
CASSLGGGELFF

SEQ ID NO: 34531 - protein, 13 aa, Homo sapiens
  CDR3 for alpha chain variable domain of TCR clone 17266 (TRAV13-1, TRAJ5)
CAASDMGRRALTF

SEQ ID NO: 34532 - protein, 12 aa, Homo sapiens
  CDR3 for beta chain variable domain of TCR clone 17266 (TRBV28, TRBJ2-3)
CASSLYRDTQYF

SEQ ID NO: 34533 - protein, 17 aa, Homo sapiens
  CDR3 for alpha chain variable domain of TCR clone 17267 (TRAV3, TRAJ6)
CAVRDGPRAGGSYIPKF

SEQ ID NO: 34534 - protein, 20 aa, Homo sapiens
  CDR3 for beta chain variable domain of TCR clone 17267 (TRBV28, TRBJ2-1)
CASTPIGRSPGLAGGNEQFF

SEQ ID NO: 34535 - protein, 14 aa, Homo sapiens
  CDR3 for alpha chain variable domain of TCR clone 17268 (TRAV2, TRAJ9)
CAVEDRSGGFKTIF

SEQ ID NO: 34536 - protein, 12 aa, Homo sapiens
  CDR3 for beta chain variable domain of TCR clone 17268 (TRBV7-3, TRBJ2-5)
CQQLPGGETQYF

SEQ ID NO: 34537 - protein, 12 aa, Homo sapiens
  CDR3 for alpha chain variable domain of TCR clone 17269 (TRAV12-3, TRAJ17)
CAMTLTGNKLTF

SEQ ID NO: 34538 - protein, 18 aa, Homo sapiens
  CDR3 for beta chain variable domain of TCR clone 17269 (TRBV7-9, TRBJ2-7)
CASSLTTSGSRTWYEQYF

SEQ ID NO: 34539 - protein, 15 aa, Homo sapiens
  CDR3 for alpha chain variable domain of TCR clone 17270 (TRAV27, TRAJ38)
CAARRNTGNNRKLIW

SEQ ID NO: 34540 - protein, 13 aa, Homo sapiens
  CDR3 for beta chain variable domain of TCR clone 17270 (TRBV20-1, TRBJ1-1)
CSARAGGNTEAFF

SEQ ID NO: 34541 - protein, 18 aa, Homo sapiens
  CDR3 for alpha chain variable domain of TCR clone 17271 (TRAV12-3, TRAJ52)
CAMSVGGAGGTSYGKLTF

SEQ ID NO: 34542 - protein, 16 aa, Homo sapiens
  CDR3 for beta chain variable domain of TCR clone 17271 (TRBV7-9, TRBJ1-2)
CASNISLDRGGYGYTF

SEQ ID NO: 34543 - protein, 13 aa, Homo sapiens
  CDR3 for alpha chain variable domain of TCR clone 17272 (TRAV2, TRAJ40)
CAVVTSGTYKYIF

SEQ ID NO: 34544 - protein, 15 aa, Homo sapiens
  CDR3 for beta chain variable domain of TCR clone 17272 (TRBV11-3, TRBJ2-3)
CASLKDGREGYTQYF

SEQ ID NO: 34545 - protein, 15 aa, Homo sapiens
  CDR3 for alpha chain variable domain of TCR clone 17273 (TRAV23/DV6, TRAJ15)
CAALPAGRNCSDLWE

SEQ ID NO: 34546 - protein, 14 aa, Homo sapiens
  CDR3 for beta chain variable domain of TCR clone 17273 (TRBV7-9, TRBJ1-2)
CASSRQGANYGYTF

SEQ ID NO: 34547 - protein, 12 aa, Homo sapiens
  CDR3 for alpha chain variable domain of TCR clone 17274 (TRAV1-1, TRAJ8)
CAGGTGFQKLVF

SEQ ID NO: 34548 - protein, 15 aa, Homo sapiens
  CDR3 for beta chain variable domain of TCR clone 17274 (TRBV7-9, TRBJ1-4)
CASSRTGGLNEKLFF

SEQ ID NO: 34549 - protein, 16 aa, Homo sapiens
  CDR3 for alpha chain variable domain of TCR clone 17275 (TRAV30, TRAJ24)
CGTEIVDADSWGKFQF

SEQ ID NO: 34550 - protein, 16 aa, Homo sapiens
  CDR3 for beta chain variable domain of TCR clone 17275 (TRBV24-1, TRBJ2-3)
CATSDPGTGATDTQYF

SEQ ID NO: 34551 - protein, 14 aa, Homo sapiens
  CDR3 for alpha chain variable domain of TCR clone 17276 (TRAV34, TRAJ18)
CGPDRGSTLGRLYF

SEQ ID NO: 34552 - protein, 14 aa, Homo sapiens
  CDR3 for beta chain variable domain of TCR clone 17276 (TRBV7-2, TRBJ2-7)
CASSPKTSFYEQYF

SEQ ID NO: 34553 - protein, 15 aa, Homo sapiens
  CDR3 for alpha chain variable domain of TCR clone 17277 (TRAV9-2, TRAJ23)
CALSDLYNQGGKLIF

SEQ ID NO: 34554 - protein, 14 aa, Homo sapiens
  CDR3 for beta chain variable domain of TCR clone 17277 (TRBV7-9, TRBJ2-3)
CASSLEDGTDTQYF

SEQ ID NO: 34555 - protein, 18 aa, Homo sapiens
  CDR3 for alpha chain variable domain of TCR clone 17278 (TRAV21, TRAJ52)
CAVGPSPAGGTSYGKLTF

SEQ ID NO: 34556 - protein, 12 aa, Homo sapiens
  CDR3 for beta chain variable domain of TCR clone 17278 (TRBV11-2, TRBJ2-2)
CASSLGGGELFF

SEQ ID NO: 34557 - protein, 14 aa, Homo sapiens
  CDR3 for alpha chain variable domain of TCR clone 17279 (TRAV38-1, TRAJ45)
CAYYSGGGADVLTF

SEQ ID NO: 34558 - protein, 20 aa, Homo sapiens
  CDR3 for beta chain variable domain of TCR clone 17279 (TRBV28, TRBJ2-1)
CASTPIGRSPGLAGGNEQFF

SEQ ID NO: 34559 - protein, 15 aa, Homo sapiens
  CDR3 for alpha chain variable domain of TCR clone 17280 (TRAV38-1, TRAJ37)
CAFTFGSGNTGKLIF

SEQ ID NO: 34560 - protein, 12 aa, Homo sapiens
  CDR3 for beta chain variable domain of TCR clone 17280 (TRBV7-9, TRBJ2-7)
CASSLEGYEQYF

SEQ ID NO: 34561 - protein, 18 aa, Homo sapiens
  CDR3 for alpha chain variable domain of TCR clone 17281 (TRAV21, TRAJ52)
CAVRPSPAGGTSYGKLTF

SEQ ID NO: 34562 - protein, 15 aa, Homo sapiens
  CDR3 for beta chain variable domain of TCR clone 17281 (TRBV4-1, TRBJ1-4)
CASSDTGGTNEKLFF

SEQ ID NO: 34563 - protein, 17 aa, Homo sapiens
  CDR3 for alpha chain variable domain of TCR clone 17282 (TRAV3, TRAJ6)
CAVRDGPRAGGSYIPTF

SEQ ID NO: 34564 - protein, 14 aa, Homo sapiens
  CDR3 for beta chain variable domain of TCR clone 17282 (TRBV7-2, TRBJ2-7)
CACSPKTSFYEQYF

SEQ ID NO: 34565 - protein, 14 aa, Homo sapiens
  CDR3 for alpha chain variable domain of TCR clone 17283 (TRAV2, TRAJ21)
CAVEDLNNSNKFYF

SEQ ID NO: 34566 - protein, 11 aa, Homo sapiens
  CDR3 for beta chain variable domain of TCR clone 17283 (TRBV10-3, TRBJ2-1)
CAISDRGLQFF

SEQ ID NO: 34567 - protein, 14 aa, Homo sapiens
  CDR3 for alpha chain variable domain of TCR clone 17284 (TRAV1-2, TRAJ16)
CAVNRFSDGQKLLF

SEQ ID NO: 34568 - protein, 13 aa, Homo sapiens
  CDR3 for beta chain variable domain of TCR clone 17284 (TRBV4-1, TRBJ2-1)
CASSQAGGDGQFF

SEQ ID NO: 34569 - protein, 11 aa, Homo sapiens
  CDR3 for alpha chain variable domain of TCR clone 17285 (TRAV3, TRAJ20)
CAVRPSVTTTS

SEQ ID NO: 34570 - protein, 15 aa, Homo sapiens
  CDR3 for beta chain variable domain of TCR clone 17285 (TRBV6-5, TRBJ2-1)
CASSYDAGAGNEQFF

SEQ ID NO: 34571 - protein, 15 aa, Homo sapiens
  CDR3 for alpha chain variable domain of TCR clone 17286 (TRAV12-1, TRAJ15)
CVVARANQAGTALIF

SEQ ID NO: 34572 - protein, 14 aa, Homo sapiens
  CDR3 for beta chain variable domain of TCR clone 17286 (TRBV5-1, TRBJ1-1)
CASSLVSINTEAFF

SEQ ID NO: 34573 - protein, 12 aa, Homo sapiens
  CDR3 for alpha chain variable domain of TCR clone 17287 (TRAV2, TRAJ9)
CAVGAGGFKTIF

SEQ ID NO: 34574 - protein, 14 aa, Homo sapiens
  CDR3 for beta chain variable domain of TCR clone 17287 (TRBV6-1, TRBJ1-3)
CASVQGGGGNTMYF

SEQ ID NO: 34575 - protein, 14 aa, Homo sapiens
  CDR3 for alpha chain variable domain of TCR clone 17288 (TRAV35, TRAJ22)
CAGLRPGYARQLTF

SEQ ID NO: 34576 - protein, 15 aa, Homo sapiens
  CDR3 for beta chain variable domain of TCR clone 17288 (TRBV12-4, TRBJ2-5)
CASSPPTGLQETQYF

SEQ ID NO: 34577 - protein, 15 aa, Homo sapiens
  CDR3 for alpha chain variable domain of TCR clone 17289 (TRAV12-1, TRAJ44)
CVVFVNAGTASKLTF

SEQ ID NO: 34578 - protein, 17 aa, Homo sapiens
  CDR3 for beta chain variable domain of TCR clone 17289 (TRBV7-8, TRBJ2-6)
CASSAGTGGAGANVLTF

SEQ ID NO: 34579 - protein, 11 aa, Homo sapiens
  CDR3 for alpha chain variable domain of TCR clone 17290 (TRAV2, TRAJ21)
CAVLNFNKFYF

SEQ ID NO: 34580 - protein, 14 aa, Homo sapiens
  CDR3 for beta chain variable domain of TCR clone 17290 (TRBV15, TRBJ2-3)
CATRSGTSTDTQYF

SEQ ID NO: 34581 - protein, 12 aa, Homo sapiens
  CDR3 for alpha chain variable domain of TCR clone 17291 (TRAV27, TRAJ47)
CAGEVRGNKLVF

SEQ ID NO: 34582 - protein, 15 aa, Homo sapiens
  CDR3 for beta chain variable domain of TCR clone 17291 (TRBV5-7, TRBJ1-6)
CASSWELGPNSPLHF

SEQ ID NO: 34583 - protein, 13 aa, Homo sapiens
  CDR3 for alpha chain variable domain of TCR clone 17292 (TRAV17, TRAJ9)
CATGYTGGFKTIF

SEQ ID NO: 34584 - protein, 14 aa, Homo sapiens
  CDR3 for beta chain variable domain of TCR clone 17292 (TRBV19, TRBJ2-5)
CASSMTGQQETQYF

SEQ ID NO: 34585 - protein, 15 aa, Homo sapiens
  CDR3 for alpha chain variable domain of TCR clone 17293 (TRAV26-1, TRAJ15)
CIVRAASQAGTALIF

SEQ ID NO: 34586 - protein, 15 aa, Homo sapiens
  CDR3 for beta chain variable domain of TCR clone 17293 (TRBV20-1, TRBJ1-1)
CSARSAATSNTEAFF

SEQ ID NO: 34587 - protein, 17 aa, Homo sapiens
  CDR3 for alpha chain variable domain of TCR clone 17294 (TRAV3, TRAJ6)
CAVSRRTDTGGSYIPTF

SEQ ID NO: 34588 - protein, 18 aa, Homo sapiens
  CDR3 for beta chain variable domain of TCR clone 17294 (TRBV7-2, TRBJ2-3)
CASSLEASRGRKADTQYF

SEQ ID NO: 34589 - protein, 11 aa, Homo sapiens
  CDR3 for alpha chain variable domain of TCR clone 17295 (TRAV17, TRAJ9)
CGFTVGFKTIF

SEQ ID NO: 34590 - protein, 14 aa, Homo sapiens
  CDR3 for beta chain variable domain of TCR clone 17295 (TRBV7-9, TRBJ2-2)
CASSLVQDTGELFF

SEQ ID NO: 34591 - protein, 11 aa, Homo sapiens
  CDR3 for alpha chain variable domain of TCR clone 17296 (TRAV21, TRAJ11)
CAVNGYSTLTF

SEQ ID NO: 34592 - protein, 11 aa, Homo sapiens
  CDR3 for beta chain variable domain of TCR clone 17296 (TRBV19, TRBJ1-1)
RASSIGSEAFF

SEQ ID NO: 34593 - protein, 14 aa, Homo sapiens
  CDR3 for alpha chain variable domain of TCR clone 17297 (TRAV29/DV5, TRAJ36)
CAARRNTGANNLFF

SEQ ID NO: 34594 - protein, 14 aa, Homo sapiens
  CDR3 for beta chain variable domain of TCR clone 17297 (TRBV12-5, TRBJ2-5)
CASGSRTHQETQYF

SEQ ID NO: 34595 - protein, 14 aa, Homo sapiens
  CDR3 for alpha chain variable domain of TCR clone 17298 (TRAV1-2, TRAJ16)
CAVNRFSDGQKLLF

SEQ ID NO: 34596 - protein, 15 aa, Homo sapiens
  CDR3 for beta chain variable domain of TCR clone 17298 (TRBV11-3, TRBJ2-7)
CASSPGPASSYEQYF

SEQ ID NO: 34597 - protein, 14 aa, Homo sapiens
  CDR3 for alpha chain variable domain of TCR clone 17299 (TRAV1-2, TRAJ16)
CAVNRFSDGQKLLF

SEQ ID NO: 34598 - protein, 15 aa, Homo sapiens
  CDR3 for beta chain variable domain of TCR clone 17299 (TRBV9, TRBJ1-6)
CASSVAGTGDSPIHF

SEQ ID NO: 34599 - protein, 14 aa, Homo sapiens
  CDR3 for alpha chain variable domain of TCR clone 17300 (TRAV21, TRAJ35)
CAVMPIGFGNVRHC

SEQ ID NO: 34600 - protein, 12 aa, Homo sapiens
  CDR3 for beta chain variable domain of TCR clone 17300 (TRBV7-9, TRBJ2-7)
CASSIKREEQYF

SEQ ID NO: 34601 - protein, 13 aa, Homo sapiens
  CDR3 for alpha chain variable domain of TCR clone 17301 (TRAV8-3, TRAJ6)
CAARRGGSYIPTF

SEQ ID NO: 34602 - protein, 14 aa, Homo sapiens
  CDR3 for beta chain variable domain of TCR clone 17301 (TRBV4-1, TRBJ2-3)
RQQQPSGGRDTQYF

SEQ ID NO: 34603 - protein, 21 aa, Homo sapiens
  CDR3 for alpha chain variable domain of TCR clone 17302 (TRAV3, TRAJ17)
CAVRARRGGRSCRQQANFWRR

SEQ ID NO: 34604 - protein, 14 aa, Homo sapiens
  CDR3 for beta chain variable domain of TCR clone 17302 (TRBV4-1, TRBJ2-2)
CASSQAVNTGELFF

SEQ ID NO: 34605 - protein, 16 aa, Homo sapiens
  CDR3 for alpha chain variable domain of TCR clone 17303 (TRAV1-2, TRAJ10)
CAVRGVLTGGGNKLTF

SEQ ID NO: 34606 - protein, 12 aa, Homo sapiens
  CDR3 for beta chain variable domain of TCR clone 17303 (TRBV11-2, TRBJ2-2)
CASSLGGGELFF

SEQ ID NO: 34607 - protein, 13 aa, Homo sapiens
  CDR3 for alpha chain variable domain of TCR clone 17304 (TRAV2, TRAJ15)
CAVASQAGTALIF

SEQ ID NO: 34608 - protein, 20 aa, Homo sapiens
  CDR3 for beta chain variable domain of TCR clone 17304 (TRBV7-8, TRBJ2-2)
CASSHLFPGPTIHITGELFF

SEQ ID NO: 34609 - protein, 14 aa, Homo sapiens
  CDR3 for alpha chain variable domain of TCR clone 17305 (TRAV12-3, TRAJ10)
SHLPLTGGGNKLTF

SEQ ID NO: 34610 - protein, 17 aa, Homo sapiens
  CDR3 for beta chain variable domain of TCR clone 17305 (TRBV25-1, TRBJ2-5)
CASSRRGGRGGQETQYF

SEQ ID NO: 34611 - protein, 15 aa, Homo sapiens
  CDR3 for alpha chain variable domain of TCR clone 17306 (TRAV12-3, TRAJ27)
CAMGAYNTNAGKSTF

SEQ ID NO: 34612 - protein, 13 aa, Homo sapiens
  CDR3 for beta chain variable domain of TCR clone 17306 (TRBV11-2, TRBJ2-5)
CASSRGPSETQYF

SEQ ID NO: 34613 - protein, 14 aa, Homo sapiens
  CDR3 for alpha chain variable domain of TCR clone 17307 (TRAV1-2, TRAJ16)
CDVNRFSDGQKLLF

SEQ ID NO: 34614 - protein, 15 aa, Homo sapiens
  CDR3 for beta chain variable domain of TCR clone 17307 (TRBV9, TRBJ1-6)
CASSVAGTGDSPLHF

SEQ ID NO: 34615 - protein, 18 aa, Homo sapiens
  CDR3 for alpha chain variable domain of TCR clone 17308 (TRAV13-1, TRAJ52)
CAASKRSAGVTSYGKLTF

SEQ ID NO: 34616 - protein, 13 aa, Homo sapiens
  CDR3 for beta chain variable domain of TCR clone 17308 (TRBV12-4, TRBJ1-2)
CASSLRQGKGYTF

SEQ ID NO: 34617 - protein, 14 aa, Homo sapiens
  CDR3 for alpha chain variable domain of TCR clone 17309 (TRAV9-2, TRAJ39)
CALYIYNAGNMLTF

SEQ ID NO: 34618 - protein, 15 aa, Homo sapiens
  CDR3 for beta chain variable domain of TCR clone 17309 (TRBV20-1, TRBJ1-5)
CSAREGGYSNQPQHF

SEQ ID NO: 34619 - protein, 14 aa, Homo sapiens
  CDR3 for alpha chain variable domain of TCR clone 17310 (TRAV13-1, TRAJ35)
CAASKGGFGNELHC

SEQ ID NO: 34620 - protein, 13 aa, Homo sapiens
  CDR3 for beta chain variable domain of TCR clone 17310 (TRBV7-3, TRBJ1-1)
CASSQDWGAEAFF

SEQ ID NO: 34621 - protein, 15 aa, Homo sapiens
  CDR3 for alpha chain variable domain of TCR clone 17311 (TRAV35, TRAJ53)
CAGLTQAGSNYKLTF

SEQ ID NO: 34622 - protein, 14 aa, Homo sapiens
  CDR3 for beta chain variable domain of TCR clone 17311 (TRBV7-9, TRBJ2-7)
CASSLVAGPYEQYF

SEQ ID NO: 34623 - protein, 16 aa, Homo sapiens
  CDR3 for alpha chain variable domain of TCR clone 17312 (TRAV23/DV6, TRAJ9)
CAASIGGNTGGFKTIF

SEQ ID NO: 34624 - protein, 15 aa, Homo sapiens
  CDR3 for beta chain variable domain of TCR clone 17312 (TRBV20-1, TRBJ2-7)
CSARDRVSGMDEQYF

SEQ ID NO: 34625 - protein, 11 aa, Homo sapiens
  CDR3 for alpha chain variable domain of TCR clone 17313 (TRAV2, TRAJ33)
CAVDSNYQLIW

SEQ ID NO: 34626 - protein, 15 aa, Homo sapiens
  CDR3 for beta chain variable domain of TCR clone 17313 (TRBV19, TRBJ1-2)
CASSVGQVLNYGDTF

SEQ ID NO: 34627 - protein, 11 aa, Homo sapiens
  CDR3 for alpha chain variable domain of TCR clone 17314 (TRAV13-1, TRAJ40)
CAVSGTHKYIF

SEQ ID NO: 34628 - protein, 13 aa, Homo sapiens
  CDR3 for beta chain variable domain of TCR clone 17314 (TRBV19, TRBJ1-5)
CASSIGGNQPQHF

SEQ ID NO: 34629 - protein, 13 aa, Homo sapiens
  CDR3 for alpha chain variable domain of TCR clone 17315 (TRAV17, TRAJ9)
CATDYTGGLKTIF

SEQ ID NO: 34630 - protein, 16 aa, Homo sapiens
  CDR3 for beta chain variable domain of TCR clone 17315 (TRBV7-7, TRBJ2-1)
CASSLASGTSYNEQFF

SEQ ID NO: 34631 - protein, 13 aa, Homo sapiens
  CDR3 for alpha chain variable domain of TCR clone 17316 (TRAV1-2, TRAJ9)
CAALNTGGFKNIF

SEQ ID NO: 34632 - protein, 13 aa, Homo sapiens
  CDR3 for beta chain variable domain of TCR clone 17316 (TRBV19, TRBJ1-2)
CASSVPGQDGYTF

SEQ ID NO: 34633 - protein, 15 aa, Homo sapiens
  CDR3 for alpha chain variable domain of TCR clone 17317 (TRAV3, TRAJ5)
CAVRDLDTGRRALTF

SEQ ID NO: 34634 - protein, 13 aa, Homo sapiens
  CDR3 for beta chain variable domain of TCR clone 17317 (TRBV25-1, TRBJ1-1)
CQHPPGGNTEAFF

SEQ ID NO: 34635 - protein, 18 aa, Homo sapiens
  CDR3 for alpha chain variable domain of TCR clone 17318 (TRAV13-1, TRAJ52)
CAAKNPDAGGTSYGKLTF

SEQ ID NO: 34636 - protein, 15 aa, Homo sapiens
  CDR3 for beta chain variable domain of TCR clone 17318 (TRBV6-1, TRBJ2-3)
CASSERGGITDTQYF

SEQ ID NO: 34637 - protein, 11 aa, Homo sapiens
  CDR3 for alpha chain variable domain of TCR clone 17319 (TRAV1-1, TRAJ23)
CAVRQGGKLIF

SEQ ID NO: 34638 - protein, 20 aa, Homo sapiens
  CDR3 for beta chain variable domain of TCR clone 17319 (TRBV7-8, TRBJ2-2)
CASSHLFPGPTFHITGELFF

SEQ ID NO: 34639 - protein, 15 aa, Homo sapiens
  CDR3 for alpha chain variable domain of TCR clone 17320 (TRAV16, TRAJ10)
CALRELTGGGNKLTF

SEQ ID NO: 34640 - protein, 14 aa, Homo sapiens
  CDR3 for beta chain variable domain of TCR clone 17320 (TRBV5-5, TRBJ2-7)
CGSSLGQGTYEQYF

SEQ ID NO: 34641 - protein, 13 aa, Homo sapiens
  CDR3 for alpha chain variable domain of TCR clone 17321 (TRAV21, TRAJ27)
CAARPGNAGKSTF

SEQ ID NO: 34642 - protein, 17 aa, Homo sapiens
  CDR3 for beta chain variable domain of TCR clone 17321 (TRBV7-8, TRBJ2-6)
CASSAGTGGAGANVLTF

SEQ ID NO: 34643 - protein, 15 aa, Homo sapiens
  CDR3 for alpha chain variable domain of TCR clone 17322 (TRAV3, TRAJ20)
CALRDIKLSDYKLSF

SEQ ID NO: 34644 - protein, 15 aa, Homo sapiens
  CDR3 for beta chain variable domain of TCR clone 17322 (TRBV7-9, TRBJ1-6)
CASSSPGRGNSPLHF

SEQ ID NO: 34645 - protein, 16 aa, Homo sapiens
  CDR3 for alpha chain variable domain of TCR clone 17323 (TRAV21, TRAJ37)
CAVRPRGSSNTGKLTF

SEQ ID NO: 34646 - protein, 13 aa, Homo sapiens
  CDR3 for beta chain variable domain of TCR clone 17323 (TRBV7-9, TRBJ2-5)
CASLSPGQETQYF

SEQ ID NO: 34647 - protein, 13 aa, Homo sapiens
  CDR3 for alpha chain variable domain of TCR clone 17324 (TRAV27, TRAJ57)
CRSAQGGSEKRVF

SEQ ID NO: 34648 - protein, 11 aa, Homo sapiens
  CDR3 for beta chain variable domain of TCR clone 17324 (TRBV11-2, TRBJ1-1)
CASSINTEAFF

SEQ ID NO: 34649 - protein, 11 aa, Homo sapiens
  CDR3 for alpha chain variable domain of TCR clone 17325 (TRAV27, TRAJ45)
CAGAKEEVLTD

SEQ ID NO: 34650 - protein, 17 aa, Homo sapiens
  CDR3 for beta chain variable domain of TCR clone 17325 (TRBV11-2, TRBJ2-1)
CASSLYPPGVEYNEQFF

SEQ ID NO: 34651 - protein, 23 aa, Homo sapiens
  CDR3 for alpha chain variable domain of TCR clone 17326 (TRAV26-1, TRAJ38)
CIADNAGNNHIQNPDPAVYQLRD

SEQ ID NO: 34652 - protein, 15 aa, Homo sapiens
  CDR3 for beta chain variable domain of TCR clone 17326 (TRBV7-2, TRBJ2-2)
CASRRPGQNTGELFF

SEQ ID NO: 34653 - protein, 11 aa, Homo sapiens
  CDR3 for alpha chain variable domain of TCR clone 17327 (TRAV1-2, TRAJ20)
CAVSNDYKLSF

SEQ ID NO: 34654 - protein, 16 aa, Homo sapiens
  CDR3 for beta chain variable domain of TCR clone 17327 (TRBV29-1, TRBJ2-6)
CSVEDITYAGANVLTF

SEQ ID NO: 34655 - protein, 16 aa, Homo sapiens
  CDR3 for alpha chain variable domain of TCR clone 17328 (TRAV4, TRAJ22)
CLVGDLYSGPARQLTF

SEQ ID NO: 34656 - protein, 16 aa, Homo sapiens
  CDR3 for beta chain variable domain of TCR clone 17328 (TRBV7-9, TRBJ2-1)
CASSDVAGGSYNEQFF

SEQ ID NO: 34657 - protein, 13 aa, Homo sapiens
  CDR3 for alpha chain variable domain of TCR clone 17329 (TRAV12-1, TRAJ33)
CGDAPDSNYQLIW

SEQ ID NO: 34658 - protein, 15 aa, Homo sapiens
  CDR3 for beta chain variable domain of TCR clone 17329 (TRBV27, TRBJ2-1)
CASSNGGGSSNEQLF

SEQ ID NO: 34659 - protein, 12 aa, Homo sapiens
  CDR3 for alpha chain variable domain of TCR clone 17330 (TRAV13-2, TRAJ23)
CAERHRGGKLIF

SEQ ID NO: 34660 - protein, 14 aa, Homo sapiens
  CDR3 for beta chain variable domain of TCR clone 17330 (TRBV18, TRBJ2-7)
CASSPRGGAYEQYF

SEQ ID NO: 34661 - protein, 13 aa, Homo sapiens
  CDR3 for alpha chain variable domain of TCR clone 17331 (TRAV13-1, TRAJ21)
CAASIYNFNKFYF

SEQ ID NO: 34662 - protein, 12 aa, Homo sapiens
  CDR3 for beta chain variable domain of TCR clone 17331 (TRBV11-2, TRBJ2-2)
CASSLGGGELFF

SEQ ID NO: 34663 - protein, 16 aa, Homo sapiens
  CDR3 for alpha chain variable domain of TCR clone 17332 (TRAV3, TRAJ37)
CAVRPHGSGNPGKLIF

SEQ ID NO: 34664 - protein, 16 aa, Homo sapiens
  CDR3 for beta chain variable domain of TCR clone 17332 (TRBV9, TRBJ1-2)
CASSVEEKVSPYGYTF

SEQ ID NO: 34665 - protein, 15 aa, Homo sapiens
  CDR3 for alpha chain variable domain of TCR clone 17333 (TRAV26-1, TRAJ44)
CIVRANNGTASKLTF

SEQ ID NO: 34666 - protein, 16 aa, Homo sapiens
  CDR3 for beta chain variable domain of TCR clone 17333 (TRBV7-7, TRBJ2-1)
CASSLASGTSYNEQFF

SEQ ID NO: 34667 - protein, 11 aa, Homo sapiens
  CDR3 for alpha chain variable domain of TCR clone 17334 (TRAV12-2, TRAJ6)
CAVNVSRKLHT

SEQ ID NO: 34668 - protein, 12 aa, Homo sapiens
  CDR3 for beta chain variable domain of TCR clone 17334 (TRBV29-1, TRBJ2-3)
CSVTGGADTQYF

SEQ ID NO: 34669 - protein, 13 aa, Homo sapiens
  CDR3 for alpha chain variable domain of TCR clone 17335 (TRAV3, TRAJ27)
CAVRPLGAGESTF

SEQ ID NO: 34670 - protein, 13 aa, Homo sapiens
  CDR3 for beta chain variable domain of TCR clone 17335 (TRBV7-9, TRBJ2-3)
CASSPGSTDTQYF

SEQ ID NO: 34671 - protein, 14 aa, Homo sapiens
  CDR3 for alpha chain variable domain of TCR clone 17336 (TRAV9-2, TRAJ39)
CALYIYNAGNMLTF

SEQ ID NO: 34672 - protein, 16 aa, Homo sapiens
  CDR3 for beta chain variable domain of TCR clone 17336 (TRBV5-1, TRBJ1-1)
CASSSGGNSLNTEAFF

SEQ ID NO: 34673 - protein, 15 aa, Homo sapiens
  CDR3 for alpha chain variable domain of TCR clone 17337 (TRAV3, TRAJ22)
CAVRDRGGFARQLTF

SEQ ID NO: 34674 - protein, 16 aa, Homo sapiens
  CDR3 for beta chain variable domain of TCR clone 17337 (TRBV5-4, TRBJ2-3)
CASQQPGAGGADTQYF

SEQ ID NO: 34675 - protein, 15 aa, Homo sapiens
  CDR3 for alpha chain variable domain of TCR clone 17338 (TRAV2, TRAJ9)
CAVEDRGTGGFKTIF

SEQ ID NO: 34676 - protein, 15 aa, Homo sapiens
  CDR3 for beta chain variable domain of TCR clone 17338 (TRBV20-1, TRBJ2-7)
CSARDRVSGMDEQYF

SEQ ID NO: 34677 - protein, 11 aa, Homo sapiens
  CDR3 for alpha chain variable domain of TCR clone 17339 (TRAV4, TRAJ31)
CLVGDNARPMF

SEQ ID NO: 34678 - protein, 16 aa, Homo sapiens
  CDR3 for beta chain variable domain of TCR clone 17339 (TRBV7-2, TRBJ2-5)
CASSSKWLSGQETQYF

SEQ ID NO: 34679 - protein, 17 aa, Homo sapiens
  CDR3 for alpha chain variable domain of TCR clone 17340 (TRAV14/DV4, TRAJ53)
CNERGPSSGGSNYKLTF

SEQ ID NO: 34680 - protein, 14 aa, Homo sapiens
  CDR3 for beta chain variable domain of TCR clone 17340 (TRBV7-6, TRBJ2-3)
CASSVAGGTDTQYF

SEQ ID NO: 34681 - protein, 12 aa, Homo sapiens
  CDR3 for alpha chain variable domain of TCR clone 17341 (TRAV13-2, TRAJ23)
CAERHRGGNLIF

SEQ ID NO: 34682 - protein, 16 aa, Homo sapiens
  CDR3 for beta chain variable domain of TCR clone 17341 (TRBV20-1, TRBJ1-4)
CSAPGQGLLTNEKLFF

SEQ ID NO: 34683 - protein, 15 aa, Homo sapiens
  CDR3 for alpha chain variable domain of TCR clone 17342 (TRAV21, TRAJ24)
CAARSSADSWGKLQF

SEQ ID NO: 34684 - protein, 13 aa, Homo sapiens
  CDR3 for beta chain variable domain of TCR clone 17342 (TRBV11-2, TRBJ2-5)
CASSSTGEETQYF

SEQ ID NO: 34685 - protein, 18 aa, Homo sapiens
  CDR3 for alpha chain variable domain of TCR clone 17343 (TRAV29/DV5, TRAJ52)
CAAGFRGAGGISYGKLTF

SEQ ID NO: 34686 - protein, 16 aa, Homo sapiens
  CDR3 for beta chain variable domain of TCR clone 17343 (TRBV7-3, TRBJ2-2)
CASSLKRGTLSGELFF

SEQ ID NO: 34687 - protein, 15 aa, Homo sapiens
  CDR3 for alpha chain variable domain of TCR clone 17344 (TRAV17, TRAJ57)
CATGPSQGGSEKLVF

SEQ ID NO: 34688 - protein, 16 aa, Homo sapiens
  CDR3 for beta chain variable domain of TCR clone 17344 (TRBV12-4, TRBJ1-5)
CASGRPVGGSNQPQHF

SEQ ID NO: 34689 - protein, 17 aa, Homo sapiens
  CDR3 for alpha chain variable domain of TCR clone 17345 (TRAV27, TRAJ26)
CAGARAPLDNYGQNFFF

SEQ ID NO: 34690 - protein, 15 aa, Homo sapiens
  CDR3 for beta chain variable domain of TCR clone 17345 (TRBV11-2, TRBJ2-5)
CASSPRSGGLETQYF

SEQ ID NO: 34691 - protein, 16 aa, Homo sapiens
  CDR3 for alpha chain variable domain of TCR clone 17346 (TRAV3, TRAJ21)
CAVRDIERGNFNKLYF

SEQ ID NO: 34692 - protein, 13 aa, Homo sapiens
  CDR3 for beta chain variable domain of TCR clone 17346 (TRBV27, TRBJ2-7)
CASSLTTGYEQYF

SEQ ID NO: 34693 - protein, 13 aa, Homo sapiens
  CDR3 for alpha chain variable domain of TCR clone 17347 (TRAV26-2, TRAJ43)
CILRAVNNNDMRF

SEQ ID NO: 34694 - protein, 15 aa, Homo sapiens
  CDR3 for beta chain variable domain of TCR clone 17347 (TRBV7-2, TRBJ2-1)
CASTHGTGVYNEQFF

SEQ ID NO: 34695 - protein, 15 aa, Homo sapiens
  CDR3 for alpha chain variable domain of TCR clone 17348 (TRAV27, TRAJ38)
CAARRNAGNNRKLIW

SEQ ID NO: 34696 - protein, 12 aa, Homo sapiens
  CDR3 for beta chain variable domain of TCR clone 17348 (TRBV11-2, TRBJ2-2)
CASSLGGGELFF

SEQ ID NO: 34697 - protein, 13 aa, Homo sapiens
  CDR3 for alpha chain variable domain of TCR clone 17349 (TRAV8-3, TRAJ48)
CAVVPFGNEELTF

SEQ ID NO: 34698 - protein, 15 aa, Homo sapiens
  CDR3 for beta chain variable domain of TCR clone 17349 (TRBV11-2, TRBJ2-1)
CASSSPSTRYNEQFF

SEQ ID NO: 34699 - protein, 15 aa, Homo sapiens
  CDR3 for alpha chain variable domain of TCR clone 17350 (TRAV8-3, TRAJ27)
CAVGPSKTNAGKSTF

SEQ ID NO: 34700 - protein, 16 aa, Homo sapiens
  CDR3 for beta chain variable domain of TCR clone 17350 (TRBV7-3, TRBJ2-2)
CASSLKRGTLSGELFF

SEQ ID NO: 34701 - protein, 15 aa, Homo sapiens
  CDR3 for alpha chain variable domain of TCR clone 17351 (TRAV17, TRAJ57)
CATGPFQGGSEKLVF

SEQ ID NO: 34702 - protein, 16 aa, Homo sapiens
  CDR3 for beta chain variable domain of TCR clone 17351 (TRBV12-4, TRBJ1-5)
CASSRPVGGSNQPQHF

SEQ ID NO: 34703 - protein, 12 aa, Homo sapiens
  CDR3 for alpha chain variable domain of TCR clone 17352 (TRAV17, TRAJ12)
CATLRSSYKFIF

SEQ ID NO: 34704 - protein, 16 aa, Homo sapiens
  CDR3 for beta chain variable domain of TCR clone 17352 (TRBV28, TRBJ2-7)
CASSLFFETGGPEQYF

SEQ ID NO: 34705 - protein, 14 aa, Homo sapiens
  CDR3 for alpha chain variable domain of TCR clone 17353 (TRAV29/DV5, TRAJ45)
CAARFRGGADGLTF

SEQ ID NO: 34706 - protein, 11 aa, Homo sapiens
  CDR3 for beta chain variable domain of TCR clone 17353 (TRBV11-2, TRBJ2-2)
CASSLPGELFF

SEQ ID NO: 34707 - protein, 17 aa, Homo sapiens
  CDR3 for alpha chain variable domain of TCR clone 17354 (TRAV23/DV6, TRAJ57)
CAASSTLSQGGSENLVF

SEQ ID NO: 34708 - protein, 14 aa, Homo sapiens
  CDR3 for beta chain variable domain of TCR clone 17354 (TRBV25-1, TRBJ1-1)
CASTHLGGNTEAFF

SEQ ID NO: 34709 - protein, 11 aa, Homo sapiens
  CDR3 for alpha chain variable domain of TCR clone 17355 (TRAV2, TRAJ33)
CAVESNYQLIW

SEQ ID NO: 34710 - protein, 11 aa, Homo sapiens
  CDR3 for beta chain variable domain of TCR clone 17355 (TRBV12-4, TRBJ2-3)
CASTATDTQYF

SEQ ID NO: 34711 - protein, 13 aa, Homo sapiens
  CDR3 for alpha chain variable domain of TCR clone 17356 (TRAV13-1, TRAJ21)
CVASKGNFNKFYF

SEQ ID NO: 34712 - protein, 16 aa, Homo sapiens
  CDR3 for beta chain variable domain of TCR clone 17356 (TRBV5-4, TRBJ2-3)
CASSWGTSGGTDTQYF

SEQ ID NO: 34713 - protein, 12 aa, Homo sapiens
  CDR3 for alpha chain variable domain of TCR clone 17357 (TRAV2, TRAJ31)
CAVEDNNARLMF

SEQ ID NO: 34714 - protein, 16 aa, Homo sapiens
  CDR3 for beta chain variable domain of TCR clone 17357 (TRBV10-3, TRBJ2-1)
CAISGVGDGGGGEQFL

SEQ ID NO: 34715 - protein, 17 aa, Homo sapiens
  CDR3 for alpha chain variable domain of TCR clone 17358 (TRAV26-2, TRAJ42)
CILRDVGDGGSQGNLIF

SEQ ID NO: 34716 - protein, 16 aa, Homo sapiens
  CDR3 for beta chain variable domain of TCR clone 17358 (TRBV12-4, TRBJ2-7)
CASSLIGGTGTYEQYF

SEQ ID NO: 34717 - protein, 15 aa, Homo sapiens
  CDR3 for alpha chain variable domain of TCR clone 17359 (TRAV3, TRAJ20)
CAVRDIKLSDYKLSF

SEQ ID NO: 34718 - protein, 15 aa, Homo sapiens
  CDR3 for beta chain variable domain of TCR clone 17359 (TRBV7-9, TRBJ1-6)
CASSSPGRGNPPLHF

SEQ ID NO: 34719 - protein, 13 aa, Homo sapiens
  CDR3 for alpha chain variable domain of TCR clone 17360 (TRAV13-1, TRAJ21)
CAASIYNFNKFYF

SEQ ID NO: 34720 - protein, 14 aa, Homo sapiens
  CDR3 for beta chain variable domain of TCR clone 17360 (TRBV25-1, TRBJ1-1)
CASTHLGGNTEAFF

SEQ ID NO: 34721 - protein, 14 aa, Homo sapiens
  CDR3 for alpha chain variable domain of TCR clone 17361 (TRAV17, TRAJ34)
CATDSLEGTDKLIF

SEQ ID NO: 34722 - protein, 16 aa, Homo sapiens
  CDR3 for beta chain variable domain of TCR clone 17361 (TRBV7-9, TRBJ2-6)
CASSLKGPLRANVLTF

SEQ ID NO: 34723 - protein, 13 aa, Homo sapiens
  CDR3 for alpha chain variable domain of TCR clone 17362 (TRAV8-6, TRAJ21)
CAVSPSSLNKFYF

SEQ ID NO: 34724 - protein, 13 aa, Homo sapiens
  CDR3 for beta chain variable domain of TCR clone 17362 (TRBV12-5, TRBJ2-3)
CASQNRGTDTQYF

SEQ ID NO: 34725 - protein, 15 aa, Homo sapiens
  CDR3 for alpha chain variable domain of TCR clone 17363 (TRAV12-2, TRAJ53)
CAVNGGGGSNYKLTF

SEQ ID NO: 34726 - protein, 13 aa, Homo sapiens
  CDR3 for beta chain variable domain of TCR clone 17363 (TRBV7-9, TRBJ1-2)
CASSLKQNYGYTF

SEQ ID NO: 34727 - protein, 12 aa, Homo sapiens
  CDR3 for alpha chain variable domain of TCR clone 17364 (TRAV21, TRAJ11)
CAATSGYSTLTF

SEQ ID NO: 34728 - protein, 14 aa, Homo sapiens
  CDR3 for beta chain variable domain of TCR clone 17364 (TRBV20-1, TRBJ2-7)
CSAPELAGAGEQYF

SEQ ID NO: 34729 - protein, 15 aa, Homo sapiens
  CDR3 for alpha chain variable domain of TCR clone 17365 (TRAV12-3, TRAJ6)
CALSATTGGSYIPTF

SEQ ID NO: 34730 - protein, 16 aa, Homo sapiens
  CDR3 for beta chain variable domain of TCR clone 17365 (TRBV20-1, TRBJ1-2)
CSASMGQGVANYGYTF

SEQ ID NO: 34731 - protein, 15 aa, Homo sapiens
  CDR3 for alpha chain variable domain of TCR clone 17366 (TRAV25, TRAJ52)
CAGTSGGTSYGELTF

SEQ ID NO: 34732 - protein, 16 aa, Homo sapiens
  CDR3 for beta chain variable domain of TCR clone 17366 (TRBV15, TRBJ1-2)
CATSRGPRTGGGGYTF

SEQ ID NO: 34733 - protein, 13 aa, Homo sapiens
  CDR3 for alpha chain variable domain of TCR clone 17367 (TRAV21, TRAJ27)
CAARPGNAGKSTF

SEQ ID NO: 34734 - protein, 15 aa, Homo sapiens
  CDR3 for beta chain variable domain of TCR clone 17367 (TRBV28, TRBJ2-1)
CASSIIAGGRSEQFF

SEQ ID NO: 34735 - protein, 16 aa, Homo sapiens
  CDR3 for alpha chain variable domain of TCR clone 17368 (TRAV30, TRAJ24)
CGTEIVDADSWGKFQF

SEQ ID NO: 34736 - protein, 14 aa, Homo sapiens
  CDR3 for beta chain variable domain of TCR clone 17368 (TRBV12-5, TRBJ2-5)
CASGSRTHQETQSF

SEQ ID NO: 34737 - protein, 14 aa, Homo sapiens
  CDR3 for alpha chain variable domain of TCR clone 17369 (TRAV8-6, TRAJ12)
CAVKAADSSYKLIF

SEQ ID NO: 34738 - protein, 15 aa, Homo sapiens
  CDR3 for beta chain variable domain of TCR clone 17369 (TRBV9, TRBJ1-6)
CASSVAGTGDSPLHF

SEQ ID NO: 34739 - protein, 15 aa, Homo sapiens
  CDR3 for alpha chain variable domain of TCR clone 17370 (TRAV35, TRAJ23)
CAGPLGNNQGGKLIF

SEQ ID NO: 34740 - protein, 14 aa, Homo sapiens
  CDR3 for beta chain variable domain of TCR clone 17370 (TRBV7-9, TRBJ1-1)
CASTPLQSYAEAFF

SEQ ID NO: 34741 - protein, 16 aa, Homo sapiens
  CDR3 for alpha chain variable domain of TCR clone 17371 (TRAV3, TRAJ10)
CAVRDMRAGGGNKLTF

SEQ ID NO: 34742 - protein, 13 aa, Homo sapiens
  CDR3 for beta chain variable domain of TCR clone 17371 (TRBV10-3, TRBJ2-7)
CASKLAVNYEQYF

SEQ ID NO: 34743 - protein, 14 aa, Homo sapiens
  CDR3 for alpha chain variable domain of TCR clone 17372 (TRAV1-2, TRAJ8)
CAVREDTGFQKLVF

SEQ ID NO: 34744 - protein, 15 aa, Homo sapiens
  CDR3 for beta chain variable domain of TCR clone 17372 (TRBV6-3, TRBJ2-7)
CDSSSPGTVFYEQYF

SEQ ID NO: 34745 - protein, 11 aa, Homo sapiens
  CDR3 for alpha chain variable domain of TCR clone 17373 (TRAV13-1, TRAJ6)
CATLGSYIPTF

SEQ ID NO: 34746 - protein, 12 aa, Homo sapiens
  CDR3 for beta chain variable domain of TCR clone 17373 (TRBV11-2, TRBJ2-1)
CASSPGNNEQFL

SEQ ID NO: 34747 - protein, 12 aa, Homo sapiens
  CDR3 for alpha chain variable domain of TCR clone 17374 (TRAV21, TRAJ33)
CAKIDSNYQLIW

SEQ ID NO: 34748 - protein, 14 aa, Homo sapiens
  CDR3 for beta chain variable domain of TCR clone 17374 (TRBV2, TRBJ2-7)
CASSLTSGGYEQYF

SEQ ID NO: 34749 - protein, 14 aa, Homo sapiens
  CDR3 for alpha chain variable domain of TCR clone 17375 (TRAV17, TRAJ49)
SATDARDTGNQFYF

SEQ ID NO: 34750 - protein, 14 aa, Homo sapiens
  CDR3 for beta chain variable domain of TCR clone 17375 (TRBV5-5, TRBJ1-2)
CASSFGQINYGYTF

SEQ ID NO: 34751 - protein, 13 aa, Homo sapiens
  CDR3 for alpha chain variable domain of TCR clone 17376 (TRAV13-2, TRAJ48)
CAEMDFGNEKSTF

SEQ ID NO: 34752 - protein, 15 aa, Homo sapiens
  CDR3 for beta chain variable domain of TCR clone 17376 (TRBV7-9, TRBJ1-6)
CASSSPGRGNSPLHF

SEQ ID NO: 34753 - protein, 11 aa, Homo sapiens
  CDR3 for alpha chain variable domain of TCR clone 17377 (TRAV1-1, TRAJ23)
CAVRQGGKLIF

SEQ ID NO: 34754 - protein, 15 aa, Homo sapiens
  CDR3 for beta chain variable domain of TCR clone 17377 (TRBV9, TRBJ1-6)
CASSVAGTGDSPLHF

SEQ ID NO: 34755 - protein, 13 aa, Homo sapiens
  CDR3 for alpha chain variable domain of TCR clone 17378 (TRAV13-1, TRAJ21)
CAASIYNFNKFYF

SEQ ID NO: 34756 - protein, 13 aa, Homo sapiens
  CDR3 for beta chain variable domain of TCR clone 17378 (TRBV10-3, TRBJ2-7)
CASKLAVNYEQYF

SEQ ID NO: 34757 - protein, 13 aa, Homo sapiens
  CDR3 for alpha chain variable domain of TCR clone 17379 (TRAV3, TRAJ27)
RAVRPLGAGKSTF

SEQ ID NO: 34758 - protein, 13 aa, Homo sapiens
  CDR3 for beta chain variable domain of TCR clone 17379 (TRBV7-9, TRBJ2-3)
CASSPGSTDTQYF

SEQ ID NO: 34759 - protein, 10 aa, Homo sapiens
  CDR3 for alpha chain variable domain of TCR clone 17380 (TRAV23/DV6, TRAJ57)
CATSSTLSQG

SEQ ID NO: 34760 - protein, 14 aa, Homo sapiens
  CDR3 for beta chain variable domain of TCR clone 17380 (TRBV25-1, TRBJ1-1)
CASTHLGGNTEAFF

SEQ ID NO: 34761 - protein, 13 aa, Homo sapiens
  CDR3 for alpha chain variable domain of TCR clone 17381 (TRAV21, TRAJ27)
CAARPGNAGKSTF

SEQ ID NO: 34762 - protein, 15 aa, Homo sapiens
  CDR3 for beta chain variable domain of TCR clone 17381 (TRBV7-9, TRBJ1-6)
CASSSPGRGNSPLHF

SEQ ID NO: 34763 - protein, 13 aa, Homo sapiens
  CDR3 for alpha chain variable domain of TCR clone 17382 (TRAV3, TRAJ34)
CCESPGNTDKLIF

SEQ ID NO: 34764 - protein, 15 aa, Homo sapiens
  CDR3 for beta chain variable domain of TCR clone 17382 (TRBV6-3, TRBJ2-7)
CASSSPGTVFYEQYF

SEQ ID NO: 34765 - protein, 15 aa, Homo sapiens
  CDR3 for alpha chain variable domain of TCR clone 17383 (TRAV3, TRAJ22)
CAVRDRGGSARQLAF

SEQ ID NO: 34766 - protein, 16 aa, Homo sapiens
  CDR3 for beta chain variable domain of TCR clone 17383 (TRBV5-4, TRBJ2-3)
CASQQPGAGGADTQYF

SEQ ID NO: 34767 - protein, 15 aa, Homo sapiens
  CDR3 for alpha chain variable domain of TCR clone 17384 (TRAV26-1, TRAJ44)
CIVRANTGTASKLPF

SEQ ID NO: 34768 - protein, 16 aa, Homo sapiens
  CDR3 for beta chain variable domain of TCR clone 17384 (TRBV7-7, TRBJ2-1)
CASSLASGTSYNEQFF

SEQ ID NO: 34769 - protein, 13 aa, Homo sapiens
  CDR3 for alpha chain variable domain of TCR clone 17385 (TRAV17, TRAJ9)
CATDYTGGFKTIF

SEQ ID NO: 34770 - protein, 14 aa, Homo sapiens
  CDR3 for beta chain variable domain of TCR clone 17385 (TRBV19, TRBJ2-5)
CASSMTGQQGTQYF

SEQ ID NO: 34771 - protein, 15 aa, Homo sapiens
  CDR3 for alpha chain variable domain of TCR clone 17386 (TRAV8-3, TRAJ27)
CAVGPSKPNAGKSTF

SEQ ID NO: 34772 - protein, 15 aa, Homo sapiens
  CDR3 for beta chain variable domain of TCR clone 17386 (TRBV7-2, TRBJ2-1)
CASSSGLAGGNEQFF

SEQ ID NO: 34773 - protein, 15 aa, Homo sapiens
  CDR3 for alpha chain variable domain of TCR clone 17387 (TRAV27, TRAJ38)
CAVRRNAGNNRKLIW

SEQ ID NO: 34774 - protein, 13 aa, Homo sapiens
  CDR3 for beta chain variable domain of TCR clone 17387 (TRBV12-5, TRBJ2-3)
CASGDRQSDTQYF

SEQ ID NO: 34775 - protein, 12 aa, Homo sapiens
  CDR3 for alpha chain variable domain of TCR clone 17388 (TRAV12-3, TRAJ42)
CAPGGSQGNLIF

SEQ ID NO: 34776 - protein, 13 aa, Homo sapiens
  CDR3 for beta chain variable domain of TCR clone 17388 (TRBV5-7, TRBJ2-6)
CASTSSGANDLTF

SEQ ID NO: 34777 - protein, 13 aa, Homo sapiens
  CDR3 for alpha chain variable domain of TCR clone 17389 (TRAV13-2, TRAJ53)
CAENMGSNYKLTF

SEQ ID NO: 34778 - protein, 13 aa, Homo sapiens
  CDR3 for beta chain variable domain of TCR clone 17389 (TRBV4-1, TRBJ2-2)
CASSQENAGELFF

SEQ ID NO: 34779 - protein, 14 aa, Homo sapiens
  CDR3 for alpha chain variable domain of TCR clone 17390 (TRAV26-1, TRAJ38)
CIADNAGNNRKLIW

SEQ ID NO: 34780 - protein, 16 aa, Homo sapiens
  CDR3 for beta chain variable domain of TCR clone 17390 (TRBV10-2, TRBJ1-5)
CASSVRDRASNQPQHF

SEQ ID NO: 34781 - protein, 13 aa, Homo sapiens
  CDR3 for alpha chain variable domain of TCR clone 17391 (TRAV8-3, TRAJ28)
CALGAVGSYQLTF

SEQ ID NO: 34782 - protein, 14 aa, Homo sapiens
  CDR3 for beta chain variable domain of TCR clone 17391 (TRBV7-2, TRBJ2-7)
CASRSQGAAYEQYF

SEQ ID NO: 34783 - protein, 12 aa, Homo sapiens
  CDR3 for alpha chain variable domain of TCR clone 17392 (TRAV16, TRAJ10)
CSRTGGGDKLTF

SEQ ID NO: 34784 - protein, 15 aa, Homo sapiens
  CDR3 for beta chain variable domain of TCR clone 17392 (TRBV6-3, TRBJ2-7)
CASSSPGTVFYEQYF

SEQ ID NO: 34785 - protein, 13 aa, Homo sapiens
  CDR3 for alpha chain variable domain of TCR clone 17393 (TRAV8-2, TRAJ9)
CVVRATGGFKTIF

SEQ ID NO: 34786 - protein, 12 aa, Homo sapiens
  CDR3 for beta chain variable domain of TCR clone 17393 (TRBV11-2, TRBJ2-2)
CASSLGGGELFF

SEQ ID NO: 34787 - protein, 14 aa, Homo sapiens
  CDR3 for alpha chain variable domain of TCR clone 17394 (TRAV1-2, TRAJ16)
CAVNRFSDGQKLLF

SEQ ID NO: 34788 - protein, 17 aa, Homo sapiens
  CDR3 for beta chain variable domain of TCR clone 17394 (TRBV15, TRBJ1-2)
RATSGREIDVVNYGYTF

SEQ ID NO: 34789 - protein, 12 aa, Homo sapiens
  CDR3 for alpha chain variable domain of TCR clone 17395 (TRAV3, TRAJ20)
CAVRDPDYRLSF

SEQ ID NO: 34790 - protein, 13 aa, Homo sapiens
  CDR3 for beta chain variable domain of TCR clone 17395 (TRBV9, TRBJ2-1)
CASSVGQGGEQFF

SEQ ID NO: 34791 - protein, 16 aa, Homo sapiens
  CDR3 for alpha chain variable domain of TCR clone 17396 (TRAV30, TRAJ24)
CGTEIVDADSWGKFQF

SEQ ID NO: 34792 - protein, 14 aa, Homo sapiens
  CDR3 for beta chain variable domain of TCR clone 17396 (TRBV12-5, TRBJ2-5)
FASGSRTHQETQYF

SEQ ID NO: 34793 - protein, 15 aa, Homo sapiens
  CDR3 for alpha chain variable domain of TCR clone 17397 (TRAV17, TRAJ57)
FATGPSQGGSEKLVF

SEQ ID NO: 34794 - protein, 16 aa, Homo sapiens
  CDR3 for beta chain variable domain of TCR clone 17397 (TRBV12-4, TRBJ1-5)
CASSRPVGGSNQPQHF

SEQ ID NO: 34795 - protein, 17 aa, Homo sapiens
  CDR3 for alpha chain variable domain of TCR clone 17398 (TRAV26-1, TRAJ53)
CIVRVDDSGGSNYKLTF

SEQ ID NO: 34796 - protein, 15 aa, Homo sapiens
  CDR3 for beta chain variable domain of TCR clone 17398 (TRBV20-1, TRBJ2-7)
CSARVPAAYLYEQYF

SEQ ID NO: 34797 - protein, 16 aa, Homo sapiens
  CDR3 for alpha chain variable domain of TCR clone 17399 (TRAV27, TRAJ13)
CAGAKSDSGGYQQVTF

SEQ ID NO: 34798 - protein, 15 aa, Homo sapiens
  CDR3 for beta chain variable domain of TCR clone 17399 (TRBV29-1, TRBJ2-1)
CSVGRHALFYNEQFF

SEQ ID NO: 34799 - protein, 19 aa, Homo sapiens
  CDR3 for alpha chain variable domain of TCR clone 17400 (TRAV1-2, TRAJ18)
CLLPLCCERRGSTLGRLYF

SEQ ID NO: 34800 - protein, 15 aa, Homo sapiens
  CDR3 for beta chain variable domain of TCR clone 17400 (TRBV20-1, TRBJ2-1)
CSAEGGLLAGDEQFF

SEQ ID NO: 34801 - protein, 17 aa, Homo sapiens
  CDR3 for alpha chain variable domain of TCR clone 17401 (TRAV13-1, TRAJ28)
CAASPPYSGAGSYQLTF

SEQ ID NO: 34802 - protein, 13 aa, Homo sapiens
  CDR3 for beta chain variable domain of TCR clone 17401 (TRBV7-2, TRBJ2-7)
CASSSPSGSEQYF

SEQ ID NO: 34803 - protein, 15 aa, Homo sapiens
  CDR3 for alpha chain variable domain of TCR clone 17402 (TRAV2, TRAJ9)
CAVEDRGTGGFKPIF

SEQ ID NO: 34804 - protein, 16 aa, Homo sapiens
  CDR3 for beta chain variable domain of TCR clone 17402 (TRBV24-1, TRBJ2-3)
CATSDPGTGATDTQYF

SEQ ID NO: 34805 - protein, 14 aa, Homo sapiens
  CDR3 for alpha chain variable domain of TCR clone 17403 (TRAV12-2, TRAJ40)
CAVKIPSGTYKYIF

SEQ ID NO: 34806 - protein, 18 aa, Homo sapiens
  CDR3 for beta chain variable domain of TCR clone 17403 (TRBV11-2, TRBJ2-3)
CASSLGGASRGAPNTQYF

SEQ ID NO: 34807 - protein, 17 aa, Homo sapiens
  CDR3 for alpha chain variable domain of TCR clone 17404 (TRAV3, TRAJ38)
CAVRDCLDAGNNRKLIW

SEQ ID NO: 34808 - protein, 14 aa, Homo sapiens
  CDR3 for beta chain variable domain of TCR clone 17404 (TRBV5-5, TRBJ1-5)
CASSGQGVDQPQHF

SEQ ID NO: 34809 - protein, 15 aa, Homo sapiens
  CDR3 for alpha chain variable domain of TCR clone 17405 (TRAV26-1, TRAJ29)
CIVRVEGSGNTPHVF

SEQ ID NO: 34810 - protein, 14 aa, Homo sapiens
  CDR3 for beta chain variable domain of TCR clone 17405 (TRBV18, TRBJ2-5)
CASSPGVSQETQYF

SEQ ID NO: 34811 - protein, 14 aa, Homo sapiens
  CDR3 for alpha chain variable domain of TCR clone 17406 (TRAV26-1, TRAJ38)
CIADSAGNNRKLIW

SEQ ID NO: 34812 - protein, 13 aa, Homo sapiens
  CDR3 for beta chain variable domain of TCR clone 17406 (TRBV20-1, TRBJ1-1)
CSARGGGNTEAFF

SEQ ID NO: 34813 - protein, 15 aa, Homo sapiens
  CDR3 for alpha chain variable domain of TCR clone 17407 (TRAV21, TRAJ45)
CAVSYSGGGADGLTF

SEQ ID NO: 34814 - protein, 13 aa, Homo sapiens
  CDR3 for beta chain variable domain of TCR clone 17407 (TRBV20-1, TRBJ2-5)
CSAATEPQETQYF

SEQ ID NO: 34815 - protein, 12 aa, Homo sapiens
  CDR3 for alpha chain variable domain of TCR clone 17408 (TRAV16, TRAJ10)
CSRTGGGNKLTF

SEQ ID NO: 34816 - protein, 17 aa, Homo sapiens
  CDR3 for beta chain variable domain of TCR clone 17408 (TRBV11-2, TRBJ2-1)
CASSLYPPGVEYNEQFF

SEQ ID NO: 34817 - protein, 18 aa, Homo sapiens
  CDR3 for alpha chain variable domain of TCR clone 17409 (TRAV21, TRAJ52)
CAVRPSPAGGTSYGKLTF

SEQ ID NO: 34818 - protein, 17 aa, Homo sapiens
  CDR3 for beta chain variable domain of TCR clone 17409 (TRBV13, TRBJ2-3)
CASSLSRVGGGRNTQYF

SEQ ID NO: 34819 - protein, 11 aa, Homo sapiens
  CDR3 for alpha chain variable domain of TCR clone 17410 (TRAV2, TRAJ33)
CAVDSNYQLIW

SEQ ID NO: 34820 - protein, 15 aa, Homo sapiens
  CDR3 for beta chain variable domain of TCR clone 17410 (TRBV19, TRBJ1-2)
CASSVGQVLNYGCTF

SEQ ID NO: 34821 - protein, 13 aa, Homo sapiens
  CDR3 for alpha chain variable domain of TCR clone 17411 (TRAV20, TRAJ37)
CAWCSSNTGKLIF

SEQ ID NO: 34822 - protein, 11 aa, Homo sapiens
  CDR3 for beta chain variable domain of TCR clone 17411 (TRBV12-4, TRBJ2-3)
CASTATDTQYF

SEQ ID NO: 34823 - protein, 15 aa, Homo sapiens
  CDR3 for alpha chain variable domain of TCR clone 17412 (TRAV8-3, TRAJ27)
CAVVPSKTNAGKSTF

SEQ ID NO: 34824 - protein, 15 aa, Homo sapiens
  CDR3 for beta chain variable domain of TCR clone 17412 (TRBV7-2, TRBJ2-1)
CASSSGLAGGNEQFF

SEQ ID NO: 34825 - protein, 13 aa, Homo sapiens
  CDR3 for alpha chain variable domain of TCR clone 17413 (TRAV3, TRAJ21)
CAVREPDFNKFYF

SEQ ID NO: 34826 - protein, 16 aa, Homo sapiens
  CDR3 for beta chain variable domain of TCR clone 17413 (TRBV12-5, TRBJ2-5)
CASGPRTSGNQETQYF

SEQ ID NO: 34827 - protein, 13 aa, Homo sapiens
  CDR3 for alpha chain variable domain of TCR clone 17414 (TRAV13-1, TRAJ21)
CAASIYNFNKFYF

SEQ ID NO: 34828 - protein, 14 aa, Homo sapiens
  CDR3 for beta chain variable domain of TCR clone 17414 (TRBV19, TRBJ2-1)
CASPTFVLSGEQFF

SEQ ID NO: 34829 - protein, 15 aa, Homo sapiens
  CDR3 for alpha chain variable domain of TCR clone 17415 (TRAV3, TRAJ5)
CAVRDRKTGGRALTF

SEQ ID NO: 34830 - protein, 15 aa, Homo sapiens
  CDR3 for beta chain variable domain of TCR clone 17415 (TRBV7-8, TRBJ2-1)
CASSLADSLYNEQFF

SEQ ID NO: 34831 - protein, 14 aa, Homo sapiens
  CDR3 for alpha chain variable domain of TCR clone 17416 (TRAV9-2, TRAJ39)
CALYIYNAGNMLTF

SEQ ID NO: 34832 - protein, 13 aa, Homo sapiens
  CDR3 for beta chain variable domain of TCR clone 17416 (TRBV29-1, TRBJ2-2)
CSTTGVNTGELFF

SEQ ID NO: 34833 - protein, 15 aa, Homo sapiens
  CDR3 for alpha chain variable domain of TCR clone 17417 (TRAV3, TRAJ22)
CAVRDRGGSARQLTF

SEQ ID NO: 34834 - protein, 14 aa, Homo sapiens
  CDR3 for beta chain variable domain of TCR clone 17417 (TRBV4-1, TRBJ2-2)
CASSQAVNTGELFF

SEQ ID NO: 34835 - protein, 12 aa, Homo sapiens
  CDR3 for alpha chain variable domain of TCR clone 17418 (TRAV8-3, TRAJ26)
CAGDNYGQNFVF

SEQ ID NO: 34836 - protein, 17 aa, Homo sapiens
  CDR3 for beta chain variable domain of TCR clone 17418 (TRBV13, TRBJ2-3)
CASSLSRVAGGRNTQYF

SEQ ID NO: 34837 - protein, 14 aa, Homo sapiens
  CDR3 for alpha chain variable domain of TCR clone 17419 (TRAV1-2, TRAJ8)
CAVREDTGFQKLVF

SEQ ID NO: 34838 - protein, 15 aa, Homo sapiens
  CDR3 for beta chain variable domain of TCR clone 17419 (TRBV19, TRBJ1-2)
CASSVGQVLNYGYTF

SEQ ID NO: 34839 - protein, 14 aa, Homo sapiens
  CDR3 for alpha chain variable domain of TCR clone 17420 (TRAV1-2, TRAJ16)
CAVNWFSDGQKLLF

SEQ ID NO: 34840 - protein, 15 aa, Homo sapiens
  CDR3 for beta chain variable domain of TCR clone 17420 (TRBV9, TRBJ1-6)
CASSVAGTGDSPLHF

SEQ ID NO: 34841 - protein, 23 aa, Homo sapiens
  CDR3 for alpha chain variable domain of TCR clone 17421 (TRAV26-1, TRAJ38)
CIADNAGNNHIHNPDPAVYQLRD

SEQ ID NO: 34842 - protein, 13 aa, Homo sapiens
  CDR3 for beta chain variable domain of TCR clone 17421 (TRBV20-1, TRBJ1-1)
CSARGGGNTEAFF

SEQ ID NO: 34843 - protein, 14 aa, Homo sapiens
  CDR3 for alpha chain variable domain of TCR clone 17422 (TRAV12-2, TRAJ17)
CAVLFKAAGNKLTF

SEQ ID NO: 34844 - protein, 13 aa, Homo sapiens
  CDR3 for beta chain variable domain of TCR clone 17422 (TRBV19, TRBJ1-2)
CASSVPGQDGYTF

SEQ ID NO: 34845 - protein, 12 aa, Homo sapiens
  CDR3 for alpha chain variable domain of TCR clone 17423 (TRAV12-1, TRAJ40)
CVVYSGTYKYIF

SEQ ID NO: 34846 - protein, 18 aa, Homo sapiens
  CDR3 for beta chain variable domain of TCR clone 17423 (TRBV11-2, TRBJ2-3)
CARSLGGASRGAPNTQYF

SEQ ID NO: 34847 - protein, 11 aa, Homo sapiens
  CDR3 for alpha chain variable domain of TCR clone 17424 (TRAV21, TRAJ34)
CAHYNADKLIF

SEQ ID NO: 34848 - protein, 13 aa, Homo sapiens
  CDR3 for beta chain variable domain of TCR clone 17424 (TRBV7-6, TRBJ1-2)
CASSLVADYGYTF

SEQ ID NO: 34849 - protein, 16 aa, Homo sapiens
  CDR3 for alpha chain variable domain of TCR clone 17425 (TRAV30, TRAJ24)
CGTEIVDADSWGKFQF

SEQ ID NO: 34850 - protein, 17 aa, Homo sapiens
  CDR3 for beta chain variable domain of TCR clone 17425 (TRBV7-9, TRBJ1-4)
CASSARTGGNEKLFLAV

SEQ ID NO: 34851 - protein, 17 aa, Homo sapiens
  CDR3 for alpha chain variable domain of TCR clone 17426 (TRAV4, TRAJ13)
CLVGVQGPSGGYQKVTF

SEQ ID NO: 34852 - protein, 18 aa, Homo sapiens
  CDR3 for beta chain variable domain of TCR clone 17426 (TRBV15, TRBJ2-3)
CATSRDGARSWDTDTQYF

SEQ ID NO: 34853 - protein, 11 aa, Homo sapiens
  CDR3 for alpha chain variable domain of TCR clone 17427 (TRAV12-2, TRAJ31)
CAVTRWARLMF

SEQ ID NO: 34854 - protein, 15 aa, Homo sapiens
  CDR3 for beta chain variable domain of TCR clone 17427 (TRBV19, TRBJ2-7)
CASSIGGGLVNEQYL

SEQ ID NO: 34855 - protein, 14 aa, Homo sapiens
  CDR3 for alpha chain variable domain of TCR clone 17428 (TRAV35, TRAJ33)
CWPRGRDSNYQLIW

SEQ ID NO: 34856 - protein, 11 aa, Homo sapiens
  CDR3 for beta chain variable domain of TCR clone 17428 (TRBV10-3, TRBJ2-7)
CAISGGLEQYF

SEQ ID NO: 34857 - protein, 11 aa, Homo sapiens
  CDR3 for alpha chain variable domain of TCR clone 17429 (TRAV12-3, TRAJ43)
RAMSVSNDMRF

SEQ ID NO: 34858 - protein, 13 aa, Homo sapiens
  CDR3 for beta chain variable domain of TCR clone 17429 (TRBV20-1, TRBJ1-1)
CSAPLGGGTEAFF

SEQ ID NO: 34859 - protein, 11 aa, Homo sapiens
  CDR3 for alpha chain variable domain of TCR clone 17430 (TRAV17, TRAJ9)
CATTGGSKTIF

SEQ ID NO: 34860 - protein, 14 aa, Homo sapiens
  CDR3 for beta chain variable domain of TCR clone 17430 (TRBV7-9, TRBJ2-2)
CASSGLADTGELFF

SEQ ID NO: 34861 - protein, 13 aa, Homo sapiens
  CDR3 for alpha chain variable domain of TCR clone 17431 (TRAV1-1, TRAJ9)
CAAKNTGGFKTIF

SEQ ID NO: 34862 - protein, 14 aa, Homo sapiens
  CDR3 for beta chain variable domain of TCR clone 17431 (TRBV20-1, TRBJ2-1)
CSAQMGGSANEQFF

SEQ ID NO: 34863 - protein, 14 aa, Homo sapiens
  CDR3 for alpha chain variable domain of TCR clone 17432 (TRAV12-1, TRAJ17)
CVVNYKDAGNKLTF

SEQ ID NO: 34864 - protein, 17 aa, Homo sapiens
  CDR3 for beta chain variable domain of TCR clone 17432 (TRBV20-1, TRBJ2-1)
CSASSSGLAGSYNEQFF

SEQ ID NO: 34865 - protein, 12 aa, Homo sapiens
  CDR3 for alpha chain variable domain of TCR clone 17433 (TRAV8-4, TRAJ43)
CAVSVNNNDMRF

SEQ ID NO: 34866 - protein, 14 aa, Homo sapiens
  CDR3 for beta chain variable domain of TCR clone 17433 (TRBV11-2, TRBJ1-2)
CASSLGTANYGYAF

SEQ ID NO: 34867 - protein, 15 aa, Homo sapiens
  CDR3 for alpha chain variable domain of TCR clone 17434 (TRAV21, TRAJ40)
CAVRPQTSGTYKYIF

SEQ ID NO: 34868 - protein, 13 aa, Homo sapiens
  CDR3 for beta chain variable domain of TCR clone 17434 (TRBV7-2, TRBJ2-2)
CASSSARAGELFF

SEQ ID NO: 34869 - protein, 14 aa, Homo sapiens
  CDR3 for alpha chain variable domain of TCR clone 17435 (TRAV12-2, TRAJ5)
CAGNRSTGRRALTF

SEQ ID NO: 34870 - protein, 12 aa, Homo sapiens
  CDR3 for beta chain variable domain of TCR clone 17435 (TRBV19, TRBJ1-5)
CASSIAQQPQHF

SEQ ID NO: 34871 - protein, 12 aa, Homo sapiens
  CDR3 for alpha chain variable domain of TCR clone 17436 (TRAV17, TRAJ39)
CATGAAGNILTF

SEQ ID NO: 34872 - protein, 14 aa, Homo sapiens
  CDR3 for beta chain variable domain of TCR clone 17436 (TRBV7-9, TRBJ1-2)
CASSRQGANYGYTF

SEQ ID NO: 34873 - protein, 13 aa, Homo sapiens
  CDR3 for alpha chain variable domain of TCR clone 17437 (TRAV1-2, TRAJ20)
CAVRDGNDYKLSF

SEQ ID NO: 34874 - protein, 14 aa, Homo sapiens
  CDR3 for beta chain variable domain of TCR clone 17437 (TRBV20-1, TRBJ2-1)
CSAQIGGSANEQFF

SEQ ID NO: 34875 - protein, 15 aa, Homo sapiens
  CDR3 for alpha chain variable domain of TCR clone 17438 (TRAV12-3, TRAJ6)
CAMSATTGGSYIPTF

SEQ ID NO: 34876 - protein, 16 aa, Homo sapiens
  CDR3 for beta chain variable domain of TCR clone 17438 (TRBV20-1, TRBJ1-2)
CSASMGQGVANYGSTF

SEQ ID NO: 34877 - protein, 11 aa, Homo sapiens
  CDR3 for alpha chain variable domain of TCR clone 17439 (TRAV1-2, TRAJ40)
CAVPGTYKYIF

SEQ ID NO: 34878 - protein, 16 aa, Homo sapiens
  CDR3 for beta chain variable domain of TCR clone 17439 (TRBV29-1, TRBJ2-7)
CSVEVVGTSGSYEQYL

SEQ ID NO: 34879 - protein, 10 aa, Homo sapiens
  CDR3 for alpha chain variable domain of TCR clone 17440 (TRAV26-1, TRAJ40)
CIAGTYKYIF

SEQ ID NO: 34880 - protein, 15 aa, Homo sapiens
  CDR3 for beta chain variable domain of TCR clone 17440 (TRBV19, TRBJ2-1)
CASSSPGVPPDEQFF

SEQ ID NO: 34881 - protein, 11 aa, Homo sapiens
  CDR3 for alpha chain variable domain of TCR clone 17441 (TRAV2, TRAJ13)
CASGGYQKVTF

SEQ ID NO: 34882 - protein, 15 aa, Homo sapiens
  CDR3 for beta chain variable domain of TCR clone 17441 (TRBV11-3, TRBJ2-7)
CASSPGPASSYEQYF

SEQ ID NO: 34883 - protein, 13 aa, Homo sapiens
  CDR3 for alpha chain variable domain of TCR clone 17442 (TRAV3, TRAJ21)
CAVREPDFNNFYF

SEQ ID NO: 34884 - protein, 13 aa, Homo sapiens
  CDR3 for beta chain variable domain of TCR clone 17442 (TRBV9, TRBJ2-1)
CASSPSGGNEQFF

SEQ ID NO: 34885 - protein, 11 aa, Homo sapiens
  CDR3 for alpha chain variable domain of TCR clone 17443 (TRAV2, TRAJ13)
CASGGYQKVTS

SEQ ID NO: 34886 - protein, 16 aa, Homo sapiens
  CDR3 for beta chain variable domain of TCR clone 17443 (TRBV6-1, TRBJ2-5)
CASSETLDRGAETQYF

SEQ ID NO: 34887 - protein, 16 aa, Homo sapiens
  CDR3 for alpha chain variable domain of TCR clone 17444 (TRAV30, TRAJ24)
CGTEIVDADSWGKFQF

SEQ ID NO: 34888 - protein, 16 aa, Homo sapiens
  CDR3 for beta chain variable domain of TCR clone 17444 (TRBV7-3, TRBJ2-1)
CASSLEGYRSYNEQFF

SEQ ID NO: 34889 - protein, 12 aa, Homo sapiens
  CDR3 for alpha chain variable domain of TCR clone 17445 (TRAV12-1, TRAJ40)
CVFYSGTYEYIF

SEQ ID NO: 34890 - protein, 18 aa, Homo sapiens
  CDR3 for beta chain variable domain of TCR clone 17445 (TRBV12-4, TRBJ2-2)
CASSLVAGTRGRTGELFF

SEQ ID NO: 34891 - protein, 13 aa, Homo sapiens
  CDR3 for alpha chain variable domain of TCR clone 17446 (TRAV8-6, TRAJ21)
CAVSPSSLSKFYF

SEQ ID NO: 34892 - protein, 14 aa, Homo sapiens
  CDR3 for beta chain variable domain of TCR clone 17446 (TRBV7-9, TRBJ2-5)
CASSLDTAQETQYF

SEQ ID NO: 34893 - protein, 13 aa, Homo sapiens
  CDR3 for alpha chain variable domain of TCR clone 17447 (TRAV8-3, TRAJ28)
CAVGAVGSCQLTF

SEQ ID NO: 34894 - protein, 14 aa, Homo sapiens
  CDR3 for beta chain variable domain of TCR clone 17447 (TRBV7-2, TRBJ2-7)
CASRSQGAAYEQYF

SEQ ID NO: 34895 - protein, 12 aa, Homo sapiens
  CDR3 for alpha chain variable domain of TCR clone 17448 (TRAV8-3, TRAJ20)
CTVGANDYKLSF

SEQ ID NO: 34896 - protein, 16 aa, Homo sapiens
  CDR3 for beta chain variable domain of TCR clone 17448 (TRBV19, TRBJ2-2)
CASRSPGTGATGELFF

SEQ ID NO: 34897 - protein, 14 aa, Homo sapiens
  CDR3 for alpha chain variable domain of TCR clone 17449 (TRAV1-2, TRAJ8)
CAVREDTGFQKLVF

SEQ ID NO: 34898 - protein, 14 aa, Homo sapiens
  CDR3 for beta chain variable domain of TCR clone 17449 (TRBV12-4, TRBJ1-1)
CASRPGQGRTEAFF

SEQ ID NO: 34899 - protein, 14 aa, Homo sapiens
  CDR3 for alpha chain variable domain of TCR clone 17450 (TRAV26-1, TRAJ38)
CIADNAGNNRKLLW

SEQ ID NO: 34900 - protein, 17 aa, Homo sapiens
  CDR3 for beta chain variable domain of TCR clone 17450 (TRBV7-9, TRBJ2-3)
CASSPTVAGDLTDTQYF

SEQ ID NO: 34901 - protein, 14 aa, Homo sapiens
  CDR3 for alpha chain variable domain of TCR clone 17451 (TRAV2, TRAJ37)
CAVDFTSNTGKLLF

SEQ ID NO: 34902 - protein, 15 aa, Homo sapiens
  CDR3 for beta chain variable domain of TCR clone 17451 (TRBV20-1, TRBJ1-1)
CSASRGVTGNTEAFF

SEQ ID NO: 34903 - protein, 13 aa, Homo sapiens
  CDR3 for alpha chain variable domain of TCR clone 17452 (TRAV21, TRAJ20)
CAVGLRVDYKLSF

SEQ ID NO: 34904 - protein, 13 aa, Homo sapiens
  CDR3 for beta chain variable domain of TCR clone 17452 (TRBV6-1, TRBJ1-1)
CASSRQGSTEAFF

SEQ ID NO: 34905 - protein, 14 aa, Homo sapiens
  CDR3 for alpha chain variable domain of TCR clone 17453 (TRAV12-2, TRAJ53)
CRERGGGSNYKLTF

SEQ ID NO: 34906 - protein, 12 aa, Homo sapiens
  CDR3 for beta chain variable domain of TCR clone 17453 (TRBV7-6, TRBJ2-5)
CASSLSQETQYF

SEQ ID NO: 34907 - protein, 16 aa, Homo sapiens
  CDR3 for alpha chain variable domain of TCR clone 17454 (TRAV16, TRAJ4)
CALSRMFSGGFNKLIF

SEQ ID NO: 34908 - protein, 16 aa, Homo sapiens
  CDR3 for beta chain variable domain of TCR clone 17454 (TRBV24-1, TRBJ2-3)
CATSDPGTGATDTQYF

SEQ ID NO: 34909 - protein, 14 aa, Homo sapiens
  CDR3 for alpha chain variable domain of TCR clone 17455 (TRAV26-1, TRAJ45)
CIEVTGGGAEGLTF

SEQ ID NO: 34910 - protein, 13 aa, Homo sapiens
  CDR3 for beta chain variable domain of TCR clone 17455 (TRBV7-6, TRBJ1-2)
CASSLVADYGYTF

SEQ ID NO: 34911 - protein, 23 aa, Homo sapiens
  CDR3 for alpha chain variable domain of TCR clone 17456 (TRAV20, TRAJ32)
CAVDGMVVLQTSSSLELALCLLS

SEQ ID NO: 34912 - protein, 16 aa, Homo sapiens
  CDR3 for beta chain variable domain of TCR clone 17456 (TRBV19, TRBJ2-2)
CASRSPGTGATGELFF

SEQ ID NO: 34913 - protein, 14 aa, Homo sapiens
  CDR3 for alpha chain variable domain of TCR clone 17457 (TRAV38-1, TRAJ43)
CAFMKHNNNNDMRF

SEQ ID NO: 34914 - protein, 16 aa, Homo sapiens
  CDR3 for beta chain variable domain of TCR clone 17457 (TRBV11-2, TRBJ2-5)
CASSGQGYSPQETQYF

SEQ ID NO: 34915 - protein, 11 aa, Homo sapiens
  CDR3 for alpha chain variable domain of TCR clone 17458 (TRAV8-6, TRAJ42)
GGGGSQGNLIF

SEQ ID NO: 34916 - protein, 13 aa, Homo sapiens
  CDR3 for beta chain variable domain of TCR clone 17458 (TRBV7-3, TRBJ1-1)
CASSQDWGAEAFF

SEQ ID NO: 34917 - protein, 12 aa, Homo sapiens
  CDR3 for alpha chain variable domain of TCR clone 17459 (TRAV3, TRAJ20)
CAVRDPDYKLSF

SEQ ID NO: 34918 - protein, 15 aa, Homo sapiens
  CDR3 for beta chain variable domain of TCR clone 17459 (TRBV20-1, TRBJ2-7)
CSARDRVSGMDEQYF

SEQ ID NO: 34919 - protein, 12 aa, Homo sapiens
  CDR3 for alpha chain variable domain of TCR clone 17460 (TRAV3, TRAJ31)
CAVRDGNARLLF

SEQ ID NO: 34920 - protein, 18 aa, Homo sapiens
  CDR3 for beta chain variable domain of TCR clone 17460 (TRBV7-2, TRBJ2-3)
CASSLKREGSGITDTQYF

SEQ ID NO: 34921 - protein, 14 aa, Homo sapiens
  CDR3 for alpha chain variable domain of TCR clone 17461 (TRAV8-2, TRAJ4)
CVVSPSGGYNRLIF

SEQ ID NO: 34922 - protein, 15 aa, Homo sapiens
  CDR3 for beta chain variable domain of TCR clone 17461 (TRBV4-1, TRBJ1-4)
CASSDTGGTNEKLFF

SEQ ID NO: 34923 - protein, 11 aa, Homo sapiens
  CDR3 for alpha chain variable domain of TCR clone 17462 (TRAV13-1, TRAJ43)
CAASNLLTCAL

SEQ ID NO: 34924 - protein, 13 aa, Homo sapiens
  CDR3 for beta chain variable domain of TCR clone 17462 (TRBV6-3, TRBJ2-1)
CASSYDNYNEQFF

SEQ ID NO: 34925 - protein, 11 aa, Homo sapiens
  CDR3 for alpha chain variable domain of TCR clone 17463 (TRAV1-2, TRAJ20)
CAVANDYKLSF

SEQ ID NO: 34926 - protein, 18 aa, Homo sapiens
  CDR3 for beta chain variable domain of TCR clone 17463 (TRBV20-1, TRBJ2-6)
CSAETTPTHGAGANVLTF

SEQ ID NO: 34927 - protein, 18 aa, Homo sapiens
  CDR3 for alpha chain variable domain of TCR clone 17464 (TRAV12-3, TRAJ52)
CAMSVGGAGGTSYGKPTF

SEQ ID NO: 34928 - protein, 15 aa, Homo sapiens
  CDR3 for beta chain variable domain of TCR clone 17464 (TRBV27, TRBJ1-6)
CASSFDRGLGSPLHF

SEQ ID NO: 34929 - protein, 16 aa, Homo sapiens
  CDR3 for alpha chain variable domain of TCR clone 17465 (TRAV26-1, TRAJ53)
CIVRVALGGSNYKLTF

SEQ ID NO: 34930 - protein, 12 aa, Homo sapiens
  CDR3 for beta chain variable domain of TCR clone 17465 (TRBV7-9, TRBJ1-5)
CASSPQGQPQHF

SEQ ID NO: 34931 - protein, 13 aa, Homo sapiens
  CDR3 for alpha chain variable domain of TCR clone 17466 (TRAV13-1, TRAJ39)
CSKYSNAGNMLTF

SEQ ID NO: 34932 - protein, 14 aa, Homo sapiens
  CDR3 for beta chain variable domain of TCR clone 17466 (TRBV12-4, TRBJ2-7)
CASSPRQDLYEQYF

SEQ ID NO: 34933 - protein, 14 aa, Homo sapiens
  CDR3 for alpha chain variable domain of TCR clone 17467 (TRAV12-1, TRAJ17)
CVVKYKAAGNKLTF

SEQ ID NO: 34934 - protein, 17 aa, Homo sapiens
  CDR3 for beta chain variable domain of TCR clone 17467 (TRBV20-1, TRBJ2-1)
CSASSSGLAGSYNEQFF

SEQ ID NO: 34935 - protein, 13 aa, Homo sapiens
  CDR3 for alpha chain variable domain of TCR clone 17468 (TRAV2, TRAJ40)
YAVVTSGTYKYIF

SEQ ID NO: 34936 - protein, 15 aa, Homo sapiens
  CDR3 for beta chain variable domain of TCR clone 17468 (TRBV11-3, TRBJ2-3)
CASLKDGREGDTQYF

SEQ ID NO: 34937 - protein, 14 aa, Homo sapiens
  CDR3 for alpha chain variable domain of TCR clone 17469 (TRAV9-2, TRAJ39)
CALYIYNAGNMLTF

SEQ ID NO: 34938 - protein, 14 aa, Homo sapiens
  CDR3 for beta chain variable domain of TCR clone 17469 (TRBV13, TRBJ2-5)
CASSLERVGETQYF

SEQ ID NO: 34939 - protein, 18 aa, Homo sapiens
  CDR3 for alpha chain variable domain of TCR clone 17470 (TRAV13-1, TRAJ52)
CAASKRSAGGTSYGNLTF

SEQ ID NO: 34940 - protein, 13 aa, Homo sapiens
  CDR3 for beta chain variable domain of TCR clone 17470 (TRBV12-4, TRBJ1-2)
CASSLRQGKGYTF

SEQ ID NO: 34941 - protein, 14 aa, Homo sapiens
  CDR3 for alpha chain variable domain of TCR clone 17471 (TRAV26-1, TRAJ38)
CIADNAGNNRKLIW

SEQ ID NO: 34942 - protein, 14 aa, Homo sapiens
  CDR3 for beta chain variable domain of TCR clone 17471 (TRBV25-1, TRBJ1-1)
CASTHLGGNTEAFF

SEQ ID NO: 34943 - protein, 15 aa, Homo sapiens
  CDR3 for alpha chain variable domain of TCR clone 17472 (TRAV26-1, TRAJ29)
CIVRVEGSGNTPLVF

SEQ ID NO: 34944 - protein, 14 aa, Homo sapiens
  CDR3 for beta chain variable domain of TCR clone 17472 (TRBV18, TRBJ2-5)
RASSPGVSQETQYF

SEQ ID NO: 34945 - protein, 17 aa, Homo sapiens
  CDR3 for alpha chain variable domain of TCR clone 17473 (TRAV3, TRAJ28)
CAVREAYSGAGSYQLTF

SEQ ID NO: 34946 - protein, 15 aa, Homo sapiens
  CDR3 for beta chain variable domain of TCR clone 17473 (TRBV19, TRBJ1-6)
CASSTQGAVGSPLHF

SEQ ID NO: 34947 - protein, 10 aa, Homo sapiens
  CDR3 for alpha chain variable domain of TCR clone 17474 (TRAV12-3, TRAJ49)
CAMNDDQVYF

SEQ ID NO: 34948 - protein, 13 aa, Homo sapiens
  CDR3 for beta chain variable domain of TCR clone 17474 (TRBV12-4, TRBJ1-1)
CASSPGTGFEAFF

SEQ ID NO: 34949 - protein, 14 aa, Homo sapiens
  CDR3 for alpha chain variable domain of TCR clone 17475 (TRAV1-2, TRAJ8)
CAVREDTGSQKLVF

SEQ ID NO: 34950 - protein, 13 aa, Homo sapiens
  CDR3 for beta chain variable domain of TCR clone 17475 (TRBV10-3, TRBJ1-2)
CAISERDSYGYTF

SEQ ID NO: 34951 - protein, 20 aa, Homo sapiens
  CDR3 for alpha chain variable domain of TCR clone 17476 (TRAV21, TRAJ4)
AASQPGDSATLAGGYNKLVF

SEQ ID NO: 34952 - protein, 19 aa, Homo sapiens
  CDR3 for beta chain variable domain of TCR clone 17476 (TRBV18, TRBJ1-3)
CASSPLSRTGMSSGNTIYF

SEQ ID NO: 34953 - protein, 17 aa, Homo sapiens
  CDR3 for alpha chain variable domain of TCR clone 17477 (TRAV26-1, TRAJ53)
CIVRVDDSGGSNYELTF

SEQ ID NO: 34954 - protein, 15 aa, Homo sapiens
  CDR3 for beta chain variable domain of TCR clone 17477 (TRBV20-1, TRBJ2-7)
CSARVPAAYFYEQYF

SEQ ID NO: 34955 - protein, 18 aa, Homo sapiens
  CDR3 for alpha chain variable domain of TCR clone 17478 (TRAV13-1, TRAJ52)
CAASKRSAGGTSYGKLTF

SEQ ID NO: 34956 - protein, 13 aa, Homo sapiens
  CDR3 for beta chain variable domain of TCR clone 17478 (TRBV12-4, TRBJ1-2)
CASSLRRGKGYTF

SEQ ID NO: 34957 - protein, 14 aa, Homo sapiens
  CDR3 for alpha chain variable domain of TCR clone 17479 (TRAV38-1, TRAJ40)
FALRPTSGTYKYIF

SEQ ID NO: 34958 - protein, 14 aa, Homo sapiens
  CDR3 for beta chain variable domain of TCR clone 17479 (TRBV25-1, TRBJ1-1)
CASTHLGGNTEAFF

SEQ ID NO: 34959 - protein, 13 aa, Homo sapiens
  CDR3 for alpha chain variable domain of TCR clone 17480 (TRAV8-3, TRAJ43)
CAVVPYNNNDIRF

SEQ ID NO: 34960 - protein, 16 aa, Homo sapiens
  CDR3 for beta chain variable domain of TCR clone 17480 (TRBV7-2, TRBJ2-5)
CASSPFPTGGEETQYF

SEQ ID NO: 34961 - protein, 11 aa, Homo sapiens
  CDR3 for alpha chain variable domain of TCR clone 17481 (TRAV3, TRAJ21)
CAVGNFNKFYF

SEQ ID NO: 34962 - protein, 17 aa, Homo sapiens
  CDR3 for beta chain variable domain of TCR clone 17481 (TRBV7-3, TRBJ2-3)
CASSLMKRMRGADTQYF

SEQ ID NO: 34963 - protein, 18 aa, Homo sapiens
  CDR3 for alpha chain variable domain of TCR clone 17482 (TRAV21, TRAJ52)
CAVRPSPAGGTSYGKLTF

SEQ ID NO: 34964 - protein, 13 aa, Homo sapiens
  CDR3 for beta chain variable domain of TCR clone 17482 (TRBV7-9, TRBJ2-3)
CASSPGSTDTQYF

SEQ ID NO: 34965 - protein, 15 aa, Homo sapiens
  CDR3 for alpha chain variable domain of TCR clone 17483 (TRAV3, TRAJ22)
CAVRDRGGSARQLTF

SEQ ID NO: 34966 - protein, 16 aa, Homo sapiens
  CDR3 for beta chain variable domain of TCR clone 17483 (TRBV5-4, TRBJ2-3)
CASQQPGAGGTDTQYF

SEQ ID NO: 34967 - protein, 11 aa, Homo sapiens
  CDR3 for alpha chain variable domain of TCR clone 17484 (TRAV1-1, TRAJ23)
CAVRQGGKLIF

SEQ ID NO: 34968 - protein, 20 aa, Homo sapiens
  CDR3 for beta chain variable domain of TCR clone 17484 (TRBV7-8, TRBJ2-2)
CVSSHLFPGPTIHITGELFF

SEQ ID NO: 34969 - protein, 14 aa, Homo sapiens
  CDR3 for alpha chain variable domain of TCR clone 17485 (TRAV1-2, TRAJ16)
CAVNRFSDGQKLLF

SEQ ID NO: 34970 - protein, 15 aa, Homo sapiens
  CDR3 for beta chain variable domain of TCR clone 17485 (TRBV20-1, TRBJ2-7)
CSAESGTSGAYEQYF

SEQ ID NO: 34971 - protein, 15 aa, Homo sapiens
  CDR3 for alpha chain variable domain of TCR clone 17486 (TRAV26-1, TRAJ22)
CIVRVSFWFFKATDL

SEQ ID NO: 34972 - protein, 13 aa, Homo sapiens
  CDR3 for beta chain variable domain of TCR clone 17486 (TRBV7-9, TRBJ1-2)
CASSLKQNYGYTF

SEQ ID NO: 34973 - protein, 13 aa, Homo sapiens
  CDR3 for alpha chain variable domain of TCR clone 17487 (TRAV3, TRAJ27)
CAVRPLVAGKSTF

SEQ ID NO: 34974 - protein, 13 aa, Homo sapiens
  CDR3 for beta chain variable domain of TCR clone 17487 (TRBV7-9, TRBJ2-3)
CASSPGSTDTQYF

SEQ ID NO: 34975 - protein, 15 aa, Homo sapiens
  CDR3 for alpha chain variable domain of TCR clone 17488 (TRAV25, TRAJ52)
CAGRPGGTSYGKLTF

SEQ ID NO: 34976 - protein, 17 aa, Homo sapiens
  CDR3 for beta chain variable domain of TCR clone 17488 (TRBV7-8, TRBJ2-6)
CASSAGTGGAGANVLTS

SEQ ID NO: 34977 - protein, 14 aa, Homo sapiens
  CDR3 for alpha chain variable domain of TCR clone 17489 (TRAV38-1, TRAJ40)
CALRPTSGTYKYIF

SEQ ID NO: 34978 - protein, 14 aa, Homo sapiens
  CDR3 for beta chain variable domain of TCR clone 17489 (TRBV25-1, TRBJ1-1)
CASTHLGGNTEAFS

SEQ ID NO: 34979 - protein, 15 aa, Homo sapiens
  CDR3 for alpha chain variable domain of TCR clone 17490 (TRAV26-1, TRAJ29)
CIVRVEGSGNTPLVF

SEQ ID NO: 34980 - protein, 14 aa, Homo sapiens
  CDR3 for beta chain variable domain of TCR clone 17490 (TRBV18, TRBJ2-5)
CASSPGVSQETQCF

SEQ ID NO: 34981 - protein, 11 aa, Homo sapiens
  CDR3 for alpha chain variable domain of TCR clone 17491 (TRAV2, TRAJ21)
CAVFNFNKFHF

SEQ ID NO: 34982 - protein, 14 aa, Homo sapiens
  CDR3 for beta chain variable domain of TCR clone 17491 (TRBV15, TRBJ2-3)
CATRSGTSTDTQYF

SEQ ID NO: 34983 - protein, 11 aa, Homo sapiens
  CDR3 for alpha chain variable domain of TCR clone 17492 (TRAV12-3, TRAJ27)
CAMANAGKSTF

SEQ ID NO: 34984 - protein, 13 aa, Homo sapiens
  CDR3 for beta chain variable domain of TCR clone 17492 (TRBV20-1, TRBJ1-1)
CSARVGGNTEALF

SEQ ID NO: 34985 - protein, 13 aa, Homo sapiens
  CDR3 for alpha chain variable domain of TCR clone 17493 (TRAV27, TRAJ49)
CAPRPYTSNQFYF

SEQ ID NO: 34986 - protein, 16 aa, Homo sapiens
  CDR3 for beta chain variable domain of TCR clone 17493 (TRBV4-1, TRBJ1-2)
CASSQDAGQVLYGYTF

SEQ ID NO: 34987 - protein, 14 aa, Homo sapiens
  CDR3 for alpha chain variable domain of TCR clone 17494 (TRAV26-1, TRAJ34)
CIVRVAYNTEKLIF

SEQ ID NO: 34988 - protein, 15 aa, Homo sapiens
  CDR3 for beta chain variable domain of TCR clone 17494 (TRBV20-1, TRBJ2-7)
CSARVPAAYFYEQYF

SEQ ID NO: 34989 - protein, 14 aa, Homo sapiens
  CDR3 for alpha chain variable domain of TCR clone 17495 (TRAV12-2, TRAJ13)
CAVKKTGGYQKVTF

SEQ ID NO: 34990 - protein, 15 aa, Homo sapiens
  CDR3 for beta chain variable domain of TCR clone 17495 (TRBV27, TRBJ2-1)
CASSNGGGSSNAQFF

SEQ ID NO: 34991 - protein, 16 aa, Homo sapiens
  CDR3 for alpha chain variable domain of TCR clone 17496 (TRAV27, TRAJ13)
CAGAKSDSGGYQKFTF

SEQ ID NO: 34992 - protein, 15 aa, Homo sapiens
  CDR3 for beta chain variable domain of TCR clone 17496 (TRBV29-1, TRBJ2-1)
CSVGRHALFYNEQFF

SEQ ID NO: 34993 - protein, 15 aa, Homo sapiens
  CDR3 for alpha chain variable domain of TCR clone 17497 (TRAV8-2, TRAJ40)
CVVLGTTSGTYKYIF

SEQ ID NO: 34994 - protein, 16 aa, Homo sapiens
  CDR3 for beta chain variable domain of TCR clone 17497 (TRBV7-3, TRBJ2-1)
CASSLEGDRSYNEQFF

SEQ ID NO: 34995 - protein, 14 aa, Homo sapiens
  CDR3 for alpha chain variable domain of TCR clone 17498 (TRAV12-1, TRAJ17)
CVVNYKAAGNKLTS

SEQ ID NO: 34996 - protein, 17 aa, Homo sapiens
  CDR3 for beta chain variable domain of TCR clone 17498 (TRBV20-1, TRBJ2-1)
CSASSSGLAGSYNEQFF

SEQ ID NO: 34997 - protein, 13 aa, Homo sapiens
  CDR3 for alpha chain variable domain of TCR clone 17499 (TRAV27, TRAJ6)
CAGGTRGSYIPTF

SEQ ID NO: 34998 - protein, 15 aa, Homo sapiens
  CDR3 for beta chain variable domain of TCR clone 17499 (TRBV11-2, TRBJ1-3)
CASSLSPLVRDTMYF

SEQ ID NO: 34999 - protein, 14 aa, Homo sapiens
  CDR3 for alpha chain variable domain of TCR clone 17500 (TRAV12-2, TRAJ17)
CAVLFKAAGNKLTF

SEQ ID NO: 35000 - protein, 16 aa, Homo sapiens
  CDR3 for beta chain variable domain of TCR clone 17500 (TRBV7-3, TRBJ2-2)
CASSLKRGTLSGELFF

SEQ ID NO: 35001 - protein, 11 aa, Homo sapiens
  CDR3 for alpha chain variable domain of TCR clone 17501 (TRAV2, TRAJ13)
CASGGYHKVTF

SEQ ID NO: 35002 - protein, 16 aa, Homo sapiens
  CDR3 for beta chain variable domain of TCR clone 17501 (TRBV6-1, TRBJ2-5)
CASSETLDRGAETQYF

SEQ ID NO: 35003 - protein, 13 aa, Homo sapiens
  CDR3 for alpha chain variable domain of TCR clone 17502 (TRAV5, TRAJ30)
CAESSNRDDKIIF

SEQ ID NO: 35004 - protein, 15 aa, Homo sapiens
  CDR3 for beta chain variable domain of TCR clone 17502 (TRBV27, TRBJ1-5)
CASSLGTGFDQPQHF

SEQ ID NO: 35005 - protein, 15 aa, Homo sapiens
  CDR3 for alpha chain variable domain of TCR clone 17503 (TRAV12-2, TRAJ43)
CAFDMRFGAGTRLTV

SEQ ID NO: 35006 - protein, 18 aa, Homo sapiens
  CDR3 for beta chain variable domain of TCR clone 17503 (TRBV20-1, TRBJ2-3)
CSASGLAGGPGTTGTQYF

SEQ ID NO: 35007 - protein, 17 aa, Homo sapiens
  CDR3 for alpha chain variable domain of TCR clone 17504 (TRAV13-1, TRAJ28)
CAASPPYSGAGSYQLTF

SEQ ID NO: 35008 - protein, 12 aa, Homo sapiens
  CDR3 for beta chain variable domain of TCR clone 17504 (TRBV11-2, TRBJ2-2)
CASSLPTGGLFF

SEQ ID NO: 35009 - protein, 14 aa, Homo sapiens
  CDR3 for alpha chain variable domain of TCR clone 17505 (TRAV1-2, TRAJ8)
CAVREDTGFQKLVF

SEQ ID NO: 35010 - protein, 14 aa, Homo sapiens
  CDR3 for beta chain variable domain of TCR clone 17505 (TRBV18, TRBJ2-7)
CASSPRGGAYEQYF

SEQ ID NO: 35011 - protein, 13 aa, Homo sapiens
  CDR3 for alpha chain variable domain of TCR clone 17506 (TRAV17, TRAJ26)
CATVDNYGQNFVF

SEQ ID NO: 35012 - protein, 16 aa, Homo sapiens
  CDR3 for beta chain variable domain of TCR clone 17506 (TRBV2, TRBJ2-1)
CASSVGGSLSYNEQFS

SEQ ID NO: 35013 - protein, 14 aa, Homo sapiens
  CDR3 for alpha chain variable domain of TCR clone 17507 (TRAV12-2, TRAJ40)
CAVKIPSGAYKYIF

SEQ ID NO: 35014 - protein, 20 aa, Homo sapiens
  CDR3 for beta chain variable domain of TCR clone 17507 (TRBV28, TRBJ2-1)
CASTPIGRSPGLAGGNEQFF

SEQ ID NO: 35015 - protein, 13 aa, Homo sapiens
  CDR3 for alpha chain variable domain of TCR clone 17508 (TRAV12-2, TRAJ33)
CGDAPDSNYQLIW

SEQ ID NO: 35016 - protein, 15 aa, Homo sapiens
  CDR3 for beta chain variable domain of TCR clone 17508 (TRBV27, TRBJ2-1)
CASSNGGGSSNEQFF

SEQ ID NO: 35017 - protein, 15 aa, Homo sapiens
  CDR3 for alpha chain variable domain of TCR clone 17509 (TRAV3, TRAJ4)
CAVRDGTGGDNKLIF

SEQ ID NO: 35018 - protein, 16 aa, Homo sapiens
  CDR3 for beta chain variable domain of TCR clone 17509 (TRBV27, TRBJ2-2)
CASSSSGVSNTGELFF

SEQ ID NO: 35019 - protein, 15 aa, Homo sapiens
  CDR3 for alpha chain variable domain of TCR clone 17510 (TRAV12-3, TRAJ47)
CAMTKVLEYGNKLVF

SEQ ID NO: 35020 - protein, 15 aa, Homo sapiens
  CDR3 for beta chain variable domain of TCR clone 17510 (TRBV5-4, TRBJ2-3)
CASTGGGRAIDTQYF

SEQ ID NO: 35021 - protein, 15 aa, Homo sapiens
  CDR3 for alpha chain variable domain of TCR clone 17511 (TRAV21, TRAJ37)
CAVRPTLSSTGKLIF

SEQ ID NO: 35022 - protein, 16 aa, Homo sapiens
  CDR3 for beta chain variable domain of TCR clone 17511 (TRBV24-1, TRBJ2-3)
CATSDRRQDLTDTQYF

SEQ ID NO: 35023 - protein, 17 aa, Homo sapiens
  CDR3 for alpha chain variable domain of TCR clone 17512 (TRAV3, TRAJ6)
CAVGDGPRAGGSYIPTF

SEQ ID NO: 35024 - protein, 20 aa, Homo sapiens
  CDR3 for beta chain variable domain of TCR clone 17512 (TRBV28, TRBJ2-1)
CASTPIGRSPGLAGGNEQFF

SEQ ID NO: 35025 - protein, 14 aa, Homo sapiens
  CDR3 for alpha chain variable domain of TCR clone 17513 (TRAV14/DV4, TRAJ54)
CAMREAPGAQKLVF

SEQ ID NO: 35026 - protein, 15 aa, Homo sapiens
  CDR3 for beta chain variable domain of TCR clone 17513 (TRBV5-1, TRBJ2-7)
CASSLSGGPAREQYF

SEQ ID NO: 35027 - protein, 14 aa, Homo sapiens
  CDR3 for alpha chain variable domain of TCR clone 17514 (TRAV21, TRAJ38)
CAVANAGNNRKLIW

SEQ ID NO: 35028 - protein, 16 aa, Homo sapiens
  CDR3 for beta chain variable domain of TCR clone 17514 (TRBV5-4, TRBJ2-1)
CASSSALAGAYNEQFF

SEQ ID NO: 35029 - protein, 11 aa, Homo sapiens
  CDR3 for alpha chain variable domain of TCR clone 17515 (TRAV1-2, TRAJ31)
CAVNNNSRLMF

SEQ ID NO: 35030 - protein, 15 aa, Homo sapiens
  CDR3 for beta chain variable domain of TCR clone 17515 (TRBV28, TRBJ2-1)
CASSIIAGGRSEQFF

SEQ ID NO: 35031 - protein, 14 aa, Homo sapiens
  CDR3 for alpha chain variable domain of TCR clone 17516 (TRAV12-2, TRAJ13)
CAVKKTGGYQKVTF

SEQ ID NO: 35032 - protein, 17 aa, Homo sapiens
  CDR3 for beta chain variable domain of TCR clone 17516 (TRBV24-1, TRBJ2-1)
CATSDVSTSGTYNEQFS

SEQ ID NO: 35033 - protein, 14 aa, Homo sapiens
  CDR3 for alpha chain variable domain of TCR clone 17517 (TRAV9-2, TRAJ39)
CALYIYNAGNMLTF

SEQ ID NO: 35034 - protein, 16 aa, Homo sapiens
  CDR3 for beta chain variable domain of TCR clone 17517 (TRBV12-4, TRBJ2-5)
CASSFFVRGRQETQYF

SEQ ID NO: 35035 - protein, 13 aa, Homo sapiens
  CDR3 for alpha chain variable domain of TCR clone 17518 (TRAV38-1, TRAJ42)
CARWGGSQGNLIF

SEQ ID NO: 35036 - protein, 17 aa, Homo sapiens
  CDR3 for beta chain variable domain of TCR clone 17518 (TRBV20-1, TRBJ2-1)
RSARDPLAGVWDNEQFF

SEQ ID NO: 35037 - protein, 14 aa, Homo sapiens
  CDR3 for alpha chain variable domain of TCR clone 17519 (TRAV35, TRAJ33)
CAGSSQDSNYQLIL

SEQ ID NO: 35038 - protein, 15 aa, Homo sapiens
  CDR3 for beta chain variable domain of TCR clone 17519 (TRBV20-1, TRBJ2-7)
CSAESGTSGAYEQYF

SEQ ID NO: 35039 - protein, 12 aa, Homo sapiens
  CDR3 for alpha chain variable domain of TCR clone 17520 (TRAV16, TRAJ56)
CAPTGANSKPTF

SEQ ID NO: 35040 - protein, 17 aa, Homo sapiens
  CDR3 for beta chain variable domain of TCR clone 17520 (TRBV27, TRBJ2-6)
CASSLTGFASGANVLTF

SEQ ID NO: 35041 - protein, 16 aa, Homo sapiens
  CDR3 for alpha chain variable domain of TCR clone 17521 (TRAV3, TRAJ37)
CAVRPHGSGNTGKLIF

SEQ ID NO: 35042 - protein, 16 aa, Homo sapiens
  CDR3 for beta chain variable domain of TCR clone 17521 (TRBV9, TRBJ1-2)
CASSVEEEVSPYGYTF

SEQ ID NO: 35043 - protein, 15 aa, Homo sapiens
  CDR3 for alpha chain variable domain of TCR clone 17522 (TRAV8-3, TRAJ15)
CAVGAPNQAGTALLF

SEQ ID NO: 35044 - protein, 14 aa, Homo sapiens
  CDR3 for beta chain variable domain of TCR clone 17522 (TRBV20-1, TRBJ2-1)
CSPNDEASYNEQFF

SEQ ID NO: 35045 - protein, 12 aa, Homo sapiens
  CDR3 for alpha chain variable domain of TCR clone 17523 (TRAV12-3, TRAJ17)
CAMTLTGNKLTF

SEQ ID NO: 35046 - protein, 17 aa, Homo sapiens
  CDR3 for beta chain variable domain of TCR clone 17523 (TRBV28, TRBJ2-5)
CASSRQGGLAGAETQYF

SEQ ID NO: 35047 - protein, 13 aa, Homo sapiens
  CDR3 for alpha chain variable domain of TCR clone 17524 (TRAV16, TRAJ28)
CAPTGAGSYQLTF

SEQ ID NO: 35048 - protein, 16 aa, Homo sapiens
  CDR3 for beta chain variable domain of TCR clone 17524 (TRBV28, TRBJ1-5)
CASSLTGQGWDQPQHF

SEQ ID NO: 35049 - protein, 20 aa, Homo sapiens
  CDR3 for alpha chain variable domain of TCR clone 17525 (TRAV1-1, TRAJ4)
CLLLPRCEGFLSGGYNKLIF

SEQ ID NO: 35050 - protein, 16 aa, Homo sapiens
  CDR3 for beta chain variable domain of TCR clone 17525 (TRBV28, TRBJ1-4)
CASSPPYRGRSEKLFF

SEQ ID NO: 35051 - protein, 15 aa, Homo sapiens
  CDR3 for alpha chain variable domain of TCR clone 17526 (TRAV12-2, TRAJ53)
CAVNGGGGSNYKLTF

SEQ ID NO: 35052 - protein, 16 aa, Homo sapiens
  CDR3 for beta chain variable domain of TCR clone 17526 (TRBV7-3, TRBJ2-3)
CASSLGLAGVADTQYF

SEQ ID NO: 35053 - protein, 11 aa, Homo sapiens
  CDR3 for alpha chain variable domain of TCR clone 17527 (TRAV1-2, TRAJ20)
CAVANDYKLSF

SEQ ID NO: 35054 - protein, 18 aa, Homo sapiens
  CDR3 for beta chain variable domain of TCR clone 17527 (TRBV20-1, TRBJ2-6)
CSAETTPTHGSGANVLTL

SEQ ID NO: 35055 - protein, 13 aa, Homo sapiens
  CDR3 for alpha chain variable domain of TCR clone 17528 (TRAV1-2, TRAJ9)
CAALNTGGFKTIF

SEQ ID NO: 35056 - protein, 15 aa, Homo sapiens
  CDR3 for beta chain variable domain of TCR clone 17528 (TRBV6-5, TRBJ2-1)
CASSYDAGAGNEQFF

SEQ ID NO: 35057 - protein, 18 aa, Homo sapiens
  CDR3 for alpha chain variable domain of TCR clone 17529 (TRAV12-3, TRAJ52)
CAMSRANAGGTSYGKLTF

SEQ ID NO: 35058 - protein, 17 aa, Homo sapiens
  CDR3 for beta chain variable domain of TCR clone 17529 (TRBV7-3, TRBJ2-3)
CASSLMKRMRGADTQYF

SEQ ID NO: 35059 - protein, 13 aa, Homo sapiens
  CDR3 for alpha chain variable domain of TCR clone 17530 (TRAV13-1, TRAJ5)
CAASDTGRRALTF

SEQ ID NO: 35060 - protein, 12 aa, Homo sapiens
  CDR3 for beta chain variable domain of TCR clone 17530 (TRBV28, TRBJ2-3)
RASSLYRDTQYF

SEQ ID NO: 35061 - protein, 14 aa, Homo sapiens
  CDR3 for alpha chain variable domain of TCR clone 17531 (TRAV9-2, TRAJ9)
CALSLIGGGFKTIF

SEQ ID NO: 35062 - protein, 18 aa, Homo sapiens
  CDR3 for beta chain variable domain of TCR clone 17531 (TRBV28, TRBJ2-6)
CASSLAGRAVSGANVLTF

SEQ ID NO: 35063 - protein, 13 aa, Homo sapiens
  CDR3 for alpha chain variable domain of TCR clone 17532 (TRAV21, TRAJ27)
CAARPGNAGKSTF

SEQ ID NO: 35064 - protein, 16 aa, Homo sapiens
  CDR3 for beta chain variable domain of TCR clone 17532 (TRBV19, TRBJ2-1)
CASSKAGPSSYNEQFF

SEQ ID NO: 35065 - protein, 13 aa, Homo sapiens
  CDR3 for alpha chain variable domain of TCR clone 17533 (TRAV2, TRAJ15)
CAVASQAGTALIF

SEQ ID NO: 35066 - protein, 12 aa, Homo sapiens
  CDR3 for beta chain variable domain of TCR clone 17533 (TRBV28, TRBJ2-6)
CAIQAGANVLTF

SEQ ID NO: 35067 - protein, 14 aa, Homo sapiens
  CDR3 for alpha chain variable domain of TCR clone 17534 (TRAV1-1, TRAJ28)
CAVNSGAGSYQLTF

SEQ ID NO: 35068 - protein, 15 aa, Homo sapiens
  CDR3 for beta chain variable domain of TCR clone 17534 (TRBV3-1, TRBJ2-7)
CASSHRDRVSYEQYF

SEQ ID NO: 35069 - protein, 14 aa, Homo sapiens
  CDR3 for alpha chain variable domain of TCR clone 17535 (TRAV17, TRAJ31)
CATVLRNNNARLMF

SEQ ID NO: 35070 - protein, 14 aa, Homo sapiens
  CDR3 for beta chain variable domain of TCR clone 17535 (TRBV12-4, TRBJ2-5)
CASSLWQKQETQYF

SEQ ID NO: 35071 - protein, 13 aa, Homo sapiens
  CDR3 for alpha chain variable domain of TCR clone 17536 (TRAV27, TRAJ41)
CAGGGNSGYALNF

SEQ ID NO: 35072 - protein, 14 aa, Homo sapiens
  CDR3 for beta chain variable domain of TCR clone 17536 (TRBV7-2, TRBJ1-1)
CASSFLTGTTEAFF

SEQ ID NO: 35073 - protein, 10 aa, Homo sapiens
  CDR3 for alpha chain variable domain of TCR clone 17537 (TRAV23/DV6, TRAJ57)
CAASSTLSQG

SEQ ID NO: 35074 - protein, 13 aa, Homo sapiens
  CDR3 for beta chain variable domain of TCR clone 17537 (TRBV7-9, TRBJ1-2)
CASSLKQNYGYTF

SEQ ID NO: 35075 - protein, 14 aa, Homo sapiens
  CDR3 for alpha chain variable domain of TCR clone 17538 (TRAV8-4, TRAJ9)
CAVRINTGGFKTIF

SEQ ID NO: 35076 - protein, 15 aa, Homo sapiens
  CDR3 for beta chain variable domain of TCR clone 17538 (TRBV10-2, TRBJ2-6)
CASSGQGTGANVLTF

SEQ ID NO: 35077 - protein, 10 aa, Homo sapiens
  CDR3 for alpha chain variable domain of TCR clone 17539 (TRAV12-3, TRAJ49)
CAMNDDQFYF

SEQ ID NO: 35078 - protein, 13 aa, Homo sapiens
  CDR3 for beta chain variable domain of TCR clone 17539 (TRBV12-4, TRBJ1-1)
CASSPGTGLEAFF

SEQ ID NO: 35079 - protein, 14 aa, Homo sapiens
  CDR3 for alpha chain variable domain of TCR clone 17540 (TRAV13-1, TRAJ5)
CAASGGTGRRALTF

SEQ ID NO: 35080 - protein, 15 aa, Homo sapiens
  CDR3 for beta chain variable domain of TCR clone 17540 (TRBV4-2, TRBJ1-6)
CASSLKEGQESPLHF

SEQ ID NO: 35081 - protein, 14 aa, Homo sapiens
  CDR3 for alpha chain variable domain of TCR clone 17541 (TRAV2, TRAJ37)
CAVDFTSNTGKLIF

SEQ ID NO: 35082 - protein, 15 aa, Homo sapiens
  CDR3 for beta chain variable domain of TCR clone 17541 (TRBV20-1, TRBJ1-1)
CSASREVTGNTEAFF

SEQ ID NO: 35083 - protein, 13 aa, Homo sapiens
  CDR3 for alpha chain variable domain of TCR clone 17542 (TRAV8-3, TRAJ28)
CAVCAVGSYQLTF

SEQ ID NO: 35084 - protein, 15 aa, Homo sapiens
  CDR3 for beta chain variable domain of TCR clone 17542 (TRBV7-9, TRBJ1-5)
CASSQGHQPNQPQHF

SEQ ID NO: 35085 - protein, 11 aa, Homo sapiens
  CDR3 for alpha chain variable domain of TCR clone 17543 (TRAV1-2, TRAJ31)
CAVNNNARLMF

SEQ ID NO: 35086 - protein, 15 aa, Homo sapiens
  CDR3 for beta chain variable domain of TCR clone 17543 (TRBV28, TRBJ2-1)
CASSIIAGDRSEQFF

SEQ ID NO: 35087 - protein, 12 aa, Homo sapiens
  CDR3 for alpha chain variable domain of TCR clone 17544 (TRAV1-1, TRAJ8)
CAGGTGFQKLVF

SEQ ID NO: 35088 - protein, 15 aa, Homo sapiens
  CDR3 for beta chain variable domain of TCR clone 17544 (TRBV7-9, TRBJ1-4)
CASSRTGGCNEKLFF

SEQ ID NO: 35089 - protein, 12 aa, Homo sapiens
  CDR3 for alpha chain variable domain of TCR clone 17545 (TRAV10, TRAJ34)
CVVSGKHRQAHL

SEQ ID NO: 35090 - protein, 14 aa, Homo sapiens
  CDR3 for beta chain variable domain of TCR clone 17545 (TRBV19, TRBJ2-1)
CAGPTFVLSGEQFF

SEQ ID NO: 35091 - protein, 13 aa, Homo sapiens
  CDR3 for alpha chain variable domain of TCR clone 17546 (TRAV12-1, TRAJ6)
CAVFPGGSYIPTF

SEQ ID NO: 35092 - protein, 14 aa, Homo sapiens
  CDR3 for beta chain variable domain of TCR clone 17546 (TRBV20-1, TRBJ1-3)
CSASPTGAGNTIYF

SEQ ID NO: 35093 - protein, 16 aa, Homo sapiens
  CDR3 for alpha chain variable domain of TCR clone 17547 (TRAV12-3, TRAJ53)
CAMSPGNGGSNYKLTF

SEQ ID NO: 35094 - protein, 11 aa, Homo sapiens
  CDR3 for beta chain variable domain of TCR clone 17547 (TRBV29-1, TRBJ2-5)
CSEDRTGTQYF

SEQ ID NO: 35095 - protein, 12 aa, Homo sapiens
  CDR3 for alpha chain variable domain of TCR clone 17548 (TRAV21, TRAJ33)
RAKMDSNYQLIW

SEQ ID NO: 35096 - protein, 14 aa, Homo sapiens
  CDR3 for beta chain variable domain of TCR clone 17548 (TRBV2, TRBJ2-7)
CASSLTSGGYEQYF

SEQ ID NO: 35097 - protein, 17 aa, Homo sapiens
  CDR3 for alpha chain variable domain of TCR clone 17549 (TRAV26-1, TRAJ53)
CIVRVDDSGGSNYKLTF

SEQ ID NO: 35098 - protein, 15 aa, Homo sapiens
  CDR3 for beta chain variable domain of TCR clone 17549 (TRBV20-1, TRBJ2-7)
CSARAPAAYFYEQYF

SEQ ID NO: 35099 - protein, 15 aa, Homo sapiens
  CDR3 for alpha chain variable domain of TCR clone 17550 (TRAV2, TRAJ9)
CAVEVRGTGGFKTIF

SEQ ID NO: 35100 - protein, 16 aa, Homo sapiens
  CDR3 for beta chain variable domain of TCR clone 17550 (TRBV24-1, TRBJ2-3)
CATSDPGTGATDTQYF

SEQ ID NO: 35101 - protein, 16 aa, Homo sapiens
  CDR3 for alpha chain variable domain of TCR clone 17551 (TRAV16, TRAJ4)
CALSRMFSGCYNKLIF

SEQ ID NO: 35102 - protein, 16 aa, Homo sapiens
  CDR3 for beta chain variable domain of TCR clone 17551 (TRBV24-1, TRBJ2-3)
CATSDPGTGATDTQYF

SEQ ID NO: 35103 - protein, 14 aa, Homo sapiens
  CDR3 for alpha chain variable domain of TCR clone 17552 (TRAV26-1, TRAJ38)
CIADNAGNNRKLIW

SEQ ID NO: 35104 - protein, 13 aa, Homo sapiens
  CDR3 for beta chain variable domain of TCR clone 17552 (TRBV20-1, TRBJ1-1)
CSARGGGNNEAFF

SEQ ID NO: 35105 - protein, 15 aa, Homo sapiens
  CDR3 for alpha chain variable domain of TCR clone 17553 (TRAV17, TRAJ23)
CATDAEDNQGGELIF

SEQ ID NO: 35106 - protein, 12 aa, Homo sapiens
  CDR3 for beta chain variable domain of TCR clone 17553 (TRBV2, TRBJ2-1)
CAKREGYNEQFF

SEQ ID NO: 35107 - protein, 14 aa, Homo sapiens
  CDR3 for alpha chain variable domain of TCR clone 17554 (TRAV38-1, TRAJ45)
CAYYSGGGADGLTS

SEQ ID NO: 35108 - protein, 20 aa, Homo sapiens
  CDR3 for beta chain variable domain of TCR clone 17554 (TRBV28, TRBJ2-1)
CASTPIGRSPGLAGGNEQFF

SEQ ID NO: 35109 - protein, 13 aa, Homo sapiens
  CDR3 for alpha chain variable domain of TCR clone 17555 (TRAV23/DV6, TRAJ22)
CASRAGSARQLTF

SEQ ID NO: 35110 - protein, 14 aa, Homo sapiens
  CDR3 for beta chain variable domain of TCR clone 17555 (TRBV5-1, TRBJ1-2)
CASSPPGPHYGYTF

SEQ ID NO: 35111 - protein, 10 aa, Homo sapiens
  CDR3 for alpha chain variable domain of TCR clone 17556 (TRAV12-1, TRAJ43)
CVVNPHRFGA

SEQ ID NO: 35112 - protein, 16 aa, Homo sapiens
  CDR3 for beta chain variable domain of TCR clone 17556 (TRBV27, TRBJ2-2)
CASSSTGGGDTGELFF

SEQ ID NO: 35113 - protein, 15 aa, Homo sapiens
  CDR3 for alpha chain variable domain of TCR clone 17557 (TRAV12-2, TRAJ43)
CAFDMRFGAGTRLTV

SEQ ID NO: 35114 - protein, 13 aa, Homo sapiens
  CDR3 for beta chain variable domain of TCR clone 17557 (TRBV7-9, TRBJ1-2)
CASSLKQNYGYTF

SEQ ID NO: 35115 - protein, 12 aa, Homo sapiens
  CDR3 for alpha chain variable domain of TCR clone 17558 (TRAV8-6, TRAJ36)
CAVSDWLGQTTS

SEQ ID NO: 35116 - protein, 13 aa, Homo sapiens
  CDR3 for beta chain variable domain of TCR clone 17558 (TRBV2, TRBJ2-5)
CASGTPYQETQYF

SEQ ID NO: 35117 - protein, 13 aa, Homo sapiens
  CDR3 for alpha chain variable domain of TCR clone 17559 (TRAV2, TRAJ40)
CAVVTSGTYKYIF

SEQ ID NO: 35118 - protein, 18 aa, Homo sapiens
  CDR3 for beta chain variable domain of TCR clone 17559 (TRBV12-4, TRBJ2-2)
CASSLVAGTRGRTGELFF

SEQ ID NO: 35119 - protein, 14 aa, Homo sapiens
  CDR3 for alpha chain variable domain of TCR clone 17560 (TRAV4, TRAJ26)
CLVGPHNYGQNLVF

SEQ ID NO: 35120 - protein, 17 aa, Homo sapiens
  CDR3 for beta chain variable domain of TCR clone 17560 (TRBV24-1, TRBJ2-1)
CATSDVSTSGTYNEQFF

SEQ ID NO: 35121 - protein, 13 aa, Homo sapiens
  CDR3 for alpha chain variable domain of TCR clone 17561 (TRAV13-1, TRAJ21)
CAASIYNFNKFYF

SEQ ID NO: 35122 - protein, 12 aa, Homo sapiens
  CDR3 for beta chain variable domain of TCR clone 17561 (TRBV11-2, TRBJ2-1)
CASSPGNSEQFF

SEQ ID NO: 35123 - protein, 13 aa, Homo sapiens
  CDR3 for alpha chain variable domain of TCR clone 17562 (TRAV21, TRAJ20)
CAVGLRVDYKVSF

SEQ ID NO: 35124 - protein, 13 aa, Homo sapiens
  CDR3 for beta chain variable domain of TCR clone 17562 (TRBV6-1, TRBJ1-1)
CASSRQGNTEAFF

SEQ ID NO: 35125 - protein, 10 aa, Homo sapiens
  CDR3 for alpha chain variable domain of TCR clone 17563 (TRAV30, TRAJ48)
CGIGNEKLTF

SEQ ID NO: 35126 - protein, 14 aa, Homo sapiens
  CDR3 for beta chain variable domain of TCR clone 17563 (TRBV7-6, TRBJ2-3)
RASSVAGGTDTQYF

SEQ ID NO: 35127 - protein, 13 aa, Homo sapiens
  CDR3 for alpha chain variable domain of TCR clone 17564 (TRAV13-1, TRAJ21)
CAASIYNFNKFYF

SEQ ID NO: 35128 - protein, 13 aa, Homo sapiens
  CDR3 for beta chain variable domain of TCR clone 17564 (TRBV27, TRBJ1-4)
CASSLMGDEKLFV

SEQ ID NO: 35129 - protein, 14 aa, Homo sapiens
  CDR3 for alpha chain variable domain of TCR clone 17565 (TRAV20, TRAJ56)
CAVQFGGANSKLTF

SEQ ID NO: 35130 - protein, 14 aa, Homo sapiens
  CDR3 for beta chain variable domain of TCR clone 17565 (TRBV20-1, TRBJ2-7)
CSAKRGGSSYEQYF

SEQ ID NO: 35131 - protein, 12 aa, Homo sapiens
  CDR3 for alpha chain variable domain of TCR clone 17566 (TRAV23/DV6, TRAJ39)
PREGDAGNMLTF

SEQ ID NO: 35132 - protein, 12 aa, Homo sapiens
  CDR3 for beta chain variable domain of TCR clone 17566 (TRBV11-2, TRBJ2-2)
CASSLGGGELFF

SEQ ID NO: 35133 - protein, 12 aa, Homo sapiens
  CDR3 for alpha chain variable domain of TCR clone 17567 (TRAV13-1, TRAJ22)
CVPRGFCKATDL

SEQ ID NO: 35134 - protein, 14 aa, Homo sapiens
  CDR3 for beta chain variable domain of TCR clone 17567 (TRBV25-1, TRBJ1-1)
CASTHLGGNTEAFF

SEQ ID NO: 35135 - protein, 13 aa, Homo sapiens
  CDR3 for alpha chain variable domain of TCR clone 17568 (TRAV21, TRAJ57)
CSVTQGGSEKLVF

SEQ ID NO: 35136 - protein, 16 aa, Homo sapiens
  CDR3 for beta chain variable domain of TCR clone 17568 (TRBV29-1, TRBJ2-7)
CSVEDAEDGTAYEQYF

SEQ ID NO: 35137 - protein, 16 aa, Homo sapiens
  CDR3 for alpha chain variable domain of TCR clone 17569 (TRAV4, TRAJ22)
CLVGDLYSGSARQLTF

SEQ ID NO: 35138 - protein, 16 aa, Homo sapiens
  CDR3 for beta chain variable domain of TCR clone 17569 (TRBV7-9, TRBJ2-1)
CASSDVAGGSYNEQSF

SEQ ID NO: 35139 - protein, 15 aa, Homo sapiens
  CDR3 for alpha chain variable domain of TCR clone 17570 (TRAV13-1, TRAJ45)
CAASGSGGGADGLTF

SEQ ID NO: 35140 - protein, 12 aa, Homo sapiens
  CDR3 for beta chain variable domain of TCR clone 17570 (TRBV11-2, TRBJ2-2)
CASSLGGGGLFF

SEQ ID NO: 35141 - protein, 13 aa, Homo sapiens
  CDR3 for alpha chain variable domain of TCR clone 17571 (TRAV12-2, TRAJ20)
CAVYPSNDYKLSF

SEQ ID NO: 35142 - protein, 20 aa, Homo sapiens
  CDR3 for beta chain variable domain of TCR clone 17571 (TRBV27, TRBJ2-5)
CASSLYPRGGRDPVLRARHA

SEQ ID NO: 35143 - protein, 11 aa, Homo sapiens
  CDR3 for alpha chain variable domain of TCR clone 17572 (TRAV12-3, TRAJ43)
CAMSVSNDMRF

SEQ ID NO: 35144 - protein, 13 aa, Homo sapiens
  CDR3 for beta chain variable domain of TCR clone 17572 (TRBV20-1, TRBJ1-1)
CSAPLGGGTEASF

SEQ ID NO: 35145 - protein, 13 aa, Homo sapiens
  CDR3 for alpha chain variable domain of TCR clone 17573 (TRAV20, TRAJ37)
CARCSSNTGKLIF

SEQ ID NO: 35146 - protein, 11 aa, Homo sapiens
  CDR3 for beta chain variable domain of TCR clone 17573 (TRBV12-4, TRBJ2-3)
CASTATDTQYF

SEQ ID NO: 35147 - protein, 12 aa, Homo sapiens
  CDR3 for alpha chain variable domain of TCR clone 17574 (TRAV13-2, TRAJ8)
CAPWLGFQKLVF

SEQ ID NO: 35148 - protein, 12 aa, Homo sapiens
  CDR3 for beta chain variable domain of TCR clone 17574 (TRBV11-2, TRBJ2-2)
CASSLPTGELFF

SEQ ID NO: 35149 - protein, 15 aa, Homo sapiens
  CDR3 for alpha chain variable domain of TCR clone 17575 (TRAV21, TRAJ52)
CAVRGGGTSYGKLTF

SEQ ID NO: 35150 - protein, 15 aa, Homo sapiens
  CDR3 for beta chain variable domain of TCR clone 17575 (TRBV18, TRBJ1-5)
CASSPSDRGNQPQHF

SEQ ID NO: 35151 - protein, 15 aa, Homo sapiens
  CDR3 for alpha chain variable domain of TCR clone 17576 (TRAV25, TRAJ52)
RAGTSGGTSYGKLTF

SEQ ID NO: 35152 - protein, 16 aa, Homo sapiens
  CDR3 for beta chain variable domain of TCR clone 17576 (TRBV15, TRBJ1-2)
CATSRGPRTGGGGYTF

SEQ ID NO: 35153 - protein, 14 aa, Homo sapiens
  CDR3 for alpha chain variable domain of TCR clone 17577 (TRAV12-2, TRAJ17)
CAVLFKAAGNKITF

SEQ ID NO: 35154 - protein, 17 aa, Homo sapiens
  CDR3 for beta chain variable domain of TCR clone 17577 (TRBV20-1, TRBJ2-2)
CSASGSGQGGLTGELFF

SEQ ID NO: 35155 - protein, 11 aa, Homo sapiens
  CDR3 for alpha chain variable domain of TCR clone 17578 (TRAV21, TRAJ11)
CAVNGYSTLTF

SEQ ID NO: 35156 - protein, 13 aa, Homo sapiens
  CDR3 for beta chain variable domain of TCR clone 17578 (TRBV7-9, TRBJ1-2)
CASSLKQNYGYTF

SEQ ID NO: 35157 - protein, 16 aa, Homo sapiens
  CDR3 for alpha chain variable domain of TCR clone 17579 (TRAV30, TRAJ24)
CGTEIVDADSWGKFQF

SEQ ID NO: 35158 - protein, 15 aa, Homo sapiens
  CDR3 for beta chain variable domain of TCR clone 17579 (TRBV7-3, TRBJ2-2)
CASSETGQGTGELFF

SEQ ID NO: 35159 - protein, 16 aa, Homo sapiens
  CDR3 for alpha chain variable domain of TCR clone 17580 (TRAV3, TRAJ10)
CAVRDMRAGGGNKLTF

SEQ ID NO: 35160 - protein, 13 aa, Homo sapiens
  CDR3 for beta chain variable domain of TCR clone 17580 (TRBV7-9, TRBJ1-2)
CASSLKQSYGYTF

SEQ ID NO: 35161 - protein, 14 aa, Homo sapiens
  CDR3 for alpha chain variable domain of TCR clone 17581 (TRAV35, TRAJ33)
CAGSSKDSNYQLIW

SEQ ID NO: 35162 - protein, 15 aa, Homo sapiens
  CDR3 for beta chain variable domain of TCR clone 17581 (TRBV20-1, TRBJ2-7)
CSAESGTSGAYEQYF

SEQ ID NO: 35163 - protein, 14 aa, Homo sapiens
  CDR3 for alpha chain variable domain of TCR clone 17582 (TRAV8-3, TRAJ9)
CAVVYNTGGFKTIF

SEQ ID NO: 35164 - protein, 14 aa, Homo sapiens
  CDR3 for beta chain variable domain of TCR clone 17582 (TRBV7-3, TRBJ2-2)
CASSSGGHTGELFF

SEQ ID NO: 35165 - protein, 17 aa, Homo sapiens
  CDR3 for alpha chain variable domain of TCR clone 17583 (TRAV3, TRAJ42)
CAVSDRDYGGSQGNLIF

SEQ ID NO: 35166 - protein, 15 aa, Homo sapiens
  CDR3 for beta chain variable domain of TCR clone 17583 (TRBV6-6, TRBJ2-7)
CASSYSYGGSYEQYF

SEQ ID NO: 35167 - protein, 14 aa, Homo sapiens
  CDR3 for alpha chain variable domain of TCR clone 17584 (TRAV2, TRAJ37)
CAVDFTSNTGKLIF

SEQ ID NO: 35168 - protein, 15 aa, Homo sapiens
  CDR3 for beta chain variable domain of TCR clone 17584 (TRBV20-1, TRBJ1-1)
CSDSRGVTGNTEAFF

SEQ ID NO: 35169 - protein, 14 aa, Homo sapiens
  CDR3 for alpha chain variable domain of TCR clone 17585 (TRAV12-1, TRAJ17)
WVVNYKAAGNKLTF

SEQ ID NO: 35170 - protein, 17 aa, Homo sapiens
  CDR3 for beta chain variable domain of TCR clone 17585 (TRBV20-1, TRBJ2-1)
CSASSSGLAGSYNEQFF

SEQ ID NO: 35171 - protein, 14 aa, Homo sapiens
  CDR3 for alpha chain variable domain of TCR clone 17586 (TRAV12-1, TRAJ17)
CVVNYKAAGNKLTF

SEQ ID NO: 35172 - protein, 17 aa, Homo sapiens
  CDR3 for beta chain variable domain of TCR clone 17586 (TRBV20-1, TRBJ2-1)
CSASSSGLAGSYNEQFS

SEQ ID NO: 35173 - protein, 14 aa, Homo sapiens
  CDR3 for alpha chain variable domain of TCR clone 17587 (TRAV12-2, TRAJ13)
CAVKKTGGYQKVTF

SEQ ID NO: 35174 - protein, 12 aa, Homo sapiens
  CDR3 for beta chain variable domain of TCR clone 17587 (TRBV28, TRBJ2-3)
CASSLYRDTQYF

SEQ ID NO: 35175 - protein, 11 aa, Homo sapiens
  CDR3 for alpha chain variable domain of TCR clone 17588 (TRAV21, TRAJ34)
CAHYNTDELIF

SEQ ID NO: 35176 - protein, 13 aa, Homo sapiens
  CDR3 for beta chain variable domain of TCR clone 17588 (TRBV7-6, TRBJ1-2)
CASSLVADYGYTF

SEQ ID NO: 35177 - protein, 14 aa, Homo sapiens
  CDR3 for alpha chain variable domain of TCR clone 17589 (TRAV29/DV5, TRAJ49)
CAASARILGNQFYF

SEQ ID NO: 35178 - protein, 15 aa, Homo sapiens
  CDR3 for beta chain variable domain of TCR clone 17589 (TRBV7-2, TRBJ2-2)
CASSSLTGGTGELFF

SEQ ID NO: 35179 - protein, 14 aa, Homo sapiens
  CDR3 for alpha chain variable domain of TCR clone 17590 (TRAV13-1, TRAJ35)
CAASKGGFGNVLHC

SEQ ID NO: 35180 - protein, 12 aa, Homo sapiens
  CDR3 for beta chain variable domain of TCR clone 17590 (TRBV7-8, TRBJ2-7)
CASSLGDREQYF

SEQ ID NO: 35181 - protein, 13 aa, Homo sapiens
  CDR3 for alpha chain variable domain of TCR clone 17591 (TRAV21, TRAJ27)
CAARPVNAGKSTF

SEQ ID NO: 35182 - protein, 14 aa, Homo sapiens
  CDR3 for beta chain variable domain of TCR clone 17591 (TRBV7-6, TRBJ2-3)
CASSLGTVTDTQYF

SEQ ID NO: 35183 - protein, 14 aa, Homo sapiens
  CDR3 for alpha chain variable domain of TCR clone 17592 (TRAV38-1, TRAJ40)
CALRPTSGTHKYIF

SEQ ID NO: 35184 - protein, 14 aa, Homo sapiens
  CDR3 for beta chain variable domain of TCR clone 17592 (TRBV25-1, TRBJ1-1)
CASTHLGGNTEAFF

SEQ ID NO: 35185 - protein, 12 aa, Homo sapiens
  CDR3 for alpha chain variable domain of TCR clone 17593 (TRAV8-3, TRAJ20)
CAVGANDYKLSF

SEQ ID NO: 35186 - protein, 13 aa, Homo sapiens
  CDR3 for beta chain variable domain of TCR clone 17593 (TRBV7-3, TRBJ1-1)
CASSQDWGAEAFF

SEQ ID NO: 35187 - protein, 12 aa, Homo sapiens
  CDR3 for alpha chain variable domain of TCR clone 17594 (TRAV1-2, TRAJ33)
CAALDSNYRLIW

SEQ ID NO: 35188 - protein, 17 aa, Homo sapiens
  CDR3 for beta chain variable domain of TCR clone 17594 (TRBV25-1, TRBJ1-2)
CASSEFGSATTNYGYTF

SEQ ID NO: 35189 - protein, 12 aa, Homo sapiens
  CDR3 for alpha chain variable domain of TCR clone 17595 (TRAV3, TRAJ9)
CAVLPAGFKTIF

SEQ ID NO: 35190 - protein, 15 aa, Homo sapiens
  CDR3 for beta chain variable domain of TCR clone 17595 (TRBV11-3, TRBJ2-3)
CASLKDGREGDTQYF

SEQ ID NO: 35191 - protein, 14 aa, Homo sapiens
  CDR3 for alpha chain variable domain of TCR clone 17596 (TRAV26-1, TRAJ38)
CIADNAGNNRKLIW

SEQ ID NO: 35192 - protein, 13 aa, Homo sapiens
  CDR3 for beta chain variable domain of TCR clone 17596 (TRBV20-1, TRBJ1-1)
CSARGGGKTEAFF

SEQ ID NO: 35193 - protein, 16 aa, Homo sapiens
  CDR3 for alpha chain variable domain of TCR clone 17597 (TRAV12-3, TRAJ53)
CAMSPGSGGSNYKLTF

SEQ ID NO: 35194 - protein, 16 aa, Homo sapiens
  CDR3 for beta chain variable domain of TCR clone 17597 (TRBV4-2, TRBJ1-1)
CASSQAGFGMNTEAFL

SEQ ID NO: 35195 - protein, 18 aa, Homo sapiens
  CDR3 for alpha chain variable domain of TCR clone 17598 (TRAV26-2, TRAJ45)
CILRVDKYSGGGADGLTF

SEQ ID NO: 35196 - protein, 15 aa, Homo sapiens
  CDR3 for beta chain variable domain of TCR clone 17598 (TRBV2, TRBJ1-4)
CQQSLQGATNEKLFF

SEQ ID NO: 35197 - protein, 16 aa, Homo sapiens
  CDR3 for alpha chain variable domain of TCR clone 17599 (TRAV38-2/DV8, TRAJ57)
CAYRSVGQGGSEKLVF

SEQ ID NO: 35198 - protein, 16 aa, Homo sapiens
  CDR3 for beta chain variable domain of TCR clone 17599 (TRBV7-3, TRBJ2-1)
CASSLEGYRSYNEQFF

SEQ ID NO: 35199 - protein, 13 aa, Homo sapiens
  CDR3 for alpha chain variable domain of TCR clone 17600 (TRAV13-2, TRAJ48)
CAEMDFGDEKLTF

SEQ ID NO: 35200 - protein, 15 aa, Homo sapiens
  CDR3 for beta chain variable domain of TCR clone 17600 (TRBV7-3, TRBJ2-1)
CASSQRGGALIEQFF

SEQ ID NO: 35201 - protein, 17 aa, Homo sapiens
  CDR3 for alpha chain variable domain of TCR clone 17601 (TRAV3, TRAJ6)
CAVRDGPRAGGSHIPTF

SEQ ID NO: 35202 - protein, 20 aa, Homo sapiens
  CDR3 for beta chain variable domain of TCR clone 17601 (TRBV28, TRBJ2-1)
CASTPIGRSPGLAGGNEQFF

SEQ ID NO: 35203 - protein, 13 aa, Homo sapiens
  CDR3 for alpha chain variable domain of TCR clone 17602 (TRAV21, TRAJ27)
CAARPGNAGKSTF

SEQ ID NO: 35204 - protein, 14 aa, Homo sapiens
  CDR3 for beta chain variable domain of TCR clone 17602 (TRBV7-6, TRBJ2-3)
CGSSLGTVTDTQYF

SEQ ID NO: 35205 - protein, 10 aa, Homo sapiens
  CDR3 for alpha chain variable domain of TCR clone 17603 (TRAV12-3, TRAJ49)
RAMNDDQFYF

SEQ ID NO: 35206 - protein, 13 aa, Homo sapiens
  CDR3 for beta chain variable domain of TCR clone 17603 (TRBV12-4, TRBJ1-1)
CASSPGTGFEAFF

SEQ ID NO: 35207 - protein, 11 aa, Homo sapiens
  CDR3 for alpha chain variable domain of TCR clone 17604 (TRAV2, TRAJ13)
CASGGYQKVTF

SEQ ID NO: 35208 - protein, 16 aa, Homo sapiens
  CDR3 for beta chain variable domain of TCR clone 17604 (TRBV6-1, TRBJ2-5)
CACSETLDRGAETQYF

SEQ ID NO: 35209 - protein, 16 aa, Homo sapiens
  CDR3 for alpha chain variable domain of TCR clone 17605 (TRAV21, TRAJ37)
CAVRTAGSSHTGKLIF

SEQ ID NO: 35210 - protein, 13 aa, Homo sapiens
  CDR3 for beta chain variable domain of TCR clone 17605 (TRBV7-9, TRBJ2-5)
CASLPSGRETQYF

SEQ ID NO: 35211 - protein, 14 aa, Homo sapiens
  CDR3 for alpha chain variable domain of TCR clone 17606 (TRAV14/DV4, TRAJ50)
CAMREFPTDDKVIF

SEQ ID NO: 35212 - protein, 13 aa, Homo sapiens
  CDR3 for beta chain variable domain of TCR clone 17606 (TRBV11-3, TRBJ1-1)
CATEEGLNTEAFF

SEQ ID NO: 35213 - protein, 15 aa, Homo sapiens
  CDR3 for alpha chain variable domain of TCR clone 17607 (TRAV17, TRAJ57)
CATGPSQGGSEKLVF

SEQ ID NO: 35214 - protein, 14 aa, Homo sapiens
  CDR3 for beta chain variable domain of TCR clone 17607 (TRBV7-2, TRBJ2-7)
CASSPKTSFYEQYF

SEQ ID NO: 35215 - protein, 14 aa, Homo sapiens
  CDR3 for alpha chain variable domain of TCR clone 17608 (TRAV9-2, TRAJ16)
CALSRAADGQKLLF

SEQ ID NO: 35216 - protein, 14 aa, Homo sapiens
  CDR3 for beta chain variable domain of TCR clone 17608 (TRBV12-4, TRBJ1-4)
CASSRQGANEKLFF

SEQ ID NO: 35217 - protein, 16 aa, Homo sapiens
  CDR3 for alpha chain variable domain of TCR clone 17609 (TRAV12-3, TRAJ53)
CAMSPGSGGSNYKLTF

SEQ ID NO: 35218 - protein, 17 aa, Homo sapiens
  CDR3 for beta chain variable domain of TCR clone 17609 (TRBV28, TRBJ2-5)
CASSFGGEWGGQETQYF

SEQ ID NO: 35219 - protein, 14 aa, Homo sapiens
  CDR3 for alpha chain variable domain of TCR clone 17610 (TRAV35, TRAJ33)
CAGSSQDSNYQLIW

SEQ ID NO: 35220 - protein, 15 aa, Homo sapiens
  CDR3 for beta chain variable domain of TCR clone 17610 (TRBV20-1, TRBJ2-7)
CSAEPGTSGAYEQYF

SEQ ID NO: 35221 - protein, 14 aa, Homo sapiens
  CDR3 for alpha chain variable domain of TCR clone 17611 (TRAV12-1, TRAJ17)
CVVNYNAAGNKLTF

SEQ ID NO: 35222 - protein, 17 aa, Homo sapiens
  CDR3 for beta chain variable domain of TCR clone 17611 (TRBV20-1, TRBJ2-1)
CSASSSGLAGSYNEQFF

SEQ ID NO: 35223 - protein, 12 aa, Homo sapiens
  CDR3 for alpha chain variable domain of TCR clone 17612 (TRAV12-3, TRAJ17)
CAMTLTGNKLTF

SEQ ID NO: 35224 - protein, 16 aa, Homo sapiens
  CDR3 for beta chain variable domain of TCR clone 17612 (TRBV9, TRBJ2-1)
CASSVGGGGNYNEQFF

SEQ ID NO: 35225 - protein, 16 aa, Homo sapiens
  CDR3 for alpha chain variable domain of TCR clone 17613 (TRAV1-2, TRAJ10)
CAVRGVLTGGGNKHTF

SEQ ID NO: 35226 - protein, 12 aa, Homo sapiens
  CDR3 for beta chain variable domain of TCR clone 17613 (TRBV7-8, TRBJ2-7)
CASSLGDREQYF

SEQ ID NO: 35227 - protein, 15 aa, Homo sapiens
  CDR3 for alpha chain variable domain of TCR clone 17614 (TRAV8-3, TRAJ27)
CAVGPSKTNAGKSTF

SEQ ID NO: 35228 - protein, 15 aa, Homo sapiens
  CDR3 for beta chain variable domain of TCR clone 17614 (TRBV7-2, TRBJ2-1)
CARSSGLAGGNEQFF

SEQ ID NO: 35229 - protein, 14 aa, Homo sapiens
  CDR3 for alpha chain variable domain of TCR clone 17615 (TRAV8-2, TRAJ4)
CVVSPSGGYNKLIF

SEQ ID NO: 35230 - protein, 15 aa, Homo sapiens
  CDR3 for beta chain variable domain of TCR clone 17615 (TRBV4-1, TRBJ1-4)
CASSDTGGTNENLFF

SEQ ID NO: 35231 - protein, 15 aa, Homo sapiens
  CDR3 for alpha chain variable domain of TCR clone 17616 (TRAV17, TRAJ57)
CATGPSQGGSEKLVF

SEQ ID NO: 35232 - protein, 14 aa, Homo sapiens
  CDR3 for beta chain variable domain of TCR clone 17616 (TRBV12-5, TRBJ2-5)
RASGSRTHQETQYF

SEQ ID NO: 35233 - protein, 14 aa, Homo sapiens
  CDR3 for alpha chain variable domain of TCR clone 17617 (TRAV10, TRAJ48)
CVGVFHFGNEKLTF

SEQ ID NO: 35234 - protein, 18 aa, Homo sapiens
  CDR3 for beta chain variable domain of TCR clone 17617 (TRBV27, TRBJ2-3)
CASSLSGTSGRGTDTQYF

SEQ ID NO: 35235 - protein, 15 aa, Homo sapiens
  CDR3 for alpha chain variable domain of TCR clone 17618 (TRAV16, TRAJ10)
CALEGLTGGGNKLTF

SEQ ID NO: 35236 - protein, 16 aa, Homo sapiens
  CDR3 for beta chain variable domain of TCR clone 17618 (TRBV12-4, TRBJ1-5)
CASSRPVGGSNQPQHF

SEQ ID NO: 35237 - protein, 14 aa, Homo sapiens
  CDR3 for alpha chain variable domain of TCR clone 17619 (TRAV13-1, TRAJ9)
CAASALTGGFKTIF

SEQ ID NO: 35238 - protein, 16 aa, Homo sapiens
  CDR3 for beta chain variable domain of TCR clone 17619 (TRBV7-8, TRBJ2-4)
CASSAERTLAKNMQYF

SEQ ID NO: 35239 - protein, 11 aa, Homo sapiens
  CDR3 for alpha chain variable domain of TCR clone 17620 (TRAV12-3, TRAJ27)
CAMANAGKSTF

SEQ ID NO: 35240 - protein, 14 aa, Homo sapiens
  CDR3 for beta chain variable domain of TCR clone 17620 (TRBV19, TRBJ2-1)
CASPTFVLSGEQFF

SEQ ID NO: 35241 - protein, 11 aa, Homo sapiens
  CDR3 for alpha chain variable domain of TCR clone 17621 (TRAV1-2, TRAJ20)
CAVANDYKLSF

SEQ ID NO: 35242 - protein, 13 aa, Homo sapiens
  CDR3 for beta chain variable domain of TCR clone 17621 (TRBV7-9, TRBJ1-2)
CASSLKQNYGYTF

SEQ ID NO: 35243 - protein, 23 aa, Homo sapiens
  CDR3 for alpha chain variable domain of TCR clone 17622 (TRAV26-1, )
CIADNAGNNHIQNPDPAVYQLRD

SEQ ID NO: 35244 - protein, 12 aa, Homo sapiens
  CDR3 for beta chain variable domain of TCR clone 17622 (TRBV11-2, TRBJ2-2)
CASSLGGGELFF

SEQ ID NO: 35245 - protein, 16 aa, Homo sapiens
  CDR3 for alpha chain variable domain of TCR clone 17623 (TRAV1-2, TRAJ10)
CAVRGVLTGGGNKLPF

SEQ ID NO: 35246 - protein, 12 aa, Homo sapiens
  CDR3 for beta chain variable domain of TCR clone 17623 (TRBV7-8, TRBJ2-7)
CASSLGDREQYF

SEQ ID NO: 35247 - protein, 14 aa, Homo sapiens
  CDR3 for alpha chain variable domain of TCR clone 17624 (TRAV1-2, TRAJ16)
CAVNRFSDGQKLLF

SEQ ID NO: 35248 - protein, 15 aa, Homo sapiens
  CDR3 for beta chain variable domain of TCR clone 17624 (TRBV9, TRBJ1-6)
YASSVAGTGDSPLHF

SEQ ID NO: 35249 - protein, 12 aa, Homo sapiens
  CDR3 for alpha chain variable domain of TCR clone 17625 (TRAV12-1, TRAJ34)
CVVAGATDKLIF

SEQ ID NO: 35250 - protein, 12 aa, Homo sapiens
  CDR3 for beta chain variable domain of TCR clone 17625 (TRBV7-9, TRBJ1-1)
CASSVVRGEAFF

SEQ ID NO: 35251 - protein, 15 aa, Homo sapiens
  CDR3 for alpha chain variable domain of TCR clone 17626 (TRAV25, TRAJ52)
CAGRHGGTSYGKLTF

SEQ ID NO: 35252 - protein, 17 aa, Homo sapiens
  CDR3 for beta chain variable domain of TCR clone 17626 (TRBV7-8, TRBJ2-6)
CASSAGTGGAGANVLTF

SEQ ID NO: 35253 - protein, 15 aa, Homo sapiens
  CDR3 for alpha chain variable domain of TCR clone 17627 (TRAV4, TRAJ10)
CLVGDEEGGGSKLTF

SEQ ID NO: 35254 - protein, 15 aa, Homo sapiens
  CDR3 for beta chain variable domain of TCR clone 17627 (TRBV7-2, TRBJ2-7)
CASSLTGQGTYEQYF

SEQ ID NO: 35255 - protein, 12 aa, Homo sapiens
  CDR3 for alpha chain variable domain of TCR clone 17628 (TRAV12-3, TRAJ17)
CAMTLTGNKLTF

SEQ ID NO: 35256 - protein, 16 aa, Homo sapiens
  CDR3 for beta chain variable domain of TCR clone 17628 (TRBV10-3, TRBJ2-1)
CAISGVGDGGGGEQFF

SEQ ID NO: 35257 - protein, 14 aa, Homo sapiens
  CDR3 for alpha chain variable domain of TCR clone 17629 (TRAV20, TRAJ56)
CAVQFGGANSKLTL

SEQ ID NO: 35258 - protein, 14 aa, Homo sapiens
  CDR3 for beta chain variable domain of TCR clone 17629 (TRBV20-1, TRBJ2-7)
CSAKRGRSSYEQYF

SEQ ID NO: 35259 - protein, 17 aa, Homo sapiens
  CDR3 for alpha chain variable domain of TCR clone 17630 (TRAV13-1, TRAJ52)
CAASSGAGGTSYGKLTF

SEQ ID NO: 35260 - protein, 15 aa, Homo sapiens
  CDR3 for beta chain variable domain of TCR clone 17630 (TRBV2, TRBJ2-1)
CASSELAGSYNEQLF

SEQ ID NO: 35261 - protein, 13 aa, Homo sapiens
  CDR3 for alpha chain variable domain of TCR clone 17631 (TRAV3, TRAJ27)
CAVRPLGAGKSTF

SEQ ID NO: 35262 - protein, 13 aa, Homo sapiens
  CDR3 for beta chain variable domain of TCR clone 17631 (TRBV7-9, TRBJ2-3)
CASSPGSTDTQYC

SEQ ID NO: 35263 - protein, 14 aa, Homo sapiens
  CDR3 for alpha chain variable domain of TCR clone 17632 (TRAV12-2, TRAJ57)
CAMSAWGGSEKLVF

SEQ ID NO: 35264 - protein, 14 aa, Homo sapiens
  CDR3 for beta chain variable domain of TCR clone 17632 (TRBV7-8, TRBJ2-7)
CASSPRDRVYEQYF

SEQ ID NO: 35265 - protein, 11 aa, Homo sapiens
  CDR3 for alpha chain variable domain of TCR clone 17633 (TRAV17, TRAJ9)
CGFNGGFKTIF

SEQ ID NO: 35266 - protein, 14 aa, Homo sapiens
  CDR3 for beta chain variable domain of TCR clone 17633 (TRBV7-9, TRBJ2-2)
CASSLVQDTGELFF

SEQ ID NO: 35267 - protein, 14 aa, Homo sapiens
  CDR3 for alpha chain variable domain of TCR clone 17634 (TRAV1-2, TRAJ8)
CAVREDTGFQKLVF

SEQ ID NO: 35268 - protein, 15 aa, Homo sapiens
  CDR3 for beta chain variable domain of TCR clone 17634 (TRBV6-3, TRBJ2-7)
YASSSPGTVFYEQYF

SEQ ID NO: 35269 - protein, 14 aa, Homo sapiens
  CDR3 for alpha chain variable domain of TCR clone 17635 (TRAV13-1, TRAJ40)
CAVSMTSGTYKYIF

SEQ ID NO: 35270 - protein, 15 aa, Homo sapiens
  CDR3 for beta chain variable domain of TCR clone 17635 (TRBV7-3, TRBJ2-1)
CASSPTGGGEVEQFF

SEQ ID NO: 35271 - protein, 15 aa, Homo sapiens
  CDR3 for alpha chain variable domain of TCR clone 17636 (TRAV3, TRAJ22)
CAVRDRGGSARQLTF

SEQ ID NO: 35272 - protein, 14 aa, Homo sapiens
  CDR3 for beta chain variable domain of TCR clone 17636 (TRBV7-2, TRBJ2-7)
CASSPKTSFYEQYF

SEQ ID NO: 35273 - protein, 14 aa, Homo sapiens
  CDR3 for alpha chain variable domain of TCR clone 17637 (TRAV12-2, TRAJ40)
CAVKIPSGTYKYIF

SEQ ID NO: 35274 - protein, 13 aa, Homo sapiens
  CDR3 for beta chain variable domain of TCR clone 17637 (TRBV12-4, TRBJ1-2)
CASSLRQGKGYTF

SEQ ID NO: 35275 - protein, 15 aa, Homo sapiens
  CDR3 for alpha chain variable domain of TCR clone 17638 (TRAV13-1, TRAJ44)
CAASRRGGTASKLTF

SEQ ID NO: 35276 - protein, 12 aa, Homo sapiens
  CDR3 for beta chain variable domain of TCR clone 17638 (TRBV11-2, TRBJ2-2)
CASSLGGGELFF

SEQ ID NO: 35277 - protein, 12 aa, Homo sapiens
  CDR3 for alpha chain variable domain of TCR clone 17639 (TRAV13-1, TRAJ49)
CAASPMGNQFYF

SEQ ID NO: 35278 - protein, 13 aa, Homo sapiens
  CDR3 for beta chain variable domain of TCR clone 17639 (TRBV20-1, TRBJ2-2)
CSASAAGTGELLF

SEQ ID NO: 35279 - protein, 13 aa, Homo sapiens
  CDR3 for alpha chain variable domain of TCR clone 17640 (TRAV8-3, TRAJ28)
CAVGAVGSYQFTF

SEQ ID NO: 35280 - protein, 15 aa, Homo sapiens
  CDR3 for beta chain variable domain of TCR clone 17640 (TRBV7-9, TRBJ1-5)
CASSQGHQPNQPQHF

SEQ ID NO: 35281 - protein, 12 aa, Homo sapiens
  CDR3 for alpha chain variable domain of TCR clone 17641 (TRAV2, TRAJ31)
RAVEDNNARLMF

SEQ ID NO: 35282 - protein, 16 aa, Homo sapiens
  CDR3 for beta chain variable domain of TCR clone 17641 (TRBV10-3, TRBJ2-1)
CAISGVGDGGGGEQFF

SEQ ID NO: 35283 - protein, 14 aa, Homo sapiens
  CDR3 for alpha chain variable domain of TCR clone 17642 (TRAV27, TRAJ36)
CAGPPKRGANNLFF

SEQ ID NO: 35284 - protein, 15 aa, Homo sapiens
  CDR3 for beta chain variable domain of TCR clone 17642 (TRBV18, TRBJ2-7)
GASSPASTPNYEQYF

SEQ ID NO: 35285 - protein, 16 aa, Homo sapiens
  CDR3 for alpha chain variable domain of TCR clone 17643 (TRAV16, TRAJ52)
CALSAAGGTSYGKLTF

SEQ ID NO: 35286 - protein, 12 aa, Homo sapiens
  CDR3 for beta chain variable domain of TCR clone 17643 (TRBV12-4, TRBJ1-3)
CASSVSGNTIYF

SEQ ID NO: 35287 - protein, 14 aa, Homo sapiens
  CDR3 for alpha chain variable domain of TCR clone 17644 (TRAV13-1, TRAJ35)
CAASKGGFGNVLQC

SEQ ID NO: 35288 - protein, 13 aa, Homo sapiens
  CDR3 for beta chain variable domain of TCR clone 17644 (TRBV7-3, TRBJ1-1)
CASSQDWGAEAFF

SEQ ID NO: 35289 - protein, 13 aa, Homo sapiens
  CDR3 for alpha chain variable domain of TCR clone 17645 (TRAV21, TRAJ20)
CAVGLRVDYELSF

SEQ ID NO: 35290 - protein, 13 aa, Homo sapiens
  CDR3 for beta chain variable domain of TCR clone 17645 (TRBV6-1, TRBJ1-1)
CASSRQGNTEAFF

SEQ ID NO: 35291 - protein, 13 aa, Homo sapiens
  CDR3 for alpha chain variable domain of TCR clone 17646 (TRAV3, TRAJ21)
CAVREPDFNKFYF

SEQ ID NO: 35292 - protein, 13 aa, Homo sapiens
  CDR3 for beta chain variable domain of TCR clone 17646 (TRBV9, TRBJ2-1)
CASSPPGGNEQFF

SEQ ID NO: 35293 - protein, 13 aa, Homo sapiens
  CDR3 for alpha chain variable domain of TCR clone 17647 (TRAV27, TRAJ6)
CAGGTRGSYIPTF

SEQ ID NO: 35294 - protein, 14 aa, Homo sapiens
  CDR3 for beta chain variable domain of TCR clone 17647 (TRBV20-1, TRBJ2-4)
CSASGRVGENMQYF

SEQ ID NO: 35295 - protein, 17 aa, Homo sapiens
  CDR3 for alpha chain variable domain of TCR clone 17648 (TRAV3, TRAJ6)
CAVRDGPRAGGSYIPTF

SEQ ID NO: 35296 - protein, 14 aa, Homo sapiens
  CDR3 for beta chain variable domain of TCR clone 17648 (TRBV18, TRBJ2-5)
CASSPGVSQETQYF

SEQ ID NO: 35297 - protein, 13 aa, Homo sapiens
  CDR3 for alpha chain variable domain of TCR clone 17649 (TRAV27, TRAJ57)
CRSAQGGSERLVF

SEQ ID NO: 35298 - protein, 11 aa, Homo sapiens
  CDR3 for beta chain variable domain of TCR clone 17649 (TRBV11-2, TRBJ1-1)
CASSINTEAFF

SEQ ID NO: 35299 - protein, 12 aa, Homo sapiens
  CDR3 for alpha chain variable domain of TCR clone 17650 (TRAV13-1, TRAJ21)
CAAKEGFNKFYF

SEQ ID NO: 35300 - protein, 16 aa, Homo sapiens
  CDR3 for beta chain variable domain of TCR clone 17650 (TRBV13, TRBJ2-2)
CASSPRTGEHTGELFF

SEQ ID NO: 35301 - protein, 18 aa, Homo sapiens
  CDR3 for alpha chain variable domain of TCR clone 17651 (TRAV13-1, TRAJ52)
CTAKNPNAGGTSYGKLTF

SEQ ID NO: 35302 - protein, 15 aa, Homo sapiens
  CDR3 for beta chain variable domain of TCR clone 17651 (TRBV6-1, TRBJ2-3)
CASSERGGITDTQYF

SEQ ID NO: 35303 - protein, 12 aa, Homo sapiens
  CDR3 for alpha chain variable domain of TCR clone 17652 (TRAV29/DV5, TRAJ49)
CAATDTGNQFYF

SEQ ID NO: 35304 - protein, 12 aa, Homo sapiens
  CDR3 for beta chain variable domain of TCR clone 17652 (TRBV12-4, TRBJ2-7)
CASSVGGYEQYF

SEQ ID NO: 35305 - protein, 14 aa, Homo sapiens
  CDR3 for alpha chain variable domain of TCR clone 17653 (TRAV8-3, TRAJ39)
CAVGANNAGNMLTF

SEQ ID NO: 35306 - protein, 14 aa, Homo sapiens
  CDR3 for beta chain variable domain of TCR clone 17653 (TRBV6-3, TRBJ1-1)
CASSYQRRDTEAFF

SEQ ID NO: 35307 - protein, 15 aa, Homo sapiens
  CDR3 for alpha chain variable domain of TCR clone 17654 (TRAV21, TRAJ24)
CAARSSTDSWGKLQF

SEQ ID NO: 35308 - protein, 13 aa, Homo sapiens
  CDR3 for beta chain variable domain of TCR clone 17654 (TRBV11-2, TRBJ2-5)
RASSSTGEETQYF

SEQ ID NO: 35309 - protein, 13 aa, Homo sapiens
  CDR3 for alpha chain variable domain of TCR clone 17655 (TRAV27, TRAJ41)
CAGEGNSGYTLNF

SEQ ID NO: 35310 - protein, 14 aa, Homo sapiens
  CDR3 for beta chain variable domain of TCR clone 17655 (TRBV7-2, TRBJ1-1)
CASSFLTGTTEAFF

SEQ ID NO: 35311 - protein, 15 aa, Homo sapiens
  CDR3 for alpha chain variable domain of TCR clone 17656 (TRAV2, TRAJ9)
CAVEDLGTGGFKTIF

SEQ ID NO: 35312 - protein, 16 aa, Homo sapiens
  CDR3 for beta chain variable domain of TCR clone 17656 (TRBV24-1, TRBJ2-3)
CATSDPGTGATDTQYF

SEQ ID NO: 35313 - protein, 15 aa, Homo sapiens
  CDR3 for alpha chain variable domain of TCR clone 17657 (TRAV17, TRAJ57)
CATVPSQGGSEKLVF

SEQ ID NO: 35314 - protein, 16 aa, Homo sapiens
  CDR3 for beta chain variable domain of TCR clone 17657 (TRBV12-4, TRBJ1-5)
CASSRPVGGSNQPQHF

SEQ ID NO: 35315 - protein, 16 aa, Homo sapiens
  CDR3 for alpha chain variable domain of TCR clone 17658 (TRAV3, TRAJ37)
CAVRPHGPGNTGKLIF

SEQ ID NO: 35316 - protein, 16 aa, Homo sapiens
  CDR3 for beta chain variable domain of TCR clone 17658 (TRBV9, TRBJ1-2)
CASSVEEKVSPYGYTF

SEQ ID NO: 35317 - protein, 12 aa, Homo sapiens
  CDR3 for alpha chain variable domain of TCR clone 17659 (TRAV21, TRAJ31)
CAAWGNNARLMF

SEQ ID NO: 35318 - protein, 16 aa, Homo sapiens
  CDR3 for beta chain variable domain of TCR clone 17659 (TRBV27, TRBJ2-5)
CASSYGPGGQKETQYF

SEQ ID NO: 35319 - protein, 13 aa, Homo sapiens
  CDR3 for alpha chain variable domain of TCR clone 17660 (TRAV2, TRAJ40)
CAVVTSGTHKYIF

SEQ ID NO: 35320 - protein, 15 aa, Homo sapiens
  CDR3 for beta chain variable domain of TCR clone 17660 (TRBV11-3, TRBJ2-3)
CASLKDGREGDTQYF

SEQ ID NO: 35321 - protein, 15 aa, Homo sapiens
  CDR3 for alpha chain variable domain of TCR clone 17661 (TRAV26-1, TRAJ23)
CIARVAGYQGGKLIF

SEQ ID NO: 35322 - protein, 18 aa, Homo sapiens
  CDR3 for beta chain variable domain of TCR clone 17661 (TRBV28, TRBJ2-1)
CASSSTSGRANSYNEQFF

SEQ ID NO: 35323 - protein, 15 aa, Homo sapiens
  CDR3 for alpha chain variable domain of TCR clone 17662 (TRAV34, TRAJ38)
CGADFTPGNNRKLIG

SEQ ID NO: 35324 - protein, 16 aa, Homo sapiens
  CDR3 for beta chain variable domain of TCR clone 17662 (TRBV12-5, TRBJ2-5)
CASGPRTSGNQETQYF

SEQ ID NO: 35325 - protein, 12 aa, Homo sapiens
  CDR3 for alpha chain variable domain of TCR clone 17663 (TRAV10, TRAJ13)
CVVSKSYQKVTF

SEQ ID NO: 35326 - protein, 17 aa, Homo sapiens
  CDR3 for beta chain variable domain of TCR clone 17663 (TRBV6-5, TRBJ2-3)
CASSYTTSGQVGDTQYF

SEQ ID NO: 35327 - protein, 14 aa, Homo sapiens
  CDR3 for alpha chain variable domain of TCR clone 17664 (TRAV8-4, TRAJ9)
CAVRINTGGFKTTF

SEQ ID NO: 35328 - protein, 15 aa, Homo sapiens
  CDR3 for beta chain variable domain of TCR clone 17664 (TRBV10-2, TRBJ2-6)
CASSEQGTGANVLTF

SEQ ID NO: 35329 - protein, 13 aa, Homo sapiens
  CDR3 for alpha chain variable domain of TCR clone 17665 (TRAV38-1, TRAJ42)
CARWGGSQGNLIF

SEQ ID NO: 35330 - protein, 17 aa, Homo sapiens
  CDR3 for beta chain variable domain of TCR clone 17665 (TRBV20-1, TRBJ2-1)
CSASDPLAGVWDNEQFF

SEQ ID NO: 35331 - protein, 11 aa, Homo sapiens
  CDR3 for alpha chain variable domain of TCR clone 17666 (TRAV13-2, TRAJ47)
CAEIRGNKLVF

SEQ ID NO: 35332 - protein, 12 aa, Homo sapiens
  CDR3 for beta chain variable domain of TCR clone 17666 (TRBV7-8, TRBJ2-7)
CASSLGDREQYF

SEQ ID NO: 35333 - protein, 14 aa, Homo sapiens
  CDR3 for alpha chain variable domain of TCR clone 17667 (TRAV29/DV5, TRAJ36)
CAARRKTGANNLFF

SEQ ID NO: 35334 - protein, 15 aa, Homo sapiens
  CDR3 for beta chain variable domain of TCR clone 17667 (TRBV7-2, TRBJ2-3)
CASSLRGGSTDTQYF

SEQ ID NO: 35335 - protein, 16 aa, Homo sapiens
  CDR3 for alpha chain variable domain of TCR clone 17668 (TRAV30, TRAJ24)
CGTEIVDADSWGKFQF

SEQ ID NO: 35336 - protein, 14 aa, Homo sapiens
  CDR3 for beta chain variable domain of TCR clone 17668 (TRBV6-3, TRBJ1-1)
CASSYQRRDTEAFF

SEQ ID NO: 35337 - protein, 14 aa, Homo sapiens
  CDR3 for alpha chain variable domain of TCR clone 17669 (TRAV1-2, TRAJ16)
CAVNRFSDGQKLLF

SEQ ID NO: 35338 - protein, 16 aa, Homo sapiens
  CDR3 for beta chain variable domain of TCR clone 17669 (TRBV2, TRBJ2-3)
CASSTSVEGVTDTQYF

SEQ ID NO: 35339 - protein, 16 aa, Homo sapiens
  CDR3 for alpha chain variable domain of TCR clone 17670 (TRAV21, TRAJ37)
CAARTAGSSNTGKLIF

SEQ ID NO: 35340 - protein, 13 aa, Homo sapiens
  CDR3 for beta chain variable domain of TCR clone 17670 (TRBV7-9, TRBJ2-5)
CASLPSGRETQYF

SEQ ID NO: 35341 - protein, 16 aa, Homo sapiens
  CDR3 for alpha chain variable domain of TCR clone 17671 (TRAV12-2, TRAJ13)
CAVKKTGGYQKVTLEL

SEQ ID NO: 35342 - protein, 15 aa, Homo sapiens
  CDR3 for beta chain variable domain of TCR clone 17671 (TRBV27, TRBJ2-1)
CASSNGGGSSNEQFF

SEQ ID NO: 35343 - protein, 12 aa, Homo sapiens
  CDR3 for alpha chain variable domain of TCR clone 17672 (TRAV8-3, TRAJ20)
CAVGGGDYKLSL

SEQ ID NO: 35344 - protein, 12 aa, Homo sapiens
  CDR3 for beta chain variable domain of TCR clone 17672 (TRBV3-1, TRBJ2-7)
CASSQVRYEQYF

SEQ ID NO: 35345 - protein, 23 aa, Homo sapiens
  CDR3 for alpha chain variable domain of TCR clone 17673 (TRAV26-1, )
CIADNAGNNNIQNPDPAVYQLRD

SEQ ID NO: 35346 - protein, 13 aa, Homo sapiens
  CDR3 for beta chain variable domain of TCR clone 17673 (TRBV20-1, TRBJ1-1)
CSARGGGNTEAFF

SEQ ID NO: 35347 - protein, 16 aa, Homo sapiens
  CDR3 for alpha chain variable domain of TCR clone 17674 (TRAV1-2, TRAJ10)
CAVRGVLTGGGHKLTF

SEQ ID NO: 35348 - protein, 12 aa, Homo sapiens
  CDR3 for beta chain variable domain of TCR clone 17674 (TRBV7-8, TRBJ2-7)
CASSLGDREQYF

SEQ ID NO: 35349 - protein, 13 aa, Homo sapiens
  CDR3 for alpha chain variable domain of TCR clone 17675 (TRAV17, TRAJ9)
CATDYTGGFKTIF

SEQ ID NO: 35350 - protein, 14 aa, Homo sapiens
  CDR3 for beta chain variable domain of TCR clone 17675 (TRBV19, TRBJ2-5)
CASSVTGQQETQYF

SEQ ID NO: 35351 - protein, 15 aa, Homo sapiens
  CDR3 for alpha chain variable domain of TCR clone 17676 (TRAV8-3, TRAJ27)
CAVGPSKTNAGKSTC

SEQ ID NO: 35352 - protein, 15 aa, Homo sapiens
  CDR3 for beta chain variable domain of TCR clone 17676 (TRBV7-2, TRBJ2-1)
CASSSGLAGGNEQFF

SEQ ID NO: 35353 - protein, 18 aa, Homo sapiens
  CDR3 for alpha chain variable domain of TCR clone 17677 (TRAV12-3, TRAJ52)
CAMSRTNAGGTSYGKLTF

SEQ ID NO: 35354 - protein, 13 aa, Homo sapiens
  CDR3 for beta chain variable domain of TCR clone 17677 (TRBV10-3, TRBJ1-2)
CAINADLNYGYTF

SEQ ID NO: 35355 - protein, 10 aa, Homo sapiens
  CDR3 for alpha chain variable domain of TCR clone 17678 (TRAV16, TRAJ22)
SAMYLRQLTF

SEQ ID NO: 35356 - protein, 15 aa, Homo sapiens
  CDR3 for beta chain variable domain of TCR clone 17678 (TRBV7-9, TRBJ1-6)
CASSSPGRGNPPLHF

SEQ ID NO: 35357 - protein, 14 aa, Homo sapiens
  CDR3 for alpha chain variable domain of TCR clone 17679 (TRAV1-2, TRAJ16)
CAVNLFSDGQKLLF

SEQ ID NO: 35358 - protein, 15 aa, Homo sapiens
  CDR3 for beta chain variable domain of TCR clone 17679 (TRBV9, TRBJ1-6)
CASSVAGTGDSPLHF

SEQ ID NO: 35359 - protein, 12 aa, Homo sapiens
  CDR3 for alpha chain variable domain of TCR clone 17680 (TRAV16, TRAJ10)
CSRTGGGNKLTF

SEQ ID NO: 35360 - protein, 15 aa, Homo sapiens
  CDR3 for beta chain variable domain of TCR clone 17680 (TRBV6-3, TRBJ2-7)
CASSSPGTAFYEQYF

SEQ ID NO: 35361 - protein, 13 aa, Homo sapiens
  CDR3 for alpha chain variable domain of TCR clone 17681 (TRAV27, TRAJ45)
CRSSGGGADVLTF

SEQ ID NO: 35362 - protein, 17 aa, Homo sapiens
  CDR3 for beta chain variable domain of TCR clone 17681 (TRBV11-2, TRBJ2-1)
CASSLYPPGVEYNEQFF

SEQ ID NO: 35363 - protein, 14 aa, Homo sapiens
  CDR3 for alpha chain variable domain of TCR clone 17682 (TRAV26-1, TRAJ39)
CIVRGSRAGNMITF

SEQ ID NO: 35364 - protein, 15 aa, Homo sapiens
  CDR3 for beta chain variable domain of TCR clone 17682 (TRBV7-9, TRBJ1-5)
CASSQGHQPNQPQHF

SEQ ID NO: 35365 - protein, 12 aa, Homo sapiens
  CDR3 for alpha chain variable domain of TCR clone 17683 (TRAV13-1, TRAJ15)
CAASQAGTALIF

SEQ ID NO: 35366 - protein, 14 aa, Homo sapiens
  CDR3 for beta chain variable domain of TCR clone 17683 (TRBV19, TRBJ2-2)
CASSTPHRSGELFF

SEQ ID NO: 35367 - protein, 16 aa, Homo sapiens
  CDR3 for alpha chain variable domain of TCR clone 17684 (TRAV4, TRAJ28)
CTTAFLSGAGSYQLTF

SEQ ID NO: 35368 - protein, 14 aa, Homo sapiens
  CDR3 for beta chain variable domain of TCR clone 17684 (TRBV7-9, TRBJ2-5)
CASSLDTAQETQYF

SEQ ID NO: 35369 - protein, 14 aa, Homo sapiens
  CDR3 for alpha chain variable domain of TCR clone 17685 (TRAV26-1, TRAJ39)
CIVRGSRAGNILTF

SEQ ID NO: 35370 - protein, 15 aa, Homo sapiens
  CDR3 for beta chain variable domain of TCR clone 17685 (TRBV7-9, TRBJ1-5)
CASSQGHQPNQPQHF

SEQ ID NO: 35371 - protein, 14 aa, Homo sapiens
  CDR3 for alpha chain variable domain of TCR clone 17686 (TRAV1-2, TRAJ16)
CAVNRFSDGQKLLF

SEQ ID NO: 35372 - protein, 13 aa, Homo sapiens
  CDR3 for beta chain variable domain of TCR clone 17686 (TRBV27, TRBJ1-4)
CASSLMGDEKLFF

SEQ ID NO: 35373 - protein, 16 aa, Homo sapiens
  CDR3 for alpha chain variable domain of TCR clone 17687 (TRAV35, TRAJ28)
CAGQRYSGAGSYQPTF

SEQ ID NO: 35374 - protein, 14 aa, Homo sapiens
  CDR3 for beta chain variable domain of TCR clone 17687 (TRBV18, TRBJ2-7)
CASSPRGGAYEQYF

SEQ ID NO: 35375 - protein, 16 aa, Homo sapiens
  CDR3 for alpha chain variable domain of TCR clone 17688 (TRAV21, TRAJ37)
CAVRTAGSSNTGKLIF

SEQ ID NO: 35376 - protein, 13 aa, Homo sapiens
  CDR3 for beta chain variable domain of TCR clone 17688 (TRBV7-9, TRBJ2-5)
CASLPAGRETQYF

SEQ ID NO: 35377 - protein, 12 aa, Homo sapiens
  CDR3 for alpha chain variable domain of TCR clone 17689 (TRAV26-1, TRAJ36)
CIVRVRADNLFF

SEQ ID NO: 35378 - protein, 14 aa, Homo sapiens
  CDR3 for beta chain variable domain of TCR clone 17689 (TRBV14, TRBJ2-3)
CGSSRKLAADTQYF

SEQ ID NO: 35379 - protein, 15 aa, Homo sapiens
  CDR3 for alpha chain variable domain of TCR clone 17690 (TRAV8-3, TRAJ27)
CAVSPSKTNAGKSTF

SEQ ID NO: 35380 - protein, 15 aa, Homo sapiens
  CDR3 for beta chain variable domain of TCR clone 17690 (TRBV7-2, TRBJ2-1)
CASSSGLAGGNEQFF

SEQ ID NO: 35381 - protein, 12 aa, Homo sapiens
  CDR3 for alpha chain variable domain of TCR clone 17691 (TRAV38-1, TRAJ47)
CAFETYGNKLVF

SEQ ID NO: 35382 - protein, 15 aa, Homo sapiens
  CDR3 for beta chain variable domain of TCR clone 17691 (TRBV28, TRBJ2-1)
CASSIIAGGRSEQFF

SEQ ID NO: 35383 - protein, 14 aa, Homo sapiens
  CDR3 for alpha chain variable domain of TCR clone 17692 (TRAV26-1, TRAJ38)
CIADNAGNHRKLIW

SEQ ID NO: 35384 - protein, 13 aa, Homo sapiens
  CDR3 for beta chain variable domain of TCR clone 17692 (TRBV20-1, TRBJ1-1)
CSARGGGNTEAFF

SEQ ID NO: 35385 - protein, 17 aa, Homo sapiens
  CDR3 for alpha chain variable domain of TCR clone 17693 (TRAV17, TRAJ7)
CATLGRLAFGKGNQVGV

SEQ ID NO: 35386 - protein, 13 aa, Homo sapiens
  CDR3 for beta chain variable domain of TCR clone 17693 (TRBV12-4, TRBJ2-7)
CASSLERVREQYF

SEQ ID NO: 35387 - protein, 16 aa, Homo sapiens
  CDR3 for alpha chain variable domain of TCR clone 17694 (TRAV30, TRAJ24)
CGTEIVDADSWGKFQF

SEQ ID NO: 35388 - protein, 14 aa, Homo sapiens
  CDR3 for beta chain variable domain of TCR clone 17694 (TRBV7-9, TRBJ2-1)
CASSPRDSLYEQFF

SEQ ID NO: 35389 - protein, 14 aa, Homo sapiens
  CDR3 for alpha chain variable domain of TCR clone 17695 (TRAV13-1, TRAJ35)
CAASKGGFGNVLHC

SEQ ID NO: 35390 - protein, 15 aa, Homo sapiens
  CDR3 for beta chain variable domain of TCR clone 17695 (TRBV28, TRBJ2-1)
CASSGLAEVDNEQFF

SEQ ID NO: 35391 - protein, 14 aa, Homo sapiens
  CDR3 for alpha chain variable domain of TCR clone 17696 (TRAV12-3, TRAJ10)
SHLPLTGGGNKLTF

SEQ ID NO: 35392 - protein, 17 aa, Homo sapiens
  CDR3 for beta chain variable domain of TCR clone 17696 (TRBV7-8, TRBJ2-6)
CASSAGTGGAGANVLTF

SEQ ID NO: 35393 - protein, 11 aa, Homo sapiens
  CDR3 for alpha chain variable domain of TCR clone 17697 (TRAV3, TRAJ21)
CAVGNFNKFYF

SEQ ID NO: 35394 - protein, 16 aa, Homo sapiens
  CDR3 for beta chain variable domain of TCR clone 17697 (TRBV19, TRBJ2-2)
CASRSPGTGATGELFF

SEQ ID NO: 35395 - protein, 10 aa, Homo sapiens
  CDR3 for alpha chain variable domain of TCR clone 17698 (TRAV12-3, TRAJ49)
CAINDDQFYF

SEQ ID NO: 35396 - protein, 13 aa, Homo sapiens
  CDR3 for beta chain variable domain of TCR clone 17698 (TRBV12-4, TRBJ1-1)
CASSPGTGFEAFF

SEQ ID NO: 35397 - protein, 13 aa, Homo sapiens
  CDR3 for alpha chain variable domain of TCR clone 17699 (TRAV1-2, TRAJ9)
CAALNTGGFKTIF

SEQ ID NO: 35398 - protein, 15 aa, Homo sapiens
  CDR3 for beta chain variable domain of TCR clone 17699 (TRBV28, TRBJ2-5)
CASSPPWSYQETQYF

SEQ ID NO: 35399 - protein, 13 aa, Homo sapiens
  CDR3 for alpha chain variable domain of TCR clone 17700 (TRAV2, TRAJ40)
CAVVTSGTYKYIF

SEQ ID NO: 35400 - protein, 18 aa, Homo sapiens
  CDR3 for beta chain variable domain of TCR clone 17700 (TRBV5-1, TRBJ1-6)
CASSPGQTRIPYNSPLHF

SEQ ID NO: 35401 - protein, 14 aa, Homo sapiens
  CDR3 for alpha chain variable domain of TCR clone 17701 (TRAV29/DV5, TRAJ48)
CAAMALFGNEKLTF

SEQ ID NO: 35402 - protein, 15 aa, Homo sapiens
  CDR3 for beta chain variable domain of TCR clone 17701 (TRBV7-2, TRBJ2-1)
CASTRGTGIYNEQFF

SEQ ID NO: 35403 - protein, 13 aa, Homo sapiens
  CDR3 for alpha chain variable domain of TCR clone 17702 (TRAV13-2, TRAJ53)
FAENMGSNYKLTF

SEQ ID NO: 35404 - protein, 13 aa, Homo sapiens
  CDR3 for beta chain variable domain of TCR clone 17702 (TRBV4-1, TRBJ2-2)
CASSQENTGELFF

SEQ ID NO: 35405 - protein, 16 aa, Homo sapiens
  CDR3 for alpha chain variable domain of TCR clone 17703 (TRAV30, TRAJ24)
CGTEIVDADSWGKFQF

SEQ ID NO: 35406 - protein, 14 aa, Homo sapiens
  CDR3 for beta chain variable domain of TCR clone 17703 (TRBV12-5, TRBJ2-5)
CASGSRTHQETQNF

SEQ ID NO: 35407 - protein, 13 aa, Homo sapiens
  CDR3 for alpha chain variable domain of TCR clone 17704 (TRAV21, TRAJ27)
CAARPGNAGKSTF

SEQ ID NO: 35408 - protein, 15 aa, Homo sapiens
  CDR3 for beta chain variable domain of TCR clone 17704 (TRBV27, TRBJ2-1)
CASSNGGGSSNEQFF

SEQ ID NO: 35409 - protein, 14 aa, Homo sapiens
  CDR3 for alpha chain variable domain of TCR clone 17705 (TRAV9-2, TRAJ39)
CALYIYNAGNMLTF

SEQ ID NO: 35410 - protein, 13 aa, Homo sapiens
  CDR3 for beta chain variable domain of TCR clone 17705 (TRBV9, TRBJ2-1)
CASSPSGGNEQFF

SEQ ID NO: 35411 - protein, 11 aa, Homo sapiens
  CDR3 for alpha chain variable domain of TCR clone 17706 (TRAV8-1, TRAJ43)
CAVTNDMRFGA

SEQ ID NO: 35412 - protein, 17 aa, Homo sapiens
  CDR3 for beta chain variable domain of TCR clone 17706 (TRBV5-4, TRBJ2-1)
CASSSAGGRGPYNEQFF

SEQ ID NO: 35413 - protein, 13 aa, Homo sapiens
  CDR3 for alpha chain variable domain of TCR clone 17707 (TRAV1-1, TRAJ9)
CAANNTGGFKTIF

SEQ ID NO: 35414 - protein, 14 aa, Homo sapiens
  CDR3 for beta chain variable domain of TCR clone 17707 (TRBV20-1, TRBJ2-1)
CSAQIGGSANEQFF

SEQ ID NO: 35415 - protein, 13 aa, Homo sapiens
  CDR3 for alpha chain variable domain of TCR clone 17708 (TRAV27, TRAJ41)
CAGEGNSGYALNF

SEQ ID NO: 35416 - protein, 13 aa, Homo sapiens
  CDR3 for beta chain variable domain of TCR clone 17708 (TRBV7-9, TRBJ1-2)
CASSLKQNYGYTF

SEQ ID NO: 35417 - protein, 14 aa, Homo sapiens
  CDR3 for alpha chain variable domain of TCR clone 17709 (TRAV13-1, TRAJ12)
CSNYPMDSSYKLIF

SEQ ID NO: 35418 - protein, 16 aa, Homo sapiens
  CDR3 for beta chain variable domain of TCR clone 17709 (TRBV2, TRBJ2-3)
CASSTSVEGVTDTQYF

SEQ ID NO: 35419 - protein, 12 aa, Homo sapiens
  CDR3 for alpha chain variable domain of TCR clone 17710 (TRAV17, TRAJ4)
CATDGGYNKLIF

SEQ ID NO: 35420 - protein, 13 aa, Homo sapiens
  CDR3 for beta chain variable domain of TCR clone 17710 (TRBV29-1, TRBJ2-2)
CSTTGVNTGELLF

SEQ ID NO: 35421 - protein, 12 aa, Homo sapiens
  CDR3 for alpha chain variable domain of TCR clone 17711 (TRAV13-1, TRAJ21)
CAAKEGFNKFYF

SEQ ID NO: 35422 - protein, 14 aa, Homo sapiens
  CDR3 for beta chain variable domain of TCR clone 17711 (TRBV25-1, TRBJ1-1)
CASTHLGGNTEAFF

SEQ ID NO: 35423 - protein, 14 aa, Homo sapiens
  CDR3 for alpha chain variable domain of TCR clone 17712 (TRAV8-4, TRAJ9)
CAVRINTGGFKTIF

SEQ ID NO: 35424 - protein, 15 aa, Homo sapiens
  CDR3 for beta chain variable domain of TCR clone 17712 (TRBV10-2, TRBJ2-6)
CASSEQGTGANALTF

SEQ ID NO: 35425 - protein, 13 aa, Homo sapiens
  CDR3 for alpha chain variable domain of TCR clone 17713 (TRAV29/DV5, TRAJ31)
CAASRNNNARLMF

SEQ ID NO: 35426 - protein, 13 aa, Homo sapiens
  CDR3 for beta chain variable domain of TCR clone 17713 (TRBV7-3, TRBJ1-1)
CASSQDWGAEAFF

SEQ ID NO: 35427 - protein, 14 aa, Homo sapiens
  CDR3 for alpha chain variable domain of TCR clone 17714 (TRAV29/DV5, TRAJ36)
CAARRKTGANNLFF

SEQ ID NO: 35428 - protein, 15 aa, Homo sapiens
  CDR3 for beta chain variable domain of TCR clone 17714 (TRBV5-5, TRBJ2-2)
CASSRQASGAGELFF

SEQ ID NO: 35429 - protein, 12 aa, Homo sapiens
  CDR3 for alpha chain variable domain of TCR clone 17715 (TRAV2, TRAJ9)
CAVGAGGFKTIF

SEQ ID NO: 35430 - protein, 16 aa, Homo sapiens
  CDR3 for beta chain variable domain of TCR clone 17715 (TRBV6-1, TRBJ2-5)
CASSETLDRGAETQYF

SEQ ID NO: 35431 - protein, 17 aa, Homo sapiens
  CDR3 for alpha chain variable domain of TCR clone 17716 (TRAV12-3, TRAJ6)
CAMSAGGGAGGSYIPTF

SEQ ID NO: 35432 - protein, 12 aa, Homo sapiens
  CDR3 for beta chain variable domain of TCR clone 17716 (TRBV12-4, TRBJ2-3)
CASSTLPDTQYF

SEQ ID NO: 35433 - protein, 16 aa, Homo sapiens
  CDR3 for alpha chain variable domain of TCR clone 17717 (TRAV12-2, TRAJ10)
CAVNRVLTGGGNKLTF

SEQ ID NO: 35434 - protein, 12 aa, Homo sapiens
  CDR3 for beta chain variable domain of TCR clone 17717 (TRBV28, TRBJ2-7)
CASSFSSYEQYL

SEQ ID NO: 35435 - protein, 12 aa, Homo sapiens
  CDR3 for alpha chain variable domain of TCR clone 17718 (TRAV21, TRAJ33)
CAKMDSNYQLIW

SEQ ID NO: 35436 - protein, 14 aa, Homo sapiens
  CDR3 for beta chain variable domain of TCR clone 17718 (TRBV2, TRBJ2-7)
CASSPTSGGYEQYF

SEQ ID NO: 35437 - protein, 17 aa, Homo sapiens
  CDR3 for alpha chain variable domain of TCR clone 17719 (TRAV26-2, TRAJ42)
CILRDVGYGGSQGNLIF

SEQ ID NO: 35438 - protein, 16 aa, Homo sapiens
  CDR3 for beta chain variable domain of TCR clone 17719 (TRBV12-4, TRBJ2-7)
CASSLSGGTGTYEQYF

SEQ ID NO: 35439 - protein, 15 aa, Homo sapiens
  CDR3 for alpha chain variable domain of TCR clone 17720 (TRAV8-3, TRAJ11)
CAVGLLNSGYSTLTF

SEQ ID NO: 35440 - protein, 16 aa, Homo sapiens
  CDR3 for beta chain variable domain of TCR clone 17720 (TRBV7-9, TRBJ1-2)
CASSLGLSSGEDGYTF

SEQ ID NO: 35441 - protein, 13 aa, Homo sapiens
  CDR3 for alpha chain variable domain of TCR clone 17721 (TRAV2, TRAJ40)
RAVVTSGTYKYIF

SEQ ID NO: 35442 - protein, 15 aa, Homo sapiens
  CDR3 for beta chain variable domain of TCR clone 17721 (TRBV11-3, TRBJ2-3)
CASLKDGREGDTQYF

SEQ ID NO: 35443 - protein, 15 aa, Homo sapiens
  CDR3 for alpha chain variable domain of TCR clone 17722 (TRAV1-2, TRAJ26)
CAVRDLITMVRILSL

SEQ ID NO: 35444 - protein, 12 aa, Homo sapiens
  CDR3 for beta chain variable domain of TCR clone 17722 (TRBV7-9, TRBJ2-7)
CATRTDAYEQYF

SEQ ID NO: 35445 - protein, 15 aa, Homo sapiens
  CDR3 for alpha chain variable domain of TCR clone 17723 (TRAV12-2, TRAJ43)
CAFDMRFGAGARLTV

SEQ ID NO: 35446 - protein, 18 aa, Homo sapiens
  CDR3 for beta chain variable domain of TCR clone 17723 (TRBV20-1, TRBJ2-3)
CSASGLAGGPGTTDTQYF

SEQ ID NO: 35447 - protein, 15 aa, Homo sapiens
  CDR3 for alpha chain variable domain of TCR clone 17724 (TRAV3, TRAJ20)
CAVRDIKLSDYKLSF

SEQ ID NO: 35448 - protein, 15 aa, Homo sapiens
  CDR3 for beta chain variable domain of TCR clone 17724 (TRBV7-9, TRBJ1-6)
RASSSPGRGNSPLHF

SEQ ID NO: 35449 - protein, 12 aa, Homo sapiens
  CDR3 for alpha chain variable domain of TCR clone 17725 (TRAV12-3, TRAJ41)
CAMSYSGYAPNF

SEQ ID NO: 35450 - protein, 13 aa, Homo sapiens
  CDR3 for beta chain variable domain of TCR clone 17725 (TRBV7-3, TRBJ2-1)
CASSLDSYNEQFF

SEQ ID NO: 35451 - protein, 14 aa, Homo sapiens
  CDR3 for alpha chain variable domain of TCR clone 17726 (TRAV26-1, TRAJ45)
CIVRVVGGADGLTF

SEQ ID NO: 35452 - protein, 18 aa, Homo sapiens
  CDR3 for beta chain variable domain of TCR clone 17726 (TRBV7-9, TRBJ1-1)
CASSLTQVRSNTEAFLDK

SEQ ID NO: 35453 - protein, 15 aa, Homo sapiens
  CDR3 for alpha chain variable domain of TCR clone 17727 (TRAV12-1, TRAJ6)
CVVTPTSGGSYIPTF

SEQ ID NO: 35454 - protein, 16 aa, Homo sapiens
  CDR3 for beta chain variable domain of TCR clone 17727 (TRBV20-1, TRBJ2-7)
CSATPWEGQASYEQYF

SEQ ID NO: 35455 - protein, 14 aa, Homo sapiens
  CDR3 for alpha chain variable domain of TCR clone 17728 (TRAV17, TRAJ32)
CATDPGGATNKLIF

SEQ ID NO: 35456 - protein, 14 aa, Homo sapiens
  CDR3 for beta chain variable domain of TCR clone 17728 (TRBV7-7, TRBJ2-2)
CATRQDSDTGELFF

SEQ ID NO: 35457 - protein, 15 aa, Homo sapiens
  CDR3 for alpha chain variable domain of TCR clone 17729 (TRAV26-1, TRAJ29)
CIVRVEGSGYTPLVF

SEQ ID NO: 35458 - protein, 14 aa, Homo sapiens
  CDR3 for beta chain variable domain of TCR clone 17729 (TRBV18, TRBJ2-5)
CASSPGVSQETQYF

SEQ ID NO: 35459 - protein, 13 aa, Homo sapiens
  CDR3 for alpha chain variable domain of TCR clone 17730 (TRAV1-2, TRAJ9)
CAALNTGGFKTIF

SEQ ID NO: 35460 - protein, 14 aa, Homo sapiens
  CDR3 for beta chain variable domain of TCR clone 17730 (TRBV7-2, TRBJ2-7)
CASSPKTSFYEQYF

SEQ ID NO: 35461 - protein, 13 aa, Homo sapiens
  CDR3 for alpha chain variable domain of TCR clone 17731 (TRAV12-3, TRAJ33)
CAMSVNSNYKLIW

SEQ ID NO: 35462 - protein, 13 aa, Homo sapiens
  CDR3 for beta chain variable domain of TCR clone 17731 (TRBV7-2, TRBJ2-2)
CASSLAVTGELFF

SEQ ID NO: 35463 - protein, 16 aa, Homo sapiens
  CDR3 for alpha chain variable domain of TCR clone 17732 (TRAV30, TRAJ24)
CGTGIVDADSWGKFQF

SEQ ID NO: 35464 - protein, 12 aa, Homo sapiens
  CDR3 for beta chain variable domain of TCR clone 17732 (TRBV11-2, TRBJ2-2)
CASSLGGGELFF

SEQ ID NO: 35465 - protein, 13 aa, Homo sapiens
  CDR3 for alpha chain variable domain of TCR clone 17733 (TRAV12-3, TRAJ13)
CAMSSGGYQRVTF

SEQ ID NO: 35466 - protein, 13 aa, Homo sapiens
  CDR3 for beta chain variable domain of TCR clone 17733 (TRBV20-1, TRBJ1-1)
CSAPPGGHTEAFF

SEQ ID NO: 35467 - protein, 16 aa, Homo sapiens
  CDR3 for alpha chain variable domain of TCR clone 17734 (TRAV22, TRAJ45)
CAVERGKRGGADGLTF

SEQ ID NO: 35468 - protein, 14 aa, Homo sapiens
  CDR3 for beta chain variable domain of TCR clone 17734 (TRBV7-2, TRBJ1-1)
CASSFLTGTTEAFF

SEQ ID NO: 35469 - protein, 13 aa, Homo sapiens
  CDR3 for alpha chain variable domain of TCR clone 17735 (TRAV38-1, TRAJ42)
CARWGGSQGNLIF

SEQ ID NO: 35470 - protein, 17 aa, Homo sapiens
  CDR3 for beta chain variable domain of TCR clone 17735 (TRBV20-1, TRBJ2-1)
CSARGPLAGVWDNEQFF

SEQ ID NO: 35471 - protein, 14 aa, Homo sapiens
  CDR3 for alpha chain variable domain of TCR clone 17736 (TRAV3, TRAJ9)
CAVGLNTGGFKTIF

SEQ ID NO: 35472 - protein, 16 aa, Homo sapiens
  CDR3 for beta chain variable domain of TCR clone 17736 (TRBV12-5, TRBJ2-5)
CASGPRTSGNQETQYF

SEQ ID NO: 35473 - protein, 17 aa, Homo sapiens
  CDR3 for alpha chain variable domain of TCR clone 17737 (TRAV3, TRAJ6)
CAVRDGPRAGGSYIPTF

SEQ ID NO: 35474 - protein, 20 aa, Homo sapiens
  CDR3 for beta chain variable domain of TCR clone 17737 (TRBV28, TRBJ2-1)
CASAPIGRSPGLAGGNEQFF

SEQ ID NO: 35475 - protein, 14 aa, Homo sapiens
  CDR3 for alpha chain variable domain of TCR clone 17738 (TRAV21, TRAJ35)
CAVMPTGFGNVLHC

SEQ ID NO: 35476 - protein, 12 aa, Homo sapiens
  CDR3 for beta chain variable domain of TCR clone 17738 (TRBV7-9, TRBJ2-7)
CASSIKREEQYF

SEQ ID NO: 35477 - protein, 13 aa, Homo sapiens
  CDR3 for alpha chain variable domain of TCR clone 17739 (TRAV21, TRAJ27)
CAARPGNAGKSTF

SEQ ID NO: 35478 - protein, 14 aa, Homo sapiens
  CDR3 for beta chain variable domain of TCR clone 17739 (TRBV7-6, TRBJ2-3)
YASSLGTVTDTQYF

SEQ ID NO: 35479 - protein, 13 aa, Homo sapiens
  CDR3 for alpha chain variable domain of TCR clone 17740 (TRAV21, TRAJ20)
CAVGMRVDYKLSF

SEQ ID NO: 35480 - protein, 13 aa, Homo sapiens
  CDR3 for beta chain variable domain of TCR clone 17740 (TRBV6-1, TRBJ1-1)
CASSRQGNTEAFF

SEQ ID NO: 35481 - protein, 17 aa, Homo sapiens
  CDR3 for alpha chain variable domain of TCR clone 17741 (TRAV3, TRAJ6)
CAVRDGPRAGGSYIPTF

SEQ ID NO: 35482 - protein, 11 aa, Homo sapiens
  CDR3 for beta chain variable domain of TCR clone 17741 (TRBV12-4, TRBJ2-3)
CASTATDTQYF

SEQ ID NO: 35483 - protein, 12 aa, Homo sapiens
  CDR3 for alpha chain variable domain of TCR clone 17742 (TRAV8-3, TRAJ26)
CAGDNYGQSFVF

SEQ ID NO: 35484 - protein, 15 aa, Homo sapiens
  CDR3 for beta chain variable domain of TCR clone 17742 (TRBV9, TRBJ2-1)
CASSLAGSSYNEQFF

SEQ ID NO: 35485 - protein, 14 aa, Homo sapiens
  CDR3 for alpha chain variable domain of TCR clone 17743 (TRAV8-3, TRAJ4)
CAVGAAGGYNKLIF

SEQ ID NO: 35486 - protein, 14 aa, Homo sapiens
  CDR3 for beta chain variable domain of TCR clone 17743 (TRBV7-2, TRBJ2-7)
CASSPKTSFYEQYF

SEQ ID NO: 35487 - protein, 13 aa, Homo sapiens
  CDR3 for alpha chain variable domain of TCR clone 17744 (TRAV2, TRAJ40)
CAVVTSGTYKYIF

SEQ ID NO: 35488 - protein, 13 aa, Homo sapiens
  CDR3 for beta chain variable domain of TCR clone 17744 (TRBV19, TRBJ2-1)
CQSDFRFEREQFF

SEQ ID NO: 35489 - protein, 14 aa, Homo sapiens
  CDR3 for alpha chain variable domain of TCR clone 17745 (TRAV12-2, TRAJ13)
CAVKKTGGYQKVTF

SEQ ID NO: 35490 - protein, 15 aa, Homo sapiens
  CDR3 for beta chain variable domain of TCR clone 17745 (TRBV27, TRBJ2-1)
CASSNEGGSSNEQFF

SEQ ID NO: 35491 - protein, 11 aa, Homo sapiens
  CDR3 for alpha chain variable domain of TCR clone 17746 (TRAV3, TRAJ17)
PRGAAGNKLTF

SEQ ID NO: 35492 - protein, 13 aa, Homo sapiens
  CDR3 for beta chain variable domain of TCR clone 17746 (TRBV7-2, TRBJ2-4)
CASSREHANIQYF

SEQ ID NO: 35493 - protein, 17 aa, Homo sapiens
  CDR3 for alpha chain variable domain of TCR clone 17747 (TRAV13-1, TRAJ52)
CAASSGAGGTSYGKLTF

SEQ ID NO: 35494 - protein, 15 aa, Homo sapiens
  CDR3 for beta chain variable domain of TCR clone 17747 (TRBV2, TRBJ2-1)
CASSELAGSYNGQFF

SEQ ID NO: 35495 - protein, 14 aa, Homo sapiens
  CDR3 for alpha chain variable domain of TCR clone 17748 (TRAV1-2, TRAJ16)
CAVSRFSDGQKLLF

SEQ ID NO: 35496 - protein, 13 aa, Homo sapiens
  CDR3 for beta chain variable domain of TCR clone 17748 (TRBV9, TRBJ2-1)
CASSPSGGSEQFF

SEQ ID NO: 35497 - protein, 13 aa, Homo sapiens
  CDR3 for alpha chain variable domain of TCR clone 17749 (TRAV13-1, TRAJ43)
CAASIPNNNDMRF

SEQ ID NO: 35498 - protein, 14 aa, Homo sapiens
  CDR3 for beta chain variable domain of TCR clone 17749 (TRBV5-1, TRBJ2-1)
CASSLFGEQASPHF

SEQ ID NO: 35499 - protein, 15 aa, Homo sapiens
  CDR3 for alpha chain variable domain of TCR clone 17750 (TRAV8-3, TRAJ45)
CASSYSGGGADGLTF

SEQ ID NO: 35500 - protein, 13 aa, Homo sapiens
  CDR3 for beta chain variable domain of TCR clone 17750 (TRBV10-3, TRBJ2-7)
CASKLAVNYEHYF

SEQ ID NO: 35501 - protein, 14 aa, Homo sapiens
  CDR3 for alpha chain variable domain of TCR clone 17751 (TRAV1-2, TRAJ16)
CAVNRFSDGEKLLF

SEQ ID NO: 35502 - protein, 15 aa, Homo sapiens
  CDR3 for beta chain variable domain of TCR clone 17751 (TRBV7-9, TRBJ1-6)
CASSSPGRGNSPLHF

SEQ ID NO: 35503 - protein, 18 aa, Homo sapiens
  CDR3 for alpha chain variable domain of TCR clone 17752 (TRAV36/DV7, TRAJ28)
CAVDTNSGLWGWELPTHF

SEQ ID NO: 35504 - protein, 15 aa, Homo sapiens
  CDR3 for beta chain variable domain of TCR clone 17752 (TRBV2, TRBJ2-1)
CASRGTGANYNEQFF

SEQ ID NO: 35505 - protein, 19 aa, Homo sapiens
  CDR3 for alpha chain variable domain of TCR clone 17753 (TRAV29/DV5, TRAJ53)
QCTSVQQARQMGSNYKLTF

SEQ ID NO: 35506 - protein, 13 aa, Homo sapiens
  CDR3 for beta chain variable domain of TCR clone 17753 (TRBV28, TRBJ2-3)
CASSLAREDTQYF

SEQ ID NO: 35507 - protein, 12 aa, Homo sapiens
  CDR3 for alpha chain variable domain of TCR clone 17754 (TRAV12-1, TRAJ40)
CAFYSGTYKYTF

SEQ ID NO: 35508 - protein, 18 aa, Homo sapiens
  CDR3 for beta chain variable domain of TCR clone 17754 (TRBV12-4, TRBJ2-2)
CASSLVAGTRGRTGELFF

SEQ ID NO: 35509 - protein, 10 aa, Homo sapiens
  CDR3 for alpha chain variable domain of TCR clone 17755 (TRAV23/DV6, TRAJ57)
CAASFTLSQG

SEQ ID NO: 35510 - protein, 14 aa, Homo sapiens
  CDR3 for beta chain variable domain of TCR clone 17755 (TRBV25-1, TRBJ1-1)
CASTHLGGNTEAFF

SEQ ID NO: 35511 - protein, 12 aa, Homo sapiens
  CDR3 for alpha chain variable domain of TCR clone 17756 (TRAV2, TRAJ9)
CAVGAGGFKTIF

SEQ ID NO: 35512 - protein, 16 aa, Homo sapiens
  CDR3 for beta chain variable domain of TCR clone 17756 (TRBV13, TRBJ2-2)
CASSPRTGENTGELFF

SEQ ID NO: 35513 - protein, 13 aa, Homo sapiens
  CDR3 for alpha chain variable domain of TCR clone 17757 (TRAV3, TRAJ21)
CAVREPDFNKFYF

SEQ ID NO: 35514 - protein, 14 aa, Homo sapiens
  CDR3 for beta chain variable domain of TCR clone 17757 (TRBV19, TRBJ2-1)
CASPTFVLSGEQFF

SEQ ID NO: 35515 - protein, 13 aa, Homo sapiens
  CDR3 for alpha chain variable domain of TCR clone 17758 (TRAV26-1, TRAJ40)
CIVRVEGTYKYTF

SEQ ID NO: 35516 - protein, 15 aa, Homo sapiens
  CDR3 for beta chain variable domain of TCR clone 17758 (TRBV12-4, TRBJ1-2)
CASSLAHRDGQAYTF

SEQ ID NO: 35517 - protein, 14 aa, Homo sapiens
  CDR3 for alpha chain variable domain of TCR clone 17759 (TRAV8-3, TRAJ4)
CAVGAAGGYNKLIF

SEQ ID NO: 35518 - protein, 14 aa, Homo sapiens
  CDR3 for beta chain variable domain of TCR clone 17759 (TRBV25-1, TRBJ1-1)
CASTHLGGNTEAFF

SEQ ID NO: 35519 - protein, 12 aa, Homo sapiens
  CDR3 for alpha chain variable domain of TCR clone 17760 (TRAV30, TRAJ43)
CGTEERGNDMRF

SEQ ID NO: 35520 - protein, 14 aa, Homo sapiens
  CDR3 for beta chain variable domain of TCR clone 17760 (TRBV19, TRBJ2-1)
CASPTFVLSGEQFF

SEQ ID NO: 35521 - protein, 14 aa, Homo sapiens
  CDR3 for alpha chain variable domain of TCR clone 17761 (TRAV9-2, TRAJ22)
CALRGSGSARQLTF

SEQ ID NO: 35522 - protein, 16 aa, Homo sapiens
  CDR3 for beta chain variable domain of TCR clone 17761 (TRBV3-1, TRBJ2-2)
CASSQGGRPGTGELFF

SEQ ID NO: 35523 - protein, 11 aa, Homo sapiens
  CDR3 for alpha chain variable domain of TCR clone 17762 (TRAV2, TRAJ33)
CAVDSNYQLIC

SEQ ID NO: 35524 - protein, 15 aa, Homo sapiens
  CDR3 for beta chain variable domain of TCR clone 17762 (TRBV19, TRBJ1-2)
CASSVGQVLNYGYTF

SEQ ID NO: 35525 - protein, 11 aa, Homo sapiens
  CDR3 for alpha chain variable domain of TCR clone 17763 (TRAV12-3, TRAJ17)
CNDAYRNKLTF

SEQ ID NO: 35526 - protein, 15 aa, Homo sapiens
  CDR3 for beta chain variable domain of TCR clone 17763 (TRBV20-1, TRBJ2-7)
CSARDRVSGMDEQYF

SEQ ID NO: 35527 - protein, 12 aa, Homo sapiens
  CDR3 for alpha chain variable domain of TCR clone 17764 (TRAV3, TRAJ43)
CAVRDPNNDIRF

SEQ ID NO: 35528 - protein, 13 aa, Homo sapiens
  CDR3 for beta chain variable domain of TCR clone 17764 (TRBV19, TRBJ1-2)
CASSVPGQDGYTF

SEQ ID NO: 35529 - protein, 13 aa, Homo sapiens
  CDR3 for alpha chain variable domain of TCR clone 17765 (TRAV12-1, TRAJ13)
CVAALLGYQKVTF

SEQ ID NO: 35530 - protein, 13 aa, Homo sapiens
  CDR3 for beta chain variable domain of TCR clone 17765 (TRBV20-1, TRBJ2-5)
CSAILTGQETQYF

SEQ ID NO: 35531 - protein, 14 aa, Homo sapiens
  CDR3 for alpha chain variable domain of TCR clone 17766 (TRAV1-2, TRAJ8)
CAVREDTGFQKLVF

SEQ ID NO: 35532 - protein, 15 aa, Homo sapiens
  CDR3 for beta chain variable domain of TCR clone 17766 (TRBV6-3, TRBJ2-7)
CASSSPGTVFYDQYF

SEQ ID NO: 35533 - protein, 13 aa, Homo sapiens
  CDR3 for alpha chain variable domain of TCR clone 17767 (TRAV36/DV7, TRAJ37)
CAAPFRNTGKLIF

SEQ ID NO: 35534 - protein, 14 aa, Homo sapiens
  CDR3 for beta chain variable domain of TCR clone 17767 (TRBV5-7, TRBJ1-3)
CASSLVGRGNTIYF

SEQ ID NO: 35535 - protein, 12 aa, Homo sapiens
  CDR3 for alpha chain variable domain of TCR clone 17768 (TRAV36/DV7, TRAJ54)
CAVVRGAQKLVF

SEQ ID NO: 35536 - protein, 14 aa, Homo sapiens
  CDR3 for beta chain variable domain of TCR clone 17768 (TRBV7-3, TRBJ1-1)
CASSLKGGNTEAFL

SEQ ID NO: 35537 - protein, 14 aa, Homo sapiens
  CDR3 for alpha chain variable domain of TCR clone 17769 (TRAV1-2, TRAJ8)
CAVREDTVFQKLVF

SEQ ID NO: 35538 - protein, 15 aa, Homo sapiens
  CDR3 for beta chain variable domain of TCR clone 17769 (TRBV6-3, TRBJ2-7)
CASSSPGTVFYEQYF

SEQ ID NO: 35539 - protein, 14 aa, Homo sapiens
  CDR3 for alpha chain variable domain of TCR clone 17770 (TRAV1-2, TRAJ16)
CAVNRFSDGQKLLF

SEQ ID NO: 35540 - protein, 16 aa, Homo sapiens
  CDR3 for beta chain variable domain of TCR clone 17770 (TRBV28, TRBJ2-7)
CASSLFFETGGPEQYF

SEQ ID NO: 35541 - protein, 12 aa, Homo sapiens
  CDR3 for alpha chain variable domain of TCR clone 17771 (TRAV8-3, TRAJ26)
CAGDNYGKNFVF

SEQ ID NO: 35542 - protein, 15 aa, Homo sapiens
  CDR3 for beta chain variable domain of TCR clone 17771 (TRBV9, TRBJ2-1)
CASSLAGSSYNEQFF

SEQ ID NO: 35543 - protein, 14 aa, Homo sapiens
  CDR3 for alpha chain variable domain of TCR clone 17772 (TRAV8-3, TRAJ39)
CAVGANNAGNMLTF

SEQ ID NO: 35544 - protein, 13 aa, Homo sapiens
  CDR3 for beta chain variable domain of TCR clone 17772 (TRBV3-1, TRBJ2-5)
CASSPVLSKTQHF

SEQ ID NO: 35545 - protein, 16 aa, Homo sapiens
  CDR3 for alpha chain variable domain of TCR clone 17773 (TRAV12-3, TRAJ53)
CAMSPGSGGSNYKLTF

SEQ ID NO: 35546 - protein, 14 aa, Homo sapiens
  CDR3 for beta chain variable domain of TCR clone 17773 (TRBV7-2, TRBJ2-7)
CASRSQGAAYEQYF

SEQ ID NO: 35547 - protein, 15 aa, Homo sapiens
  CDR3 for alpha chain variable domain of TCR clone 17774 (TRAV3, TRAJ13)
CAVRVYSGGCQKVTF

SEQ ID NO: 35548 - protein, 15 aa, Homo sapiens
  CDR3 for beta chain variable domain of TCR clone 17774 (TRBV5-7, TRBJ1-2)
CASSLGVAANYGYTF

SEQ ID NO: 35549 - protein, 20 aa, Homo sapiens
  CDR3 for alpha chain variable domain of TCR clone 17775 (TRAV12-1, TRAJ42)
SSVIQPPTSVKGGSQGNLIL

SEQ ID NO: 35550 - protein, 18 aa, Homo sapiens
  CDR3 for beta chain variable domain of TCR clone 17775 (TRBV11-2, TRBJ2-3)
CASSLGGASRGAPNTQYF

SEQ ID NO: 35551 - protein, 14 aa, Homo sapiens
  CDR3 for alpha chain variable domain of TCR clone 17776 (TRAV35, TRAJ22)
CAGLRPGSARQLTF

SEQ ID NO: 35552 - protein, 13 aa, Homo sapiens
  CDR3 for beta chain variable domain of TCR clone 17776 (TRBV7-9, TRBJ1-2)
CASSLKQNYGYTF

SEQ ID NO: 35553 - protein, 14 aa, Homo sapiens
  CDR3 for alpha chain variable domain of TCR clone 17777 (TRAV17, TRAJ57)
CATDPQGGSEKLVF

SEQ ID NO: 35554 - protein, 16 aa, Homo sapiens
  CDR3 for beta chain variable domain of TCR clone 17777 (TRBV7-3, TRBJ2-2)
CASSLKRGTLSGELFF

SEQ ID NO: 35555 - protein, 13 aa, Homo sapiens
  CDR3 for alpha chain variable domain of TCR clone 17778 (TRAV21, TRAJ27)
CAARPGNAGKSTF

SEQ ID NO: 35556 - protein, 17 aa, Homo sapiens
  CDR3 for beta chain variable domain of TCR clone 17778 (TRBV11-2, TRBJ2-1)
CASSLYPPGVEYNEQFF

SEQ ID NO: 35557 - protein, 14 aa, Homo sapiens
  CDR3 for alpha chain variable domain of TCR clone 17779 (TRAV8-2, TRAJ4)
CVVSPSGGYNKLIF

SEQ ID NO: 35558 - protein, 15 aa, Homo sapiens
  CDR3 for beta chain variable domain of TCR clone 17779 (TRBV4-1, TRBJ1-4)
CASSDTGGTNEKLLF

SEQ ID NO: 35559 - protein, 13 aa, Homo sapiens
  CDR3 for alpha chain variable domain of TCR clone 17780 (TRAV12-2, TRAJ20)
CAVYPSNDYKLSF

SEQ ID NO: 35560 - protein, 15 aa, Homo sapiens
  CDR3 for beta chain variable domain of TCR clone 17780 (TRBV20-1, TRBJ2-7)
CSARDRVSGMDEQYF

SEQ ID NO: 35561 - protein, 12 aa, Homo sapiens
  CDR3 for alpha chain variable domain of TCR clone 17781 (TRAV2, TRAJ9)
CAVAAGGFKTIF

SEQ ID NO: 35562 - protein, 16 aa, Homo sapiens
  CDR3 for beta chain variable domain of TCR clone 17781 (TRBV13, TRBJ2-2)
CASSPRTGEHTGELFF

SEQ ID NO: 35563 - protein, 12 aa, Homo sapiens
  CDR3 for alpha chain variable domain of TCR clone 17782 (TRAV13-1, TRAJ15)
CAASKAGTALIF

SEQ ID NO: 35564 - protein, 14 aa, Homo sapiens
  CDR3 for beta chain variable domain of TCR clone 17782 (TRBV19, TRBJ2-2)
CASSTLHRSGELFF

SEQ ID NO: 35565 - protein, 13 aa, Homo sapiens
  CDR3 for alpha chain variable domain of TCR clone 17783 (TRAV1-2, TRAJ26)
CAVSPNYGQNFVF

SEQ ID NO: 35566 - protein, 14 aa, Homo sapiens
  CDR3 for beta chain variable domain of TCR clone 17783 (TRBV4-1, TRBJ2-5)
CASSQDLALETQYF

SEQ ID NO: 35567 - protein, 18 aa, Homo sapiens
  CDR3 for alpha chain variable domain of TCR clone 17784 (TRAV13-1, TRAJ52)
CAASKRSAGGTSYGKPTF

SEQ ID NO: 35568 - protein, 13 aa, Homo sapiens
  CDR3 for beta chain variable domain of TCR clone 17784 (TRBV12-4, TRBJ1-2)
CASSLRQGKGYTF

SEQ ID NO: 35569 - protein, 13 aa, Homo sapiens
  CDR3 for alpha chain variable domain of TCR clone 17785 (TRAV3, TRAJ21)
CAVREPDFNKFYF

SEQ ID NO: 35570 - protein, 13 aa, Homo sapiens
  CDR3 for beta chain variable domain of TCR clone 17785 (TRBV9, TRBJ2-1)
CASSPAGGNEQFF

SEQ ID NO: 35571 - protein, 15 aa, Homo sapiens
  CDR3 for alpha chain variable domain of TCR clone 17786 (TRAV8-3, TRAJ11)
CAVGLLNSVYSTLTF

SEQ ID NO: 35572 - protein, 16 aa, Homo sapiens
  CDR3 for beta chain variable domain of TCR clone 17786 (TRBV7-9, TRBJ1-2)
CASSLGFSSGEDGYTF

SEQ ID NO: 35573 - protein, 11 aa, Homo sapiens
  CDR3 for alpha chain variable domain of TCR clone 17787 (TRAV12-2, TRAJ29)
CAVTLRSPLVF

SEQ ID NO: 35574 - protein, 16 aa, Homo sapiens
  CDR3 for beta chain variable domain of TCR clone 17787 (TRBV19, TRBJ1-5)
CASSIDRGGPRQTQHF

SEQ ID NO: 35575 - protein, 14 aa, Homo sapiens
  CDR3 for alpha chain variable domain of TCR clone 17788 (TRAV25, TRAJ27)
CAGPGNTNAGKSTF

SEQ ID NO: 35576 - protein, 16 aa, Homo sapiens
  CDR3 for beta chain variable domain of TCR clone 17788 (TRBV4-1, TRBJ2-6)
CASSQDGGPGANDLTF

SEQ ID NO: 35577 - protein, 16 aa, Homo sapiens
  CDR3 for alpha chain variable domain of TCR clone 17789 (TRAV1-2, TRAJ10)
CAVRGVLTGGGNKLTF

SEQ ID NO: 35578 - protein, 14 aa, Homo sapiens
  CDR3 for beta chain variable domain of TCR clone 17789 (TRBV6-1, TRBJ1-3)
CASVQGGGGNTIYF

SEQ ID NO: 35579 - protein, 13 aa, Homo sapiens
  CDR3 for alpha chain variable domain of TCR clone 17790 (TRAV2, TRAJ21)
CAVDDLNFNKFYF

SEQ ID NO: 35580 - protein, 15 aa, Homo sapiens
  CDR3 for beta chain variable domain of TCR clone 17790 (TRBV28, TRBJ2-5)
CASSPGQGSIETQYF

SEQ ID NO: 35581 - protein, 11 aa, Homo sapiens
  CDR3 for alpha chain variable domain of TCR clone 17791 (TRAV16, TRAJ49)
CSLNTGNQFYF

SEQ ID NO: 35582 - protein, 13 aa, Homo sapiens
  CDR3 for beta chain variable domain of TCR clone 17791 (TRBV7-9, TRBJ1-2)
CASSLKQNYGYTF

SEQ ID NO: 35583 - protein, 15 aa, Homo sapiens
  CDR3 for alpha chain variable domain of TCR clone 17792 (TRAV12-1, TRAJ44)
CVVFVNTGTASKLTF

SEQ ID NO: 35584 - protein, 14 aa, Homo sapiens
  CDR3 for beta chain variable domain of TCR clone 17792 (TRBV19, TRBJ2-1)
CASPTFVLSGEQFF

SEQ ID NO: 35585 - protein, 11 aa, Homo sapiens
  CDR3 for alpha chain variable domain of TCR clone 17793 (TRAV12-1, TRAJ8)
CVVTGFQKLVF

SEQ ID NO: 35586 - protein, 14 aa, Homo sapiens
  CDR3 for beta chain variable domain of TCR clone 17793 (TRBV19, TRBJ2-1)
CASGKSTQHNEQFF

SEQ ID NO: 35587 - protein, 14 aa, Homo sapiens
  CDR3 for alpha chain variable domain of TCR clone 17794 (TRAV12-3, TRAJ58)
CAMSTETSGPRLTF

SEQ ID NO: 35588 - protein, 13 aa, Homo sapiens
  CDR3 for beta chain variable domain of TCR clone 17794 (TRBV27, TRBJ2-3)
CASSWGRTDTQYF

SEQ ID NO: 35589 - protein, 14 aa, Homo sapiens
  CDR3 for alpha chain variable domain of TCR clone 17795 (TRAV35, TRAJ22)
CAGLSPGSARQLTF

SEQ ID NO: 35590 - protein, 15 aa, Homo sapiens
  CDR3 for beta chain variable domain of TCR clone 17795 (TRBV12-4, TRBJ2-5)
CASSPPTGLQETQYF

SEQ ID NO: 35591 - protein, 19 aa, Homo sapiens
  CDR3 for alpha chain variable domain of TCR clone 17796 (TRAV26-1, TRAJ52)
CIVRAHRNAGGTSYGKLTF

SEQ ID NO: 35592 - protein, 15 aa, Homo sapiens
  CDR3 for beta chain variable domain of TCR clone 17796 (TRBV29-1, TRBJ2-1)
CSGRDRKGSYNEQFF

SEQ ID NO: 35593 - protein, 17 aa, Homo sapiens
  CDR3 for alpha chain variable domain of TCR clone 17797 (TRAV23/DV6, TRAJ57)
CAASSTLSQGGAEKLVF

SEQ ID NO: 35594 - protein, 14 aa, Homo sapiens
  CDR3 for beta chain variable domain of TCR clone 17797 (TRBV25-1, TRBJ1-1)
CASTHLGGNTEAFF

SEQ ID NO: 35595 - protein, 13 aa, Homo sapiens
  CDR3 for alpha chain variable domain of TCR clone 17798 (TRAV1-2, TRAJ12)
CAVSMDSSYKLIF

SEQ ID NO: 35596 - protein, 14 aa, Homo sapiens
  CDR3 for beta chain variable domain of TCR clone 17798 (TRBV7-2, TRBJ1-3)
CASSLSRSGNTIYF

SEQ ID NO: 35597 - protein, 11 aa, Homo sapiens
  CDR3 for alpha chain variable domain of TCR clone 17799 (TRAV17, TRAJ9)
CATTGCFKTIF

SEQ ID NO: 35598 - protein, 14 aa, Homo sapiens
  CDR3 for beta chain variable domain of TCR clone 17799 (TRBV7-9, TRBJ2-2)
CASSGLADTGELFF

SEQ ID NO: 35599 - protein, 11 aa, Homo sapiens
  CDR3 for alpha chain variable domain of TCR clone 17800 (TRAV35, TRAJ30)
CAPGGDDKIIF

SEQ ID NO: 35600 - protein, 14 aa, Homo sapiens
  CDR3 for beta chain variable domain of TCR clone 17800 (TRBV7-6, TRBJ2-1)
CASSLGGGADKQFF

SEQ ID NO: 35601 - protein, 14 aa, Homo sapiens
  CDR3 for alpha chain variable domain of TCR clone 17801 (TRAV26-1, TRAJ39)
CIVFTNNAGNMLTF

SEQ ID NO: 35602 - protein, 15 aa, Homo sapiens
  CDR3 for beta chain variable domain of TCR clone 17801 (TRBV19, TRBJ2-4)
CASSLTGLTKNSQYF

SEQ ID NO: 35603 - protein, 14 aa, Homo sapiens
  CDR3 for alpha chain variable domain of TCR clone 17802 (TRAV12-2, TRAJ44)
CAVNPAGTASKLTF

SEQ ID NO: 35604 - protein, 14 aa, Homo sapiens
  CDR3 for beta chain variable domain of TCR clone 17802 (TRBV4-2, TRBJ2-3)
CASRETRAPGMQYF

SEQ ID NO: 35605 - protein, 12 aa, Homo sapiens
  CDR3 for alpha chain variable domain of TCR clone 17803 (TRAV12-3, TRAJ40)
CAMSPGTYKYIF

SEQ ID NO: 35606 - protein, 15 aa, Homo sapiens
  CDR3 for beta chain variable domain of TCR clone 17803 (TRBV7-3, TRBJ2-2)
CASSETGQGTGELFF

SEQ ID NO: 35607 - protein, 13 aa, Homo sapiens
  CDR3 for alpha chain variable domain of TCR clone 17804 (TRAV14/DV4, TRAJ15)
CAMRDQAGTALIF

SEQ ID NO: 35608 - protein, 14 aa, Homo sapiens
  CDR3 for beta chain variable domain of TCR clone 17804 (TRBV2, TRBJ2-3)
CASARDFPADTQYF

SEQ ID NO: 35609 - protein, 13 aa, Homo sapiens
  CDR3 for alpha chain variable domain of TCR clone 17805 (TRAV12-3, TRAJ33)
CAMSVNSNDQLIW

SEQ ID NO: 35610 - protein, 13 aa, Homo sapiens
  CDR3 for beta chain variable domain of TCR clone 17805 (TRBV7-2, TRBJ2-2)
CASSLAVTGELFF

SEQ ID NO: 35611 - protein, 10 aa, Homo sapiens
  CDR3 for alpha chain variable domain of TCR clone 17806 (TRAV16, TRAJ26)
CALSGSELCL

SEQ ID NO: 35612 - protein, 12 aa, Homo sapiens
  CDR3 for beta chain variable domain of TCR clone 17806 (TRBV11-2, TRBJ2-1)
CASSPGNNEQFF

SEQ ID NO: 35613 - protein, 13 aa, Homo sapiens
  CDR3 for alpha chain variable domain of TCR clone 17807 (TRAV24, TRAJ5)
CACCGAGRRALTF

SEQ ID NO: 35614 - protein, 13 aa, Homo sapiens
  CDR3 for beta chain variable domain of TCR clone 17807 (TRBV19, TRBJ1-2)
CASSVPGQDGYTF

SEQ ID NO: 35615 - protein, 13 aa, Homo sapiens
  CDR3 for alpha chain variable domain of TCR clone 17808 (TRAV12-2, TRAJ11)
CAVPNSGYSTLTF

SEQ ID NO: 35616 - protein, 10 aa, Homo sapiens
  CDR3 for beta chain variable domain of TCR clone 17808 (TRBV6-1, TRBJ1-3)
CASSQGQEYF

SEQ ID NO: 35617 - protein, 11 aa, Homo sapiens
  CDR3 for alpha chain variable domain of TCR clone 17809 (TRAV2, TRAJ13)
CASGGYQKVTF

SEQ ID NO: 35618 - protein, 14 aa, Homo sapiens
  CDR3 for beta chain variable domain of TCR clone 17809 (TRBV20-1, TRBJ1-1)
CSAQTRIGGTEAFF

SEQ ID NO: 35619 - protein, 17 aa, Homo sapiens
  CDR3 for alpha chain variable domain of TCR clone 17810 (TRAV3, TRAJ6)
CAVRDGPTAGGSYIPTF

SEQ ID NO: 35620 - protein, 14 aa, Homo sapiens
  CDR3 for beta chain variable domain of TCR clone 17810 (TRBV7-2, TRBJ2-7)
CASSPKTSFYEQYF

SEQ ID NO: 35621 - protein, 13 aa, Homo sapiens
  CDR3 for alpha chain variable domain of TCR clone 17811 (TRAV2, TRAJ40)
CAVVTSGTYKYIF

SEQ ID NO: 35622 - protein, 14 aa, Homo sapiens
  CDR3 for beta chain variable domain of TCR clone 17811 (TRBV19, TRBJ2-1)
CASPTFVLSGEQIF

SEQ ID NO: 35623 - protein, 10 aa, Homo sapiens
  CDR3 for alpha chain variable domain of TCR clone 17812 (TRAV26-1, )
CIVSHRVEVF

SEQ ID NO: 35624 - protein, 14 aa, Homo sapiens
  CDR3 for beta chain variable domain of TCR clone 17812 (TRBV20-1, TRBJ2-7)
CSAWTALSSYEQYF

SEQ ID NO: 35625 - protein, 17 aa, Homo sapiens
  CDR3 for alpha chain variable domain of TCR clone 17813 (TRAV26-2, TRAJ42)
CILRDVGYGGSQGSLIF

SEQ ID NO: 35626 - protein, 16 aa, Homo sapiens
  CDR3 for beta chain variable domain of TCR clone 17813 (TRBV12-4, TRBJ2-7)
CASSLIGGTGTYEQYF

SEQ ID NO: 35627 - protein, 14 aa, Homo sapiens
  CDR3 for alpha chain variable domain of TCR clone 17814 (TRAV9-2, TRAJ39)
CALYIYNAGNMLTF

SEQ ID NO: 35628 - protein, 20 aa, Homo sapiens
  CDR3 for beta chain variable domain of TCR clone 17814 (TRBV7-8, TRBJ2-2)
CASSHLFPGPTIHITGELFF

SEQ ID NO: 35629 - protein, 14 aa, Homo sapiens
  CDR3 for alpha chain variable domain of TCR clone 17815 (TRAV1-2, TRAJ8)
CAVREDTGFQKLVF

SEQ ID NO: 35630 - protein, 15 aa, Homo sapiens
  CDR3 for beta chain variable domain of TCR clone 17815 (TRBV6-3, TRBJ2-7)
CASNSPGTVFYEQYF

SEQ ID NO: 35631 - protein, 16 aa, Homo sapiens
  CDR3 for alpha chain variable domain of TCR clone 17816 (TRAV3, TRAJ10)
CAVRDMRAGGGNKLTF

SEQ ID NO: 35632 - protein, 15 aa, Homo sapiens
  CDR3 for beta chain variable domain of TCR clone 17816 (TRBV7-9, TRBJ1-6)
CASSSPGRGNSPLHF

SEQ ID NO: 35633 - protein, 12 aa, Homo sapiens
  CDR3 for alpha chain variable domain of TCR clone 17817 (TRAV12-1, TRAJ40)
CVVYSGTYKYIF

SEQ ID NO: 35634 - protein, 18 aa, Homo sapiens
  CDR3 for beta chain variable domain of TCR clone 17817 (TRBV11-2, TRBJ2-3)
CASGLGGASRGAPNTQYF

SEQ ID NO: 35635 - protein, 14 aa, Homo sapiens
  CDR3 for alpha chain variable domain of TCR clone 17818 (TRAV13-1, TRAJ44)
CAAKATGTASKLTF

SEQ ID NO: 35636 - protein, 14 aa, Homo sapiens
  CDR3 for beta chain variable domain of TCR clone 17818 (TRBV19, TRBJ1-5)
CASGTEVYNQPQHF

SEQ ID NO: 35637 - protein, 13 aa, Homo sapiens
  CDR3 for alpha chain variable domain of TCR clone 17819 (TRAV1-2, TRAJ9)
CAALNTGGFKTIF

SEQ ID NO: 35638 - protein, 16 aa, Homo sapiens
  CDR3 for beta chain variable domain of TCR clone 17819 (TRBV7-3, TRBJ2-2)
CASSLKRGTLSGELFF

SEQ ID NO: 35639 - protein, 14 aa, Homo sapiens
  CDR3 for alpha chain variable domain of TCR clone 17820 (TRAV4, TRAJ9)
CPVGSGTGGFKTIF

SEQ ID NO: 35640 - protein, 15 aa, Homo sapiens
  CDR3 for beta chain variable domain of TCR clone 17820 (TRBV7-2, TRBJ2-1)
CASSLASGRVNEQFF

SEQ ID NO: 35641 - protein, 16 aa, Homo sapiens
  CDR3 for alpha chain variable domain of TCR clone 17821 (TRAV3, TRAJ37)
CAVRGKGSGNTGKLIF

SEQ ID NO: 35642 - protein, 14 aa, Homo sapiens
  CDR3 for beta chain variable domain of TCR clone 17821 (TRBV20-1, TRBJ1-1)
CSAQTRIGGTEAFF

SEQ ID NO: 35643 - protein, 13 aa, Homo sapiens
  CDR3 for alpha chain variable domain of TCR clone 17822 (TRAV13-1, TRAJ12)
CAASPDSSYKLIF

SEQ ID NO: 35644 - protein, 16 aa, Homo sapiens
  CDR3 for beta chain variable domain of TCR clone 17822 (TRBV15, TRBJ2-1)
CAASRERLAGAYEQFF

SEQ ID NO: 35645 - protein, 16 aa, Homo sapiens
  CDR3 for alpha chain variable domain of TCR clone 17823 (TRAV8-3, TRAJ13)
CAVGAYPSGGYQKVTF

SEQ ID NO: 35646 - protein, 15 aa, Homo sapiens
  CDR3 for beta chain variable domain of TCR clone 17823 (TRBV19, TRBJ1-5)
CASSIVWADNQPRHF

SEQ ID NO: 35647 - protein, 11 aa, Homo sapiens
  CDR3 for alpha chain variable domain of TCR clone 17824 (TRAV17, TRAJ9)
CGFTGGFKTIF

SEQ ID NO: 35648 - protein, 13 aa, Homo sapiens
  CDR3 for beta chain variable domain of TCR clone 17824 (TRBV7-9, TRBJ1-2)
CASSLKQNYGYTF

SEQ ID NO: 35649 - protein, 13 aa, Homo sapiens
  CDR3 for alpha chain variable domain of TCR clone 17825 (TRAV13-2, TRAJ48)
CAEMDFGNEKLTF

SEQ ID NO: 35650 - protein, 15 aa, Homo sapiens
  CDR3 for beta chain variable domain of TCR clone 17825 (TRBV7-9, TRBJ1-6)
CASSSPGSGNSPLHF

SEQ ID NO: 35651 - protein, 15 aa, Homo sapiens
  CDR3 for alpha chain variable domain of TCR clone 17826 (TRAV26-1, TRAJ29)
CIVKVEGSGNTPLVF

SEQ ID NO: 35652 - protein, 15 aa, Homo sapiens
  CDR3 for beta chain variable domain of TCR clone 17826 (TRBV7-9, TRBJ1-5)
CASSQGHQPNQPQHF

SEQ ID NO: 35653 - protein, 13 aa, Homo sapiens
  CDR3 for alpha chain variable domain of TCR clone 17827 (TRAV17, TRAJ9)
CATDYTGGFKTIF

SEQ ID NO: 35654 - protein, 16 aa, Homo sapiens
  CDR3 for beta chain variable domain of TCR clone 17827 (TRBV7-7, TRBJ2-1)
CASSLASGTSYNEQFS

SEQ ID NO: 35655 - protein, 15 aa, Homo sapiens
  CDR3 for alpha chain variable domain of TCR clone 17828 (TRAV17, TRAJ57)
CATGPSQGGSEELVF

SEQ ID NO: 35656 - protein, 16 aa, Homo sapiens
  CDR3 for beta chain variable domain of TCR clone 17828 (TRBV12-4, TRBJ1-5)
CASSRPVGGSNQPQHF

SEQ ID NO: 35657 - protein, 13 aa, Homo sapiens
  CDR3 for alpha chain variable domain of TCR clone 17829 (TRAV3, TRAJ27)
CAVRPLGAGKSTF

SEQ ID NO: 35658 - protein, 13 aa, Homo sapiens
  CDR3 for beta chain variable domain of TCR clone 17829 (TRBV7-9, TRBJ2-3)
CASSPGSTETQYF

SEQ ID NO: 35659 - protein, 17 aa, Homo sapiens
  CDR3 for alpha chain variable domain of TCR clone 17830 (TRAV3, TRAJ6)
CAVRDGPRAGGSYIPTF

SEQ ID NO: 35660 - protein, 15 aa, Homo sapiens
  CDR3 for beta chain variable domain of TCR clone 17830 (TRBV7-2, TRBJ2-1)
CASSSGLAGGNEQFF

SEQ ID NO: 35661 - protein, 13 aa, Homo sapiens
  CDR3 for alpha chain variable domain of TCR clone 17831 (TRAV13-1, TRAJ17)
CAADGAAGNKLTF

SEQ ID NO: 35662 - protein, 14 aa, Homo sapiens
  CDR3 for beta chain variable domain of TCR clone 17831 (TRBV11-2, TRBJ1-3)
CASSLTQGRNTMYF

SEQ ID NO: 35663 - protein, 13 aa, Homo sapiens
  CDR3 for alpha chain variable domain of TCR clone 17832 (TRAV3, TRAJ27)
CAVRPPGAGKSTF

SEQ ID NO: 35664 - protein, 13 aa, Homo sapiens
  CDR3 for beta chain variable domain of TCR clone 17832 (TRBV7-9, TRBJ2-3)
CASSPGSTDTQYF

SEQ ID NO: 35665 - protein, 13 aa, Homo sapiens
  CDR3 for alpha chain variable domain of TCR clone 17833 (TRAV13-1, TRAJ5)
CAASDTGRRALTF

SEQ ID NO: 35666 - protein, 12 aa, Homo sapiens
  CDR3 for beta chain variable domain of TCR clone 17833 (TRBV28, TRBJ2-3)
CASSLYRGTQYF

SEQ ID NO: 35667 - protein, 16 aa, Homo sapiens
  CDR3 for alpha chain variable domain of TCR clone 17834 (TRAV8-3, TRAJ48)
CAVGLISNFGNEKLTF

SEQ ID NO: 35668 - protein, 13 aa, Homo sapiens
  CDR3 for beta chain variable domain of TCR clone 17834 (TRBV20-1, TRBJ1-5)
CSASWGRSQPQHY

SEQ ID NO: 35669 - protein, 16 aa, Homo sapiens
  CDR3 for alpha chain variable domain of TCR clone 17835 (TRAV12-2, TRAJ32)
CAVNLGQGGATNKLIL

SEQ ID NO: 35670 - protein, 15 aa, Homo sapiens
  CDR3 for beta chain variable domain of TCR clone 17835 (TRBV20-1, TRBJ2-7)
CSARGPLAGGREQYF

SEQ ID NO: 35671 - protein, 12 aa, Homo sapiens
  CDR3 for alpha chain variable domain of TCR clone 17836 (TRAV3, TRAJ31)
CAVRDGNARPMF

SEQ ID NO: 35672 - protein, 18 aa, Homo sapiens
  CDR3 for beta chain variable domain of TCR clone 17836 (TRBV7-2, TRBJ2-3)
CASSLKREGSGITDTQYF

SEQ ID NO: 35673 - protein, 12 aa, Homo sapiens
  CDR3 for alpha chain variable domain of TCR clone 17837 (TRAV20, TRAJ39)
CAVGNAGNMLTF

SEQ ID NO: 35674 - protein, 16 aa, Homo sapiens
  CDR3 for beta chain variable domain of TCR clone 17837 (TRBV15, TRBJ1-2)
CATSRGPRTGGGGDTF

SEQ ID NO: 35675 - protein, 14 aa, Homo sapiens
  CDR3 for alpha chain variable domain of TCR clone 17838 (TRAV9-2, TRAJ39)
CALYIYNAGNMLTF

SEQ ID NO: 35676 - protein, 12 aa, Homo sapiens
  CDR3 for beta chain variable domain of TCR clone 17838 (TRBV11-2, TRBJ2-2)
CASSLPTGELFF

SEQ ID NO: 35677 - protein, 16 aa, Homo sapiens
  CDR3 for alpha chain variable domain of TCR clone 17839 (TRAV38-2/DV8, TRAJ45)
CAYRGNSGGGADGLTF

SEQ ID NO: 35678 - protein, 17 aa, Homo sapiens
  CDR3 for beta chain variable domain of TCR clone 17839 (TRBV5-1, TRBJ2-7)
FAPAADNPGQIPYEQYF

SEQ ID NO: 35679 - protein, 15 aa, Homo sapiens
  CDR3 for alpha chain variable domain of TCR clone 17840 (TRAV35, TRAJ40)
CAGQLGTSGTYKYIL

SEQ ID NO: 35680 - protein, 14 aa, Homo sapiens
  CDR3 for beta chain variable domain of TCR clone 17840 (TRBV5-1, TRBJ2-7)
CASSRGESLYEQYF

SEQ ID NO: 35681 - protein, 17 aa, Homo sapiens
  CDR3 for alpha chain variable domain of TCR clone 17841 (TRAV16, )
CALSGDIQNPDPAVYQL

SEQ ID NO: 35682 - protein, 16 aa, Homo sapiens
  CDR3 for beta chain variable domain of TCR clone 17841 (TRBV12-5, TRBJ2-5)
CASGPRTSGNQETQYF

SEQ ID NO: 35683 - protein, 13 aa, Homo sapiens
  CDR3 for alpha chain variable domain of TCR clone 17842 (TRAV29/DV5, TRAJ49)
CAASTNTGNQFYF

SEQ ID NO: 35684 - protein, 15 aa, Homo sapiens
  CDR3 for beta chain variable domain of TCR clone 17842 (TRBV7-2, TRBJ1-4)
CASSLAGLEKLFLAV

SEQ ID NO: 35685 - protein, 14 aa, Homo sapiens
  CDR3 for alpha chain variable domain of TCR clone 17843 (TRAV13-1, TRAJ40)
CAASMTSGTYKYIF

SEQ ID NO: 35686 - protein, 14 aa, Homo sapiens
  CDR3 for beta chain variable domain of TCR clone 17843 (TRBV7-3, TRBJ2-1)
CQQPDGGGEVEQFF

SEQ ID NO: 35687 - protein, 11 aa, Homo sapiens
  CDR3 for alpha chain variable domain of TCR clone 17844 (TRAV2, TRAJ33)
CAVDSNYQLIW

SEQ ID NO: 35688 - protein, 14 aa, Homo sapiens
  CDR3 for beta chain variable domain of TCR clone 17844 (TRBV11-2, TRBJ2-3)
CASSRLARTDTQYL

SEQ ID NO: 35689 - protein, 13 aa, Homo sapiens
  CDR3 for alpha chain variable domain of TCR clone 17845 (TRAV8-3, TRAJ28)
CALGAVGSYQLTF

SEQ ID NO: 35690 - protein, 15 aa, Homo sapiens
  CDR3 for beta chain variable domain of TCR clone 17845 (TRBV7-9, TRBJ1-5)
CASSQGHQPNQPQHF

SEQ ID NO: 35691 - protein, 14 aa, Homo sapiens
  CDR3 for alpha chain variable domain of TCR clone 17846 (TRAV1-2, TRAJ16)
CAVNRFSDGQKLLF

SEQ ID NO: 35692 - protein, 15 aa, Homo sapiens
  CDR3 for beta chain variable domain of TCR clone 17846 (TRBV28, TRBJ1-3)
CASGATGNSGSTIYF

SEQ ID NO: 35693 - protein, 12 aa, Homo sapiens
  CDR3 for alpha chain variable domain of TCR clone 17847 (TRAV36/DV7, TRAJ54)
CAVVRGAQKLVF

SEQ ID NO: 35694 - protein, 14 aa, Homo sapiens
  CDR3 for beta chain variable domain of TCR clone 17847 (TRBV7-3, TRBJ1-1)
CASSSKGGNTEAFF

SEQ ID NO: 35695 - protein, 15 aa, Homo sapiens
  CDR3 for alpha chain variable domain of TCR clone 17848 (TRAV8-3, TRAJ45)
YASSYSGGGADGLTF

SEQ ID NO: 35696 - protein, 13 aa, Homo sapiens
  CDR3 for beta chain variable domain of TCR clone 17848 (TRBV10-3, TRBJ2-7)
CASKLAVNYEQYF

SEQ ID NO: 35697 - protein, 14 aa, Homo sapiens
  CDR3 for alpha chain variable domain of TCR clone 17849 (TRAV1-2, TRAJ16)
CAVNRFSDGQKLLF

SEQ ID NO: 35698 - protein, 15 aa, Homo sapiens
  CDR3 for beta chain variable domain of TCR clone 17849 (TRBV9, TRBJ1-6)
CASSVAGTGDSPLDF

SEQ ID NO: 35699 - protein, 13 aa, Homo sapiens
  CDR3 for alpha chain variable domain of TCR clone 17850 (TRAV21, TRAJ27)
CAARPGNAGKSTF

SEQ ID NO: 35700 - protein, 13 aa, Homo sapiens
  CDR3 for beta chain variable domain of TCR clone 17850 (TRBV7-6, TRBJ2-1)
CRQLGGGADEQFF

SEQ ID NO: 35701 - protein, 17 aa, Homo sapiens
  CDR3 for alpha chain variable domain of TCR clone 17851 (TRAV4, TRAJ13)
CLVGVQGSSGGYQKVTF

SEQ ID NO: 35702 - protein, 18 aa, Homo sapiens
  CDR3 for beta chain variable domain of TCR clone 17851 (TRBV15, TRBJ2-3)
CATSSDGARSWDTDTQYF

SEQ ID NO: 35703 - protein, 13 aa, Homo sapiens
  CDR3 for alpha chain variable domain of TCR clone 17852 (TRAV27, TRAJ45)
CRSSVGGADGLTF

SEQ ID NO: 35704 - protein, 17 aa, Homo sapiens
  CDR3 for beta chain variable domain of TCR clone 17852 (TRBV11-2, TRBJ2-1)
CASSLYPPGVEYNEQFF

SEQ ID NO: 35705 - protein, 14 aa, Homo sapiens
  CDR3 for alpha chain variable domain of TCR clone 17853 (TRAV26-1, TRAJ38)
CIADNAGNNRKLIW

SEQ ID NO: 35706 - protein, 13 aa, Homo sapiens
  CDR3 for beta chain variable domain of TCR clone 17853 (TRBV20-1, TRBJ1-1)
CSARCGGNTEAFF

SEQ ID NO: 35707 - protein, 13 aa, Homo sapiens
  CDR3 for alpha chain variable domain of TCR clone 17854 (TRAV3, TRAJ21)
CAVREPDFNKFYF

SEQ ID NO: 35708 - protein, 16 aa, Homo sapiens
  CDR3 for beta chain variable domain of TCR clone 17854 (TRBV19, TRBJ2-1)
CASSKAGPSSYNEQFF

SEQ ID NO: 35709 - protein, 16 aa, Homo sapiens
  CDR3 for alpha chain variable domain of TCR clone 17855 (TRAV1-2, TRAJ10)
CAVRGVLTGGGNKLTF

SEQ ID NO: 35710 - protein, 15 aa, Homo sapiens
  CDR3 for beta chain variable domain of TCR clone 17855 (TRBV6-1, TRBJ2-2)
CASSRLRGDTGELFF

SEQ ID NO: 35711 - protein, 13 aa, Homo sapiens
  CDR3 for alpha chain variable domain of TCR clone 17856 (TRAV23/DV6, TRAJ16)
CAASISDGQRLLF

SEQ ID NO: 35712 - protein, 15 aa, Homo sapiens
  CDR3 for beta chain variable domain of TCR clone 17856 (TRBV2, TRBJ2-2)
CASSRETVGTGELFF

SEQ ID NO: 35713 - protein, 12 aa, Homo sapiens
  CDR3 for alpha chain variable domain of TCR clone 17857 (TRAV8-3, TRAJ26)
CAGDNYGQNFVF

SEQ ID NO: 35714 - protein, 16 aa, Homo sapiens
  CDR3 for beta chain variable domain of TCR clone 17857 (TRBV7-3, TRBJ2-2)
CASSLKRGTLSGELFF

SEQ ID NO: 35715 - protein, 14 aa, Homo sapiens
  CDR3 for alpha chain variable domain of TCR clone 17858 (TRAV12-3, TRAJ42)
CAMNYGGSQGNLIF

SEQ ID NO: 35716 - protein, 12 aa, Homo sapiens
  CDR3 for beta chain variable domain of TCR clone 17858 (TRBV11-2, TRBJ2-2)
CASSLGGGELFF

SEQ ID NO: 35717 - protein, 23 aa, Homo sapiens
  CDR3 for alpha chain variable domain of TCR clone 17859 (TRAV26-1, TRAJ38)
CIADNAGNNHIQNPDPAVYQLSD

SEQ ID NO: 35718 - protein, 12 aa, Homo sapiens
  CDR3 for beta chain variable domain of TCR clone 17859 (TRBV11-2, TRBJ2-2)
CASSLGGGELFF

SEQ ID NO: 35719 - protein, 15 aa, Homo sapiens
  CDR3 for alpha chain variable domain of TCR clone 17860 (TRAV21, TRAJ45)
CAVSYSGGGADGLTF

SEQ ID NO: 35720 - protein, 15 aa, Homo sapiens
  CDR3 for beta chain variable domain of TCR clone 17860 (TRBV6-4, TRBJ2-7)
CASSDQGPPNYEQYF

SEQ ID NO: 35721 - protein, 13 aa, Homo sapiens
  CDR3 for alpha chain variable domain of TCR clone 17861 (TRAV21, TRAJ27)
CASRPGNAGKSTF

SEQ ID NO: 35722 - protein, 14 aa, Homo sapiens
  CDR3 for beta chain variable domain of TCR clone 17861 (TRBV11-2, TRBJ2-7)
CASSLGAGAYEQYF

SEQ ID NO: 35723 - protein, 15 aa, Homo sapiens
  CDR3 for alpha chain variable domain of TCR clone 17862 (TRAV25, TRAJ52)
CAGRPGGTSYGKLTF

SEQ ID NO: 35724 - protein, 16 aa, Homo sapiens
  CDR3 for beta chain variable domain of TCR clone 17862 (TRBV7-8, TRBJ2-6)
CQQRRDRGAGANVLTF

SEQ ID NO: 35725 - protein, 14 aa, Homo sapiens
  CDR3 for alpha chain variable domain of TCR clone 17863 (TRAV12-3, TRAJ42)
CAMNYGGSQGNLTF

SEQ ID NO: 35726 - protein, 15 aa, Homo sapiens
  CDR3 for beta chain variable domain of TCR clone 17863 (TRBV5-7, TRBJ1-5)
CASSYGKLWDQPQHF

SEQ ID NO: 35727 - protein, 13 aa, Homo sapiens
  CDR3 for alpha chain variable domain of TCR clone 17864 (TRAV30, TRAJ34)
CGTVGYNTDKPIF

SEQ ID NO: 35728 - protein, 16 aa, Homo sapiens
  CDR3 for beta chain variable domain of TCR clone 17864 (TRBV7-9, TRBJ1-2)
CASSLGFSSGEDGYTF

SEQ ID NO: 35729 - protein, 12 aa, Homo sapiens
  CDR3 for alpha chain variable domain of TCR clone 17865 (TRAV29/DV5, TRAJ49)
CAATDTGNLFYF

SEQ ID NO: 35730 - protein, 12 aa, Homo sapiens
  CDR3 for beta chain variable domain of TCR clone 17865 (TRBV12-4, TRBJ2-7)
CASSLGGYEQYF

SEQ ID NO: 35731 - protein, 14 aa, Homo sapiens
  CDR3 for alpha chain variable domain of TCR clone 17866 (TRAV13-1, TRAJ44)
CAAKATGTASKLTF

SEQ ID NO: 35732 - protein, 17 aa, Homo sapiens
  CDR3 for beta chain variable domain of TCR clone 17866 (TRBV7-3, TRBJ2-3)
CASSLMKRRRGADTQYF

SEQ ID NO: 35733 - protein, 18 aa, Homo sapiens
  CDR3 for alpha chain variable domain of TCR clone 17867 (TRAV21, TRAJ52)
CAVRPSPAGGTSYGKLTF

SEQ ID NO: 35734 - protein, 17 aa, Homo sapiens
  CDR3 for beta chain variable domain of TCR clone 17867 (TRBV13, TRBJ2-3)
CASSLFRVAGGRNTQYF

SEQ ID NO: 35735 - protein, 11 aa, Homo sapiens
  CDR3 for alpha chain variable domain of TCR clone 17868 (TRAV3, TRAJ21)
CAVGNFNKFYF

SEQ ID NO: 35736 - protein, 15 aa, Homo sapiens
  CDR3 for beta chain variable domain of TCR clone 17868 (TRBV11-3, TRBJ2-3)
CASLKDGREGDTQYF

SEQ ID NO: 35737 - protein, 14 aa, Homo sapiens
  CDR3 for alpha chain variable domain of TCR clone 17869 (TRAV13-1, TRAJ44)
CAAKATGIASKLTF

SEQ ID NO: 35738 - protein, 14 aa, Homo sapiens
  CDR3 for beta chain variable domain of TCR clone 17869 (TRBV7-8, TRBJ2-3)
CASSLEAGTDTQYF

SEQ ID NO: 35739 - protein, 17 aa, Homo sapiens
  CDR3 for alpha chain variable domain of TCR clone 17870 (TRAV3, TRAJ6)
CAVRDGPRAGGSYIPTF

SEQ ID NO: 35740 - protein, 18 aa, Homo sapiens
  CDR3 for beta chain variable domain of TCR clone 17870 (TRBV7-9, TRBJ2-7)
CASGLTTSGSRTWYEQYF

SEQ ID NO: 35741 - protein, 13 aa, Homo sapiens
  CDR3 for alpha chain variable domain of TCR clone 17871 (TRAV8-3, TRAJ43)
CAVGPDNNNDMRF

SEQ ID NO: 35742 - protein, 13 aa, Homo sapiens
  CDR3 for beta chain variable domain of TCR clone 17871 (TRBV4-2, TRBJ1-1)
CASSQAGNTEAFF

SEQ ID NO: 35743 - protein, 15 aa, Homo sapiens
  CDR3 for alpha chain variable domain of TCR clone 17872 (TRAV4, TRAJ39)
CLVGPNNNAGNMLTF

SEQ ID NO: 35744 - protein, 13 aa, Homo sapiens
  CDR3 for beta chain variable domain of TCR clone 17872 (TRBV11-2, TRBJ2-5)
CVSSSTGEETQYF

SEQ ID NO: 35745 - protein, 18 aa, Homo sapiens
  CDR3 for alpha chain variable domain of TCR clone 17873 (TRAV21, TRAJ52)
CAVRPSPAGGTSYGKLTF

SEQ ID NO: 35746 - protein, 17 aa, Homo sapiens
  CDR3 for beta chain variable domain of TCR clone 17873 (TRBV13, TRBJ2-3)
CASSLSSVAGGRNTQYF

SEQ ID NO: 35747 - protein, 13 aa, Homo sapiens
  CDR3 for alpha chain variable domain of TCR clone 17874 (TRAV21, TRAJ57)
CAVTQGGSEKLVF

SEQ ID NO: 35748 - protein, 16 aa, Homo sapiens
  CDR3 for beta chain variable domain of TCR clone 17874 (TRBV29-1, TRBJ2-7)
CRVEDAEDGTAYEQYF

SEQ ID NO: 35749 - protein, 11 aa, Homo sapiens
  CDR3 for alpha chain variable domain of TCR clone 17875 (TRAV2, TRAJ13)
CASGGYQKVTF

SEQ ID NO: 35750 - protein, 16 aa, Homo sapiens
  CDR3 for beta chain variable domain of TCR clone 17875 (TRBV13, TRBJ2-2)
CASSPRTGEHTGELFF

SEQ ID NO: 35751 - protein, 14 aa, Homo sapiens
  CDR3 for alpha chain variable domain of TCR clone 17876 (TRAV35, TRAJ13)
CAGSPSGGYQRVTF

SEQ ID NO: 35752 - protein, 13 aa, Homo sapiens
  CDR3 for beta chain variable domain of TCR clone 17876 (TRBV29-1, TRBJ1-1)
CSVGDSRNTEAFF

SEQ ID NO: 35753 - protein, 14 aa, Homo sapiens
  CDR3 for alpha chain variable domain of TCR clone 17877 (TRAV12-2, TRAJ17)
CAVLFKAEGNKLTF

SEQ ID NO: 35754 - protein, 17 aa, Homo sapiens
  CDR3 for beta chain variable domain of TCR clone 17877 (TRBV20-1, TRBJ2-2)
CSASGSGQGGLTGELFF

SEQ ID NO: 35755 - protein, 14 aa, Homo sapiens
  CDR3 for alpha chain variable domain of TCR clone 17878 (TRAV13-2, TRAJ43)
CAEIPTYNNNDMRF

SEQ ID NO: 35756 - protein, 15 aa, Homo sapiens
  CDR3 for beta chain variable domain of TCR clone 17878 (TRBV7-9, TRBJ2-2)
CASGPLDTFPGELSF

SEQ ID NO: 35757 - protein, 11 aa, Homo sapiens
  CDR3 for alpha chain variable domain of TCR clone 17879 (TRAV17, TRAJ31)
CATSNNARLMF

SEQ ID NO: 35758 - protein, 14 aa, Homo sapiens
  CDR3 for beta chain variable domain of TCR clone 17879 (TRBV18, TRBJ2-7)
CASSPRGGAYEQYF

SEQ ID NO: 35759 - protein, 12 aa, Homo sapiens
  CDR3 for alpha chain variable domain of TCR clone 17880 (TRAV36/DV7, TRAJ54)
CAVVRGAQKLVF

SEQ ID NO: 35760 - protein, 14 aa, Homo sapiens
  CDR3 for beta chain variable domain of TCR clone 17880 (TRBV7-3, TRBJ1-1)
CASSLKGGNTEALF

SEQ ID NO: 35761 - protein, 17 aa, Homo sapiens
  CDR3 for alpha chain variable domain of TCR clone 17881 (TRAV3, TRAJ6)
CAVRDGPRAGGSYIPTF

SEQ ID NO: 35762 - protein, 18 aa, Homo sapiens
  CDR3 for beta chain variable domain of TCR clone 17881 (TRBV11-2, TRBJ1-6)
CASSLAVQGLSLNSPLHF

SEQ ID NO: 35763 - protein, 10 aa, Homo sapiens
  CDR3 for alpha chain variable domain of TCR clone 17882 (TRAV30, TRAJ24)
WMLTAGKFQF

SEQ ID NO: 35764 - protein, 14 aa, Homo sapiens
  CDR3 for beta chain variable domain of TCR clone 17882 (TRBV12-5, TRBJ2-5)
CASGSRTHQETQYF

SEQ ID NO: 35765 - protein, 15 aa, Homo sapiens
  CDR3 for alpha chain variable domain of TCR clone 17883 (TRAV36/DV7, TRAJ53)
WEGENSEGSNYKLTF

SEQ ID NO: 35766 - protein, 15 aa, Homo sapiens
  CDR3 for beta chain variable domain of TCR clone 17883 (TRBV6-1, TRBJ2-5)
CASSEGWGIQETQYF

SEQ ID NO: 35767 - protein, 14 aa, Homo sapiens
  CDR3 for alpha chain variable domain of TCR clone 17884 (TRAV1-2, TRAJ16)
CAVNRFSDGQKLLF

SEQ ID NO: 35768 - protein, 15 aa, Homo sapiens
  CDR3 for beta chain variable domain of TCR clone 17884 (TRBV11-2, TRBJ2-1)
CASSKNRGLIYEQFF

SEQ ID NO: 35769 - protein, 14 aa, Homo sapiens
  CDR3 for alpha chain variable domain of TCR clone 17885 (TRAV1-2, TRAJ8)
CAVREDTGFQKLVF

SEQ ID NO: 35770 - protein, 11 aa, Homo sapiens
  CDR3 for beta chain variable domain of TCR clone 17885 (TRBV11-2, TRBJ1-1)
CASSINTEAFF

SEQ ID NO: 35771 - protein, 14 aa, Homo sapiens
  CDR3 for alpha chain variable domain of TCR clone 17886 (TRAV17, TRAJ16)
RATADFSDGQKLLF

SEQ ID NO: 35772 - protein, 15 aa, Homo sapiens
  CDR3 for beta chain variable domain of TCR clone 17886 (TRBV18, TRBJ2-1)
CASSPPSASYNEQFF

SEQ ID NO: 35773 - protein, 11 aa, Homo sapiens
  CDR3 for alpha chain variable domain of TCR clone 17887 (TRAV12-1, TRAJ34)
CVVNKGRELIF

SEQ ID NO: 35774 - protein, 12 aa, Homo sapiens
  CDR3 for beta chain variable domain of TCR clone 17887 (TRBV2, TRBJ2-1)
CAHGPPGNEQFF

SEQ ID NO: 35775 - protein, 16 aa, Homo sapiens
  CDR3 for alpha chain variable domain of TCR clone 17888 (TRAV12-3, TRAJ53)
CAMGPGSGGSNYKLTF

SEQ ID NO: 35776 - protein, 16 aa, Homo sapiens
  CDR3 for beta chain variable domain of TCR clone 17888 (TRBV4-2, TRBJ1-1)
CASSQAGFGMNTEAFF

SEQ ID NO: 35777 - protein, 13 aa, Homo sapiens
  CDR3 for alpha chain variable domain of TCR clone 17889 (TRAV13-2, TRAJ48)
CAEMDFGNEKLTF

SEQ ID NO: 35778 - protein, 15 aa, Homo sapiens
  CDR3 for beta chain variable domain of TCR clone 17889 (TRBV7-9, TRBJ1-6)
CASSSPGRGNSPLYF

SEQ ID NO: 35779 - protein, 14 aa, Homo sapiens
  CDR3 for alpha chain variable domain of TCR clone 17890 (TRAV12-2, TRAJ17)
CTVLFKAAGNKLTF

SEQ ID NO: 35780 - protein, 17 aa, Homo sapiens
  CDR3 for beta chain variable domain of TCR clone 17890 (TRBV20-1, TRBJ2-2)
CSASGSGQGGLTGELFF

SEQ ID NO: 35781 - protein, 14 aa, Homo sapiens
  CDR3 for alpha chain variable domain of TCR clone 17891 (TRAV8-2, TRAJ29)
CVVSSSSGNTPLVF

SEQ ID NO: 35782 - protein, 12 aa, Homo sapiens
  CDR3 for beta chain variable domain of TCR clone 17891 (TRBV28, TRBJ2-3)
CASSLYRDTQYF

SEQ ID NO: 35783 - protein, 11 aa, Homo sapiens
  CDR3 for alpha chain variable domain of TCR clone 17892 (TRAV2, TRAJ33)
CAVDSNYQLIW

SEQ ID NO: 35784 - protein, 13 aa, Homo sapiens
  CDR3 for beta chain variable domain of TCR clone 17892 (TRBV7-9, TRBJ1-2)
CASSLKQNYGYTF

SEQ ID NO: 35785 - protein, 15 aa, Homo sapiens
  CDR3 for alpha chain variable domain of TCR clone 17893 (TRAV3, TRAJ22)
CAVRDRGGSASQLTF

SEQ ID NO: 35786 - protein, 16 aa, Homo sapiens
  CDR3 for beta chain variable domain of TCR clone 17893 (TRBV5-4, TRBJ2-3)
CASQQPGAGGADTQYF

SEQ ID NO: 35787 - protein, 17 aa, Homo sapiens
  CDR3 for alpha chain variable domain of TCR clone 17894 (TRAV26-2, TRAJ42)
CILRDVGYGGSKGNLIF

SEQ ID NO: 35788 - protein, 16 aa, Homo sapiens
  CDR3 for beta chain variable domain of TCR clone 17894 (TRBV12-4, TRBJ2-7)
CASSLIGGTGTYEQYF

SEQ ID NO: 35789 - protein, 14 aa, Homo sapiens
  CDR3 for alpha chain variable domain of TCR clone 17895 (TRAV13-1, TRAJ9)
CAASALTGGFKTTF

SEQ ID NO: 35790 - protein, 13 aa, Homo sapiens
  CDR3 for beta chain variable domain of TCR clone 17895 (TRBV20-1, TRBJ1-1)
CSAGTVGNTEAFF

SEQ ID NO: 35791 - protein, 16 aa, Homo sapiens
  CDR3 for alpha chain variable domain of TCR clone 17896 (TRAV14/DV4, TRAJ20)
CAMREGRSRDDYKLSF

SEQ ID NO: 35792 - protein, 15 aa, Homo sapiens
  CDR3 for beta chain variable domain of TCR clone 17896 (TRBV7-3, TRBJ2-1)
CASSLGQGPFGEQFF

SEQ ID NO: 35793 - protein, 14 aa, Homo sapiens
  CDR3 for alpha chain variable domain of TCR clone 17897 (TRAV21, TRAJ35)
CAVMPIGFRNVLHC

SEQ ID NO: 35794 - protein, 12 aa, Homo sapiens
  CDR3 for beta chain variable domain of TCR clone 17897 (TRBV7-9, TRBJ2-7)
CASSIKREEQYF

SEQ ID NO: 35795 - protein, 15 aa, Homo sapiens
  CDR3 for alpha chain variable domain of TCR clone 17898 (TRAV13-2, TRAJ10)
CAEIDFTGGGNKLTF

SEQ ID NO: 35796 - protein, 15 aa, Homo sapiens
  CDR3 for beta chain variable domain of TCR clone 17898 (TRBV7-6, TRBJ1-6)
CASSAAGRGNSPLHF

SEQ ID NO: 35797 - protein, 15 aa, Homo sapiens
  CDR3 for alpha chain variable domain of TCR clone 17899 (TRAV26-1, TRAJ40)
CIVRVTTSGIYKYIF

SEQ ID NO: 35798 - protein, 12 aa, Homo sapiens
  CDR3 for beta chain variable domain of TCR clone 17899 (TRBV7-9, TRBJ1-4)
CASSTDREKLFF

SEQ ID NO: 35799 - protein, 12 aa, Homo sapiens
  CDR3 for alpha chain variable domain of TCR clone 17900 (TRAV8-3, TRAJ20)
CALGANDYKLSF

SEQ ID NO: 35800 - protein, 16 aa, Homo sapiens
  CDR3 for beta chain variable domain of TCR clone 17900 (TRBV19, TRBJ2-2)
CASRSPGTGATGELFF

SEQ ID NO: 35801 - protein, 14 aa, Homo sapiens
  CDR3 for alpha chain variable domain of TCR clone 17901 (TRAV12-2, TRAJ13)
CAVKKTGGYQKVTF

SEQ ID NO: 35802 - protein, 16 aa, Homo sapiens
  CDR3 for beta chain variable domain of TCR clone 17901 (TRBV19, TRBJ2-2)
CASRSPGTGATGELFF

SEQ ID NO: 35803 - protein, 14 aa, Homo sapiens
  CDR3 for alpha chain variable domain of TCR clone 17902 (TRAV26-1, TRAJ38)
CIADNAGNNRKLIW

SEQ ID NO: 35804 - protein, 13 aa, Homo sapiens
  CDR3 for beta chain variable domain of TCR clone 17902 (TRBV7-3, TRBJ1-1)
CASSQDWGAEAFF

SEQ ID NO: 35805 - protein, 14 aa, Homo sapiens
  CDR3 for alpha chain variable domain of TCR clone 17903 (TRAV17, TRAJ34)
CATDSLEGTDKLIF

SEQ ID NO: 35806 - protein, 14 aa, Homo sapiens
  CDR3 for beta chain variable domain of TCR clone 17903 (TRBV19, TRBJ2-1)
CASPTFVLSGEQFF

SEQ ID NO: 35807 - protein, 12 aa, Homo sapiens
  CDR3 for alpha chain variable domain of TCR clone 17904 (TRAV36/DV7, TRAJ54)
CAVVRGAQKLVF

SEQ ID NO: 35808 - protein, 17 aa, Homo sapiens
  CDR3 for beta chain variable domain of TCR clone 17904 (TRBV20-1, TRBJ2-2)
CSASGSGQGGLTGELFF

SEQ ID NO: 35809 - protein, 12 aa, Homo sapiens
  CDR3 for alpha chain variable domain of TCR clone 17905 (TRAV13-2, TRAJ23)
CAELHRGGKLIF

SEQ ID NO: 35810 - protein, 16 aa, Homo sapiens
  CDR3 for beta chain variable domain of TCR clone 17905 (TRBV20-1, TRBJ1-4)
CSAPGQGLLTNEKLFF

SEQ ID NO: 35811 - protein, 12 aa, Homo sapiens
  CDR3 for alpha chain variable domain of TCR clone 17906 (TRAV12-1, TRAJ40)
CVFYSGTYKYIF

SEQ ID NO: 35812 - protein, 20 aa, Homo sapiens
  CDR3 for beta chain variable domain of TCR clone 17906 (TRBV7-8, TRBJ2-2)
CASSHLFPGPTIHITGELFF

SEQ ID NO: 35813 - protein, 11 aa, Homo sapiens
  CDR3 for alpha chain variable domain of TCR clone 17907 (TRAV3, TRAJ21)
CAVGNFNKFYF

SEQ ID NO: 35814 - protein, 17 aa, Homo sapiens
  CDR3 for beta chain variable domain of TCR clone 17907 (TRBV24-1, TRBJ2-1)
CATSDVSTSGTYSEQFF

SEQ ID NO: 35815 - protein, 15 aa, Homo sapiens
  CDR3 for alpha chain variable domain of TCR clone 17908 (TRAV2, TRAJ9)
CAVEDRGTGGFKTIF

SEQ ID NO: 35816 - protein, 16 aa, Homo sapiens
  CDR3 for beta chain variable domain of TCR clone 17908 (TRBV24-1, TRBJ2-3)
CATSDPGTGATDTQYL

SEQ ID NO: 35817 - protein, 14 aa, Homo sapiens
  CDR3 for alpha chain variable domain of TCR clone 17909 (TRAV8-3, TRAJ9)
CAVVYNTGGFKPIF

SEQ ID NO: 35818 - protein, 14 aa, Homo sapiens
  CDR3 for beta chain variable domain of TCR clone 17909 (TRBV7-3, TRBJ2-2)
CASSSGGYTGELFF

SEQ ID NO: 35819 - protein, 15 aa, Homo sapiens
  CDR3 for alpha chain variable domain of TCR clone 17910 (TRAV26-1, TRAJ22)
CIVRLSFWFCKATDL

SEQ ID NO: 35820 - protein, 13 aa, Homo sapiens
  CDR3 for beta chain variable domain of TCR clone 17910 (TRBV7-9, TRBJ1-2)
CASSLKQNYGYTF

SEQ ID NO: 35821 - protein, 14 aa, Homo sapiens
  CDR3 for alpha chain variable domain of TCR clone 17911 (TRAV20, TRAJ42)
CAVQAGGSQGNLIF

SEQ ID NO: 35822 - protein, 14 aa, Homo sapiens
  CDR3 for beta chain variable domain of TCR clone 17911 (TRBV28, TRBJ1-2)
CASRIQGANCGYTF

SEQ ID NO: 35823 - protein, 13 aa, Homo sapiens
  CDR3 for alpha chain variable domain of TCR clone 17912 (TRAV12-2, TRAJ39)
CAVNNNAGDMLTF

SEQ ID NO: 35824 - protein, 13 aa, Homo sapiens
  CDR3 for beta chain variable domain of TCR clone 17912 (TRBV2, TRBJ1-5)
CATAGPGNQPQHF

SEQ ID NO: 35825 - protein, 14 aa, Homo sapiens
  CDR3 for alpha chain variable domain of TCR clone 17913 (TRAV13-1, TRAJ35)
CAASKGGFGNVLYC

SEQ ID NO: 35826 - protein, 13 aa, Homo sapiens
  CDR3 for beta chain variable domain of TCR clone 17913 (TRBV7-3, TRBJ1-1)
CASSQDWGAEAFF

SEQ ID NO: 35827 - protein, 14 aa, Homo sapiens
  CDR3 for alpha chain variable domain of TCR clone 17914 (TRAV26-1, TRAJ38)
CIADNAGNNRKLIW

SEQ ID NO: 35828 - protein, 13 aa, Homo sapiens
  CDR3 for beta chain variable domain of TCR clone 17914 (TRBV20-1, TRBJ1-1)
CSARGGGNTEAFF

SEQ ID NO: 35829 - protein, 14 aa, Homo sapiens
  CDR3 for alpha chain variable domain of TCR clone 17915 (TRAV12-2, TRAJ40)
CAVKISSGTYKYIF

SEQ ID NO: 35830 - protein, 14 aa, Homo sapiens
  CDR3 for beta chain variable domain of TCR clone 17915 (TRBV20-1, TRBJ1-1)
CSAQTRIGGTEAFF

SEQ ID NO: 35831 - protein, 19 aa, Homo sapiens
  CDR3 for alpha chain variable domain of TCR clone 17916 (TRAV26-1, TRAJ52)
CIVRAHRNAGGTSYGKLTF

SEQ ID NO: 35832 - protein, 15 aa, Homo sapiens
  CDR3 for beta chain variable domain of TCR clone 17916 (TRBV29-1, TRBJ2-1)
CSGGDRKSSYNEQFF

SEQ ID NO: 35833 - protein, 17 aa, Homo sapiens
  CDR3 for alpha chain variable domain of TCR clone 17917 (TRAV12-2, TRAJ6)
CAPQGPPRAGGSYIPTL

SEQ ID NO: 35834 - protein, 16 aa, Homo sapiens
  CDR3 for beta chain variable domain of TCR clone 17917 (TRBV19, TRBJ2-2)
CASSTARASNTGELFF

SEQ ID NO: 35835 - protein, 20 aa, Homo sapiens
  CDR3 for alpha chain variable domain of TCR clone 17918 (TRAV12-1, TRAJ42)
SSVIQPPTSVKGGSQGNIIF

SEQ ID NO: 35836 - protein, 18 aa, Homo sapiens
  CDR3 for beta chain variable domain of TCR clone 17918 (TRBV11-2, TRBJ2-3)
CASSLGGASRGAPNTQYF

SEQ ID NO: 35837 - protein, 11 aa, Homo sapiens
  CDR3 for alpha chain variable domain of TCR clone 17919 (TRAV2, TRAJ13)
CASGGYQKVTF

SEQ ID NO: 35838 - protein, 16 aa, Homo sapiens
  CDR3 for beta chain variable domain of TCR clone 17919 (TRBV6-1, TRBJ2-5)
CASSETLDRGAETQHF

SEQ ID NO: 35839 - protein, 13 aa, Homo sapiens
  CDR3 for alpha chain variable domain of TCR clone 17920 (TRAV8-3, TRAJ40)
CAVDPSGTYKYIF

SEQ ID NO: 35840 - protein, 13 aa, Homo sapiens
  CDR3 for beta chain variable domain of TCR clone 17920 (TRBV6-5, TRBJ2-7)
CASSGGSFYEQYF

SEQ ID NO: 35841 - protein, 13 aa, Homo sapiens
  CDR3 for alpha chain variable domain of TCR clone 17921 (TRAV8-3, TRAJ28)
CAVVAVGSYQLTF

SEQ ID NO: 35842 - protein, 15 aa, Homo sapiens
  CDR3 for beta chain variable domain of TCR clone 17921 (TRBV7-9, TRBJ1-5)
CASSQGHQPNQPQHF

SEQ ID NO: 35843 - protein, 15 aa, Homo sapiens
  CDR3 for alpha chain variable domain of TCR clone 17922 (TRAV26-1, TRAJ29)
CIVRVEGSGNTPFVF

SEQ ID NO: 35844 - protein, 14 aa, Homo sapiens
  CDR3 for beta chain variable domain of TCR clone 17922 (TRBV18, TRBJ2-5)
CASSPGVSQETQYF

SEQ ID NO: 35845 - protein, 12 aa, Homo sapiens
  CDR3 for alpha chain variable domain of TCR clone 17923 (TRAV10, TRAJ34)
CVVSGKHRQAHL

SEQ ID NO: 35846 - protein, 14 aa, Homo sapiens
  CDR3 for beta chain variable domain of TCR clone 17923 (TRBV19, TRBJ2-1)
CASPTFVLSGELFF

SEQ ID NO: 35847 - protein, 12 aa, Homo sapiens
  CDR3 for alpha chain variable domain of TCR clone 17924 (TRAV3, TRAJ26)
CAVRDYGQNFVF

SEQ ID NO: 35848 - protein, 16 aa, Homo sapiens
  CDR3 for beta chain variable domain of TCR clone 17924 (TRBV11-2, TRBJ1-2)
CASSPSGREANYGYAF

SEQ ID NO: 35849 - protein, 16 aa, Homo sapiens
  CDR3 for alpha chain variable domain of TCR clone 17925 (TRAV30, TRAJ24)
RGTEIVDADSWGKFQF

SEQ ID NO: 35850 - protein, 18 aa, Homo sapiens
  CDR3 for beta chain variable domain of TCR clone 17925 (TRBV11-2, TRBJ2-3)
CASSLGGASRGAPNTQYF

SEQ ID NO: 35851 - protein, 14 aa, Homo sapiens
  CDR3 for alpha chain variable domain of TCR clone 17926 (TRAV12-3, TRAJ10)
SHLPLTGGGNKLTF

SEQ ID NO: 35852 - protein, 12 aa, Homo sapiens
  CDR3 for beta chain variable domain of TCR clone 17926 (TRBV11-2, TRBJ2-1)
CASSPGNNEQFF

SEQ ID NO: 35853 - protein, 17 aa, Homo sapiens
  CDR3 for alpha chain variable domain of TCR clone 17927 (TRAV3, TRAJ6)
CAVRDGPRAGGNYIPTF

SEQ ID NO: 35854 - protein, 14 aa, Homo sapiens
  CDR3 for beta chain variable domain of TCR clone 17927 (TRBV7-2, TRBJ2-7)
CASSPKTSFYEQYL

SEQ ID NO: 35855 - protein, 14 aa, Homo sapiens
  CDR3 for alpha chain variable domain of TCR clone 17928 (TRAV8-3, TRAJ39)
CAVGANNAGNMLTF

SEQ ID NO: 35856 - protein, 12 aa, Homo sapiens
  CDR3 for beta chain variable domain of TCR clone 17928 (TRBV28, TRBJ1-3)
CASVSSGNTIYS

SEQ ID NO: 35857 - protein, 12 aa, Homo sapiens
  CDR3 for alpha chain variable domain of TCR clone 17929 (TRAV13-2, TRAJ23)
CAERHRGGKLIF

SEQ ID NO: 35858 - protein, 14 aa, Homo sapiens
  CDR3 for beta chain variable domain of TCR clone 17929 (TRBV4-2, TRBJ2-1)
CASGLDRAYNEQFF

SEQ ID NO: 35859 - protein, 14 aa, Homo sapiens
  CDR3 for alpha chain variable domain of TCR clone 17930 (TRAV12-2, TRAJ13)
CAVKKTGGYQKVTF

SEQ ID NO: 35860 - protein, 15 aa, Homo sapiens
  CDR3 for beta chain variable domain of TCR clone 17930 (TRBV27, TRBJ2-1)
CACSNGGGSSNEQFF

SEQ ID NO: 35861 - protein, 18 aa, Homo sapiens
  CDR3 for alpha chain variable domain of TCR clone 17931 (TRAV21, TRAJ52)
CAVRPSPAGGTSYGKLTF

SEQ ID NO: 35862 - protein, 17 aa, Homo sapiens
  CDR3 for beta chain variable domain of TCR clone 17931 (TRBV7-3, TRBJ2-3)
CASSLMKRMRGADTQYF

SEQ ID NO: 35863 - protein, 14 aa, Homo sapiens
  CDR3 for alpha chain variable domain of TCR clone 17932 (TRAV9-2, TRAJ3)
CALCPYSSASKIIF

SEQ ID NO: 35864 - protein, 17 aa, Homo sapiens
  CDR3 for beta chain variable domain of TCR clone 17932 (TRBV11-2, TRBJ2-1)
CASSLDLAQRPYNEQFF

SEQ ID NO: 35865 - protein, 14 aa, Homo sapiens
  CDR3 for alpha chain variable domain of TCR clone 17933 (TRAV3, TRAJ21)
CAVESQANFDKFYF

SEQ ID NO: 35866 - protein, 18 aa, Homo sapiens
  CDR3 for beta chain variable domain of TCR clone 17933 (TRBV7-9, TRBJ2-1)
CASSLAVSGTSGRNEQFF

SEQ ID NO: 35867 - protein, 13 aa, Homo sapiens
  CDR3 for alpha chain variable domain of TCR clone 17934 (TRAV17, TRAJ7)
CATDNYGNNRLAL

SEQ ID NO: 35868 - protein, 13 aa, Homo sapiens
  CDR3 for beta chain variable domain of TCR clone 17934 (TRBV27, TRBJ2-1)
CASSSGSYNEQFF

SEQ ID NO: 35869 - protein, 14 aa, Homo sapiens
  CDR3 for alpha chain variable domain of TCR clone 17935 (TRAV8-2, TRAJ4)
CVVSTSGGYNKLIF

SEQ ID NO: 35870 - protein, 15 aa, Homo sapiens
  CDR3 for beta chain variable domain of TCR clone 17935 (TRBV4-1, TRBJ1-4)
CASSDTGGTNEKLFF

SEQ ID NO: 35871 - protein, 12 aa, Homo sapiens
  CDR3 for alpha chain variable domain of TCR clone 17936 (TRAV17, TRAJ12)
CATLRSSYKLIF

SEQ ID NO: 35872 - protein, 16 aa, Homo sapiens
  CDR3 for beta chain variable domain of TCR clone 17936 (TRBV28, TRBJ2-7)
CASSLFFETGGAEQYF

SEQ ID NO: 35873 - protein, 12 aa, Homo sapiens
  CDR3 for alpha chain variable domain of TCR clone 17937 (TRAV8-3, TRAJ26)
CAGDNYGQNFVL

SEQ ID NO: 35874 - protein, 15 aa, Homo sapiens
  CDR3 for beta chain variable domain of TCR clone 17937 (TRBV9, TRBJ2-1)
CASSLAGSSYNEQFF

SEQ ID NO: 35875 - protein, 13 aa, Homo sapiens
  CDR3 for alpha chain variable domain of TCR clone 17938 (TRAV2, TRAJ40)
CAVVTSGTYKYTF

SEQ ID NO: 35876 - protein, 14 aa, Homo sapiens
  CDR3 for beta chain variable domain of TCR clone 17938 (TRBV28, TRBJ2-1)
CASSYYTAYNEQFF

SEQ ID NO: 35877 - protein, 14 aa, Homo sapiens
  CDR3 for alpha chain variable domain of TCR clone 17939 (TRAV1-2, TRAJ8)
CAVREDTGFQKLVF

SEQ ID NO: 35878 - protein, 14 aa, Homo sapiens
  CDR3 for beta chain variable domain of TCR clone 17939 (TRBV6-1, TRBJ1-6)
CASSEGVGDSPLHF

SEQ ID NO: 35879 - protein, 14 aa, Homo sapiens
  CDR3 for alpha chain variable domain of TCR clone 17940 (TRAV8-3, TRAJ36)
CAVGPLTGANNLFF

SEQ ID NO: 35880 - protein, 15 aa, Homo sapiens
  CDR3 for beta chain variable domain of TCR clone 17940 (TRBV4-1, TRBJ2-1)
CASSQDPGNYNEQFF

SEQ ID NO: 35881 - protein, 15 aa, Homo sapiens
  CDR3 for alpha chain variable domain of TCR clone 17941 (TRAV41, TRAJ45)
CAASYSGGGADGLTF

SEQ ID NO: 35882 - protein, 14 aa, Homo sapiens
  CDR3 for beta chain variable domain of TCR clone 17941 (TRBV12-5, TRBJ2-5)
CASGSRIHQETQYF

SEQ ID NO: 35883 - protein, 13 aa, Homo sapiens
  CDR3 for alpha chain variable domain of TCR clone 17942 (TRAV9-2, TRAJ49)
CALIQIGGSQFYF

SEQ ID NO: 35884 - protein, 13 aa, Homo sapiens
  CDR3 for beta chain variable domain of TCR clone 17942 (TRBV20-1, TRBJ1-1)
CSARGGGNTEAFF

SEQ ID NO: 35885 - protein, 15 aa, Homo sapiens
  CDR3 for alpha chain variable domain of TCR clone 17943 (TRAV17, TRAJ57)
CATGPSQGGSEKLVF

SEQ ID NO: 35886 - protein, 16 aa, Homo sapiens
  CDR3 for beta chain variable domain of TCR clone 17943 (TRBV12-4, TRBJ1-5)
CASSRPVGGYNQPQHF

SEQ ID NO: 35887 - protein, 16 aa, Homo sapiens
  CDR3 for alpha chain variable domain of TCR clone 17944 (TRAV30, TRAJ24)
CGTEIVDADSWGKFQF

SEQ ID NO: 35888 - protein, 13 aa, Homo sapiens
  CDR3 for beta chain variable domain of TCR clone 17944 (TRBV5-4, TRBJ1-1)
CASSPGEGTEAFF

SEQ ID NO: 35889 - protein, 12 aa, Homo sapiens
  CDR3 for alpha chain variable domain of TCR clone 17945 (TRAV13-2, TRAJ23)
CAERHRGGKLTF

SEQ ID NO: 35890 - protein, 16 aa, Homo sapiens
  CDR3 for beta chain variable domain of TCR clone 17945 (TRBV20-1, TRBJ1-4)
CSAPGQGLLTNEKLFF

SEQ ID NO: 35891 - protein, 15 aa, Homo sapiens
  CDR3 for alpha chain variable domain of TCR clone 17946 (TRAV2, TRAJ15)
RAVEDRGQAGTALIF

SEQ ID NO: 35892 - protein, 13 aa, Homo sapiens
  CDR3 for beta chain variable domain of TCR clone 17946 (TRBV10-2, TRBJ2-7)
CASGASGGYEQYF

SEQ ID NO: 35893 - protein, 10 aa, Homo sapiens
  CDR3 for alpha chain variable domain of TCR clone 17947 (TRAV1-2, TRAJ20)
CALNDYKLSF

SEQ ID NO: 35894 - protein, 16 aa, Homo sapiens
  CDR3 for beta chain variable domain of TCR clone 17947 (TRBV20-1, TRBJ1-1)
CSASALTQGMNTEAFF

SEQ ID NO: 35895 - protein, 14 aa, Homo sapiens
  CDR3 for alpha chain variable domain of TCR clone 17948 (TRAV23/DV6, TRAJ17)
CAASVQAAGNKLTF

SEQ ID NO: 35896 - protein, 18 aa, Homo sapiens
  CDR3 for beta chain variable domain of TCR clone 17948 (TRBV20-1, TRBJ2-7)
CSAGLPPRGGGSPYEQYF

SEQ ID NO: 35897 - protein, 13 aa, Homo sapiens
  CDR3 for alpha chain variable domain of TCR clone 17949 (TRAV1-1, TRAJ9)
CAAKNTGGFKTIF

SEQ ID NO: 35898 - protein, 13 aa, Homo sapiens
  CDR3 for beta chain variable domain of TCR clone 17949 (TRBV10-3, TRBJ2-7)
CASKLAVNYEQYF

SEQ ID NO: 35899 - protein, 16 aa, Homo sapiens
  CDR3 for alpha chain variable domain of TCR clone 17950 (TRAV1-2, TRAJ10)
CAVRGVITGGGNKLTF

SEQ ID NO: 35900 - protein, 12 aa, Homo sapiens
  CDR3 for beta chain variable domain of TCR clone 17950 (TRBV7-8, TRBJ2-7)
CASSLGDREQYF

SEQ ID NO: 35901 - protein, 12 aa, Homo sapiens
  CDR3 for alpha chain variable domain of TCR clone 17951 (TRAV13-2, TRAJ23)
CAERHRGGKLIF

SEQ ID NO: 35902 - protein, 14 aa, Homo sapiens
  CDR3 for beta chain variable domain of TCR clone 17951 (TRBV9, TRBJ1-5)
CASSGGDTNQPQHF

SEQ ID NO: 35903 - protein, 13 aa, Homo sapiens
  CDR3 for alpha chain variable domain of TCR clone 17952 (TRAV20, TRAJ37)
CAGCSSNTGKLIF

SEQ ID NO: 35904 - protein, 11 aa, Homo sapiens
  CDR3 for beta chain variable domain of TCR clone 17952 (TRBV12-4, TRBJ2-3)
CAGTATDTQYF

SEQ ID NO: 35905 - protein, 15 aa, Homo sapiens
  CDR3 for alpha chain variable domain of TCR clone 17953 (TRAV3, TRAJ4)
CAVRDGTGGYNKLIF

SEQ ID NO: 35906 - protein, 16 aa, Homo sapiens
  CDR3 for beta chain variable domain of TCR clone 17953 (TRBV27, TRBJ2-2)
CASSSSGVSNTGELLF

SEQ ID NO: 35907 - protein, 13 aa, Homo sapiens
  CDR3 for alpha chain variable domain of TCR clone 17954 (TRAV26-2, TRAJ43)
CILRAVNNNDTRF

SEQ ID NO: 35908 - protein, 15 aa, Homo sapiens
  CDR3 for beta chain variable domain of TCR clone 17954 (TRBV7-2, TRBJ2-1)
CASTHGTGIYNEQFF

SEQ ID NO: 35909 - protein, 11 aa, Homo sapiens
  CDR3 for alpha chain variable domain of TCR clone 17955 (TRAV8-6, TRAJ13)
CALGIYQKVTF

SEQ ID NO: 35910 - protein, 14 aa, Homo sapiens
  CDR3 for beta chain variable domain of TCR clone 17955 (TRBV3-1, TRBJ2-7)
CASSQPGLLDEQYF

SEQ ID NO: 35911 - protein, 12 aa, Homo sapiens
  CDR3 for alpha chain variable domain of TCR clone 17956 (TRAV13-2, TRAJ22)
CAERGSARQLTF

SEQ ID NO: 35912 - protein, 11 aa, Homo sapiens
  CDR3 for beta chain variable domain of TCR clone 17956 (TRBV28, TRBJ2-7)
CASSWDCEQYF

SEQ ID NO: 35913 - protein, 12 aa, Homo sapiens
  CDR3 for alpha chain variable domain of TCR clone 17957 (TRAV10, TRAJ43)
CVVVRVGNDMRF

SEQ ID NO: 35914 - protein, 15 aa, Homo sapiens
  CDR3 for beta chain variable domain of TCR clone 17957 (TRBV6-3, TRBJ2-7)
CASSSPGTVFYEQYF

SEQ ID NO: 35915 - protein, 14 aa, Homo sapiens
  CDR3 for alpha chain variable domain of TCR clone 17958 (TRAV12-1, TRAJ17)
CVVNYKAAGNKLTF

SEQ ID NO: 35916 - protein, 17 aa, Homo sapiens
  CDR3 for beta chain variable domain of TCR clone 17958 (TRBV20-1, TRBJ2-1)
CSASSSGLAGSYNEQFV

SEQ ID NO: 35917 - protein, 13 aa, Homo sapiens
  CDR3 for alpha chain variable domain of TCR clone 17959 (TRAV21, TRAJ27)
CTARPGNAGKSTF

SEQ ID NO: 35918 - protein, 14 aa, Homo sapiens
  CDR3 for beta chain variable domain of TCR clone 17959 (TRBV7-6, TRBJ2-3)
CASSLGTVTDTQYF

SEQ ID NO: 35919 - protein, 14 aa, Homo sapiens
  CDR3 for alpha chain variable domain of TCR clone 17960 (TRAV3, TRAJ9)
CAVRLNTGGFKTIF

SEQ ID NO: 35920 - protein, 15 aa, Homo sapiens
  CDR3 for beta chain variable domain of TCR clone 17960 (TRBV7-2, TRBJ2-1)
CASSLASGRVNEQFL

SEQ ID NO: 35921 - protein, 11 aa, Homo sapiens
  CDR3 for alpha chain variable domain of TCR clone 17961 (TRAV2, TRAJ33)
CAVASNYQLIW

SEQ ID NO: 35922 - protein, 15 aa, Homo sapiens
  CDR3 for beta chain variable domain of TCR clone 17961 (TRBV19, TRBJ1-1)
CASTSGQIQNTEAFF

SEQ ID NO: 35923 - protein, 12 aa, Homo sapiens
  CDR3 for alpha chain variable domain of TCR clone 17962 (TRAV12-3, TRAJ5)
CAMDTGRRALTF

SEQ ID NO: 35924 - protein, 17 aa, Homo sapiens
  CDR3 for beta chain variable domain of TCR clone 17962 (TRBV20-1, TRBJ2-2)
CSASGSGQGGLTGELFF

SEQ ID NO: 35925 - protein, 13 aa, Homo sapiens
  CDR3 for alpha chain variable domain of TCR clone 17963 (TRAV27, TRAJ54)
CAGAGQGAQKLVF

SEQ ID NO: 35926 - protein, 15 aa, Homo sapiens
  CDR3 for beta chain variable domain of TCR clone 17963 (TRBV18, TRBJ2-6)
CASSPSYAGANVLTL

SEQ ID NO: 35927 - protein, 12 aa, Homo sapiens
  CDR3 for alpha chain variable domain of TCR clone 17964 (TRAV3, TRAJ43)
CAVRDPNNDMRF

SEQ ID NO: 35928 - protein, 15 aa, Homo sapiens
  CDR3 for beta chain variable domain of TCR clone 17964 (TRBV12-4, TRBJ1-5)
CASSLGTGFDQPQHF

SEQ ID NO: 35929 - protein, 13 aa, Homo sapiens
  CDR3 for alpha chain variable domain of TCR clone 17965 (TRAV21, TRAJ15)
CAVANQAGTALIF

SEQ ID NO: 35930 - protein, 14 aa, Homo sapiens
  CDR3 for beta chain variable domain of TCR clone 17965 (TRBV25-1, TRBJ2-2)
CASSLGAATGELFF

SEQ ID NO: 35931 - protein, 14 aa, Homo sapiens
  CDR3 for alpha chain variable domain of TCR clone 17966 (TRAV2, TRAJ3)
CAVRPYSSASKIIS

SEQ ID NO: 35932 - protein, 17 aa, Homo sapiens
  CDR3 for beta chain variable domain of TCR clone 17966 (TRBV7-6, TRBJ2-5)
CASSSPQAGDPSETQYF

SEQ ID NO: 35933 - protein, 14 aa, Homo sapiens
  CDR3 for alpha chain variable domain of TCR clone 17967 (TRAV1-2, TRAJ16)
CAVNRFSDGQKLLF

SEQ ID NO: 35934 - protein, 13 aa, Homo sapiens
  CDR3 for beta chain variable domain of TCR clone 17967 (TRBV7-9, TRBJ1-2)
CAGSLKQNYGYTF

SEQ ID NO: 35935 - protein, 11 aa, Homo sapiens
  CDR3 for alpha chain variable domain of TCR clone 17968 (TRAV17, TRAJ9)
CGFTGGFKTIF

SEQ ID NO: 35936 - protein, 14 aa, Homo sapiens
  CDR3 for beta chain variable domain of TCR clone 17968 (TRBV7-9, TRBJ2-2)
CASSLAQDTGELFF

SEQ ID NO: 35937 - protein, 14 aa, Homo sapiens
  CDR3 for alpha chain variable domain of TCR clone 17969 (TRAV10, TRAJ48)
CVGVFHFGNEKLTF

SEQ ID NO: 35938 - protein, 13 aa, Homo sapiens
  CDR3 for beta chain variable domain of TCR clone 17969 (TRBV25-1, TRBJ2-5)
CASSESGRETQYF

SEQ ID NO: 35939 - protein, 11 aa, Homo sapiens
  CDR3 for alpha chain variable domain of TCR clone 17970 (TRAV22, TRAJ20)
CAPLHDYKLSF

SEQ ID NO: 35940 - protein, 12 aa, Homo sapiens
  CDR3 for beta chain variable domain of TCR clone 17970 (TRBV5-1, TRBJ1-2)
CASSQDTYGYTF

SEQ ID NO: 35941 - protein, 12 aa, Homo sapiens
  CDR3 for alpha chain variable domain of TCR clone 17971 (TRAV12-1, TRAJ40)
CVVYSGTYKYIF

SEQ ID NO: 35942 - protein, 18 aa, Homo sapiens
  CDR3 for beta chain variable domain of TCR clone 17971 (TRBV11-2, TRBJ2-3)
CASSLGGASRGAPNTRYF

SEQ ID NO: 35943 - protein, 15 aa, Homo sapiens
  CDR3 for alpha chain variable domain of TCR clone 17972 (TRAV17, TRAJ57)
CATGPSQGRSEKLVF

SEQ ID NO: 35944 - protein, 16 aa, Homo sapiens
  CDR3 for beta chain variable domain of TCR clone 17972 (TRBV12-4, TRBJ1-5)
CASSRPVGGSNQPQHF

SEQ ID NO: 35945 - protein, 14 aa, Homo sapiens
  CDR3 for alpha chain variable domain of TCR clone 17973 (TRAV13-1, TRAJ35)
CAASEGGFGNVLHC

SEQ ID NO: 35946 - protein, 13 aa, Homo sapiens
  CDR3 for beta chain variable domain of TCR clone 17973 (TRBV7-3, TRBJ1-1)
CASSQDWGAEAFF

SEQ ID NO: 35947 - protein, 12 aa, Homo sapiens
  CDR3 for alpha chain variable domain of TCR clone 17974 (TRAV12-1, TRAJ40)
CVFYSGTYKHIF

SEQ ID NO: 35948 - protein, 18 aa, Homo sapiens
  CDR3 for beta chain variable domain of TCR clone 17974 (TRBV12-4, TRBJ2-2)
CASSLVAGTRGRTGELFF

SEQ ID NO: 35949 - protein, 11 aa, Homo sapiens
  CDR3 for alpha chain variable domain of TCR clone 17975 (TRAV1-2, TRAJ20)
CAVANDYKLSF

SEQ ID NO: 35950 - protein, 18 aa, Homo sapiens
  CDR3 for beta chain variable domain of TCR clone 17975 (TRBV20-1, TRBJ2-6)
CSADTTPTHGSGANVLTF

SEQ ID NO: 35951 - protein, 14 aa, Homo sapiens
  CDR3 for alpha chain variable domain of TCR clone 17976 (TRAV9-2, TRAJ17)
CALSKPTCRQQANF

SEQ ID NO: 35952 - protein, 14 aa, Homo sapiens
  CDR3 for beta chain variable domain of TCR clone 17976 (TRBV6-5, TRBJ2-7)
CASSTTGGPYEQYF

SEQ ID NO: 35953 - protein, 14 aa, Homo sapiens
  CDR3 for alpha chain variable domain of TCR clone 17977 (TRAV2, TRAJ9)
CAVEDRSGGFKTIF

SEQ ID NO: 35954 - protein, 12 aa, Homo sapiens
  CDR3 for beta chain variable domain of TCR clone 17977 (TRBV12-4, TRBJ2-4)
CASSSSGNIRYF

SEQ ID NO: 35955 - protein, 13 aa, Homo sapiens
  CDR3 for alpha chain variable domain of TCR clone 17978 (TRAV1-1, TRAJ9)
CAAKNTGGFKTIF

SEQ ID NO: 35956 - protein, 14 aa, Homo sapiens
  CDR3 for beta chain variable domain of TCR clone 17978 (TRBV19, TRBJ2-1)
CASPTFVLSGEQFF

SEQ ID NO: 35957 - protein, 14 aa, Homo sapiens
  CDR3 for alpha chain variable domain of TCR clone 17979 (TRAV21, TRAJ35)
CAVMSIGFGNVLHC

SEQ ID NO: 35958 - protein, 12 aa, Homo sapiens
  CDR3 for beta chain variable domain of TCR clone 17979 (TRBV7-9, TRBJ2-7)
CASSIKREEQYF

SEQ ID NO: 35959 - protein, 14 aa, Homo sapiens
  CDR3 for alpha chain variable domain of TCR clone 17980 (TRAV20, TRAJ56)
CAVQFGGANSKLTF

SEQ ID NO: 35960 - protein, 14 aa, Homo sapiens
  CDR3 for beta chain variable domain of TCR clone 17980 (TRBV20-1, TRBJ2-7)
CSVKRGRSSYEQYF

SEQ ID NO: 35961 - protein, 14 aa, Homo sapiens
  CDR3 for alpha chain variable domain of TCR clone 17981 (TRAV27, TRAJ36)
CAGPPKRGANNLFF

SEQ ID NO: 35962 - protein, 15 aa, Homo sapiens
  CDR3 for beta chain variable domain of TCR clone 17981 (TRBV18, TRBJ2-7)
CPSPPASTPNYEQYF

SEQ ID NO: 35963 - protein, 12 aa, Homo sapiens
  CDR3 for alpha chain variable domain of TCR clone 17982 (TRAV8-4, TRAJ43)
CAVSVNNNDIRF

SEQ ID NO: 35964 - protein, 14 aa, Homo sapiens
  CDR3 for beta chain variable domain of TCR clone 17982 (TRBV11-2, TRBJ1-2)
CASSLGTANYGYTF

SEQ ID NO: 35965 - protein, 15 aa, Homo sapiens
  CDR3 for alpha chain variable domain of TCR clone 17983 (TRAV27, TRAJ38)
FAARRNAGNNRKLIW

SEQ ID NO: 35966 - protein, 13 aa, Homo sapiens
  CDR3 for beta chain variable domain of TCR clone 17983 (TRBV12-5, TRBJ2-3)
CASGDRQSDTQYF

SEQ ID NO: 35967 - protein, 12 aa, Homo sapiens
  CDR3 for alpha chain variable domain of TCR clone 17984 (TRAV36/DV7, TRAJ54)
CAVVRGAQELVF

SEQ ID NO: 35968 - protein, 14 aa, Homo sapiens
  CDR3 for beta chain variable domain of TCR clone 17984 (TRBV7-3, TRBJ1-1)
CASSLKGGNTEAFF

SEQ ID NO: 35969 - protein, 15 aa, Homo sapiens
  CDR3 for alpha chain variable domain of TCR clone 17985 (TRAV25, TRAJ48)
CAGGYPNFGNEKLTF

SEQ ID NO: 35970 - protein, 14 aa, Homo sapiens
  CDR3 for beta chain variable domain of TCR clone 17985 (TRBV5-1, TRBJ2-1)
CASSQRDIYNEQFF

SEQ ID NO: 35971 - protein, 15 aa, Homo sapiens
  CDR3 for alpha chain variable domain of TCR clone 17986 (TRAV3, TRAJ22)
CAVRDRGGSARQLTF

SEQ ID NO: 35972 - protein, 20 aa, Homo sapiens
  CDR3 for beta chain variable domain of TCR clone 17986 (TRBV7-8, TRBJ2-2)
CASSHLFPGPTIHITGELFF

SEQ ID NO: 35973 - protein, 15 aa, Homo sapiens
  CDR3 for alpha chain variable domain of TCR clone 17987 (TRAV12-3, TRAJ6)
CAMSATSGGSYIPTF

SEQ ID NO: 35974 - protein, 11 aa, Homo sapiens
  CDR3 for beta chain variable domain of TCR clone 17987 (TRBV20-1, TRBJ1-5)
CSAQGDQHQHF

SEQ ID NO: 35975 - protein, 13 aa, Homo sapiens
  CDR3 for alpha chain variable domain of TCR clone 17988 (TRAV13-2, TRAJ48)
YAEMDFGNEKLTF

SEQ ID NO: 35976 - protein, 15 aa, Homo sapiens
  CDR3 for beta chain variable domain of TCR clone 17988 (TRBV7-9, TRBJ1-6)
CASSSPGRGNSPLHF

SEQ ID NO: 35977 - protein, 13 aa, Homo sapiens
  CDR3 for alpha chain variable domain of TCR clone 17989 (TRAV21, TRAJ27)
CAARPGNAGKSTF

SEQ ID NO: 35978 - protein, 18 aa, Homo sapiens
  CDR3 for beta chain variable domain of TCR clone 17989 (TRBV11-2, TRBJ2-3)
CASSLGGASRGAPNTQYF

SEQ ID NO: 35979 - protein, 14 aa, Homo sapiens
  CDR3 for alpha chain variable domain of TCR clone 17990 (TRAV1-2, TRAJ16)
CAVNRFSDGQKLLF

SEQ ID NO: 35980 - protein, 15 aa, Homo sapiens
  CDR3 for beta chain variable domain of TCR clone 17990 (TRBV7-8, TRBJ2-1)
CASSLADSLYNEQFF

SEQ ID NO: 35981 - protein, 14 aa, Homo sapiens
  CDR3 for alpha chain variable domain of TCR clone 17991 (TRAV3, TRAJ22)
CAVRDYGSARQLTS

SEQ ID NO: 35982 - protein, 13 aa, Homo sapiens
  CDR3 for beta chain variable domain of TCR clone 17991 (TRBV11-2, TRBJ2-5)
CASGHGAKETQYF

SEQ ID NO: 35983 - protein, 14 aa, Homo sapiens
  CDR3 for alpha chain variable domain of TCR clone 17992 (TRAV35, TRAJ22)
CAGLRQGSARQLTF

SEQ ID NO: 35984 - protein, 15 aa, Homo sapiens
  CDR3 for beta chain variable domain of TCR clone 17992 (TRBV12-4, TRBJ2-5)
CASSPPTGLQETQYF

SEQ ID NO: 35985 - protein, 14 aa, Homo sapiens
  CDR3 for alpha chain variable domain of TCR clone 17993 (TRAV4, TRAJ31)
CLVGDRDNNARLMF

SEQ ID NO: 35986 - protein, 13 aa, Homo sapiens
  CDR3 for beta chain variable domain of TCR clone 17993 (TRBV5-1, TRBJ1-1)
CASSLGSDTEAFF

SEQ ID NO: 35987 - protein, 15 aa, Homo sapiens
  CDR3 for alpha chain variable domain of TCR clone 17994 (TRAV12-3, TRAJ6)
RAMSATTGGSYIPTF

SEQ ID NO: 35988 - protein, 16 aa, Homo sapiens
  CDR3 for beta chain variable domain of TCR clone 17994 (TRBV20-1, TRBJ1-2)
CSASMGQGVANYGYTF

SEQ ID NO: 35989 - protein, 15 aa, Homo sapiens
  CDR3 for alpha chain variable domain of TCR clone 17995 (TRAV12-3, TRAJ44)
CAMSGLTGTASKLTF

SEQ ID NO: 35990 - protein, 15 aa, Homo sapiens
  CDR3 for beta chain variable domain of TCR clone 17995 (TRBV20-1, TRBJ2-7)
CSARTPGTITYGQYF

SEQ ID NO: 35991 - protein, 15 aa, Homo sapiens
  CDR3 for alpha chain variable domain of TCR clone 17996 (TRAV1-1, TRAJ23)
CAVSEGPGRKAYLRT

SEQ ID NO: 35992 - protein, 12 aa, Homo sapiens
  CDR3 for beta chain variable domain of TCR clone 17996 (TRBV18, TRBJ2-1)
CASSSDEDEQFF

SEQ ID NO: 35993 - protein, 14 aa, Homo sapiens
  CDR3 for alpha chain variable domain of TCR clone 17997 (TRAV38-1, TRAJ29)
CAFITPSGNTPLVF

SEQ ID NO: 35994 - protein, 14 aa, Homo sapiens
  CDR3 for beta chain variable domain of TCR clone 17997 (TRBV18, TRBJ2-7)
CAGSPRGGAYEQYF

SEQ ID NO: 35995 - protein, 13 aa, Homo sapiens
  CDR3 for alpha chain variable domain of TCR clone 17998 (TRAV9-2, TRAJ39)
ALYIYNAGNMLTF

SEQ ID NO: 35996 - protein, 16 aa, Homo sapiens
  CDR3 for beta chain variable domain of TCR clone 17998 (TRBV11-2, TRBJ1-2)
CASSLDTGGADYGYTF

SEQ ID NO: 35997 - protein, 10 aa, Homo sapiens
  CDR3 for alpha chain variable domain of TCR clone 17999 (TRAV12-3, TRAJ49)
CAMNDDQFYF

SEQ ID NO: 35998 - protein, 13 aa, Homo sapiens
  CDR3 for beta chain variable domain of TCR clone 17999 (TRBV12-4, TRBJ1-1)
CASSPGTGFESFF

SEQ ID NO: 35999 - protein, 14 aa, Homo sapiens
  CDR3 for alpha chain variable domain of TCR clone 18000 (TRAV35, TRAJ33)
CAGPSQDSNYQLIW

SEQ ID NO: 36000 - protein, 15 aa, Homo sapiens
  CDR3 for beta chain variable domain of TCR clone 18000 (TRBV20-1, TRBJ2-7)
CSAESGTSGAYEQYF

SEQ ID NO: 36001 - protein, 14 aa, Homo sapiens
  CDR3 for alpha chain variable domain of TCR clone 18001 (TRAV3, TRAJ9)
CAVRLNTGGFKTIF

SEQ ID NO: 36002 - protein, 15 aa, Homo sapiens
  CDR3 for beta chain variable domain of TCR clone 18001 (TRBV7-2, TRBJ2-1)
CASSFASGRVNEQFF

SEQ ID NO: 36003 - protein, 13 aa, Homo sapiens
  CDR3 for alpha chain variable domain of TCR clone 18002 (TRAV3, TRAJ20)
CAVRSLNDYKLSF

SEQ ID NO: 36004 - protein, 12 aa, Homo sapiens
  CDR3 for beta chain variable domain of TCR clone 18002 (TRBV6-1, TRBJ2-1)
CASYSTYNERFF

SEQ ID NO: 36005 - protein, 15 aa, Homo sapiens
  CDR3 for alpha chain variable domain of TCR clone 18003 (TRAV8-3, TRAJ23)
CAVGDRYNQGGKLIF

SEQ ID NO: 36006 - protein, 22 aa, Homo sapiens
  CDR3 for beta chain variable domain of TCR clone 18003 (TRBV29-1, TRBJ2-5)
TVSNMGPEDSSIYLCSAGTQYF

SEQ ID NO: 36007 - protein, 13 aa, Homo sapiens
  CDR3 for alpha chain variable domain of TCR clone 18004 (TRAV21, TRAJ27)
CAARPGNAGKSTL

SEQ ID NO: 36008 - protein, 14 aa, Homo sapiens
  CDR3 for beta chain variable domain of TCR clone 18004 (TRBV11-2, TRBJ2-7)
CASSLGAGAYEQYF

SEQ ID NO: 36009 - protein, 14 aa, Homo sapiens
  CDR3 for alpha chain variable domain of TCR clone 18005 (TRAV2, TRAJ37)
CAVDFTSNTGKLIF

SEQ ID NO: 36010 - protein, 14 aa, Homo sapiens
  CDR3 for beta chain variable domain of TCR clone 18005 (TRBV12-5, TRBJ2-5)
CASGSRTHQETQYF

SEQ ID NO: 36011 - protein, 17 aa, Homo sapiens
  CDR3 for alpha chain variable domain of TCR clone 18006 (TRAV36/DV7, TRAJ52)
CAVAQRAGGTSYGKLTF

SEQ ID NO: 36012 - protein, 15 aa, Homo sapiens
  CDR3 for beta chain variable domain of TCR clone 18006 (TRBV20-1, TRBJ2-7)
CSARDRVSGMDEQYF

SEQ ID NO: 36013 - protein, 18 aa, Homo sapiens
  CDR3 for alpha chain variable domain of TCR clone 18007 (TRAV21, TRAJ52)
CAVRPSPAGGTSYGKLTF

SEQ ID NO: 36014 - protein, 14 aa, Homo sapiens
  CDR3 for beta chain variable domain of TCR clone 18007 (TRBV4-1, TRBJ2-2)
CASSQAVNTGELFS

SEQ ID NO: 36015 - protein, 11 aa, Homo sapiens
  CDR3 for alpha chain variable domain of TCR clone 18008 (TRAV2, TRAJ13)
CASGGYQKVTF

SEQ ID NO: 36016 - protein, 14 aa, Homo sapiens
  CDR3 for beta chain variable domain of TCR clone 18008 (TRBV7-6, TRBJ2-3)
CASSLGTVTDTQYF

SEQ ID NO: 36017 - protein, 14 aa, Homo sapiens
  CDR3 for alpha chain variable domain of TCR clone 18009 (TRAV12-2, TRAJ13)
CAVKKTGGYQKVTF

SEQ ID NO: 36018 - protein, 15 aa, Homo sapiens
  CDR3 for beta chain variable domain of TCR clone 18009 (TRBV27, TRBJ2-1)
CASSNGGGSSNEQFF

SEQ ID NO: 36019 - protein, 12 aa, Homo sapiens
  CDR3 for alpha chain variable domain of TCR clone 18010 (TRAV8-3, TRAJ20)
CAGGANDYKLSF

SEQ ID NO: 36020 - protein, 16 aa, Homo sapiens
  CDR3 for beta chain variable domain of TCR clone 18010 (TRBV19, TRBJ2-2)
CASRSPGTGATGELFF

SEQ ID NO: 36021 - protein, 12 aa, Homo sapiens
  CDR3 for alpha chain variable domain of TCR clone 18011 (TRAV41, TRAJ45)
CAVGRGADGLTF

SEQ ID NO: 36022 - protein, 13 aa, Homo sapiens
  CDR3 for beta chain variable domain of TCR clone 18011 (TRBV7-8, TRBJ2-7)
CASSLTGGREQYF

SEQ ID NO: 36023 - protein, 14 aa, Homo sapiens
  CDR3 for alpha chain variable domain of TCR clone 18012 (TRAV13-1, TRAJ44)
CAAKATGTASKLTF

SEQ ID NO: 36024 - protein, 14 aa, Homo sapiens
  CDR3 for beta chain variable domain of TCR clone 18012 (TRBV4-1, TRBJ2-2)
CASSQAVNTGELFF

SEQ ID NO: 36025 - protein, 14 aa, Homo sapiens
  CDR3 for alpha chain variable domain of TCR clone 18013 (TRAV13-1, TRAJ44)
CAAKATGTASKLTF

SEQ ID NO: 36026 - protein, 17 aa, Homo sapiens
  CDR3 for beta chain variable domain of TCR clone 18013 (TRBV7-3, TRBJ2-3)
CASSLMERMRGADTQYF

SEQ ID NO: 36027 - protein, 17 aa, Homo sapiens
  CDR3 for alpha chain variable domain of TCR clone 18014 (TRAV26-1, TRAJ53)
CIVRVDDSGGSNYKLTF

SEQ ID NO: 36028 - protein, 17 aa, Homo sapiens
  CDR3 for beta chain variable domain of TCR clone 18014 (TRBV20-1, TRBJ2-7)
CSARVQPRTSTSSTSGR

SEQ ID NO: 36029 - protein, 16 aa, Homo sapiens
  CDR3 for alpha chain variable domain of TCR clone 18015 (TRAV27, TRAJ52)
CAGAPAGGTSYGRLTF

SEQ ID NO: 36030 - protein, 12 aa, Homo sapiens
  CDR3 for beta chain variable domain of TCR clone 18015 (TRBV27, TRBJ2-1)
CASRGFYNEQFF

SEQ ID NO: 36031 - protein, 18 aa, Homo sapiens
  CDR3 for alpha chain variable domain of TCR clone 18016 (TRAV21, TRAJ52)
CAVRPSPAGGTSYGKLTF

SEQ ID NO: 36032 - protein, 16 aa, Homo sapiens
  CDR3 for beta chain variable domain of TCR clone 18016 (TRBV7-9, TRBJ1-2)
CASSLGFSSGEDGYTF

SEQ ID NO: 36033 - protein, 12 aa, Homo sapiens
  CDR3 for alpha chain variable domain of TCR clone 18017 (TRAV12-2, TRAJ10)
WGVTGGGNKLTF

SEQ ID NO: 36034 - protein, 13 aa, Homo sapiens
  CDR3 for beta chain variable domain of TCR clone 18017 (TRBV7-9, TRBJ1-2)
CASSLKQNYGYTF

SEQ ID NO: 36035 - protein, 14 aa, Homo sapiens
  CDR3 for alpha chain variable domain of TCR clone 18018 (TRAV17, TRAJ57)
CATDPQGGSEKLVF

SEQ ID NO: 36036 - protein, 15 aa, Homo sapiens
  CDR3 for beta chain variable domain of TCR clone 18018 (TRBV5-1, TRBJ2-7)
RASSLDLTSSYEQYF

SEQ ID NO: 36037 - protein, 13 aa, Homo sapiens
  CDR3 for alpha chain variable domain of TCR clone 18019 (TRAV1-2, TRAJ9)
CAALDTGGFKTIF

SEQ ID NO: 36038 - protein, 13 aa, Homo sapiens
  CDR3 for beta chain variable domain of TCR clone 18019 (TRBV19, TRBJ1-2)
CASSVPGQDGYTF

SEQ ID NO: 36039 - protein, 13 aa, Homo sapiens
  CDR3 for alpha chain variable domain of TCR clone 18020 (TRAV8-4, TRAJ9)
CAVSDTGGFKTIF

SEQ ID NO: 36040 - protein, 14 aa, Homo sapiens
  CDR3 for beta chain variable domain of TCR clone 18020 (TRBV6-1, TRBJ1-3)
CASVQGGGGNTIYF

SEQ ID NO: 36041 - protein, 13 aa, Homo sapiens
  CDR3 for alpha chain variable domain of TCR clone 18021 (TRAV13-1, TRAJ11)
CAASIRGYSTLTF

SEQ ID NO: 36042 - protein, 17 aa, Homo sapiens
  CDR3 for beta chain variable domain of TCR clone 18021 (TRBV4-3, TRBJ1-2)
CASSSRLQAGGSVGYAF

SEQ ID NO: 36043 - protein, 16 aa, Homo sapiens
  CDR3 for alpha chain variable domain of TCR clone 18022 (TRAV30, TRAJ24)
CGTEIVDADSWGKFQF

SEQ ID NO: 36044 - protein, 15 aa, Homo sapiens
  CDR3 for beta chain variable domain of TCR clone 18022 (TRBV11-3, TRBJ2-7)
CASSPGPASSYEQYF

SEQ ID NO: 36045 - protein, 15 aa, Homo sapiens
  CDR3 for alpha chain variable domain of TCR clone 18023 (TRAV3, TRAJ5)
CAVRDRKTGRRALTF

SEQ ID NO: 36046 - protein, 15 aa, Homo sapiens
  CDR3 for beta chain variable domain of TCR clone 18023 (TRBV7-8, TRBJ2-1)
CASSLAGSLYNEQFF

SEQ ID NO: 36047 - protein, 15 aa, Homo sapiens
  CDR3 for alpha chain variable domain of TCR clone 18024 (TRAV26-1, TRAJ21)
CIVRAPNYNFNKFYF

SEQ ID NO: 36048 - protein, 16 aa, Homo sapiens
  CDR3 for beta chain variable domain of TCR clone 18024 (TRBV7-9, TRBJ2-3)
CASSLQGNPGTDTQYF

SEQ ID NO: 36049 - protein, 15 aa, Homo sapiens
  CDR3 for alpha chain variable domain of TCR clone 18025 (TRAV21, TRAJ24)
CAARSSTDSWGKLQF

SEQ ID NO: 36050 - protein, 12 aa, Homo sapiens
  CDR3 for beta chain variable domain of TCR clone 18025 (TRBV11-2, TRBJ2-2)
CASSLGGGELFF

SEQ ID NO: 36051 - protein, 16 aa, Homo sapiens
  CDR3 for alpha chain variable domain of TCR clone 18026 (TRAV12-3, TRAJ53)
CAMSPGSGGSNYKLIF

SEQ ID NO: 36052 - protein, 11 aa, Homo sapiens
  CDR3 for beta chain variable domain of TCR clone 18026 (TRBV29-1, TRBJ2-5)
CSEDRTGTQYF

SEQ ID NO: 36053 - protein, 18 aa, Homo sapiens
  CDR3 for alpha chain variable domain of TCR clone 18027 (TRAV12-3, TRAJ52)
CAMSRTNAGGTSYGKLTF

SEQ ID NO: 36054 - protein, 12 aa, Homo sapiens
  CDR3 for beta chain variable domain of TCR clone 18027 (TRBV11-2, TRBJ2-2)
CASSLGGGELFF

SEQ ID NO: 36055 - protein, 17 aa, Homo sapiens
  CDR3 for alpha chain variable domain of TCR clone 18028 (TRAV3, TRAJ6)
CAVRDGPRAGGSYIPTF

SEQ ID NO: 36056 - protein, 15 aa, Homo sapiens
  CDR3 for beta chain variable domain of TCR clone 18028 (TRBV12-4, TRBJ2-5)
CASSPPTGLQETQYF

SEQ ID NO: 36057 - protein, 12 aa, Homo sapiens
  CDR3 for alpha chain variable domain of TCR clone 18029 (TRAV13-2, TRAJ23)
CADRHRGGKLIF

SEQ ID NO: 36058 - protein, 16 aa, Homo sapiens
  CDR3 for beta chain variable domain of TCR clone 18029 (TRBV20-1, TRBJ1-4)
CSAPGQGLLTNEKLFF

SEQ ID NO: 36059 - protein, 16 aa, Homo sapiens
  CDR3 for alpha chain variable domain of TCR clone 18030 (TRAV3, TRAJ21)
CAVRDIERGNFNKFCF

SEQ ID NO: 36060 - protein, 13 aa, Homo sapiens
  CDR3 for beta chain variable domain of TCR clone 18030 (TRBV27, TRBJ2-7)
CASSLTTGYEQYF

SEQ ID NO: 36061 - protein, 14 aa, Homo sapiens
  CDR3 for alpha chain variable domain of TCR clone 18031 (TRAV12-2, TRAJ40)
CAVKIPSGTYRYIF

SEQ ID NO: 36062 - protein, 13 aa, Homo sapiens
  CDR3 for beta chain variable domain of TCR clone 18031 (TRBV7-9, TRBJ1-2)
CASSLKQNYGYTF

SEQ ID NO: 36063 - protein, 14 aa, Homo sapiens
  CDR3 for alpha chain variable domain of TCR clone 18032 (TRAV13-2, TRAJ58)
CAERWLTSGSRLTF

SEQ ID NO: 36064 - protein, 16 aa, Homo sapiens
  CDR3 for beta chain variable domain of TCR clone 18032 (TRBV18, TRBJ1-4)
CASSLQTVATNEKLFF

SEQ ID NO: 36065 - protein, 15 aa, Homo sapiens
  CDR3 for alpha chain variable domain of TCR clone 18033 (TRAV26-1, TRAJ29)
CLVRVEGSGNTPLVF

SEQ ID NO: 36066 - protein, 15 aa, Homo sapiens
  CDR3 for beta chain variable domain of TCR clone 18033 (TRBV7-9, TRBJ1-5)
CASSQGHQPNQPQHF

SEQ ID NO: 36067 - protein, 17 aa, Homo sapiens
  CDR3 for alpha chain variable domain of TCR clone 18034 (TRAV13-1, TRAJ31)
CAPRDRLMFGAGTQLVV

SEQ ID NO: 36068 - protein, 12 aa, Homo sapiens
  CDR3 for beta chain variable domain of TCR clone 18034 (TRBV7-9, TRBJ2-7)
CASSLEGYEQYF

SEQ ID NO: 36069 - protein, 12 aa, Homo sapiens
  CDR3 for alpha chain variable domain of TCR clone 18035 (TRAV3, TRAJ20)
CAMRDGDYKLSF

SEQ ID NO: 36070 - protein, 13 aa, Homo sapiens
  CDR3 for beta chain variable domain of TCR clone 18035 (TRBV9, TRBJ2-1)
CASSVGQGGEQFF

SEQ ID NO: 36071 - protein, 11 aa, Homo sapiens
  CDR3 for alpha chain variable domain of TCR clone 18036 (TRAV1-2, TRAJ40)
CAVPGTYKYIF

SEQ ID NO: 36072 - protein, 16 aa, Homo sapiens
  CDR3 for beta chain variable domain of TCR clone 18036 (TRBV29-1, TRBJ2-7)
CSVEVVGTSGGYEQYF

SEQ ID NO: 36073 - protein, 12 aa, Homo sapiens
  CDR3 for alpha chain variable domain of TCR clone 18037 (TRAV2, TRAJ9)
CAVGAGGFKTIF

SEQ ID NO: 36074 - protein, 16 aa, Homo sapiens
  CDR3 for beta chain variable domain of TCR clone 18037 (TRBV13, TRBJ2-2)
CASSPRTGEHTRELFF

SEQ ID NO: 36075 - protein, 14 aa, Homo sapiens
  CDR3 for alpha chain variable domain of TCR clone 18038 (TRAV1-2, TRAJ16)
CAVNRFSDGQKLLF

SEQ ID NO: 36076 - protein, 15 aa, Homo sapiens
  CDR3 for beta chain variable domain of TCR clone 18038 (TRBV7-9, TRBJ2-7)
CASSLALAEAYEQYF

SEQ ID NO: 36077 - protein, 14 aa, Homo sapiens
  CDR3 for alpha chain variable domain of TCR clone 18039 (TRAV12-2, TRAJ13)
CAVKKTGGYQKVTF

SEQ ID NO: 36078 - protein, 15 aa, Homo sapiens
  CDR3 for beta chain variable domain of TCR clone 18039 (TRBV27, TRBJ2-1)
CASSNGGGSSNEQFY

SEQ ID NO: 36079 - protein, 14 aa, Homo sapiens
  CDR3 for alpha chain variable domain of TCR clone 18040 (TRAV14/DV4, TRAJ26)
CAMREGTYGQNFVF

SEQ ID NO: 36080 - protein, 14 aa, Homo sapiens
  CDR3 for beta chain variable domain of TCR clone 18040 (TRBV6-1, TRBJ1-3)
CASVQGGGGNTIYF

SEQ ID NO: 36081 - protein, 13 aa, Homo sapiens
  CDR3 for alpha chain variable domain of TCR clone 18041 (TRAV35, TRAJ42)
CAGFPGSQGNLIF

SEQ ID NO: 36082 - protein, 13 aa, Homo sapiens
  CDR3 for beta chain variable domain of TCR clone 18041 (TRBV29-1, TRBJ2-1)
CSVEGGRVNGQFF

SEQ ID NO: 36083 - protein, 10 aa, Homo sapiens
  CDR3 for alpha chain variable domain of TCR clone 18042 (TRAV30, TRAJ24)
DADSWGKFQF

SEQ ID NO: 36084 - protein, 14 aa, Homo sapiens
  CDR3 for beta chain variable domain of TCR clone 18042 (TRBV12-5, TRBJ2-5)
CASGSRTHQETQYF

SEQ ID NO: 36085 - protein, 14 aa, Homo sapiens
  CDR3 for alpha chain variable domain of TCR clone 18043 (TRAV9-2, TRAJ39)
CALYIYNAGNMLTF

SEQ ID NO: 36086 - protein, 15 aa, Homo sapiens
  CDR3 for beta chain variable domain of TCR clone 18043 (TRBV25-1, TRBJ1-4)
CASSPGDSTNEKLFF

SEQ ID NO: 36087 - protein, 15 aa, Homo sapiens
  CDR3 for alpha chain variable domain of TCR clone 18044 (TRAV17, TRAJ56)
CATDANTGASSKLTF

SEQ ID NO: 36088 - protein, 14 aa, Homo sapiens
  CDR3 for beta chain variable domain of TCR clone 18044 (TRBV19, TRBJ1-5)
CASSLGTGGQPQHF

SEQ ID NO: 36089 - protein, 14 aa, Homo sapiens
  CDR3 for alpha chain variable domain of TCR clone 18045 (TRAV12-2, TRAJ3)
CAVSLYSSASKIIF

SEQ ID NO: 36090 - protein, 14 aa, Homo sapiens
  CDR3 for beta chain variable domain of TCR clone 18045 (TRBV6-1, TRBJ1-3)
CASVQGGGGNTIYF

SEQ ID NO: 36091 - protein, 14 aa, Homo sapiens
  CDR3 for alpha chain variable domain of TCR clone 18046 (TRAV26-1, TRAJ38)
CISDNAGNNRKLIW

SEQ ID NO: 36092 - protein, 13 aa, Homo sapiens
  CDR3 for beta chain variable domain of TCR clone 18046 (TRBV20-1, TRBJ1-1)
CSARGGGNTEAFF

SEQ ID NO: 36093 - protein, 14 aa, Homo sapiens
  CDR3 for alpha chain variable domain of TCR clone 18047 (TRAV13-2, TRAJ39)
CADHPPGAGNMLTF

SEQ ID NO: 36094 - protein, 18 aa, Homo sapiens
  CDR3 for beta chain variable domain of TCR clone 18047 (TRBV27, TRBJ2-3)
CASSLSGTSGRGTDTQYL

SEQ ID NO: 36095 - protein, 14 aa, Homo sapiens
  CDR3 for alpha chain variable domain of TCR clone 18048 (TRAV12-2, TRAJ13)
CAVNPSGGYQKVTF

SEQ ID NO: 36096 - protein, 13 aa, Homo sapiens
  CDR3 for beta chain variable domain of TCR clone 18048 (TRBV20-1, TRBJ1-6)
CSAKLGGTPPLHF

SEQ ID NO: 36097 - protein, 11 aa, Homo sapiens
  CDR3 for alpha chain variable domain of TCR clone 18049 (TRAV2, TRAJ20)
CAVKNDYKLSF

SEQ ID NO: 36098 - protein, 14 aa, Homo sapiens
  CDR3 for beta chain variable domain of TCR clone 18049 (TRBV12-4, TRBJ2-3)
CASSLQSSTDTQYF

SEQ ID NO: 36099 - protein, 12 aa, Homo sapiens
  CDR3 for alpha chain variable domain of TCR clone 18050 (TRAV8-3, TRAJ20)
CAVGANDYKLSF

SEQ ID NO: 36100 - protein, 16 aa, Homo sapiens
  CDR3 for beta chain variable domain of TCR clone 18050 (TRBV19, TRBJ2-2)
CASRSPGTGATWELFF

SEQ ID NO: 36101 - protein, 11 aa, Homo sapiens
  CDR3 for alpha chain variable domain of TCR clone 18051 (TRAV3, TRAJ21)
CAVGNFNKFYF

SEQ ID NO: 36102 - protein, 13 aa, Homo sapiens
  CDR3 for beta chain variable domain of TCR clone 18051 (TRBV20-1, TRBJ1-1)
CSARGGGNTEAFF

SEQ ID NO: 36103 - protein, 14 aa, Homo sapiens
  CDR3 for alpha chain variable domain of TCR clone 18052 (TRAV25, TRAJ27)
CAGEHLTNAGKSTF

SEQ ID NO: 36104 - protein, 23 aa, Homo sapiens
  CDR3 for beta chain variable domain of TCR clone 18052 (TRBV7-8, TRBJ2-3)
CASRNSGTSGKNWLAQIRSILAQ

SEQ ID NO: 36105 - protein, 16 aa, Homo sapiens
  CDR3 for alpha chain variable domain of TCR clone 18053 (TRAV30, TRAJ24)
CGTEIVDADSWGKFQF

SEQ ID NO: 36106 - protein, 15 aa, Homo sapiens
  CDR3 for beta chain variable domain of TCR clone 18053 (TRBV7-9, TRBJ1-4)
CASGARTGGNEKLFF

SEQ ID NO: 36107 - protein, 12 aa, Homo sapiens
  CDR3 for alpha chain variable domain of TCR clone 18054 (TRAV16, TRAJ10)
CSRAGGGNKLTF

SEQ ID NO: 36108 - protein, 15 aa, Homo sapiens
  CDR3 for beta chain variable domain of TCR clone 18054 (TRBV6-3, TRBJ2-7)
CASSSPGTVFYEQYF

SEQ ID NO: 36109 - protein, 14 aa, Homo sapiens
  CDR3 for alpha chain variable domain of TCR clone 18055 (TRAV1-2, TRAJ16)
CAVNRFSDGQKLLF

SEQ ID NO: 36110 - protein, 15 aa, Homo sapiens
  CDR3 for beta chain variable domain of TCR clone 18055 (TRBV9, TRBJ1-6)
CASSVVGTGDSPLHF

SEQ ID NO: 36111 - protein, 12 aa, Homo sapiens
  CDR3 for alpha chain variable domain of TCR clone 18056 (TRAV12-3, TRAJ17)
CAMTLTGNKLTF

SEQ ID NO: 36112 - protein, 16 aa, Homo sapiens
  CDR3 for beta chain variable domain of TCR clone 18056 (TRBV2, TRBJ2-1)
CASSVGGSLSYNEQFF

SEQ ID NO: 36113 - protein, 14 aa, Homo sapiens
  CDR3 for alpha chain variable domain of TCR clone 18057 (TRAV1-2, TRAJ16)
CAVNRFSDGQKLLF

SEQ ID NO: 36114 - protein, 15 aa, Homo sapiens
  CDR3 for beta chain variable domain of TCR clone 18057 (TRBV9, TRBJ1-6)
CASSVAGTGDSPLQF

SEQ ID NO: 36115 - protein, 16 aa, Homo sapiens
  CDR3 for alpha chain variable domain of TCR clone 18058 (TRAV3, TRAJ37)
CAVRGKGSGNTGKLIF

SEQ ID NO: 36116 - protein, 17 aa, Homo sapiens
  CDR3 for beta chain variable domain of TCR clone 18058 (TRBV11-2, TRBJ2-1)
CASSLYPPGVEYNEQFF

SEQ ID NO: 36117 - protein, 13 aa, Homo sapiens
  CDR3 for alpha chain variable domain of TCR clone 18059 (TRAV20, TRAJ37)
CAGRSSNTGKLIF

SEQ ID NO: 36118 - protein, 11 aa, Homo sapiens
  CDR3 for beta chain variable domain of TCR clone 18059 (TRBV12-4, TRBJ2-3)
CASTATDTQYF

SEQ ID NO: 36119 - protein, 13 aa, Homo sapiens
  CDR3 for alpha chain variable domain of TCR clone 18060 (TRAV21, TRAJ20)
CAVGLRVDYKLSF

SEQ ID NO: 36120 - protein, 16 aa, Homo sapiens
  CDR3 for beta chain variable domain of TCR clone 18060 (TRBV12-5, TRBJ2-5)
CASGPRTSGNQETQYF

SEQ ID NO: 36121 - protein, 18 aa, Homo sapiens
  CDR3 for alpha chain variable domain of TCR clone 18061 (TRAV13-1, TRAJ52)
CAASKRSAGSTSYGKLTF

SEQ ID NO: 36122 - protein, 13 aa, Homo sapiens
  CDR3 for beta chain variable domain of TCR clone 18061 (TRBV12-4, TRBJ1-2)
CASSLRQGKGYTF

SEQ ID NO: 36123 - protein, 14 aa, Homo sapiens
  CDR3 for alpha chain variable domain of TCR clone 18062 (TRAV1-2, TRAJ16)
CAVNRISDGQKLLF

SEQ ID NO: 36124 - protein, 15 aa, Homo sapiens
  CDR3 for beta chain variable domain of TCR clone 18062 (TRBV9, TRBJ1-6)
CASSVAGTGDSPLHF

SEQ ID NO: 36125 - protein, 15 aa, Homo sapiens
  CDR3 for alpha chain variable domain of TCR clone 18063 (TRAV8-2, TRAJ16)
CVVSDGLSDGQKLLF

SEQ ID NO: 36126 - protein, 14 aa, Homo sapiens
  CDR3 for beta chain variable domain of TCR clone 18063 (TRBV7-3, TRBJ1-1)
CASSLGTGYTEAFF

SEQ ID NO: 36127 - protein, 17 aa, Homo sapiens
  CDR3 for alpha chain variable domain of TCR clone 18064 (TRAV3, TRAJ6)
CAVRDGPRAGGSYIPTF

SEQ ID NO: 36128 - protein, 14 aa, Homo sapiens
  CDR3 for beta chain variable domain of TCR clone 18064 (TRBV7-2, TRBJ2-7)
CASSPKTSFDEQYF

SEQ ID NO: 36129 - protein, 12 aa, Homo sapiens
  CDR3 for alpha chain variable domain of TCR clone 18065 (TRAV30, TRAJ43)
CGTEERGNDVRF

SEQ ID NO: 36130 - protein, 13 aa, Homo sapiens
  CDR3 for beta chain variable domain of TCR clone 18065 (TRBV27, TRBJ2-7)
CASSFSQGYEQYF

SEQ ID NO: 36131 - protein, 14 aa, Homo sapiens
  CDR3 for alpha chain variable domain of TCR clone 18066 (TRAV12-1, TRAJ17)
CVVNYKAAGNKLTF

SEQ ID NO: 36132 - protein, 16 aa, Homo sapiens
  CDR3 for beta chain variable domain of TCR clone 18066 (TRBV7-2, TRBJ1-6)
CASSSFESSYNSPLHF

SEQ ID NO: 36133 - protein, 12 aa, Homo sapiens
  CDR3 for alpha chain variable domain of TCR clone 18067 (TRAV12-3, TRAJ17)
CAMTLTGNKLTF

SEQ ID NO: 36134 - protein, 15 aa, Homo sapiens
  CDR3 for beta chain variable domain of TCR clone 18067 (TRBV20-1, TRBJ2-7)
CSARDRVSAMDEQYF

SEQ ID NO: 36135 - protein, 12 aa, Homo sapiens
  CDR3 for alpha chain variable domain of TCR clone 18068 (TRAV12-1, TRAJ40)
WVVYSGTYKYIF

SEQ ID NO: 36136 - protein, 18 aa, Homo sapiens
  CDR3 for beta chain variable domain of TCR clone 18068 (TRBV11-2, TRBJ2-3)
CASSLGGASRGAPNTQYF

SEQ ID NO: 36137 - protein, 11 aa, Homo sapiens
  CDR3 for alpha chain variable domain of TCR clone 18069 (TRAV17, TRAJ9)
CATTGGFTTIF

SEQ ID NO: 36138 - protein, 14 aa, Homo sapiens
  CDR3 for beta chain variable domain of TCR clone 18069 (TRBV7-9, TRBJ2-2)
CASSGLADTGELFF

SEQ ID NO: 36139 - protein, 16 aa, Homo sapiens
  CDR3 for alpha chain variable domain of TCR clone 18070 (TRAV17, TRAJ28)
RATASVSGAGSYQLTF

SEQ ID NO: 36140 - protein, 11 aa, Homo sapiens
  CDR3 for beta chain variable domain of TCR clone 18070 (TRBV7-9, TRBJ2-5)
CASSLGETQYF

SEQ ID NO: 36141 - protein, 14 aa, Homo sapiens
  CDR3 for alpha chain variable domain of TCR clone 18071 (TRAV17, TRAJ22)
CATSPSGSARQLTL

SEQ ID NO: 36142 - protein, 15 aa, Homo sapiens
  CDR3 for beta chain variable domain of TCR clone 18071 (TRBV4-1, TRBJ2-5)
CASSQWDLYQETQYF

SEQ ID NO: 36143 - protein, 14 aa, Homo sapiens
  CDR3 for alpha chain variable domain of TCR clone 18072 (TRAV13-1, TRAJ35)
CAASKGGFGYVLHC

SEQ ID NO: 36144 - protein, 13 aa, Homo sapiens
  CDR3 for beta chain variable domain of TCR clone 18072 (TRBV7-3, TRBJ1-1)
CASSQDWGAEAFF

SEQ ID NO: 36145 - protein, 15 aa, Homo sapiens
  CDR3 for alpha chain variable domain of TCR clone 18073 (TRAV17, TRAJ13)
CATDAGSGGYQQVTF

SEQ ID NO: 36146 - protein, 17 aa, Homo sapiens
  CDR3 for beta chain variable domain of TCR clone 18073 (TRBV11-2, TRBJ2-1)
CASSLYPPGVEYNEQFF

SEQ ID NO: 36147 - protein, 14 aa, Homo sapiens
  CDR3 for alpha chain variable domain of TCR clone 18074 (TRAV1-2, TRAJ6)
CAVSLSGGRYIPTF

SEQ ID NO: 36148 - protein, 15 aa, Homo sapiens
  CDR3 for beta chain variable domain of TCR clone 18074 (TRBV28, TRBJ2-7)
CASSPGGRGFYEQYF

SEQ ID NO: 36149 - protein, 14 aa, Homo sapiens
  CDR3 for alpha chain variable domain of TCR clone 18075 (TRAV13-1, TRAJ40)
CAASRASGTYKYIF

SEQ ID NO: 36150 - protein, 13 aa, Homo sapiens
  CDR3 for beta chain variable domain of TCR clone 18075 (TRBV29-1, TRBJ2-7)
CSVGRTGGYEQHF

SEQ ID NO: 36151 - protein, 13 aa, Homo sapiens
  CDR3 for alpha chain variable domain of TCR clone 18076 (TRAV8-6, TRAJ9)
CAVWDTGGFKTIF

SEQ ID NO: 36152 - protein, 13 aa, Homo sapiens
  CDR3 for beta chain variable domain of TCR clone 18076 (TRBV27, TRBJ1-1)
CASSLSMGAEAFF

SEQ ID NO: 36153 - protein, 16 aa, Homo sapiens
  CDR3 for alpha chain variable domain of TCR clone 18077 (TRAV16, TRAJ52)
CALSAAGGTSYGKLTF

SEQ ID NO: 36154 - protein, 12 aa, Homo sapiens
  CDR3 for beta chain variable domain of TCR clone 18077 (TRBV12-4, TRBJ1-3)
CASSLSGNTIYF

SEQ ID NO: 36155 - protein, 15 aa, Homo sapiens
  CDR3 for alpha chain variable domain of TCR clone 18078 (TRAV25, TRAJ52)
CAGRPGGTSYGKLTF

SEQ ID NO: 36156 - protein, 20 aa, Homo sapiens
  CDR3 for beta chain variable domain of TCR clone 18078 (TRBV7-8, TRBJ2-2)
CASSHLFPGPTIHITGELFF

SEQ ID NO: 36157 - protein, 18 aa, Homo sapiens
  CDR3 for alpha chain variable domain of TCR clone 18079 (TRAV2, TRAJ4)
CAVEDRFSGGYNKLILEQ

SEQ ID NO: 36158 - protein, 13 aa, Homo sapiens
  CDR3 for beta chain variable domain of TCR clone 18079 (TRBV7-7, TRBJ2-5)
CASSRSGQETQYF

SEQ ID NO: 36159 - protein, 13 aa, Homo sapiens
  CDR3 for alpha chain variable domain of TCR clone 18080 (TRAV23/DV6, TRAJ12)
CAPRVDSGYKLIF

SEQ ID NO: 36160 - protein, 12 aa, Homo sapiens
  CDR3 for beta chain variable domain of TCR clone 18080 (TRBV7-8, TRBJ2-7)
CASSLGDREQYF

SEQ ID NO: 36161 - protein, 14 aa, Homo sapiens
  CDR3 for alpha chain variable domain of TCR clone 18081 (TRAV8-3, TRAJ4)
CAVGAAGGYNKLIF

SEQ ID NO: 36162 - protein, 15 aa, Homo sapiens
  CDR3 for beta chain variable domain of TCR clone 18081 (TRBV20-1, TRBJ2-5)
CGAPPRTGFGETQYF

SEQ ID NO: 36163 - protein, 14 aa, Homo sapiens
  CDR3 for alpha chain variable domain of TCR clone 18082 (TRAV9-2, TRAJ39)
CALYIYNAGNMFTF

SEQ ID NO: 36164 - protein, 14 aa, Homo sapiens
  CDR3 for beta chain variable domain of TCR clone 18082 (TRBV6-1, TRBJ1-3)
CASVQGGGGNTIYF

SEQ ID NO: 36165 - protein, 15 aa, Homo sapiens
  CDR3 for alpha chain variable domain of TCR clone 18083 (TRAV3, TRAJ5)
CAVRDLDTDRRALTF

SEQ ID NO: 36166 - protein, 13 aa, Homo sapiens
  CDR3 for beta chain variable domain of TCR clone 18083 (TRBV12-4, TRBJ2-7)
CASSPTETYEQYF

SEQ ID NO: 36167 - protein, 14 aa, Homo sapiens
  CDR3 for alpha chain variable domain of TCR clone 18084 (TRAV9-2, TRAJ39)
CALYIYNAGNMLTF

SEQ ID NO: 36168 - protein, 14 aa, Homo sapiens
  CDR3 for beta chain variable domain of TCR clone 18084 (TRBV2, TRBJ2-7)
CASSLTSGGYEQYF

SEQ ID NO: 36169 - protein, 11 aa, Homo sapiens
  CDR3 for alpha chain variable domain of TCR clone 18085 (TRAV12-1, TRAJ34)
CVVNKGREFIF

SEQ ID NO: 36170 - protein, 12 aa, Homo sapiens
  CDR3 for beta chain variable domain of TCR clone 18085 (TRBV2, TRBJ2-1)
CAYGPPGNEQFF

SEQ ID NO: 36171 - protein, 16 aa, Homo sapiens
  CDR3 for alpha chain variable domain of TCR clone 18086 (TRAV3, TRAJ37)
CAVRPHCSGNTGKLIF

SEQ ID NO: 36172 - protein, 16 aa, Homo sapiens
  CDR3 for beta chain variable domain of TCR clone 18086 (TRBV9, TRBJ1-2)
CASSVEEKVSPYGYTF

SEQ ID NO: 36173 - protein, 13 aa, Homo sapiens
  CDR3 for alpha chain variable domain of TCR clone 18087 (TRAV3, TRAJ27)
CAVRPLGAGKSTF

SEQ ID NO: 36174 - protein, 13 aa, Homo sapiens
  CDR3 for beta chain variable domain of TCR clone 18087 (TRBV29-1, TRBJ2-1)
CSVEGGRVNEQFF

SEQ ID NO: 36175 - protein, 13 aa, Homo sapiens
  CDR3 for alpha chain variable domain of TCR clone 18088 (TRAV21, TRAJ20)
CAVGLRVDYKLSF

SEQ ID NO: 36176 - protein, 15 aa, Homo sapiens
  CDR3 for beta chain variable domain of TCR clone 18088 (TRBV20-1, TRBJ2-7)
CSARDRVSGMDEQYF

SEQ ID NO: 36177 - protein, 14 aa, Homo sapiens
  CDR3 for alpha chain variable domain of TCR clone 18089 (TRAV20, TRAJ56)
CTVQFGGANSKLTF

SEQ ID NO: 36178 - protein, 14 aa, Homo sapiens
  CDR3 for beta chain variable domain of TCR clone 18089 (TRBV20-1, TRBJ2-7)
CSAKRGRSSYEQYF

SEQ ID NO: 36179 - protein, 13 aa, Homo sapiens
  CDR3 for alpha chain variable domain of TCR clone 18090 (TRAV21, TRAJ27)
CAARPGNAGKSTF

SEQ ID NO: 36180 - protein, 16 aa, Homo sapiens
  CDR3 for beta chain variable domain of TCR clone 18090 (TRBV7-3, TRBJ2-2)
CASSLKRGTLSGELFF

SEQ ID NO: 36181 - protein, 14 aa, Homo sapiens
  CDR3 for alpha chain variable domain of TCR clone 18091 (TRAV13-2, TRAJ17)
CAENSKAAGNKLTF

SEQ ID NO: 36182 - protein, 14 aa, Homo sapiens
  CDR3 for beta chain variable domain of TCR clone 18091 (TRBV4-1, TRBJ2-2)
CASSQAVSTGELFF

SEQ ID NO: 36183 - protein, 13 aa, Homo sapiens
  CDR3 for alpha chain variable domain of TCR clone 18092 (TRAV2, TRAJ15)
CAVASQAGTALIF

SEQ ID NO: 36184 - protein, 17 aa, Homo sapiens
  CDR3 for beta chain variable domain of TCR clone 18092 (TRBV13, TRBJ2-3)
CASSLSRVAGGRNTQYF

SEQ ID NO: 36185 - protein, 11 aa, Homo sapiens
  CDR3 for alpha chain variable domain of TCR clone 18093 (TRAV1-2, TRAJ31)
CAVNNNARLTF

SEQ ID NO: 36186 - protein, 15 aa, Homo sapiens
  CDR3 for beta chain variable domain of TCR clone 18093 (TRBV28, TRBJ2-1)
CASSIIAGGRSEQFF

SEQ ID NO: 36187 - protein, 15 aa, Homo sapiens
  CDR3 for alpha chain variable domain of TCR clone 18094 (TRAV26-1, TRAJ29)
CIVRVEGSGHTPLVF

SEQ ID NO: 36188 - protein, 14 aa, Homo sapiens
  CDR3 for beta chain variable domain of TCR clone 18094 (TRBV18, TRBJ2-5)
CASSPGVSQETQYF

SEQ ID NO: 36189 - protein, 13 aa, Homo sapiens
  CDR3 for alpha chain variable domain of TCR clone 18095 (TRAV12-1, TRAJ29)
RVVNGPGNTPLVF

SEQ ID NO: 36190 - protein, 13 aa, Homo sapiens
  CDR3 for beta chain variable domain of TCR clone 18095 (TRBV7-2, TRBJ2-5)
CASSRGGLETQYF

SEQ ID NO: 36191 - protein, 13 aa, Homo sapiens
  CDR3 for alpha chain variable domain of TCR clone 18096 (TRAV36/DV7, TRAJ7)
CAGTRYGNNRLAF

SEQ ID NO: 36192 - protein, 14 aa, Homo sapiens
  CDR3 for beta chain variable domain of TCR clone 18096 (TRBV19, TRBJ2-1)
CASPAFVLSGEQFF

SEQ ID NO: 36193 - protein, 13 aa, Homo sapiens
  CDR3 for alpha chain variable domain of TCR clone 18097 (TRAV13-2, TRAJ48)
CAEMDFGNEKLTF

SEQ ID NO: 36194 - protein, 15 aa, Homo sapiens
  CDR3 for beta chain variable domain of TCR clone 18097 (TRBV7-9, TRBJ1-6)
CASSSPGRGNSPLRF

SEQ ID NO: 36195 - protein, 14 aa, Homo sapiens
  CDR3 for alpha chain variable domain of TCR clone 18098 (TRAV9-2, TRAJ39)
CALYIYNAGNMLTF

SEQ ID NO: 36196 - protein, 15 aa, Homo sapiens
  CDR3 for beta chain variable domain of TCR clone 18098 (TRBV19, TRBJ1-1)
CASTSGQIQNTEAFF

SEQ ID NO: 36197 - protein, 16 aa, Homo sapiens
  CDR3 for alpha chain variable domain of TCR clone 18099 (TRAV30, TRAJ24)
CGTEIVDADSWGKFQF

SEQ ID NO: 36198 - protein, 16 aa, Homo sapiens
  CDR3 for beta chain variable domain of TCR clone 18099 (TRBV27, TRBJ2-2)
CASSFRGLVRTGELFF

SEQ ID NO: 36199 - protein, 14 aa, Homo sapiens
  CDR3 for alpha chain variable domain of TCR clone 18100 (TRAV13-1, TRAJ40)
CAAGMTSGTYKYIF

SEQ ID NO: 36200 - protein, 15 aa, Homo sapiens
  CDR3 for beta chain variable domain of TCR clone 18100 (TRBV7-3, TRBJ2-1)
CASSPTGGGEVEQFF

SEQ ID NO: 36201 - protein, 16 aa, Homo sapiens
  CDR3 for alpha chain variable domain of TCR clone 18101 (TRAV30, TRAJ24)
CGTEIVDADSWGKFQF

SEQ ID NO: 36202 - protein, 14 aa, Homo sapiens
  CDR3 for beta chain variable domain of TCR clone 18101 (TRBV7-3, TRBJ1-1)
CASSLKGGNTEAFF

SEQ ID NO: 36203 - protein, 17 aa, Homo sapiens
  CDR3 for alpha chain variable domain of TCR clone 18102 (TRAV3, TRAJ6)
CAVRDGPRAGGSYIPTF

SEQ ID NO: 36204 - protein, 14 aa, Homo sapiens
  CDR3 for beta chain variable domain of TCR clone 18102 (TRBV7-2, TRBJ2-7)
CASSPMTSFYEQYF

SEQ ID NO: 36205 - protein, 15 aa, Homo sapiens
  CDR3 for alpha chain variable domain of TCR clone 18103 (TRAV13-1, TRAJ45)
CAASGSGGGADGLTS

SEQ ID NO: 36206 - protein, 14 aa, Homo sapiens
  CDR3 for beta chain variable domain of TCR clone 18103 (TRBV12-4, TRBJ1-2)
CASSFVGTAYGYTF

SEQ ID NO: 36207 - protein, 20 aa, Homo sapiens
  CDR3 for alpha chain variable domain of TCR clone 18104 (TRAV12-3, TRAJ52)
CAMTQSYQNAGGTSYGKLTF

SEQ ID NO: 36208 - protein, 16 aa, Homo sapiens
  CDR3 for beta chain variable domain of TCR clone 18104 (TRBV9, TRBJ1-3)
CASSVGLASSGNTIYF

SEQ ID NO: 36209 - protein, 15 aa, Homo sapiens
  CDR3 for alpha chain variable domain of TCR clone 18105 (TRAV17, TRAJ57)
CATGPSQGGSEKLFF

SEQ ID NO: 36210 - protein, 14 aa, Homo sapiens
  CDR3 for beta chain variable domain of TCR clone 18105 (TRBV12-5, TRBJ2-5)
CASGSRTHQETQYF

SEQ ID NO: 36211 - protein, 14 aa, Homo sapiens
  CDR3 for alpha chain variable domain of TCR clone 18106 (TRAV8-2, TRAJ4)
CVVSPSGGYTKLIF

SEQ ID NO: 36212 - protein, 15 aa, Homo sapiens
  CDR3 for beta chain variable domain of TCR clone 18106 (TRBV4-1, TRBJ1-4)
CASSDTGGTNEKLFF

SEQ ID NO: 36213 - protein, 14 aa, Homo sapiens
  CDR3 for alpha chain variable domain of TCR clone 18107 (TRAV12-1, TRAJ3)
CGAARYSSAFKIIF

SEQ ID NO: 36214 - protein, 15 aa, Homo sapiens
  CDR3 for beta chain variable domain of TCR clone 18107 (TRBV7-2, TRBJ2-6)
CASSREGSGANVLTF

SEQ ID NO: 36215 - protein, 12 aa, Homo sapiens
  CDR3 for alpha chain variable domain of TCR clone 18108 (TRAV12-1, TRAJ40)
CVVYSGTYKYIF

SEQ ID NO: 36216 - protein, 15 aa, Homo sapiens
  CDR3 for beta chain variable domain of TCR clone 18108 (TRBV3-1, TRBJ2-5)
CASSANLGGPETQYF

SEQ ID NO: 36217 - protein, 18 aa, Homo sapiens
  CDR3 for alpha chain variable domain of TCR clone 18109 (TRAV13-1, TRAJ52)
CAAKNPNAGGTSYGKLTF

SEQ ID NO: 36218 - protein, 14 aa, Homo sapiens
  CDR3 for beta chain variable domain of TCR clone 18109 (TRBV7-9, TRBJ2-1)
CASSLASGSNEQFF

SEQ ID NO: 36219 - protein, 13 aa, Homo sapiens
  CDR3 for alpha chain variable domain of TCR clone 18110 (TRAV9-2, TRAJ53)
CALSGGSNYKLTF

SEQ ID NO: 36220 - protein, 15 aa, Homo sapiens
  CDR3 for beta chain variable domain of TCR clone 18110 (TRBV10-3, TRBJ2-3)
CAISVLGQETDTQYF

SEQ ID NO: 36221 - protein, 12 aa, Homo sapiens
  CDR3 for alpha chain variable domain of TCR clone 18111 (TRAV8-3, TRAJ20)
CAVGANDYKLSF

SEQ ID NO: 36222 - protein, 16 aa, Homo sapiens
  CDR3 for beta chain variable domain of TCR clone 18111 (TRBV19, TRBJ2-2)
CASLSPGTGATGELFF

SEQ ID NO: 36223 - protein, 15 aa, Homo sapiens
  CDR3 for alpha chain variable domain of TCR clone 18112 (TRAV3, TRAJ5)
CAVRDLDKGRRALTF

SEQ ID NO: 36224 - protein, 13 aa, Homo sapiens
  CDR3 for beta chain variable domain of TCR clone 18112 (TRBV12-4, TRBJ2-7)
CASSPTETYEQYF

SEQ ID NO: 36225 - protein, 15 aa, Homo sapiens
  CDR3 for alpha chain variable domain of TCR clone 18113 (TRAV14/DV4, TRAJ10)
CAMRELTGGGNKLTF

SEQ ID NO: 36226 - protein, 17 aa, Homo sapiens
  CDR3 for beta chain variable domain of TCR clone 18113 (TRBV4-3, TRBJ1-5)
CASSQWGDGGPNQPQHF

SEQ ID NO: 36227 - protein, 13 aa, Homo sapiens
  CDR3 for alpha chain variable domain of TCR clone 18114 (TRAV2, TRAJ40)
CAVVTSGTYKYIF

SEQ ID NO: 36228 - protein, 14 aa, Homo sapiens
  CDR3 for beta chain variable domain of TCR clone 18114 (TRBV19, TRBJ2-1)
CASATFVLSGEQFF

SEQ ID NO: 36229 - protein, 16 aa, Homo sapiens
  CDR3 for alpha chain variable domain of TCR clone 18115 (TRAV3, TRAJ37)
CAVRGKGSGNTGKLIF

SEQ ID NO: 36230 - protein, 10 aa, Homo sapiens
  CDR3 for beta chain variable domain of TCR clone 18115 (TRBV7-3, TRBJ2-2)
CASSETGQGT

SEQ ID NO: 36231 - protein, 14 aa, Homo sapiens
  CDR3 for alpha chain variable domain of TCR clone 18116 (TRAV12-1, TRAJ17)
CVVNYKAAGNKLNF

SEQ ID NO: 36232 - protein, 17 aa, Homo sapiens
  CDR3 for beta chain variable domain of TCR clone 18116 (TRBV20-1, TRBJ2-1)
CSASSSGLAGSYNEQFF

SEQ ID NO: 36233 - protein, 14 aa, Homo sapiens
  CDR3 for alpha chain variable domain of TCR clone 18117 (TRAV22, TRAJ41)
CAVSNSNSGYALNF

SEQ ID NO: 36234 - protein, 13 aa, Homo sapiens
  CDR3 for beta chain variable domain of TCR clone 18117 (TRBV12-4, TRBJ1-1)
CASSLGGTTEAFF

SEQ ID NO: 36235 - protein, 14 aa, Homo sapiens
  CDR3 for alpha chain variable domain of TCR clone 18118 (TRAV12-3, TRAJ58)
CAMSTETSGSRLTL

SEQ ID NO: 36236 - protein, 13 aa, Homo sapiens
  CDR3 for beta chain variable domain of TCR clone 18118 (TRBV27, TRBJ2-3)
CASSWGRTDTQYF

SEQ ID NO: 36237 - protein, 15 aa, Homo sapiens
  CDR3 for alpha chain variable domain of TCR clone 18119 (TRAV26-1, TRAJ29)
CIVRVEGSGNTPLVF

SEQ ID NO: 36238 - protein, 15 aa, Homo sapiens
  CDR3 for beta chain variable domain of TCR clone 18119 (TRBV7-9, TRBJ1-5)
CASSQGHQPNQPQNF

SEQ ID NO: 36239 - protein, 23 aa, Homo sapiens
  CDR3 for alpha chain variable domain of TCR clone 18120 (TRAV20, TRAJ38)
CAVQGNNAGNNHIQNPDPAVYQL

SEQ ID NO: 36240 - protein, 13 aa, Homo sapiens
  CDR3 for beta chain variable domain of TCR clone 18120 (TRBV7-2, TRBJ1-5)
CASSPTSNQPQHF

SEQ ID NO: 36241 - protein, 13 aa, Homo sapiens
  CDR3 for alpha chain variable domain of TCR clone 18121 (TRAV35, TRAJ47)
CRTHTEYGNKLVF

SEQ ID NO: 36242 - protein, 11 aa, Homo sapiens
  CDR3 for beta chain variable domain of TCR clone 18121 (TRBV29-1, TRBJ1-1)
CSVEVGTRTFF

SEQ ID NO: 36243 - protein, 12 aa, Homo sapiens
  CDR3 for alpha chain variable domain of TCR clone 18122 (TRAV13-2, TRAJ8)
CAPWLGFQKLVF

SEQ ID NO: 36244 - protein, 15 aa, Homo sapiens
  CDR3 for beta chain variable domain of TCR clone 18122 (TRBV2, TRBJ2-1)
CASSEARSAYNEQFF

SEQ ID NO: 36245 - protein, 12 aa, Homo sapiens
  CDR3 for alpha chain variable domain of TCR clone 18123 (TRAV21, TRAJ33)
CAKMDSNYQLIW

SEQ ID NO: 36246 - protein, 14 aa, Homo sapiens
  CDR3 for beta chain variable domain of TCR clone 18123 (TRBV2, TRBJ2-7)
CASSLTSSGYEQYF

SEQ ID NO: 36247 - protein, 11 aa, Homo sapiens
  CDR3 for alpha chain variable domain of TCR clone 18124 (TRAV12-3, TRAJ43)
CAMSFSNDMRF

SEQ ID NO: 36248 - protein, 13 aa, Homo sapiens
  CDR3 for beta chain variable domain of TCR clone 18124 (TRBV20-1, TRBJ1-1)
CSAPLGGGTEAFF

SEQ ID NO: 36249 - protein, 12 aa, Homo sapiens
  CDR3 for alpha chain variable domain of TCR clone 18125 (TRAV2, TRAJ31)
CAVEDNNARLMV

SEQ ID NO: 36250 - protein, 16 aa, Homo sapiens
  CDR3 for beta chain variable domain of TCR clone 18125 (TRBV10-3, TRBJ2-1)
CAISGVGDGGGGEQFF

SEQ ID NO: 36251 - protein, 13 aa, Homo sapiens
  CDR3 for alpha chain variable domain of TCR clone 18126 (TRAV21, TRAJ15)
CAVANQAGTALIL

SEQ ID NO: 36252 - protein, 14 aa, Homo sapiens
  CDR3 for beta chain variable domain of TCR clone 18126 (TRBV27, TRBJ2-2)
CASSLGAATGELFF

SEQ ID NO: 36253 - protein, 13 aa, Homo sapiens
  CDR3 for alpha chain variable domain of TCR clone 18127 (TRAV21, TRAJ20)
CAVGLRVDYKLSF

SEQ ID NO: 36254 - protein, 17 aa, Homo sapiens
  CDR3 for beta chain variable domain of TCR clone 18127 (TRBV11-2, TRBJ2-1)
CASSLYPPGVEYNEQFF

SEQ ID NO: 36255 - protein, 15 aa, Homo sapiens
  CDR3 for alpha chain variable domain of TCR clone 18128 (TRAV12-2, TRAJ53)
CAVNGGGGSNYKLTF

SEQ ID NO: 36256 - protein, 14 aa, Homo sapiens
  CDR3 for beta chain variable domain of TCR clone 18128 (TRBV7-2, TRBJ2-7)
CASSPKTSFYEQYF

SEQ ID NO: 36257 - protein, 13 aa, Homo sapiens
  CDR3 for alpha chain variable domain of TCR clone 18129 (TRAV13-1, TRAJ10)
CAALEGGGDKLTF

SEQ ID NO: 36258 - protein, 17 aa, Homo sapiens
  CDR3 for beta chain variable domain of TCR clone 18129 (TRBV7-3, TRBJ2-2)
CASSLSGTSGGTGELFF

SEQ ID NO: 36259 - protein, 15 aa, Homo sapiens
  CDR3 for alpha chain variable domain of TCR clone 18130 (TRAV2, TRAJ9)
CAVEDRGTGGFKTIF

SEQ ID NO: 36260 - protein, 16 aa, Homo sapiens
  CDR3 for beta chain variable domain of TCR clone 18130 (TRBV24-1, TRBJ2-3)
CATSDPGTGAADTQYF

SEQ ID NO: 36261 - protein, 12 aa, Homo sapiens
  CDR3 for alpha chain variable domain of TCR clone 18131 (TRAV1-1, TRAJ8)
CAGGTGFHKLVF

SEQ ID NO: 36262 - protein, 15 aa, Homo sapiens
  CDR3 for beta chain variable domain of TCR clone 18131 (TRBV7-9, TRBJ1-4)
CASSRTGGFNEKLFF

SEQ ID NO: 36263 - protein, 15 aa, Homo sapiens
  CDR3 for alpha chain variable domain of TCR clone 18132 (TRAV26-1, TRAJ44)
CIVRANTGTASNLTF

SEQ ID NO: 36264 - protein, 16 aa, Homo sapiens
  CDR3 for beta chain variable domain of TCR clone 18132 (TRBV7-7, TRBJ2-1)
CASSLASGTSYNEQFF

SEQ ID NO: 36265 - protein, 13 aa, Homo sapiens
  CDR3 for alpha chain variable domain of TCR clone 18133 (TRAV3, TRAJ27)
CAVRPLGAGKSTF

SEQ ID NO: 36266 - protein, 13 aa, Homo sapiens
  CDR3 for beta chain variable domain of TCR clone 18133 (TRBV7-9, TRBJ2-3)
CASSPGSTDTQYL

SEQ ID NO: 36267 - protein, 15 aa, Homo sapiens
  CDR3 for alpha chain variable domain of TCR clone 18134 (TRAV21, TRAJ53)
CATLNSGGSNYKLTF

SEQ ID NO: 36268 - protein, 18 aa, Homo sapiens
  CDR3 for beta chain variable domain of TCR clone 18134 (TRBV7-2, TRBJ2-2)
CASSLASRGAGGPGELFF

SEQ ID NO: 36269 - protein, 17 aa, Homo sapiens
  CDR3 for alpha chain variable domain of TCR clone 18135 (TRAV26-2, TRAJ42)
CILRDVGYGGGQGNLIF

SEQ ID NO: 36270 - protein, 16 aa, Homo sapiens
  CDR3 for beta chain variable domain of TCR clone 18135 (TRBV12-4, TRBJ2-7)
CASSLIGGTGTYEQYF

SEQ ID NO: 36271 - protein, 12 aa, Homo sapiens
  CDR3 for alpha chain variable domain of TCR clone 18136 (TRAV21, TRAJ33)
CAKMDSNYKLIW

SEQ ID NO: 36272 - protein, 14 aa, Homo sapiens
  CDR3 for beta chain variable domain of TCR clone 18136 (TRBV2, TRBJ2-7)
CASSLTSGGYEQYF

SEQ ID NO: 36273 - protein, 15 aa, Homo sapiens
  CDR3 for alpha chain variable domain of TCR clone 18137 (TRAV12-3, TRAJ27)
CAMRAYNTDAGKSTF

SEQ ID NO: 36274 - protein, 13 aa, Homo sapiens
  CDR3 for beta chain variable domain of TCR clone 18137 (TRBV11-2, TRBJ2-5)
CASSRGPSETQYF

SEQ ID NO: 36275 - protein, 12 aa, Homo sapiens
  CDR3 for alpha chain variable domain of TCR clone 18138 (TRAV17, TRAJ57)
CATDGGSEKLVF

SEQ ID NO: 36276 - protein, 13 aa, Homo sapiens
  CDR3 for beta chain variable domain of TCR clone 18138 (TRBV7-9, TRBJ2-7)
CASSFAGAYEQYL

SEQ ID NO: 36277 - protein, 15 aa, Homo sapiens
  CDR3 for alpha chain variable domain of TCR clone 18139 (TRAV17, TRAJ57)
CATGPSQGGSETLVF

SEQ ID NO: 36278 - protein, 14 aa, Homo sapiens
  CDR3 for beta chain variable domain of TCR clone 18139 (TRBV12-5, TRBJ2-5)
CASGSRTHQETQYF

SEQ ID NO: 36279 - protein, 13 aa, Homo sapiens
  CDR3 for alpha chain variable domain of TCR clone 18140 (TRAV27, TRAJ3)
ASLRGSSASKVIF

SEQ ID NO: 36280 - protein, 15 aa, Homo sapiens
  CDR3 for beta chain variable domain of TCR clone 18140 (TRBV28, TRBJ1-3)
CASSMGWASGNTIYF

SEQ ID NO: 36281 - protein, 16 aa, Homo sapiens
  CDR3 for alpha chain variable domain of TCR clone 18141 (TRAV3, TRAJ37)
CAVRPHGSGNTGKLIF

SEQ ID NO: 36282 - protein, 16 aa, Homo sapiens
  CDR3 for beta chain variable domain of TCR clone 18141 (TRBV9, TRBJ1-2)
CASSVEEKVSPYGYSF

SEQ ID NO: 36283 - protein, 13 aa, Homo sapiens
  CDR3 for alpha chain variable domain of TCR clone 18142 (TRAV8-3, TRAJ28)
CAVGAVGSYQLTF

SEQ ID NO: 36284 - protein, 14 aa, Homo sapiens
  CDR3 for beta chain variable domain of TCR clone 18142 (TRBV7-2, TRBJ2-7)
CDSRSQGAAYEQYF

SEQ ID NO: 36285 - protein, 15 aa, Homo sapiens
  CDR3 for alpha chain variable domain of TCR clone 18143 (TRAV35, TRAJ20)
CAGQLVGSNDYKLSF

SEQ ID NO: 36286 - protein, 13 aa, Homo sapiens
  CDR3 for beta chain variable domain of TCR clone 18143 (TRBV19, TRBJ2-7)
CASSKTGTHKQYF

SEQ ID NO: 36287 - protein, 14 aa, Homo sapiens
  CDR3 for alpha chain variable domain of TCR clone 18144 (TRAV38-1, TRAJ40)
CALRPNSGTYKYIF

SEQ ID NO: 36288 - protein, 14 aa, Homo sapiens
  CDR3 for beta chain variable domain of TCR clone 18144 (TRBV25-1, TRBJ1-1)
CASTHLGGNTEAFF

SEQ ID NO: 36289 - protein, 16 aa, Homo sapiens
  CDR3 for alpha chain variable domain of TCR clone 18145 (TRAV8-3, TRAJ13)
CAVGAYPSGCYQKVTF

SEQ ID NO: 36290 - protein, 15 aa, Homo sapiens
  CDR3 for beta chain variable domain of TCR clone 18145 (TRBV19, TRBJ1-5)
CASSIVWADNQPQHF

SEQ ID NO: 36291 - protein, 13 aa, Homo sapiens
  CDR3 for alpha chain variable domain of TCR clone 18146 (TRAV26-2, TRAJ43)
CILRAVNNNEMRF

SEQ ID NO: 36292 - protein, 15 aa, Homo sapiens
  CDR3 for beta chain variable domain of TCR clone 18146 (TRBV7-2, TRBJ2-1)
CASTHGTGIYNEQFF

SEQ ID NO: 36293 - protein, 16 aa, Homo sapiens
  CDR3 for alpha chain variable domain of TCR clone 18147 (TRAV3, TRAJ21)
CAARDIERGNFNKFYF

SEQ ID NO: 36294 - protein, 13 aa, Homo sapiens
  CDR3 for beta chain variable domain of TCR clone 18147 (TRBV27, TRBJ2-7)
CASSLTTGYEQYF

SEQ ID NO: 36295 - protein, 12 aa, Homo sapiens
  CDR3 for alpha chain variable domain of TCR clone 18148 (TRAV2, TRAJ9)
CAVGAGGFKTIF

SEQ ID NO: 36296 - protein, 16 aa, Homo sapiens
  CDR3 for beta chain variable domain of TCR clone 18148 (TRBV20-1, TRBJ1-4)
CSAPGQGLLTNEKLFF

SEQ ID NO: 36297 - protein, 16 aa, Homo sapiens
  CDR3 for alpha chain variable domain of TCR clone 18149 (TRAV3, TRAJ18)
CAVRDGRGSTLGRLYF

SEQ ID NO: 36298 - protein, 15 aa, Homo sapiens
  CDR3 for beta chain variable domain of TCR clone 18149 (TRBV7-9, TRBJ1-6)
CASSSPGRGNSPLLF

SEQ ID NO: 36299 - protein, 15 aa, Homo sapiens
  CDR3 for alpha chain variable domain of TCR clone 18150 (TRAV13-1, TRAJ15)
RAASIERQAGTALIF

SEQ ID NO: 36300 - protein, 13 aa, Homo sapiens
  CDR3 for beta chain variable domain of TCR clone 18150 (TRBV5-1, TRBJ2-7)
CASSATGGNEQYF

SEQ ID NO: 36301 - protein, 12 aa, Homo sapiens
  CDR3 for alpha chain variable domain of TCR clone 18151 (TRAV13-1, TRAJ49)
CAASPMGNQFYF

SEQ ID NO: 36302 - protein, 13 aa, Homo sapiens
  CDR3 for beta chain variable domain of TCR clone 18151 (TRBV20-1, TRBJ2-2)
CSASAASTGELFF

SEQ ID NO: 36303 - protein, 14 aa, Homo sapiens
  CDR3 for alpha chain variable domain of TCR clone 18152 (TRAV12-3, TRAJ9)
CAMSPNTGGFKTIF

SEQ ID NO: 36304 - protein, 14 aa, Homo sapiens
  CDR3 for beta chain variable domain of TCR clone 18152 (TRBV6-3, TRBJ1-1)
CASSYQRRDTEAFF

SEQ ID NO: 36305 - protein, 13 aa, Homo sapiens
  CDR3 for alpha chain variable domain of TCR clone 18153 (TRAV35, TRAJ22)
CAGLSGSAGQLTF

SEQ ID NO: 36306 - protein, 16 aa, Homo sapiens
  CDR3 for beta chain variable domain of TCR clone 18153 (TRBV7-9, TRBJ2-1)
CASSLVLTGQGNEQFF

SEQ ID NO: 36307 - protein, 11 aa, Homo sapiens
  CDR3 for alpha chain variable domain of TCR clone 18154 (TRAV12-3, TRAJ43)
CAMSVSNDMRF

SEQ ID NO: 36308 - protein, 13 aa, Homo sapiens
  CDR3 for beta chain variable domain of TCR clone 18154 (TRBV7-3, TRBJ1-1)
CASSLTQGTEAFF

SEQ ID NO: 36309 - protein, 14 aa, Homo sapiens
  CDR3 for alpha chain variable domain of TCR clone 18155 (TRAV12-2, TRAJ13)
CAVKKTGGYQKVTF

SEQ ID NO: 36310 - protein, 15 aa, Homo sapiens
  CDR3 for beta chain variable domain of TCR clone 18155 (TRBV20-1, TRBJ1-1)
CSASWDRSLNTEAFF

SEQ ID NO: 36311 - protein, 15 aa, Homo sapiens
  CDR3 for alpha chain variable domain of TCR clone 18156 (TRAV4, TRAJ39)
CLVGPNNNAGNMLTF

SEQ ID NO: 36312 - protein, 15 aa, Homo sapiens
  CDR3 for beta chain variable domain of TCR clone 18156 (TRBV27, TRBJ1-4)
CASSAQRDLNEKLFF

SEQ ID NO: 36313 - protein, 12 aa, Homo sapiens
  CDR3 for alpha chain variable domain of TCR clone 18157 (TRAV12-3, TRAJ20)
CAMVRGDYKLSF

SEQ ID NO: 36314 - protein, 16 aa, Homo sapiens
  CDR3 for beta chain variable domain of TCR clone 18157 (TRBV9, TRBJ2-2)
CASSAMGKGNTGELFF

SEQ ID NO: 36315 - protein, 21 aa, Homo sapiens
  CDR3 for alpha chain variable domain of TCR clone 18158 (TRAV26-1, )
CIVSHRVEGFWNQIPDIQNPD

SEQ ID NO: 36316 - protein, 14 aa, Homo sapiens
  CDR3 for beta chain variable domain of TCR clone 18158 (TRBV20-1, TRBJ2-7)
CSAWTALSSYEQYF

SEQ ID NO: 36317 - protein, 17 aa, Homo sapiens
  CDR3 for alpha chain variable domain of TCR clone 18159 (TRAV3, TRAJ6)
CAVRDGPRAGGSYVPTF

SEQ ID NO: 36318 - protein, 16 aa, Homo sapiens
  CDR3 for beta chain variable domain of TCR clone 18159 (TRBV7-8, TRBJ2-3)
CASSTEGQRETDTQYF

SEQ ID NO: 36319 - protein, 14 aa, Homo sapiens
  CDR3 for alpha chain variable domain of TCR clone 18160 (TRAV3, TRAJ36)
CAVRDGTGANNPFF

SEQ ID NO: 36320 - protein, 16 aa, Homo sapiens
  CDR3 for beta chain variable domain of TCR clone 18160 (TRBV20-1, TRBJ2-6)
CSAREGPGVGANVLTF

SEQ ID NO: 36321 - protein, 12 aa, Homo sapiens
  CDR3 for alpha chain variable domain of TCR clone 18161 (TRAV3, TRAJ26)
CAVRDYGQNSVF

SEQ ID NO: 36322 - protein, 16 aa, Homo sapiens
  CDR3 for beta chain variable domain of TCR clone 18161 (TRBV11-2, TRBJ1-2)
CASSPSGREANYGYTF

SEQ ID NO: 36323 - protein, 15 aa, Homo sapiens
  CDR3 for alpha chain variable domain of TCR clone 18162 (TRAV2, TRAJ9)
CAVEDRGAGGFKTIF

SEQ ID NO: 36324 - protein, 16 aa, Homo sapiens
  CDR3 for beta chain variable domain of TCR clone 18162 (TRBV24-1, TRBJ2-3)
CATSDPGTGATDTQYF

SEQ ID NO: 36325 - protein, 12 aa, Homo sapiens
  CDR3 for alpha chain variable domain of TCR clone 18163 (TRAV21, TRAJ34)
CAVRGNTDKLIF

SEQ ID NO: 36326 - protein, 17 aa, Homo sapiens
  CDR3 for beta chain variable domain of TCR clone 18163 (TRBV25-1, TRBJ2-1)
CASSAYGQGRGVYEQFF

SEQ ID NO: 36327 - protein, 12 aa, Homo sapiens
  CDR3 for alpha chain variable domain of TCR clone 18164 (TRAV2, TRAJ9)
CAVGAGGFKTIF

SEQ ID NO: 36328 - protein, 16 aa, Homo sapiens
  CDR3 for beta chain variable domain of TCR clone 18164 (TRBV13, TRBJ2-2)
CASSPRTGEHTGELFS

SEQ ID NO: 36329 - protein, 13 aa, Homo sapiens
  CDR3 for alpha chain variable domain of TCR clone 18165 (TRAV35, TRAJ42)
CAGFPGSQGNLIF

SEQ ID NO: 36330 - protein, 14 aa, Homo sapiens
  CDR3 for beta chain variable domain of TCR clone 18165 (TRBV19, TRBJ2-1)
CASPTFVLSDEQFF

SEQ ID NO: 36331 - protein, 18 aa, Homo sapiens
  CDR3 for alpha chain variable domain of TCR clone 18166 (TRAV13-1, TRAJ52)
CAAKNPNAGGTSYGKLTF

SEQ ID NO: 36332 - protein, 15 aa, Homo sapiens
  CDR3 for beta chain variable domain of TCR clone 18166 (TRBV6-1, TRBJ2-3)
RASSERGGITDTQYF

SEQ ID NO: 36333 - protein, 13 aa, Homo sapiens
  CDR3 for alpha chain variable domain of TCR clone 18167 (TRAV13-1, TRAJ5)
CAARVTGRRALTF

SEQ ID NO: 36334 - protein, 15 aa, Homo sapiens
  CDR3 for beta chain variable domain of TCR clone 18167 (TRBV7-9, TRBJ2-7)
CASSPGGGLTYEQYL

SEQ ID NO: 36335 - protein, 13 aa, Homo sapiens
  CDR3 for alpha chain variable domain of TCR clone 18168 (TRAV3, TRAJ15)
CAVRDQAGTALIF

SEQ ID NO: 36336 - protein, 15 aa, Homo sapiens
  CDR3 for beta chain variable domain of TCR clone 18168 (TRBV11-3, TRBJ2-7)
CASSLNYGASYEQYF

SEQ ID NO: 36337 - protein, 17 aa, Homo sapiens
  CDR3 for alpha chain variable domain of TCR clone 18169 (TRAV3, TRAJ42)
CAVRDRDYGGSQGDLIF

SEQ ID NO: 36338 - protein, 15 aa, Homo sapiens
  CDR3 for beta chain variable domain of TCR clone 18169 (TRBV6-6, TRBJ2-7)
CASSYSYGGSYEQYF

SEQ ID NO: 36339 - protein, 17 aa, Homo sapiens
  CDR3 for alpha chain variable domain of TCR clone 18170 (TRAV38-2/DV8, TRAJ38)
CAYRSARGAGNNRKLIW

SEQ ID NO: 36340 - protein, 13 aa, Homo sapiens
  CDR3 for beta chain variable domain of TCR clone 18170 (TRBV6-5, TRBJ2-1)
CASRGRVGNEQFF

SEQ ID NO: 36341 - protein, 13 aa, Homo sapiens
  CDR3 for alpha chain variable domain of TCR clone 18171 (TRAV38-2/DV8, TRAJ34)
CAYRTWNTDKLIF

SEQ ID NO: 36342 - protein, 18 aa, Homo sapiens
  CDR3 for beta chain variable domain of TCR clone 18171 (TRBV6-6, TRBJ1-3)
CASSYSKWDSISGNTMYF

SEQ ID NO: 36343 - protein, 12 aa, Homo sapiens
  CDR3 for alpha chain variable domain of TCR clone 18172 (TRAV21, TRAJ31)
CAVWGNNARLMF

SEQ ID NO: 36344 - protein, 16 aa, Homo sapiens
  CDR3 for beta chain variable domain of TCR clone 18172 (TRBV27, TRBJ2-5)
SASSYGPGGQKETQYF

SEQ ID NO: 36345 - protein, 18 aa, Homo sapiens
  CDR3 for alpha chain variable domain of TCR clone 18173 (TRAV26-1, TRAJ52)
CIVRVEGAGGTSYGKLTF

SEQ ID NO: 36346 - protein, 13 aa, Homo sapiens
  CDR3 for beta chain variable domain of TCR clone 18173 (TRBV7-3, TRBJ1-2)
CASSLKRGYGYAF

SEQ ID NO: 36347 - protein, 16 aa, Homo sapiens
  CDR3 for alpha chain variable domain of TCR clone 18174 (TRAV12-1, TRAJ48)
CVVNMVSNFGNEKLTF

SEQ ID NO: 36348 - protein, 18 aa, Homo sapiens
  CDR3 for beta chain variable domain of TCR clone 18174 (TRBV11-3, TRBJ2-6)
CASSLNPFLGTGANVLTF

SEQ ID NO: 36349 - protein, 14 aa, Homo sapiens
  CDR3 for alpha chain variable domain of TCR clone 18175 (TRAV12-1, TRAJ17)
CVVNYKAAGNTLTF

SEQ ID NO: 36350 - protein, 17 aa, Homo sapiens
  CDR3 for beta chain variable domain of TCR clone 18175 (TRBV20-1, TRBJ2-1)
CSASSSGLAGSYNEQFF

SEQ ID NO: 36351 - protein, 12 aa, Homo sapiens
  CDR3 for alpha chain variable domain of TCR clone 18176 (TRAV2, TRAJ9)
CAVGAGGCKTIF

SEQ ID NO: 36352 - protein, 16 aa, Homo sapiens
  CDR3 for beta chain variable domain of TCR clone 18176 (TRBV13, TRBJ2-2)
CASSPRTGEHTGELFF

SEQ ID NO: 36353 - protein, 11 aa, Homo sapiens
  CDR3 for alpha chain variable domain of TCR clone 18177 (TRAV17, TRAJ9)
CATTGGFKTIF

SEQ ID NO: 36354 - protein, 14 aa, Homo sapiens
  CDR3 for beta chain variable domain of TCR clone 18177 (TRBV7-9, TRBJ2-2)
CASSGLADTGELFS

SEQ ID NO: 36355 - protein, 13 aa, Homo sapiens
  CDR3 for alpha chain variable domain of TCR clone 18178 (TRAV38-1, TRAJ42)
CARWGGSQGNLIF

SEQ ID NO: 36356 - protein, 17 aa, Homo sapiens
  CDR3 for beta chain variable domain of TCR clone 18178 (TRBV20-1, TRBJ2-1)
CSARAPLAGVWDNEQFF

SEQ ID NO: 36357 - protein, 14 aa, Homo sapiens
  CDR3 for alpha chain variable domain of TCR clone 18179 (TRAV4, TRAJ26)
CLVGPHNYGQNFVF

SEQ ID NO: 36358 - protein, 17 aa, Homo sapiens
  CDR3 for beta chain variable domain of TCR clone 18179 (TRBV24-1, TRBJ2-1)
CATSDVSTSGAYNEQFF

SEQ ID NO: 36359 - protein, 17 aa, Homo sapiens
  CDR3 for alpha chain variable domain of TCR clone 18180 (TRAV23/DV6, TRAJ57)
CAASSTLSQGGSERLVF

SEQ ID NO: 36360 - protein, 14 aa, Homo sapiens
  CDR3 for beta chain variable domain of TCR clone 18180 (TRBV25-1, TRBJ1-1)
CASTHLGGNTEAFF

SEQ ID NO: 36361 - protein, 12 aa, Homo sapiens
  CDR3 for alpha chain variable domain of TCR clone 18181 (TRAV21, TRAJ33)
CATMDSNYQLIW

SEQ ID NO: 36362 - protein, 14 aa, Homo sapiens
  CDR3 for beta chain variable domain of TCR clone 18181 (TRBV2, TRBJ2-7)
CASSLTSGGYEQYF

SEQ ID NO: 36363 - protein, 12 aa, Homo sapiens
  CDR3 for alpha chain variable domain of TCR clone 18182 (TRAV27, TRAJ35)
CAGADFGNGLHC

SEQ ID NO: 36364 - protein, 16 aa, Homo sapiens
  CDR3 for beta chain variable domain of TCR clone 18182 (TRBV6-1, TRBJ2-1)
CASILRQGSSYNEQFF

SEQ ID NO: 36365 - protein, 14 aa, Homo sapiens
  CDR3 for alpha chain variable domain of TCR clone 18183 (TRAV1-2, TRAJ16)
CAVNRFSVGQKLLF

SEQ ID NO: 36366 - protein, 16 aa, Homo sapiens
  CDR3 for beta chain variable domain of TCR clone 18183 (TRBV11-2, TRBJ1-2)
CASSLDTGGADYGYTF

SEQ ID NO: 36367 - protein, 13 aa, Homo sapiens
  CDR3 for alpha chain variable domain of TCR clone 18184 (TRAV23/DV6, TRAJ26)
CAATYNYGQNFVF

SEQ ID NO: 36368 - protein, 14 aa, Homo sapiens
  CDR3 for beta chain variable domain of TCR clone 18184 (TRBV11-3, TRBJ1-2)
CASSLGSGTYGYTF

SEQ ID NO: 36369 - protein, 17 aa, Homo sapiens
  CDR3 for alpha chain variable domain of TCR clone 18185 (TRAV16, TRAJ58)
CITVLSNGETSGSRLTF

SEQ ID NO: 36370 - protein, 17 aa, Homo sapiens
  CDR3 for beta chain variable domain of TCR clone 18185 (TRBV18, TRBJ2-1)
CASSKGLSGGPTMSSSS

SEQ ID NO: 36371 - protein, 12 aa, Homo sapiens
  CDR3 for alpha chain variable domain of TCR clone 18186 (TRAV2, TRAJ31)
CAVEDNNARPMF

SEQ ID NO: 36372 - protein, 16 aa, Homo sapiens
  CDR3 for beta chain variable domain of TCR clone 18186 (TRBV10-3, TRBJ2-1)
CAISGVGDGGGGEQFF

SEQ ID NO: 36373 - protein, 13 aa, Homo sapiens
  CDR3 for alpha chain variable domain of TCR clone 18187 (TRAV8-3, TRAJ36)
CAVGSTGANNLFF

SEQ ID NO: 36374 - protein, 15 aa, Homo sapiens
  CDR3 for beta chain variable domain of TCR clone 18187 (TRBV7-2, TRBJ1-2)
CASSPRAGWNYGYTF

SEQ ID NO: 36375 - protein, 10 aa, Homo sapiens
  CDR3 for alpha chain variable domain of TCR clone 18188 (TRAV23/DV6, TRAJ57)
CAASSTLSQG

SEQ ID NO: 36376 - protein, 14 aa, Homo sapiens
  CDR3 for beta chain variable domain of TCR clone 18188 (TRBV12-5, TRBJ2-5)
CASGSRTHQETQYF

SEQ ID NO: 36377 - protein, 14 aa, Homo sapiens
  CDR3 for alpha chain variable domain of TCR clone 18189 (TRAV12-1, TRAJ9)
CVVTGYTGGFKTIF

SEQ ID NO: 36378 - protein, 13 aa, Homo sapiens
  CDR3 for beta chain variable domain of TCR clone 18189 (TRBV20-1, TRBJ1-1)
CSARAGGNTGAFF

SEQ ID NO: 36379 - protein, 15 aa, Homo sapiens
  CDR3 for alpha chain variable domain of TCR clone 18190 (TRAV26-1, TRAJ44)
CIVRANIGTASKLTF

SEQ ID NO: 36380 - protein, 12 aa, Homo sapiens
  CDR3 for beta chain variable domain of TCR clone 18190 (TRBV28, TRBJ2-3)
CASSLYRDTQYF

SEQ ID NO: 36381 - protein, 14 aa, Homo sapiens
  CDR3 for alpha chain variable domain of TCR clone 18191 (TRAV35, TRAJ22)
CAGLRPGFARQLTF

SEQ ID NO: 36382 - protein, 15 aa, Homo sapiens
  CDR3 for beta chain variable domain of TCR clone 18191 (TRBV12-4, TRBJ2-5)
CASSPPTGLQETQYF

SEQ ID NO: 36383 - protein, 15 aa, Homo sapiens
  CDR3 for alpha chain variable domain of TCR clone 18192 (TRAV3, TRAJ5)
CAVSDRKTGRRALTF

SEQ ID NO: 36384 - protein, 15 aa, Homo sapiens
  CDR3 for beta chain variable domain of TCR clone 18192 (TRBV7-8, TRBJ2-1)
CASSLADSLYNEQFF

SEQ ID NO: 36385 - protein, 18 aa, Homo sapiens
  CDR3 for alpha chain variable domain of TCR clone 18193 (TRAV13-1, TRAJ52)
RAASKRSAGGTSYGKLTF

SEQ ID NO: 36386 - protein, 13 aa, Homo sapiens
  CDR3 for beta chain variable domain of TCR clone 18193 (TRBV12-4, TRBJ1-2)
CASSLRQGKGYTF

SEQ ID NO: 36387 - protein, 15 aa, Homo sapiens
  CDR3 for alpha chain variable domain of TCR clone 18194 (TRAV17, TRAJ57)
CATGPSQGGSEKLVF

SEQ ID NO: 36388 - protein, 16 aa, Homo sapiens
  CDR3 for beta chain variable domain of TCR clone 18194 (TRBV12-4, TRBJ1-5)
CASSRPVGGSNKPQHF

SEQ ID NO: 36389 - protein, 14 aa, Homo sapiens
  CDR3 for alpha chain variable domain of TCR clone 18195 (TRAV38-1, TRAJ40)
CALRPTSGTYKYIF

SEQ ID NO: 36390 - protein, 15 aa, Homo sapiens
  CDR3 for beta chain variable domain of TCR clone 18195 (TRBV6-3, TRBJ2-7)
CASSSPGTVFYEQYF

SEQ ID NO: 36391 - protein, 17 aa, Homo sapiens
  CDR3 for alpha chain variable domain of TCR clone 18196 (TRAV3, TRAJ6)
CAVRDGPRAGGSYIPTF

SEQ ID NO: 36392 - protein, 20 aa, Homo sapiens
  CDR3 for beta chain variable domain of TCR clone 18196 (TRBV28, TRBJ2-1)
CASTPIGRSPGLAGGNEQFS

SEQ ID NO: 36393 - protein, 14 aa, Homo sapiens
  CDR3 for alpha chain variable domain of TCR clone 18197 (TRAV12-2, TRAJ13)
CAVKKTGGYQKVTF

SEQ ID NO: 36394 - protein, 15 aa, Homo sapiens
  CDR3 for beta chain variable domain of TCR clone 18197 (TRBV27, TRBJ2-1)
CASSTGGGSSNEQFF

SEQ ID NO: 36395 - protein, 15 aa, Homo sapiens
  CDR3 for alpha chain variable domain of TCR clone 18198 (TRAV3, TRAJ24)
CAGGMTTDSWGKFRF

SEQ ID NO: 36396 - protein, 14 aa, Homo sapiens
  CDR3 for beta chain variable domain of TCR clone 18198 (TRBV4-1, TRBJ2-2)
CASRRGRASGELFF

SEQ ID NO: 36397 - protein, 17 aa, Homo sapiens
  CDR3 for alpha chain variable domain of TCR clone 18199 (TRAV26-1, TRAJ53)
CIVRVDDSGGSNHKLTF

SEQ ID NO: 36398 - protein, 15 aa, Homo sapiens
  CDR3 for beta chain variable domain of TCR clone 18199 (TRBV20-1, TRBJ2-7)
CSARVPAAYFYEQYF

SEQ ID NO: 36399 - protein, 17 aa, Homo sapiens
  CDR3 for alpha chain variable domain of TCR clone 18200 (TRAV1-1, TRAJ32)
CAVRVDELWWCYKQAHL

SEQ ID NO: 36400 - protein, 13 aa, Homo sapiens
  CDR3 for beta chain variable domain of TCR clone 18200 (TRBV10-3, TRBJ2-7)
CASKLAVNYEQYF

SEQ ID NO: 36401 - protein, 10 aa, Homo sapiens
  CDR3 for alpha chain variable domain of TCR clone 18201 (TRAV12-1, TRAJ43)
CVVHNNDMRF

SEQ ID NO: 36402 - protein, 13 aa, Homo sapiens
  CDR3 for beta chain variable domain of TCR clone 18201 (TRBV12-4, TRBJ1-2)
CASSSGLTVIATF

SEQ ID NO: 36403 - protein, 13 aa, Homo sapiens
  CDR3 for alpha chain variable domain of TCR clone 18202 (TRAV2, TRAJ40)
CAVVTSGTYKYSF

SEQ ID NO: 36404 - protein, 15 aa, Homo sapiens
  CDR3 for beta chain variable domain of TCR clone 18202 (TRBV11-3, TRBJ2-3)
CASLKDGREGDTQYF

SEQ ID NO: 36405 - protein, 12 aa, Homo sapiens
  CDR3 for alpha chain variable domain of TCR clone 18203 (TRAV17, TRAJ5)
CAILTGRRALTF

SEQ ID NO: 36406 - protein, 16 aa, Homo sapiens
  CDR3 for beta chain variable domain of TCR clone 18203 (TRBV6-5, TRBJ1-5)
CASSPPGLEGNQPQHF

SEQ ID NO: 36407 - protein, 17 aa, Homo sapiens
  CDR3 for alpha chain variable domain of TCR clone 18204 (TRAV3, TRAJ6)
CAVRDGPRAGGSYIPTF

SEQ ID NO: 36408 - protein, 16 aa, Homo sapiens
  CDR3 for beta chain variable domain of TCR clone 18204 (TRBV13, TRBJ2-2)
CASSPRTGEHTGELFF

SEQ ID NO: 36409 - protein, 14 aa, Homo sapiens
  CDR3 for alpha chain variable domain of TCR clone 18205 (TRAV8-6, TRAJ29)
CAVSRASGDTPLVF

SEQ ID NO: 36410 - protein, 13 aa, Homo sapiens
  CDR3 for beta chain variable domain of TCR clone 18205 (TRBV19, TRBJ1-5)
CASSEGSNQPQHF

SEQ ID NO: 36411 - protein, 12 aa, Homo sapiens
  CDR3 for alpha chain variable domain of TCR clone 18206 (TRAV35, TRAJ49)
CAGWNTGNQLYF

SEQ ID NO: 36412 - protein, 16 aa, Homo sapiens
  CDR3 for beta chain variable domain of TCR clone 18206 (TRBV5-1, TRBJ2-2)
CASSLWDTTNTGELFF

SEQ ID NO: 36413 - protein, 16 aa, Homo sapiens
  CDR3 for alpha chain variable domain of TCR clone 18207 (TRAV8-3, TRAJ13)
CAVGAYPSGGYKKVTF

SEQ ID NO: 36414 - protein, 15 aa, Homo sapiens
  CDR3 for beta chain variable domain of TCR clone 18207 (TRBV19, TRBJ1-5)
CASSIVWADNQPQHF

SEQ ID NO: 36415 - protein, 11 aa, Homo sapiens
  CDR3 for alpha chain variable domain of TCR clone 18208 (TRAV17, TRAJ9)
CATTGGVKTIF

SEQ ID NO: 36416 - protein, 14 aa, Homo sapiens
  CDR3 for beta chain variable domain of TCR clone 18208 (TRBV7-9, TRBJ2-2)
CASSGLADTGELFF

SEQ ID NO: 36417 - protein, 15 aa, Homo sapiens
  CDR3 for alpha chain variable domain of TCR clone 18209 (TRAV12-1, TRAJ36)
CVVNEHQTGANNPFF

SEQ ID NO: 36418 - protein, 12 aa, Homo sapiens
  CDR3 for beta chain variable domain of TCR clone 18209 (TRBV29-1, TRBJ2-3)
CSVTGGADTQYF

SEQ ID NO: 36419 - protein, 14 aa, Homo sapiens
  CDR3 for alpha chain variable domain of TCR clone 18210 (TRAV12-1, TRAJ17)
CVVNYKAAGNKLTF

SEQ ID NO: 36420 - protein, 15 aa, Homo sapiens
  CDR3 for beta chain variable domain of TCR clone 18210 (TRBV9, TRBJ1-6)
CASSVAGTGDSPLHF

SEQ ID NO: 36421 - protein, 13 aa, Homo sapiens
  CDR3 for alpha chain variable domain of TCR clone 18211 (TRAV8-3, TRAJ28)
CAVGAVGSYQLTF

SEQ ID NO: 36422 - protein, 15 aa, Homo sapiens
  CDR3 for beta chain variable domain of TCR clone 18211 (TRBV7-9, TRBJ1-5)
CASRQGHQPNQPQHF

SEQ ID NO: 36423 - protein, 15 aa, Homo sapiens
  CDR3 for alpha chain variable domain of TCR clone 18212 (TRAV4, TRAJ39)
CLVGPNNNAGNMLTF

SEQ ID NO: 36424 - protein, 15 aa, Homo sapiens
  CDR3 for beta chain variable domain of TCR clone 18212 (TRBV19, TRBJ1-6)
CASGTQGAVGSPLHF

SEQ ID NO: 36425 - protein, 10 aa, Homo sapiens
  CDR3 for alpha chain variable domain of TCR clone 18213 (TRAV23/DV6, TRAJ57)
CAASSTLSQG

SEQ ID NO: 36426 - protein, 14 aa, Homo sapiens
  CDR3 for beta chain variable domain of TCR clone 18213 (TRBV25-1, TRBJ1-1)
CASTHLGGNAEAFF

SEQ ID NO: 36427 - protein, 12 aa, Homo sapiens
  CDR3 for alpha chain variable domain of TCR clone 18214 (TRAV8-3, TRAJ20)
CAVGANDYKLSF

SEQ ID NO: 36428 - protein, 16 aa, Homo sapiens
  CDR3 for beta chain variable domain of TCR clone 18214 (TRBV19, TRBJ2-2)
CARRSPGTGATGELFF

SEQ ID NO: 36429 - protein, 14 aa, Homo sapiens
  CDR3 for alpha chain variable domain of TCR clone 18215 (TRAV12-1, TRAJ17)
CVVNYKAAGNKLTF

SEQ ID NO: 36430 - protein, 17 aa, Homo sapiens
  CDR3 for beta chain variable domain of TCR clone 18215 (TRBV20-1, TRBJ2-1)
CSASSSGLAGSYNEQCF

SEQ ID NO: 36431 - protein, 18 aa, Homo sapiens
  CDR3 for alpha chain variable domain of TCR clone 18216 (TRAV12-3, TRAJ52)
CAMSVGGAGGTSHGKLTF

SEQ ID NO: 36432 - protein, 15 aa, Homo sapiens
  CDR3 for beta chain variable domain of TCR clone 18216 (TRBV27, TRBJ1-6)
CASSFDRGLGSPLHF

SEQ ID NO: 36433 - protein, 16 aa, Homo sapiens
  CDR3 for alpha chain variable domain of TCR clone 18217 (TRAV16, TRAJ4)
CALSRMFSGGYNKLIF

SEQ ID NO: 36434 - protein, 16 aa, Homo sapiens
  CDR3 for beta chain variable domain of TCR clone 18217 (TRBV24-1, TRBJ2-3)
CATSDPGTVATDTQYF

SEQ ID NO: 36435 - protein, 15 aa, Homo sapiens
  CDR3 for alpha chain variable domain of TCR clone 18218 (TRAV4, TRAJ39)
CLGGPNNNAGNMLTF

SEQ ID NO: 36436 - protein, 13 aa, Homo sapiens
  CDR3 for beta chain variable domain of TCR clone 18218 (TRBV11-2, TRBJ2-5)
CASSSTGEETQYF

SEQ ID NO: 36437 - protein, 16 aa, Homo sapiens
  CDR3 for alpha chain variable domain of TCR clone 18219 (TRAV30, TRAJ24)
CGTEIVDADSWGKFKF

SEQ ID NO: 36438 - protein, 14 aa, Homo sapiens
  CDR3 for beta chain variable domain of TCR clone 18219 (TRBV12-5, TRBJ2-5)
CASGSRTHQGTQYF

SEQ ID NO: 36439 - protein, 14 aa, Homo sapiens
  CDR3 for alpha chain variable domain of TCR clone 18220 (TRAV23/DV6, TRAJ57)
CAASNQGGSEKLVF

SEQ ID NO: 36440 - protein, 13 aa, Homo sapiens
  CDR3 for beta chain variable domain of TCR clone 18220 (TRBV11-2, TRBJ2-7)
CASSSYPPYEQYF

SEQ ID NO: 36441 - protein, 12 aa, Homo sapiens
  CDR3 for alpha chain variable domain of TCR clone 18221 (TRAV13-2, TRAJ23)
CSERHRGGKLIF

SEQ ID NO: 36442 - protein, 16 aa, Homo sapiens
  CDR3 for beta chain variable domain of TCR clone 18221 (TRBV20-1, TRBJ1-4)
CSAPGQGLLTNEKLFF

SEQ ID NO: 36443 - protein, 13 aa, Homo sapiens
  CDR3 for alpha chain variable domain of TCR clone 18222 (TRAV12-1, TRAJ21)
CVVTLYNFNKFYF

SEQ ID NO: 36444 - protein, 20 aa, Homo sapiens
  CDR3 for beta chain variable domain of TCR clone 18222 (TRBV7-8, TRBJ2-1)
CASSLANRLAGVRSYNEQFF

SEQ ID NO: 36445 - protein, 14 aa, Homo sapiens
  CDR3 for alpha chain variable domain of TCR clone 18223 (TRAV2, TRAJ37)
CAVDFTSNTGKLIF

SEQ ID NO: 36446 - protein, 15 aa, Homo sapiens
  CDR3 for beta chain variable domain of TCR clone 18223 (TRBV20-1, TRBJ1-1)
CSVSRGVTGNTEAFF

SEQ ID NO: 36447 - protein, 16 aa, Homo sapiens
  CDR3 for alpha chain variable domain of TCR clone 18224 (TRAV1-2, TRAJ10)
CAVRGVLTGGGNTLTF

SEQ ID NO: 36448 - protein, 12 aa, Homo sapiens
  CDR3 for beta chain variable domain of TCR clone 18224 (TRBV7-8, TRBJ2-7)
CASSLGDREQYF

SEQ ID NO: 36449 - protein, 16 aa, Homo sapiens
  CDR3 for alpha chain variable domain of TCR clone 18225 (TRAV30, TRAJ24)
CGTEIVDADSWGKFQF

SEQ ID NO: 36450 - protein, 14 aa, Homo sapiens
  CDR3 for beta chain variable domain of TCR clone 18225 (TRBV12-5, TRBJ2-5)
SASGSRTHQETQYF

SEQ ID NO: 36451 - protein, 11 aa, Homo sapiens
  CDR3 for alpha chain variable domain of TCR clone 18226 (TRAV12-2, TRAJ31)
CAVTRWARLIF

SEQ ID NO: 36452 - protein, 15 aa, Homo sapiens
  CDR3 for beta chain variable domain of TCR clone 18226 (TRBV19, TRBJ2-7)
CASSIGGGLVNEQYF

SEQ ID NO: 36453 - protein, 17 aa, Homo sapiens
  CDR3 for alpha chain variable domain of TCR clone 18227 (TRAV26-1, TRAJ53)
CIVRVDDRGGSNYKLTF

SEQ ID NO: 36454 - protein, 15 aa, Homo sapiens
  CDR3 for beta chain variable domain of TCR clone 18227 (TRBV20-1, TRBJ2-7)
CSARVPAAYFYEQYF

SEQ ID NO: 36455 - protein, 14 aa, Homo sapiens
  CDR3 for alpha chain variable domain of TCR clone 18228 (TRAV12-2, TRAJ6)
CASKWGGGSYIPTF

SEQ ID NO: 36456 - protein, 13 aa, Homo sapiens
  CDR3 for beta chain variable domain of TCR clone 18228 (TRBV2, TRBJ1-1)
CASSEGGNTEAFS

SEQ ID NO: 36457 - protein, 16 aa, Homo sapiens
  CDR3 for alpha chain variable domain of TCR clone 18229 (TRAV12-1, TRAJ42)
CVVTPYYGGSQGNLIF

SEQ ID NO: 36458 - protein, 13 aa, Homo sapiens
  CDR3 for beta chain variable domain of TCR clone 18229 (TRBV10-3, TRBJ2-7)
CASKLAVNYEQYF

SEQ ID NO: 36459 - protein, 12 aa, Homo sapiens
  CDR3 for alpha chain variable domain of TCR clone 18230 (TRAV5, TRAJ3)
CAEDSSASKIIF

SEQ ID NO: 36460 - protein, 12 aa, Homo sapiens
  CDR3 for beta chain variable domain of TCR clone 18230 (TRBV14, TRBJ2-7)
CASSSLKGEQYF

SEQ ID NO: 36461 - protein, 18 aa, Homo sapiens
  CDR3 for alpha chain variable domain of TCR clone 18231 (TRAV26-2, TRAJ54)
CILRDVEVGIQGAQKLGF

SEQ ID NO: 36462 - protein, 16 aa, Homo sapiens
  CDR3 for beta chain variable domain of TCR clone 18231 (TRBV6-1, TRBJ2-5)
CASSETLDRGAETQYF

SEQ ID NO: 36463 - protein, 13 aa, Homo sapiens
  CDR3 for alpha chain variable domain of TCR clone 18232 (TRAV3, TRAJ15)
CAVRDQAGTALLF

SEQ ID NO: 36464 - protein, 15 aa, Homo sapiens
  CDR3 for beta chain variable domain of TCR clone 18232 (TRBV11-1, TRBJ2-7)
CASSLNYGASYEQYF

SEQ ID NO: 36465 - protein, 15 aa, Homo sapiens
  CDR3 for alpha chain variable domain of TCR clone 18233 (TRAV12-3, TRAJ6)
CAMSATTGGSYIPTF

SEQ ID NO: 36466 - protein, 16 aa, Homo sapiens
  CDR3 for beta chain variable domain of TCR clone 18233 (TRBV20-1, TRBJ1-2)
CSASMEQGVANYGYTF

SEQ ID NO: 36467 - protein, 14 aa, Homo sapiens
  CDR3 for alpha chain variable domain of TCR clone 18234 (TRAV1-2, TRAJ8)
CAVREDTGFQKLVF

SEQ ID NO: 36468 - protein, 12 aa, Homo sapiens
  CDR3 for beta chain variable domain of TCR clone 18234 (TRBV7-9, TRBJ1-1)
CASSLVRGEAFF

SEQ ID NO: 36469 - protein, 16 aa, Homo sapiens
  CDR3 for alpha chain variable domain of TCR clone 18235 (TRAV16, TRAJ42)
CARKMNYGGSQGNLIS

SEQ ID NO: 36470 - protein, 15 aa, Homo sapiens
  CDR3 for beta chain variable domain of TCR clone 18235 (TRBV20-1, TRBJ2-7)
CSAREGRDSLYEQYF

SEQ ID NO: 36471 - protein, 13 aa, Homo sapiens
  CDR3 for alpha chain variable domain of TCR clone 18236 (TRAV13-1, TRAJ5)
CAASDTGRIALTF

SEQ ID NO: 36472 - protein, 12 aa, Homo sapiens
  CDR3 for beta chain variable domain of TCR clone 18236 (TRBV28, TRBJ2-3)
CASSLYRDTQYF

SEQ ID NO: 36473 - protein, 12 aa, Homo sapiens
  CDR3 for alpha chain variable domain of TCR clone 18237 (TRAV1-1, TRAJ8)
CAGGTGFQELVF

SEQ ID NO: 36474 - protein, 15 aa, Homo sapiens
  CDR3 for beta chain variable domain of TCR clone 18237 (TRBV7-9, TRBJ1-4)
CASSRTGGFNEKLFF

SEQ ID NO: 36475 - protein, 13 aa, Homo sapiens
  CDR3 for alpha chain variable domain of TCR clone 18238 (TRAV8-3, TRAJ28)
CSVGAVGSYQLTF

SEQ ID NO: 36476 - protein, 15 aa, Homo sapiens
  CDR3 for beta chain variable domain of TCR clone 18238 (TRBV7-9, TRBJ1-5)
CASSQGHQPNQPQHF

SEQ ID NO: 36477 - protein, 16 aa, Homo sapiens
  CDR3 for alpha chain variable domain of TCR clone 18239 (TRAV27, TRAJ13)
CAGAKSDSGCYQKVTF

SEQ ID NO: 36478 - protein, 15 aa, Homo sapiens
  CDR3 for beta chain variable domain of TCR clone 18239 (TRBV29-1, TRBJ2-1)
CSVGRHALFYNEQFF

SEQ ID NO: 36479 - protein, 14 aa, Homo sapiens
  CDR3 for alpha chain variable domain of TCR clone 18240 (TRAV13-1, TRAJ44)
CAAKATGTASKLTF

SEQ ID NO: 36480 - protein, 17 aa, Homo sapiens
  CDR3 for beta chain variable domain of TCR clone 18240 (TRBV7-3, TRBJ2-3)
CASSLMRRMRGADTQYF

SEQ ID NO: 36481 - protein, 14 aa, Homo sapiens
  CDR3 for alpha chain variable domain of TCR clone 18241 (TRAV29/DV5, TRAJ5)
CAASGDTGRRALTF

SEQ ID NO: 36482 - protein, 14 aa, Homo sapiens
  CDR3 for beta chain variable domain of TCR clone 18241 (TRBV7-2, TRBJ2-7)
CASSPKTSFYEQYF

SEQ ID NO: 36483 - protein, 13 aa, Homo sapiens
  CDR3 for alpha chain variable domain of TCR clone 18242 (TRAV12-2, TRAJ39)
CAANNNAGNMLTF

SEQ ID NO: 36484 - protein, 13 aa, Homo sapiens
  CDR3 for beta chain variable domain of TCR clone 18242 (TRBV2, TRBJ1-5)
CATAGPGNQPQHF

SEQ ID NO: 36485 - protein, 15 aa, Homo sapiens
  CDR3 for alpha chain variable domain of TCR clone 18243 (TRAV3, TRAJ24)
CAVRDKMTAGGDCSL

SEQ ID NO: 36486 - protein, 14 aa, Homo sapiens
  CDR3 for beta chain variable domain of TCR clone 18243 (TRBV7-2, TRBJ2-3)
CASSQTGSSYTQYF

SEQ ID NO: 36487 - protein, 12 aa, Homo sapiens
  CDR3 for alpha chain variable domain of TCR clone 18244 (TRAV35, TRAJ49)
CAGWNTGNQFYF

SEQ ID NO: 36488 - protein, 16 aa, Homo sapiens
  CDR3 for beta chain variable domain of TCR clone 18244 (TRBV5-1, TRBJ2-2)
CAGSLWDTTNTGELFF

SEQ ID NO: 36489 - protein, 13 aa, Homo sapiens
  CDR3 for alpha chain variable domain of TCR clone 18245 (TRAV2, TRAJ40)
CAVVTSGTYKYIF

SEQ ID NO: 36490 - protein, 12 aa, Homo sapiens
  CDR3 for beta chain variable domain of TCR clone 18245 (TRBV12-4, TRBJ2-7)
CASSLGGYEQYF

SEQ ID NO: 36491 - protein, 12 aa, Homo sapiens
  CDR3 for alpha chain variable domain of TCR clone 18246 (TRAV12-1, TRAJ50)
CVGRTSYGKVIF

SEQ ID NO: 36492 - protein, 12 aa, Homo sapiens
  CDR3 for beta chain variable domain of TCR clone 18246 (TRBV5-7, TRBJ1-1)
CASSLVGTEAFF

SEQ ID NO: 36493 - protein, 15 aa, Homo sapiens
  CDR3 for alpha chain variable domain of TCR clone 18247 (TRAV27, TRAJ38)
CAARRNAGNNRKLIW

SEQ ID NO: 36494 - protein, 13 aa, Homo sapiens
  CDR3 for beta chain variable domain of TCR clone 18247 (TRBV12-5, TRBJ2-3)
CASGDRQSDTHYF

SEQ ID NO: 36495 - protein, 17 aa, Homo sapiens
  CDR3 for alpha chain variable domain of TCR clone 18248 (TRAV27, TRAJ52)
CAGAGWAGGTSYGKLTF

SEQ ID NO: 36496 - protein, 16 aa, Homo sapiens
  CDR3 for beta chain variable domain of TCR clone 18248 (TRBV19, TRBJ2-1)
CASSKAGPSSYNEQLF

SEQ ID NO: 36497 - protein, 13 aa, Homo sapiens
  CDR3 for alpha chain variable domain of TCR clone 18249 (TRAV20, TRAJ29)
CAVQAVGNTPLVF

SEQ ID NO: 36498 - protein, 15 aa, Homo sapiens
  CDR3 for beta chain variable domain of TCR clone 18249 (TRBV10-2, TRBJ2-5)
CASRGSGGPQEAQYF

SEQ ID NO: 36499 - protein, 15 aa, Homo sapiens
  CDR3 for alpha chain variable domain of TCR clone 18250 (TRAV8-3, TRAJ45)
CASSYSGGGADGVTF

SEQ ID NO: 36500 - protein, 13 aa, Homo sapiens
  CDR3 for beta chain variable domain of TCR clone 18250 (TRBV10-3, TRBJ2-7)
CASKLAVNYEQYF

SEQ ID NO: 36501 - protein, 14 aa, Homo sapiens
  CDR3 for alpha chain variable domain of TCR clone 18251 (TRAV12-2, TRAJ40)
CALKIPSGTYKYIF

SEQ ID NO: 36502 - protein, 14 aa, Homo sapiens
  CDR3 for beta chain variable domain of TCR clone 18251 (TRBV20-1, TRBJ1-1)
CSAQTRIGGTEAFF

SEQ ID NO: 36503 - protein, 13 aa, Homo sapiens
  CDR3 for alpha chain variable domain of TCR clone 18252 (TRAV2, TRAJ15)
CAVASQAGTALIF

SEQ ID NO: 36504 - protein, 16 aa, Homo sapiens
  CDR3 for beta chain variable domain of TCR clone 18252 (TRBV5-1, TRBJ1-1)
CASSSGGSSLNTEAFF

SEQ ID NO: 36505 - protein, 15 aa, Homo sapiens
  CDR3 for alpha chain variable domain of TCR clone 18253 (TRAV8-4, TRAJ9)
CAVSDRETGGFKTIF

SEQ ID NO: 36506 - protein, 13 aa, Homo sapiens
  CDR3 for beta chain variable domain of TCR clone 18253 (TRBV9, TRBJ2-1)
CASSPSGGSEQFF

SEQ ID NO: 36507 - protein, 16 aa, Homo sapiens
  CDR3 for alpha chain variable domain of TCR clone 18254 (TRAV3, TRAJ21)
CAVRDIEGGNFNKFYF

SEQ ID NO: 36508 - protein, 13 aa, Homo sapiens
  CDR3 for beta chain variable domain of TCR clone 18254 (TRBV27, TRBJ2-7)
CASSLTTGYEQYF

SEQ ID NO: 36509 - protein, 10 aa, Homo sapiens
  CDR3 for alpha chain variable domain of TCR clone 18255 (TRAV2, TRAJ34)
CAVVDDKLIF

SEQ ID NO: 36510 - protein, 15 aa, Homo sapiens
  CDR3 for beta chain variable domain of TCR clone 18255 (TRBV3-1, TRBJ2-2)
CASSQDWTRAGELFF

SEQ ID NO: 36511 - protein, 13 aa, Homo sapiens
  CDR3 for alpha chain variable domain of TCR clone 18256 (TRAV2, TRAJ40)
CAVVTSVTYKYIF

SEQ ID NO: 36512 - protein, 15 aa, Homo sapiens
  CDR3 for beta chain variable domain of TCR clone 18256 (TRBV11-3, TRBJ2-3)
CASLKDGREGDTQYF

SEQ ID NO: 36513 - protein, 15 aa, Homo sapiens
  CDR3 for alpha chain variable domain of TCR clone 18257 (TRAV2, TRAJ9)
CAVEDRGTGGFKTIF

SEQ ID NO: 36514 - protein, 13 aa, Homo sapiens
  CDR3 for beta chain variable domain of TCR clone 18257 (TRBV20-1, TRBJ2-5)
CSAREGGKETQYF

SEQ ID NO: 36515 - protein, 12 aa, Homo sapiens
  CDR3 for alpha chain variable domain of TCR clone 18258 (TRAV27, TRAJ13)
CAGAGGYQKVTF

SEQ ID NO: 36516 - protein, 15 aa, Homo sapiens
  CDR3 for beta chain variable domain of TCR clone 18258 (TRBV20-1, TRBJ2-6)
CSARDRGPGANDLTF

SEQ ID NO: 36517 - protein, 14 aa, Homo sapiens
  CDR3 for alpha chain variable domain of TCR clone 18259 (TRAV8-3, TRAJ27)
CAGGRNTNAGKSTF

SEQ ID NO: 36518 - protein, 15 aa, Homo sapiens
  CDR3 for beta chain variable domain of TCR clone 18259 (TRBV11-3, TRBJ2-5)
CASSLRGRVQETQYS

SEQ ID NO: 36519 - protein, 18 aa, Homo sapiens
  CDR3 for alpha chain variable domain of TCR clone 18260 (TRAV12-3, TRAJ52)
CAMSVGGAGGTSYGKLTF

SEQ ID NO: 36520 - protein, 12 aa, Homo sapiens
  CDR3 for beta chain variable domain of TCR clone 18260 (TRBV11-2, TRBJ2-2)
CASSLGGGELFF

SEQ ID NO: 36521 - protein, 11 aa, Homo sapiens
  CDR3 for alpha chain variable domain of TCR clone 18261 (TRAV1-1, TRAJ23)
CAVRQGGKLIF

SEQ ID NO: 36522 - protein, 20 aa, Homo sapiens
  CDR3 for beta chain variable domain of TCR clone 18261 (TRBV7-8, TRBJ2-2)
CASSRLFPGPTIHITGELFF

SEQ ID NO: 36523 - protein, 14 aa, Homo sapiens
  CDR3 for alpha chain variable domain of TCR clone 18262 (TRAV12-3, TRAJ10)
RHLPLTGGGNKLTF

SEQ ID NO: 36524 - protein, 14 aa, Homo sapiens
  CDR3 for beta chain variable domain of TCR clone 18262 (TRBV6-1, TRBJ1-3)
CASVQGGGGNTIYF

SEQ ID NO: 36525 - protein, 18 aa, Homo sapiens
  CDR3 for alpha chain variable domain of TCR clone 18263 (TRAV9-2, TRAJ52)
CALSRHNAGGTSYGKLTF

SEQ ID NO: 36526 - protein, 13 aa, Homo sapiens
  CDR3 for beta chain variable domain of TCR clone 18263 (TRBV7-9, TRBJ1-2)
CASSLKQNYGDTF

SEQ ID NO: 36527 - protein, 13 aa, Homo sapiens
  CDR3 for alpha chain variable domain of TCR clone 18264 (TRAV2, TRAJ40)
CAVVTSGTYKYIF

SEQ ID NO: 36528 - protein, 14 aa, Homo sapiens
  CDR3 for beta chain variable domain of TCR clone 18264 (TRBV11-3, TRBJ2-3)
CSLKDGREGDTQYF

SEQ ID NO: 36529 - protein, 13 aa, Homo sapiens
  CDR3 for alpha chain variable domain of TCR clone 18265 (TRAV8-3, TRAJ28)
YAVGAVGSYQLTF

SEQ ID NO: 36530 - protein, 14 aa, Homo sapiens
  CDR3 for beta chain variable domain of TCR clone 18265 (TRBV7-2, TRBJ2-7)
CASRSQGAAYEQYF

SEQ ID NO: 36531 - protein, 23 aa, Homo sapiens
  CDR3 for alpha chain variable domain of TCR clone 18266 (TRAV26-1, )
CIADNAGSNHIQNPDPAVYQLRD

SEQ ID NO: 36532 - protein, 13 aa, Homo sapiens
  CDR3 for beta chain variable domain of TCR clone 18266 (TRBV20-1, TRBJ1-1)
CSARGGGNTEAFF

SEQ ID NO: 36533 - protein, 12 aa, Homo sapiens
  CDR3 for alpha chain variable domain of TCR clone 18267 (TRAV1-2, TRAJ33)
CAAPDSNYQLIW

SEQ ID NO: 36534 - protein, 17 aa, Homo sapiens
  CDR3 for beta chain variable domain of TCR clone 18267 (TRBV25-1, TRBJ1-2)
CASSEFGSATTNYGYTF

SEQ ID NO: 36535 - protein, 15 aa, Homo sapiens
  CDR3 for alpha chain variable domain of TCR clone 18268 (TRAV12-3, TRAJ6)
CAMSATTGGSYIPTF

SEQ ID NO: 36536 - protein, 16 aa, Homo sapiens
  CDR3 for beta chain variable domain of TCR clone 18268 (TRBV20-1, TRBJ1-2)
CSASMGQGVANYGYTV

SEQ ID NO: 36537 - protein, 10 aa, Homo sapiens
  CDR3 for alpha chain variable domain of TCR clone 18269 (TRAV23/DV6, TRAJ57)
CAASSTLSLG

SEQ ID NO: 36538 - protein, 14 aa, Homo sapiens
  CDR3 for beta chain variable domain of TCR clone 18269 (TRBV25-1, TRBJ1-1)
CASTHLGGNTEAFF

SEQ ID NO: 36539 - protein, 14 aa, Homo sapiens
  CDR3 for alpha chain variable domain of TCR clone 18270 (TRAV1-2, TRAJ8)
CAVREDTGFQKLVF

SEQ ID NO: 36540 - protein, 13 aa, Homo sapiens
  CDR3 for beta chain variable domain of TCR clone 18270 (TRBV7-2, TRBJ2-7)
CASSSPSGSEQYF

SEQ ID NO: 36541 - protein, 18 aa, Homo sapiens
  CDR3 for alpha chain variable domain of TCR clone 18271 (TRAV12-3, TRAJ52)
CAMSRTNAGGTSYGKLAF

SEQ ID NO: 36542 - protein, 17 aa, Homo sapiens
  CDR3 for beta chain variable domain of TCR clone 18271 (TRBV7-3, TRBJ2-3)
CASSLMKRMRGADTQYF

SEQ ID NO: 36543 - protein, 14 aa, Homo sapiens
  CDR3 for alpha chain variable domain of TCR clone 18272 (TRAV13-1, TRAJ35)
CAASKEGFGNVLHC

SEQ ID NO: 36544 - protein, 13 aa, Homo sapiens
  CDR3 for beta chain variable domain of TCR clone 18272 (TRBV7-3, TRBJ1-1)
CASSQDWGAEAFF

SEQ ID NO: 36545 - protein, 17 aa, Homo sapiens
  CDR3 for alpha chain variable domain of TCR clone 18273 (TRAV3, TRAJ38)
CAVRDCLNAGNNRKLIC

SEQ ID NO: 36546 - protein, 14 aa, Homo sapiens
  CDR3 for beta chain variable domain of TCR clone 18273 (TRBV5-5, TRBJ1-5)
CASSGQGVDQPQHF

SEQ ID NO: 36547 - protein, 15 aa, Homo sapiens
  CDR3 for alpha chain variable domain of TCR clone 18274 (TRAV38-1, TRAJ37)
CAFIFGSGNTGKLIF

SEQ ID NO: 36548 - protein, 12 aa, Homo sapiens
  CDR3 for beta chain variable domain of TCR clone 18274 (TRBV7-9, TRBJ2-7)
CASSLGGYEQYF

SEQ ID NO: 36549 - protein, 14 aa, Homo sapiens
  CDR3 for alpha chain variable domain of TCR clone 18275 (TRAV1-2, TRAJ16)
CAVNRFSDGQKLLF

SEQ ID NO: 36550 - protein, 14 aa, Homo sapiens
  CDR3 for beta chain variable domain of TCR clone 18275 (TRBV6-1, TRBJ1-3)
CASVQGGGGNAIYF

SEQ ID NO: 36551 - protein, 14 aa, Homo sapiens
  CDR3 for alpha chain variable domain of TCR clone 18276 (TRAV1-2, TRAJ8)
CDVREDTGFQKLVF

SEQ ID NO: 36552 - protein, 15 aa, Homo sapiens
  CDR3 for beta chain variable domain of TCR clone 18276 (TRBV6-3, TRBJ2-7)
CASSSPGTVFYEQYF

SEQ ID NO: 36553 - protein, 14 aa, Homo sapiens
  CDR3 for alpha chain variable domain of TCR clone 18277 (TRAV38-1, TRAJ45)
CAYYSGGGADGLTF

SEQ ID NO: 36554 - protein, 20 aa, Homo sapiens
  CDR3 for beta chain variable domain of TCR clone 18277 (TRBV28, TRBJ2-1)
CAGTPIGRSPGLAGGNEQFF

SEQ ID NO: 36555 - protein, 11 aa, Homo sapiens
  CDR3 for alpha chain variable domain of TCR clone 18278 (TRAV2, TRAJ13)
CASGGYQKVTS

SEQ ID NO: 36556 - protein, 16 aa, Homo sapiens
  CDR3 for beta chain variable domain of TCR clone 18278 (TRBV2, TRBJ2-1)
CASSVGGSLSYNEQFF

SEQ ID NO: 36557 - protein, 12 aa, Homo sapiens
  CDR3 for alpha chain variable domain of TCR clone 18279 (TRAV8-3, TRAJ20)
CAVGANDYKLSF

SEQ ID NO: 36558 - protein, 16 aa, Homo sapiens
  CDR3 for beta chain variable domain of TCR clone 18279 (TRBV19, TRBJ2-2)
CDSRSPGTGATGELFF

SEQ ID NO: 36559 - protein, 12 aa, Homo sapiens
  CDR3 for alpha chain variable domain of TCR clone 18280 (TRAV13-2, TRAJ8)
CAPWLGFQKLVF

SEQ ID NO: 36560 - protein, 15 aa, Homo sapiens
  CDR3 for beta chain variable domain of TCR clone 18280 (TRBV10-3, TRBJ2-3)
CAISLTSGGTDTQYF

SEQ ID NO: 36561 - protein, 16 aa, Homo sapiens
  CDR3 for alpha chain variable domain of TCR clone 18281 (TRAV21, TRAJ37)
CAVRTAGSSNTGKLIF

SEQ ID NO: 36562 - protein, 13 aa, Homo sapiens
  CDR3 for beta chain variable domain of TCR clone 18281 (TRBV7-9, TRBJ2-5)
CASLPSGRETHYF

SEQ ID NO: 36563 - protein, 16 aa, Homo sapiens
  CDR3 for alpha chain variable domain of TCR clone 18282 (TRAV1-2, TRAJ10)
CAVRGVLTGGGNKLTF

SEQ ID NO: 36564 - protein, 10 aa, Homo sapiens
  CDR3 for beta chain variable domain of TCR clone 18282 (TRBV29-1, TRBJ1-2)
CSVFSAGYTF

SEQ ID NO: 36565 - protein, 16 aa, Homo sapiens
  CDR3 for alpha chain variable domain of TCR clone 18283 (TRAV26-1, TRAJ53)
CIVRVAMGGSNYKLTF

SEQ ID NO: 36566 - protein, 12 aa, Homo sapiens
  CDR3 for beta chain variable domain of TCR clone 18283 (TRBV7-9, TRBJ1-5)
CASSPQGQAQHF

SEQ ID NO: 36567 - protein, 15 aa, Homo sapiens
  CDR3 for alpha chain variable domain of TCR clone 18284 (TRAV3, TRAJ22)
CAVRDRGGSARQLTF

SEQ ID NO: 36568 - protein, 20 aa, Homo sapiens
  CDR3 for beta chain variable domain of TCR clone 18284 (TRBV11-2, TRBJ1-6)
CASSLVFATGGSVHPSTLGT

SEQ ID NO: 36569 - protein, 15 aa, Homo sapiens
  CDR3 for alpha chain variable domain of TCR clone 18285 (TRAV2, TRAJ24)
CAVVRLKNSWGKLQF

SEQ ID NO: 36570 - protein, 16 aa, Homo sapiens
  CDR3 for beta chain variable domain of TCR clone 18285 (TRBV7-7, TRBJ2-3)
CASNPGTSGSTDTQYF

SEQ ID NO: 36571 - protein, 12 aa, Homo sapiens
  CDR3 for alpha chain variable domain of TCR clone 18286 (TRAV2, TRAJ31)
CAVEDNNARLMC

SEQ ID NO: 36572 - protein, 16 aa, Homo sapiens
  CDR3 for beta chain variable domain of TCR clone 18286 (TRBV10-3, TRBJ2-1)
CAISGVGDGGGGEQFF

SEQ ID NO: 36573 - protein, 14 aa, Homo sapiens
  CDR3 for alpha chain variable domain of TCR clone 18287 (TRAV1-2, TRAJ8)
YAVREDTGFQKLVF

SEQ ID NO: 36574 - protein, 13 aa, Homo sapiens
  CDR3 for beta chain variable domain of TCR clone 18287 (TRBV24-1, TRBJ2-2)
CATSDWSTGELFF

SEQ ID NO: 36575 - protein, 14 aa, Homo sapiens
  CDR3 for alpha chain variable domain of TCR clone 18288 (TRAV26-1, TRAJ21)
CIVRVVYNFNKFYF

SEQ ID NO: 36576 - protein, 11 aa, Homo sapiens
  CDR3 for beta chain variable domain of TCR clone 18288 (TRBV5-7, TRBJ2-5)
CASSLERTQYF

SEQ ID NO: 36577 - protein, 11 aa, Homo sapiens
  CDR3 for alpha chain variable domain of TCR clone 18289 (TRAV21, TRAJ39)
LLVNAGNMLTF

SEQ ID NO: 36578 - protein, 15 aa, Homo sapiens
  CDR3 for beta chain variable domain of TCR clone 18289 (TRBV11-3, TRBJ2-3)
CASLKDGREGDTQYF

SEQ ID NO: 36579 - protein, 13 aa, Homo sapiens
  CDR3 for alpha chain variable domain of TCR clone 18290 (TRAV35, TRAJ42)
CAGFPGSQGNLIF

SEQ ID NO: 36580 - protein, 13 aa, Homo sapiens
  CDR3 for beta chain variable domain of TCR clone 18290 (TRBV29-1, TRBJ2-1)
CSVEGGGVNEQFF

SEQ ID NO: 36581 - protein, 12 aa, Homo sapiens
  CDR3 for alpha chain variable domain of TCR clone 18291 (TRAV12-2, TRAJ30)
RAVRNRDDKIIF

SEQ ID NO: 36582 - protein, 15 aa, Homo sapiens
  CDR3 for beta chain variable domain of TCR clone 18291 (TRBV6-3, TRBJ1-5)
CASRVDRWSNQPQHF

SEQ ID NO: 36583 - protein, 15 aa, Homo sapiens
  CDR3 for alpha chain variable domain of TCR clone 18292 (TRAV26-1, TRAJ48)
CTARWSWFGNEKLTF

SEQ ID NO: 36584 - protein, 12 aa, Homo sapiens
  CDR3 for beta chain variable domain of TCR clone 18292 (TRBV19, TRBJ2-5)
CASSISEETQYF

SEQ ID NO: 36585 - protein, 13 aa, Homo sapiens
  CDR3 for alpha chain variable domain of TCR clone 18293 (TRAV2, TRAJ40)
CAVVTSGTYKYIF

SEQ ID NO: 36586 - protein, 15 aa, Homo sapiens
  CDR3 for beta chain variable domain of TCR clone 18293 (TRBV28, TRBJ2-7)
CASSRWDRGSYEQYF

SEQ ID NO: 36587 - protein, 13 aa, Homo sapiens
  CDR3 for alpha chain variable domain of TCR clone 18294 (TRAV27, TRAJ49)
CAPRPYPGNQFYF

SEQ ID NO: 36588 - protein, 16 aa, Homo sapiens
  CDR3 for beta chain variable domain of TCR clone 18294 (TRBV4-1, TRBJ1-2)
CASSQDAGQVLYGYTF

SEQ ID NO: 36589 - protein, 12 aa, Homo sapiens
  CDR3 for alpha chain variable domain of TCR clone 18295 (TRAV8-3, TRAJ20)
CAVGANDYKLSF

SEQ ID NO: 36590 - protein, 16 aa, Homo sapiens
  CDR3 for beta chain variable domain of TCR clone 18295 (TRBV19, TRBJ2-2)
CASRSPGIGATGELFF

SEQ ID NO: 36591 - protein, 13 aa, Homo sapiens
  CDR3 for alpha chain variable domain of TCR clone 18296 (TRAV26-2, TRAJ43)
CILRAVNNNDMRF

SEQ ID NO: 36592 - protein, 18 aa, Homo sapiens
  CDR3 for beta chain variable domain of TCR clone 18296 (TRBV11-2, TRBJ2-3)
CASSLGGASRGAPNTQYF

SEQ ID NO: 36593 - protein, 14 aa, Homo sapiens
  CDR3 for alpha chain variable domain of TCR clone 18297 (TRAV35, TRAJ33)
CAGSSQYSNYQLIW

SEQ ID NO: 36594 - protein, 15 aa, Homo sapiens
  CDR3 for beta chain variable domain of TCR clone 18297 (TRBV20-1, TRBJ2-7)
CSAESGTSGAYEQYF

SEQ ID NO: 36595 - protein, 15 aa, Homo sapiens
  CDR3 for alpha chain variable domain of TCR clone 18298 (TRAV26-1, TRAJ29)
CIVRVEGTGNTPLVF

SEQ ID NO: 36596 - protein, 14 aa, Homo sapiens
  CDR3 for beta chain variable domain of TCR clone 18298 (TRBV18, TRBJ2-5)
CASSPGVSQETQYF

SEQ ID NO: 36597 - protein, 15 aa, Homo sapiens
  CDR3 for alpha chain variable domain of TCR clone 18299 (TRAV27, TRAJ38)
CAARRNSGNNRKLIW

SEQ ID NO: 36598 - protein, 13 aa, Homo sapiens
  CDR3 for beta chain variable domain of TCR clone 18299 (TRBV12-5, TRBJ2-3)
CASGDRQSDTQYF

SEQ ID NO: 36599 - protein, 14 aa, Homo sapiens
  CDR3 for alpha chain variable domain of TCR clone 18300 (TRAV29/DV5, TRAJ45)
CAASFRGGADGLTL

SEQ ID NO: 36600 - protein, 11 aa, Homo sapiens
  CDR3 for beta chain variable domain of TCR clone 18300 (TRBV11-2, TRBJ2-2)
CASSLPGELFF

SEQ ID NO: 36601 - protein, 15 aa, Homo sapiens
  CDR3 for alpha chain variable domain of TCR clone 18301 (TRAV1-2, TRAJ35)
CAVRDPGGFGNVLHC

SEQ ID NO: 36602 - protein, 14 aa, Homo sapiens
  CDR3 for beta chain variable domain of TCR clone 18301 (TRBV5-1, TRBJ2-1)
CASSLDDRFDEQFF

SEQ ID NO: 36603 - protein, 13 aa, Homo sapiens
  CDR3 for alpha chain variable domain of TCR clone 18302 (TRAV12-2, TRAJ20)
CAVYPPNDYKLSF

SEQ ID NO: 36604 - protein, 15 aa, Homo sapiens
  CDR3 for beta chain variable domain of TCR clone 18302 (TRBV27, TRBJ2-5)
CASSLYPRGGETQYF

SEQ ID NO: 36605 - protein, 14 aa, Homo sapiens
  CDR3 for alpha chain variable domain of TCR clone 18303 (TRAV12-2, TRAJ13)
CAVKKTGGYQKVTF

SEQ ID NO: 36606 - protein, 15 aa, Homo sapiens
  CDR3 for beta chain variable domain of TCR clone 18303 (TRBV27, TRBJ2-1)
FASSNGGGSSNEQFF

SEQ ID NO: 36607 - protein, 16 aa, Homo sapiens
  CDR3 for alpha chain variable domain of TCR clone 18304 (TRAV16, TRAJ52)
CALSGVGGTGYGKLTF

SEQ ID NO: 36608 - protein, 14 aa, Homo sapiens
  CDR3 for beta chain variable domain of TCR clone 18304 (TRBV19, TRBJ1-2)
CASSLQGQAYGYTF

SEQ ID NO: 36609 - protein, 15 aa, Homo sapiens
  CDR3 for alpha chain variable domain of TCR clone 18305 (TRAV2, TRAJ3)
CAVEDAYSSASKIIF

SEQ ID NO: 36610 - protein, 15 aa, Homo sapiens
  CDR3 for beta chain variable domain of TCR clone 18305 (TRBV6-3, TRBJ1-3)
CASRGGGSSGNTIYF

SEQ ID NO: 36611 - protein, 11 aa, Homo sapiens
  CDR3 for alpha chain variable domain of TCR clone 18306 (TRAV1-1, TRAJ23)
CAVSQGGKLIF

SEQ ID NO: 36612 - protein, 20 aa, Homo sapiens
  CDR3 for beta chain variable domain of TCR clone 18306 (TRBV7-8, TRBJ2-2)
CASSHLFPGPTIHITGELFF

SEQ ID NO: 36613 - protein, 14 aa, Homo sapiens
  CDR3 for alpha chain variable domain of TCR clone 18307 (TRAV16, TRAJ33)
CALSAMDSNYKLIW

SEQ ID NO: 36614 - protein, 12 aa, Homo sapiens
  CDR3 for beta chain variable domain of TCR clone 18307 (TRBV5-1, TRBJ1-2)
CASSQDTYGYTF

SEQ ID NO: 36615 - protein, 13 aa, Homo sapiens
  CDR3 for alpha chain variable domain of TCR clone 18308 (TRAV12-3, TRAJ7)
CAMTPYGNNRLAF

SEQ ID NO: 36616 - protein, 15 aa, Homo sapiens
  CDR3 for beta chain variable domain of TCR clone 18308 (TRBV29-1, TRBJ2-7)
CSVEFFDRGSYEQYF

SEQ ID NO: 36617 - protein, 17 aa, Homo sapiens
  CDR3 for alpha chain variable domain of TCR clone 18309 (TRAV26-1, TRAJ53)
CIVRVDDSGGSNYKLTL

SEQ ID NO: 36618 - protein, 15 aa, Homo sapiens
  CDR3 for beta chain variable domain of TCR clone 18309 (TRBV20-1, TRBJ2-7)
CSARVPAAYFYEQYF

SEQ ID NO: 36619 - protein, 11 aa, Homo sapiens
  CDR3 for alpha chain variable domain of TCR clone 18310 (TRAV16, TRAJ49)
CALGTGNQFYF

SEQ ID NO: 36620 - protein, 17 aa, Homo sapiens
  CDR3 for beta chain variable domain of TCR clone 18310 (TRBV6-5, TRBJ2-1)
CASRKNPRTGGHNEQFF

SEQ ID NO: 36621 - protein, 16 aa, Homo sapiens
  CDR3 for alpha chain variable domain of TCR clone 18311 (TRAV1-2, TRAJ10)
CAVRVVLTGGGNKLTF

SEQ ID NO: 36622 - protein, 12 aa, Homo sapiens
  CDR3 for beta chain variable domain of TCR clone 18311 (TRBV7-8, TRBJ2-7)
CASSLGDREQYF

SEQ ID NO: 36623 - protein, 17 aa, Homo sapiens
  CDR3 for alpha chain variable domain of TCR clone 18312 (TRAV13-1, TRAJ31)
CAPRDRLMFGDGTQLVV

SEQ ID NO: 36624 - protein, 12 aa, Homo sapiens
  CDR3 for beta chain variable domain of TCR clone 18312 (TRBV7-9, TRBJ2-7)
CASSLGGYEQYF

SEQ ID NO: 36625 - protein, 17 aa, Homo sapiens
  CDR3 for alpha chain variable domain of TCR clone 18313 (TRAV12-2, TRAJ52)
CAVNKGAGGTSYGKLTF

SEQ ID NO: 36626 - protein, 16 aa, Homo sapiens
  CDR3 for beta chain variable domain of TCR clone 18313 (TRBV2, TRBJ1-5)
CASGSTGSNFGQPQHF

SEQ ID NO: 36627 - protein, 14 aa, Homo sapiens
  CDR3 for alpha chain variable domain of TCR clone 18314 (TRAV12-3, TRAJ9)
CAMSPNTGGFKTIF

SEQ ID NO: 36628 - protein, 12 aa, Homo sapiens
  CDR3 for beta chain variable domain of TCR clone 18314 (TRBV19, TRBJ1-5)
CASSIAQQAQHF

SEQ ID NO: 36629 - protein, 18 aa, Homo sapiens
  CDR3 for alpha chain variable domain of TCR clone 18315 (TRAV29/DV5, TRAJ52)
WAAGFRGAGGTSYGKLTF

SEQ ID NO: 36630 - protein, 16 aa, Homo sapiens
  CDR3 for beta chain variable domain of TCR clone 18315 (TRBV7-3, TRBJ2-2)
CASSLKRGTLSGELFF

SEQ ID NO: 36631 - protein, 14 aa, Homo sapiens
  CDR3 for alpha chain variable domain of TCR clone 18316 (TRAV2, TRAJ37)
CAVDFTSNTGKLIF

SEQ ID NO: 36632 - protein, 15 aa, Homo sapiens
  CDR3 for beta chain variable domain of TCR clone 18316 (TRBV20-1, TRBJ1-1)
CSASRGVKGNTEAFF

SEQ ID NO: 36633 - protein, 15 aa, Homo sapiens
  CDR3 for alpha chain variable domain of TCR clone 18317 (TRAV8-3, TRAJ41)
CAVGSNPNSGYALNF

SEQ ID NO: 36634 - protein, 17 aa, Homo sapiens
  CDR3 for beta chain variable domain of TCR clone 18317 (TRBV25-1, TRBJ2-1)
CASSAYGQGRGVYEQFF

SEQ ID NO: 36635 - protein, 16 aa, Homo sapiens
  CDR3 for alpha chain variable domain of TCR clone 18318 (TRAV16, TRAJ4)
CALSRMFSGGYNKLLF

SEQ ID NO: 36636 - protein, 16 aa, Homo sapiens
  CDR3 for beta chain variable domain of TCR clone 18318 (TRBV24-1, TRBJ2-3)
CATSDPGTGATDTQYF

SEQ ID NO: 36637 - protein, 13 aa, Homo sapiens
  CDR3 for alpha chain variable domain of TCR clone 18319 (TRAV35, TRAJ42)
CAGFPGSQGNLIF

SEQ ID NO: 36638 - protein, 14 aa, Homo sapiens
  CDR3 for beta chain variable domain of TCR clone 18319 (TRBV4-1, TRBJ2-2)
CASSQAVSTGELFF

SEQ ID NO: 36639 - protein, 14 aa, Homo sapiens
  CDR3 for alpha chain variable domain of TCR clone 18320 (TRAV8-3, TRAJ4)
CAVGAAGGYNKLIF

SEQ ID NO: 36640 - protein, 16 aa, Homo sapiens
  CDR3 for beta chain variable domain of TCR clone 18320 (TRBV7-3, TRBJ2-2)
CASSLKRGTLSGELFF

SEQ ID NO: 36641 - protein, 15 aa, Homo sapiens
  CDR3 for alpha chain variable domain of TCR clone 18321 (TRAV3, TRAJ47)
CAVRDIGEYGNKLVF

SEQ ID NO: 36642 - protein, 14 aa, Homo sapiens
  CDR3 for beta chain variable domain of TCR clone 18321 (TRBV13, TRBJ2-5)
CASSLERVGETQYL

SEQ ID NO: 36643 - protein, 12 aa, Homo sapiens
  CDR3 for alpha chain variable domain of TCR clone 18322 (TRAV13-2, TRAJ23)
CAERHRGGKPIF

SEQ ID NO: 36644 - protein, 15 aa, Homo sapiens
  CDR3 for beta chain variable domain of TCR clone 18322 (TRBV9, TRBJ1-6)
CASSVAGTGDSPLHF

SEQ ID NO: 36645 - protein, 16 aa, Homo sapiens
  CDR3 for alpha chain variable domain of TCR clone 18323 (TRAV3, TRAJ37)
CAVRPHGSGNTGKLIF

SEQ ID NO: 36646 - protein, 16 aa, Homo sapiens
  CDR3 for beta chain variable domain of TCR clone 18323 (TRBV9, TRBJ1-2)
CASSVEEKVSPYGYTL

SEQ ID NO: 36647 - protein, 13 aa, Homo sapiens
  CDR3 for alpha chain variable domain of TCR clone 18324 (TRAV2, TRAJ21)
CAVEDLNFNKFYF

SEQ ID NO: 36648 - protein, 15 aa, Homo sapiens
  CDR3 for beta chain variable domain of TCR clone 18324 (TRBV28, TRBJ2-5)
CASSPGQGSIETQYF

SEQ ID NO: 36649 - protein, 15 aa, Homo sapiens
  CDR3 for alpha chain variable domain of TCR clone 18325 (TRAV26-1, TRAJ29)
CIVRVEGSGNAPLVF

SEQ ID NO: 36650 - protein, 13 aa, Homo sapiens
  CDR3 for beta chain variable domain of TCR clone 18325 (TRBV28, TRBJ1-1)
CASSKQGWTEAFF

SEQ ID NO: 36651 - protein, 10 aa, Homo sapiens
  CDR3 for alpha chain variable domain of TCR clone 18326 (TRAV26-1, TRAJ40)
CIAGTYKYIL

SEQ ID NO: 36652 - protein, 15 aa, Homo sapiens
  CDR3 for beta chain variable domain of TCR clone 18326 (TRBV19, TRBJ2-1)
CASSSPGVPLDEQFF

SEQ ID NO: 36653 - protein, 13 aa, Homo sapiens
  CDR3 for alpha chain variable domain of TCR clone 18327 (TRAV21, TRAJ27)
CAARPGNAGKSTF

SEQ ID NO: 36654 - protein, 14 aa, Homo sapiens
  CDR3 for beta chain variable domain of TCR clone 18327 (TRBV7-6, TRBJ2-3)
CASSLRTVTDTQYF

SEQ ID NO: 36655 - protein, 14 aa, Homo sapiens
  CDR3 for alpha chain variable domain of TCR clone 18328 (TRAV1-2, TRAJ6)
CAVSLSGGSYIPTF

SEQ ID NO: 36656 - protein, 15 aa, Homo sapiens
  CDR3 for beta chain variable domain of TCR clone 18328 (TRBV28, TRBJ2-7)
CASSPGGRGLYEQYF

SEQ ID NO: 36657 - protein, 14 aa, Homo sapiens
  CDR3 for alpha chain variable domain of TCR clone 18329 (TRAV12-2, TRAJ17)
CAVLFKAAGNKLTF

SEQ ID NO: 36658 - protein, 15 aa, Homo sapiens
  CDR3 for beta chain variable domain of TCR clone 18329 (TRBV28, TRBJ2-1)
CASSIIAGGRSEQFF

SEQ ID NO: 36659 - protein, 12 aa, Homo sapiens
  CDR3 for alpha chain variable domain of TCR clone 18330 (TRAV30, TRAJ39)
CGRGNAGNMLTF

SEQ ID NO: 36660 - protein, 15 aa, Homo sapiens
  CDR3 for beta chain variable domain of TCR clone 18330 (TRBV5-1, TRBJ1-1)
CASSWTGRENTEAFF

SEQ ID NO: 36661 - protein, 12 aa, Homo sapiens
  CDR3 for alpha chain variable domain of TCR clone 18331 (TRAV12-3, TRAJ40)
CAMSSGTYKYIF

SEQ ID NO: 36662 - protein, 10 aa, Homo sapiens
  CDR3 for beta chain variable domain of TCR clone 18331 (TRBV7-3, TRBJ2-2)
CASSETGQGT

SEQ ID NO: 36663 - protein, 16 aa, Homo sapiens
  CDR3 for alpha chain variable domain of TCR clone 18332 (TRAV3, TRAJ18)
CAVRDGRGSTLGRLYF

SEQ ID NO: 36664 - protein, 15 aa, Homo sapiens
  CDR3 for beta chain variable domain of TCR clone 18332 (TRBV7-9, TRBJ1-6)
CASSSPGRGNSTLHF

SEQ ID NO: 36665 - protein, 17 aa, Homo sapiens
  CDR3 for alpha chain variable domain of TCR clone 18333 (TRAV3, TRAJ6)
CAVRDGPRAGGSYIPTF

SEQ ID NO: 36666 - protein, 12 aa, Homo sapiens
  CDR3 for beta chain variable domain of TCR clone 18333 (TRBV11-2, TRBJ2-2)
CASSLPTGELFF

SEQ ID NO: 36667 - protein, 16 aa, Homo sapiens
  CDR3 for alpha chain variable domain of TCR clone 18334 (TRAV3, TRAJ37)
CAVSGKGSGNTGKLIF

SEQ ID NO: 36668 - protein, 13 aa, Homo sapiens
  CDR3 for beta chain variable domain of TCR clone 18334 (TRBV14, TRBJ2-7)
CASSQDRRYEQYF

SEQ ID NO: 36669 - protein, 15 aa, Homo sapiens
  CDR3 for alpha chain variable domain of TCR clone 18335 (TRAV9-2, TRAJ11)
CALSDGNSGYSTLTF

SEQ ID NO: 36670 - protein, 15 aa, Homo sapiens
  CDR3 for beta chain variable domain of TCR clone 18335 (TRBV2, TRBJ2-1)
CASSETGGNYNEQFF

SEQ ID NO: 36671 - protein, 16 aa, Homo sapiens
  CDR3 for alpha chain variable domain of TCR clone 18336 (TRAV12-3, TRAJ53)
CAMSPGSGGSNYKLTF

SEQ ID NO: 36672 - protein, 11 aa, Homo sapiens
  CDR3 for beta chain variable domain of TCR clone 18336 (TRBV29-1, TRBJ2-5)
CSEYRTGTQYF

SEQ ID NO: 36673 - protein, 13 aa, Homo sapiens
  CDR3 for alpha chain variable domain of TCR clone 18337 (TRAV2, TRAJ40)
CAVVTSGTYKYIF

SEQ ID NO: 36674 - protein, 19 aa, Homo sapiens
  CDR3 for beta chain variable domain of TCR clone 18337 (TRBV25-1, TRBJ2-2)
CAILVYRVDRGRKTGELFF

SEQ ID NO: 36675 - protein, 11 aa, Homo sapiens
  CDR3 for alpha chain variable domain of TCR clone 18338 (TRAV2, TRAJ13)
CASGGYQKVTF

SEQ ID NO: 36676 - protein, 18 aa, Homo sapiens
  CDR3 for beta chain variable domain of TCR clone 18338 (TRBV12-4, TRBJ2-2)
CASSLVAGTRGRTGELFF

SEQ ID NO: 36677 - protein, 14 aa, Homo sapiens
  CDR3 for alpha chain variable domain of TCR clone 18339 (TRAV1-2, TRAJ16)
CAVNRFSDGQKMLF

SEQ ID NO: 36678 - protein, 15 aa, Homo sapiens
  CDR3 for beta chain variable domain of TCR clone 18339 (TRBV7-9, TRBJ1-6)
CASSSPGRGNSPLHF

SEQ ID NO: 36679 - protein, 10 aa, Homo sapiens
  CDR3 for alpha chain variable domain of TCR clone 18340 (TRAV23/DV6, TRAJ57)
CAASSTLSQG

SEQ ID NO: 36680 - protein, 14 aa, Homo sapiens
  CDR3 for beta chain variable domain of TCR clone 18340 (TRBV25-1, TRBJ1-1)
CASTHLGENTEAFF

SEQ ID NO: 36681 - protein, 14 aa, Homo sapiens
  CDR3 for alpha chain variable domain of TCR clone 18341 (TRAV12-2, TRAJ13)
CAVKKTGGYQKVTF

SEQ ID NO: 36682 - protein, 20 aa, Homo sapiens
  CDR3 for beta chain variable domain of TCR clone 18341 (TRBV28, TRBJ2-1)
CASTPIGRSPGLAGGNEQFF

SEQ ID NO: 36683 - protein, 14 aa, Homo sapiens
  CDR3 for alpha chain variable domain of TCR clone 18342 (TRAV1-2, TRAJ16)
CAVNRFSDGQKLLF

SEQ ID NO: 36684 - protein, 15 aa, Homo sapiens
  CDR3 for beta chain variable domain of TCR clone 18342 (TRBV28, TRBJ2-5)
CASSPPWSYQETQYF

SEQ ID NO: 36685 - protein, 16 aa, Homo sapiens
  CDR3 for alpha chain variable domain of TCR clone 18343 (TRAV1-2, TRAJ10)
CAVRGVLTGGGNNLTF

SEQ ID NO: 36686 - protein, 12 aa, Homo sapiens
  CDR3 for beta chain variable domain of TCR clone 18343 (TRBV7-8, TRBJ2-7)
CASSLGDREQYF

SEQ ID NO: 36687 - protein, 18 aa, Homo sapiens
  CDR3 for alpha chain variable domain of TCR clone 18344 (TRAV13-1, TRAJ52)
CAASKRSAVGTSYGKLTF

SEQ ID NO: 36688 - protein, 13 aa, Homo sapiens
  CDR3 for beta chain variable domain of TCR clone 18344 (TRBV12-4, TRBJ1-2)
CASSLRQGKGYTF

SEQ ID NO: 36689 - protein, 11 aa, Homo sapiens
  CDR3 for alpha chain variable domain of TCR clone 18345 (TRAV21, TRAJ11)
RAVNGYSTLTF

SEQ ID NO: 36690 - protein, 11 aa, Homo sapiens
  CDR3 for beta chain variable domain of TCR clone 18345 (TRBV19, TRBJ1-1)
CASSIGSEAFF

SEQ ID NO: 36691 - protein, 11 aa, Homo sapiens
  CDR3 for alpha chain variable domain of TCR clone 18346 (TRAV3, TRAJ21)
CAVGIFNKFYF

SEQ ID NO: 36692 - protein, 16 aa, Homo sapiens
  CDR3 for beta chain variable domain of TCR clone 18346 (TRBV19, TRBJ2-1)
CASSKAGPSSYNEQFF

SEQ ID NO: 36693 - protein, 12 aa, Homo sapiens
  CDR3 for alpha chain variable domain of TCR clone 18347 (TRAV12-1, TRAJ40)
CLVYSGTYKYIF

SEQ ID NO: 36694 - protein, 18 aa, Homo sapiens
  CDR3 for beta chain variable domain of TCR clone 18347 (TRBV11-2, TRBJ2-3)
CASSLGGASRGAPNTQYF

SEQ ID NO: 36695 - protein, 14 aa, Homo sapiens
  CDR3 for alpha chain variable domain of TCR clone 18348 (TRAV21, TRAJ35)
CAVMPICFGNVLHC

SEQ ID NO: 36696 - protein, 12 aa, Homo sapiens
  CDR3 for beta chain variable domain of TCR clone 18348 (TRBV7-9, TRBJ2-7)
CASSIKREEQYF

SEQ ID NO: 36697 - protein, 13 aa, Homo sapiens
  CDR3 for alpha chain variable domain of TCR clone 18349 (TRAV20, TRAJ15)
CATINQAGTALIF

SEQ ID NO: 36698 - protein, 13 aa, Homo sapiens
  CDR3 for beta chain variable domain of TCR clone 18349 (TRBV12-4, TRBJ2-1)
CASRQPSNDEQFF

SEQ ID NO: 36699 - protein, 14 aa, Homo sapiens
  CDR3 for alpha chain variable domain of TCR clone 18350 (TRAV3, TRAJ22)
CVVRDYGSARQLTF

SEQ ID NO: 36700 - protein, 13 aa, Homo sapiens
  CDR3 for beta chain variable domain of TCR clone 18350 (TRBV11-2, TRBJ2-5)
CASGHGAKETQYF

SEQ ID NO: 36701 - protein, 14 aa, Homo sapiens
  CDR3 for alpha chain variable domain of TCR clone 18351 (TRAV8-2, TRAJ4)
CVVSPSGGYNKLIF

SEQ ID NO: 36702 - protein, 15 aa, Homo sapiens
  CDR3 for beta chain variable domain of TCR clone 18351 (TRBV2, TRBJ2-1)
CASSEARSAYNEQFF

SEQ ID NO: 36703 - protein, 11 aa, Homo sapiens
  CDR3 for alpha chain variable domain of TCR clone 18352 (TRAV12-3, TRAJ43)
CAMSVSNDMRF

SEQ ID NO: 36704 - protein, 13 aa, Homo sapiens
  CDR3 for beta chain variable domain of TCR clone 18352 (TRBV20-1, TRBJ1-1)
CSATLGGGTEAFF

SEQ ID NO: 36705 - protein, 14 aa, Homo sapiens
  CDR3 for alpha chain variable domain of TCR clone 18353 (TRAV2, TRAJ37)
CAVDFTSNPGKLIF

SEQ ID NO: 36706 - protein, 15 aa, Homo sapiens
  CDR3 for beta chain variable domain of TCR clone 18353 (TRBV20-1, TRBJ1-1)
CSASRGVTGNTEAFF

SEQ ID NO: 36707 - protein, 14 aa, Homo sapiens
  CDR3 for alpha chain variable domain of TCR clone 18354 (TRAV12-1, TRAJ12)
RVVTRMDSSYKLIF

SEQ ID NO: 36708 - protein, 13 aa, Homo sapiens
  CDR3 for beta chain variable domain of TCR clone 18354 (TRBV20-1, TRBJ1-1)
CSARGGGNTEAFF

SEQ ID NO: 36709 - protein, 12 aa, Homo sapiens
  CDR3 for alpha chain variable domain of TCR clone 18355 (TRAV13-1, TRAJ53)
AASGGSNYKLTF

SEQ ID NO: 36710 - protein, 15 aa, Homo sapiens
  CDR3 for beta chain variable domain of TCR clone 18355 (TRBV5-1, TRBJ2-1)
CASSPPRAAYNEQFF

SEQ ID NO: 36711 - protein, 14 aa, Homo sapiens
  CDR3 for alpha chain variable domain of TCR clone 18356 (TRAV17, TRAJ22)
CATSPSGSARQLTF

SEQ ID NO: 36712 - protein, 15 aa, Homo sapiens
  CDR3 for beta chain variable domain of TCR clone 18356 (TRBV4-1, TRBJ2-5)
RASSQWDLYQETQYF

SEQ ID NO: 36713 - protein, 15 aa, Homo sapiens
  CDR3 for alpha chain variable domain of TCR clone 18357 (TRAV35, TRAJ40)
CAGQLGTSGTYKYIF

SEQ ID NO: 36714 - protein, 10 aa, Homo sapiens
  CDR3 for beta chain variable domain of TCR clone 18357 (TRBV23-1, TRBJ2-7)
SAGTGLEQYF

SEQ ID NO: 36715 - protein, 12 aa, Homo sapiens
  CDR3 for alpha chain variable domain of TCR clone 18358 (TRAV17, TRAJ57)
CATDGGSDKLVF

SEQ ID NO: 36716 - protein, 13 aa, Homo sapiens
  CDR3 for beta chain variable domain of TCR clone 18358 (TRBV7-9, TRBJ2-7)
CASSFAGAYEQYF

SEQ ID NO: 36717 - protein, 14 aa, Homo sapiens
  CDR3 for alpha chain variable domain of TCR clone 18359 (TRAV2, TRAJ37)
CAVDFTSNTGKLIF

SEQ ID NO: 36718 - protein, 13 aa, Homo sapiens
  CDR3 for beta chain variable domain of TCR clone 18359 (TRBV20-1, TRBJ1-1)
CSAPLGGGTEAFL

SEQ ID NO: 36719 - protein, 15 aa, Homo sapiens
  CDR3 for alpha chain variable domain of TCR clone 18360 (TRAV17, TRAJ57)
CATGPSQGGSEKLVF

SEQ ID NO: 36720 - protein, 14 aa, Homo sapiens
  CDR3 for beta chain variable domain of TCR clone 18360 (TRBV12-5, TRBJ2-5)
CASGSRTHQETKYF

SEQ ID NO: 36721 - protein, 13 aa, Homo sapiens
  CDR3 for alpha chain variable domain of TCR clone 18361 (TRAV35, TRAJ53)
CAGQESSNYKLTF

SEQ ID NO: 36722 - protein, 11 aa, Homo sapiens
  CDR3 for beta chain variable domain of TCR clone 18361 (TRBV29-1, TRBJ2-5)
CGEDRTGTQYF

SEQ ID NO: 36723 - protein, 14 aa, Homo sapiens
  CDR3 for alpha chain variable domain of TCR clone 18362 (TRAV12-2, TRAJ13)
CAVKKTGGYQKVTF

SEQ ID NO: 36724 - protein, 15 aa, Homo sapiens
  CDR3 for beta chain variable domain of TCR clone 18362 (TRBV4-3, TRBJ2-7)
CASSQGDWGDYEQYF

SEQ ID NO: 36725 - protein, 11 aa, Homo sapiens
  CDR3 for alpha chain variable domain of TCR clone 18363 (TRAV12-3, TRAJ26)
CAMSHGQNFVF

SEQ ID NO: 36726 - protein, 13 aa, Homo sapiens
  CDR3 for beta chain variable domain of TCR clone 18363 (TRBV6-1, TRBJ2-1)
CASEGSSYNEQFF

SEQ ID NO: 36727 - protein, 14 aa, Homo sapiens
  CDR3 for alpha chain variable domain of TCR clone 18364 (TRAV2, TRAJ37)
CAVDFTSNTGKLIF

SEQ ID NO: 36728 - protein, 17 aa, Homo sapiens
  CDR3 for beta chain variable domain of TCR clone 18364 (TRBV13, TRBJ2-3)
CASSLSRVAGGRNTQYF

SEQ ID NO: 36729 - protein, 14 aa, Homo sapiens
  CDR3 for alpha chain variable domain of TCR clone 18365 (TRAV1-2, TRAJ26)
CCERPDNYGQNFVF

SEQ ID NO: 36730 - protein, 15 aa, Homo sapiens
  CDR3 for beta chain variable domain of TCR clone 18365 (TRBV9, TRBJ1-6)
CASSVAGTGDSPLHF

SEQ ID NO: 36731 - protein, 16 aa, Homo sapiens
  CDR3 for alpha chain variable domain of TCR clone 18366 (TRAV30, TRAJ24)
CGTEIVDADSWGKFQF

SEQ ID NO: 36732 - protein, 14 aa, Homo sapiens
  CDR3 for beta chain variable domain of TCR clone 18366 (TRBV12-5, TRBJ2-7)
CASGSRTHQETQYF

SEQ ID NO: 36733 - protein, 15 aa, Homo sapiens
  CDR3 for alpha chain variable domain of TCR clone 18367 (TRAV21, TRAJ53)
CATLNSGGINYKLTF

SEQ ID NO: 36734 - protein, 16 aa, Homo sapiens
  CDR3 for beta chain variable domain of TCR clone 18367 (TRBV9, TRBJ2-1)
CASSVGGGGNYNEQFF

SEQ ID NO: 36735 - protein, 14 aa, Homo sapiens
  CDR3 for alpha chain variable domain of TCR clone 18368 (TRAV1-2, TRAJ16)
CAVRSAPDGQKLLF

SEQ ID NO: 36736 - protein, 17 aa, Homo sapiens
  CDR3 for beta chain variable domain of TCR clone 18368 (TRBV7-3, TRBJ2-3)
CASSLMKRMRGADTQYF

SEQ ID NO: 36737 - protein, 14 aa, Homo sapiens
  CDR3 for alpha chain variable domain of TCR clone 18369 (TRAV1-2, TRAJ16)
CAVNRFSDGQKLLF

SEQ ID NO: 36738 - protein, 16 aa, Homo sapiens
  CDR3 for beta chain variable domain of TCR clone 18369 (TRBV4-2, TRBJ1-1)
CASSQAGFGMNTEAFF

SEQ ID NO: 36739 - protein, 13 aa, Homo sapiens
  CDR3 for alpha chain variable domain of TCR clone 18370 (TRAV13-2, TRAJ20)
CAEKSWNDYKLSF

SEQ ID NO: 36740 - protein, 17 aa, Homo sapiens
  CDR3 for beta chain variable domain of TCR clone 18370 (TRBV5-1, TRBJ2-1)
CASSMGLAGEGYNEQFF

SEQ ID NO: 36741 - protein, 14 aa, Homo sapiens
  CDR3 for alpha chain variable domain of TCR clone 18371 (TRAV12-3, TRAJ22)
CAMSLFGSARQLTF

SEQ ID NO: 36742 - protein, 12 aa, Homo sapiens
  CDR3 for beta chain variable domain of TCR clone 18371 (TRBV11-2, TRBJ2-2)
CASSLGGGELFF

SEQ ID NO: 36743 - protein, 17 aa, Homo sapiens
  CDR3 for alpha chain variable domain of TCR clone 18372 (TRAV13-1, TRAJ52)
CAASSGAGGTSYGKLKF

SEQ ID NO: 36744 - protein, 15 aa, Homo sapiens
  CDR3 for beta chain variable domain of TCR clone 18372 (TRBV2, TRBJ2-1)
CASSELAGSYNEQFF

SEQ ID NO: 36745 - protein, 14 aa, Homo sapiens
  CDR3 for alpha chain variable domain of TCR clone 18373 (TRAV2, TRAJ29)
CAAESYSGNTPLVF

SEQ ID NO: 36746 - protein, 15 aa, Homo sapiens
  CDR3 for beta chain variable domain of TCR clone 18373 (TRBV19, TRBJ2-5)
CASSIARARGETQYF

SEQ ID NO: 36747 - protein, 19 aa, Homo sapiens
  CDR3 for alpha chain variable domain of TCR clone 18374 (TRAV21, TRAJ20)
SLVTQPPTSVLPNDYKLSF

SEQ ID NO: 36748 - protein, 14 aa, Homo sapiens
  CDR3 for beta chain variable domain of TCR clone 18374 (TRBV4-3, TRBJ2-2)
CASSQGHVTGELFF

SEQ ID NO: 36749 - protein, 11 aa, Homo sapiens
  CDR3 for alpha chain variable domain of TCR clone 18375 (TRAV13-1, TRAJ16)
CAALDGQKLLF

SEQ ID NO: 36750 - protein, 15 aa, Homo sapiens
  CDR3 for beta chain variable domain of TCR clone 18375 (TRBV20-1, TRBJ2-7)
CSARDRVSGMDEQYF

SEQ ID NO: 36751 - protein, 14 aa, Homo sapiens
  CDR3 for alpha chain variable domain of TCR clone 18376 (TRAV35, TRAJ33)
CAGSSQDSNYQLIW

SEQ ID NO: 36752 - protein, 15 aa, Homo sapiens
  CDR3 for beta chain variable domain of TCR clone 18376 (TRBV20-1, TRBJ2-7)
CSAESGTSGAHEQYF

SEQ ID NO: 36753 - protein, 16 aa, Homo sapiens
  CDR3 for alpha chain variable domain of TCR clone 18377 (TRAV4, TRAJ22)
CLVGGLYSGSARQLTF

SEQ ID NO: 36754 - protein, 16 aa, Homo sapiens
  CDR3 for beta chain variable domain of TCR clone 18377 (TRBV7-9, TRBJ2-3)
CASSPWREVGTDTQYF

SEQ ID NO: 36755 - protein, 17 aa, Homo sapiens
  CDR3 for alpha chain variable domain of TCR clone 18378 (TRAV23/DV6, TRAJ57)
CAASSTLSQGGSEKLVF

SEQ ID NO: 36756 - protein, 14 aa, Homo sapiens
  CDR3 for beta chain variable domain of TCR clone 18378 (TRBV25-1, TRBJ1-1)
CASTHLGGDTEAFF

SEQ ID NO: 36757 - protein, 15 aa, Homo sapiens
  CDR3 for alpha chain variable domain of TCR clone 18379 (TRAV38-1, TRAJ37)
CAFIFGSGNTGKLIL

SEQ ID NO: 36758 - protein, 12 aa, Homo sapiens
  CDR3 for beta chain variable domain of TCR clone 18379 (TRBV7-9, TRBJ2-7)
CASSLEGYEQYF

SEQ ID NO: 36759 - protein, 15 aa, Homo sapiens
  CDR3 for alpha chain variable domain of TCR clone 18380 (TRAV25, TRAJ52)
CAGRPGGTSYGKLTF

SEQ ID NO: 36760 - protein, 17 aa, Homo sapiens
  CDR3 for beta chain variable domain of TCR clone 18380 (TRBV7-8, TRBJ2-6)
CASGAGTGGAGANVLTF

SEQ ID NO: 36761 - protein, 15 aa, Homo sapiens
  CDR3 for alpha chain variable domain of TCR clone 18381 (TRAV21, TRAJ24)
CAARSSTDSWGRLQF

SEQ ID NO: 36762 - protein, 13 aa, Homo sapiens
  CDR3 for beta chain variable domain of TCR clone 18381 (TRBV11-2, TRBJ2-5)
CASSSTGEETQYF

SEQ ID NO: 36763 - protein, 14 aa, Homo sapiens
  CDR3 for alpha chain variable domain of TCR clone 18382 (TRAV1-2, TRAJ16)
CAVNLFSDGQKLLF

SEQ ID NO: 36764 - protein, 15 aa, Homo sapiens
  CDR3 for beta chain variable domain of TCR clone 18382 (TRBV7-9, TRBJ1-6)
CASSSPGRGNSPLHF

SEQ ID NO: 36765 - protein, 15 aa, Homo sapiens
  CDR3 for alpha chain variable domain of TCR clone 18383 (TRAV4, TRAJ39)
CLAGPNNNAGNMLTF

SEQ ID NO: 36766 - protein, 13 aa, Homo sapiens
  CDR3 for beta chain variable domain of TCR clone 18383 (TRBV11-2, TRBJ2-5)
CASSSTGEETQYF

SEQ ID NO: 36767 - protein, 12 aa, Homo sapiens
  CDR3 for alpha chain variable domain of TCR clone 18384 (TRAV12-3, TRAJ17)
CAMTLTGNKLTF

SEQ ID NO: 36768 - protein, 13 aa, Homo sapiens
  CDR3 for beta chain variable domain of TCR clone 18384 (TRBV7-9, TRBJ1-2)
RASSLKQNYGYTF

SEQ ID NO: 36769 - protein, 11 aa, Homo sapiens
  CDR3 for alpha chain variable domain of TCR clone 18385 (TRAV1-1, TRAJ23)
CAVLQGGKLIF

SEQ ID NO: 36770 - protein, 20 aa, Homo sapiens
  CDR3 for beta chain variable domain of TCR clone 18385 (TRBV7-8, TRBJ2-2)
CASSHLFPGPTIHITGELFF

SEQ ID NO: 36771 - protein, 12 aa, Homo sapiens
  CDR3 for alpha chain variable domain of TCR clone 18386 (TRAV13-2, TRAJ23)
CAERPRGGKLIF

SEQ ID NO: 36772 - protein, 16 aa, Homo sapiens
  CDR3 for beta chain variable domain of TCR clone 18386 (TRBV20-1, TRBJ1-4)
CSAPGQGLLTNEKLFF

SEQ ID NO: 36773 - protein, 16 aa, Homo sapiens
  CDR3 for alpha chain variable domain of TCR clone 18387 (TRAV30, TRAJ24)
CGTEIVDADSWGKFQF

SEQ ID NO: 36774 - protein, 12 aa, Homo sapiens
  CDR3 for beta chain variable domain of TCR clone 18387 (TRBV7-9, TRBJ2-7)
CASSIKREEQYF

SEQ ID NO: 36775 - protein, 13 aa, Homo sapiens
  CDR3 for alpha chain variable domain of TCR clone 18388 (TRAV21, TRAJ57)
CAVTQGGSEKLVV

SEQ ID NO: 36776 - protein, 16 aa, Homo sapiens
  CDR3 for beta chain variable domain of TCR clone 18388 (TRBV29-1, TRBJ2-7)
CSVEDAEDGTAYEQYF

SEQ ID NO: 36777 - protein, 16 aa, Homo sapiens
  CDR3 for alpha chain variable domain of TCR clone 18389 (TRAV16, TRAJ4)
CALSRMFSGGYNKLTF

SEQ ID NO: 36778 - protein, 16 aa, Homo sapiens
  CDR3 for beta chain variable domain of TCR clone 18389 (TRBV24-1, TRBJ2-3)
CATSDPGTGATDTQYF

SEQ ID NO: 36779 - protein, 16 aa, Homo sapiens
  CDR3 for alpha chain variable domain of TCR clone 18390 (TRAV27, TRAJ13)
CTGAKSDSGGYQKVTF

SEQ ID NO: 36780 - protein, 15 aa, Homo sapiens
  CDR3 for beta chain variable domain of TCR clone 18390 (TRBV29-1, TRBJ2-1)
CSVGRHALFYNEQFF

SEQ ID NO: 36781 - protein, 18 aa, Homo sapiens
  CDR3 for alpha chain variable domain of TCR clone 18391 (TRAV13-1, TRAJ52)
CAASKRSAGGTSYGKLTF

SEQ ID NO: 36782 - protein, 13 aa, Homo sapiens
  CDR3 for beta chain variable domain of TCR clone 18391 (TRBV12-4, TRBJ1-2)
CAGSLRQGKGYTF

SEQ ID NO: 36783 - protein, 17 aa, Homo sapiens
  CDR3 for alpha chain variable domain of TCR clone 18392 (TRAV3, TRAJ6)
CAVRDGPRAGGSYIPTF

SEQ ID NO: 36784 - protein, 14 aa, Homo sapiens
  CDR3 for beta chain variable domain of TCR clone 18392 (TRBV12-4, TRBJ1-1)
CASSLGTGGTEAFF

SEQ ID NO: 36785 - protein, 14 aa, Homo sapiens
  CDR3 for alpha chain variable domain of TCR clone 18393 (TRAV19, TRAJ16)
CALSEVSDGQKLLF

SEQ ID NO: 36786 - protein, 15 aa, Homo sapiens
  CDR3 for beta chain variable domain of TCR clone 18393 (TRBV20-1, TRBJ1-5)
CSASAWDRVNQPQHF

SEQ ID NO: 36787 - protein, 16 aa, Homo sapiens
  CDR3 for alpha chain variable domain of TCR clone 18394 (TRAV3, TRAJ10)
CAVRDMRAGGGNKLTF

SEQ ID NO: 36788 - protein, 13 aa, Homo sapiens
  CDR3 for beta chain variable domain of TCR clone 18394 (TRBV19, TRBJ1-2)
CASSVPGQDGYTF

SEQ ID NO: 36789 - protein, 12 aa, Homo sapiens
  CDR3 for alpha chain variable domain of TCR clone 18395 (TRAV12-1, TRAJ40)
CVFYSGTYNYIF

SEQ ID NO: 36790 - protein, 18 aa, Homo sapiens
  CDR3 for beta chain variable domain of TCR clone 18395 (TRBV12-4, TRBJ2-2)
CASSLVAGTRGRTGELFF

SEQ ID NO: 36791 - protein, 14 aa, Homo sapiens
  CDR3 for alpha chain variable domain of TCR clone 18396 (TRAV21, TRAJ37)
CAVKGSSNTGKLIF

SEQ ID NO: 36792 - protein, 14 aa, Homo sapiens
  CDR3 for beta chain variable domain of TCR clone 18396 (TRBV7-2, TRBJ2-1)
CASSRGGAKNEQFF

SEQ ID NO: 36793 - protein, 16 aa, Homo sapiens
  CDR3 for alpha chain variable domain of TCR clone 18397 (TRAV12-3, TRAJ53)
CAMSPGSGGSNYKLTF

SEQ ID NO: 36794 - protein, 11 aa, Homo sapiens
  CDR3 for beta chain variable domain of TCR clone 18397 (TRBV29-1, TRBJ2-5)
CSEDGTGTQYF

SEQ ID NO: 36795 - protein, 13 aa, Homo sapiens
  CDR3 for alpha chain variable domain of TCR clone 18398 (TRAV21, TRAJ27)
CAARPGNAGKSTF

SEQ ID NO: 36796 - protein, 14 aa, Homo sapiens
  CDR3 for beta chain variable domain of TCR clone 18398 (TRBV7-6, TRBJ2-3)
CASSLGTVTYTQYF

SEQ ID NO: 36797 - protein, 14 aa, Homo sapiens
  CDR3 for alpha chain variable domain of TCR clone 18399 (TRAV35, TRAJ34)
CAGRGTPTSSSLDW

SEQ ID NO: 36798 - protein, 13 aa, Homo sapiens
  CDR3 for beta chain variable domain of TCR clone 18399 (TRBV19, TRBJ2-7)
CASSIDRTYEQYF

SEQ ID NO: 36799 - protein, 14 aa, Homo sapiens
  CDR3 for alpha chain variable domain of TCR clone 18400 (TRAV1-2, TRAJ16)
CAVNRFSDGQKLLF

SEQ ID NO: 36800 - protein, 15 aa, Homo sapiens
  CDR3 for beta chain variable domain of TCR clone 18400 (TRBV9, TRBJ1-6)
CASSVDGTGDSPLHF

SEQ ID NO: 36801 - protein, 15 aa, Homo sapiens
  CDR3 for alpha chain variable domain of TCR clone 18401 (TRAV2, TRAJ22)
CAVPSRGGSARQLPF

SEQ ID NO: 36802 - protein, 11 aa, Homo sapiens
  CDR3 for beta chain variable domain of TCR clone 18401 (TRBV27, TRBJ2-3)
CASSLGDTQYF

SEQ ID NO: 36803 - protein, 14 aa, Homo sapiens
  CDR3 for alpha chain variable domain of TCR clone 18402 (TRAV12-3, TRAJ10)
SHLPLTGGGNKLTF

SEQ ID NO: 36804 - protein, 18 aa, Homo sapiens
  CDR3 for beta chain variable domain of TCR clone 18402 (TRBV7-9, TRBJ2-7)
CASSLTTSGSRTWYEQYF

SEQ ID NO: 36805 - protein, 18 aa, Homo sapiens
  CDR3 for alpha chain variable domain of TCR clone 18403 (TRAV13-1, TRAJ52)
CAAKNPNAGGTSYEKLTF

SEQ ID NO: 36806 - protein, 15 aa, Homo sapiens
  CDR3 for beta chain variable domain of TCR clone 18403 (TRBV6-1, TRBJ2-3)
CASSERGGITDTQYF

SEQ ID NO: 36807 - protein, 15 aa, Homo sapiens
  CDR3 for alpha chain variable domain of TCR clone 18404 (TRAV12-2, TRAJ53)
CAVNGGGGSNYKPTF

SEQ ID NO: 36808 - protein, 13 aa, Homo sapiens
  CDR3 for beta chain variable domain of TCR clone 18404 (TRBV3-1, TRBJ1-1)
CASSPGVITEAFF

SEQ ID NO: 36809 - protein, 14 aa, Homo sapiens
  CDR3 for alpha chain variable domain of TCR clone 18405 (TRAV12-1, TRAJ17)
CLVNYKAAGNKLTF

SEQ ID NO: 36810 - protein, 17 aa, Homo sapiens
  CDR3 for beta chain variable domain of TCR clone 18405 (TRBV20-1, TRBJ2-1)
CSASSSGLAGSYNEQFF

SEQ ID NO: 36811 - protein, 12 aa, Homo sapiens
  CDR3 for alpha chain variable domain of TCR clone 18406 (TRAV16, TRAJ56)
CAPTGANSKLTF

SEQ ID NO: 36812 - protein, 17 aa, Homo sapiens
  CDR3 for beta chain variable domain of TCR clone 18406 (TRBV27, TRBJ2-6)
CASSLTGFASGANDLTF

SEQ ID NO: 36813 - protein, 16 aa, Homo sapiens
  CDR3 for alpha chain variable domain of TCR clone 18407 (TRAV4, TRAJ9)
CLVGDPNRPGGFKTIF

SEQ ID NO: 36814 - protein, 16 aa, Homo sapiens
  CDR3 for beta chain variable domain of TCR clone 18407 (TRBV28, TRBJ1-4)
CASSPPYRGRSEELFF

SEQ ID NO: 36815 - protein, 16 aa, Homo sapiens
  CDR3 for alpha chain variable domain of TCR clone 18408 (TRAV4, TRAJ22)
CLVGDLYSGSSRQLTF

SEQ ID NO: 36816 - protein, 16 aa, Homo sapiens
  CDR3 for beta chain variable domain of TCR clone 18408 (TRBV7-9, TRBJ2-1)
CASSDVAGGSYNEQFF

SEQ ID NO: 36817 - protein, 16 aa, Homo sapiens
  CDR3 for alpha chain variable domain of TCR clone 18409 (TRAV30, TRAJ24)
CGTEIVDADSWGKFQF

SEQ ID NO: 36818 - protein, 19 aa, Homo sapiens
  CDR3 for beta chain variable domain of TCR clone 18409 (TRBV25-1, TRBJ2-2)
CAILVYRVDRGRKTGEPFF

SEQ ID NO: 36819 - protein, 17 aa, Homo sapiens
  CDR3 for alpha chain variable domain of TCR clone 18410 (TRAV23/DV6, TRAJ57)
CAASSTLSQGGSEKLVF

SEQ ID NO: 36820 - protein, 14 aa, Homo sapiens
  CDR3 for beta chain variable domain of TCR clone 18410 (TRBV25-1, TRBJ1-1)
CASTHLGGNTEAVF

SEQ ID NO: 36821 - protein, 12 aa, Homo sapiens
  CDR3 for alpha chain variable domain of TCR clone 18411 (TRAV8-3, TRAJ34)
WASEYNTDKLIF

SEQ ID NO: 36822 - protein, 13 aa, Homo sapiens
  CDR3 for beta chain variable domain of TCR clone 18411 (TRBV6-4, TRBJ2-3)
CASSVSWADTQYF

SEQ ID NO: 36823 - protein, 11 aa, Homo sapiens
  CDR3 for alpha chain variable domain of TCR clone 18412 (TRAV2, TRAJ13)
CASGGYQKVTF

SEQ ID NO: 36824 - protein, 16 aa, Homo sapiens
  CDR3 for beta chain variable domain of TCR clone 18412 (TRBV20-1, TRBJ1-2)
CSASMGQGVANYGYTF

SEQ ID NO: 36825 - protein, 15 aa, Homo sapiens
  CDR3 for alpha chain variable domain of TCR clone 18413 (TRAV21, TRAJ24)
CAARSSTGSWGKLQF

SEQ ID NO: 36826 - protein, 13 aa, Homo sapiens
  CDR3 for beta chain variable domain of TCR clone 18413 (TRBV11-2, TRBJ2-5)
CASSSTGEETQYF

SEQ ID NO: 36827 - protein, 16 aa, Homo sapiens
  CDR3 for alpha chain variable domain of TCR clone 18414 (TRAV12-2, TRAJ32)
CAVNLGHGGATNKLIF

SEQ ID NO: 36828 - protein, 15 aa, Homo sapiens
  CDR3 for beta chain variable domain of TCR clone 18414 (TRBV20-1, TRBJ2-7)
CSARGPLAGGREQYF

SEQ ID NO: 36829 - protein, 16 aa, Homo sapiens
  CDR3 for alpha chain variable domain of TCR clone 18415 (TRAV12-2, TRAJ52)
CRLANAGGTSYGKLTF

SEQ ID NO: 36830 - protein, 13 aa, Homo sapiens
  CDR3 for beta chain variable domain of TCR clone 18415 (TRBV10-3, TRBJ2-7)
CASKLAVNYEQYS

SEQ ID NO: 36831 - protein, 13 aa, Homo sapiens
  CDR3 for alpha chain variable domain of TCR clone 18416 (TRAV3, TRAJ27)
CAVRPLGAGKLTF

SEQ ID NO: 36832 - protein, 13 aa, Homo sapiens
  CDR3 for beta chain variable domain of TCR clone 18416 (TRBV7-9, TRBJ2-3)
CASSPGSTDTQYF

SEQ ID NO: 36833 - protein, 11 aa, Homo sapiens
  CDR3 for alpha chain variable domain of TCR clone 18417 (TRAV21, TRAJ11)
CAVNGYSTLTF

SEQ ID NO: 36834 - protein, 14 aa, Homo sapiens
  CDR3 for beta chain variable domain of TCR clone 18417 (TRBV19, TRBJ2-1)
CASPTFVLSGEQFF

SEQ ID NO: 36835 - protein, 13 aa, Homo sapiens
  CDR3 for alpha chain variable domain of TCR clone 18418 (TRAV1-1, TRAJ9)
CAAKNTGGFKTIF

SEQ ID NO: 36836 - protein, 15 aa, Homo sapiens
  CDR3 for beta chain variable domain of TCR clone 18418 (TRBV7-2, TRBJ2-1)
CASTHGTGIYNEQFF

SEQ ID NO: 36837 - protein, 13 aa, Homo sapiens
  CDR3 for alpha chain variable domain of TCR clone 18419 (TRAV36/DV7, TRAJ54)
CAVLIQGAQKPVF

SEQ ID NO: 36838 - protein, 13 aa, Homo sapiens
  CDR3 for beta chain variable domain of TCR clone 18419 (TRBV29-1, TRBJ2-4)
CSVGEGTKNIQYF

SEQ ID NO: 36839 - protein, 14 aa, Homo sapiens
  CDR3 for alpha chain variable domain of TCR clone 18420 (TRAV21, TRAJ15)
CAVSLNQAGTALIS

SEQ ID NO: 36840 - protein, 11 aa, Homo sapiens
  CDR3 for beta chain variable domain of TCR clone 18420 (TRBV20-1, TRBJ2-7)
CSARTSYEQYF

SEQ ID NO: 36841 - protein, 13 aa, Homo sapiens
  CDR3 for alpha chain variable domain of TCR clone 18421 (TRAV27, TRAJ29)
CAGAHSGNTPLVF

SEQ ID NO: 36842 - protein, 13 aa, Homo sapiens
  CDR3 for beta chain variable domain of TCR clone 18421 (TRBV10-2, TRBJ2-7)
CASGASGGYEQYF

SEQ ID NO: 36843 - protein, 12 aa, Homo sapiens
  CDR3 for alpha chain variable domain of TCR clone 18422 (TRAV36/DV7, TRAJ37)
CACYGNTGKLIF

SEQ ID NO: 36844 - protein, 13 aa, Homo sapiens
  CDR3 for beta chain variable domain of TCR clone 18422 (TRBV10-3, TRBJ2-7)
CASKLAVSYEQYF

SEQ ID NO: 36845 - protein, 12 aa, Homo sapiens
  CDR3 for alpha chain variable domain of TCR clone 18423 (TRAV12-3, TRAJ17)
RAMTLTGNKLTF

SEQ ID NO: 36846 - protein, 14 aa, Homo sapiens
  CDR3 for beta chain variable domain of TCR clone 18423 (TRBV9, TRBJ2-1)
CASSVVAAYNEQFF

SEQ ID NO: 36847 - protein, 11 aa, Homo sapiens
  CDR3 for alpha chain variable domain of TCR clone 18424 (TRAV39, TRAJ49)
CAVDISTQLYF

SEQ ID NO: 36848 - protein, 11 aa, Homo sapiens
  CDR3 for beta chain variable domain of TCR clone 18424 (TRBV7-8, TRBJ2-7)
CASSLSLEQYF

SEQ ID NO: 36849 - protein, 14 aa, Homo sapiens
  CDR3 for alpha chain variable domain of TCR clone 18425 (TRAV8-3, TRAJ4)
CAVGASGGYNKLIF

SEQ ID NO: 36850 - protein, 16 aa, Homo sapiens
  CDR3 for beta chain variable domain of TCR clone 18425 (TRBV4-3, TRBJ2-2)
CASSRLQGSGTGELFF

SEQ ID NO: 36851 - protein, 12 aa, Homo sapiens
  CDR3 for alpha chain variable domain of TCR clone 18426 (TRAV12-3, TRAJ17)
CAMTLTGSKLTF

SEQ ID NO: 36852 - protein, 15 aa, Homo sapiens
  CDR3 for beta chain variable domain of TCR clone 18426 (TRBV20-1, TRBJ2-7)
CSARDRVSGMDERYF

SEQ ID NO: 36853 - protein, 14 aa, Homo sapiens
  CDR3 for alpha chain variable domain of TCR clone 18427 (TRAV1-2, TRAJ16)
CAVNRFSDGQKLPF

SEQ ID NO: 36854 - protein, 13 aa, Homo sapiens
  CDR3 for beta chain variable domain of TCR clone 18427 (TRBV19, TRBJ1-2)
CASSVPGQDGYTF

SEQ ID NO: 36855 - protein, 15 aa, Homo sapiens
  CDR3 for alpha chain variable domain of TCR clone 18428 (TRAV4, TRAJ39)
CLVGPNNNAGNVLTF

SEQ ID NO: 36856 - protein, 13 aa, Homo sapiens
  CDR3 for beta chain variable domain of TCR clone 18428 (TRBV11-2, TRBJ2-5)
CASSSTGEETQYF

SEQ ID NO: 36857 - protein, 14 aa, Homo sapiens
  CDR3 for alpha chain variable domain of TCR clone 18429 (TRAV17, TRAJ16)
CATADFSDGQKLLL

SEQ ID NO: 36858 - protein, 12 aa, Homo sapiens
  CDR3 for beta chain variable domain of TCR clone 18429 (TRBV24-1, TRBJ1-1)
CATLYPDTEAFF

SEQ ID NO: 36859 - protein, 13 aa, Homo sapiens
  CDR3 for alpha chain variable domain of TCR clone 18430 (TRAV27, TRAJ54)
CAGAGQGAQKLVF

SEQ ID NO: 36860 - protein, 15 aa, Homo sapiens
  CDR3 for beta chain variable domain of TCR clone 18430 (TRBV18, TRBJ2-6)
CASSPTYAGANVLTF

SEQ ID NO: 36861 - protein, 15 aa, Homo sapiens
  CDR3 for alpha chain variable domain of TCR clone 18431 (TRAV17, TRAJ23)
CATDAEDNQGGKLIF

SEQ ID NO: 36862 - protein, 12 aa, Homo sapiens
  CDR3 for beta chain variable domain of TCR clone 18431 (TRBV2, TRBJ2-1)
CAEREGYNEQFF

SEQ ID NO: 36863 - protein, 13 aa, Homo sapiens
  CDR3 for alpha chain variable domain of TCR clone 18432 (TRAV20, TRAJ40)
CAVSFSGTYKYIF

SEQ ID NO: 36864 - protein, 13 aa, Homo sapiens
  CDR3 for beta chain variable domain of TCR clone 18432 (TRBV15, TRBJ2-5)
CATSQIGEETQYF

SEQ ID NO: 36865 - protein, 12 aa, Homo sapiens
  CDR3 for alpha chain variable domain of TCR clone 18433 (TRAV20, TRAJ39)
CAVGSAGNMLTF

SEQ ID NO: 36866 - protein, 16 aa, Homo sapiens
  CDR3 for beta chain variable domain of TCR clone 18433 (TRBV15, TRBJ1-2)
CATSRGPRTGGGGYTF

SEQ ID NO: 36867 - protein, 14 aa, Homo sapiens
  CDR3 for alpha chain variable domain of TCR clone 18434 (TRAV12-2, TRAJ40)
CAVKIPSGTYKYIF

SEQ ID NO: 36868 - protein, 14 aa, Homo sapiens
  CDR3 for beta chain variable domain of TCR clone 18434 (TRBV4-1, TRBJ2-2)
CASSQAVNTGELFF

SEQ ID NO: 36869 - protein, 14 aa, Homo sapiens
  CDR3 for alpha chain variable domain of TCR clone 18435 (TRAV38-1, TRAJ40)
CALRPTSGTYKCIF

SEQ ID NO: 36870 - protein, 14 aa, Homo sapiens
  CDR3 for beta chain variable domain of TCR clone 18435 (TRBV25-1, TRBJ1-1)
CASTHLGGNTEAFF

SEQ ID NO: 36871 - protein, 14 aa, Homo sapiens
  CDR3 for alpha chain variable domain of TCR clone 18436 (TRAV8-4, TRAJ34)
CAVSDPGDTDKLIF

SEQ ID NO: 36872 - protein, 13 aa, Homo sapiens
  CDR3 for beta chain variable domain of TCR clone 18436 (TRBV10-3, TRBJ2-7)
CASKLAVNYEQYF

SEQ ID NO: 36873 - protein, 16 aa, Homo sapiens
  CDR3 for alpha chain variable domain of TCR clone 18437 (TRAV13-2, TRAJ28)
CAGKSYSGAGSYQLTF

SEQ ID NO: 36874 - protein, 16 aa, Homo sapiens
  CDR3 for beta chain variable domain of TCR clone 18437 (TRBV19, TRBJ2-1)
CASSKAGPSSYNEQFF

SEQ ID NO: 36875 - protein, 14 aa, Homo sapiens
  CDR3 for alpha chain variable domain of TCR clone 18438 (TRAV1-2, TRAJ8)
CAVREDTGFQKLVF

SEQ ID NO: 36876 - protein, 15 aa, Homo sapiens
  CDR3 for beta chain variable domain of TCR clone 18438 (TRBV6-3, TRBJ2-7)
CASSSPGTVFYEKYF

SEQ ID NO: 36877 - protein, 12 aa, Homo sapiens
  CDR3 for alpha chain variable domain of TCR clone 18439 (TRAV3, TRAJ31)
CAVRDGNARLMF

SEQ ID NO: 36878 - protein, 18 aa, Homo sapiens
  CDR3 for beta chain variable domain of TCR clone 18439 (TRBV7-2, TRBJ2-3)
CASSLKREGSGITDTQYF

SEQ ID NO: 36879 - protein, 12 aa, Homo sapiens
  CDR3 for alpha chain variable domain of TCR clone 18440 (TRAV12-2, TRAJ10)
WGVTGGGNKLAF

SEQ ID NO: 36880 - protein, 16 aa, Homo sapiens
  CDR3 for beta chain variable domain of TCR clone 18440 (TRBV6-4, TRBJ1-2)
CASSEAVGDPNYGYTF

SEQ ID NO: 36881 - protein, 16 aa, Homo sapiens
  CDR3 for alpha chain variable domain of TCR clone 18441 (TRAV21, TRAJ37)
CAVRTAGSSNTGKLLF

SEQ ID NO: 36882 - protein, 13 aa, Homo sapiens
  CDR3 for beta chain variable domain of TCR clone 18441 (TRBV7-9, TRBJ2-5)
CASLPSGRETQYF

SEQ ID NO: 36883 - protein, 15 aa, Homo sapiens
  CDR3 for alpha chain variable domain of TCR clone 18442 (TRAV26-1, TRAJ44)
CIVRANTGTASKLTF

SEQ ID NO: 36884 - protein, 16 aa, Homo sapiens
  CDR3 for beta chain variable domain of TCR clone 18442 (TRBV7-7, TRBJ2-1)
CASSLASGTSYNEQLF

SEQ ID NO: 36885 - protein, 15 aa, Homo sapiens
  CDR3 for alpha chain variable domain of TCR clone 18443 (TRAV3, TRAJ22)
CAVRDRGGSARQLTF

SEQ ID NO: 36886 - protein, 15 aa, Homo sapiens
  CDR3 for beta chain variable domain of TCR clone 18443 (TRBV5-4, TRBJ2-3)
CQPAAGAGGADTQYF

SEQ ID NO: 36887 - protein, 18 aa, Homo sapiens
  CDR3 for alpha chain variable domain of TCR clone 18444 (TRAV29/DV5, TRAJ52)
CAAGFRGSGGTSYGKLTF

SEQ ID NO: 36888 - protein, 16 aa, Homo sapiens
  CDR3 for beta chain variable domain of TCR clone 18444 (TRBV7-3, TRBJ2-2)
CASSLKRGTLSGELFF

SEQ ID NO: 36889 - protein, 14 aa, Homo sapiens
  CDR3 for alpha chain variable domain of TCR clone 18445 (TRAV12-1, TRAJ23)
CVVIVYNQGGKLIF

SEQ ID NO: 36890 - protein, 15 aa, Homo sapiens
  CDR3 for beta chain variable domain of TCR clone 18445 (TRBV14, TRBJ2-7)
CQQPRQQGRVYEQYF

SEQ ID NO: 36891 - protein, 12 aa, Homo sapiens
  CDR3 for alpha chain variable domain of TCR clone 18446 (TRAV25, TRAJ5)
CAGGGGQESTYF

SEQ ID NO: 36892 - protein, 15 aa, Homo sapiens
  CDR3 for beta chain variable domain of TCR clone 18446 (TRBV19, TRBJ2-4)
CASRGPRRGENIQYF

SEQ ID NO: 36893 - protein, 16 aa, Homo sapiens
  CDR3 for alpha chain variable domain of TCR clone 18447 (TRAV30, TRAJ24)
CGTEIVDADSWGKFKF

SEQ ID NO: 36894 - protein, 15 aa, Homo sapiens
  CDR3 for beta chain variable domain of TCR clone 18447 (TRBV20-1, TRBJ2-7)
CSARDRVSGMDEQYF

SEQ ID NO: 36895 - protein, 13 aa, Homo sapiens
  CDR3 for alpha chain variable domain of TCR clone 18448 (TRAV12-3, TRAJ9)
CAMRNTGGFKTIF

SEQ ID NO: 36896 - protein, 14 aa, Homo sapiens
  CDR3 for beta chain variable domain of TCR clone 18448 (TRBV11-2, TRBJ2-7)
CASSSTGEGYERYF

SEQ ID NO: 36897 - protein, 18 aa, Homo sapiens
  CDR3 for alpha chain variable domain of TCR clone 18449 (TRAV21, TRAJ52)
CAVRPSPAGGTSYGKLPF

SEQ ID NO: 36898 - protein, 13 aa, Homo sapiens
  CDR3 for beta chain variable domain of TCR clone 18449 (TRBV7-3, TRBJ1-1)
CASSQDWGAEAFF

SEQ ID NO: 36899 - protein, 14 aa, Homo sapiens
  CDR3 for alpha chain variable domain of TCR clone 18450 (TRAV12-2, TRAJ17)
CAVLFKASGNKLTF

SEQ ID NO: 36900 - protein, 17 aa, Homo sapiens
  CDR3 for beta chain variable domain of TCR clone 18450 (TRBV20-1, TRBJ2-2)
CSASGSGQGGLTGELFF

SEQ ID NO: 36901 - protein, 14 aa, Homo sapiens
  CDR3 for alpha chain variable domain of TCR clone 18451 (TRAV1-2, TRAJ8)
CAVREDTGFQKLVF

SEQ ID NO: 36902 - protein, 15 aa, Homo sapiens
  CDR3 for beta chain variable domain of TCR clone 18451 (TRBV6-3, TRBJ2-7)
SASSSPGTVFYEQYF

SEQ ID NO: 36903 - protein, 14 aa, Homo sapiens
  CDR3 for alpha chain variable domain of TCR clone 18452 (TRAV6, TRAJ6)
CALPTSGGSYIPTF

SEQ ID NO: 36904 - protein, 17 aa, Homo sapiens
  CDR3 for beta chain variable domain of TCR clone 18452 (TRBV5-1, TRBJ2-5)
CASSPVVLGQNQETQYF

SEQ ID NO: 36905 - protein, 12 aa, Homo sapiens
  CDR3 for alpha chain variable domain of TCR clone 18453 (TRAV2, TRAJ31)
CAVEDNNARLMF

SEQ ID NO: 36906 - protein, 14 aa, Homo sapiens
  CDR3 for beta chain variable domain of TCR clone 18453 (TRBV19, TRBJ2-1)
CASPTFVLSGEQFF

SEQ ID NO: 36907 - protein, 15 aa, Homo sapiens
  CDR3 for alpha chain variable domain of TCR clone 18454 (TRAV3, TRAJ5)
CAVRDRQTGRRALTF

SEQ ID NO: 36908 - protein, 15 aa, Homo sapiens
  CDR3 for beta chain variable domain of TCR clone 18454 (TRBV7-8, TRBJ2-1)
CASSLADSLYNEQFF

SEQ ID NO: 36909 - protein, 13 aa, Homo sapiens
  CDR3 for alpha chain variable domain of TCR clone 18455 (TRAV27, TRAJ3)
ASLLGSSASKIIF

SEQ ID NO: 36910 - protein, 15 aa, Homo sapiens
  CDR3 for beta chain variable domain of TCR clone 18455 (TRBV28, TRBJ1-3)
CASSMGWASGNTIYF

SEQ ID NO: 36911 - protein, 14 aa, Homo sapiens
  CDR3 for alpha chain variable domain of TCR clone 18456 (TRAV8-3, TRAJ4)
CAVGAAGGYNKLIF

SEQ ID NO: 36912 - protein, 15 aa, Homo sapiens
  CDR3 for beta chain variable domain of TCR clone 18456 (TRBV6-5, TRBJ2-1)
CASSYDAGAGNEQFL

SEQ ID NO: 36913 - protein, 17 aa, Homo sapiens
  CDR3 for alpha chain variable domain of TCR clone 18457 (TRAV3, TRAJ42)
CAVRDRDYGGSQGNLIF

SEQ ID NO: 36914 - protein, 15 aa, Homo sapiens
  CDR3 for beta chain variable domain of TCR clone 18457 (TRBV27, TRBJ2-1)
CASSNGGGSSNEQFF

SEQ ID NO: 36915 - protein, 16 aa, Homo sapiens
  CDR3 for alpha chain variable domain of TCR clone 18458 (TRAV21, TRAJ37)
CAVRTAGSSNTGKIIF

SEQ ID NO: 36916 - protein, 13 aa, Homo sapiens
  CDR3 for beta chain variable domain of TCR clone 18458 (TRBV7-9, TRBJ2-5)
CASLPSGRETQYF

SEQ ID NO: 36917 - protein, 17 aa, Homo sapiens
  CDR3 for alpha chain variable domain of TCR clone 18459 (TRAV3, TRAJ6)
CAVRDGPRAGGSYIPTF

SEQ ID NO: 36918 - protein, 15 aa, Homo sapiens
  CDR3 for beta chain variable domain of TCR clone 18459 (TRBV7-3, TRBJ2-2)
CASSETGQGTGELFF

SEQ ID NO: 36919 - protein, 15 aa, Homo sapiens
  CDR3 for alpha chain variable domain of TCR clone 18460 (TRAV26-1, TRAJ29)
CIVRVEGSGNTPLVF

SEQ ID NO: 36920 - protein, 15 aa, Homo sapiens
  CDR3 for beta chain variable domain of TCR clone 18460 (TRBV7-9, TRBJ1-5)
CASSQDHQPNQPQHF

SEQ ID NO: 36921 - protein, 14 aa, Homo sapiens
  CDR3 for alpha chain variable domain of TCR clone 18461 (TRAV12-2, TRAJ53)
CAVKGGGSNYKLTF

SEQ ID NO: 36922 - protein, 14 aa, Homo sapiens
  CDR3 for beta chain variable domain of TCR clone 18461 (TRBV7-7, TRBJ2-2)
CATRQDSDAGELFF

SEQ ID NO: 36923 - protein, 14 aa, Homo sapiens
  CDR3 for alpha chain variable domain of TCR clone 18462 (TRAV3, TRAJ6)
CAVRRTGGSYIPTF

SEQ ID NO: 36924 - protein, 13 aa, Homo sapiens
  CDR3 for beta chain variable domain of TCR clone 18462 (TRBV6-1, TRBJ1-3)
CASTLDSGNTIYF

SEQ ID NO: 36925 - protein, 15 aa, Homo sapiens
  CDR3 for alpha chain variable domain of TCR clone 18463 (TRAV26-1, TRAJ29)
CIVRVEGSGNTPLVF

SEQ ID NO: 36926 - protein, 13 aa, Homo sapiens
  CDR3 for beta chain variable domain of TCR clone 18463 (TRBV19, TRBJ1-2)
CASSVPGQDGYTF

SEQ ID NO: 36927 - protein, 14 aa, Homo sapiens
  CDR3 for alpha chain variable domain of TCR clone 18464 (TRAV26-1, TRAJ34)
CIVRVAYNTNKLIF

SEQ ID NO: 36928 - protein, 15 aa, Homo sapiens
  CDR3 for beta chain variable domain of TCR clone 18464 (TRBV20-1, TRBJ2-7)
CSARVPAAYFYEQYF

SEQ ID NO: 36929 - protein, 11 aa, Homo sapiens
  CDR3 for alpha chain variable domain of TCR clone 18465 (TRAV1-2, TRAJ31)
CAVNNNARLMF

SEQ ID NO: 36930 - protein, 15 aa, Homo sapiens
  CDR3 for beta chain variable domain of TCR clone 18465 (TRBV28, TRBJ2-1)
CASGIIAGGRSEQFF

SEQ ID NO: 36931 - protein, 15 aa, Homo sapiens
  CDR3 for alpha chain variable domain of TCR clone 18466 (TRAV25, TRAJ52)
CAGRPGGNSYGKLTF

SEQ ID NO: 36932 - protein, 17 aa, Homo sapiens
  CDR3 for beta chain variable domain of TCR clone 18466 (TRBV7-8, TRBJ2-6)
CASSAGTGGAGANVLTF

SEQ ID NO: 36933 - protein, 13 aa, Homo sapiens
  CDR3 for alpha chain variable domain of TCR clone 18467 (TRAV8-3, TRAJ28)
CAVGAVGSYQLTF

SEQ ID NO: 36934 - protein, 15 aa, Homo sapiens
  CDR3 for beta chain variable domain of TCR clone 18467 (TRBV7-9, TRBJ1-5)
CASSQGHQPNRPQHF

SEQ ID NO: 36935 - protein, 14 aa, Homo sapiens
  CDR3 for alpha chain variable domain of TCR clone 18468 (TRAV12-3, TRAJ41)
CAMSAGNSGYALNF

SEQ ID NO: 36936 - protein, 11 aa, Homo sapiens
  CDR3 for beta chain variable domain of TCR clone 18468 (TRBV7-2, TRBJ2-3)
RASSSSDTQYF

SEQ ID NO: 36937 - protein, 16 aa, Homo sapiens
  CDR3 for alpha chain variable domain of TCR clone 18469 (TRAV12-3, TRAJ53)
CAMSPGSGGSNYKLTF

SEQ ID NO: 36938 - protein, 11 aa, Homo sapiens
  CDR3 for beta chain variable domain of TCR clone 18469 (TRBV29-1, TRBJ2-5)
CSEDRTGTQYF

SEQ ID NO: 36939 - protein, 10 aa, Homo sapiens
  CDR3 for alpha chain variable domain of TCR clone 18470 (TRAV27, TRAJ49)
CAGPVTSSIL

SEQ ID NO: 36940 - protein, 17 aa, Homo sapiens
  CDR3 for beta chain variable domain of TCR clone 18470 (TRBV6-5, TRBJ2-1)
CASRKNPRTGGHNEQFF

SEQ ID NO: 36941 - protein, 15 aa, Homo sapiens
  CDR3 for alpha chain variable domain of TCR clone 18471 (TRAV8-6, TRAJ10)
CAASDQAGGGNKLTF

SEQ ID NO: 36942 - protein, 13 aa, Homo sapiens
  CDR3 for beta chain variable domain of TCR clone 18471 (TRBV10-2, TRBJ2-3)
CASSESGDHTQYF

SEQ ID NO: 36943 - protein, 17 aa, Homo sapiens
  CDR3 for alpha chain variable domain of TCR clone 18472 (TRAV13-1, TRAJ52)
CAASSGAGGTSYGKLTF

SEQ ID NO: 36944 - protein, 15 aa, Homo sapiens
  CDR3 for beta chain variable domain of TCR clone 18472 (TRBV13, TRBJ1-5)
CASSFGQGGVQPQHF

SEQ ID NO: 36945 - protein, 18 aa, Homo sapiens
  CDR3 for alpha chain variable domain of TCR clone 18473 (TRAV12-3, TRAJ52)
CAMSVGGAGGTSYGKLPF

SEQ ID NO: 36946 - protein, 15 aa, Homo sapiens
  CDR3 for beta chain variable domain of TCR clone 18473 (TRBV27, TRBJ1-6)
CASSFDRGLGSPLHF

SEQ ID NO: 36947 - protein, 16 aa, Homo sapiens
  CDR3 for alpha chain variable domain of TCR clone 18474 (TRAV16, TRAJ4)
CALSRMFSGGYNKLIF

SEQ ID NO: 36948 - protein, 16 aa, Homo sapiens
  CDR3 for beta chain variable domain of TCR clone 18474 (TRBV24-1, TRBJ2-3)
CATSDPGTGAIDTQYF

SEQ ID NO: 36949 - protein, 12 aa, Homo sapiens
  CDR3 for alpha chain variable domain of TCR clone 18475 (TRAV12-3, TRAJ41)
CAMSYSGYALNF

SEQ ID NO: 36950 - protein, 13 aa, Homo sapiens
  CDR3 for beta chain variable domain of TCR clone 18475 (TRBV7-3, TRBJ2-1)
CASSLDSHNEQFF

SEQ ID NO: 36951 - protein, 12 aa, Homo sapiens
  CDR3 for alpha chain variable domain of TCR clone 18476 (TRAV16, TRAJ56)
CAPTGANSKLTL

SEQ ID NO: 36952 - protein, 17 aa, Homo sapiens
  CDR3 for beta chain variable domain of TCR clone 18476 (TRBV27, TRBJ2-6)
CASSLTGFASGANVLTF

SEQ ID NO: 36953 - protein, 16 aa, Homo sapiens
  CDR3 for alpha chain variable domain of TCR clone 18477 (TRAV27, TRAJ53)
CAAPEGGGGSNYKLTF

SEQ ID NO: 36954 - protein, 15 aa, Homo sapiens
  CDR3 for beta chain variable domain of TCR clone 18477 (TRBV20-1, TRBJ1-1)
CSASRGVTGNTEAFF

SEQ ID NO: 36955 - protein, 15 aa, Homo sapiens
  CDR3 for alpha chain variable domain of TCR clone 18478 (TRAV12-3, TRAJ6)
CAMSATTGGSYIPTF

SEQ ID NO: 36956 - protein, 16 aa, Homo sapiens
  CDR3 for beta chain variable domain of TCR clone 18478 (TRBV20-1, TRBJ1-2)
CSASMRQGVANYGYTF

SEQ ID NO: 36957 - protein, 12 aa, Homo sapiens
  CDR3 for alpha chain variable domain of TCR clone 18479 (TRAV12-3, TRAJ4)
CAMTGAGTRLAV

SEQ ID NO: 36958 - protein, 14 aa, Homo sapiens
  CDR3 for beta chain variable domain of TCR clone 18479 (TRBV10-3, TRBJ1-1)
CAISDTGRGVEAFF

SEQ ID NO: 36959 - protein, 13 aa, Homo sapiens
  CDR3 for alpha chain variable domain of TCR clone 18480 (TRAV21, TRAJ27)
CAALNTNTGKSTF

SEQ ID NO: 36960 - protein, 14 aa, Homo sapiens
  CDR3 for beta chain variable domain of TCR clone 18480 (TRBV27, TRBJ1-1)
CASSLLSGLSEAFF

SEQ ID NO: 36961 - protein, 14 aa, Homo sapiens
  CDR3 for alpha chain variable domain of TCR clone 18481 (TRAV17, TRAJ56)
CATDVGGANSKLTF

SEQ ID NO: 36962 - protein, 15 aa, Homo sapiens
  CDR3 for beta chain variable domain of TCR clone 18481 (TRBV20-1, TRBJ2-7)
CSARDRVSGMDEQYF

SEQ ID NO: 36963 - protein, 14 aa, Homo sapiens
  CDR3 for alpha chain variable domain of TCR clone 18482 (TRAV12-3, TRAJ10)
SHLPLTGGGNKLTF

SEQ ID NO: 36964 - protein, 15 aa, Homo sapiens
  CDR3 for beta chain variable domain of TCR clone 18482 (TRBV7-3, TRBJ2-1)
CASSPTGGGEVEQFF

SEQ ID NO: 36965 - protein, 14 aa, Homo sapiens
  CDR3 for alpha chain variable domain of TCR clone 18483 (TRAV12-2, TRAJ17)
CAVLFKDAGNKLTF

SEQ ID NO: 36966 - protein, 17 aa, Homo sapiens
  CDR3 for beta chain variable domain of TCR clone 18483 (TRBV20-1, TRBJ2-2)
CSASGSGQGGLTGELFF

SEQ ID NO: 36967 - protein, 14 aa, Homo sapiens
  CDR3 for alpha chain variable domain of TCR clone 18484 (TRAV12-2, TRAJ17)
CAVLFKATGNKLTF

SEQ ID NO: 36968 - protein, 17 aa, Homo sapiens
  CDR3 for beta chain variable domain of TCR clone 18484 (TRBV20-1, TRBJ2-2)
CSASGSGQGGLTGELFF

SEQ ID NO: 36969 - protein, 16 aa, Homo sapiens
  CDR3 for alpha chain variable domain of TCR clone 18485 (TRAV30, TRAJ24)
CGTEIVDADSWGKFQF

SEQ ID NO: 36970 - protein, 19 aa, Homo sapiens
  CDR3 for beta chain variable domain of TCR clone 18485 (TRBV19, TRBJ2-5)
CASSIGQVTDFFLGETQYF

SEQ ID NO: 36971 - protein, 14 aa, Homo sapiens
  CDR3 for alpha chain variable domain of TCR clone 18486 (TRAV12-2, TRAJ40)
CAVKIPSGTYKYIF

SEQ ID NO: 36972 - protein, 16 aa, Homo sapiens
  CDR3 for beta chain variable domain of TCR clone 18486 (TRBV12-5, TRBJ2-5)
CASGPRTSGNQETQYF

SEQ ID NO: 36973 - protein, 14 aa, Homo sapiens
  CDR3 for alpha chain variable domain of TCR clone 18487 (TRAV12-2, TRAJ6)
CASKGGGGSYIPTF

SEQ ID NO: 36974 - protein, 13 aa, Homo sapiens
  CDR3 for beta chain variable domain of TCR clone 18487 (TRBV2, TRBJ1-1)
CASSEGGNTEAFF

SEQ ID NO: 36975 - protein, 13 aa, Homo sapiens
  CDR3 for alpha chain variable domain of TCR clone 18488 (TRAV35, TRAJ42)
CAGFPESQGNLIF

SEQ ID NO: 36976 - protein, 13 aa, Homo sapiens
  CDR3 for beta chain variable domain of TCR clone 18488 (TRBV29-1, TRBJ2-1)
CSVEGGRVNEQFF

SEQ ID NO: 36977 - protein, 16 aa, Homo sapiens
  CDR3 for alpha chain variable domain of TCR clone 18489 (TRAV1-2, TRAJ10)
CAVRGVLTGGGNELTF

SEQ ID NO: 36978 - protein, 12 aa, Homo sapiens
  CDR3 for beta chain variable domain of TCR clone 18489 (TRBV7-8, TRBJ2-7)
CASSLGDREQYF

SEQ ID NO: 36979 - protein, 14 aa, Homo sapiens
  CDR3 for alpha chain variable domain of TCR clone 18490 (TRAV12-2, TRAJ40)
CAVNIPSGTYKYIF

SEQ ID NO: 36980 - protein, 14 aa, Homo sapiens
  CDR3 for beta chain variable domain of TCR clone 18490 (TRBV20-1, TRBJ1-1)
CSAQTRIGGTEAFF

SEQ ID NO: 36981 - protein, 11 aa, Homo sapiens
  CDR3 for alpha chain variable domain of TCR clone 18491 (TRAV2, TRAJ13)
CASGGYQKVTF

SEQ ID NO: 36982 - protein, 19 aa, Homo sapiens
  CDR3 for beta chain variable domain of TCR clone 18491 (TRBV20-1, TRBJ2-7)
CSAAGTSGGEAPTSSTSGR

SEQ ID NO: 36983 - protein, 16 aa, Homo sapiens
  CDR3 for alpha chain variable domain of TCR clone 18492 (TRAV8-3, TRAJ13)
CAVCAYPSGGYQKVTF

SEQ ID NO: 36984 - protein, 15 aa, Homo sapiens
  CDR3 for beta chain variable domain of TCR clone 18492 (TRBV19, TRBJ1-5)
CASSIVWADNQPQHF

SEQ ID NO: 36985 - protein, 15 aa, Homo sapiens
  CDR3 for alpha chain variable domain of TCR clone 18493 (TRAV17, TRAJ13)
CATDAGSGGYQKVTF

SEQ ID NO: 36986 - protein, 17 aa, Homo sapiens
  CDR3 for beta chain variable domain of TCR clone 18493 (TRBV11-2, TRBJ2-1)
CASSLCPPGVEYNEQFF

SEQ ID NO: 36987 - protein, 11 aa, Homo sapiens
  CDR3 for alpha chain variable domain of TCR clone 18494 (TRAV1-1, TRAJ23)
CAVRQGGKLIF

SEQ ID NO: 36988 - protein, 20 aa, Homo sapiens
  CDR3 for beta chain variable domain of TCR clone 18494 (TRBV7-8, TRBJ2-2)
CASSHVFPGPTIHITGELFF

SEQ ID NO: 36989 - protein, 16 aa, Homo sapiens
  CDR3 for alpha chain variable domain of TCR clone 18495 (TRAV26-1, TRAJ53)
CVVRVAMGGSNYKLTF

SEQ ID NO: 36990 - protein, 12 aa, Homo sapiens
  CDR3 for beta chain variable domain of TCR clone 18495 (TRBV7-9, TRBJ1-5)
CASSPQGQPQHF

SEQ ID NO: 36991 - protein, 14 aa, Homo sapiens
  CDR3 for alpha chain variable domain of TCR clone 18496 (TRAV3, TRAJ21)
CALGRGSTNFTLDL

SEQ ID NO: 36992 - protein, 14 aa, Homo sapiens
  CDR3 for beta chain variable domain of TCR clone 18496 (TRBV7-9, TRBJ2-4)
CASSLAMGGNSQYF

SEQ ID NO: 36993 - protein, 14 aa, Homo sapiens
  CDR3 for alpha chain variable domain of TCR clone 18497 (TRAV12-1, TRAJ17)
CVVNYKAAVNKLTF

SEQ ID NO: 36994 - protein, 17 aa, Homo sapiens
  CDR3 for beta chain variable domain of TCR clone 18497 (TRBV20-1, TRBJ2-1)
CSASSSGLAGSYNEQFF

SEQ ID NO: 36995 - protein, 15 aa, Homo sapiens
  CDR3 for alpha chain variable domain of TCR clone 18498 (TRAV12-3, TRAJ6)
CAMSATTEGSYIPTF

SEQ ID NO: 36996 - protein, 16 aa, Homo sapiens
  CDR3 for beta chain variable domain of TCR clone 18498 (TRBV20-1, TRBJ1-2)
CSASMGQGVANYGYTF

SEQ ID NO: 36997 - protein, 10 aa, Homo sapiens
  CDR3 for alpha chain variable domain of TCR clone 18499 (TRAV30, TRAJ48)
CGVGNEKLTF

SEQ ID NO: 36998 - protein, 14 aa, Homo sapiens
  CDR3 for beta chain variable domain of TCR clone 18499 (TRBV7-6, TRBJ2-3)
CASSVAGGTDTQYF

SEQ ID NO: 36999 - protein, 15 aa, Homo sapiens
  CDR3 for alpha chain variable domain of TCR clone 18500 (TRAV12-3, TRAJ6)
CAMSATTGGSYIPTF

SEQ ID NO: 37000 - protein, 16 aa, Homo sapiens
  CDR3 for beta chain variable domain of TCR clone 18500 (TRBV20-1, TRBJ1-2)
CSASMGQGVANCGYTF

SEQ ID NO: 37001 - protein, 12 aa, Homo sapiens
  CDR3 for alpha chain variable domain of TCR clone 18501 (TRAV13-1, TRAJ42)
SVLRGSQGNLIF

SEQ ID NO: 37002 - protein, 13 aa, Homo sapiens
  CDR3 for beta chain variable domain of TCR clone 18501 (TRBV2, TRBJ1-4)
CASSELGVEKLLF

SEQ ID NO: 37003 - protein, 11 aa, Homo sapiens
  CDR3 for alpha chain variable domain of TCR clone 18502 (TRAV16, TRAJ26)
CALRLWSEFCL

SEQ ID NO: 37004 - protein, 14 aa, Homo sapiens
  CDR3 for beta chain variable domain of TCR clone 18502 (TRBV7-2, TRBJ2-7)
CASRSQGAAYEQYF

SEQ ID NO: 37005 - protein, 13 aa, Homo sapiens
  CDR3 for alpha chain variable domain of TCR clone 18503 (TRAV3, TRAJ27)
CAVRPLGACKSTF

SEQ ID NO: 37006 - protein, 13 aa, Homo sapiens
  CDR3 for beta chain variable domain of TCR clone 18503 (TRBV7-9, TRBJ2-3)
CASSPGSTDTQYF

SEQ ID NO: 37007 - protein, 15 aa, Homo sapiens
  CDR3 for alpha chain variable domain of TCR clone 18504 (TRAV12-3, TRAJ6)
CAMSATTGGSYIPTF

SEQ ID NO: 37008 - protein, 14 aa, Homo sapiens
  CDR3 for beta chain variable domain of TCR clone 18504 (TRBV25-1, TRBJ1-1)
CASTHLGGNTEAFF

SEQ ID NO: 37009 - protein, 16 aa, Homo sapiens
  CDR3 for alpha chain variable domain of TCR clone 18505 (TRAV1-2, TRAJ10)
CAVRGVLTGGGNKLTF

SEQ ID NO: 37010 - protein, 16 aa, Homo sapiens
  CDR3 for beta chain variable domain of TCR clone 18505 (TRBV7-3, TRBJ2-2)
CASSLKRGTLSGELFF

SEQ ID NO: 37011 - protein, 12 aa, Homo sapiens
  CDR3 for alpha chain variable domain of TCR clone 18506 (TRAV12-1, TRAJ40)
CVFYSGTYKYIF

SEQ ID NO: 37012 - protein, 18 aa, Homo sapiens
  CDR3 for beta chain variable domain of TCR clone 18506 (TRBV12-4, TRBJ2-2)
CASSLVAGTRGRTRELFF

SEQ ID NO: 37013 - protein, 13 aa, Homo sapiens
  CDR3 for alpha chain variable domain of TCR clone 18507 (TRAV12-3, TRAJ33)
CAMSVNSDYQLIW

SEQ ID NO: 37014 - protein, 13 aa, Homo sapiens
  CDR3 for beta chain variable domain of TCR clone 18507 (TRBV7-2, TRBJ2-2)
CASSLAVTGELFF

SEQ ID NO: 37015 - protein, 13 aa, Homo sapiens
  CDR3 for alpha chain variable domain of TCR clone 18508 (TRAV12-2, TRAJ27)
CAARPGNAGKSTF

SEQ ID NO: 37016 - protein, 14 aa, Homo sapiens
  CDR3 for beta chain variable domain of TCR clone 18508 (TRBV7-6, TRBJ2-3)
CASSLGTVTDTQYF

SEQ ID NO: 37017 - protein, 17 aa, Homo sapiens
  CDR3 for alpha chain variable domain of TCR clone 18509 (TRAV26-1, TRAJ53)
RIVRVDDSGGSNYKLTF

SEQ ID NO: 37018 - protein, 15 aa, Homo sapiens
  CDR3 for beta chain variable domain of TCR clone 18509 (TRBV20-1, TRBJ2-7)
CSARVPAAYFYEQYF

SEQ ID NO: 37019 - protein, 15 aa, Homo sapiens
  CDR3 for alpha chain variable domain of TCR clone 18510 (TRAV3, TRAJ5)
CAVRDLDTGRRALTF

SEQ ID NO: 37020 - protein, 13 aa, Homo sapiens
  CDR3 for beta chain variable domain of TCR clone 18510 (TRBV12-4, TRBJ2-7)
CASSTTETYEQYF

SEQ ID NO: 37021 - protein, 13 aa, Homo sapiens
  CDR3 for alpha chain variable domain of TCR clone 18511 (TRAV12-1, TRAJ34)
CVVTGYNTDKLIL

SEQ ID NO: 37022 - protein, 13 aa, Homo sapiens
  CDR3 for beta chain variable domain of TCR clone 18511 (TRBV28, TRBJ2-7)
CASKAGGVYEQYF

SEQ ID NO: 37023 - protein, 13 aa, Homo sapiens
  CDR3 for alpha chain variable domain of TCR clone 18512 (TRAV13-2, TRAJ48)
CAEMDFGNEKLTF

SEQ ID NO: 37024 - protein, 15 aa, Homo sapiens
  CDR3 for beta chain variable domain of TCR clone 18512 (TRBV7-9, TRBJ1-6)
CASSSPGRGNSPFHF

SEQ ID NO: 37025 - protein, 13 aa, Homo sapiens
  CDR3 for alpha chain variable domain of TCR clone 18513 (TRAV2, TRAJ15)
CAVASQSGTALIF

SEQ ID NO: 37026 - protein, 16 aa, Homo sapiens
  CDR3 for beta chain variable domain of TCR clone 18513 (TRBV5-1, TRBJ1-1)
CASSSGGNSLNTEAFF

SEQ ID NO: 37027 - protein, 15 aa, Homo sapiens
  CDR3 for alpha chain variable domain of TCR clone 18514 (TRAV26-1, TRAJ29)
CIVRVEGSGNTPLVC

SEQ ID NO: 37028 - protein, 14 aa, Homo sapiens
  CDR3 for beta chain variable domain of TCR clone 18514 (TRBV18, TRBJ2-5)
CASSPGVSQETQYF

SEQ ID NO: 37029 - protein, 14 aa, Homo sapiens
  CDR3 for alpha chain variable domain of TCR clone 18515 (TRAV9-2, TRAJ39)
CALYIYNAGNMLTF

SEQ ID NO: 37030 - protein, 13 aa, Homo sapiens
  CDR3 for beta chain variable domain of TCR clone 18515 (TRBV27, TRBJ1-4)
CASSLMGDEKLFF

SEQ ID NO: 37031 - protein, 11 aa, Homo sapiens
  CDR3 for alpha chain variable domain of TCR clone 18516 (TRAV1-2, TRAJ31)
CAVNNNARLIF

SEQ ID NO: 37032 - protein, 15 aa, Homo sapiens
  CDR3 for beta chain variable domain of TCR clone 18516 (TRBV28, TRBJ2-1)
CASSIIAGGRSEQFF

SEQ ID NO: 37033 - protein, 18 aa, Homo sapiens
  CDR3 for alpha chain variable domain of TCR clone 18517 (TRAV26-1, TRAJ5)
CIVRAVPPRDTGRRALTF

SEQ ID NO: 37034 - protein, 15 aa, Homo sapiens
  CDR3 for beta chain variable domain of TCR clone 18517 (TRBV7-9, TRBJ2-7)
CASSLPMGQANEQYF

SEQ ID NO: 37035 - protein, 16 aa, Homo sapiens
  CDR3 for alpha chain variable domain of TCR clone 18518 (TRAV3, TRAJ37)
CAVGGKGSGNTGKLIF

SEQ ID NO: 37036 - protein, 13 aa, Homo sapiens
  CDR3 for beta chain variable domain of TCR clone 18518 (TRBV14, TRBJ2-7)
CASSQDRRYEQYF

SEQ ID NO: 37037 - protein, 16 aa, Homo sapiens
  CDR3 for alpha chain variable domain of TCR clone 18519 (TRAV22, TRAJ45)
CAMERGKRGGADGLTF

SEQ ID NO: 37038 - protein, 13 aa, Homo sapiens
  CDR3 for beta chain variable domain of TCR clone 18519 (TRBV27, TRBJ1-1)
CASSLSIGAEAFF

SEQ ID NO: 37039 - protein, 13 aa, Homo sapiens
  CDR3 for alpha chain variable domain of TCR clone 18520 (TRAV3, TRAJ20)
CAVRDTPRYKPSF

SEQ ID NO: 37040 - protein, 14 aa, Homo sapiens
  CDR3 for beta chain variable domain of TCR clone 18520 (TRBV11-1, TRBJ2-7)
CASTFAVPSYEQYF

SEQ ID NO: 37041 - protein, 15 aa, Homo sapiens
  CDR3 for alpha chain variable domain of TCR clone 18521 (TRAV35, TRAJ40)
CAGQLGTSGTYKYIF

SEQ ID NO: 37042 - protein, 14 aa, Homo sapiens
  CDR3 for beta chain variable domain of TCR clone 18521 (TRBV7-3, TRBJ2-1)
CASSLAGGTNEQFL

SEQ ID NO: 37043 - protein, 12 aa, Homo sapiens
  CDR3 for alpha chain variable domain of TCR clone 18522 (TRAV9-2, TRAJ48)
CALTFGNEKLTF

SEQ ID NO: 37044 - protein, 14 aa, Homo sapiens
  CDR3 for beta chain variable domain of TCR clone 18522 (TRBV11-3, TRBJ2-3)
CASSPSTRADTQYF

SEQ ID NO: 37045 - protein, 13 aa, Homo sapiens
  CDR3 for alpha chain variable domain of TCR clone 18523 (TRAV8-3, TRAJ36)
CAVGATGANNLFF

SEQ ID NO: 37046 - protein, 15 aa, Homo sapiens
  CDR3 for beta chain variable domain of TCR clone 18523 (TRBV7-2, TRBJ1-2)
CASSPRAGWNYGYSF

SEQ ID NO: 37047 - protein, 14 aa, Homo sapiens
  CDR3 for alpha chain variable domain of TCR clone 18524 (TRAV12-3, TRAJ10)
SHLPLTGGGNKLTF

SEQ ID NO: 37048 - protein, 14 aa, Homo sapiens
  CDR3 for beta chain variable domain of TCR clone 18524 (TRBV6-1, TRBJ1-3)
CASAQGGGGNTIYF

SEQ ID NO: 37049 - protein, 14 aa, Homo sapiens
  CDR3 for alpha chain variable domain of TCR clone 18525 (TRAV13-2, TRAJ49)
CAEILSNTGNQFYF

SEQ ID NO: 37050 - protein, 15 aa, Homo sapiens
  CDR3 for beta chain variable domain of TCR clone 18525 (TRBV5-1, TRBJ2-1)
CASSQAGYWWNEQFF

SEQ ID NO: 37051 - protein, 14 aa, Homo sapiens
  CDR3 for alpha chain variable domain of TCR clone 18526 (TRAV12-2, TRAJ40)
CAVKIPSGTYKYIF

SEQ ID NO: 37052 - protein, 14 aa, Homo sapiens
  CDR3 for beta chain variable domain of TCR clone 18526 (TRBV20-1, TRBJ1-1)
CSEQTRIGGTEAFF

SEQ ID NO: 37053 - protein, 13 aa, Homo sapiens
  CDR3 for alpha chain variable domain of TCR clone 18527 (TRAV8-3, TRAJ28)
FAVGAVGSYQLTF

SEQ ID NO: 37054 - protein, 14 aa, Homo sapiens
  CDR3 for beta chain variable domain of TCR clone 18527 (TRBV7-2, TRBJ2-7)
CASRSQGAAYEQYF

SEQ ID NO: 37055 - protein, 11 aa, Homo sapiens
  CDR3 for alpha chain variable domain of TCR clone 18528 (TRAV12-1, TRAJ30)
CVVNGQDKITF

SEQ ID NO: 37056 - protein, 12 aa, Homo sapiens
  CDR3 for beta chain variable domain of TCR clone 18528 (TRBV27, TRBJ2-2)
CASKLFTGELFF

SEQ ID NO: 37057 - protein, 13 aa, Homo sapiens
  CDR3 for alpha chain variable domain of TCR clone 18529 (TRAV8-3, TRAJ44)
CAVVPGPASKLTF

SEQ ID NO: 37058 - protein, 14 aa, Homo sapiens
  CDR3 for beta chain variable domain of TCR clone 18529 (TRBV11-2, TRBJ2-3)
CASSRLARTDTQYF

SEQ ID NO: 37059 - protein, 17 aa, Homo sapiens
  CDR3 for alpha chain variable domain of TCR clone 18530 (TRAV38-1, TRAJ54)
CAFMKPTGLQGAQKLVF

SEQ ID NO: 37060 - protein, 14 aa, Homo sapiens
  CDR3 for beta chain variable domain of TCR clone 18530 (TRBV19, TRBJ2-7)
CASSIRLGDHEQYF

SEQ ID NO: 37061 - protein, 14 aa, Homo sapiens
  CDR3 for alpha chain variable domain of TCR clone 18531 (TRAV3, TRAJ22)
CAVRDYGSARQLTF

SEQ ID NO: 37062 - protein, 13 aa, Homo sapiens
  CDR3 for beta chain variable domain of TCR clone 18531 (TRBV11-3, TRBJ2-5)
CASGHGAKETQYF

SEQ ID NO: 37063 - protein, 14 aa, Homo sapiens
  CDR3 for alpha chain variable domain of TCR clone 18532 (TRAV35, TRAJ33)
CSGSSQDSNYQLIW

SEQ ID NO: 37064 - protein, 15 aa, Homo sapiens
  CDR3 for beta chain variable domain of TCR clone 18532 (TRBV20-1, TRBJ2-7)
CSAESGTSGAYEQYF

SEQ ID NO: 37065 - protein, 14 aa, Homo sapiens
  CDR3 for alpha chain variable domain of TCR clone 18533 (TRAV35, TRAJ22)
CAGLRPGSARQLTF

SEQ ID NO: 37066 - protein, 15 aa, Homo sapiens
  CDR3 for beta chain variable domain of TCR clone 18533 (TRBV12-4, TRBJ2-5)
CASSPPTGLQETQFF

SEQ ID NO: 37067 - protein, 15 aa, Homo sapiens
  CDR3 for alpha chain variable domain of TCR clone 18534 (TRAV3, TRAJ5)
CDVRDLDTGRRALTF

SEQ ID NO: 37068 - protein, 13 aa, Homo sapiens
  CDR3 for beta chain variable domain of TCR clone 18534 (TRBV12-4, TRBJ2-7)
CASSPTETYEQYF

SEQ ID NO: 37069 - protein, 13 aa, Homo sapiens
  CDR3 for alpha chain variable domain of TCR clone 18535 (TRAV13-2, TRAJ53)
CAENMGSNYKLTF

SEQ ID NO: 37070 - protein, 13 aa, Homo sapiens
  CDR3 for beta chain variable domain of TCR clone 18535 (TRBV4-1, TRBJ2-2)
CASSQGNTGELFF

SEQ ID NO: 37071 - protein, 14 aa, Homo sapiens
  CDR3 for alpha chain variable domain of TCR clone 18536 (TRAV17, TRAJ22)
CATSPSGSARQLTF

SEQ ID NO: 37072 - protein, 15 aa, Homo sapiens
  CDR3 for beta chain variable domain of TCR clone 18536 (TRBV4-1, TRBJ2-5)
CASSQWDLYQETKYF

SEQ ID NO: 37073 - protein, 15 aa, Homo sapiens
  CDR3 for alpha chain variable domain of TCR clone 18537 (TRAV20, TRAJ43)
CAVQAGKSSNNDIRF

SEQ ID NO: 37074 - protein, 13 aa, Homo sapiens
  CDR3 for beta chain variable domain of TCR clone 18537 (TRBV27, TRBJ1-1)
CASSLSIGAEAFF

SEQ ID NO: 37075 - protein, 17 aa, Homo sapiens
  CDR3 for alpha chain variable domain of TCR clone 18538 (TRAV27, TRAJ42)
CAERVIYYGGSQGNLIF

SEQ ID NO: 37076 - protein, 14 aa, Homo sapiens
  CDR3 for beta chain variable domain of TCR clone 18538 (TRBV7-2, TRBJ2-3)
CASSLGGGERYAVF

SEQ ID NO: 37077 - protein, 10 aa, Homo sapiens
  CDR3 for alpha chain variable domain of TCR clone 18539 (TRAV12-3, TRAJ49)
CAMNDDQFYF

SEQ ID NO: 37078 - protein, 13 aa, Homo sapiens
  CDR3 for beta chain variable domain of TCR clone 18539 (TRBV7-9, TRBJ1-2)
CASSLKQNYGYTF

SEQ ID NO: 37079 - protein, 17 aa, Homo sapiens
  CDR3 for alpha chain variable domain of TCR clone 18540 (TRAV26-1, TRAJ53)
CIVRVDDSGGSNYKLTF

SEQ ID NO: 37080 - protein, 15 aa, Homo sapiens
  CDR3 for beta chain variable domain of TCR clone 18540 (TRBV20-1, TRBJ2-7)
CSARVPAAYFYGQYF

SEQ ID NO: 37081 - protein, 14 aa, Homo sapiens
  CDR3 for alpha chain variable domain of TCR clone 18541 (TRAV1-2, TRAJ16)
CAVNRFSDGQKLLF

SEQ ID NO: 37082 - protein, 10 aa, Homo sapiens
  CDR3 for beta chain variable domain of TCR clone 18541 (TRBV5-1, TRBJ2-2)
CASSLAGLSG

SEQ ID NO: 37083 - protein, 14 aa, Homo sapiens
  CDR3 for alpha chain variable domain of TCR clone 18542 (TRAV12-2, TRAJ13)
CAVKKTGGYQKVPF

SEQ ID NO: 37084 - protein, 15 aa, Homo sapiens
  CDR3 for beta chain variable domain of TCR clone 18542 (TRBV27, TRBJ2-1)
CASSNGGGSSNEQFF

SEQ ID NO: 37085 - protein, 11 aa, Homo sapiens
  CDR3 for alpha chain variable domain of TCR clone 18543 (TRAV23/DV6, TRAJ48)
CAPRWGETLTF

SEQ ID NO: 37086 - protein, 13 aa, Homo sapiens
  CDR3 for beta chain variable domain of TCR clone 18543 (TRBV12-4, TRBJ2-5)
CASSPGTEETQYF

SEQ ID NO: 37087 - protein, 15 aa, Homo sapiens
  CDR3 for alpha chain variable domain of TCR clone 18544 (TRAV8-3, TRAJ45)
WASSYSGGGADGLTF

SEQ ID NO: 37088 - protein, 13 aa, Homo sapiens
  CDR3 for beta chain variable domain of TCR clone 18544 (TRBV10-3, TRBJ2-7)
CASKLAVNYEQYF

SEQ ID NO: 37089 - protein, 14 aa, Homo sapiens
  CDR3 for alpha chain variable domain of TCR clone 18545 (TRAV12-3, TRAJ10)
SHLPLTGGGNKLTF

SEQ ID NO: 37090 - protein, 14 aa, Homo sapiens
  CDR3 for beta chain variable domain of TCR clone 18545 (TRBV11-2, TRBJ2-5)
CASSRTGGIETQYF

SEQ ID NO: 37091 - protein, 13 aa, Homo sapiens
  CDR3 for alpha chain variable domain of TCR clone 18546 (TRAV1-1, TRAJ9)
CAAKNTEGFKTIF

SEQ ID NO: 37092 - protein, 14 aa, Homo sapiens
  CDR3 for beta chain variable domain of TCR clone 18546 (TRBV20-1, TRBJ2-1)
CSAQIGGSANEQFF

SEQ ID NO: 37093 - protein, 18 aa, Homo sapiens
  CDR3 for alpha chain variable domain of TCR clone 18547 (TRAV8-3, TRAJ44)
CAVGPLFKALPVNSPLGL

SEQ ID NO: 37094 - protein, 16 aa, Homo sapiens
  CDR3 for beta chain variable domain of TCR clone 18547 (TRBV11-2, TRBJ2-7)
CASSPTTGGVSYEQYF

SEQ ID NO: 37095 - protein, 14 aa, Homo sapiens
  CDR3 for alpha chain variable domain of TCR clone 18548 (TRAV12-2, TRAJ40)
CAVKIPSGTYKYIF

SEQ ID NO: 37096 - protein, 14 aa, Homo sapiens
  CDR3 for beta chain variable domain of TCR clone 18548 (TRBV20-1, TRBJ1-1)
CSAQTWIGGTEAFF

SEQ ID NO: 37097 - protein, 17 aa, Homo sapiens
  CDR3 for alpha chain variable domain of TCR clone 18549 (TRAV13-1, TRAJ31)
CAPRDRLMFGDGTQLVV

SEQ ID NO: 37098 - protein, 12 aa, Homo sapiens
  CDR3 for beta chain variable domain of TCR clone 18549 (TRBV7-9, TRBJ2-7)
CASSLEGYEQYL

SEQ ID NO: 37099 - protein, 11 aa, Homo sapiens
  CDR3 for alpha chain variable domain of TCR clone 18550 (TRAV39, TRAJ49)
CAVDISTQFYF

SEQ ID NO: 37100 - protein, 11 aa, Homo sapiens
  CDR3 for beta chain variable domain of TCR clone 18550 (TRBV7-8, TRBJ2-7)
CASSLSLEQYL

SEQ ID NO: 37101 - protein, 14 aa, Homo sapiens
  CDR3 for alpha chain variable domain of TCR clone 18551 (TRAV1-2, TRAJ16)
CAVNRFSDGQKLLF

SEQ ID NO: 37102 - protein, 15 aa, Homo sapiens
  CDR3 for beta chain variable domain of TCR clone 18551 (TRBV7-9, TRBJ1-6)
CASSAPGRGNSPLHF

SEQ ID NO: 37103 - protein, 15 aa, Homo sapiens
  CDR3 for alpha chain variable domain of TCR clone 18552 (TRAV26-1, TRAJ29)
CIVRVEGSGNTPLVF

SEQ ID NO: 37104 - protein, 15 aa, Homo sapiens
  CDR3 for beta chain variable domain of TCR clone 18552 (TRBV6-3, TRBJ2-7)
CASSSPGTVFYEQYF

SEQ ID NO: 37105 - protein, 14 aa, Homo sapiens
  CDR3 for alpha chain variable domain of TCR clone 18553 (TRAV12-2, TRAJ17)
CAVLFKAAGNKLTF

SEQ ID NO: 37106 - protein, 15 aa, Homo sapiens
  CDR3 for beta chain variable domain of TCR clone 18553 (TRBV11-3, TRBJ2-3)
CASLKDGREGDTQYF

SEQ ID NO: 37107 - protein, 14 aa, Homo sapiens
  CDR3 for alpha chain variable domain of TCR clone 18554 (TRAV9-2, TRAJ39)
CALYIYNAGNMLTF

SEQ ID NO: 37108 - protein, 17 aa, Homo sapiens
  CDR3 for beta chain variable domain of TCR clone 18554 (TRBV20-1, TRBJ2-1)
CSASSSGLAGSYNEQFF

SEQ ID NO: 37109 - protein, 12 aa, Homo sapiens
  CDR3 for alpha chain variable domain of TCR clone 18555 (TRAV12-3, TRAJ17)
CAMTLTGNKLTF

SEQ ID NO: 37110 - protein, 15 aa, Homo sapiens
  CDR3 for beta chain variable domain of TCR clone 18555 (TRBV20-1, TRBJ2-1)
CSARDRVSGMDEQYF

SEQ ID NO: 37111 - protein, 11 aa, Homo sapiens
  CDR3 for alpha chain variable domain of TCR clone 18556 (TRAV3, TRAJ21)
CAEGNFNKFYF

SEQ ID NO: 37112 - protein, 16 aa, Homo sapiens
  CDR3 for beta chain variable domain of TCR clone 18556 (TRBV19, TRBJ2-1)
CASSKAGPSSYNEQFF

SEQ ID NO: 37113 - protein, 18 aa, Homo sapiens
  CDR3 for alpha chain variable domain of TCR clone 18557 (TRAV13-1, TRAJ52)
CAASKRSAGGTSYGKLTS

SEQ ID NO: 37114 - protein, 13 aa, Homo sapiens
  CDR3 for beta chain variable domain of TCR clone 18557 (TRBV12-4, TRBJ1-2)
CASSLRQGKGYTF

SEQ ID NO: 37115 - protein, 12 aa, Homo sapiens
  CDR3 for alpha chain variable domain of TCR clone 18558 (TRAV1-1, TRAJ8)
CAEGTGFQKLVF

SEQ ID NO: 37116 - protein, 14 aa, Homo sapiens
  CDR3 for beta chain variable domain of TCR clone 18558 (TRBV12-5, TRBJ2-5)
CASGSRTHQETQYF

SEQ ID NO: 37117 - protein, 13 aa, Homo sapiens
  CDR3 for alpha chain variable domain of TCR clone 18559 (TRAV1-2, TRAJ9)
CAALNTGGFKTIF

SEQ ID NO: 37118 - protein, 13 aa, Homo sapiens
  CDR3 for beta chain variable domain of TCR clone 18559 (TRBV12-5, TRBJ2-3)
CASGDRQSDTQYF

SEQ ID NO: 37119 - protein, 14 aa, Homo sapiens
  CDR3 for alpha chain variable domain of TCR clone 18560 (TRAV38-1, TRAJ40)
CALRPTSGTYKYIF

SEQ ID NO: 37120 - protein, 14 aa, Homo sapiens
  CDR3 for beta chain variable domain of TCR clone 18560 (TRBV12-5, TRBJ2-5)
CASGSRTHQETQYF

SEQ ID NO: 37121 - protein, 14 aa, Homo sapiens
  CDR3 for alpha chain variable domain of TCR clone 18561 (TRAV3, TRAJ22)
CAVRDYGSARQLPF

SEQ ID NO: 37122 - protein, 13 aa, Homo sapiens
  CDR3 for beta chain variable domain of TCR clone 18561 (TRBV11-2, TRBJ2-5)
CASGHGAKETQYF

SEQ ID NO: 37123 - protein, 16 aa, Homo sapiens
  CDR3 for alpha chain variable domain of TCR clone 18562 (TRAV14/DV4, TRAJ53)
CAMREGGGGSNYKLTF

SEQ ID NO: 37124 - protein, 15 aa, Homo sapiens
  CDR3 for beta chain variable domain of TCR clone 18562 (TRBV20-1, TRBJ2-7)
CSARDRVSGMDEQYF

SEQ ID NO: 37125 - protein, 11 aa, Homo sapiens
  CDR3 for alpha chain variable domain of TCR clone 18563 (TRAV21, TRAJ11)
CAVNGYSTLTF

SEQ ID NO: 37126 - protein, 11 aa, Homo sapiens
  CDR3 for beta chain variable domain of TCR clone 18563 (TRBV19, TRBJ1-1)
CASSIGGEAFF

SEQ ID NO: 37127 - protein, 15 aa, Homo sapiens
  CDR3 for alpha chain variable domain of TCR clone 18564 (TRAV13-1, TRAJ44)
CAASRGGGTAGKLTF

SEQ ID NO: 37128 - protein, 14 aa, Homo sapiens
  CDR3 for beta chain variable domain of TCR clone 18564 (TRBV7-2, TRBJ2-5)
CASSPRGSSETQYF

SEQ ID NO: 37129 - protein, 14 aa, Homo sapiens
  CDR3 for alpha chain variable domain of TCR clone 18565 (TRAV1-2, TRAJ8)
CAVREDTGFQKLVF

SEQ ID NO: 37130 - protein, 13 aa, Homo sapiens
  CDR3 for beta chain variable domain of TCR clone 18565 (TRBV4-1, TRBJ2-1)
CASSQAGGDEQFF

SEQ ID NO: 37131 - protein, 17 aa, Homo sapiens
  CDR3 for alpha chain variable domain of TCR clone 18566 (TRAV3, TRAJ6)
CAVRDGPRAGGSYIPTF

SEQ ID NO: 37132 - protein, 20 aa, Homo sapiens
  CDR3 for beta chain variable domain of TCR clone 18566 (TRBV28, TRBJ2-1)
WASTPIGRSPGLAGGNEQFF

SEQ ID NO: 37133 - protein, 20 aa, Homo sapiens
  CDR3 for alpha chain variable domain of TCR clone 18567 (TRAV21, TRAJ4)
AASQPGDSTTLAGGYNKLIF

SEQ ID NO: 37134 - protein, 19 aa, Homo sapiens
  CDR3 for beta chain variable domain of TCR clone 18567 (TRBV18, TRBJ1-3)
CASSPLSRTGMSSGNTIYF

SEQ ID NO: 37135 - protein, 11 aa, Homo sapiens
  CDR3 for alpha chain variable domain of TCR clone 18568 (TRAV1-2, TRAJ20)
CAVANDHKLSF

SEQ ID NO: 37136 - protein, 18 aa, Homo sapiens
  CDR3 for beta chain variable domain of TCR clone 18568 (TRBV20-1, TRBJ2-6)
CSAETTPTHGSGANVLTF

SEQ ID NO: 37137 - protein, 17 aa, Homo sapiens
  CDR3 for alpha chain variable domain of TCR clone 18569 (TRAV13-1, TRAJ28)
CAASPPYSGTGSYQLTF

SEQ ID NO: 37138 - protein, 15 aa, Homo sapiens
  CDR3 for beta chain variable domain of TCR clone 18569 (TRBV6-3, TRBJ2-2)
CASSFLATLTGELFF

SEQ ID NO: 37139 - protein, 15 aa, Homo sapiens
  CDR3 for alpha chain variable domain of TCR clone 18570 (TRAV21, TRAJ24)
CAARSSTDSWGELQF

SEQ ID NO: 37140 - protein, 13 aa, Homo sapiens
  CDR3 for beta chain variable domain of TCR clone 18570 (TRBV11-2, TRBJ2-5)
CASSSTGEETQYF

SEQ ID NO: 37141 - protein, 14 aa, Homo sapiens
  CDR3 for alpha chain variable domain of TCR clone 18571 (TRAV12-1, TRAJ17)
CVVNYKAAGNKLTF

SEQ ID NO: 37142 - protein, 12 aa, Homo sapiens
  CDR3 for beta chain variable domain of TCR clone 18571 (TRBV20-1, TRBJ2-7)
CSAITPTKEQYF

SEQ ID NO: 37143 - protein, 13 aa, Homo sapiens
  CDR3 for alpha chain variable domain of TCR clone 18572 (TRAV16, TRAJ31)
CSLSAHNNARLMF

SEQ ID NO: 37144 - protein, 17 aa, Homo sapiens
  CDR3 for beta chain variable domain of TCR clone 18572 (TRBV12-4, TRBJ2-1)
CASSPGLAGGRINEQFF

SEQ ID NO: 37145 - protein, 13 aa, Homo sapiens
  CDR3 for alpha chain variable domain of TCR clone 18573 (TRAV8-3, TRAJ48)
CAVVPLGNEKLTF

SEQ ID NO: 37146 - protein, 15 aa, Homo sapiens
  CDR3 for beta chain variable domain of TCR clone 18573 (TRBV11-2, TRBJ2-1)
CASSSPSTRYNEQFF

SEQ ID NO: 37147 - protein, 14 aa, Homo sapiens
  CDR3 for alpha chain variable domain of TCR clone 18574 (TRAV26-1, TRAJ38)
CIADNAGNNLKLIW

SEQ ID NO: 37148 - protein, 13 aa, Homo sapiens
  CDR3 for beta chain variable domain of TCR clone 18574 (TRBV20-1, TRBJ1-1)
CSARGGGNTEAFF

SEQ ID NO: 37149 - protein, 15 aa, Homo sapiens
  CDR3 for alpha chain variable domain of TCR clone 18575 (TRAV27, TRAJ38)
CAARRNAGNNLKLIW

SEQ ID NO: 37150 - protein, 13 aa, Homo sapiens
  CDR3 for beta chain variable domain of TCR clone 18575 (TRBV12-5, TRBJ2-3)
CASGDRQSDTQYF

SEQ ID NO: 37151 - protein, 13 aa, Homo sapiens
  CDR3 for alpha chain variable domain of TCR clone 18576 (TRAV12-3, TRAJ13)
CAMSSGGYQEVTF

SEQ ID NO: 37152 - protein, 13 aa, Homo sapiens
  CDR3 for beta chain variable domain of TCR clone 18576 (TRBV20-1, TRBJ1-1)
CGAPPGGHTEAFF

SEQ ID NO: 37153 - protein, 15 aa, Homo sapiens
  CDR3 for alpha chain variable domain of TCR clone 18577 (TRAV3, TRAJ5)
CAVRDLDTGRRALTF

SEQ ID NO: 37154 - protein, 13 aa, Homo sapiens
  CDR3 for beta chain variable domain of TCR clone 18577 (TRBV12-4, TRBJ2-7)
CASIPTETYEQYF

SEQ ID NO: 37155 - protein, 14 aa, Homo sapiens
  CDR3 for alpha chain variable domain of TCR clone 18578 (TRAV8-4, TRAJ13)
CAATLSGGYQKVTF

SEQ ID NO: 37156 - protein, 14 aa, Homo sapiens
  CDR3 for beta chain variable domain of TCR clone 18578 (TRBV7-2, TRBJ1-2)
CASSQTGSTYGYTF

SEQ ID NO: 37157 - protein, 13 aa, Homo sapiens
  CDR3 for alpha chain variable domain of TCR clone 18579 (TRAV8-3, TRAJ28)
CAVGAVGSYQLTC

SEQ ID NO: 37158 - protein, 14 aa, Homo sapiens
  CDR3 for beta chain variable domain of TCR clone 18579 (TRBV7-2, TRBJ2-7)
CASRSQGAAYEQYF

SEQ ID NO: 37159 - protein, 11 aa, Homo sapiens
  CDR3 for alpha chain variable domain of TCR clone 18580 (TRAV1-2, TRAJ20)
CAVANDYKLSF

SEQ ID NO: 37160 - protein, 16 aa, Homo sapiens
  CDR3 for beta chain variable domain of TCR clone 18580 (TRBV7-3, TRBJ2-1)
CASSLEGYRSYNEQFF

SEQ ID NO: 37161 - protein, 19 aa, Homo sapiens
  CDR3 for alpha chain variable domain of TCR clone 18581 (TRAV3, )
CAVRPTPDIQNPDPAVYQL

SEQ ID NO: 37162 - protein, 15 aa, Homo sapiens
  CDR3 for beta chain variable domain of TCR clone 18581 (TRBV11-3, TRBJ2-5)
CASSDTSGGIETQYF

SEQ ID NO: 37163 - protein, 13 aa, Homo sapiens
  CDR3 for alpha chain variable domain of TCR clone 18582 (TRAV21, TRAJ20)
CAVGLRVDYKLSF

SEQ ID NO: 37164 - protein, 13 aa, Homo sapiens
  CDR3 for beta chain variable domain of TCR clone 18582 (TRBV6-1, TRBJ1-1)
CASSREGNTEAFF

SEQ ID NO: 37165 - protein, 19 aa, Homo sapiens
  CDR3 for alpha chain variable domain of TCR clone 18583 (TRAV38-1, TRAJ53)
CAFMKHGLESGGSNHKLTF

SEQ ID NO: 37166 - protein, 13 aa, Homo sapiens
  CDR3 for beta chain variable domain of TCR clone 18583 (TRBV19, TRBJ2-7)
CASSPRQSYEQYF

SEQ ID NO: 37167 - protein, 14 aa, Homo sapiens
  CDR3 for alpha chain variable domain of TCR clone 18584 (TRAV8-4, TRAJ13)
CAVTLSGGSQKVTF

SEQ ID NO: 37168 - protein, 14 aa, Homo sapiens
  CDR3 for beta chain variable domain of TCR clone 18584 (TRBV7-2, TRBJ1-2)
CASSQTGSTYGYTF

SEQ ID NO: 37169 - protein, 14 aa, Homo sapiens
  CDR3 for alpha chain variable domain of TCR clone 18585 (TRAV4, TRAJ12)
CLVGYMDSSYKLIF

SEQ ID NO: 37170 - protein, 14 aa, Homo sapiens
  CDR3 for beta chain variable domain of TCR clone 18585 (TRBV27, TRBJ1-1)
CASSPGGGATEAFL

SEQ ID NO: 37171 - protein, 13 aa, Homo sapiens
  CDR3 for alpha chain variable domain of TCR clone 18586 (TRAV26-2, TRAJ43)
RILRAVNNNDMRF

SEQ ID NO: 37172 - protein, 15 aa, Homo sapiens
  CDR3 for beta chain variable domain of TCR clone 18586 (TRBV7-2, TRBJ2-1)
CASTHGTGIYNEQFF

SEQ ID NO: 37173 - protein, 15 aa, Homo sapiens
  CDR3 for alpha chain variable domain of TCR clone 18587 (TRAV12-2, TRAJ53)
CAVNGGGGSNYKLTF

SEQ ID NO: 37174 - protein, 12 aa, Homo sapiens
  CDR3 for beta chain variable domain of TCR clone 18587 (TRBV7-8, TRBJ2-7)
CASSLGDREQYF

SEQ ID NO: 37175 - protein, 13 aa, Homo sapiens
  CDR3 for alpha chain variable domain of TCR clone 18588 (TRAV27, TRAJ57)
CRSAQGGSEKLVF

SEQ ID NO: 37176 - protein, 11 aa, Homo sapiens
  CDR3 for beta chain variable domain of TCR clone 18588 (TRBV11-3, TRBJ1-1)
CASSINTEAFF

SEQ ID NO: 37177 - protein, 11 aa, Homo sapiens
  CDR3 for alpha chain variable domain of TCR clone 18589 (TRAV1-2, TRAJ20)
CALANDYKLSF

SEQ ID NO: 37178 - protein, 18 aa, Homo sapiens
  CDR3 for beta chain variable domain of TCR clone 18589 (TRBV20-1, TRBJ2-6)
CSAETTPTHGSGANVLTF

SEQ ID NO: 37179 - protein, 12 aa, Homo sapiens
  CDR3 for alpha chain variable domain of TCR clone 18590 (TRAV8-3, TRAJ40)
CAVTSGTYKYIF

SEQ ID NO: 37180 - protein, 14 aa, Homo sapiens
  CDR3 for beta chain variable domain of TCR clone 18590 (TRBV12-4, TRBJ1-1)
CASSLGTGGTEAFF

SEQ ID NO: 37181 - protein, 15 aa, Homo sapiens
  CDR3 for alpha chain variable domain of TCR clone 18591 (TRAV24, TRAJ24)
CARTMTTDSWGKFQF

SEQ ID NO: 37182 - protein, 12 aa, Homo sapiens
  CDR3 for beta chain variable domain of TCR clone 18591 (TRBV27, TRBJ2-1)
CASRGFYNEQFF

SEQ ID NO: 37183 - protein, 15 aa, Homo sapiens
  CDR3 for alpha chain variable domain of TCR clone 18592 (TRAV12-3, TRAJ6)
CAMSATTGGGYIPTF

SEQ ID NO: 37184 - protein, 16 aa, Homo sapiens
  CDR3 for beta chain variable domain of TCR clone 18592 (TRBV20-1, TRBJ1-2)
CSASMGQGVANYGYTF

SEQ ID NO: 37185 - protein, 12 aa, Homo sapiens
  CDR3 for alpha chain variable domain of TCR clone 18593 (TRAV13-1, TRAJ48)
CAANFGNEKLTF

SEQ ID NO: 37186 - protein, 13 aa, Homo sapiens
  CDR3 for beta chain variable domain of TCR clone 18593 (TRBV7-3, TRBJ1-1)
CASSQDWGAKAFF

SEQ ID NO: 37187 - protein, 12 aa, Homo sapiens
  CDR3 for alpha chain variable domain of TCR clone 18594 (TRAV1-1, TRAJ39)
CAVPVVGNMLTF

SEQ ID NO: 37188 - protein, 13 aa, Homo sapiens
  CDR3 for beta chain variable domain of TCR clone 18594 (TRBV20-1, TRBJ1-1)
CSARGGGNTEAFF

SEQ ID NO: 37189 - protein, 17 aa, Homo sapiens
  CDR3 for alpha chain variable domain of TCR clone 18595 (TRAV3, TRAJ6)
CAVRDGPRAGGSYIPTF

SEQ ID NO: 37190 - protein, 14 aa, Homo sapiens
  CDR3 for beta chain variable domain of TCR clone 18595 (TRBV7-2, TRBJ2-7)
CASSPKTSFYEQDF

SEQ ID NO: 37191 - protein, 15 aa, Homo sapiens
  CDR3 for alpha chain variable domain of TCR clone 18596 (TRAV38-1, TRAJ37)
CTFIHGSGNTGKLIF

SEQ ID NO: 37192 - protein, 12 aa, Homo sapiens
  CDR3 for beta chain variable domain of TCR clone 18596 (TRBV7-9, TRBJ2-7)
CASSFGSYEQYF

SEQ ID NO: 37193 - protein, 14 aa, Homo sapiens
  CDR3 for alpha chain variable domain of TCR clone 18597 (TRAV26-1, TRAJ34)
CIVRVAYNTDKLLF

SEQ ID NO: 37194 - protein, 15 aa, Homo sapiens
  CDR3 for beta chain variable domain of TCR clone 18597 (TRBV20-1, TRBJ2-7)
CSARVPAAYFYEQYF

SEQ ID NO: 37195 - protein, 14 aa, Homo sapiens
  CDR3 for alpha chain variable domain of TCR clone 18598 (TRAV13-1, TRAJ44)
CAAKATGAASKLTF

SEQ ID NO: 37196 - protein, 17 aa, Homo sapiens
  CDR3 for beta chain variable domain of TCR clone 18598 (TRBV7-3, TRBJ2-3)
CASSLMKRMRGADTQYF

SEQ ID NO: 37197 - protein, 17 aa, Homo sapiens
  CDR3 for alpha chain variable domain of TCR clone 18599 (TRAV26-1, TRAJ53)
CIVRVDDSGGSNYKLTF

SEQ ID NO: 37198 - protein, 15 aa, Homo sapiens
  CDR3 for beta chain variable domain of TCR clone 18599 (TRBV20-1, TRBJ2-7)
CSARVTAAYFYEQYF

SEQ ID NO: 37199 - protein, 14 aa, Homo sapiens
  CDR3 for alpha chain variable domain of TCR clone 18600 (TRAV21, TRAJ35)
CAVMPIGFGNVLHC

SEQ ID NO: 37200 - protein, 12 aa, Homo sapiens
  CDR3 for beta chain variable domain of TCR clone 18600 (TRBV7-9, TRBJ2-7)
CASSIKRDEQYF

SEQ ID NO: 37201 - protein, 14 aa, Homo sapiens
  CDR3 for alpha chain variable domain of TCR clone 18601 (TRAV12-1, TRAJ17)
CVVNPKAAGNKLAF

SEQ ID NO: 37202 - protein, 16 aa, Homo sapiens
  CDR3 for beta chain variable domain of TCR clone 18601 (TRBV20-1, TRBJ2-1)
CSASASGYSSYNEQFF

SEQ ID NO: 37203 - protein, 15 aa, Homo sapiens
  CDR3 for alpha chain variable domain of TCR clone 18602 (TRAV3, TRAJ3)
CAVRDRDSSASKIIF

SEQ ID NO: 37204 - protein, 18 aa, Homo sapiens
  CDR3 for beta chain variable domain of TCR clone 18602 (TRBV25-1, TRBJ1-2)
RASSGLQNGQGLIFGYTF

SEQ ID NO: 37205 - protein, 14 aa, Homo sapiens
  CDR3 for alpha chain variable domain of TCR clone 18603 (TRAV1-2, TRAJ8)
CAVREDTGFQKPVF

SEQ ID NO: 37206 - protein, 15 aa, Homo sapiens
  CDR3 for beta chain variable domain of TCR clone 18603 (TRBV20-1, TRBJ2-7)
CSARDRVSGMDEQYF

SEQ ID NO: 37207 - protein, 12 aa, Homo sapiens
  CDR3 for alpha chain variable domain of TCR clone 18604 (TRAV36/DV7, TRAJ54)
CAVVRGAQKLVV

SEQ ID NO: 37208 - protein, 14 aa, Homo sapiens
  CDR3 for beta chain variable domain of TCR clone 18604 (TRBV7-3, TRBJ1-1)
CASSLKGGNTEAFF

SEQ ID NO: 37209 - protein, 13 aa, Homo sapiens
  CDR3 for alpha chain variable domain of TCR clone 18605 (TRAV4, TRAJ42)
CLVGGGSQGNPIF

SEQ ID NO: 37210 - protein, 16 aa, Homo sapiens
  CDR3 for beta chain variable domain of TCR clone 18605 (TRBV5-1, TRBJ2-3)
CASSLQGRVGADTQYF

SEQ ID NO: 37211 - protein, 13 aa, Homo sapiens
  CDR3 for alpha chain variable domain of TCR clone 18606 (TRAV27, TRAJ41)
CAGEGNSGYALTF

SEQ ID NO: 37212 - protein, 14 aa, Homo sapiens
  CDR3 for beta chain variable domain of TCR clone 18606 (TRBV7-2, TRBJ1-1)
CASSFLTGTTEAFF

SEQ ID NO: 37213 - protein, 11 aa, Homo sapiens
  CDR3 for alpha chain variable domain of TCR clone 18607 (TRAV2, TRAJ13)
CASGGYQKVTF

SEQ ID NO: 37214 - protein, 16 aa, Homo sapiens
  CDR3 for beta chain variable domain of TCR clone 18607 (TRBV6-1, TRBJ2-5)
CASSETLDRGEETQYF

SEQ ID NO: 37215 - protein, 14 aa, Homo sapiens
  CDR3 for alpha chain variable domain of TCR clone 18608 (TRAV38-1, TRAJ45)
FAYYSGGGADGLTF

SEQ ID NO: 37216 - protein, 20 aa, Homo sapiens
  CDR3 for beta chain variable domain of TCR clone 18608 (TRBV28, TRBJ2-1)
CASTPIGRSPGLAGGNEQFF

SEQ ID NO: 37217 - protein, 14 aa, Homo sapiens
  CDR3 for alpha chain variable domain of TCR clone 18609 (TRAV1-1, TRAJ27)
CAVIYNTNAGKPTF

SEQ ID NO: 37218 - protein, 15 aa, Homo sapiens
  CDR3 for beta chain variable domain of TCR clone 18609 (TRBV7-2, TRBJ2-1)
CASSSGLAGGNEQFF

SEQ ID NO: 37219 - protein, 17 aa, Homo sapiens
  CDR3 for alpha chain variable domain of TCR clone 18610 (TRAV4, TRAJ42)
CLVGVLNYGGSQGNLIF

SEQ ID NO: 37220 - protein, 12 aa, Homo sapiens
  CDR3 for beta chain variable domain of TCR clone 18610 (TRBV20-1, TRBJ2-1)
CSAQYTYNEQFL

SEQ ID NO: 37221 - protein, 16 aa, Homo sapiens
  CDR3 for alpha chain variable domain of TCR clone 18611 (TRAV26-1, TRAJ53)
CIVRVAMGGRNYKLTF

SEQ ID NO: 37222 - protein, 12 aa, Homo sapiens
  CDR3 for beta chain variable domain of TCR clone 18611 (TRBV7-9, TRBJ1-5)
CASSPQGQPQHF

SEQ ID NO: 37223 - protein, 14 aa, Homo sapiens
  CDR3 for alpha chain variable domain of TCR clone 18612 (TRAV12-2, TRAJ17)
CAVLFKAAGNKLTF

SEQ ID NO: 37224 - protein, 17 aa, Homo sapiens
  CDR3 for beta chain variable domain of TCR clone 18612 (TRBV20-1, TRBJ2-2)
GSASGSGQGGLTGELFF

SEQ ID NO: 37225 - protein, 18 aa, Homo sapiens
  CDR3 for alpha chain variable domain of TCR clone 18613 (TRAV13-1, )
CAASPMDIQNPDPAVYQL

SEQ ID NO: 37226 - protein, 13 aa, Homo sapiens
  CDR3 for beta chain variable domain of TCR clone 18613 (TRBV20-1, TRBJ2-2)
CSASAAGTGELFF

SEQ ID NO: 37227 - protein, 14 aa, Homo sapiens
  CDR3 for alpha chain variable domain of TCR clone 18614 (TRAV8-2, TRAJ11)
CVVSEKSGYRTLTF

SEQ ID NO: 37228 - protein, 16 aa, Homo sapiens
  CDR3 for beta chain variable domain of TCR clone 18614 (TRBV28, TRBJ2-1)
CASSSPEYPRDNEQFF

SEQ ID NO: 37229 - protein, 15 aa, Homo sapiens
  CDR3 for alpha chain variable domain of TCR clone 18615 (TRAV17, TRAJ23)
CATDAEDNQGGKRIF

SEQ ID NO: 37230 - protein, 12 aa, Homo sapiens
  CDR3 for beta chain variable domain of TCR clone 18615 (TRBV2, TRBJ2-1)
CAKREGYNEQFF

SEQ ID NO: 37231 - protein, 16 aa, Homo sapiens
  CDR3 for alpha chain variable domain of TCR clone 18616 (TRAV9-2, TRAJ52)
CALQGAGGTSYGKLTF

SEQ ID NO: 37232 - protein, 15 aa, Homo sapiens
  CDR3 for beta chain variable domain of TCR clone 18616 (TRBV18, TRBJ1-5)
CASSPSDRSNQPQHF

SEQ ID NO: 37233 - protein, 12 aa, Homo sapiens
  CDR3 for alpha chain variable domain of TCR clone 18617 (TRAV12-3, TRAJ17)
CAMTLTGNKLTF

SEQ ID NO: 37234 - protein, 13 aa, Homo sapiens
  CDR3 for beta chain variable domain of TCR clone 18617 (TRBV19, TRBJ2-7)
CASSPRQSYEQYF

SEQ ID NO: 37235 - protein, 12 aa, Homo sapiens
  CDR3 for alpha chain variable domain of TCR clone 18618 (TRAV2, TRAJ9)
CAVGAGGFKTIF

SEQ ID NO: 37236 - protein, 16 aa, Homo sapiens
  CDR3 for beta chain variable domain of TCR clone 18618 (TRBV13, TRBJ2-2)
FASSPRTGEHTGELFF

SEQ ID NO: 37237 - protein, 16 aa, Homo sapiens
  CDR3 for alpha chain variable domain of TCR clone 18619 (TRAV23/DV6, TRAJ9)
CAASIGGNTGGFNTIF

SEQ ID NO: 37238 - protein, 14 aa, Homo sapiens
  CDR3 for beta chain variable domain of TCR clone 18619 (TRBV9, TRBJ2-7)
CASSVGVGSYEQYF

SEQ ID NO: 37239 - protein, 16 aa, Homo sapiens
  CDR3 for alpha chain variable domain of TCR clone 18620 (TRAV26-1, TRAJ53)
CIVRVAMGGSNYKLTF

SEQ ID NO: 37240 - protein, 14 aa, Homo sapiens
  CDR3 for beta chain variable domain of TCR clone 18620 (TRBV2, TRBJ2-7)
CASSLTSGGYEQYF

SEQ ID NO: 37241 - protein, 14 aa, Homo sapiens
  CDR3 for alpha chain variable domain of TCR clone 18621 (TRAV12-2, TRAJ17)
CAVLFKAAGNKLTF

SEQ ID NO: 37242 - protein, 17 aa, Homo sapiens
  CDR3 for beta chain variable domain of TCR clone 18621 (TRBV20-1, TRBJ2-2)
CSASGSGQGGLTEELFF

SEQ ID NO: 37243 - protein, 13 aa, Homo sapiens
  CDR3 for alpha chain variable domain of TCR clone 18622 (TRAV13-1, TRAJ6)
CAASSGGSYIPTF

SEQ ID NO: 37244 - protein, 12 aa, Homo sapiens
  CDR3 for beta chain variable domain of TCR clone 18622 (TRBV12-4, TRBJ2-7)
CASSLGGYEQYF

SEQ ID NO: 37245 - protein, 13 aa, Homo sapiens
  CDR3 for alpha chain variable domain of TCR clone 18623 (TRAV8-1, TRAJ13)
CAVSKGGYQKVTL

SEQ ID NO: 37246 - protein, 18 aa, Homo sapiens
  CDR3 for beta chain variable domain of TCR clone 18623 (TRBV11-2, TRBJ2-7)
CASSWRTVQTGQSYEQYF

SEQ ID NO: 37247 - protein, 13 aa, Homo sapiens
  CDR3 for alpha chain variable domain of TCR clone 18624 (TRAV2, TRAJ40)
CAVVTLGTYKYIF

SEQ ID NO: 37248 - protein, 15 aa, Homo sapiens
  CDR3 for beta chain variable domain of TCR clone 18624 (TRBV11-3, TRBJ2-3)
CASLKDGREGDTQYF

SEQ ID NO: 37249 - protein, 14 aa, Homo sapiens
  CDR3 for alpha chain variable domain of TCR clone 18625 (TRAV13-1, TRAJ44)
CAAKATGTASKPTF

SEQ ID NO: 37250 - protein, 17 aa, Homo sapiens
  CDR3 for beta chain variable domain of TCR clone 18625 (TRBV7-3, TRBJ2-3)
RASSLMKRMRGADTQYF

SEQ ID NO: 37251 - protein, 16 aa, Homo sapiens
  CDR3 for alpha chain variable domain of TCR clone 18626 (TRAV12-3, TRAJ53)
CAMSPGSGGSNYKLTF

SEQ ID NO: 37252 - protein, 11 aa, Homo sapiens
  CDR3 for beta chain variable domain of TCR clone 18626 (TRBV29-1, TRBJ2-5)
CSEDRTGTQSF

SEQ ID NO: 37253 - protein, 15 aa, Homo sapiens
  CDR3 for alpha chain variable domain of TCR clone 18627 (TRAV4, TRAJ39)
CLVGPNNNSGNMLTF

SEQ ID NO: 37254 - protein, 13 aa, Homo sapiens
  CDR3 for beta chain variable domain of TCR clone 18627 (TRBV11-2, TRBJ2-5)
CASSSTGEETQYF

SEQ ID NO: 37255 - protein, 13 aa, Homo sapiens
  CDR3 for alpha chain variable domain of TCR clone 18628 (TRAV13-2, TRAJ48)
CAEMEFGNEKLTF

SEQ ID NO: 37256 - protein, 15 aa, Homo sapiens
  CDR3 for beta chain variable domain of TCR clone 18628 (TRBV7-9, TRBJ1-6)
CASSSPGRGNSPLHF

SEQ ID NO: 37257 - protein, 18 aa, Homo sapiens
  CDR3 for alpha chain variable domain of TCR clone 18629 (TRAV21, TRAJ52)
CAVRPSPAGGTSYGKLTF

SEQ ID NO: 37258 - protein, 20 aa, Homo sapiens
  CDR3 for beta chain variable domain of TCR clone 18629 (TRBV7-8, TRBJ2-2)
CASSHLFPGPTIHITGELFF

SEQ ID NO: 37259 - protein, 12 aa, Homo sapiens
  CDR3 for alpha chain variable domain of TCR clone 18630 (TRAV17, TRAJ30)
CATDARDDKIIF

SEQ ID NO: 37260 - protein, 16 aa, Homo sapiens
  CDR3 for beta chain variable domain of TCR clone 18630 (TRBV7-2, TRBJ2-7)
CASTSQAASGGYEQYF

SEQ ID NO: 37261 - protein, 15 aa, Homo sapiens
  CDR3 for alpha chain variable domain of TCR clone 18631 (TRAV8-2, TRAJ40)
CVVLGTTSGAYKYIF

SEQ ID NO: 37262 - protein, 16 aa, Homo sapiens
  CDR3 for beta chain variable domain of TCR clone 18631 (TRBV7-3, TRBJ2-1)
CASSLEGYRSYNEQFF

SEQ ID NO: 37263 - protein, 14 aa, Homo sapiens
  CDR3 for alpha chain variable domain of TCR clone 18632 (TRAV12-3, TRAJ29)
CAMSFYSGNTPLVF

SEQ ID NO: 37264 - protein, 15 aa, Homo sapiens
  CDR3 for beta chain variable domain of TCR clone 18632 (TRBV5-1, TRBJ2-3)
CASSPGGARTDAQYF

SEQ ID NO: 37265 - protein, 13 aa, Homo sapiens
  CDR3 for alpha chain variable domain of TCR clone 18633 (TRAV17, TRAJ5)
CAPMDTGRGALTF

SEQ ID NO: 37266 - protein, 15 aa, Homo sapiens
  CDR3 for beta chain variable domain of TCR clone 18633 (TRBV6-6, TRBJ2-5)
CASSPGGGLEETQYF

SEQ ID NO: 37267 - protein, 14 aa, Homo sapiens
  CDR3 for alpha chain variable domain of TCR clone 18634 (TRAV17, TRAJ17)
CATDHRAAGNKLTF

SEQ ID NO: 37268 - protein, 12 aa, Homo sapiens
  CDR3 for beta chain variable domain of TCR clone 18634 (TRBV7-9, TRBJ2-7)
CASSIKREEQYF

SEQ ID NO: 37269 - protein, 14 aa, Homo sapiens
  CDR3 for alpha chain variable domain of TCR clone 18635 (TRAV35, TRAJ33)
CAGSSQDSNYQLIW

SEQ ID NO: 37270 - protein, 13 aa, Homo sapiens
  CDR3 for beta chain variable domain of TCR clone 18635 (TRBV7-9, TRBJ1-2)
CASSLKQNYGYTF

SEQ ID NO: 37271 - protein, 13 aa, Homo sapiens
  CDR3 for alpha chain variable domain of TCR clone 18636 (TRAV17, TRAJ26)
CATVDNYGQNFVF

SEQ ID NO: 37272 - protein, 16 aa, Homo sapiens
  CDR3 for beta chain variable domain of TCR clone 18636 (TRBV2, TRBJ2-1)
CASSVGGSPSYNEQFF

SEQ ID NO: 37273 - protein, 13 aa, Homo sapiens
  CDR3 for alpha chain variable domain of TCR clone 18637 (TRAV21, TRAJ20)
CAVGLRVDYKLSF

SEQ ID NO: 37274 - protein, 14 aa, Homo sapiens
  CDR3 for beta chain variable domain of TCR clone 18637 (TRBV19, TRBJ2-2)
CASSGQGIAGELFF

SEQ ID NO: 37275 - protein, 13 aa, Homo sapiens
  CDR3 for alpha chain variable domain of TCR clone 18638 (TRAV27, TRAJ45)
CRSSGGGADGLTF

SEQ ID NO: 37276 - protein, 17 aa, Homo sapiens
  CDR3 for beta chain variable domain of TCR clone 18638 (TRBV11-2, TRBJ2-1)
CARSLYPPGVEYNEQFF

SEQ ID NO: 37277 - protein, 14 aa, Homo sapiens
  CDR3 for alpha chain variable domain of TCR clone 18639 (TRAV27, TRAJ36)
CAGPPKRGANNPFF

SEQ ID NO: 37278 - protein, 15 aa, Homo sapiens
  CDR3 for beta chain variable domain of TCR clone 18639 (TRBV18, TRBJ2-7)
CASSPASTPNYEQYF

SEQ ID NO: 37279 - protein, 13 aa, Homo sapiens
  CDR3 for alpha chain variable domain of TCR clone 18640 (TRAV17, TRAJ9)
CATYYTGGFKTIF

SEQ ID NO: 37280 - protein, 16 aa, Homo sapiens
  CDR3 for beta chain variable domain of TCR clone 18640 (TRBV7-7, TRBJ2-1)
CASSLASGTSYNEQFF

SEQ ID NO: 37281 - protein, 15 aa, Homo sapiens
  CDR3 for alpha chain variable domain of TCR clone 18641 (TRAV17, TRAJ57)
CVTGPSQGGSEKLVF

SEQ ID NO: 37282 - protein, 16 aa, Homo sapiens
  CDR3 for beta chain variable domain of TCR clone 18641 (TRBV12-4, TRBJ1-5)
CASSRPVGGSNQPQHF

SEQ ID NO: 37283 - protein, 14 aa, Homo sapiens
  CDR3 for alpha chain variable domain of TCR clone 18642 (TRAV26-1, TRAJ34)
CIVRVAYSTDKLIF

SEQ ID NO: 37284 - protein, 15 aa, Homo sapiens
  CDR3 for beta chain variable domain of TCR clone 18642 (TRBV20-1, TRBJ2-7)
CSARVPAAYFYEQYF

SEQ ID NO: 37285 - protein, 17 aa, Homo sapiens
  CDR3 for alpha chain variable domain of TCR clone 18643 (TRAV26-1, TRAJ37)
CIVRVITVSSNTGKLIL

SEQ ID NO: 37286 - protein, 11 aa, Homo sapiens
  CDR3 for beta chain variable domain of TCR clone 18643 (TRBV29-1, TRBJ2-5)
CSEDRTGTQYF

SEQ ID NO: 37287 - protein, 13 aa, Homo sapiens
  CDR3 for alpha chain variable domain of TCR clone 18644 (TRAV21, TRAJ57)
CAVTKGGSEKLVF

SEQ ID NO: 37288 - protein, 16 aa, Homo sapiens
  CDR3 for beta chain variable domain of TCR clone 18644 (TRBV29-1, TRBJ2-7)
CSVEDAEDGTAYEQYF

SEQ ID NO: 37289 - protein, 15 aa, Homo sapiens
  CDR3 for alpha chain variable domain of TCR clone 18645 (TRAV12-1, TRAJ42)
CVVTRDGGSQGNLIS

SEQ ID NO: 37290 - protein, 14 aa, Homo sapiens
  CDR3 for beta chain variable domain of TCR clone 18645 (TRBV11-2, TRBJ2-3)
CASSLGGGANTQYF

SEQ ID NO: 37291 - protein, 14 aa, Homo sapiens
  CDR3 for alpha chain variable domain of TCR clone 18646 (TRAV26-1, TRAJ39)
CIVRVSRAGNMLTF

SEQ ID NO: 37292 - protein, 15 aa, Homo sapiens
  CDR3 for beta chain variable domain of TCR clone 18646 (TRBV7-9, TRBJ1-5)
CASSQGHQPNQPQHF

SEQ ID NO: 37293 - protein, 15 aa, Homo sapiens
  CDR3 for alpha chain variable domain of TCR clone 18647 (TRAV3, TRAJ22)
CAVRDRGGSARQLTF

SEQ ID NO: 37294 - protein, 17 aa, Homo sapiens
  CDR3 for beta chain variable domain of TCR clone 18647 (TRBV11-2, TRBJ2-1)
CASSLYPPGVEYNEQFF

SEQ ID NO: 37295 - protein, 20 aa, Homo sapiens
  CDR3 for alpha chain variable domain of TCR clone 18648 (TRAV26-1, TRAJ42)
CCVLFHRQTYYGGSQGNLIF

SEQ ID NO: 37296 - protein, 16 aa, Homo sapiens
  CDR3 for beta chain variable domain of TCR clone 18648 (TRBV7-3, TRBJ2-2)
CASSLKRGTLSGELFF

SEQ ID NO: 37297 - protein, 12 aa, Homo sapiens
  CDR3 for alpha chain variable domain of TCR clone 18649 (TRAV13-2, TRAJ8)
CAPWLGFQKLVF

SEQ ID NO: 37298 - protein, 15 aa, Homo sapiens
  CDR3 for beta chain variable domain of TCR clone 18649 (TRBV6-3, TRBJ2-2)
CASSFLATLTGELFF

SEQ ID NO: 37299 - protein, 13 aa, Homo sapiens
  CDR3 for alpha chain variable domain of TCR clone 18650 (TRAV21, TRAJ27)
CAARPGNPGKSTF

SEQ ID NO: 37300 - protein, 14 aa, Homo sapiens
  CDR3 for beta chain variable domain of TCR clone 18650 (TRBV7-6, TRBJ2-3)
CASSLGTVTDTQYF

SEQ ID NO: 37301 - protein, 14 aa, Homo sapiens
  CDR3 for alpha chain variable domain of TCR clone 18651 (TRAV1-2, TRAJ16)
CAVNRFSDGHKLLF

SEQ ID NO: 37302 - protein, 15 aa, Homo sapiens
  CDR3 for beta chain variable domain of TCR clone 18651 (TRBV7-9, TRBJ1-6)
CASSSPGRGNSPLHF

SEQ ID NO: 37303 - protein, 12 aa, Homo sapiens
  CDR3 for alpha chain variable domain of TCR clone 18652 (TRAV2, TRAJ31)
CAVEDNNARLMF

SEQ ID NO: 37304 - protein, 16 aa, Homo sapiens
  CDR3 for beta chain variable domain of TCR clone 18652 (TRBV10-3, TRBJ2-1)
CAISGVGDGGGGGQFF

SEQ ID NO: 37305 - protein, 15 aa, Homo sapiens
  CDR3 for alpha chain variable domain of TCR clone 18653 (TRAV3, TRAJ22)
CAVRDRGGSARQLTF

SEQ ID NO: 37306 - protein, 16 aa, Homo sapiens
  CDR3 for beta chain variable domain of TCR clone 18653 (TRBV12-5, TRBJ2-5)
CASGPRTSGNQETQYF

SEQ ID NO: 37307 - protein, 18 aa, Homo sapiens
  CDR3 for alpha chain variable domain of TCR clone 18654 (TRAV13-1, TRAJ52)
CAASKRSAGGTSYGKLAF

SEQ ID NO: 37308 - protein, 13 aa, Homo sapiens
  CDR3 for beta chain variable domain of TCR clone 18654 (TRBV12-4, TRBJ1-2)
CASSLRQGKGYTF

SEQ ID NO: 37309 - protein, 14 aa, Homo sapiens
  CDR3 for alpha chain variable domain of TCR clone 18655 (TRAV29/DV5, TRAJ36)
CAARRKTGANNLFF

SEQ ID NO: 37310 - protein, 13 aa, Homo sapiens
  CDR3 for beta chain variable domain of TCR clone 18655 (TRBV10-3, TRBJ2-7)
CASKLAVNYEQYF

SEQ ID NO: 37311 - protein, 15 aa, Homo sapiens
  CDR3 for alpha chain variable domain of TCR clone 18656 (TRAV27, TRAJ38)
CAARRNAGNNRKLIW

SEQ ID NO: 37312 - protein, 13 aa, Homo sapiens
  CDR3 for beta chain variable domain of TCR clone 18656 (TRBV12-5, TRBJ2-3)
CASGDRQSDTQYV

SEQ ID NO: 37313 - protein, 14 aa, Homo sapiens
  CDR3 for alpha chain variable domain of TCR clone 18657 (TRAV1-2, TRAJ16)
CAVNRFSDGQKPLF

SEQ ID NO: 37314 - protein, 14 aa, Homo sapiens
  CDR3 for beta chain variable domain of TCR clone 18657 (TRBV7-9, TRBJ2-3)
CASSLEDGTDTQYF

SEQ ID NO: 37315 - protein, 14 aa, Homo sapiens
  CDR3 for alpha chain variable domain of TCR clone 18658 (TRAV8-3, TRAJ4)
CAVGAAGGYTKLIF

SEQ ID NO: 37316 - protein, 15 aa, Homo sapiens
  CDR3 for beta chain variable domain of TCR clone 18658 (TRBV6-5, TRBJ2-1)
CASSYDAGAGNEQFF

SEQ ID NO: 37317 - protein, 12 aa, Homo sapiens
  CDR3 for alpha chain variable domain of TCR clone 18659 (TRAV21, TRAJ49)
CAVNDGGNQFYF

SEQ ID NO: 37318 - protein, 14 aa, Homo sapiens
  CDR3 for beta chain variable domain of TCR clone 18659 (TRBV6-1, TRBJ1-3)
CASVQGGGGNTIYF

SEQ ID NO: 37319 - protein, 11 aa, Homo sapiens
  CDR3 for alpha chain variable domain of TCR clone 18660 (TRAV17, TRAJ31)
CATPNNARLMF

SEQ ID NO: 37320 - protein, 16 aa, Homo sapiens
  CDR3 for beta chain variable domain of TCR clone 18660 (TRBV7-8, TRBJ2-4)
CASSAERTLAKNIQYF

SEQ ID NO: 37321 - protein, 14 aa, Homo sapiens
  CDR3 for alpha chain variable domain of TCR clone 18661 (TRAV1-2, TRAJ8)
CAVREDTGFQKLVF

SEQ ID NO: 37322 - protein, 15 aa, Homo sapiens
  CDR3 for beta chain variable domain of TCR clone 18661 (TRBV6-3, TRBJ2-7)
CASSSPGTVYYEQYF

SEQ ID NO: 37323 - protein, 15 aa, Homo sapiens
  CDR3 for alpha chain variable domain of TCR clone 18662 (TRAV29/DV5, TRAJ12)
CAAAPRMDSSYKLIF

SEQ ID NO: 37324 - protein, 17 aa, Homo sapiens
  CDR3 for beta chain variable domain of TCR clone 18662 (TRBV6-1, TRBJ1-5)
CASSEAEFIRARQPQHF

SEQ ID NO: 37325 - protein, 15 aa, Homo sapiens
  CDR3 for alpha chain variable domain of TCR clone 18663 (TRAV26-1, TRAJ29)
CIVRIEGSGNTPLVF

SEQ ID NO: 37326 - protein, 15 aa, Homo sapiens
  CDR3 for beta chain variable domain of TCR clone 18663 (TRBV7-9, TRBJ1-5)
CASSQGHQPNQPQHF

SEQ ID NO: 37327 - protein, 13 aa, Homo sapiens
  CDR3 for alpha chain variable domain of TCR clone 18664 (TRAV21, TRAJ57)
CAVTQSGSEKLVF

SEQ ID NO: 37328 - protein, 16 aa, Homo sapiens
  CDR3 for beta chain variable domain of TCR clone 18664 (TRBV29-1, TRBJ2-7)
CSVEDAEDGTAYEQYF

SEQ ID NO: 37329 - protein, 12 aa, Homo sapiens
  CDR3 for alpha chain variable domain of TCR clone 18665 (TRAV17, TRAJ12)
CATLRSSYKSIF

SEQ ID NO: 37330 - protein, 16 aa, Homo sapiens
  CDR3 for beta chain variable domain of TCR clone 18665 (TRBV28, TRBJ2-7)
CASSLFFETGGPEQYF

SEQ ID NO: 37331 - protein, 12 aa, Homo sapiens
  CDR3 for alpha chain variable domain of TCR clone 18666 (TRAV20, TRAJ39)
CAVGNAGNTLTF

SEQ ID NO: 37332 - protein, 16 aa, Homo sapiens
  CDR3 for beta chain variable domain of TCR clone 18666 (TRBV15, TRBJ1-2)
CATSRGPRTGGGGYTF

SEQ ID NO: 37333 - protein, 14 aa, Homo sapiens
  CDR3 for alpha chain variable domain of TCR clone 18667 (TRAV23/DV6, TRAJ37)
CAASTSSNTGKLIF

SEQ ID NO: 37334 - protein, 15 aa, Homo sapiens
  CDR3 for beta chain variable domain of TCR clone 18667 (TRBV7-9, TRBJ2-7)
CASSPGGGSTYEQYF

SEQ ID NO: 37335 - protein, 14 aa, Homo sapiens
  CDR3 for alpha chain variable domain of TCR clone 18668 (TRAV8-3, TRAJ9)
CAVVYTTGGFKTIF

SEQ ID NO: 37336 - protein, 14 aa, Homo sapiens
  CDR3 for beta chain variable domain of TCR clone 18668 (TRBV7-3, TRBJ2-2)
CASSSGGYTGELFF

SEQ ID NO: 37337 - protein, 18 aa, Homo sapiens
  CDR3 for alpha chain variable domain of TCR clone 18669 (TRAV26-2, TRAJ45)
CILRVDKYSGGGADGLTF

SEQ ID NO: 37338 - protein, 16 aa, Homo sapiens
  CDR3 for beta chain variable domain of TCR clone 18669 (TRBV2, TRBJ1-4)
CASNLLQGATNEELFF

SEQ ID NO: 37339 - protein, 15 aa, Homo sapiens
  CDR3 for alpha chain variable domain of TCR clone 18670 (TRAV26-2, TRAJ39)
CSLRENNNAGNMLTF

SEQ ID NO: 37340 - protein, 15 aa, Homo sapiens
  CDR3 for beta chain variable domain of TCR clone 18670 (TRBV5-4, TRBJ1-1)
CASSSLGWANTEAFF

SEQ ID NO: 37341 - protein, 13 aa, Homo sapiens
  CDR3 for alpha chain variable domain of TCR clone 18671 (TRAV13-2, TRAJ48)
CAEMDFGNEKLTF

SEQ ID NO: 37342 - protein, 15 aa, Homo sapiens
  CDR3 for beta chain variable domain of TCR clone 18671 (TRBV7-9, TRBJ1-6)
CASSSPGRGKSPLHF

SEQ ID NO: 37343 - protein, 11 aa, Homo sapiens
  CDR3 for alpha chain variable domain of TCR clone 18672 (TRAV12-3, TRAJ43)
CAMSVSNDIRF

SEQ ID NO: 37344 - protein, 16 aa, Homo sapiens
  CDR3 for beta chain variable domain of TCR clone 18672 (TRBV20-1, TRBJ2-1)
CSARDSLGAVYNEQFF

SEQ ID NO: 37345 - protein, 15 aa, Homo sapiens
  CDR3 for alpha chain variable domain of TCR clone 18673 (TRAV12-3, TRAJ49)
CAMAVTPNTGNQFSF

SEQ ID NO: 37346 - protein, 18 aa, Homo sapiens
  CDR3 for beta chain variable domain of TCR clone 18673 (TRBV4-1, TRBJ1-5)
CASSQDPRGQGLNQPQHF

SEQ ID NO: 37347 - protein, 14 aa, Homo sapiens
  CDR3 for alpha chain variable domain of TCR clone 18674 (TRAV8-3, TRAJ4)
CAAGAAGGYNKLIF

SEQ ID NO: 37348 - protein, 15 aa, Homo sapiens
  CDR3 for beta chain variable domain of TCR clone 18674 (TRBV6-5, TRBJ2-1)
CASSYDAGAGNEQFF

SEQ ID NO: 37349 - protein, 13 aa, Homo sapiens
  CDR3 for alpha chain variable domain of TCR clone 18675 (TRAV17, TRAJ9)
CATDYTGGFKTIF

SEQ ID NO: 37350 - protein, 16 aa, Homo sapiens
  CDR3 for beta chain variable domain of TCR clone 18675 (TRBV7-7, TRBJ2-1)
CASSLASGTSYSEQFF

SEQ ID NO: 37351 - protein, 16 aa, Homo sapiens
  CDR3 for alpha chain variable domain of TCR clone 18676 (TRAV16, TRAJ4)
CALSSMFSGGYNKLIF

SEQ ID NO: 37352 - protein, 16 aa, Homo sapiens
  CDR3 for beta chain variable domain of TCR clone 18676 (TRBV24-1, TRBJ2-3)
CATSDPGTGATDTQYF

SEQ ID NO: 37353 - protein, 15 aa, Homo sapiens
  CDR3 for alpha chain variable domain of TCR clone 18677 (TRAV17, TRAJ57)
CATGPSPGGSEKLVF

SEQ ID NO: 37354 - protein, 14 aa, Homo sapiens
  CDR3 for beta chain variable domain of TCR clone 18677 (TRBV12-5, TRBJ2-5)
CASGSRTHQETQYF

SEQ ID NO: 37355 - protein, 16 aa, Homo sapiens
  CDR3 for alpha chain variable domain of TCR clone 18678 (TRAV13-2, TRAJ32)
CAENMNYGGAANKLIF

SEQ ID NO: 37356 - protein, 14 aa, Homo sapiens
  CDR3 for beta chain variable domain of TCR clone 18678 (TRBV15, TRBJ2-5)
CATSSTGYQETQYF

SEQ ID NO: 37357 - protein, 15 aa, Homo sapiens
  CDR3 for alpha chain variable domain of TCR clone 18679 (TRAV3, TRAJ5)
CAVRDRKTGRRALTF

SEQ ID NO: 37358 - protein, 15 aa, Homo sapiens
  CDR3 for beta chain variable domain of TCR clone 18679 (TRBV7-8, TRBJ2-1)
CASSLADSLYNEQFL

SEQ ID NO: 37359 - protein, 18 aa, Homo sapiens
  CDR3 for alpha chain variable domain of TCR clone 18680 (TRAV12-3, TRAJ52)
CAMSVGGAGGTSYGKLTF

SEQ ID NO: 37360 - protein, 16 aa, Homo sapiens
  CDR3 for beta chain variable domain of TCR clone 18680 (TRBV7-3, TRBJ2-2)
CASSLKRGTLSGELFF

SEQ ID NO: 37361 - protein, 12 aa, Homo sapiens
  CDR3 for alpha chain variable domain of TCR clone 18681 (TRAV21, TRAJ11)
CAATSGYSTLTF

SEQ ID NO: 37362 - protein, 14 aa, Homo sapiens
  CDR3 for beta chain variable domain of TCR clone 18681 (TRBV20-1, TRBJ2-7)
CSAPALAGVGEQYF

SEQ ID NO: 37363 - protein, 15 aa, Homo sapiens
  CDR3 for alpha chain variable domain of TCR clone 18682 (TRAV12-1, TRAJ44)
CVVNTNTGTASKLTF

SEQ ID NO: 37364 - protein, 16 aa, Homo sapiens
  CDR3 for beta chain variable domain of TCR clone 18682 (TRBV12-5, TRBJ2-5)
CASGPRTSGNQETQYF

SEQ ID NO: 37365 - protein, 16 aa, Homo sapiens
  CDR3 for alpha chain variable domain of TCR clone 18683 (TRAV12-3, TRAJ53)
CAMSPGSGGSNYKLTF

SEQ ID NO: 37366 - protein, 11 aa, Homo sapiens
  CDR3 for beta chain variable domain of TCR clone 18683 (TRBV29-1, TRBJ2-5)
RSEDRTGTQYF

SEQ ID NO: 37367 - protein, 13 aa, Homo sapiens
  CDR3 for alpha chain variable domain of TCR clone 18684 (TRAV27, TRAJ45)
CRSSGGGADGLTF

SEQ ID NO: 37368 - protein, 17 aa, Homo sapiens
  CDR3 for beta chain variable domain of TCR clone 18684 (TRBV11-2, TRBJ2-1)
WASSLYPPGVEYNEQFF

SEQ ID NO: 37369 - protein, 11 aa, Homo sapiens
  CDR3 for alpha chain variable domain of TCR clone 18685 (TRAV12-3, TRAJ43)
CAMSVSNDMRF

SEQ ID NO: 37370 - protein, 15 aa, Homo sapiens
  CDR3 for beta chain variable domain of TCR clone 18685 (TRBV20-1, TRBJ2-7)
CSARDRVSGMDEQYF

SEQ ID NO: 37371 - protein, 16 aa, Homo sapiens
  CDR3 for alpha chain variable domain of TCR clone 18686 (TRAV3, TRAJ4)
CAVRPSPSGGYNKLIF

SEQ ID NO: 37372 - protein, 12 aa, Homo sapiens
  CDR3 for beta chain variable domain of TCR clone 18686 (TRBV7-9, TRBJ2-7)
CASSQGVYGQYF

SEQ ID NO: 37373 - protein, 14 aa, Homo sapiens
  CDR3 for alpha chain variable domain of TCR clone 18687 (TRAV20, TRAJ56)
CAVQFGGANSKLPF

SEQ ID NO: 37374 - protein, 14 aa, Homo sapiens
  CDR3 for beta chain variable domain of TCR clone 18687 (TRBV20-1, TRBJ2-7)
CSAKRGRSSYEQYF

SEQ ID NO: 37375 - protein, 14 aa, Homo sapiens
  CDR3 for alpha chain variable domain of TCR clone 18688 (TRAV12-1, TRAJ54)
CVVNIYQGAQKLVF

SEQ ID NO: 37376 - protein, 13 aa, Homo sapiens
  CDR3 for beta chain variable domain of TCR clone 18688 (TRBV12-4, TRBJ2-2)
CASSITGSGELSF

SEQ ID NO: 37377 - protein, 14 aa, Homo sapiens
  CDR3 for alpha chain variable domain of TCR clone 18689 (TRAV12-1, TRAJ30)
CVVNIGGRDDKIIL

SEQ ID NO: 37378 - protein, 13 aa, Homo sapiens
  CDR3 for beta chain variable domain of TCR clone 18689 (TRBV12-5, TRBJ2-1)
CASGLGRGNEQFF

SEQ ID NO: 37379 - protein, 15 aa, Homo sapiens
  CDR3 for alpha chain variable domain of TCR clone 18690 (TRAV25, TRAJ52)
CAGRPGGTSYGKMTF

SEQ ID NO: 37380 - protein, 17 aa, Homo sapiens
  CDR3 for beta chain variable domain of TCR clone 18690 (TRBV7-8, TRBJ2-6)
CASSAGTGGAGANVLTF

SEQ ID NO: 37381 - protein, 14 aa, Homo sapiens
  CDR3 for alpha chain variable domain of TCR clone 18691 (TRAV38-1, TRAJ29)
CAFITPSGNTPLVF

SEQ ID NO: 37382 - protein, 19 aa, Homo sapiens
  CDR3 for beta chain variable domain of TCR clone 18691 (TRBV18, TRBJ2-7)
CASSPRGGGLRAVLRAGHQ

SEQ ID NO: 37383 - protein, 13 aa, Homo sapiens
  CDR3 for alpha chain variable domain of TCR clone 18692 (TRAV1-1, TRAJ9)
CAAKNTGGFKAIF

SEQ ID NO: 37384 - protein, 14 aa, Homo sapiens
  CDR3 for beta chain variable domain of TCR clone 18692 (TRBV20-1, TRBJ2-1)
CSAQIGGSANEQFF

SEQ ID NO: 37385 - protein, 15 aa, Homo sapiens
  CDR3 for alpha chain variable domain of TCR clone 18693 (TRAV8-3, TRAJ45)
CASSYSGGGADGLTF

SEQ ID NO: 37386 - protein, 12 aa, Homo sapiens
  CDR3 for beta chain variable domain of TCR clone 18693 (TRBV10-3, TRBJ2-7)
CLQLAVNYEQYF

SEQ ID NO: 37387 - protein, 15 aa, Homo sapiens
  CDR3 for alpha chain variable domain of TCR clone 18694 (TRAV3, TRAJ22)
RAVRDRGGSARQLTF

SEQ ID NO: 37388 - protein, 16 aa, Homo sapiens
  CDR3 for beta chain variable domain of TCR clone 18694 (TRBV5-4, TRBJ2-3)
CASQQPGAGGADTQYF

SEQ ID NO: 37389 - protein, 15 aa, Homo sapiens
  CDR3 for alpha chain variable domain of TCR clone 18695 (TRAV3, TRAJ5)
CAVRDLDTGRRALTF

SEQ ID NO: 37390 - protein, 13 aa, Homo sapiens
  CDR3 for beta chain variable domain of TCR clone 18695 (TRBV12-4, TRBJ2-7)
CASSPTESYEQYF

SEQ ID NO: 37391 - protein, 12 aa, Homo sapiens
  CDR3 for alpha chain variable domain of TCR clone 18696 (TRAV21, TRAJ33)
CAKMDSNYQLIW

SEQ ID NO: 37392 - protein, 14 aa, Homo sapiens
  CDR3 for beta chain variable domain of TCR clone 18696 (TRBV2, TRBJ2-7)
CASSLTSGGYEQDF

SEQ ID NO: 37393 - protein, 15 aa, Homo sapiens
  CDR3 for alpha chain variable domain of TCR clone 18697 (TRAV27, TRAJ38)
CAARRNAGNNRKLIW

SEQ ID NO: 37394 - protein, 13 aa, Homo sapiens
  CDR3 for beta chain variable domain of TCR clone 18697 (TRBV12-5, TRBJ2-3)
CASGDRKSDTQYF

SEQ ID NO: 37395 - protein, 15 aa, Homo sapiens
  CDR3 for alpha chain variable domain of TCR clone 18698 (TRAV17, TRAJ57)
CATDPSQGGSEKLVF

SEQ ID NO: 37396 - protein, 16 aa, Homo sapiens
  CDR3 for beta chain variable domain of TCR clone 18698 (TRBV12-4, TRBJ1-5)
CASSRPVGGSNQPQHF

SEQ ID NO: 37397 - protein, 12 aa, Homo sapiens
  CDR3 for alpha chain variable domain of TCR clone 18699 (TRAV12-1, TRAJ40)
CAVYSGTYKYIF

SEQ ID NO: 37398 - protein, 18 aa, Homo sapiens
  CDR3 for beta chain variable domain of TCR clone 18699 (TRBV11-2, TRBJ2-3)
CASSLGGASRGAPNTQYF

SEQ ID NO: 37399 - protein, 12 aa, Homo sapiens
  CDR3 for alpha chain variable domain of TCR clone 18700 (TRAV21, TRAJ31)
CAVWGNNARLMF

SEQ ID NO: 37400 - protein, 16 aa, Homo sapiens
  CDR3 for beta chain variable domain of TCR clone 18700 (TRBV27, TRBJ2-5)
CASSYGPGGQKEAQYF

SEQ ID NO: 37401 - protein, 16 aa, Homo sapiens
  CDR3 for alpha chain variable domain of TCR clone 18701 (TRAV14/DV4, TRAJ21)
CAMREGPENNFNKFYF

SEQ ID NO: 37402 - protein, 12 aa, Homo sapiens
  CDR3 for beta chain variable domain of TCR clone 18701 (TRBV29-1, TRBJ2-2)
CSVDKYTGELFF

SEQ ID NO: 37403 - protein, 13 aa, Homo sapiens
  CDR3 for alpha chain variable domain of TCR clone 18702 (TRAV27, TRAJ41)
CAGAGNSGYALNF

SEQ ID NO: 37404 - protein, 14 aa, Homo sapiens
  CDR3 for beta chain variable domain of TCR clone 18702 (TRBV7-2, TRBJ1-1)
CASSFLTGTTEAFF

SEQ ID NO: 37405 - protein, 13 aa, Homo sapiens
  CDR3 for alpha chain variable domain of TCR clone 18703 (TRAV8-3, TRAJ36)
CAVGATGANNLFF

SEQ ID NO: 37406 - protein, 13 aa, Homo sapiens
  CDR3 for beta chain variable domain of TCR clone 18703 (TRBV10-3, TRBJ2-7)
CASKLAVNYEQYF

SEQ ID NO: 37407 - protein, 14 aa, Homo sapiens
  CDR3 for alpha chain variable domain of TCR clone 18704 (TRAV1-2, TRAJ16)
CAVNRFSDGQKLLF

SEQ ID NO: 37408 - protein, 15 aa, Homo sapiens
  CDR3 for beta chain variable domain of TCR clone 18704 (TRBV7-9, TRBJ1-6)
CASSFPGRGNSPLHF

SEQ ID NO: 37409 - protein, 13 aa, Homo sapiens
  CDR3 for alpha chain variable domain of TCR clone 18705 (TRAV12-1, TRAJ9)
CVVRNTGGFKTIF

SEQ ID NO: 37410 - protein, 14 aa, Homo sapiens
  CDR3 for beta chain variable domain of TCR clone 18705 (TRBV20-1, TRBJ2-1)
CSAQMGGSANEQFF

SEQ ID NO: 37411 - protein, 13 aa, Homo sapiens
  CDR3 for alpha chain variable domain of TCR clone 18706 (TRAV12-1, TRAJ33)
CGDAPDSNYQLIW

SEQ ID NO: 37412 - protein, 16 aa, Homo sapiens
  CDR3 for beta chain variable domain of TCR clone 18706 (TRBV7-3, TRBJ2-2)
CASSLKRGTLSGELFF

SEQ ID NO: 37413 - protein, 11 aa, Homo sapiens
  CDR3 for alpha chain variable domain of TCR clone 18707 (TRAV13-1, TRAJ39)
CASHAGNILTF

SEQ ID NO: 37414 - protein, 14 aa, Homo sapiens
  CDR3 for beta chain variable domain of TCR clone 18707 (TRBV11-2, TRBJ1-5)
CASSLDRGRQPQHF

SEQ ID NO: 37415 - protein, 14 aa, Homo sapiens
  CDR3 for alpha chain variable domain of TCR clone 18708 (TRAV1-1, TRAJ27)
CAVIYNTNAGKSNF

SEQ ID NO: 37416 - protein, 15 aa, Homo sapiens
  CDR3 for beta chain variable domain of TCR clone 18708 (TRBV7-2, TRBJ2-1)
CASSSGLAGGNEQFF

SEQ ID NO: 37417 - protein, 15 aa, Homo sapiens
  CDR3 for alpha chain variable domain of TCR clone 18709 (TRAV21, TRAJ13)
CAVPRSFWGYQKVTF

SEQ ID NO: 37418 - protein, 15 aa, Homo sapiens
  CDR3 for beta chain variable domain of TCR clone 18709 (TRBV7-9, TRBJ1-6)
CASSSPGRGNSPLHF

SEQ ID NO: 37419 - protein, 17 aa, Homo sapiens
  CDR3 for alpha chain variable domain of TCR clone 18710 (TRAV3, TRAJ42)
CAVRDRDYGGSQGNLIF

SEQ ID NO: 37420 - protein, 17 aa, Homo sapiens
  CDR3 for beta chain variable domain of TCR clone 18710 (TRBV11-2, TRBJ2-1)
CASSLYPPGVEYNEQFF

SEQ ID NO: 37421 - protein, 12 aa, Homo sapiens
  CDR3 for alpha chain variable domain of TCR clone 18711 (TRAV8-3, TRAJ20)
CAVGANDYKLSF

SEQ ID NO: 37422 - protein, 16 aa, Homo sapiens
  CDR3 for beta chain variable domain of TCR clone 18711 (TRBV19, TRBJ2-1)
CASSKAGPSSYNEQFF

SEQ ID NO: 37423 - protein, 17 aa, Homo sapiens
  CDR3 for alpha chain variable domain of TCR clone 18712 (TRAV3, TRAJ42)
CAVRERDYGGSQGNLIF

SEQ ID NO: 37424 - protein, 15 aa, Homo sapiens
  CDR3 for beta chain variable domain of TCR clone 18712 (TRBV6-6, TRBJ2-7)
CASSYSYGGSYEQYF

SEQ ID NO: 37425 - protein, 14 aa, Homo sapiens
  CDR3 for alpha chain variable domain of TCR clone 18713 (TRAV23/DV6, TRAJ12)
CAASRMDSSYKLIF

SEQ ID NO: 37426 - protein, 11 aa, Homo sapiens
  CDR3 for beta chain variable domain of TCR clone 18713 (TRBV6-1, TRBJ2-7)
CASSDFREQYF

SEQ ID NO: 37427 - protein, 14 aa, Homo sapiens
  CDR3 for alpha chain variable domain of TCR clone 18714 (TRAV2, TRAJ9)
CAVEDRSGGFKTIF

SEQ ID NO: 37428 - protein, 12 aa, Homo sapiens
  CDR3 for beta chain variable domain of TCR clone 18714 (TRBV12-4, TRBJ2-7)
CASSLGGYEQYF

SEQ ID NO: 37429 - protein, 19 aa, Homo sapiens
  CDR3 for alpha chain variable domain of TCR clone 18715 (TRAV3, TRAJ6)
CAVRDRNPSRSGGRYIPTF

SEQ ID NO: 37430 - protein, 15 aa, Homo sapiens
  CDR3 for beta chain variable domain of TCR clone 18715 (TRBV18, TRBJ2-7)
CASSPTFMDSYEQYF

SEQ ID NO: 37431 - protein, 11 aa, Homo sapiens
  CDR3 for alpha chain variable domain of TCR clone 18716 (TRAV1-1, TRAJ23)
CAVRQGGQLIF

SEQ ID NO: 37432 - protein, 20 aa, Homo sapiens
  CDR3 for beta chain variable domain of TCR clone 18716 (TRBV7-8, TRBJ2-2)
CASSHLFPGPTIHITGELFF

SEQ ID NO: 37433 - protein, 14 aa, Homo sapiens
  CDR3 for alpha chain variable domain of TCR clone 18717 (TRAV12-2, TRAJ5)
CAVNRSTGRRALTF

SEQ ID NO: 37434 - protein, 12 aa, Homo sapiens
  CDR3 for beta chain variable domain of TCR clone 18717 (TRBV19, TRBJ1-5)
CASSRAQQPQHF

SEQ ID NO: 37435 - protein, 11 aa, Homo sapiens
  CDR3 for alpha chain variable domain of TCR clone 18718 (TRAV12-3, TRAJ43)
CAMSVSNDTRF

SEQ ID NO: 37436 - protein, 13 aa, Homo sapiens
  CDR3 for beta chain variable domain of TCR clone 18718 (TRBV20-1, TRBJ1-1)
CSAPLGGGTEAFF

SEQ ID NO: 37437 - protein, 16 aa, Homo sapiens
  CDR3 for alpha chain variable domain of TCR clone 18719 (TRAV1-2, TRAJ10)
CAVRGVLTGGGNKLTF

SEQ ID NO: 37438 - protein, 12 aa, Homo sapiens
  CDR3 for beta chain variable domain of TCR clone 18719 (TRBV7-8, TRBJ2-7)
CASSLGDREQYS

SEQ ID NO: 37439 - protein, 11 aa, Homo sapiens
  CDR3 for alpha chain variable domain of TCR clone 18720 (TRAV17, TRAJ31)
CTTSNNARLMF

SEQ ID NO: 37440 - protein, 16 aa, Homo sapiens
  CDR3 for beta chain variable domain of TCR clone 18720 (TRBV7-8, TRBJ2-4)
CASSAERTLAKNIQYF

SEQ ID NO: 37441 - protein, 15 aa, Homo sapiens
  CDR3 for alpha chain variable domain of TCR clone 18721 (TRAV26-1, TRAJ22)
CIVRVSFWFCKAIDL

SEQ ID NO: 37442 - protein, 13 aa, Homo sapiens
  CDR3 for beta chain variable domain of TCR clone 18721 (TRBV7-9, TRBJ1-2)
CASSLKQNYGYTF

SEQ ID NO: 37443 - protein, 14 aa, Homo sapiens
  CDR3 for alpha chain variable domain of TCR clone 18722 (TRAV9-2, TRAJ39)
CALYIYNAGNMLTF

SEQ ID NO: 37444 - protein, 14 aa, Homo sapiens
  CDR3 for beta chain variable domain of TCR clone 18722 (TRBV18, TRBJ2-7)
CASSPRGGAYEQYF

SEQ ID NO: 37445 - protein, 15 aa, Homo sapiens
  CDR3 for alpha chain variable domain of TCR clone 18723 (TRAV25, TRAJ53)
CAATGGGGSNYKLTF

SEQ ID NO: 37446 - protein, 19 aa, Homo sapiens
  CDR3 for beta chain variable domain of TCR clone 18723 (TRBV7-2, TRBJ2-3)
CAGSFLSRNWGGGTDTQYF

SEQ ID NO: 37447 - protein, 15 aa, Homo sapiens
  CDR3 for alpha chain variable domain of TCR clone 18724 (TRAV17, TRAJ56)
CATEPFTGANSKLTF

SEQ ID NO: 37448 - protein, 17 aa, Homo sapiens
  CDR3 for beta chain variable domain of TCR clone 18724 (TRBV4-2, TRBJ2-7)
CASSQERARGVPYEQYF

SEQ ID NO: 37449 - protein, 14 aa, Homo sapiens
  CDR3 for alpha chain variable domain of TCR clone 18725 (TRAV12-2, TRAJ40)
CAVKIPSGTCKYIF

SEQ ID NO: 37450 - protein, 14 aa, Homo sapiens
  CDR3 for beta chain variable domain of TCR clone 18725 (TRBV20-1, TRBJ1-1)
CSAQTRIGGTEAFF

SEQ ID NO: 37451 - protein, 12 aa, Homo sapiens
  CDR3 for alpha chain variable domain of TCR clone 18726 (TRAV35, TRAJ49)
CAGWNTGNQFYF

SEQ ID NO: 37452 - protein, 16 aa, Homo sapiens
  CDR3 for beta chain variable domain of TCR clone 18726 (TRBV5-1, TRBJ2-2)
CASSLWDTTNAGELFF

SEQ ID NO: 37453 - protein, 14 aa, Homo sapiens
  CDR3 for alpha chain variable domain of TCR clone 18727 (TRAV16, TRAJ37)
CALDISGNTGKLIF

SEQ ID NO: 37454 - protein, 14 aa, Homo sapiens
  CDR3 for beta chain variable domain of TCR clone 18727 (TRBV7-6, TRBJ2-7)
CASGFRQGADEQYF

SEQ ID NO: 37455 - protein, 18 aa, Homo sapiens
  CDR3 for alpha chain variable domain of TCR clone 18728 (TRAV12-3, TRAJ52)
CAMIVGGAGGTSYGKLTF

SEQ ID NO: 37456 - protein, 15 aa, Homo sapiens
  CDR3 for beta chain variable domain of TCR clone 18728 (TRBV27, TRBJ1-6)
CASSFDRGLGSPLHF

SEQ ID NO: 37457 - protein, 16 aa, Homo sapiens
  CDR3 for alpha chain variable domain of TCR clone 18729 (TRAV12-2, TRAJ32)
CAVNLGQGGATNKLIF

SEQ ID NO: 37458 - protein, 15 aa, Homo sapiens
  CDR3 for beta chain variable domain of TCR clone 18729 (TRBV20-1, TRBJ2-7)
CSARGPLAGGRERYF

SEQ ID NO: 37459 - protein, 17 aa, Homo sapiens
  CDR3 for alpha chain variable domain of TCR clone 18730 (TRAV38-1, TRAJ28)
CAFMKPTSGAGSYQLTF

SEQ ID NO: 37460 - protein, 14 aa, Homo sapiens
  CDR3 for beta chain variable domain of TCR clone 18730 (TRBV18, TRBJ2-7)
CASSPRGGAYEQYF

SEQ ID NO: 37461 - protein, 13 aa, Homo sapiens
  CDR3 for alpha chain variable domain of TCR clone 18731 (TRAV2, TRAJ40)
CAVVTSGTYKYIF

SEQ ID NO: 37462 - protein, 16 aa, Homo sapiens
  CDR3 for beta chain variable domain of TCR clone 18731 (TRBV13, TRBJ2-2)
CASSPRTGEHTGELFF

SEQ ID NO: 37463 - protein, 15 aa, Homo sapiens
  CDR3 for alpha chain variable domain of TCR clone 18732 (TRAV8-2, TRAJ39)
CVVSSWDNAGNMLTF

SEQ ID NO: 37464 - protein, 13 aa, Homo sapiens
  CDR3 for beta chain variable domain of TCR clone 18732 (TRBV25-1, TRBJ2-5)
CASSESGRETQYF

SEQ ID NO: 37465 - protein, 13 aa, Homo sapiens
  CDR3 for alpha chain variable domain of TCR clone 18733 (TRAV21, TRAJ27)
CAARPGNAGKSTF

SEQ ID NO: 37466 - protein, 13 aa, Homo sapiens
  CDR3 for beta chain variable domain of TCR clone 18733 (TRBV13, TRBJ2-1)
CASIVGGRGEQFF

SEQ ID NO: 37467 - protein, 14 aa, Homo sapiens
  CDR3 for alpha chain variable domain of TCR clone 18734 (TRAV26-1, TRAJ38)
CIAYNAGNNRKLIW

SEQ ID NO: 37468 - protein, 13 aa, Homo sapiens
  CDR3 for beta chain variable domain of TCR clone 18734 (TRBV20-1, TRBJ1-1)
CSARGGGNTEAFF

SEQ ID NO: 37469 - protein, 12 aa, Homo sapiens
  CDR3 for alpha chain variable domain of TCR clone 18735 (TRAV17, TRAJ4)
CATDGGYNKLLF

SEQ ID NO: 37470 - protein, 13 aa, Homo sapiens
  CDR3 for beta chain variable domain of TCR clone 18735 (TRBV29-1, TRBJ2-2)
CSTTGVNTGELFF

SEQ ID NO: 37471 - protein, 15 aa, Homo sapiens
  CDR3 for alpha chain variable domain of TCR clone 18736 (TRAV17, TRAJ23)
CATDAEDNQGGKLIF

SEQ ID NO: 37472 - protein, 12 aa, Homo sapiens
  CDR3 for beta chain variable domain of TCR clone 18736 (TRBV2, TRBJ2-1)
CAKREGYNEQFV

SEQ ID NO: 37473 - protein, 16 aa, Homo sapiens
  CDR3 for alpha chain variable domain of TCR clone 18737 (TRAV12-3, TRAJ53)
CAMSPGSGGSNYKLTL

SEQ ID NO: 37474 - protein, 17 aa, Homo sapiens
  CDR3 for beta chain variable domain of TCR clone 18737 (TRBV28, TRBJ2-5)
CASSTPEGDALQETQYF

SEQ ID NO: 37475 - protein, 12 aa, Homo sapiens
  CDR3 for alpha chain variable domain of TCR clone 18738 (TRAV13-1, TRAJ48)
CAANFGNEKLTF

SEQ ID NO: 37476 - protein, 13 aa, Homo sapiens
  CDR3 for beta chain variable domain of TCR clone 18738 (TRBV7-3, TRBJ1-1)
CASSQDRGAEAFF

SEQ ID NO: 37477 - protein, 15 aa, Homo sapiens
  CDR3 for alpha chain variable domain of TCR clone 18739 (TRAV21, TRAJ53)
CATLNSGGSNYKLTF

SEQ ID NO: 37478 - protein, 16 aa, Homo sapiens
  CDR3 for beta chain variable domain of TCR clone 18739 (TRBV9, TRBJ2-1)
CASSGGGGGNYNEQFF

SEQ ID NO: 37479 - protein, 14 aa, Homo sapiens
  CDR3 for alpha chain variable domain of TCR clone 18740 (TRAV8-4, TRAJ9)
CAARINTGGFKTIF

SEQ ID NO: 37480 - protein, 15 aa, Homo sapiens
  CDR3 for beta chain variable domain of TCR clone 18740 (TRBV10-2, TRBJ2-6)
CASSEQGTGANVLTF

SEQ ID NO: 37481 - protein, 13 aa, Homo sapiens
  CDR3 for alpha chain variable domain of TCR clone 18741 (TRAV35, TRAJ36)
CAGPRIGANNLFL

SEQ ID NO: 37482 - protein, 15 aa, Homo sapiens
  CDR3 for beta chain variable domain of TCR clone 18741 (TRBV28, TRBJ2-5)
CASSPPWSYQETQYF

SEQ ID NO: 37483 - protein, 15 aa, Homo sapiens
  CDR3 for alpha chain variable domain of TCR clone 18742 (TRAV35, TRAJ50)
CAGQLRKTSYDKVIF

SEQ ID NO: 37484 - protein, 12 aa, Homo sapiens
  CDR3 for beta chain variable domain of TCR clone 18742 (TRBV5-1, TRBJ2-5)
CASSVGLETQYF

SEQ ID NO: 37485 - protein, 20 aa, Homo sapiens
  CDR3 for alpha chain variable domain of TCR clone 18743 (TRAV8-2, TRAJ26)
CVVTLLLGSEFCLCSRNQIV

SEQ ID NO: 37486 - protein, 15 aa, Homo sapiens
  CDR3 for beta chain variable domain of TCR clone 18743 (TRBV11-2, TRBJ2-2)
CASSSDRVNAGELFF

SEQ ID NO: 37487 - protein, 16 aa, Homo sapiens
  CDR3 for alpha chain variable domain of TCR clone 18744 (TRAV21, TRAJ37)
CAVRTAGSRNTGKLIF

SEQ ID NO: 37488 - protein, 13 aa, Homo sapiens
  CDR3 for beta chain variable domain of TCR clone 18744 (TRBV7-9, TRBJ2-5)
CASLPSGRETQYF

SEQ ID NO: 37489 - protein, 13 aa, Homo sapiens
  CDR3 for alpha chain variable domain of TCR clone 18745 (TRAV2, TRAJ40)
CAVVTSGTYKYIS

SEQ ID NO: 37490 - protein, 15 aa, Homo sapiens
  CDR3 for beta chain variable domain of TCR clone 18745 (TRBV11-3, TRBJ2-3)
CASLKDGREGDTQYF

SEQ ID NO: 37491 - protein, 16 aa, Homo sapiens
  CDR3 for alpha chain variable domain of TCR clone 18746 (TRAV30, TRAJ24)
CGTEIVDADSWGKFQF

SEQ ID NO: 37492 - protein, 16 aa, Homo sapiens
  CDR3 for beta chain variable domain of TCR clone 18746 (TRBV2, TRBJ1-3)
CASSGGAGRSGNTVYF

SEQ ID NO: 37493 - protein, 13 aa, Homo sapiens
  CDR3 for alpha chain variable domain of TCR clone 18747 (TRAV27, TRAJ45)
CRSSGGGADGLTF

SEQ ID NO: 37494 - protein, 17 aa, Homo sapiens
  CDR3 for beta chain variable domain of TCR clone 18747 (TRBV11-2, TRBJ2-1)
CASSLYPPGVEYSEQFF

SEQ ID NO: 37495 - protein, 13 aa, Homo sapiens
  CDR3 for alpha chain variable domain of TCR clone 18748 (TRAV13-1, TRAJ5)
CAASDTGRRARTF

SEQ ID NO: 37496 - protein, 12 aa, Homo sapiens
  CDR3 for beta chain variable domain of TCR clone 18748 (TRBV28, TRBJ2-3)
CASSLYRDTQYF

SEQ ID NO: 37497 - protein, 14 aa, Homo sapiens
  CDR3 for alpha chain variable domain of TCR clone 18749 (TRAV8-4, TRAJ13)
CAVTLSGGYQKVTF

SEQ ID NO: 37498 - protein, 14 aa, Homo sapiens
  CDR3 for beta chain variable domain of TCR clone 18749 (TRBV7-2, TRBJ1-2)
CARSQTGSTYGYTF

SEQ ID NO: 37499 - protein, 18 aa, Homo sapiens
  CDR3 for alpha chain variable domain of TCR clone 18750 (TRAV21, TRAJ52)
CAVRPSPAGGTSYGKLTL

SEQ ID NO: 37500 - protein, 12 aa, Homo sapiens
  CDR3 for beta chain variable domain of TCR clone 18750 (TRBV11-2, TRBJ2-2)
CASSLGGGELFF

SEQ ID NO: 37501 - protein, 12 aa, Homo sapiens
  CDR3 for alpha chain variable domain of TCR clone 18751 (TRAV1-1, TRAJ8)
FAGGTGFQKLVF

SEQ ID NO: 37502 - protein, 15 aa, Homo sapiens
  CDR3 for beta chain variable domain of TCR clone 18751 (TRBV7-9, TRBJ1-4)
CASSRTGGFNEKLFF

SEQ ID NO: 37503 - protein, 14 aa, Homo sapiens
  CDR3 for alpha chain variable domain of TCR clone 18752 (TRAV26-1, TRAJ45)
CIEVTGGGADGLTF

SEQ ID NO: 37504 - protein, 15 aa, Homo sapiens
  CDR3 for beta chain variable domain of TCR clone 18752 (TRBV4-1, TRBJ1-4)
CASSDTGGTNEKLFF

SEQ ID NO: 37505 - protein, 15 aa, Homo sapiens
  CDR3 for alpha chain variable domain of TCR clone 18753 (TRAV2, TRAJ9)
CAVEDQGTGGFKTIF

SEQ ID NO: 37506 - protein, 16 aa, Homo sapiens
  CDR3 for beta chain variable domain of TCR clone 18753 (TRBV24-1, TRBJ2-3)
CATSDPGTGATDTQYF

SEQ ID NO: 37507 - protein, 13 aa, Homo sapiens
  CDR3 for alpha chain variable domain of TCR clone 18754 (TRAV13-1, TRAJ21)
CAASIYNFNKFYL

SEQ ID NO: 37508 - protein, 13 aa, Homo sapiens
  CDR3 for beta chain variable domain of TCR clone 18754 (TRBV27, TRBJ1-4)
CASSLMGDEKLFF

SEQ ID NO: 37509 - protein, 23 aa, Homo sapiens
  CDR3 for alpha chain variable domain of TCR clone 18755 (TRAV26-1, TRAJ38)
CIAGNAGNNHIQNPDPAVYQLRD

SEQ ID NO: 37510 - protein, 13 aa, Homo sapiens
  CDR3 for beta chain variable domain of TCR clone 18755 (TRBV20-1, TRBJ1-1)
CSARGGGNTEAFF

SEQ ID NO: 37511 - protein, 13 aa, Homo sapiens
  CDR3 for alpha chain variable domain of TCR clone 18756 (TRAV8-3, TRAJ28)
CAMGAVGSYQLTF

SEQ ID NO: 37512 - protein, 15 aa, Homo sapiens
  CDR3 for beta chain variable domain of TCR clone 18756 (TRBV7-9, TRBJ1-5)
CASSQGHQPNQPQHF

SEQ ID NO: 37513 - protein, 16 aa, Homo sapiens
  CDR3 for alpha chain variable domain of TCR clone 18757 (TRAV26-1, TRAJ53)
CIVRVAMRGSNYKLTF

SEQ ID NO: 37514 - protein, 12 aa, Homo sapiens
  CDR3 for beta chain variable domain of TCR clone 18757 (TRBV7-9, TRBJ1-5)
CASSPQGQPQHF

SEQ ID NO: 37515 - protein, 15 aa, Homo sapiens
  CDR3 for alpha chain variable domain of TCR clone 18758 (TRAV26-1, TRAJ29)
CIVRDEGSGNTPLVF

SEQ ID NO: 37516 - protein, 15 aa, Homo sapiens
  CDR3 for beta chain variable domain of TCR clone 18758 (TRBV7-9, TRBJ1-5)
CASSQGHQPNQPQHF

SEQ ID NO: 37517 - protein, 14 aa, Homo sapiens
  CDR3 for alpha chain variable domain of TCR clone 18759 (TRAV21, TRAJ35)
CAVLPIGFGNVLHC

SEQ ID NO: 37518 - protein, 12 aa, Homo sapiens
  CDR3 for beta chain variable domain of TCR clone 18759 (TRBV7-9, TRBJ2-7)
CASSIKREEQYF

SEQ ID NO: 37519 - protein, 13 aa, Homo sapiens
  CDR3 for alpha chain variable domain of TCR clone 18760 (TRAV27, TRAJ54)
CAGAGQGAQKLGF

SEQ ID NO: 37520 - protein, 15 aa, Homo sapiens
  CDR3 for beta chain variable domain of TCR clone 18760 (TRBV18, TRBJ2-6)
CASSPSYAGANVLTF

SEQ ID NO: 37521 - protein, 11 aa, Homo sapiens
  CDR3 for alpha chain variable domain of TCR clone 18761 (TRAV1-1, TRAJ23)
CVVRQGGKLIF

SEQ ID NO: 37522 - protein, 20 aa, Homo sapiens
  CDR3 for beta chain variable domain of TCR clone 18761 (TRBV7-8, TRBJ2-2)
CASSHLFPGPTIHITGELFF

SEQ ID NO: 37523 - protein, 12 aa, Homo sapiens
  CDR3 for alpha chain variable domain of TCR clone 18762 (TRAV35, TRAJ49)
CAGWNTSNQFYF

SEQ ID NO: 37524 - protein, 16 aa, Homo sapiens
  CDR3 for beta chain variable domain of TCR clone 18762 (TRBV5-1, TRBJ2-2)
CASSLWDTTNTGELFF

SEQ ID NO: 37525 - protein, 23 aa, Homo sapiens
  CDR3 for alpha chain variable domain of TCR clone 18763 (TRAV26-1, TRAJ38)
CIADNAGNNHIQNPDPPVYQLRD

SEQ ID NO: 37526 - protein, 13 aa, Homo sapiens
  CDR3 for beta chain variable domain of TCR clone 18763 (TRBV20-1, TRBJ1-1)
CSARGGGNTEAFF

SEQ ID NO: 37527 - protein, 15 aa, Homo sapiens
  CDR3 for alpha chain variable domain of TCR clone 18764 (TRAV26-1, TRAJ44)
CIIRANTGTASKLTF

SEQ ID NO: 37528 - protein, 16 aa, Homo sapiens
  CDR3 for beta chain variable domain of TCR clone 18764 (TRBV7-7, TRBJ2-1)
CASSLASGTSYNEQFF

SEQ ID NO: 37529 - protein, 12 aa, Homo sapiens
  CDR3 for alpha chain variable domain of TCR clone 18765 (TRAV13-1, TRAJ6)
CAAMGGSYIPTF

SEQ ID NO: 37530 - protein, 12 aa, Homo sapiens
  CDR3 for beta chain variable domain of TCR clone 18765 (TRBV5-4, TRBJ2-2)
CASIDQGGELFF

SEQ ID NO: 37531 - protein, 16 aa, Homo sapiens
  CDR3 for alpha chain variable domain of TCR clone 18766 (TRAV30, TRAJ24)
CGTEIVDADSWGKFQF

SEQ ID NO: 37532 - protein, 15 aa, Homo sapiens
  CDR3 for beta chain variable domain of TCR clone 18766 (TRBV6-5, TRBJ2-1)
CASSYDAGAGNEQFF

SEQ ID NO: 37533 - protein, 12 aa, Homo sapiens
  CDR3 for alpha chain variable domain of TCR clone 18767 (TRAV13-1, TRAJ9)
CASHTGGFKTIF

SEQ ID NO: 37534 - protein, 17 aa, Homo sapiens
  CDR3 for beta chain variable domain of TCR clone 18767 (TRBV11-2, TRBJ2-3)
CQQLRGASRGAPNTQYF

SEQ ID NO: 37535 - protein, 13 aa, Homo sapiens
  CDR3 for alpha chain variable domain of TCR clone 18768 (TRAV27, TRAJ42)
CAGARGSQGNLIF

SEQ ID NO: 37536 - protein, 14 aa, Homo sapiens
  CDR3 for beta chain variable domain of TCR clone 18768 (TRBV20-1, TRBJ1-1)
CSAQTRIGGTEALF

SEQ ID NO: 37537 - protein, 14 aa, Homo sapiens
  CDR3 for alpha chain variable domain of TCR clone 18769 (TRAV1-2, TRAJ8)
CAVREDTGFRKLVF

SEQ ID NO: 37538 - protein, 16 aa, Homo sapiens
  CDR3 for beta chain variable domain of TCR clone 18769 (TRBV7-6, TRBJ2-6)
CASSLPGLSGANVLTF

SEQ ID NO: 37539 - protein, 15 aa, Homo sapiens
  CDR3 for alpha chain variable domain of TCR clone 18770 (TRAV26-1, TRAJ29)
CIVRVEGSGNTPLVF

SEQ ID NO: 37540 - protein, 15 aa, Homo sapiens
  CDR3 for beta chain variable domain of TCR clone 18770 (TRBV7-9, TRBJ1-5)
SASSQGHQPNQPQHF

SEQ ID NO: 37541 - protein, 12 aa, Homo sapiens
  CDR3 for alpha chain variable domain of TCR clone 18771 (TRAV22, TRAJ29)
CAPPSGNTPLVF

SEQ ID NO: 37542 - protein, 14 aa, Homo sapiens
  CDR3 for beta chain variable domain of TCR clone 18771 (TRBV11-2, TRBJ2-7)
CANSLGAGAYEQYF

SEQ ID NO: 37543 - protein, 11 aa, Homo sapiens
  CDR3 for alpha chain variable domain of TCR clone 18772 (TRAV21, TRAJ34)
CAHYNTDKLIF

SEQ ID NO: 37544 - protein, 13 aa, Homo sapiens
  CDR3 for beta chain variable domain of TCR clone 18772 (TRBV7-6, TRBJ1-2)
CASSLVADHGYTF

SEQ ID NO: 37545 - protein, 13 aa, Homo sapiens
  CDR3 for alpha chain variable domain of TCR clone 18773 (TRAV12-1, TRAJ29)
CAMTLSGNTPLVF

SEQ ID NO: 37546 - protein, 15 aa, Homo sapiens
  CDR3 for beta chain variable domain of TCR clone 18773 (TRBV5-1, TRBJ2-6)
CASSLDPSGANVLTF

SEQ ID NO: 37547 - protein, 12 aa, Homo sapiens
  CDR3 for alpha chain variable domain of TCR clone 18774 (TRAV16, TRAJ10)
CSRTGGGNKLNF

SEQ ID NO: 37548 - protein, 15 aa, Homo sapiens
  CDR3 for beta chain variable domain of TCR clone 18774 (TRBV6-3, TRBJ2-7)
CASSSPGTVFYEQYF

SEQ ID NO: 37549 - protein, 12 aa, Homo sapiens
  CDR3 for alpha chain variable domain of TCR clone 18775 (TRAV1-1, TRAJ8)
CAGGTGSQKLVF

SEQ ID NO: 37550 - protein, 15 aa, Homo sapiens
  CDR3 for beta chain variable domain of TCR clone 18775 (TRBV7-9, TRBJ1-4)
CASSRTGGFNEKLFF

SEQ ID NO: 37551 - protein, 14 aa, Homo sapiens
  CDR3 for alpha chain variable domain of TCR clone 18776 (TRAV8-4, TRAJ13)
CAVTLSGGYQKVTF

SEQ ID NO: 37552 - protein, 17 aa, Homo sapiens
  CDR3 for beta chain variable domain of TCR clone 18776 (TRBV4-1, TRBJ1-4)
CASSQEGPRGVEEKLFF

SEQ ID NO: 37553 - protein, 14 aa, Homo sapiens
  CDR3 for alpha chain variable domain of TCR clone 18777 (TRAV13-1, TRAJ35)
CAASKGGFGNVLHC

SEQ ID NO: 37554 - protein, 13 aa, Homo sapiens
  CDR3 for beta chain variable domain of TCR clone 18777 (TRBV7-3, TRBJ1-1)
SASSQDWGAEAFF

SEQ ID NO: 37555 - protein, 14 aa, Homo sapiens
  CDR3 for alpha chain variable domain of TCR clone 18778 (TRAV20, TRAJ56)
CAVQSGGANSKLTF

SEQ ID NO: 37556 - protein, 14 aa, Homo sapiens
  CDR3 for beta chain variable domain of TCR clone 18778 (TRBV20-1, TRBJ2-7)
CSAKRGRSSYEQYF

SEQ ID NO: 37557 - protein, 15 aa, Homo sapiens
  CDR3 for alpha chain variable domain of TCR clone 18779 (TRAV25, TRAJ52)
CAGRPDGTSYGKLTF

SEQ ID NO: 37558 - protein, 17 aa, Homo sapiens
  CDR3 for beta chain variable domain of TCR clone 18779 (TRBV7-8, TRBJ2-6)
CASSAGTGGAGANVLTF

SEQ ID NO: 37559 - protein, 13 aa, Homo sapiens
  CDR3 for alpha chain variable domain of TCR clone 18780 (TRAV22, TRAJ10)
CAVGTGGGNKLTF

SEQ ID NO: 37560 - protein, 16 aa, Homo sapiens
  CDR3 for beta chain variable domain of TCR clone 18780 (TRBV20-1, TRBJ2-1)
CSARGSSSGMVNEQFF

SEQ ID NO: 37561 - protein, 15 aa, Homo sapiens
  CDR3 for alpha chain variable domain of TCR clone 18781 (TRAV25, TRAJ52)
CAGRPGGTSYGKLTF

SEQ ID NO: 37562 - protein, 17 aa, Homo sapiens
  CDR3 for beta chain variable domain of TCR clone 18781 (TRBV7-8, TRBJ2-6)
WASSAGTGGAGANVLTF

SEQ ID NO: 37563 - protein, 20 aa, Homo sapiens
  CDR3 for alpha chain variable domain of TCR clone 18782 (TRAV12-1, TRAJ42)
SSVIQPPTSVRGGSQGNLIF

SEQ ID NO: 37564 - protein, 18 aa, Homo sapiens
  CDR3 for beta chain variable domain of TCR clone 18782 (TRBV11-2, TRBJ2-3)
CASSLGGASRGAPNTQYF

SEQ ID NO: 37565 - protein, 14 aa, Homo sapiens
  CDR3 for alpha chain variable domain of TCR clone 18783 (TRAV30, TRAJ26)
CGTEIVSYGQNFVF

SEQ ID NO: 37566 - protein, 13 aa, Homo sapiens
  CDR3 for beta chain variable domain of TCR clone 18783 (TRBV19, TRBJ1-3)
CASGLSLGNTIYF

SEQ ID NO: 37567 - protein, 12 aa, Homo sapiens
  CDR3 for alpha chain variable domain of TCR clone 18784 (TRAV3, TRAJ20)
CAVRDPDYKLSF

SEQ ID NO: 37568 - protein, 13 aa, Homo sapiens
  CDR3 for beta chain variable domain of TCR clone 18784 (TRBV9, TRBJ2-1)
CASSVEQGGEQFF

SEQ ID NO: 37569 - protein, 17 aa, Homo sapiens
  CDR3 for alpha chain variable domain of TCR clone 18785 (TRAV13-1, TRAJ52)
CAAGRNAGGTSYGKLAF

SEQ ID NO: 37570 - protein, 13 aa, Homo sapiens
  CDR3 for beta chain variable domain of TCR clone 18785 (TRBV7-2, TRBJ1-1)
CASNLKGAKVAFF

SEQ ID NO: 37571 - protein, 15 aa, Homo sapiens
  CDR3 for alpha chain variable domain of TCR clone 18786 (TRAV26-1, TRAJ22)
CIVRGSFWFCKATDL

SEQ ID NO: 37572 - protein, 13 aa, Homo sapiens
  CDR3 for beta chain variable domain of TCR clone 18786 (TRBV7-9, TRBJ1-2)
CASSLKQNYGYTF

SEQ ID NO: 37573 - protein, 11 aa, Homo sapiens
  CDR3 for alpha chain variable domain of TCR clone 18787 (TRAV27, TRAJ52)
CAGAGAGGTSY

SEQ ID NO: 37574 - protein, 17 aa, Homo sapiens
  CDR3 for beta chain variable domain of TCR clone 18787 (TRBV24-1, TRBJ2-3)
CATSDLPSGEDTDTQYF

SEQ ID NO: 37575 - protein, 13 aa, Homo sapiens
  CDR3 for alpha chain variable domain of TCR clone 18788 (TRAV2, TRAJ29)
CAAQHSGNTPLVF

SEQ ID NO: 37576 - protein, 14 aa, Homo sapiens
  CDR3 for beta chain variable domain of TCR clone 18788 (TRBV7-9, TRBJ2-4)
CASSLAMGGNIQYF

SEQ ID NO: 37577 - protein, 12 aa, Homo sapiens
  CDR3 for alpha chain variable domain of TCR clone 18789 (TRAV1-1, TRAJ8)
CSGGTGFQKLVF

SEQ ID NO: 37578 - protein, 15 aa, Homo sapiens
  CDR3 for beta chain variable domain of TCR clone 18789 (TRBV7-9, TRBJ1-4)
CASSRTGGFNEKLFF

SEQ ID NO: 37579 - protein, 15 aa, Homo sapiens
  CDR3 for alpha chain variable domain of TCR clone 18790 (TRAV25, TRAJ52)
CAGTSGGTSYGKLTF

SEQ ID NO: 37580 - protein, 16 aa, Homo sapiens
  CDR3 for beta chain variable domain of TCR clone 18790 (TRBV20-1, TRBJ1-2)
CSASMGQGVANYGYTF

SEQ ID NO: 37581 - protein, 12 aa, Homo sapiens
  CDR3 for alpha chain variable domain of TCR clone 18791 (TRAV2, TRAJ9)
CAVGAGGFKTIF

SEQ ID NO: 37582 - protein, 14 aa, Homo sapiens
  CDR3 for beta chain variable domain of TCR clone 18791 (TRBV19, TRBJ2-1)
CASPTFVLSGEQFF

SEQ ID NO: 37583 - protein, 14 aa, Homo sapiens
  CDR3 for alpha chain variable domain of TCR clone 18792 (TRAV9-2, TRAJ39)
CALYIYNAGSMLTF

SEQ ID NO: 37584 - protein, 14 aa, Homo sapiens
  CDR3 for beta chain variable domain of TCR clone 18792 (TRBV6-1, TRBJ1-3)
CASVQGGGGNTIYF

SEQ ID NO: 37585 - protein, 13 aa, Homo sapiens
  CDR3 for alpha chain variable domain of TCR clone 18793 (TRAV8-3, TRAJ28)
WAVGAVGSYQLTF

SEQ ID NO: 37586 - protein, 14 aa, Homo sapiens
  CDR3 for beta chain variable domain of TCR clone 18793 (TRBV7-2, TRBJ2-7)
CASRSQGAAYEQYF

SEQ ID NO: 37587 - protein, 14 aa, Homo sapiens
  CDR3 for alpha chain variable domain of TCR clone 18794 (TRAV17, TRAJ31)
CATVLRNNNARPMF

SEQ ID NO: 37588 - protein, 14 aa, Homo sapiens
  CDR3 for beta chain variable domain of TCR clone 18794 (TRBV12-4, TRBJ2-5)
CASSLWQKQETQYF

SEQ ID NO: 37589 - protein, 14 aa, Homo sapiens
  CDR3 for alpha chain variable domain of TCR clone 18795 (TRAV17, TRAJ15)
CATDAWQAGTALIF

SEQ ID NO: 37590 - protein, 15 aa, Homo sapiens
  CDR3 for beta chain variable domain of TCR clone 18795 (TRBV7-2, TRBJ2-1)
CASSSGLAGGNEQFF

SEQ ID NO: 37591 - protein, 12 aa, Homo sapiens
  CDR3 for alpha chain variable domain of TCR clone 18796 (TRAV12-1, TRAJ40)
CVGYSGTYKYIF

SEQ ID NO: 37592 - protein, 18 aa, Homo sapiens
  CDR3 for beta chain variable domain of TCR clone 18796 (TRBV11-2, TRBJ2-3)
CASSLGGASRGAPNTQYF

SEQ ID NO: 37593 - protein, 16 aa, Homo sapiens
  CDR3 for alpha chain variable domain of TCR clone 18797 (TRAV8-3, TRAJ13)
CAVGAYPSGGSQKVTF

SEQ ID NO: 37594 - protein, 15 aa, Homo sapiens
  CDR3 for beta chain variable domain of TCR clone 18797 (TRBV19, TRBJ1-5)
CASSIVWADNQPQHF

SEQ ID NO: 37595 - protein, 15 aa, Homo sapiens
  CDR3 for alpha chain variable domain of TCR clone 18798 (TRAV8-3, TRAJ45)
CASSYSGGGADGLTF

SEQ ID NO: 37596 - protein, 17 aa, Homo sapiens
  CDR3 for beta chain variable domain of TCR clone 18798 (TRBV7-8, TRBJ1-2)
CASSLRPLQGHLYGDTF

SEQ ID NO: 37597 - protein, 11 aa, Homo sapiens
  CDR3 for alpha chain variable domain of TCR clone 18799 (TRAV1-2, TRAJ40)
CAVPGTYKYIF

SEQ ID NO: 37598 - protein, 16 aa, Homo sapiens
  CDR3 for beta chain variable domain of TCR clone 18799 (TRBV29-1, TRBJ2-7)
CSVEVVGTSGSYEQYF

SEQ ID NO: 37599 - protein, 14 aa, Homo sapiens
  CDR3 for alpha chain variable domain of TCR clone 18800 (TRAV12-1, TRAJ17)
CVVNYKAAGYKLTF

SEQ ID NO: 37600 - protein, 17 aa, Homo sapiens
  CDR3 for beta chain variable domain of TCR clone 18800 (TRBV20-1, TRBJ2-1)
CSASSSGLAGSYNEQFF

SEQ ID NO: 37601 - protein, 13 aa, Homo sapiens
  CDR3 for alpha chain variable domain of TCR clone 18801 (TRAV20, TRAJ48)
CAVQGVGNEKLTF

SEQ ID NO: 37602 - protein, 19 aa, Homo sapiens
  CDR3 for beta chain variable domain of TCR clone 18801 (TRBV2, TRBJ2-2)
CASSQPGRAGGGNTGELFF

SEQ ID NO: 37603 - protein, 16 aa, Homo sapiens
  CDR3 for alpha chain variable domain of TCR clone 18802 (TRAV16, TRAJ52)
CALSAAGGTRYGKLTF

SEQ ID NO: 37604 - protein, 12 aa, Homo sapiens
  CDR3 for beta chain variable domain of TCR clone 18802 (TRBV12-4, TRBJ1-3)
CASSFSGNTIYF

SEQ ID NO: 37605 - protein, 15 aa, Homo sapiens
  CDR3 for alpha chain variable domain of TCR clone 18803 (TRAV35, TRAJ40)
CAGQLGASGTYKYIF

SEQ ID NO: 37606 - protein, 11 aa, Homo sapiens
  CDR3 for beta chain variable domain of TCR clone 18803 (TRBV23-1, TRBJ2-7)
SSSGTGLEQYF

SEQ ID NO: 37607 - protein, 11 aa, Homo sapiens
  CDR3 for alpha chain variable domain of TCR clone 18804 (TRAV1-2, TRAJ20)
CAVANDYKLSF

SEQ ID NO: 37608 - protein, 18 aa, Homo sapiens
  CDR3 for beta chain variable domain of TCR clone 18804 (TRBV20-1, TRBJ2-6)
CSAEKTPTHGSGANVLTF

SEQ ID NO: 37609 - protein, 14 aa, Homo sapiens
  CDR3 for alpha chain variable domain of TCR clone 18805 (TRAV1-2, TRAJ8)
CAVREVTGFQKLVF

SEQ ID NO: 37610 - protein, 15 aa, Homo sapiens
  CDR3 for beta chain variable domain of TCR clone 18805 (TRBV6-3, TRBJ2-7)
CASSSPGTVFYEQYF

SEQ ID NO: 37611 - protein, 14 aa, Homo sapiens
  CDR3 for alpha chain variable domain of TCR clone 18806 (TRAV1-2, TRAJ8)
CAVREDTGFQKLVF

SEQ ID NO: 37612 - protein, 14 aa, Homo sapiens
  CDR3 for beta chain variable domain of TCR clone 18806 (TRBV7-7, TRBJ2-2)
CATRQDSDTGELFF

SEQ ID NO: 37613 - protein, 15 aa, Homo sapiens
  CDR3 for alpha chain variable domain of TCR clone 18807 (TRAV29/DV5, TRAJ24)
CAASGATDSWEKFQF

SEQ ID NO: 37614 - protein, 12 aa, Homo sapiens
  CDR3 for beta chain variable domain of TCR clone 18807 (TRBV11-2, TRBJ2-2)
CASSLPTGELFF

SEQ ID NO: 37615 - protein, 13 aa, Homo sapiens
  CDR3 for alpha chain variable domain of TCR clone 18808 (TRAV8-3, TRAJ28)
CAVGAVGSYQLTF

SEQ ID NO: 37616 - protein, 13 aa, Homo sapiens
  CDR3 for beta chain variable domain of TCR clone 18808 (TRBV4-2, TRBJ1-1)
CASSQAGNTEAFF

SEQ ID NO: 37617 - protein, 15 aa, Homo sapiens
  CDR3 for alpha chain variable domain of TCR clone 18809 (TRAV21, TRAJ53)
CATLNSGGSNYRLTF

SEQ ID NO: 37618 - protein, 15 aa, Homo sapiens
  CDR3 for beta chain variable domain of TCR clone 18809 (TRBV11-3, TRBJ2-3)
CASSAGTVVTNTQYF

SEQ ID NO: 37619 - protein, 12 aa, Homo sapiens
  CDR3 for alpha chain variable domain of TCR clone 18810 (TRAV16, TRAJ10)
CSRTGGGNKLTF

SEQ ID NO: 37620 - protein, 15 aa, Homo sapiens
  CDR3 for beta chain variable domain of TCR clone 18810 (TRBV6-3, TRBJ2-7)
CVSSSPGTVFYEQYF

SEQ ID NO: 37621 - protein, 12 aa, Homo sapiens
  CDR3 for alpha chain variable domain of TCR clone 18811 (TRAV13-1, TRAJ15)
CAASQAGTALIF

SEQ ID NO: 37622 - protein, 14 aa, Homo sapiens
  CDR3 for beta chain variable domain of TCR clone 18811 (TRBV19, TRBJ2-2)
CASSALHRSGELFF

SEQ ID NO: 37623 - protein, 15 aa, Homo sapiens
  CDR3 for alpha chain variable domain of TCR clone 18812 (TRAV12-2, TRAJ43)
CAFDMRFGAGTGLTV

SEQ ID NO: 37624 - protein, 18 aa, Homo sapiens
  CDR3 for beta chain variable domain of TCR clone 18812 (TRBV20-1, TRBJ2-3)
CSASGLAGGPGTTDTQYF

SEQ ID NO: 37625 - protein, 14 aa, Homo sapiens
  CDR3 for alpha chain variable domain of TCR clone 18813 (TRAV16, TRAJ33)
CALSAVDSNYQLIW

SEQ ID NO: 37626 - protein, 12 aa, Homo sapiens
  CDR3 for beta chain variable domain of TCR clone 18813 (TRBV5-1, TRBJ1-2)
CASSQDTYGYTF

SEQ ID NO: 37627 - protein, 12 aa, Homo sapiens
  CDR3 for alpha chain variable domain of TCR clone 18814 (TRAV12-2, TRAJ4)
GWPEGGYNKLIF

SEQ ID NO: 37628 - protein, 14 aa, Homo sapiens
  CDR3 for beta chain variable domain of TCR clone 18814 (TRBV18, TRBJ1-2)
CASSPDRVVYGYTF

SEQ ID NO: 37629 - protein, 18 aa, Homo sapiens
  CDR3 for alpha chain variable domain of TCR clone 18815 (TRAV21, TRAJ13)
CAVPRSFWGLPESYPWNW

SEQ ID NO: 37630 - protein, 15 aa, Homo sapiens
  CDR3 for beta chain variable domain of TCR clone 18815 (TRBV7-9, TRBJ1-6)
CASSSPGRGNSPLHF

SEQ ID NO: 37631 - protein, 12 aa, Homo sapiens
  CDR3 for alpha chain variable domain of TCR clone 18816 (TRAV13-1, TRAJ21)
CAAKEGFNKFYF

SEQ ID NO: 37632 - protein, 17 aa, Homo sapiens
  CDR3 for beta chain variable domain of TCR clone 18816 (TRBV28, TRBJ2-5)
CASSFGGEWGGQETQYF

SEQ ID NO: 37633 - protein, 13 aa, Homo sapiens
  CDR3 for alpha chain variable domain of TCR clone 18817 (TRAV21, TRAJ20)
CAVGLRVDYKLSF

SEQ ID NO: 37634 - protein, 13 aa, Homo sapiens
  CDR3 for beta chain variable domain of TCR clone 18817 (TRBV6-1, TRBJ1-1)
CASSRQGNAEAFF

SEQ ID NO: 37635 - protein, 14 aa, Homo sapiens
  CDR3 for alpha chain variable domain of TCR clone 18818 (TRAV17, TRAJ45)
RATASGGGADGLTF

SEQ ID NO: 37636 - protein, 15 aa, Homo sapiens
  CDR3 for beta chain variable domain of TCR clone 18818 (TRBV11-2, TRBJ2-1)
CASSRNRGLMYEQFF

SEQ ID NO: 37637 - protein, 14 aa, Homo sapiens
  CDR3 for alpha chain variable domain of TCR clone 18819 (TRAV1-2, TRAJ8)
CAVREDTGFQKLVF

SEQ ID NO: 37638 - protein, 15 aa, Homo sapiens
  CDR3 for beta chain variable domain of TCR clone 18819 (TRBV28, TRBJ1-3)
CASSMGWASGNTIYF

SEQ ID NO: 37639 - protein, 14 aa, Homo sapiens
  CDR3 for alpha chain variable domain of TCR clone 18820 (TRAV17, TRAJ22)
CATSPSGSAGQLTF

SEQ ID NO: 37640 - protein, 15 aa, Homo sapiens
  CDR3 for beta chain variable domain of TCR clone 18820 (TRBV4-1, TRBJ2-5)
CASSQWDLYQETQYF

SEQ ID NO: 37641 - protein, 11 aa, Homo sapiens
  CDR3 for alpha chain variable domain of TCR clone 18821 (TRAV1-1, TRAJ23)
CAVRQGGKLIF

SEQ ID NO: 37642 - protein, 20 aa, Homo sapiens
  CDR3 for beta chain variable domain of TCR clone 18821 (TRBV7-8, TRBJ2-2)
CASNHLFPGPTIHITGELFF

SEQ ID NO: 37643 - protein, 11 aa, Homo sapiens
  CDR3 for alpha chain variable domain of TCR clone 18822 (TRAV12-3, TRAJ43)
CAMSVSNDMRF

SEQ ID NO: 37644 - protein, 13 aa, Homo sapiens
  CDR3 for beta chain variable domain of TCR clone 18822 (TRBV20-1, TRBJ1-1)
CSAPIGGGTEAFF

SEQ ID NO: 37645 - protein, 18 aa, Homo sapiens
  CDR3 for alpha chain variable domain of TCR clone 18823 (TRAV29/DV5, TRAJ10)
CSVLLCSKRTGGGNKLTF

SEQ ID NO: 37646 - protein, 13 aa, Homo sapiens
  CDR3 for beta chain variable domain of TCR clone 18823 (TRBV3-1, TRBJ1-1)
CASSPGVITEAFF

SEQ ID NO: 37647 - protein, 13 aa, Homo sapiens
  CDR3 for alpha chain variable domain of TCR clone 18824 (TRAV1-2, TRAJ9)
CAAVNTGGFKTIF

SEQ ID NO: 37648 - protein, 13 aa, Homo sapiens
  CDR3 for beta chain variable domain of TCR clone 18824 (TRBV19, TRBJ1-2)
CASSVPGQDGYTF

SEQ ID NO: 37649 - protein, 15 aa, Homo sapiens
  CDR3 for alpha chain variable domain of TCR clone 18825 (TRAV2, TRAJ9)
CAVEDRGTGGFKTIF

SEQ ID NO: 37650 - protein, 14 aa, Homo sapiens
  CDR3 for beta chain variable domain of TCR clone 18825 (TRBV19, TRBJ2-1)
CASPTFVLSGEQFF

SEQ ID NO: 37651 - protein, 12 aa, Homo sapiens
  CDR3 for alpha chain variable domain of TCR clone 18826 (TRAV8-3, TRAJ34)
WASGYNTDKLTF

SEQ ID NO: 37652 - protein, 13 aa, Homo sapiens
  CDR3 for beta chain variable domain of TCR clone 18826 (TRBV6-4, TRBJ2-3)
CASSVSWADTQYF

SEQ ID NO: 37653 - protein, 12 aa, Homo sapiens
  CDR3 for alpha chain variable domain of TCR clone 18827 (TRAV17, TRAJ57)
CATDGGYEKLVF

SEQ ID NO: 37654 - protein, 13 aa, Homo sapiens
  CDR3 for beta chain variable domain of TCR clone 18827 (TRBV7-9, TRBJ2-7)
CASSFAGAYEQYF

SEQ ID NO: 37655 - protein, 14 aa, Homo sapiens
  CDR3 for alpha chain variable domain of TCR clone 18828 (TRAV17, TRAJ8)
CATDLNTGFQKLVF

SEQ ID NO: 37656 - protein, 15 aa, Homo sapiens
  CDR3 for beta chain variable domain of TCR clone 18828 (TRBV6-3, TRBJ2-7)
CASSSPGTVFYEQYF

SEQ ID NO: 37657 - protein, 15 aa, Homo sapiens
  CDR3 for alpha chain variable domain of TCR clone 18829 (TRAV25, TRAJ53)
CPTSNSGGSNYKMTF

SEQ ID NO: 37658 - protein, 14 aa, Homo sapiens
  CDR3 for beta chain variable domain of TCR clone 18829 (TRBV11-2, TRBJ2-3)
CASSRLARTDTQYF

SEQ ID NO: 37659 - protein, 11 aa, Homo sapiens
  CDR3 for alpha chain variable domain of TCR clone 18830 (TRAV2, TRAJ33)
RAVESNYQLIW

SEQ ID NO: 37660 - protein, 15 aa, Homo sapiens
  CDR3 for beta chain variable domain of TCR clone 18830 (TRBV19, TRBJ1-1)
CASTSGQIQNTEAFF

SEQ ID NO: 37661 - protein, 11 aa, Homo sapiens
  CDR3 for alpha chain variable domain of TCR clone 18831 (TRAV2, TRAJ21)
CAVFNFNKFYF

SEQ ID NO: 37662 - protein, 14 aa, Homo sapiens
  CDR3 for beta chain variable domain of TCR clone 18831 (TRBV15, TRBJ2-3)
CATRGGTSTDTQYF

SEQ ID NO: 37663 - protein, 14 aa, Homo sapiens
  CDR3 for alpha chain variable domain of TCR clone 18832 (TRAV13-1, TRAJ44)
CAAKATGTASKLTF

SEQ ID NO: 37664 - protein, 14 aa, Homo sapiens
  CDR3 for beta chain variable domain of TCR clone 18832 (TRBV12-5, TRBJ2-5)
CASGSRTHQETQYF

SEQ ID NO: 37665 - protein, 13 aa, Homo sapiens
  CDR3 for alpha chain variable domain of TCR clone 18833 (TRAV38-1, TRAJ42)
CARWGGSQGNLIF

SEQ ID NO: 37666 - protein, 17 aa, Homo sapiens
  CDR3 for beta chain variable domain of TCR clone 18833 (TRBV20-1, TRBJ2-1)
CSARDPLAGVWDNEQFL

SEQ ID NO: 37667 - protein, 16 aa, Homo sapiens
  CDR3 for alpha chain variable domain of TCR clone 18834 (TRAV13-2, TRAJ32)
CAENMNYGGATNKPIF

SEQ ID NO: 37668 - protein, 14 aa, Homo sapiens
  CDR3 for beta chain variable domain of TCR clone 18834 (TRBV15, TRBJ2-5)
CATSSTGYQETQYF

SEQ ID NO: 37669 - protein, 16 aa, Homo sapiens
  CDR3 for alpha chain variable domain of TCR clone 18835 (TRAV35, TRAJ28)
CAGQRYSGAGGYQLTF

SEQ ID NO: 37670 - protein, 13 aa, Homo sapiens
  CDR3 for beta chain variable domain of TCR clone 18835 (TRBV19, TRBJ1-2)
CASSQGQVYGYTF

SEQ ID NO: 37671 - protein, 16 aa, Homo sapiens
  CDR3 for alpha chain variable domain of TCR clone 18836 (TRAV3, TRAJ37)
CAVRVRGSGNTGKLIF

SEQ ID NO: 37672 - protein, 11 aa, Homo sapiens
  CDR3 for beta chain variable domain of TCR clone 18836 (TRBV11-3, TRBJ2-2)
CASSLPGELFF

SEQ ID NO: 37673 - protein, 16 aa, Homo sapiens
  CDR3 for alpha chain variable domain of TCR clone 18837 (TRAV17, TRAJ22)
CATGPISSGSARQLTF

SEQ ID NO: 37674 - protein, 13 aa, Homo sapiens
  CDR3 for beta chain variable domain of TCR clone 18837 (TRBV11-2, TRBJ2-1)
CASSVGLAGGRFF

SEQ ID NO: 37675 - protein, 16 aa, Homo sapiens
  CDR3 for alpha chain variable domain of TCR clone 18838 (TRAV1-2, TRAJ10)
CAVRGVLTVGGNKLTF

SEQ ID NO: 37676 - protein, 12 aa, Homo sapiens
  CDR3 for beta chain variable domain of TCR clone 18838 (TRBV7-8, TRBJ2-7)
CASSLGDREQYF

SEQ ID NO: 37677 - protein, 16 aa, Homo sapiens
  CDR3 for alpha chain variable domain of TCR clone 18839 (TRAV12-2, TRAJ18)
CAVTTDRGSTLGRLYF

SEQ ID NO: 37678 - protein, 15 aa, Homo sapiens
  CDR3 for beta chain variable domain of TCR clone 18839 (TRBV5-1, TRBJ2-3)
CASSVTSGSTDTQYF

SEQ ID NO: 37679 - protein, 14 aa, Homo sapiens
  CDR3 for alpha chain variable domain of TCR clone 18840 (TRAV38-1, TRAJ40)
RALRPTSGTYKYIF

SEQ ID NO: 37680 - protein, 14 aa, Homo sapiens
  CDR3 for beta chain variable domain of TCR clone 18840 (TRBV25-1, TRBJ1-1)
CASTHLGGNTEAFF

SEQ ID NO: 37681 - protein, 15 aa, Homo sapiens
  CDR3 for alpha chain variable domain of TCR clone 18841 (TRAV12-3, TRAJ6)
CTMSATTGGSYIPTF

SEQ ID NO: 37682 - protein, 16 aa, Homo sapiens
  CDR3 for beta chain variable domain of TCR clone 18841 (TRBV20-1, TRBJ1-2)
CSASMGQGVANYGYTF

SEQ ID NO: 37683 - protein, 11 aa, Homo sapiens
  CDR3 for alpha chain variable domain of TCR clone 18842 (TRAV1-1, TRAJ23)
CAVRQGGKLIF

SEQ ID NO: 37684 - protein, 20 aa, Homo sapiens
  CDR3 for beta chain variable domain of TCR clone 18842 (TRBV7-8, TRBJ2-2)
CASSYLFPGPTIHITGELFF

SEQ ID NO: 37685 - protein, 14 aa, Homo sapiens
  CDR3 for alpha chain variable domain of TCR clone 18843 (TRAV13-1, TRAJ9)
CAASALTGGFKTIF

SEQ ID NO: 37686 - protein, 13 aa, Homo sapiens
  CDR3 for beta chain variable domain of TCR clone 18843 (TRBV20-1, TRBJ1-1)
CSAGTVGSTEAFF

SEQ ID NO: 37687 - protein, 12 aa, Homo sapiens
  CDR3 for alpha chain variable domain of TCR clone 18844 (TRAV12-1, TRAJ40)
CVVYSGTYKYIF

SEQ ID NO: 37688 - protein, 14 aa, Homo sapiens
  CDR3 for beta chain variable domain of TCR clone 18844 (TRBV19, TRBJ2-1)
CASPTFVLSGEQFF

SEQ ID NO: 37689 - protein, 14 aa, Homo sapiens
  CDR3 for alpha chain variable domain of TCR clone 18845 (TRAV1-2, TRAJ16)
CAVNRFSDGQKLLF

SEQ ID NO: 37690 - protein, 12 aa, Homo sapiens
  CDR3 for beta chain variable domain of TCR clone 18845 (TRBV7-9, TRBJ2-7)
CASSFGSYEQYF

SEQ ID NO: 37691 - protein, 14 aa, Homo sapiens
  CDR3 for alpha chain variable domain of TCR clone 18846 (TRAV1-2, TRAJ16)
CAVNRFSDGQKLLF

SEQ ID NO: 37692 - protein, 15 aa, Homo sapiens
  CDR3 for beta chain variable domain of TCR clone 18846 (TRBV9, TRBJ1-6)
CVSSVAGTGDSPLHF

SEQ ID NO: 37693 - protein, 19 aa, Homo sapiens
  CDR3 for alpha chain variable domain of TCR clone 18847 (TRAV8-4, TRAJ3)
CAVTGENLVQQCFQDNLCI

SEQ ID NO: 37694 - protein, 16 aa, Homo sapiens
  CDR3 for beta chain variable domain of TCR clone 18847 (TRBV4-2, TRBJ1-1)
CASSQAGFGMNTEAFF

SEQ ID NO: 37695 - protein, 12 aa, Homo sapiens
  CDR3 for alpha chain variable domain of TCR clone 18848 (TRAV17, TRAJ12)
CATLRSSHKLIF

SEQ ID NO: 37696 - protein, 16 aa, Homo sapiens
  CDR3 for beta chain variable domain of TCR clone 18848 (TRBV28, TRBJ2-7)
CASSLFFETGGPEQYF

SEQ ID NO: 37697 - protein, 12 aa, Homo sapiens
  CDR3 for alpha chain variable domain of TCR clone 18849 (TRAV3, TRAJ20)
CAVRDPDYKLSF

SEQ ID NO: 37698 - protein, 13 aa, Homo sapiens
  CDR3 for beta chain variable domain of TCR clone 18849 (TRBV9, TRBJ2-1)
CASSVGQGGEQSF

SEQ ID NO: 37699 - protein, 13 aa, Homo sapiens
  CDR3 for alpha chain variable domain of TCR clone 18850 (TRAV13-2, TRAJ48)
CAEMDFGNEKLTF

SEQ ID NO: 37700 - protein, 15 aa, Homo sapiens
  CDR3 for beta chain variable domain of TCR clone 18850 (TRBV9, TRBJ1-6)
CASSVAGTGDSPLHF

SEQ ID NO: 37701 - protein, 14 aa, Homo sapiens
  CDR3 for alpha chain variable domain of TCR clone 18851 (TRAV12-2, TRAJ45)
CALPERGGADGLPF

SEQ ID NO: 37702 - protein, 14 aa, Homo sapiens
  CDR3 for beta chain variable domain of TCR clone 18851 (TRBV18, TRBJ1-5)
CASSPGNSNQPQHF

SEQ ID NO: 37703 - protein, 10 aa, Homo sapiens
  CDR3 for alpha chain variable domain of TCR clone 18852 (TRAV16, TRAJ22)
SAMYLRQLTF

SEQ ID NO: 37704 - protein, 15 aa, Homo sapiens
  CDR3 for beta chain variable domain of TCR clone 18852 (TRBV7-9, TRBJ1-6)
CASSSTGRGNSPLHF

SEQ ID NO: 37705 - protein, 12 aa, Homo sapiens
  CDR3 for alpha chain variable domain of TCR clone 18853 (TRAV2, TRAJ31)
CAVEDNNARLMF

SEQ ID NO: 37706 - protein, 16 aa, Homo sapiens
  CDR3 for beta chain variable domain of TCR clone 18853 (TRBV10-3, TRBJ2-1)
CAISGVGGGGGGEQFF

SEQ ID NO: 37707 - protein, 14 aa, Homo sapiens
  CDR3 for alpha chain variable domain of TCR clone 18854 (TRAV36/DV7, TRAJ40)
CAVETTPGTYKYIF

SEQ ID NO: 37708 - protein, 13 aa, Homo sapiens
  CDR3 for beta chain variable domain of TCR clone 18854 (TRBV10-3, TRBJ2-5)
CAMTSGAGETQYF

SEQ ID NO: 37709 - protein, 17 aa, Homo sapiens
  CDR3 for alpha chain variable domain of TCR clone 18855 (TRAV3, TRAJ6)
CAVSRRTDTGGSYIPTF

SEQ ID NO: 37710 - protein, 18 aa, Homo sapiens
  CDR3 for beta chain variable domain of TCR clone 18855 (TRBV7-2, TRBJ2-3)
CAGSLETSRGRKADTQYF

SEQ ID NO: 37711 - protein, 14 aa, Homo sapiens
  CDR3 for alpha chain variable domain of TCR clone 18856 (TRAV13-1, TRAJ35)
CAASKGGFGNVLHR

SEQ ID NO: 37712 - protein, 15 aa, Homo sapiens
  CDR3 for beta chain variable domain of TCR clone 18856 (TRBV28, TRBJ2-1)
CASSGLAEVDNEQFF

SEQ ID NO: 37713 - protein, 14 aa, Homo sapiens
  CDR3 for alpha chain variable domain of TCR clone 18857 (TRAV1-2, TRAJ16)
CAVNRFSDGQKLLF

SEQ ID NO: 37714 - protein, 15 aa, Homo sapiens
  CDR3 for beta chain variable domain of TCR clone 18857 (TRBV9, TRBJ1-6)
CASSVAVTGDSPLHF

SEQ ID NO: 37715 - protein, 11 aa, Homo sapiens
  CDR3 for alpha chain variable domain of TCR clone 18858 (TRAV1-2, TRAJ31)
CAVNNNARLMF

SEQ ID NO: 37716 - protein, 15 aa, Homo sapiens
  CDR3 for beta chain variable domain of TCR clone 18858 (TRBV28, TRBJ2-1)
CARSIIAGGRSEQFF

SEQ ID NO: 37717 - protein, 17 aa, Homo sapiens
  CDR3 for alpha chain variable domain of TCR clone 18859 (TRAV13-1, TRAJ28)
CAASPPYSGAGSYQLTS

SEQ ID NO: 37718 - protein, 12 aa, Homo sapiens
  CDR3 for beta chain variable domain of TCR clone 18859 (TRBV11-2, TRBJ2-2)
CASSLPTGELFF

SEQ ID NO: 37719 - protein, 13 aa, Homo sapiens
  CDR3 for alpha chain variable domain of TCR clone 18860 (TRAV8-6, TRAJ21)
CAVSPSSLNKFYF

SEQ ID NO: 37720 - protein, 14 aa, Homo sapiens
  CDR3 for beta chain variable domain of TCR clone 18860 (TRBV7-9, TRBJ2-5)
CASSLDTARETQYF

SEQ ID NO: 37721 - protein, 15 aa, Homo sapiens
  CDR3 for alpha chain variable domain of TCR clone 18861 (TRAV12-3, TRAJ11)
CAMSEENSGYSTLTF

SEQ ID NO: 37722 - protein, 17 aa, Homo sapiens
  CDR3 for beta chain variable domain of TCR clone 18861 (TRBV20-1, TRBJ2-1)
CSASSSGLAGSYNEQFF

SEQ ID NO: 37723 - protein, 15 aa, Homo sapiens
  CDR3 for alpha chain variable domain of TCR clone 18862 (TRAV26-1, TRAJ29)
CIVRVEGSGNTPLVF

SEQ ID NO: 37724 - protein, 14 aa, Homo sapiens
  CDR3 for beta chain variable domain of TCR clone 18862 (TRBV7-2, TRBJ2-7)
CASSPKTSFYEQYF

SEQ ID NO: 37725 - protein, 18 aa, Homo sapiens
  CDR3 for alpha chain variable domain of TCR clone 18863 (TRAV13-1, TRAJ52)
CAAKNPNAGGTSYGKLTF

SEQ ID NO: 37726 - protein, 14 aa, Homo sapiens
  CDR3 for beta chain variable domain of TCR clone 18863 (TRBV5-1, TRBJ2-7)
CASSRGESLYEQYF

SEQ ID NO: 37727 - protein, 15 aa, Homo sapiens
  CDR3 for alpha chain variable domain of TCR clone 18864 (TRAV17, TRAJ57)
CATGPSQGGSEKLVF

SEQ ID NO: 37728 - protein, 16 aa, Homo sapiens
  CDR3 for beta chain variable domain of TCR clone 18864 (TRBV12-4, TRBJ1-5)
CASSRPVGRSNQPQHF

SEQ ID NO: 37729 - protein, 14 aa, Homo sapiens
  CDR3 for alpha chain variable domain of TCR clone 18865 (TRAV3, TRAJ34)
CAVRAPGNTDKPIF

SEQ ID NO: 37730 - protein, 17 aa, Homo sapiens
  CDR3 for beta chain variable domain of TCR clone 18865 (TRBV20-1, TRBJ2-7)
CSAAPGLARGISYEQYF

SEQ ID NO: 37731 - protein, 14 aa, Homo sapiens
  CDR3 for alpha chain variable domain of TCR clone 18866 (TRAV17, TRAJ34)
CATGSLEGTDKLIF

SEQ ID NO: 37732 - protein, 13 aa, Homo sapiens
  CDR3 for beta chain variable domain of TCR clone 18866 (TRBV11-2, TRBJ2-7)
CASSGTRPYEQYF

SEQ ID NO: 37733 - protein, 13 aa, Homo sapiens
  CDR3 for alpha chain variable domain of TCR clone 18867 (TRAV29/DV5, TRAJ31)
CAASRNNNARLMF

SEQ ID NO: 37734 - protein, 13 aa, Homo sapiens
  CDR3 for beta chain variable domain of TCR clone 18867 (TRBV7-2, TRBJ1-5)
CASTPTVNQPQHF

SEQ ID NO: 37735 - protein, 12 aa, Homo sapiens
  CDR3 for alpha chain variable domain of TCR clone 18868 (TRAV13-2, TRAJ23)
CAERRRGGKLIF

SEQ ID NO: 37736 - protein, 16 aa, Homo sapiens
  CDR3 for beta chain variable domain of TCR clone 18868 (TRBV20-1, TRBJ1-4)
CSAPGQGLLTNEKLFF

SEQ ID NO: 37737 - protein, 12 aa, Homo sapiens
  CDR3 for alpha chain variable domain of TCR clone 18869 (TRAV13-1, TRAJ21)
CAAKEGFNKFYF

SEQ ID NO: 37738 - protein, 14 aa, Homo sapiens
  CDR3 for beta chain variable domain of TCR clone 18869 (TRBV5-4, TRBJ1-1)
CASSLDSRRDEAFF

SEQ ID NO: 37739 - protein, 15 aa, Homo sapiens
  CDR3 for alpha chain variable domain of TCR clone 18870 (TRAV8-4, TRAJ48)
CAVSYESRGNEKLTF

SEQ ID NO: 37740 - protein, 16 aa, Homo sapiens
  CDR3 for beta chain variable domain of TCR clone 18870 (TRBV12-4, TRBJ2-5)
CASSFFVRGRQETQYF

SEQ ID NO: 37741 - protein, 12 aa, Homo sapiens
  CDR3 for alpha chain variable domain of TCR clone 18871 (TRAV22, TRAJ34)
CAVLYNTDKLIF

SEQ ID NO: 37742 - protein, 13 aa, Homo sapiens
  CDR3 for beta chain variable domain of TCR clone 18871 (TRBV7-3, TRBJ1-1)
CASSLTQGTEAFF

SEQ ID NO: 37743 - protein, 17 aa, Homo sapiens
  CDR3 for alpha chain variable domain of TCR clone 18872 (TRAV3, TRAJ6)
CAVRDGPRAGGSYIPTY

SEQ ID NO: 37744 - protein, 14 aa, Homo sapiens
  CDR3 for beta chain variable domain of TCR clone 18872 (TRBV7-2, TRBJ2-7)
CASSPKTSFYEQYF

SEQ ID NO: 37745 - protein, 12 aa, Homo sapiens
  CDR3 for alpha chain variable domain of TCR clone 18873 (TRAV12-3, TRAJ17)
CAMTLTGNKLTF

SEQ ID NO: 37746 - protein, 13 aa, Homo sapiens
  CDR3 for beta chain variable domain of TCR clone 18873 (TRBV27, TRBJ1-1)
CASSLSIGAEAFF

SEQ ID NO: 37747 - protein, 11 aa, Homo sapiens
  CDR3 for alpha chain variable domain of TCR clone 18874 (TRAV17, TRAJ9)
CATTGGFKTIF

SEQ ID NO: 37748 - protein, 14 aa, Homo sapiens
  CDR3 for beta chain variable domain of TCR clone 18874 (TRBV7-9, TRBJ2-2)
CASSGLADTGELSF

SEQ ID NO: 37749 - protein, 17 aa, Homo sapiens
  CDR3 for alpha chain variable domain of TCR clone 18875 (TRAV38-2/DV8, TRAJ28)
CAFLTLYSGAGSYQLTF

SEQ ID NO: 37750 - protein, 14 aa, Homo sapiens
  CDR3 for beta chain variable domain of TCR clone 18875 (TRBV7-2, TRBJ2-5)
CASSLAGGGETQYF

SEQ ID NO: 37751 - protein, 15 aa, Homo sapiens
  CDR3 for alpha chain variable domain of TCR clone 18876 (TRAV26-1, TRAJ56)
CIARVATGANSKLTF

SEQ ID NO: 37752 - protein, 15 aa, Homo sapiens
  CDR3 for beta chain variable domain of TCR clone 18876 (TRBV27, TRBJ2-7)
CASSPQREGQREQYF

SEQ ID NO: 37753 - protein, 14 aa, Homo sapiens
  CDR3 for alpha chain variable domain of TCR clone 18877 (TRAV1-2, TRAJ16)
CAVNRFSGGQKLLF

SEQ ID NO: 37754 - protein, 16 aa, Homo sapiens
  CDR3 for beta chain variable domain of TCR clone 18877 (TRBV7-2, TRBJ2-7)
CASSLDLSGGAYEQYF

SEQ ID NO: 37755 - protein, 13 aa, Homo sapiens
  CDR3 for alpha chain variable domain of TCR clone 18878 (TRAV20, TRAJ54)
CAVQAGGAQKLGF

SEQ ID NO: 37756 - protein, 14 aa, Homo sapiens
  CDR3 for beta chain variable domain of TCR clone 18878 (TRBV20-1, TRBJ2-7)
CSAKTGTGGYEQYF

SEQ ID NO: 37757 - protein, 14 aa, Homo sapiens
  CDR3 for alpha chain variable domain of TCR clone 18879 (TRAV1-2, TRAJ16)
CAVNRFSDGQKLLF

SEQ ID NO: 37758 - protein, 15 aa, Homo sapiens
  CDR3 for beta chain variable domain of TCR clone 18879 (TRBV9, TRBJ1-6)
CASSVAGTGDSPLHY

SEQ ID NO: 37759 - protein, 14 aa, Homo sapiens
  CDR3 for alpha chain variable domain of TCR clone 18880 (TRAV8-1, TRAJ24)
CAVNVADSWGKLQF

SEQ ID NO: 37760 - protein, 16 aa, Homo sapiens
  CDR3 for beta chain variable domain of TCR clone 18880 (TRBV4-3, TRBJ2-1)
CASSPALDRGVNEQFF

SEQ ID NO: 37761 - protein, 15 aa, Homo sapiens
  CDR3 for alpha chain variable domain of TCR clone 18881 (TRAV2, TRAJ22)
CAVPSRGGSARQLTF

SEQ ID NO: 37762 - protein, 13 aa, Homo sapiens
  CDR3 for beta chain variable domain of TCR clone 18881 (TRBV3-1, TRBJ2-7)
CASSLRDGYEQYF

SEQ ID NO: 37763 - protein, 15 aa, Homo sapiens
  CDR3 for alpha chain variable domain of TCR clone 18882 (TRAV8-3, TRAJ41)
CAVGSNSNSGYALNL

SEQ ID NO: 37764 - protein, 17 aa, Homo sapiens
  CDR3 for beta chain variable domain of TCR clone 18882 (TRBV25-1, TRBJ2-1)
CASSAYGQGRGVYEQFF

SEQ ID NO: 37765 - protein, 14 aa, Homo sapiens
  CDR3 for alpha chain variable domain of TCR clone 18883 (TRAV35, TRAJ22)
CAGLRPGSARQMTF

SEQ ID NO: 37766 - protein, 15 aa, Homo sapiens
  CDR3 for beta chain variable domain of TCR clone 18883 (TRBV12-4, TRBJ2-5)
CASSPPTGLQETQYF

SEQ ID NO: 37767 - protein, 15 aa, Homo sapiens
  CDR3 for alpha chain variable domain of TCR clone 18884 (TRAV17, TRAJ52)
CTTEAGGTSYGKLTF

SEQ ID NO: 37768 - protein, 14 aa, Homo sapiens
  CDR3 for beta chain variable domain of TCR clone 18884 (TRBV28, TRBJ1-5)
CASSLGVLVKPQHF

SEQ ID NO: 37769 - protein, 21 aa, Homo sapiens
  CDR3 for alpha chain variable domain of TCR clone 18885 (TRAV27, TRAJ3)
TAAQPVIQASLRGSSASKIIF

SEQ ID NO: 37770 - protein, 15 aa, Homo sapiens
  CDR3 for beta chain variable domain of TCR clone 18885 (TRBV28, TRBJ1-3)
CASSMGWASGNTIYF

SEQ ID NO: 37771 - protein, 12 aa, Homo sapiens
  CDR3 for alpha chain variable domain of TCR clone 18886 (TRAV8-3, TRAJ20)
CAVGAHDYKLSF

SEQ ID NO: 37772 - protein, 16 aa, Homo sapiens
  CDR3 for beta chain variable domain of TCR clone 18886 (TRBV19, TRBJ2-2)
CASRSPGTGATGELFF

SEQ ID NO: 37773 - protein, 15 aa, Homo sapiens
  CDR3 for alpha chain variable domain of TCR clone 18887 (TRAV2, TRAJ15)
CAVADRGQAGTALIF

SEQ ID NO: 37774 - protein, 13 aa, Homo sapiens
  CDR3 for beta chain variable domain of TCR clone 18887 (TRBV10-2, TRBJ2-7)
CASGASGGYEQYF

SEQ ID NO: 37775 - protein, 12 aa, Homo sapiens
  CDR3 for alpha chain variable domain of TCR clone 18888 (TRAV17, TRAJ12)
CVTLRSSYKLIF

SEQ ID NO: 37776 - protein, 16 aa, Homo sapiens
  CDR3 for beta chain variable domain of TCR clone 18888 (TRBV28, TRBJ2-7)
CASSLFFETGGPEQYF

SEQ ID NO: 37777 - protein, 13 aa, Homo sapiens
  CDR3 for alpha chain variable domain of TCR clone 18889 (TRAV27, TRAJ45)
CRSSGGCADGLTF

SEQ ID NO: 37778 - protein, 17 aa, Homo sapiens
  CDR3 for beta chain variable domain of TCR clone 18889 (TRBV11-2, TRBJ2-1)
CASSLYPPGVEYNEQFF

SEQ ID NO: 37779 - protein, 10 aa, Homo sapiens
  CDR3 for alpha chain variable domain of TCR clone 18890 (TRAV12-2, TRAJ52)
RSTSYRKLTF

SEQ ID NO: 37780 - protein, 11 aa, Homo sapiens
  CDR3 for beta chain variable domain of TCR clone 18890 (TRBV11-2, TRBJ2-2)
CASSLPGELFF

SEQ ID NO: 37781 - protein, 12 aa, Homo sapiens
  CDR3 for alpha chain variable domain of TCR clone 18891 (TRAV17, TRAJ12)
CATLHSSYKLIF

SEQ ID NO: 37782 - protein, 16 aa, Homo sapiens
  CDR3 for beta chain variable domain of TCR clone 18891 (TRBV28, TRBJ2-7)
CASSLFFETGGPEQYF

SEQ ID NO: 37783 - protein, 11 aa, Homo sapiens
  CDR3 for alpha chain variable domain of TCR clone 18892 (TRAV3, TRAJ21)
CAVGNFNKFYF

SEQ ID NO: 37784 - protein, 16 aa, Homo sapiens
  CDR3 for beta chain variable domain of TCR clone 18892 (TRBV19, TRBJ2-1)
CASSKAGPSSYTEQFF

SEQ ID NO: 37785 - protein, 23 aa, Homo sapiens
  CDR3 for alpha chain variable domain of TCR clone 18893 (TRAV12-2, TRAJ43)
SLLIRDSQPSDSATYPCAFDMRF

SEQ ID NO: 37786 - protein, 18 aa, Homo sapiens
  CDR3 for beta chain variable domain of TCR clone 18893 (TRBV20-1, TRBJ2-3)
CSASGLAGGPGTTDTQYF

SEQ ID NO: 37787 - protein, 13 aa, Homo sapiens
  CDR3 for alpha chain variable domain of TCR clone 18894 (TRAV20, TRAJ37)
CAGCSSNTGKLIF

SEQ ID NO: 37788 - protein, 11 aa, Homo sapiens
  CDR3 for beta chain variable domain of TCR clone 18894 (TRBV12-4, TRBJ2-3)
CTSTATDTQYF

SEQ ID NO: 37789 - protein, 11 aa, Homo sapiens
  CDR3 for alpha chain variable domain of TCR clone 18895 (TRAV2, TRAJ33)
CAVDSNYQLIW

SEQ ID NO: 37790 - protein, 13 aa, Homo sapiens
  CDR3 for beta chain variable domain of TCR clone 18895 (TRBV7-3, TRBJ1-1)
CASSQDWGAEAFF

SEQ ID NO: 37791 - protein, 16 aa, Homo sapiens
  CDR3 for alpha chain variable domain of TCR clone 18896 (TRAV12-1, TRAJ45)
CVVIRYSGGGADGLTL

SEQ ID NO: 37792 - protein, 12 aa, Homo sapiens
  CDR3 for beta chain variable domain of TCR clone 18896 (TRBV6-5, TRBJ2-2)
CASRQITGELFF

SEQ ID NO: 37793 - protein, 12 aa, Homo sapiens
  CDR3 for alpha chain variable domain of TCR clone 18897 (TRAV21, TRAJ33)
CAKVDSNYQLIW

SEQ ID NO: 37794 - protein, 14 aa, Homo sapiens
  CDR3 for beta chain variable domain of TCR clone 18897 (TRBV2, TRBJ2-7)
CASSLTSGGYEQYF

SEQ ID NO: 37795 - protein, 13 aa, Homo sapiens
  CDR3 for alpha chain variable domain of TCR clone 18898 (TRAV17, TRAJ33)
CATDADSNYQLIW

SEQ ID NO: 37796 - protein, 15 aa, Homo sapiens
  CDR3 for beta chain variable domain of TCR clone 18898 (TRBV7-9, TRBJ2-3)
CASNQGGRVTDTQYF

SEQ ID NO: 37797 - protein, 15 aa, Homo sapiens
  CDR3 for alpha chain variable domain of TCR clone 18899 (TRAV17, TRAJ57)
CATGPSQGGSEKLVF

SEQ ID NO: 37798 - protein, 16 aa, Homo sapiens
  CDR3 for beta chain variable domain of TCR clone 18899 (TRBV12-4, TRBJ1-5)
CANSRPVGGSNQPQHF

SEQ ID NO: 37799 - protein, 14 aa, Homo sapiens
  CDR3 for alpha chain variable domain of TCR clone 18900 (TRAV1-2, TRAJ16)
CAVNRFSDGQKLLF

SEQ ID NO: 37800 - protein, 15 aa, Homo sapiens
  CDR3 for beta chain variable domain of TCR clone 18900 (TRBV20-1, TRBJ2-7)
CSARDWVSGMDEQYF

SEQ ID NO: 37801 - protein, 14 aa, Homo sapiens
  CDR3 for alpha chain variable domain of TCR clone 18901 (TRAV21, TRAJ35)
CAVMPIGFGNVLHG

SEQ ID NO: 37802 - protein, 12 aa, Homo sapiens
  CDR3 for beta chain variable domain of TCR clone 18901 (TRBV7-9, TRBJ2-7)
CASSIKREEQYF

SEQ ID NO: 37803 - protein, 15 aa, Homo sapiens
  CDR3 for alpha chain variable domain of TCR clone 18902 (TRAV8-3, TRAJ27)
CSVGPSKTNAGKSTF

SEQ ID NO: 37804 - protein, 15 aa, Homo sapiens
  CDR3 for beta chain variable domain of TCR clone 18902 (TRBV7-2, TRBJ2-1)
CASSSGLAGGNEQFF

SEQ ID NO: 37805 - protein, 15 aa, Homo sapiens
  CDR3 for alpha chain variable domain of TCR clone 18903 (TRAV17, TRAJ57)
CATGPSQGGSEKLVF

SEQ ID NO: 37806 - protein, 14 aa, Homo sapiens
  CDR3 for beta chain variable domain of TCR clone 18903 (TRBV12-5, TRBJ2-5)
CASGSRTHQGTQYF

SEQ ID NO: 37807 - protein, 15 aa, Homo sapiens
  CDR3 for alpha chain variable domain of TCR clone 18904 (TRAV3, TRAJ5)
CAVRDLDTGRRALTF

SEQ ID NO: 37808 - protein, 13 aa, Homo sapiens
  CDR3 for beta chain variable domain of TCR clone 18904 (TRBV12-4, TRBJ2-7)
FASSPTETYEQYF

SEQ ID NO: 37809 - protein, 13 aa, Homo sapiens
  CDR3 for alpha chain variable domain of TCR clone 18905 (TRAV3, TRAJ21)
FAVREPDFNKFYF

SEQ ID NO: 37810 - protein, 13 aa, Homo sapiens
  CDR3 for beta chain variable domain of TCR clone 18905 (TRBV9, TRBJ2-1)
CASSPSGGNEQFF

SEQ ID NO: 37811 - protein, 14 aa, Homo sapiens
  CDR3 for alpha chain variable domain of TCR clone 18906 (TRAV2, TRAJ3)
CAVDRYSSASKIIF

SEQ ID NO: 37812 - protein, 16 aa, Homo sapiens
  CDR3 for beta chain variable domain of TCR clone 18906 (TRBV20-1, TRBJ1-5)
CSAELPGQQTKQPQHF

SEQ ID NO: 37813 - protein, 13 aa, Homo sapiens
  CDR3 for alpha chain variable domain of TCR clone 18907 (TRAV21, TRAJ27)
CAARPGNAGKSTF

SEQ ID NO: 37814 - protein, 14 aa, Homo sapiens
  CDR3 for beta chain variable domain of TCR clone 18907 (TRBV12-5, TRBJ2-5)
CASGSRTHQETQYF

SEQ ID NO: 37815 - protein, 11 aa, Homo sapiens
  CDR3 for alpha chain variable domain of TCR clone 18908 (TRAV12-3, TRAJ43)
CAMSVSNAMRF

SEQ ID NO: 37816 - protein, 13 aa, Homo sapiens
  CDR3 for beta chain variable domain of TCR clone 18908 (TRBV20-1, TRBJ1-1)
CSAPLGGGTEAFF

SEQ ID NO: 37817 - protein, 16 aa, Homo sapiens
  CDR3 for alpha chain variable domain of TCR clone 18909 (TRAV30, TRAJ24)
CGTENVDADSWGKFQF

SEQ ID NO: 37818 - protein, 14 aa, Homo sapiens
  CDR3 for beta chain variable domain of TCR clone 18909 (TRBV12-5, TRBJ2-5)
CASGSRTHQETQYF

SEQ ID NO: 37819 - protein, 12 aa, Homo sapiens
  CDR3 for alpha chain variable domain of TCR clone 18910 (TRAV23/DV6, TRAJ31)
CAARRIGARLMF

SEQ ID NO: 37820 - protein, 15 aa, Homo sapiens
  CDR3 for beta chain variable domain of TCR clone 18910 (TRBV28, TRBJ2-7)
CASKAGGYTSSTSGR

SEQ ID NO: 37821 - protein, 15 aa, Homo sapiens
  CDR3 for alpha chain variable domain of TCR clone 18911 (TRAV26-1, TRAJ44)
CIVRANTGTASKLTF

SEQ ID NO: 37822 - protein, 16 aa, Homo sapiens
  CDR3 for beta chain variable domain of TCR clone 18911 (TRBV7-7, TRBJ2-1)
CASSLASGTSYNEQSF

SEQ ID NO: 37823 - protein, 15 aa, Homo sapiens
  CDR3 for alpha chain variable domain of TCR clone 18912 (TRAV35, TRAJ40)
CAGQLGTSGTYKYIF

SEQ ID NO: 37824 - protein, 14 aa, Homo sapiens
  CDR3 for beta chain variable domain of TCR clone 18912 (TRBV7-3, TRBJ2-1)
CASSLAGGTNEQSF

SEQ ID NO: 37825 - protein, 12 aa, Homo sapiens
  CDR3 for alpha chain variable domain of TCR clone 18913 (TRAV13-2, TRAJ23)
CAERHRGGKLIF

SEQ ID NO: 37826 - protein, 16 aa, Homo sapiens
  CDR3 for beta chain variable domain of TCR clone 18913 (TRBV20-1, TRBJ1-4)
CSALGQGLLTNEKLFF

SEQ ID NO: 37827 - protein, 14 aa, Homo sapiens
  CDR3 for alpha chain variable domain of TCR clone 18914 (TRAV12-2, TRAJ13)
CAVKKTGGYQKVTF

SEQ ID NO: 37828 - protein, 12 aa, Homo sapiens
  CDR3 for beta chain variable domain of TCR clone 18914 (TRBV12-4, TRBJ2-7)
CASNPGGGEQYF

SEQ ID NO: 37829 - protein, 12 aa, Homo sapiens
  CDR3 for alpha chain variable domain of TCR clone 18915 (TRAV36/DV7, TRAJ54)
CAVVRGAQKLGF

SEQ ID NO: 37830 - protein, 14 aa, Homo sapiens
  CDR3 for beta chain variable domain of TCR clone 18915 (TRBV7-3, TRBJ1-1)
CASSLKGGNTEAFF

SEQ ID NO: 37831 - protein, 15 aa, Homo sapiens
  CDR3 for alpha chain variable domain of TCR clone 18916 (TRAV3, TRAJ22)
CAVRDRGGSARQLTF

SEQ ID NO: 37832 - protein, 13 aa, Homo sapiens
  CDR3 for beta chain variable domain of TCR clone 18916 (TRBV7-3, TRBJ1-1)
CASSQDWGAEAFF

SEQ ID NO: 37833 - protein, 15 aa, Homo sapiens
  CDR3 for alpha chain variable domain of TCR clone 18917 (TRAV8-3, TRAJ11)
CAVSLLNSGYSTLTF

SEQ ID NO: 37834 - protein, 16 aa, Homo sapiens
  CDR3 for beta chain variable domain of TCR clone 18917 (TRBV7-9, TRBJ1-2)
CASSLGFSSGEDGYTF

SEQ ID NO: 37835 - protein, 14 aa, Homo sapiens
  CDR3 for alpha chain variable domain of TCR clone 18918 (TRAV1-1, TRAJ27)
FAVIYNTNAGKSTF

SEQ ID NO: 37836 - protein, 15 aa, Homo sapiens
  CDR3 for beta chain variable domain of TCR clone 18918 (TRBV7-2, TRBJ2-1)
CASSSGLAGGNEQFF

SEQ ID NO: 37837 - protein, 11 aa, Homo sapiens
  CDR3 for alpha chain variable domain of TCR clone 18919 (TRAV12-1, TRAJ30)
CVANGQDKIIF

SEQ ID NO: 37838 - protein, 12 aa, Homo sapiens
  CDR3 for beta chain variable domain of TCR clone 18919 (TRBV27, TRBJ2-2)
CASKLFTGELFF

SEQ ID NO: 37839 - protein, 16 aa, Homo sapiens
  CDR3 for alpha chain variable domain of TCR clone 18920 (TRAV3, TRAJ37)
CAVRGKGSGNTGKLIF

SEQ ID NO: 37840 - protein, 15 aa, Homo sapiens
  CDR3 for beta chain variable domain of TCR clone 18920 (TRBV20-1, TRBJ2-7)
CSARDRVSGMDEQYF

SEQ ID NO: 37841 - protein, 12 aa, Homo sapiens
  CDR3 for alpha chain variable domain of TCR clone 18921 (TRAV17, TRAJ57)
CATDGGSGKLVF

SEQ ID NO: 37842 - protein, 13 aa, Homo sapiens
  CDR3 for beta chain variable domain of TCR clone 18921 (TRBV7-9, TRBJ2-7)
CASSFAGAYEQYF

SEQ ID NO: 37843 - protein, 14 aa, Homo sapiens
  CDR3 for alpha chain variable domain of TCR clone 18922 (TRAV2, TRAJ9)
CAVEDRSGGFKTIF

SEQ ID NO: 37844 - protein, 14 aa, Homo sapiens
  CDR3 for beta chain variable domain of TCR clone 18922 (TRBV18, TRBJ1-5)
RASSRQQRNQPQHF

SEQ ID NO: 37845 - protein, 15 aa, Homo sapiens
  CDR3 for alpha chain variable domain of TCR clone 18923 (TRAV17, TRAJ57)
CATGPSQGGSEQLVF

SEQ ID NO: 37846 - protein, 14 aa, Homo sapiens
  CDR3 for beta chain variable domain of TCR clone 18923 (TRBV12-5, TRBJ2-5)
CASGSRTHQETQYF

SEQ ID NO: 37847 - protein, 12 aa, Homo sapiens
  CDR3 for alpha chain variable domain of TCR clone 18924 (TRAV16, TRAJ10)
CSRTGGGNRLTF

SEQ ID NO: 37848 - protein, 15 aa, Homo sapiens
  CDR3 for beta chain variable domain of TCR clone 18924 (TRBV6-3, TRBJ2-7)
CASSSPGTVFYEQYF

SEQ ID NO: 37849 - protein, 15 aa, Homo sapiens
  CDR3 for alpha chain variable domain of TCR clone 18925 (TRAV3, TRAJ5)
CAVRDLDTGRRALTC

SEQ ID NO: 37850 - protein, 13 aa, Homo sapiens
  CDR3 for beta chain variable domain of TCR clone 18925 (TRBV12-4, TRBJ2-7)
CASSPTETYEQYF

SEQ ID NO: 37851 - protein, 12 aa, Homo sapiens
  CDR3 for alpha chain variable domain of TCR clone 18926 (TRAV3, TRAJ20)
CAVRDGDYKLSF

SEQ ID NO: 37852 - protein, 14 aa, Homo sapiens
  CDR3 for beta chain variable domain of TCR clone 18926 (TRBV19, TRBJ2-1)
CASPTFVLSGEQFF

SEQ ID NO: 37853 - protein, 12 aa, Homo sapiens
  CDR3 for alpha chain variable domain of TCR clone 18927 (TRAV13-1, TRAJ49)
CAAGPMGNQFYF

SEQ ID NO: 37854 - protein, 13 aa, Homo sapiens
  CDR3 for beta chain variable domain of TCR clone 18927 (TRBV20-1, TRBJ2-2)
CSASAAGTGELFF

SEQ ID NO: 37855 - protein, 15 aa, Homo sapiens
  CDR3 for alpha chain variable domain of TCR clone 18928 (TRAV35, TRAJ52)
CAGPRGGTSYGELTF

SEQ ID NO: 37856 - protein, 14 aa, Homo sapiens
  CDR3 for beta chain variable domain of TCR clone 18928 (TRBV20-1, TRBJ2-7)
CSAWTALSSYEQYF

SEQ ID NO: 37857 - protein, 20 aa, Homo sapiens
  CDR3 for alpha chain variable domain of TCR clone 18929 (TRAV26-1, TRAJ42)
CCVLLHRQTYYGGSQGNLIF

SEQ ID NO: 37858 - protein, 16 aa, Homo sapiens
  CDR3 for beta chain variable domain of TCR clone 18929 (TRBV7-3, TRBJ2-2)
CASSLKRGTLSGELFF

SEQ ID NO: 37859 - protein, 14 aa, Homo sapiens
  CDR3 for alpha chain variable domain of TCR clone 18930 (TRAV26-1, TRAJ40)
CIVRLLSGTHKYIF

SEQ ID NO: 37860 - protein, 13 aa, Homo sapiens
  CDR3 for beta chain variable domain of TCR clone 18930 (TRBV3-1, TRBJ1-1)
CASSQLQGAEAFF

SEQ ID NO: 37861 - protein, 12 aa, Homo sapiens
  CDR3 for alpha chain variable domain of TCR clone 18931 (TRAV1-1, TRAJ8)
CAGGTGFQKLVF

SEQ ID NO: 37862 - protein, 15 aa, Homo sapiens
  CDR3 for beta chain variable domain of TCR clone 18931 (TRBV7-9, TRBJ1-4)
CASSRTEGFNEKLFF

SEQ ID NO: 37863 - protein, 12 aa, Homo sapiens
  CDR3 for alpha chain variable domain of TCR clone 18932 (TRAV8-3, TRAJ26)
CASDNYGQNFVF

SEQ ID NO: 37864 - protein, 15 aa, Homo sapiens
  CDR3 for beta chain variable domain of TCR clone 18932 (TRBV9, TRBJ2-1)
CASSLAGSSYNEQFF

SEQ ID NO: 37865 - protein, 13 aa, Homo sapiens
  CDR3 for alpha chain variable domain of TCR clone 18933 (TRAV2, TRAJ10)
CAVETGGGNKLTF

SEQ ID NO: 37866 - protein, 16 aa, Homo sapiens
  CDR3 for beta chain variable domain of TCR clone 18933 (TRBV27, TRBJ2-1)
CASSSTGQGMNNEQFF

SEQ ID NO: 37867 - protein, 15 aa, Homo sapiens
  CDR3 for alpha chain variable domain of TCR clone 18934 (TRAV26-1, TRAJ29)
CIVRVEGSGNTLLVF

SEQ ID NO: 37868 - protein, 14 aa, Homo sapiens
  CDR3 for beta chain variable domain of TCR clone 18934 (TRBV18, TRBJ2-5)
CASSPGVSQETQYF

SEQ ID NO: 37869 - protein, 14 aa, Homo sapiens
  CDR3 for alpha chain variable domain of TCR clone 18935 (TRAV26-1, TRAJ39)
RIVRGSRAGNMLTF

SEQ ID NO: 37870 - protein, 15 aa, Homo sapiens
  CDR3 for beta chain variable domain of TCR clone 18935 (TRBV7-9, TRBJ1-5)
CASSQGHQPNQPQHF

SEQ ID NO: 37871 - protein, 16 aa, Homo sapiens
  CDR3 for alpha chain variable domain of TCR clone 18936 (TRAV30, TRAJ24)
CGTEIVDADSWGKFQF

SEQ ID NO: 37872 - protein, 14 aa, Homo sapiens
  CDR3 for beta chain variable domain of TCR clone 18936 (TRBV12-5, TRBJ2-5)
CASGSRTHLETQYF

SEQ ID NO: 37873 - protein, 18 aa, Homo sapiens
  CDR3 for alpha chain variable domain of TCR clone 18937 (TRAV21, TRAJ52)
CAVRPSPAGGTSYGKLTF

SEQ ID NO: 37874 - protein, 17 aa, Homo sapiens
  CDR3 for beta chain variable domain of TCR clone 18937 (TRBV13, TRBJ2-3)
SASSLSRVAGGRNTQYF

SEQ ID NO: 37875 - protein, 12 aa, Homo sapiens
  CDR3 for alpha chain variable domain of TCR clone 18938 (TRAV12-3, TRAJ20)
CAMVRGDYKLSF

SEQ ID NO: 37876 - protein, 16 aa, Homo sapiens
  CDR3 for beta chain variable domain of TCR clone 18938 (TRBV6-5, TRBJ2-1)
CASSYSLSGGYNEQFF

SEQ ID NO: 37877 - protein, 11 aa, Homo sapiens
  CDR3 for alpha chain variable domain of TCR clone 18939 (TRAV17, TRAJ9)
FGFTGGFKTIF

SEQ ID NO: 37878 - protein, 14 aa, Homo sapiens
  CDR3 for beta chain variable domain of TCR clone 18939 (TRBV7-9, TRBJ2-2)
CASSLVQDTGELFF

SEQ ID NO: 37879 - protein, 14 aa, Homo sapiens
  CDR3 for alpha chain variable domain of TCR clone 18940 (TRAV12-2, TRAJ17)
CAVLFKAAGNKLTF

SEQ ID NO: 37880 - protein, 17 aa, Homo sapiens
  CDR3 for beta chain variable domain of TCR clone 18940 (TRBV20-1, TRBJ2-2)
CSARGSGQGGLTGELFF

SEQ ID NO: 37881 - protein, 12 aa, Homo sapiens
  CDR3 for alpha chain variable domain of TCR clone 18941 (TRAV16, TRAJ10)
CSRTGGGNKLTF

SEQ ID NO: 37882 - protein, 16 aa, Homo sapiens
  CDR3 for beta chain variable domain of TCR clone 18941 (TRBV3-1, TRBJ2-5)
CASSQDWASGQETQYF

SEQ ID NO: 37883 - protein, 16 aa, Homo sapiens
  CDR3 for alpha chain variable domain of TCR clone 18942 (TRAV23/DV6, TRAJ30)
CAASMCADANRDDKII

SEQ ID NO: 37884 - protein, 12 aa, Homo sapiens
  CDR3 for beta chain variable domain of TCR clone 18942 (TRBV19, TRBJ2-3)
CATAQGGDTQYF

SEQ ID NO: 37885 - protein, 14 aa, Homo sapiens
  CDR3 for alpha chain variable domain of TCR clone 18943 (TRAV12-2, TRAJ40)
CAVKIPSGIYKYIF

SEQ ID NO: 37886 - protein, 14 aa, Homo sapiens
  CDR3 for beta chain variable domain of TCR clone 18943 (TRBV20-1, TRBJ1-1)
CSAQTRIGGTEAFF

SEQ ID NO: 37887 - protein, 13 aa, Homo sapiens
  CDR3 for alpha chain variable domain of TCR clone 18944 (TRAV8-4, TRAJ39)
SAPPSDAGNMLTF

SEQ ID NO: 37888 - protein, 13 aa, Homo sapiens
  CDR3 for beta chain variable domain of TCR clone 18944 (TRBV12-4, TRBJ2-7)
CASSPTETYEQYF

SEQ ID NO: 37889 - protein, 14 aa, Homo sapiens
  CDR3 for alpha chain variable domain of TCR clone 18945 (TRAV38-1, TRAJ45)
CAYYSRGGADGLTF

SEQ ID NO: 37890 - protein, 20 aa, Homo sapiens
  CDR3 for beta chain variable domain of TCR clone 18945 (TRBV28, TRBJ2-1)
CASTPIGRSPGLAGGNEQFF

SEQ ID NO: 37891 - protein, 11 aa, Homo sapiens
  CDR3 for alpha chain variable domain of TCR clone 18946 (TRAV8-4, TRAJ26)
CAGGEGQNFVF

SEQ ID NO: 37892 - protein, 17 aa, Homo sapiens
  CDR3 for beta chain variable domain of TCR clone 18946 (TRBV7-9, TRBJ2-3)
CASSLTVAGDLTDTQYF

SEQ ID NO: 37893 - protein, 12 aa, Homo sapiens
  CDR3 for alpha chain variable domain of TCR clone 18947 (TRAV12-1, TRAJ40)
CVVYSGTYKYIF

SEQ ID NO: 37894 - protein, 18 aa, Homo sapiens
  CDR3 for beta chain variable domain of TCR clone 18947 (TRBV11-2, TRBJ2-3)
CASSLGWASRGAPNTQYF

SEQ ID NO: 37895 - protein, 19 aa, Homo sapiens
  CDR3 for alpha chain variable domain of TCR clone 18948 (TRAV26-1, TRAJ42)
CALLHRQTYYGGSQGNLIF

SEQ ID NO: 37896 - protein, 16 aa, Homo sapiens
  CDR3 for beta chain variable domain of TCR clone 18948 (TRBV7-3, TRBJ2-2)
CASSLKRGTLSGELFF

SEQ ID NO: 37897 - protein, 12 aa, Homo sapiens
  CDR3 for alpha chain variable domain of TCR clone 18949 (TRAV13-1, TRAJ27)
CAAHTNAGKSTL

SEQ ID NO: 37898 - protein, 14 aa, Homo sapiens
  CDR3 for beta chain variable domain of TCR clone 18949 (TRBV19, TRBJ2-2)
CASSGQGIAGELFF

SEQ ID NO: 37899 - protein, 14 aa, Homo sapiens
  CDR3 for alpha chain variable domain of TCR clone 18950 (TRAV9-2, TRAJ6)
CALSDPGGSYIPTF

SEQ ID NO: 37900 - protein, 15 aa, Homo sapiens
  CDR3 for beta chain variable domain of TCR clone 18950 (TRBV20-1, TRBJ2-3)
CSASPPQVSTDTQYF

SEQ ID NO: 37901 - protein, 14 aa, Homo sapiens
  CDR3 for alpha chain variable domain of TCR clone 18951 (TRAV35, TRAJ22)
CAGLRPGSVRQLTF

SEQ ID NO: 37902 - protein, 15 aa, Homo sapiens
  CDR3 for beta chain variable domain of TCR clone 18951 (TRBV12-4, TRBJ2-5)
CASSPPTGLQETQYF

SEQ ID NO: 37903 - protein, 13 aa, Homo sapiens
  CDR3 for alpha chain variable domain of TCR clone 18952 (TRAV21, TRAJ57)
CAVTQGGSEKLVF

SEQ ID NO: 37904 - protein, 16 aa, Homo sapiens
  CDR3 for beta chain variable domain of TCR clone 18952 (TRBV29-1, TRBJ2-7)
CSVEDAEDGTAYEHYF

SEQ ID NO: 37905 - protein, 13 aa, Homo sapiens
  CDR3 for alpha chain variable domain of TCR clone 18953 (TRAV12-2, TRAJ39)
CAVNNNAGNMLTF

SEQ ID NO: 37906 - protein, 13 aa, Homo sapiens
  CDR3 for beta chain variable domain of TCR clone 18953 (TRBV2, TRBJ1-5)
CATAGPGNQHQHF

SEQ ID NO: 37907 - protein, 14 aa, Homo sapiens
  CDR3 for alpha chain variable domain of TCR clone 18954 (TRAV29/DV5, TRAJ36)
CAARRKTGANNLFF

SEQ ID NO: 37908 - protein, 14 aa, Homo sapiens
  CDR3 for beta chain variable domain of TCR clone 18954 (TRBV9, TRBJ1-2)
CASSVSGTLYGYTF

SEQ ID NO: 37909 - protein, 15 aa, Homo sapiens
  CDR3 for alpha chain variable domain of TCR clone 18955 (TRAV35, TRAJ40)
CAGQLWDSGTYKYIF

SEQ ID NO: 37910 - protein, 12 aa, Homo sapiens
  CDR3 for beta chain variable domain of TCR clone 18955 (TRBV7-8, TRBJ2-7)
CASSLAGYEQYL

SEQ ID NO: 37911 - protein, 14 aa, Homo sapiens
  CDR3 for alpha chain variable domain of TCR clone 18956 (TRAV38-1, TRAJ45)
CAYYSVGGADGLTF

SEQ ID NO: 37912 - protein, 20 aa, Homo sapiens
  CDR3 for beta chain variable domain of TCR clone 18956 (TRBV28, TRBJ2-1)
CASTPIGRSPGLAGGNEQFF

SEQ ID NO: 37913 - protein, 15 aa, Homo sapiens
  CDR3 for alpha chain variable domain of TCR clone 18957 (TRAV8-3, TRAJ27)
CDVGPSKTNAGKSTF

SEQ ID NO: 37914 - protein, 15 aa, Homo sapiens
  CDR3 for beta chain variable domain of TCR clone 18957 (TRBV7-2, TRBJ2-1)
CASSSGLAGGNEQFF

SEQ ID NO: 37915 - protein, 13 aa, Homo sapiens
  CDR3 for alpha chain variable domain of TCR clone 18958 (TRAV13-1, TRAJ5)
CAARVTGRGALTF

SEQ ID NO: 37916 - protein, 15 aa, Homo sapiens
  CDR3 for beta chain variable domain of TCR clone 18958 (TRBV7-9, TRBJ2-7)
CASSPGGGLTYEQYF

SEQ ID NO: 37917 - protein, 13 aa, Homo sapiens
  CDR3 for alpha chain variable domain of TCR clone 18959 (TRAV22, TRAJ29)
CAVGGSGNTPLVF

SEQ ID NO: 37918 - protein, 13 aa, Homo sapiens
  CDR3 for beta chain variable domain of TCR clone 18959 (TRBV4-2, TRBJ1-1)
CASSQAGSTEAFF

SEQ ID NO: 37919 - protein, 13 aa, Homo sapiens
  CDR3 for alpha chain variable domain of TCR clone 18960 (TRAV21, TRAJ36)
CAVIKTGANNLFF

SEQ ID NO: 37920 - protein, 13 aa, Homo sapiens
  CDR3 for beta chain variable domain of TCR clone 18960 (TRBV29-1, TRBJ2-3)
CSATRGGRDTQYL

SEQ ID NO: 37921 - protein, 11 aa, Homo sapiens
  CDR3 for alpha chain variable domain of TCR clone 18961 (TRAV21, TRAJ11)
CAANGYSTLTF

SEQ ID NO: 37922 - protein, 11 aa, Homo sapiens
  CDR3 for beta chain variable domain of TCR clone 18961 (TRBV19, TRBJ1-1)
CASSIGSEAFF

SEQ ID NO: 37923 - protein, 16 aa, Homo sapiens
  CDR3 for alpha chain variable domain of TCR clone 18962 (TRAV1-2, TRAJ10)
RAVRGVLTGGGNKLTF

SEQ ID NO: 37924 - protein, 12 aa, Homo sapiens
  CDR3 for beta chain variable domain of TCR clone 18962 (TRBV7-8, TRBJ2-7)
CASSLGDREQYF

SEQ ID NO: 37925 - protein, 15 aa, Homo sapiens
  CDR3 for alpha chain variable domain of TCR clone 18963 (TRAV8-3, TRAJ45)
CASSYSGGGADGLTF

SEQ ID NO: 37926 - protein, 14 aa, Homo sapiens
  CDR3 for beta chain variable domain of TCR clone 18963 (TRBV7-2, TRBJ2-7)
CASSPKTSFYEQYF

SEQ ID NO: 37927 - protein, 17 aa, Homo sapiens
  CDR3 for alpha chain variable domain of TCR clone 18964 (TRAV12-3, TRAJ6)
CAMSARGGAGGRYIPTF

SEQ ID NO: 37928 - protein, 12 aa, Homo sapiens
  CDR3 for beta chain variable domain of TCR clone 18964 (TRBV12-4, TRBJ2-3)
CASSTLPDTQYF

SEQ ID NO: 37929 - protein, 12 aa, Homo sapiens
  CDR3 for alpha chain variable domain of TCR clone 18965 (TRAV13-1, TRAJ21)
CTAKEGFNKFYF

SEQ ID NO: 37930 - protein, 14 aa, Homo sapiens
  CDR3 for beta chain variable domain of TCR clone 18965 (TRBV5-4, TRBJ1-1)
CASSLDSRRDEAFF

SEQ ID NO: 37931 - protein, 13 aa, Homo sapiens
  CDR3 for alpha chain variable domain of TCR clone 18966 (TRAV1-2, TRAJ9)
CAVLNTGGFKTIF

SEQ ID NO: 37932 - protein, 13 aa, Homo sapiens
  CDR3 for beta chain variable domain of TCR clone 18966 (TRBV19, TRBJ1-2)
CASSVPGQDGYTF

SEQ ID NO: 37933 - protein, 14 aa, Homo sapiens
  CDR3 for alpha chain variable domain of TCR clone 18967 (TRAV35, TRAJ50)
CAGHRKTSYGKVIF

SEQ ID NO: 37934 - protein, 13 aa, Homo sapiens
  CDR3 for beta chain variable domain of TCR clone 18967 (TRBV7-7, TRBJ2-3)
CASSLSRADTQYF

SEQ ID NO: 37935 - protein, 21 aa, Homo sapiens
  CDR3 for alpha chain variable domain of TCR clone 18968 (TRAV34, TRAJ44)
PAMQASTSVEQTTGTASKLTF

SEQ ID NO: 37936 - protein, 15 aa, Homo sapiens
  CDR3 for beta chain variable domain of TCR clone 18968 (TRBV5-7, TRBJ2-7)
CASSLGPGRGHEQYF

SEQ ID NO: 37937 - protein, 13 aa, Homo sapiens
  CDR3 for alpha chain variable domain of TCR clone 18969 (TRAV23/DV6, TRAJ45)
CAARRGSADGLTF

SEQ ID NO: 37938 - protein, 14 aa, Homo sapiens
  CDR3 for beta chain variable domain of TCR clone 18969 (TRBV7-2, TRBJ2-3)
CASSLARGTDTQYF

SEQ ID NO: 37939 - protein, 16 aa, Homo sapiens
  CDR3 for alpha chain variable domain of TCR clone 18970 (TRAV16, TRAJ52)
CALSAAGGTSYGKLTF

SEQ ID NO: 37940 - protein, 15 aa, Homo sapiens
  CDR3 for beta chain variable domain of TCR clone 18970 (TRBV5-1, TRBJ2-1)
CASSPPRAPYNEQFF

SEQ ID NO: 37941 - protein, 14 aa, Homo sapiens
  CDR3 for alpha chain variable domain of TCR clone 18971 (TRAV12-2, TRAJ9)
CAVNLNTGGFKTIF

SEQ ID NO: 37942 - protein, 17 aa, Homo sapiens
  CDR3 for beta chain variable domain of TCR clone 18971 (TRBV20-1, TRBJ2-2)
CSASRQVGQGYTGELFS

SEQ ID NO: 37943 - protein, 13 aa, Homo sapiens
  CDR3 for alpha chain variable domain of TCR clone 18972 (TRAV21, TRAJ20)
CAVGLRVDYKLSF

SEQ ID NO: 37944 - protein, 13 aa, Homo sapiens
  CDR3 for beta chain variable domain of TCR clone 18972 (TRBV6-1, TRBJ1-1)
CASSRQGNTEAVF

SEQ ID NO: 37945 - protein, 11 aa, Homo sapiens
  CDR3 for alpha chain variable domain of TCR clone 18973 (TRAV1-2, TRAJ40)
CSVPGTYKYIF

SEQ ID NO: 37946 - protein, 16 aa, Homo sapiens
  CDR3 for beta chain variable domain of TCR clone 18973 (TRBV29-1, TRBJ2-7)
CSVEVVGTSGSYEQYF

SEQ ID NO: 37947 - protein, 15 aa, Homo sapiens
  CDR3 for alpha chain variable domain of TCR clone 18974 (TRAV25, TRAJ53)
CPTGNSGGSNYKLTF

SEQ ID NO: 37948 - protein, 14 aa, Homo sapiens
  CDR3 for beta chain variable domain of TCR clone 18974 (TRBV11-2, TRBJ2-3)
CASSRLARTDTQYF

SEQ ID NO: 37949 - protein, 13 aa, Homo sapiens
  CDR3 for alpha chain variable domain of TCR clone 18975 (TRAV13-1, TRAJ5)
CAASDTGRRALNF

SEQ ID NO: 37950 - protein, 12 aa, Homo sapiens
  CDR3 for beta chain variable domain of TCR clone 18975 (TRBV28, TRBJ2-3)
CASSLYRDTQYF

SEQ ID NO: 37951 - protein, 16 aa, Homo sapiens
  CDR3 for alpha chain variable domain of TCR clone 18976 (TRAV8-3, TRAJ13)
CAVGAYPSGGYQKVTF

SEQ ID NO: 37952 - protein, 14 aa, Homo sapiens
  CDR3 for beta chain variable domain of TCR clone 18976 (TRBV19, TRBJ2-1)
CASPTFVLSGEQFF

SEQ ID NO: 37953 - protein, 11 aa, Homo sapiens
  CDR3 for alpha chain variable domain of TCR clone 18977 (TRAV1-1, TRAJ23)
CAVRQGGKLIF

SEQ ID NO: 37954 - protein, 15 aa, Homo sapiens
  CDR3 for beta chain variable domain of TCR clone 18977 (TRBV6-5, TRBJ2-1)
CASSYDAGAGNEQFF

SEQ ID NO: 37955 - protein, 18 aa, Homo sapiens
  CDR3 for alpha chain variable domain of TCR clone 18978 (TRAV13-1, TRAJ52)
CAAKNPNAGGTSYGKLTF

SEQ ID NO: 37956 - protein, 13 aa, Homo sapiens
  CDR3 for beta chain variable domain of TCR clone 18978 (TRBV7-3, TRBJ1-1)
CASSQDWGAEAFF

SEQ ID NO: 37957 - protein, 15 aa, Homo sapiens
  CDR3 for alpha chain variable domain of TCR clone 18979 (TRAV3, TRAJ22)
CAVRDRGGSARQLTF

SEQ ID NO: 37958 - protein, 11 aa, Homo sapiens
  CDR3 for beta chain variable domain of TCR clone 18979 (TRBV29-1, TRBJ2-5)
CSEDRTGTQYF

SEQ ID NO: 37959 - protein, 11 aa, Homo sapiens
  CDR3 for alpha chain variable domain of TCR clone 18980 (TRAV13-2, TRAJ20)
CADSNDYKLSF

SEQ ID NO: 37960 - protein, 15 aa, Homo sapiens
  CDR3 for beta chain variable domain of TCR clone 18980 (TRBV6-3, TRBJ2-7)
CASSSPGTVFYEQYF

SEQ ID NO: 37961 - protein, 11 aa, Homo sapiens
  CDR3 for alpha chain variable domain of TCR clone 18981 (TRAV27, TRAJ47)
SIVEYGNKLVF

SEQ ID NO: 37962 - protein, 18 aa, Homo sapiens
  CDR3 for beta chain variable domain of TCR clone 18981 (TRBV2, TRBJ2-1)
CASRGLAGGPRTYNEQSF

SEQ ID NO: 37963 - protein, 15 aa, Homo sapiens
  CDR3 for alpha chain variable domain of TCR clone 18982 (TRAV8-3, TRAJ11)
CAVGLLNSGYSTLTF

SEQ ID NO: 37964 - protein, 16 aa, Homo sapiens
  CDR3 for beta chain variable domain of TCR clone 18982 (TRBV7-9, TRBJ1-2)
CASSLGFSSGEGGYTF

SEQ ID NO: 37965 - protein, 12 aa, Homo sapiens
  CDR3 for alpha chain variable domain of TCR clone 18983 (TRAV12-3, TRAJ17)
CAMTLTGNKLTF

SEQ ID NO: 37966 - protein, 17 aa, Homo sapiens
  CDR3 for beta chain variable domain of TCR clone 18983 (TRBV20-1, TRBJ2-7)
CSARDRVSGMDEQYLGR

SEQ ID NO: 37967 - protein, 11 aa, Homo sapiens
  CDR3 for alpha chain variable domain of TCR clone 18984 (TRAV2, TRAJ13)
CASGGYQKVTF

SEQ ID NO: 37968 - protein, 16 aa, Homo sapiens
  CDR3 for beta chain variable domain of TCR clone 18984 (TRBV27, TRBJ2-2)
CASSFRGLVRTGELFF

SEQ ID NO: 37969 - protein, 18 aa, Homo sapiens
  CDR3 for alpha chain variable domain of TCR clone 18985 (TRAV9-2, TRAJ52)
CALSRHNAGGTSYGKLTF

SEQ ID NO: 37970 - protein, 17 aa, Homo sapiens
  CDR3 for beta chain variable domain of TCR clone 18985 (TRBV20-1, TRBJ2-2)
CSASGSGQGGLTGELFF

SEQ ID NO: 37971 - protein, 14 aa, Homo sapiens
  CDR3 for alpha chain variable domain of TCR clone 18986 (TRAV2, TRAJ9)
CAVEDRSGGFKTIF

SEQ ID NO: 37972 - protein, 15 aa, Homo sapiens
  CDR3 for beta chain variable domain of TCR clone 18986 (TRBV9, TRBJ1-6)
CASSVAGTGDSPLHF

SEQ ID NO: 37973 - protein, 14 aa, Homo sapiens
  CDR3 for alpha chain variable domain of TCR clone 18987 (TRAV12-2, TRAJ13)
CAVKKTGGYEKVTF

SEQ ID NO: 37974 - protein, 15 aa, Homo sapiens
  CDR3 for beta chain variable domain of TCR clone 18987 (TRBV27, TRBJ2-1)
CASSNGGGSSNEQFF

SEQ ID NO: 37975 - protein, 17 aa, Homo sapiens
  CDR3 for alpha chain variable domain of TCR clone 18988 (TRAV13-1, TRAJ31)
CAPRDRLMFGDGTQLVA

SEQ ID NO: 37976 - protein, 12 aa, Homo sapiens
  CDR3 for beta chain variable domain of TCR clone 18988 (TRBV7-9, TRBJ2-7)
CASSLEGYEQYF

SEQ ID NO: 37977 - protein, 14 aa, Homo sapiens
  CDR3 for alpha chain variable domain of TCR clone 18989 (TRAV1-2, TRAJ16)
CAVNRSSDGQKLLF

SEQ ID NO: 37978 - protein, 13 aa, Homo sapiens
  CDR3 for beta chain variable domain of TCR clone 18989 (TRBV7-3, TRBJ1-1)
CASSQDWGAEAFF

SEQ ID NO: 37979 - protein, 15 aa, Homo sapiens
  CDR3 for alpha chain variable domain of TCR clone 18990 (TRAV12-1, TRAJ15)
CVVTRANQAGTALIF

SEQ ID NO: 37980 - protein, 14 aa, Homo sapiens
  CDR3 for beta chain variable domain of TCR clone 18990 (TRBV5-1, TRBJ1-1)
CVSSLVSINTEAFF

SEQ ID NO: 37981 - protein, 23 aa, Homo sapiens
  CDR3 for alpha chain variable domain of TCR clone 18991 (TRAV26-1, TRAJ38)
CIADNAGNNHIQNPDPAVYRLRD

SEQ ID NO: 37982 - protein, 13 aa, Homo sapiens
  CDR3 for beta chain variable domain of TCR clone 18991 (TRBV20-1, TRBJ1-1)
CSARGGGNTEAFF

SEQ ID NO: 37983 - protein, 12 aa, Homo sapiens
  CDR3 for alpha chain variable domain of TCR clone 18992 (TRAV12-1, TRAJ40)
RVFYSGTYKYIF

SEQ ID NO: 37984 - protein, 18 aa, Homo sapiens
  CDR3 for beta chain variable domain of TCR clone 18992 (TRBV12-4, TRBJ2-2)
CASSLVAGTRGRTGELFF

SEQ ID NO: 37985 - protein, 14 aa, Homo sapiens
  CDR3 for alpha chain variable domain of TCR clone 18993 (TRAV2, TRAJ33)
CAVEDQESNYQLIW

SEQ ID NO: 37986 - protein, 15 aa, Homo sapiens
  CDR3 for beta chain variable domain of TCR clone 18993 (TRBV9, TRBJ2-3)
CASSEQGAGRDTQYF

SEQ ID NO: 37987 - protein, 15 aa, Homo sapiens
  CDR3 for alpha chain variable domain of TCR clone 18994 (TRAV23/DV6, TRAJ27)
CAASKPMQANQPLGM

SEQ ID NO: 37988 - protein, 14 aa, Homo sapiens
  CDR3 for beta chain variable domain of TCR clone 18994 (TRBV5-4, TRBJ1-1)
CASSLDSRRDEAFF

SEQ ID NO: 37989 - protein, 14 aa, Homo sapiens
  CDR3 for alpha chain variable domain of TCR clone 18995 (TRAV8-3, TRAJ4)
CAVGAAGGYNKLIF

SEQ ID NO: 37990 - protein, 15 aa, Homo sapiens
  CDR3 for beta chain variable domain of TCR clone 18995 (TRBV6-5, TRBJ2-1)
CASSYDAGVGNEQFF

SEQ ID NO: 37991 - protein, 16 aa, Homo sapiens
  CDR3 for alpha chain variable domain of TCR clone 18996 (TRAV20, TRAJ10)
CAVLRGLTGGGNKLTF

SEQ ID NO: 37992 - protein, 18 aa, Homo sapiens
  CDR3 for beta chain variable domain of TCR clone 18996 (TRBV13, TRBJ2-4)
CAIIDQKHSVLRRRDPAL

SEQ ID NO: 37993 - protein, 12 aa, Homo sapiens
  CDR3 for alpha chain variable domain of TCR clone 18997 (TRAV2, TRAJ9)
CAVGAGGFKNIF

SEQ ID NO: 37994 - protein, 16 aa, Homo sapiens
  CDR3 for beta chain variable domain of TCR clone 18997 (TRBV13, TRBJ2-2)
CASSPRTGEHTGELFF

SEQ ID NO: 37995 - protein, 13 aa, Homo sapiens
  CDR3 for alpha chain variable domain of TCR clone 18998 (TRAV13-1, TRAJ27)
CAASTHQCRQTNL

SEQ ID NO: 37996 - protein, 16 aa, Homo sapiens
  CDR3 for beta chain variable domain of TCR clone 18998 (TRBV27, TRBJ2-2)
CASSFRGLVRTGELFF

SEQ ID NO: 37997 - protein, 16 aa, Homo sapiens
  CDR3 for alpha chain variable domain of TCR clone 18999 (TRAV30, TRAJ24)
CGTEIVDADSWGKFQF

SEQ ID NO: 37998 - protein, 13 aa, Homo sapiens
  CDR3 for beta chain variable domain of TCR clone 18999 (TRBV20-1, TRBJ1-1)
CSVRGGGNTEAFF

SEQ ID NO: 37999 - protein, 14 aa, Homo sapiens
  CDR3 for alpha chain variable domain of TCR clone 19000 (TRAV1-2, TRAJ16)
CAVNRFSDGQKLLF

SEQ ID NO: 38000 - protein, 16 aa, Homo sapiens
  CDR3 for beta chain variable domain of TCR clone 19000 (TRBV20-1, TRBJ1-4)
CSASGQGLLTNEKLFF

SEQ ID NO: 38001 - protein, 14 aa, Homo sapiens
  CDR3 for alpha chain variable domain of TCR clone 19001 (TRAV12-3, TRAJ22)
CAMSLFGSARQLTF

SEQ ID NO: 38002 - protein, 11 aa, Homo sapiens
  CDR3 for beta chain variable domain of TCR clone 19001 (TRBV12-4, TRBJ2-2)
CASSSTGELFF

SEQ ID NO: 38003 - protein, 15 aa, Homo sapiens
  CDR3 for alpha chain variable domain of TCR clone 19002 (TRAV20, TRAJ53)
CAVQASGGSNYKLAF

SEQ ID NO: 38004 - protein, 12 aa, Homo sapiens
  CDR3 for beta chain variable domain of TCR clone 19002 (TRBV7-8, TRBJ2-7)
CASSLGDREQYF

SEQ ID NO: 38005 - protein, 14 aa, Homo sapiens
  CDR3 for alpha chain variable domain of TCR clone 19003 (TRAV12-2, TRAJ5)
CAVNRSTGRRALTF

SEQ ID NO: 38006 - protein, 14 aa, Homo sapiens
  CDR3 for beta chain variable domain of TCR clone 19003 (TRBV19, TRBJ1-5)
CASSIAQQPSILVM

SEQ ID NO: 38007 - protein, 12 aa, Homo sapiens
  CDR3 for alpha chain variable domain of TCR clone 19004 (TRAV17, TRAJ12)
CATLRSSYKLIF

SEQ ID NO: 38008 - protein, 16 aa, Homo sapiens
  CDR3 for beta chain variable domain of TCR clone 19004 (TRBV28, TRBJ2-7)
CASSLFCETGGPEQYF

SEQ ID NO: 38009 - protein, 15 aa, Homo sapiens
  CDR3 for alpha chain variable domain of TCR clone 19005 (TRAV8-3, TRAJ11)
CTVGLLNSGYSTLTF

SEQ ID NO: 38010 - protein, 16 aa, Homo sapiens
  CDR3 for beta chain variable domain of TCR clone 19005 (TRBV7-9, TRBJ1-2)
CASSLGFSSGEDGYTF

SEQ ID NO: 38011 - protein, 13 aa, Homo sapiens
  CDR3 for alpha chain variable domain of TCR clone 19006 (TRAV1-2, TRAJ9)
CAALNTGGFKTFF

SEQ ID NO: 38012 - protein, 13 aa, Homo sapiens
  CDR3 for beta chain variable domain of TCR clone 19006 (TRBV19, TRBJ1-2)
CASSVPGQDGYTF

SEQ ID NO: 38013 - protein, 14 aa, Homo sapiens
  CDR3 for alpha chain variable domain of TCR clone 19007 (TRAV16, TRAJ33)
CALSAMDSNYQLIW

SEQ ID NO: 38014 - protein, 12 aa, Homo sapiens
  CDR3 for beta chain variable domain of TCR clone 19007 (TRBV11-2, TRBJ2-2)
CASSLGGGELFF

SEQ ID NO: 38015 - protein, 11 aa, Homo sapiens
  CDR3 for alpha chain variable domain of TCR clone 19008 (TRAV1-1, TRAJ23)
CAVRKGGKLIF

SEQ ID NO: 38016 - protein, 20 aa, Homo sapiens
  CDR3 for beta chain variable domain of TCR clone 19008 (TRBV7-8, TRBJ2-2)
CASSHLFPGPTIHITGELFF

SEQ ID NO: 38017 - protein, 14 aa, Homo sapiens
  CDR3 for alpha chain variable domain of TCR clone 19009 (TRAV13-1, TRAJ35)
CAASKGGFGNVLHC

SEQ ID NO: 38018 - protein, 13 aa, Homo sapiens
  CDR3 for beta chain variable domain of TCR clone 19009 (TRBV7-3, TRBJ1-1)
CASSQDWWAEAFF

SEQ ID NO: 38019 - protein, 12 aa, Homo sapiens
  CDR3 for alpha chain variable domain of TCR clone 19010 (TRAV21, TRAJ33)
CAKMDSNYQLIW

SEQ ID NO: 38020 - protein, 14 aa, Homo sapiens
  CDR3 for beta chain variable domain of TCR clone 19010 (TRBV2, TRBJ2-7)
CASSLTSGGYVQYF

SEQ ID NO: 38021 - protein, 11 aa, Homo sapiens
  CDR3 for alpha chain variable domain of TCR clone 19011 (TRAV2, TRAJ33)
CAVESNYQLIW

SEQ ID NO: 38022 - protein, 15 aa, Homo sapiens
  CDR3 for beta chain variable domain of TCR clone 19011 (TRBV19, TRBJ1-1)
CASTSGQVQNTEAFF

SEQ ID NO: 38023 - protein, 14 aa, Homo sapiens
  CDR3 for alpha chain variable domain of TCR clone 19012 (TRAV12-2, TRAJ44)
CAVNPAGTASKLTF

SEQ ID NO: 38024 - protein, 20 aa, Homo sapiens
  CDR3 for beta chain variable domain of TCR clone 19012 (TRBV3-1, TRBJ2-6)
CASSPRPGLEGGAGANVLTF

SEQ ID NO: 38025 - protein, 11 aa, Homo sapiens
  CDR3 for alpha chain variable domain of TCR clone 19013 (TRAV13-1, TRAJ43)
CAAHNNNDIRF

SEQ ID NO: 38026 - protein, 15 aa, Homo sapiens
  CDR3 for beta chain variable domain of TCR clone 19013 (TRBV6-1, TRBJ2-2)
CASSRLRGDTGELFF

SEQ ID NO: 38027 - protein, 11 aa, Homo sapiens
  CDR3 for alpha chain variable domain of TCR clone 19014 (TRAV22, TRAJ20)
CAPLHDYKLSF

SEQ ID NO: 38028 - protein, 12 aa, Homo sapiens
  CDR3 for beta chain variable domain of TCR clone 19014 (TRBV6-3, TRBJ2-7)
CASSLTPYEQYF

SEQ ID NO: 38029 - protein, 11 aa, Homo sapiens
  CDR3 for alpha chain variable domain of TCR clone 19015 (TRAV12-3, TRAJ43)
CAMSVSNDMRF

SEQ ID NO: 38030 - protein, 13 aa, Homo sapiens
  CDR3 for beta chain variable domain of TCR clone 19015 (TRBV20-1, TRBJ1-1)
CGAPLGGGTEAFF

SEQ ID NO: 38031 - protein, 14 aa, Homo sapiens
  CDR3 for alpha chain variable domain of TCR clone 19016 (TRAV12-2, TRAJ9)
CAVNMEGGDFKTIF

SEQ ID NO: 38032 - protein, 14 aa, Homo sapiens
  CDR3 for beta chain variable domain of TCR clone 19016 (TRBV27, TRBJ2-3)
CASRKGGRTDTQYF

SEQ ID NO: 38033 - protein, 16 aa, Homo sapiens
  CDR3 for alpha chain variable domain of TCR clone 19017 (TRAV30, TRAJ24)
CGTEIVDADSWGKFQF

SEQ ID NO: 38034 - protein, 16 aa, Homo sapiens
  CDR3 for beta chain variable domain of TCR clone 19017 (TRBV2, TRBJ2-1)
CASSVGGSLSYNEQFF

SEQ ID NO: 38035 - protein, 14 aa, Homo sapiens
  CDR3 for alpha chain variable domain of TCR clone 19018 (TRAV13-1, TRAJ35)
CAASKGGFGNVLHC

SEQ ID NO: 38036 - protein, 13 aa, Homo sapiens
  CDR3 for beta chain variable domain of TCR clone 19018 (TRBV7-3, TRBJ1-1)
CASSQDCGAEAFF

SEQ ID NO: 38037 - protein, 11 aa, Homo sapiens
  CDR3 for alpha chain variable domain of TCR clone 19019 (TRAV17, TRAJ9)
CATTGGFKTIS

SEQ ID NO: 38038 - protein, 14 aa, Homo sapiens
  CDR3 for beta chain variable domain of TCR clone 19019 (TRBV7-9, TRBJ2-2)
CASSGLADTGELFF

SEQ ID NO: 38039 - protein, 13 aa, Homo sapiens
  CDR3 for alpha chain variable domain of TCR clone 19020 (TRAV12-2, TRAJ39)
CAVNNNAGNMPTF

SEQ ID NO: 38040 - protein, 13 aa, Homo sapiens
  CDR3 for beta chain variable domain of TCR clone 19020 (TRBV2, TRBJ1-5)
CATAGPGNQPQHF

SEQ ID NO: 38041 - protein, 11 aa, Homo sapiens
  CDR3 for alpha chain variable domain of TCR clone 19021 (TRAV12-3, TRAJ43)
CAMSVSNDMRF

SEQ ID NO: 38042 - protein, 13 aa, Homo sapiens
  CDR3 for beta chain variable domain of TCR clone 19021 (TRBV20-1, TRBJ1-1)
CSAPLGGGTEAFL

SEQ ID NO: 38043 - protein, 15 aa, Homo sapiens
  CDR3 for alpha chain variable domain of TCR clone 19022 (TRAV12-3, TRAJ6)
CAMSATTGGSYILTF

SEQ ID NO: 38044 - protein, 16 aa, Homo sapiens
  CDR3 for beta chain variable domain of TCR clone 19022 (TRBV20-1, TRBJ1-2)
CSASMGQGVANYGYTF

SEQ ID NO: 38045 - protein, 15 aa, Homo sapiens
  CDR3 for alpha chain variable domain of TCR clone 19023 (TRAV38-2/DV8, TRAJ39)
CAYRTSNNAGNMLTF

SEQ ID NO: 38046 - protein, 15 aa, Homo sapiens
  CDR3 for beta chain variable domain of TCR clone 19023 (TRBV27, TRBJ1-6)
CASSFDRGLGSPLHF

SEQ ID NO: 38047 - protein, 12 aa, Homo sapiens
  CDR3 for alpha chain variable domain of TCR clone 19024 (TRAV13-1, TRAJ53)
AASGGSNYKLTF

SEQ ID NO: 38048 - protein, 15 aa, Homo sapiens
  CDR3 for beta chain variable domain of TCR clone 19024 (TRBV5-1, TRBJ2-1)
CASSLPRAPYNEQFF

SEQ ID NO: 38049 - protein, 13 aa, Homo sapiens
  CDR3 for alpha chain variable domain of TCR clone 19025 (TRAV35, TRAJ21)
CAGQLSNFNKFYF

SEQ ID NO: 38050 - protein, 11 aa, Homo sapiens
  CDR3 for beta chain variable domain of TCR clone 19025 (TRBV7-6, TRBJ2-5)
CASSSQETQYL

SEQ ID NO: 38051 - protein, 13 aa, Homo sapiens
  CDR3 for alpha chain variable domain of TCR clone 19026 (TRAV12-3, TRAJ33)
CTMSVNSNYQLIW

SEQ ID NO: 38052 - protein, 13 aa, Homo sapiens
  CDR3 for beta chain variable domain of TCR clone 19026 (TRBV7-2, TRBJ2-2)
CASSLAVTGELFF

SEQ ID NO: 38053 - protein, 13 aa, Homo sapiens
  CDR3 for alpha chain variable domain of TCR clone 19027 (TRAV17, TRAJ9)
CATGYTGGFKTIF

SEQ ID NO: 38054 - protein, 16 aa, Homo sapiens
  CDR3 for beta chain variable domain of TCR clone 19027 (TRBV7-7, TRBJ2-1)
CASSLASGTSYNEQFF

SEQ ID NO: 38055 - protein, 16 aa, Homo sapiens
  CDR3 for alpha chain variable domain of TCR clone 19028 (TRAV1-2, TRAJ10)
CAVRGVLTGGGNKLTF

SEQ ID NO: 38056 - protein, 16 aa, Homo sapiens
  CDR3 for beta chain variable domain of TCR clone 19028 (TRBV20-1, TRBJ1-4)
CSAPGQGLLTNEKLFF

SEQ ID NO: 38057 - protein, 14 aa, Homo sapiens
  CDR3 for alpha chain variable domain of TCR clone 19029 (TRAV12-2, TRAJ44)
CAVNPAGTASKLTF

SEQ ID NO: 38058 - protein, 13 aa, Homo sapiens
  CDR3 for beta chain variable domain of TCR clone 19029 (TRBV20-1, TRBJ1-6)
CSAPLGVGSPLHV

SEQ ID NO: 38059 - protein, 13 aa, Homo sapiens
  CDR3 for alpha chain variable domain of TCR clone 19030 (TRAV8-3, TRAJ28)
CAVGAVWSYQLTF

SEQ ID NO: 38060 - protein, 14 aa, Homo sapiens
  CDR3 for beta chain variable domain of TCR clone 19030 (TRBV7-2, TRBJ2-7)
CASRSQGAAYEQYF

SEQ ID NO: 38061 - protein, 13 aa, Homo sapiens
  CDR3 for alpha chain variable domain of TCR clone 19031 (TRAV8-3, TRAJ28)
CAVGAVGSYRLTF

SEQ ID NO: 38062 - protein, 15 aa, Homo sapiens
  CDR3 for beta chain variable domain of TCR clone 19031 (TRBV7-9, TRBJ1-5)
CASSQGHQPNQPQHF

SEQ ID NO: 38063 - protein, 17 aa, Homo sapiens
  CDR3 for alpha chain variable domain of TCR clone 19032 (TRAV21, TRAJ52)
CCEAFPSGCTSYGKLTF

SEQ ID NO: 38064 - protein, 17 aa, Homo sapiens
  CDR3 for beta chain variable domain of TCR clone 19032 (TRBV13, TRBJ2-3)
CASSLSRVAGGRNTQYF

SEQ ID NO: 38065 - protein, 13 aa, Homo sapiens
  CDR3 for alpha chain variable domain of TCR clone 19033 (TRAV26-2, TRAJ43)
CILRAVNNNDMRF

SEQ ID NO: 38066 - protein, 15 aa, Homo sapiens
  CDR3 for beta chain variable domain of TCR clone 19033 (TRBV7-2, TRBJ2-1)
CASTRGTGIYNEQFF

SEQ ID NO: 38067 - protein, 14 aa, Homo sapiens
  CDR3 for alpha chain variable domain of TCR clone 19034 (TRAV17, TRAJ57)
CATDPQGGSEKLVF

SEQ ID NO: 38068 - protein, 15 aa, Homo sapiens
  CDR3 for beta chain variable domain of TCR clone 19034 (TRBV20-1, TRBJ2-7)
CSARDRVSGMDEQYF

SEQ ID NO: 38069 - protein, 11 aa, Homo sapiens
  CDR3 for alpha chain variable domain of TCR clone 19035 (TRAV21, TRAJ34)
CAVTNTDKPIF

SEQ ID NO: 38070 - protein, 16 aa, Homo sapiens
  CDR3 for beta chain variable domain of TCR clone 19035 (TRBV18, TRBJ1-1)
CASSPGVGGRGGEAFF

SEQ ID NO: 38071 - protein, 15 aa, Homo sapiens
  CDR3 for alpha chain variable domain of TCR clone 19036 (TRAV12-3, TRAJ6)
CAMSATTGGSYIPTF

SEQ ID NO: 38072 - protein, 13 aa, Homo sapiens
  CDR3 for beta chain variable domain of TCR clone 19036 (TRBV7-2, TRBJ2-7)
CASSSPSGSEQYF

SEQ ID NO: 38073 - protein, 13 aa, Homo sapiens
  CDR3 for alpha chain variable domain of TCR clone 19037 (TRAV17, TRAJ26)
CATVDNYGQNFVF

SEQ ID NO: 38074 - protein, 16 aa, Homo sapiens
  CDR3 for beta chain variable domain of TCR clone 19037 (TRBV2, TRBJ2-1)
CASSVGGSLSYNEQFL

SEQ ID NO: 38075 - protein, 13 aa, Homo sapiens
  CDR3 for alpha chain variable domain of TCR clone 19038 (TRAV17, TRAJ9)
CATDYTGGFKTIF

SEQ ID NO: 38076 - protein, 14 aa, Homo sapiens
  CDR3 for beta chain variable domain of TCR clone 19038 (TRBV19, TRBJ2-5)
CARSMTGQQETQYF

SEQ ID NO: 38077 - protein, 13 aa, Homo sapiens
  CDR3 for alpha chain variable domain of TCR clone 19039 (TRAV21, TRAJ27)
CAARPGNAGKSTF

SEQ ID NO: 38078 - protein, 14 aa, Homo sapiens
  CDR3 for beta chain variable domain of TCR clone 19039 (TRBV7-6, TRBJ2-3)
CASSLGTVTDTQYL

SEQ ID NO: 38079 - protein, 14 aa, Homo sapiens
  CDR3 for alpha chain variable domain of TCR clone 19040 (TRAV2, TRAJ37)
CAVDFTSNTGKLIF

SEQ ID NO: 38080 - protein, 13 aa, Homo sapiens
  CDR3 for beta chain variable domain of TCR clone 19040 (TRBV7-3, TRBJ1-1)
CASSQDWGAEAFF

SEQ ID NO: 38081 - protein, 15 aa, Homo sapiens
  CDR3 for alpha chain variable domain of TCR clone 19041 (TRAV13-1, TRAJ10)
CAATILTGGGDKLTF

SEQ ID NO: 38082 - protein, 15 aa, Homo sapiens
  CDR3 for beta chain variable domain of TCR clone 19041 (TRBV2, TRBJ2-7)
CASTLLGSGATEQYF

SEQ ID NO: 38083 - protein, 11 aa, Homo sapiens
  CDR3 for alpha chain variable domain of TCR clone 19042 (TRAV1-2, TRAJ31)
CALNNNARLMF

SEQ ID NO: 38084 - protein, 15 aa, Homo sapiens
  CDR3 for beta chain variable domain of TCR clone 19042 (TRBV28, TRBJ2-1)
CASSIIAGGRSEQFF

SEQ ID NO: 38085 - protein, 13 aa, Homo sapiens
  CDR3 for alpha chain variable domain of TCR clone 19043 (TRAV3, TRAJ21)
CAVREPDFNKFYF

SEQ ID NO: 38086 - protein, 12 aa, Homo sapiens
  CDR3 for beta chain variable domain of TCR clone 19043 (TRBV11-2, TRBJ2-1)
CASSPGNNEQFF

SEQ ID NO: 38087 - protein, 12 aa, Homo sapiens
  CDR3 for alpha chain variable domain of TCR clone 19044 (TRAV17, TRAJ57)
CATDGGSEELVF

SEQ ID NO: 38088 - protein, 13 aa, Homo sapiens
  CDR3 for beta chain variable domain of TCR clone 19044 (TRBV7-9, TRBJ2-7)
CASSFAGAYEQYF

SEQ ID NO: 38089 - protein, 11 aa, Homo sapiens
  CDR3 for alpha chain variable domain of TCR clone 19045 (TRAV2, TRAJ33)
CAVDSNYQLIW

SEQ ID NO: 38090 - protein, 15 aa, Homo sapiens
  CDR3 for beta chain variable domain of TCR clone 19045 (TRBV19, TRBJ1-2)
CASSVVQVLNYGYTF

SEQ ID NO: 38091 - protein, 12 aa, Homo sapiens
  CDR3 for alpha chain variable domain of TCR clone 19046 (TRAV21, TRAJ11)
RAVRGGNSTLTF

SEQ ID NO: 38092 - protein, 15 aa, Homo sapiens
  CDR3 for beta chain variable domain of TCR clone 19046 (TRBV6-1, TRBJ2-7)
CASSEPIAATTEQYF

SEQ ID NO: 38093 - protein, 13 aa, Homo sapiens
  CDR3 for alpha chain variable domain of TCR clone 19047 (TRAV3, TRAJ21)
CAVREPDFNKFYL

SEQ ID NO: 38094 - protein, 13 aa, Homo sapiens
  CDR3 for beta chain variable domain of TCR clone 19047 (TRBV9, TRBJ2-1)
CASSPSGGNEQFF

SEQ ID NO: 38095 - protein, 14 aa, Homo sapiens
  CDR3 for alpha chain variable domain of TCR clone 19048 (TRAV13-2, TRAJ15)
YAENPNQAGTALIF

SEQ ID NO: 38096 - protein, 16 aa, Homo sapiens
  CDR3 for beta chain variable domain of TCR clone 19048 (TRBV12-4, TRBJ1-2)
CASSPTATGKTRGYTF

SEQ ID NO: 38097 - protein, 14 aa, Homo sapiens
  CDR3 for alpha chain variable domain of TCR clone 19049 (TRAV2, TRAJ37)
CAVDFTSNTDKLIF

SEQ ID NO: 38098 - protein, 15 aa, Homo sapiens
  CDR3 for beta chain variable domain of TCR clone 19049 (TRBV20-1, TRBJ1-1)
CSASRGVTGNTEAFF

SEQ ID NO: 38099 - protein, 11 aa, Homo sapiens
  CDR3 for alpha chain variable domain of TCR clone 19050 (TRAV1-2, TRAJ40)
RAVPGTYKYIF

SEQ ID NO: 38100 - protein, 16 aa, Homo sapiens
  CDR3 for beta chain variable domain of TCR clone 19050 (TRBV29-1, TRBJ2-7)
CSVEVVGTSGSYEQYF

SEQ ID NO: 38101 - protein, 15 aa, Homo sapiens
  CDR3 for alpha chain variable domain of TCR clone 19051 (TRAV10, TRAJ10)
CVVRGLTGGGNKLTF

SEQ ID NO: 38102 - protein, 15 aa, Homo sapiens
  CDR3 for beta chain variable domain of TCR clone 19051 (TRBV6-1, TRBJ2-2)
CAILTGTRDTGELFF

SEQ ID NO: 38103 - protein, 14 aa, Homo sapiens
  CDR3 for alpha chain variable domain of TCR clone 19052 (TRAV12-2, TRAJ17)
CAVPFKAAGNKLTF

SEQ ID NO: 38104 - protein, 12 aa, Homo sapiens
  CDR3 for beta chain variable domain of TCR clone 19052 (TRBV11-2, TRBJ2-2)
CASSLGGGELFF

SEQ ID NO: 38105 - protein, 15 aa, Homo sapiens
  CDR3 for alpha chain variable domain of TCR clone 19053 (TRAV12-2, TRAJ56)
CAVNPFTGANSKLTF

SEQ ID NO: 38106 - protein, 13 aa, Homo sapiens
  CDR3 for beta chain variable domain of TCR clone 19053 (TRBV20-1, TRBJ1-2)
CSARGRVYGGYTF

SEQ ID NO: 38107 - protein, 16 aa, Homo sapiens
  CDR3 for alpha chain variable domain of TCR clone 19054 (TRAV16, TRAJ57)
CAPYLITQGGSERLVF

SEQ ID NO: 38108 - protein, 17 aa, Homo sapiens
  CDR3 for beta chain variable domain of TCR clone 19054 (TRBV24-1, TRBJ2-4)
CATSDAEARGVRNIQYF

SEQ ID NO: 38109 - protein, 12 aa, Homo sapiens
  CDR3 for alpha chain variable domain of TCR clone 19055 (TRAV13-2, TRAJ23)
CAERHRGGKLIF

SEQ ID NO: 38110 - protein, 12 aa, Homo sapiens
  CDR3 for beta chain variable domain of TCR clone 19055 (TRBV12-4, TRBJ2-7)
CASSLGGYEQYF

SEQ ID NO: 38111 - protein, 15 aa, Homo sapiens
  CDR3 for alpha chain variable domain of TCR clone 19056 (TRAV17, TRAJ57)
CATGPSQGGSENLVF

SEQ ID NO: 38112 - protein, 14 aa, Homo sapiens
  CDR3 for beta chain variable domain of TCR clone 19056 (TRBV12-5, TRBJ2-5)
CASGSRTHQETQYF

SEQ ID NO: 38113 - protein, 16 aa, Homo sapiens
  CDR3 for alpha chain variable domain of TCR clone 19057 (TRAV30, TRAJ24)
CGTEIVDADSWGKFQF

SEQ ID NO: 38114 - protein, 15 aa, Homo sapiens
  CDR3 for beta chain variable domain of TCR clone 19057 (TRBV20-1, TRBJ2-7)
CSARDRVSGMDEQYS

SEQ ID NO: 38115 - protein, 15 aa, Homo sapiens
  CDR3 for alpha chain variable domain of TCR clone 19058 (TRAV26-1, TRAJ44)
CIVRANTGTASKLTF

SEQ ID NO: 38116 - protein, 16 aa, Homo sapiens
  CDR3 for beta chain variable domain of TCR clone 19058 (TRBV7-7, TRBJ2-1)
CASSLASGTSYDEQFF

SEQ ID NO: 38117 - protein, 11 aa, Homo sapiens
  CDR3 for alpha chain variable domain of TCR clone 19059 (TRAV2, TRAJ13)
CASGGYPKVTF

SEQ ID NO: 38118 - protein, 16 aa, Homo sapiens
  CDR3 for beta chain variable domain of TCR clone 19059 (TRBV6-1, TRBJ2-5)
CASSETLDRGAETQYF

SEQ ID NO: 38119 - protein, 14 aa, Homo sapiens
  CDR3 for alpha chain variable domain of TCR clone 19060 (TRAV1-2, TRAJ16)
CAVNRFPDGQKLLF

SEQ ID NO: 38120 - protein, 15 aa, Homo sapiens
  CDR3 for beta chain variable domain of TCR clone 19060 (TRBV7-9, TRBJ1-6)
CASSSPGRGNSPLHF

SEQ ID NO: 38121 - protein, 15 aa, Homo sapiens
  CDR3 for alpha chain variable domain of TCR clone 19061 (TRAV23/DV6, TRAJ13)
CAAWPGGGGYQNVTF

SEQ ID NO: 38122 - protein, 17 aa, Homo sapiens
  CDR3 for beta chain variable domain of TCR clone 19061 (TRBV19, TRBJ2-7)
CASSISFYDSYPYEQYF

SEQ ID NO: 38123 - protein, 13 aa, Homo sapiens
  CDR3 for alpha chain variable domain of TCR clone 19062 (TRAV12-3, TRAJ40)
CAMSDSGTYKYIF

SEQ ID NO: 38124 - protein, 14 aa, Homo sapiens
  CDR3 for beta chain variable domain of TCR clone 19062 (TRBV7-2, TRBJ1-5)
CASSTQGAGQTQHF

SEQ ID NO: 38125 - protein, 16 aa, Homo sapiens
  CDR3 for alpha chain variable domain of TCR clone 19063 (TRAV21, TRAJ37)
CAFRTAGSSNTGKLIF

SEQ ID NO: 38126 - protein, 13 aa, Homo sapiens
  CDR3 for beta chain variable domain of TCR clone 19063 (TRBV7-9, TRBJ2-5)
CASLPSGRETQYF

SEQ ID NO: 38127 - protein, 19 aa, Homo sapiens
  CDR3 for alpha chain variable domain of TCR clone 19064 (TRAV3, TRAJ6)
CAVRDRNPSRSGGGYIPTF

SEQ ID NO: 38128 - protein, 15 aa, Homo sapiens
  CDR3 for beta chain variable domain of TCR clone 19064 (TRBV18, TRBJ2-7)
CASSPTFMDSYEQYF

SEQ ID NO: 38129 - protein, 15 aa, Homo sapiens
  CDR3 for alpha chain variable domain of TCR clone 19065 (TRAV26-1, TRAJ44)
CIVRANTGTASKITF

SEQ ID NO: 38130 - protein, 16 aa, Homo sapiens
  CDR3 for beta chain variable domain of TCR clone 19065 (TRBV7-7, TRBJ2-1)
CASSLASGTSYNEQFF

SEQ ID NO: 38131 - protein, 18 aa, Homo sapiens
  CDR3 for alpha chain variable domain of TCR clone 19066 (TRAV13-1, TRAJ52)
CAAKNPNAGGTSYGKLTF

SEQ ID NO: 38132 - protein, 15 aa, Homo sapiens
  CDR3 for beta chain variable domain of TCR clone 19066 (TRBV6-1, TRBJ2-3)
CASSERGGITGTQYF

SEQ ID NO: 38133 - protein, 18 aa, Homo sapiens
  CDR3 for alpha chain variable domain of TCR clone 19067 (TRAV12-3, TRAJ52)
CAMSVGGAGGTSYGKLTF

SEQ ID NO: 38134 - protein, 15 aa, Homo sapiens
  CDR3 for beta chain variable domain of TCR clone 19067 (TRBV4-1, TRBJ1-4)
CASSDTGGTNEKLFF

SEQ ID NO: 38135 - protein, 15 aa, Homo sapiens
  CDR3 for alpha chain variable domain of TCR clone 19068 (TRAV17, TRAJ57)
CATGPSQGGSEKLVF

SEQ ID NO: 38136 - protein, 16 aa, Homo sapiens
  CDR3 for beta chain variable domain of TCR clone 19068 (TRBV12-4, TRBJ1-5)
CASSQPVGGSNQPQHF

SEQ ID NO: 38137 - protein, 13 aa, Homo sapiens
  CDR3 for alpha chain variable domain of TCR clone 19069 (TRAV1-2, TRAJ9)
CAALNTGGFKTIF

SEQ ID NO: 38138 - protein, 13 aa, Homo sapiens
  CDR3 for beta chain variable domain of TCR clone 19069 (TRBV19, TRBJ1-2)
CASSVPVQDGYTF

SEQ ID NO: 38139 - protein, 15 aa, Homo sapiens
  CDR3 for alpha chain variable domain of TCR clone 19070 (TRAV26-1, TRAJ29)
CIVRVEGSGNTPLVF

SEQ ID NO: 38140 - protein, 10 aa, Homo sapiens
  CDR3 for beta chain variable domain of TCR clone 19070 (TRBV7-9, TRBJ1-5)
CASSQGHQPN

SEQ ID NO: 38141 - protein, 14 aa, Homo sapiens
  CDR3 for alpha chain variable domain of TCR clone 19071 (TRAV20, TRAJ56)
CAVQFGGANSKLKF

SEQ ID NO: 38142 - protein, 14 aa, Homo sapiens
  CDR3 for beta chain variable domain of TCR clone 19071 (TRBV20-1, TRBJ2-7)
CSAKRGRSSYEQYF

SEQ ID NO: 38143 - protein, 13 aa, Homo sapiens
  CDR3 for alpha chain variable domain of TCR clone 19072 (TRAV25, TRAJ26)
CAGGDNYGQNFVF

SEQ ID NO: 38144 - protein, 15 aa, Homo sapiens
  CDR3 for beta chain variable domain of TCR clone 19072 (TRBV19, TRBJ1-1)
CASSIRSGGRTEAFF

SEQ ID NO: 38145 - protein, 15 aa, Homo sapiens
  CDR3 for alpha chain variable domain of TCR clone 19073 (TRAV26-1, TRAJ29)
CIVRVEGSGNTPLVF

SEQ ID NO: 38146 - protein, 14 aa, Homo sapiens
  CDR3 for beta chain variable domain of TCR clone 19073 (TRBV7-6, TRBJ2-3)
CASSLGTVTDTQYF

SEQ ID NO: 38147 - protein, 12 aa, Homo sapiens
  CDR3 for alpha chain variable domain of TCR clone 19074 (TRAV12-3, TRAJ17)
CAMTLTGNKLTF

SEQ ID NO: 38148 - protein, 13 aa, Homo sapiens
  CDR3 for beta chain variable domain of TCR clone 19074 (TRBV10-3, TRBJ1-1)
CAIIPEGGIEAFF

SEQ ID NO: 38149 - protein, 14 aa, Homo sapiens
  CDR3 for alpha chain variable domain of TCR clone 19075 (TRAV13-1, TRAJ20)
CAARPGSNDYKLSF

SEQ ID NO: 38150 - protein, 13 aa, Homo sapiens
  CDR3 for beta chain variable domain of TCR clone 19075 (TRBV6-6, TRBJ2-7)
CASSSSGSYEQYF

SEQ ID NO: 38151 - protein, 15 aa, Homo sapiens
  CDR3 for alpha chain variable domain of TCR clone 19076 (TRAV23/DV6, TRAJ18)
CAARYRGSTPGRLYF

SEQ ID NO: 38152 - protein, 13 aa, Homo sapiens
  CDR3 for beta chain variable domain of TCR clone 19076 (TRBV7-2, TRBJ2-7)
CASSSPSGSEQYF

SEQ ID NO: 38153 - protein, 11 aa, Homo sapiens
  CDR3 for alpha chain variable domain of TCR clone 19077 (TRAV1-1, TRAJ23)
CAVRQGGKLIF

SEQ ID NO: 38154 - protein, 17 aa, Homo sapiens
  CDR3 for beta chain variable domain of TCR clone 19077 (TRBV7-8, TRBJ2-6)
CASSAGTGGAGANVLTF

SEQ ID NO: 38155 - protein, 14 aa, Homo sapiens
  CDR3 for alpha chain variable domain of TCR clone 19078 (TRAV1-2, TRAJ16)
CAVNRSSDGQKLLF

SEQ ID NO: 38156 - protein, 13 aa, Homo sapiens
  CDR3 for beta chain variable domain of TCR clone 19078 (TRBV20-1, TRBJ1-1)
CSARGGGNTEAFF

SEQ ID NO: 38157 - protein, 13 aa, Homo sapiens
  CDR3 for alpha chain variable domain of TCR clone 19079 (TRAV12-3, TRAJ33)
CAMSVNSNYQLIW

SEQ ID NO: 38158 - protein, 13 aa, Homo sapiens
  CDR3 for beta chain variable domain of TCR clone 19079 (TRBV7-3, TRBJ1-1)
CASSQDWGAEAFF

SEQ ID NO: 38159 - protein, 13 aa, Homo sapiens
  CDR3 for alpha chain variable domain of TCR clone 19080 (TRAV3, TRAJ27)
CAVRPIGAGKSTF

SEQ ID NO: 38160 - protein, 13 aa, Homo sapiens
  CDR3 for beta chain variable domain of TCR clone 19080 (TRBV7-9, TRBJ2-3)
CASSPGSTDTQYF

SEQ ID NO: 38161 - protein, 14 aa, Homo sapiens
  CDR3 for alpha chain variable domain of TCR clone 19081 (TRAV26-1, TRAJ39)
CIVRGSRAGNTLTF

SEQ ID NO: 38162 - protein, 15 aa, Homo sapiens
  CDR3 for beta chain variable domain of TCR clone 19081 (TRBV7-9, TRBJ1-5)
CASSQGHQPNQPQHF

SEQ ID NO: 38163 - protein, 15 aa, Homo sapiens
  CDR3 for alpha chain variable domain of TCR clone 19082 (TRAV21, TRAJ24)
CAARSSTDSWGKLKF

SEQ ID NO: 38164 - protein, 13 aa, Homo sapiens
  CDR3 for beta chain variable domain of TCR clone 19082 (TRBV11-2, TRBJ2-5)
CASSSTGEETQYF

SEQ ID NO: 38165 - protein, 14 aa, Homo sapiens
  CDR3 for alpha chain variable domain of TCR clone 19083 (TRAV1-2, TRAJ8)
CAVREDTGFQKLVF

SEQ ID NO: 38166 - protein, 15 aa, Homo sapiens
  CDR3 for beta chain variable domain of TCR clone 19083 (TRBV29-1, TRBJ2-7)
CSVEFFDRGSYEQYF

SEQ ID NO: 38167 - protein, 13 aa, Homo sapiens
  CDR3 for alpha chain variable domain of TCR clone 19084 (TRAV29/DV5, TRAJ31)
CAASRNNDARLMF

SEQ ID NO: 38168 - protein, 12 aa, Homo sapiens
  CDR3 for beta chain variable domain of TCR clone 19084 (TRBV14, TRBJ2-7)
CASSLYKDEQYF

SEQ ID NO: 38169 - protein, 10 aa, Homo sapiens
  CDR3 for alpha chain variable domain of TCR clone 19085 (TRAV23/DV6, TRAJ28)
CAASSCILWG

SEQ ID NO: 38170 - protein, 15 aa, Homo sapiens
  CDR3 for beta chain variable domain of TCR clone 19085 (TRBV9, TRBJ2-1)
CASSARLARYNEQFF

SEQ ID NO: 38171 - protein, 13 aa, Homo sapiens
  CDR3 for alpha chain variable domain of TCR clone 19086 (TRAV35, TRAJ36)
CAGPRIGANNLFS

SEQ ID NO: 38172 - protein, 15 aa, Homo sapiens
  CDR3 for beta chain variable domain of TCR clone 19086 (TRBV28, TRBJ2-5)
CASSPPWSYQETQYF

SEQ ID NO: 38173 - protein, 14 aa, Homo sapiens
  CDR3 for alpha chain variable domain of TCR clone 19087 (TRAV1-2, TRAJ16)
CAVNRFSDGPKLLF

SEQ ID NO: 38174 - protein, 15 aa, Homo sapiens
  CDR3 for beta chain variable domain of TCR clone 19087 (TRBV7-9, TRBJ1-6)
CASSSPGRGNSPLHF

SEQ ID NO: 38175 - protein, 14 aa, Homo sapiens
  CDR3 for alpha chain variable domain of TCR clone 19088 (TRAV21, TRAJ35)
CAVMPVGFGNVLHC

SEQ ID NO: 38176 - protein, 12 aa, Homo sapiens
  CDR3 for beta chain variable domain of TCR clone 19088 (TRBV7-9, TRBJ2-7)
CASSIKREEQYF

SEQ ID NO: 38177 - protein, 12 aa, Homo sapiens
  CDR3 for alpha chain variable domain of TCR clone 19089 (TRAV13-1, TRAJ21)
CAAKEGFNKFYF

SEQ ID NO: 38178 - protein, 13 aa, Homo sapiens
  CDR3 for beta chain variable domain of TCR clone 19089 (TRBV4-1, TRBJ2-1)
CASSQAGGDEQFF

SEQ ID NO: 38179 - protein, 20 aa, Homo sapiens
  CDR3 for alpha chain variable domain of TCR clone 19090 (TRAV12-1, TRAJ42)
SSVIQPPTSVKGGSQGNLIF

SEQ ID NO: 38180 - protein, 18 aa, Homo sapiens
  CDR3 for beta chain variable domain of TCR clone 19090 (TRBV11-2, TRBJ2-3)
CASSLGGASRGAPITQYF

SEQ ID NO: 38181 - protein, 16 aa, Homo sapiens
  CDR3 for alpha chain variable domain of TCR clone 19091 (TRAV1-2, TRAJ10)
CAVRGVLTGGGNKLTF

SEQ ID NO: 38182 - protein, 15 aa, Homo sapiens
  CDR3 for beta chain variable domain of TCR clone 19091 (TRBV20-1, TRBJ2-7)
CSARDRVSGMDEQYF

SEQ ID NO: 38183 - protein, 13 aa, Homo sapiens
  CDR3 for alpha chain variable domain of TCR clone 19092 (TRAV2, TRAJ40)
CAVVTSGTYKYIF

SEQ ID NO: 38184 - protein, 15 aa, Homo sapiens
  CDR3 for beta chain variable domain of TCR clone 19092 (TRBV11-3, TRBJ2-3)
CARLKDGREGDTQYF

SEQ ID NO: 38185 - protein, 15 aa, Homo sapiens
  CDR3 for alpha chain variable domain of TCR clone 19093 (TRAV12-2, TRAJ53)
CAVNGGGGSNYKLTF

SEQ ID NO: 38186 - protein, 13 aa, Homo sapiens
  CDR3 for beta chain variable domain of TCR clone 19093 (TRBV12-4, TRBJ1-2)
CASSLRQGKGYTF

SEQ ID NO: 38187 - protein, 14 aa, Homo sapiens
  CDR3 for alpha chain variable domain of TCR clone 19094 (TRAV38-2/DV8, TRAJ22)
CAHISSGSARQLTF

SEQ ID NO: 38188 - protein, 17 aa, Homo sapiens
  CDR3 for beta chain variable domain of TCR clone 19094 (TRBV7-2, TRBJ2-4)
CASSVQGLVQAKNIQYF

SEQ ID NO: 38189 - protein, 15 aa, Homo sapiens
  CDR3 for alpha chain variable domain of TCR clone 19095 (TRAV26-1, TRAJ29)
CIVRVEGSGNTPLDF

SEQ ID NO: 38190 - protein, 14 aa, Homo sapiens
  CDR3 for beta chain variable domain of TCR clone 19095 (TRBV18, TRBJ2-5)
CASSPGVSQETQYF

SEQ ID NO: 38191 - protein, 14 aa, Homo sapiens
  CDR3 for alpha chain variable domain of TCR clone 19096 (TRAV2, TRAJ37)
CAVDFTSNTSKLIF

SEQ ID NO: 38192 - protein, 15 aa, Homo sapiens
  CDR3 for beta chain variable domain of TCR clone 19096 (TRBV20-1, TRBJ1-1)
CSASRGVTGNTEAFF

SEQ ID NO: 38193 - protein, 18 aa, Homo sapiens
  CDR3 for alpha chain variable domain of TCR clone 19097 (TRAV13-1, TRAJ52)
CAASKRSAGGTRYGKLTF

SEQ ID NO: 38194 - protein, 13 aa, Homo sapiens
  CDR3 for beta chain variable domain of TCR clone 19097 (TRBV12-4, TRBJ1-2)
CASSLRQGKGYTF

SEQ ID NO: 38195 - protein, 14 aa, Homo sapiens
  CDR3 for alpha chain variable domain of TCR clone 19098 (TRAV8-2, TRAJ23)
CVVSDDNQGGKLIF

SEQ ID NO: 38196 - protein, 16 aa, Homo sapiens
  CDR3 for beta chain variable domain of TCR clone 19098 (TRBV3-1, TRBJ1-2)
CASSQGQGVQRDGYTF

SEQ ID NO: 38197 - protein, 12 aa, Homo sapiens
  CDR3 for alpha chain variable domain of TCR clone 19099 (TRAV8-3, TRAJ26)
CAGDNYGQNFVF

SEQ ID NO: 38198 - protein, 15 aa, Homo sapiens
  CDR3 for beta chain variable domain of TCR clone 19099 (TRBV9, TRBJ2-1)
CASSRAGSSYNEQFF

SEQ ID NO: 38199 - protein, 15 aa, Homo sapiens
  CDR3 for alpha chain variable domain of TCR clone 19100 (TRAV17, TRAJ57)
CATGPSQGGSEKLVF

SEQ ID NO: 38200 - protein, 16 aa, Homo sapiens
  CDR3 for beta chain variable domain of TCR clone 19100 (TRBV12-4, TRBJ1-5)
CASSRPVWGSNQPQHF

SEQ ID NO: 38201 - protein, 13 aa, Homo sapiens
  CDR3 for alpha chain variable domain of TCR clone 19101 (TRAV27, TRAJ3)
ASLRGSSASTIIF

SEQ ID NO: 38202 - protein, 15 aa, Homo sapiens
  CDR3 for beta chain variable domain of TCR clone 19101 (TRBV28, TRBJ1-3)
CASSMGWASGNTIYF

SEQ ID NO: 38203 - protein, 13 aa, Homo sapiens
  CDR3 for alpha chain variable domain of TCR clone 19102 (TRAV21, TRAJ27)
CAARPGNAGKATF

SEQ ID NO: 38204 - protein, 14 aa, Homo sapiens
  CDR3 for beta chain variable domain of TCR clone 19102 (TRBV7-6, TRBJ2-3)
CASSLGTVTDTQYF

SEQ ID NO: 38205 - protein, 13 aa, Homo sapiens
  CDR3 for alpha chain variable domain of TCR clone 19103 (TRAV12-3, TRAJ7)
CAMSASGSNRLAF

SEQ ID NO: 38206 - protein, 14 aa, Homo sapiens
  CDR3 for beta chain variable domain of TCR clone 19103 (TRBV13, TRBJ2-5)
CASSLGPRGETQYF

SEQ ID NO: 38207 - protein, 13 aa, Homo sapiens
  CDR3 for alpha chain variable domain of TCR clone 19104 (TRAV8-3, TRAJ48)
CAVVPVGNEKLTF

SEQ ID NO: 38208 - protein, 15 aa, Homo sapiens
  CDR3 for beta chain variable domain of TCR clone 19104 (TRBV11-2, TRBJ2-1)
CASSSPSTRYNEQFF

SEQ ID NO: 38209 - protein, 17 aa, Homo sapiens
  CDR3 for alpha chain variable domain of TCR clone 19105 (TRAV3, TRAJ42)
CAVRDRDYGGSQGNLIF

SEQ ID NO: 38210 - protein, 16 aa, Homo sapiens
  CDR3 for beta chain variable domain of TCR clone 19105 (TRBV12-5, TRBJ2-5)
CASGPRTSGNQETQYF

SEQ ID NO: 38211 - protein, 15 aa, Homo sapiens
  CDR3 for alpha chain variable domain of TCR clone 19106 (TRAV38-1, TRAJ37)
CAFIFGSGNTGKLIF

SEQ ID NO: 38212 - protein, 12 aa, Homo sapiens
  CDR3 for beta chain variable domain of TCR clone 19106 (TRBV7-9, TRBJ2-7)
CAGSLEGYEQYF

SEQ ID NO: 38213 - protein, 11 aa, Homo sapiens
  CDR3 for alpha chain variable domain of TCR clone 19107 (TRAV17, TRAJ9)
CATTGGFKTIF

SEQ ID NO: 38214 - protein, 14 aa, Homo sapiens
  CDR3 for beta chain variable domain of TCR clone 19107 (TRBV7-9, TRBJ2-2)
CASSGLADTGELVF

SEQ ID NO: 38215 - protein, 10 aa, Homo sapiens
  CDR3 for alpha chain variable domain of TCR clone 19108 (TRAV29/DV5, TRAJ22)
CAASARQLTF

SEQ ID NO: 38216 - protein, 15 aa, Homo sapiens
  CDR3 for beta chain variable domain of TCR clone 19108 (TRBV19, TRBJ2-5)
CASSIARGRQETQYF

SEQ ID NO: 38217 - protein, 13 aa, Homo sapiens
  CDR3 for alpha chain variable domain of TCR clone 19109 (TRAV38-1, TRAJ42)
CARWGGSQGNPIF

SEQ ID NO: 38218 - protein, 10 aa, Homo sapiens
  CDR3 for beta chain variable domain of TCR clone 19109 (TRBV2, TRBJ2-5)
CASSAATQYF

SEQ ID NO: 38219 - protein, 15 aa, Homo sapiens
  CDR3 for alpha chain variable domain of TCR clone 19110 (TRAV26-1, TRAJ22)
CIVRVSFWFCKATDL

SEQ ID NO: 38220 - protein, 13 aa, Homo sapiens
  CDR3 for beta chain variable domain of TCR clone 19110 (TRBV7-9, TRBJ1-2)
CASSLNQNYGYTF

SEQ ID NO: 38221 - protein, 14 aa, Homo sapiens
  CDR3 for alpha chain variable domain of TCR clone 19111 (TRAV1-2, TRAJ16)
CAVNRFSDGQKLLF

SEQ ID NO: 38222 - protein, 18 aa, Homo sapiens
  CDR3 for beta chain variable domain of TCR clone 19111 (TRBV20-1, TRBJ2-6)
CSAEATPTHGSGANVLTF

SEQ ID NO: 38223 - protein, 13 aa, Homo sapiens
  CDR3 for alpha chain variable domain of TCR clone 19112 (TRAV16, TRAJ34)
CALSPYNTDKLIF

SEQ ID NO: 38224 - protein, 12 aa, Homo sapiens
  CDR3 for beta chain variable domain of TCR clone 19112 (TRBV6-1, TRBJ2-1)
CASRGPGDEQFF

SEQ ID NO: 38225 - protein, 11 aa, Homo sapiens
  CDR3 for alpha chain variable domain of TCR clone 19113 (TRAV1-2, TRAJ31)
CAVNNNARLMF

SEQ ID NO: 38226 - protein, 15 aa, Homo sapiens
  CDR3 for beta chain variable domain of TCR clone 19113 (TRBV28, TRBJ2-1)
CDSSIIAGGRSEQFF

SEQ ID NO: 38227 - protein, 13 aa, Homo sapiens
  CDR3 for alpha chain variable domain of TCR clone 19114 (TRAV27, TRAJ49)
CAPRPYTGNQVYF

SEQ ID NO: 38228 - protein, 16 aa, Homo sapiens
  CDR3 for beta chain variable domain of TCR clone 19114 (TRBV4-1, TRBJ1-2)
CASSQDAGQVLYGYTF

SEQ ID NO: 38229 - protein, 14 aa, Homo sapiens
  CDR3 for alpha chain variable domain of TCR clone 19115 (TRAV12-3, TRAJ10)
SHLPLTGGGNKLTF

SEQ ID NO: 38230 - protein, 17 aa, Homo sapiens
  CDR3 for beta chain variable domain of TCR clone 19115 (TRBV7-3, TRBJ2-3)
CASSLMKRMRGADTQYF

SEQ ID NO: 38231 - protein, 13 aa, Homo sapiens
  CDR3 for alpha chain variable domain of TCR clone 19116 (TRAV3, TRAJ21)
CAVREPDFNKFYF

SEQ ID NO: 38232 - protein, 13 aa, Homo sapiens
  CDR3 for beta chain variable domain of TCR clone 19116 (TRBV19, TRBJ1-2)
CASSVPGQDGYTF

SEQ ID NO: 38233 - protein, 11 aa, Homo sapiens
  CDR3 for alpha chain variable domain of TCR clone 19117 (TRAV1-2, TRAJ20)
CAVADDYKLSF

SEQ ID NO: 38234 - protein, 18 aa, Homo sapiens
  CDR3 for beta chain variable domain of TCR clone 19117 (TRBV20-1, TRBJ2-6)
CSAETTPTHGSGANVLTF

SEQ ID NO: 38235 - protein, 16 aa, Homo sapiens
  CDR3 for alpha chain variable domain of TCR clone 19118 (TRAV8-3, TRAJ13)
CAVGAYPSGVYQKVTF

SEQ ID NO: 38236 - protein, 15 aa, Homo sapiens
  CDR3 for beta chain variable domain of TCR clone 19118 (TRBV19, TRBJ1-5)
CASSIVWADNQPQHF

SEQ ID NO: 38237 - protein, 12 aa, Homo sapiens
  CDR3 for alpha chain variable domain of TCR clone 19119 (TRAV12-2, TRAJ21)
CAVNRSFNKFYF

SEQ ID NO: 38238 - protein, 14 aa, Homo sapiens
  CDR3 for beta chain variable domain of TCR clone 19119 (TRBV12-4, TRBJ2-3)
CASSLSGATDTQYF

SEQ ID NO: 38239 - protein, 13 aa, Homo sapiens
  CDR3 for alpha chain variable domain of TCR clone 19120 (TRAV1-2, TRAJ9)
CAALNTGGFKTIF

SEQ ID NO: 38240 - protein, 13 aa, Homo sapiens
  CDR3 for beta chain variable domain of TCR clone 19120 (TRBV19, TRBJ1-2)
CASSVPRQDGYTF

SEQ ID NO: 38241 - protein, 13 aa, Homo sapiens
  CDR3 for alpha chain variable domain of TCR clone 19121 (TRAV27, TRAJ8)
CAGGPTGFRKLVF

SEQ ID NO: 38242 - protein, 15 aa, Homo sapiens
  CDR3 for beta chain variable domain of TCR clone 19121 (TRBV6-1, TRBJ2-7)
CASSESMGDFYEQYF

SEQ ID NO: 38243 - protein, 14 aa, Homo sapiens
  CDR3 for alpha chain variable domain of TCR clone 19122 (TRAV35, TRAJ22)
CAGIRPGSARQLTF

SEQ ID NO: 38244 - protein, 15 aa, Homo sapiens
  CDR3 for beta chain variable domain of TCR clone 19122 (TRBV12-4, TRBJ2-5)
CASSPPTGLQETQYF

SEQ ID NO: 38245 - protein, 14 aa, Homo sapiens
  CDR3 for alpha chain variable domain of TCR clone 19123 (TRAV1-2, TRAJ16)
CAVNRFSDGQKLRF

SEQ ID NO: 38246 - protein, 15 aa, Homo sapiens
  CDR3 for beta chain variable domain of TCR clone 19123 (TRBV7-9, TRBJ1-6)
CASSSPGRGNSPLHF

SEQ ID NO: 38247 - protein, 15 aa, Homo sapiens
  CDR3 for alpha chain variable domain of TCR clone 19124 (TRAV12-1, TRAJ44)
CVVFVNTGTASKLTF

SEQ ID NO: 38248 - protein, 17 aa, Homo sapiens
  CDR3 for beta chain variable domain of TCR clone 19124 (TRBV7-8, TRBJ2-6)
CASSAGTGGAGANGLTF

SEQ ID NO: 38249 - protein, 13 aa, Homo sapiens
  CDR3 for alpha chain variable domain of TCR clone 19125 (TRAV17, TRAJ9)
CATDYTGGFKTIF

SEQ ID NO: 38250 - protein, 13 aa, Homo sapiens
  CDR3 for beta chain variable domain of TCR clone 19125 (TRBV7-9, TRBJ1-2)
CASSLKQNYGYTL

SEQ ID NO: 38251 - protein, 15 aa, Homo sapiens
  CDR3 for alpha chain variable domain of TCR clone 19126 (TRAV3, TRAJ5)
CAVRDRKTGRRALTS

SEQ ID NO: 38252 - protein, 15 aa, Homo sapiens
  CDR3 for beta chain variable domain of TCR clone 19126 (TRBV7-8, TRBJ2-1)
CASSLADSLYNEQFF

SEQ ID NO: 38253 - protein, 17 aa, Homo sapiens
  CDR3 for alpha chain variable domain of TCR clone 19127 (TRAV3, TRAJ6)
CAVRDGPRAGGSYIPTF

SEQ ID NO: 38254 - protein, 14 aa, Homo sapiens
  CDR3 for beta chain variable domain of TCR clone 19127 (TRBV7-2, TRBJ2-7)
CASSPKTIFYEQYF

SEQ ID NO: 38255 - protein, 14 aa, Homo sapiens
  CDR3 for alpha chain variable domain of TCR clone 19128 (TRAV26-1, TRAJ39)
CIVRGSRAGNMLTF

SEQ ID NO: 38256 - protein, 15 aa, Homo sapiens
  CDR3 for beta chain variable domain of TCR clone 19128 (TRBV7-9, TRBJ1-5)
CASRQGHQPNQPQHF

SEQ ID NO: 38257 - protein, 15 aa, Homo sapiens
  CDR3 for alpha chain variable domain of TCR clone 19129 (TRAV8-3, TRAJ45)
CASSYSGGGADGLTF

SEQ ID NO: 38258 - protein, 13 aa, Homo sapiens
  CDR3 for beta chain variable domain of TCR clone 19129 (TRBV10-3, TRBJ2-7)
CASKLAVNYEQYS

SEQ ID NO: 38259 - protein, 15 aa, Homo sapiens
  CDR3 for alpha chain variable domain of TCR clone 19130 (TRAV27, TRAJ38)
CAARCNAGNNRKLIW

SEQ ID NO: 38260 - protein, 13 aa, Homo sapiens
  CDR3 for beta chain variable domain of TCR clone 19130 (TRBV12-5, TRBJ2-3)
CASGDRQSDTQYF

SEQ ID NO: 38261 - protein, 14 aa, Homo sapiens
  CDR3 for alpha chain variable domain of TCR clone 19131 (TRAV12-2, TRAJ13)
CAVKKTAGYQKVTF

SEQ ID NO: 38262 - protein, 15 aa, Homo sapiens
  CDR3 for beta chain variable domain of TCR clone 19131 (TRBV27, TRBJ2-1)
CASSNGGGSSNEQFF

SEQ ID NO: 38263 - protein, 13 aa, Homo sapiens
  CDR3 for alpha chain variable domain of TCR clone 19132 (TRAV8-6, TRAJ21)
CAVSPSSLNKFYF

SEQ ID NO: 38264 - protein, 14 aa, Homo sapiens
  CDR3 for beta chain variable domain of TCR clone 19132 (TRBV7-9, TRBJ2-5)
CASSLDTAQETQYL

SEQ ID NO: 38265 - protein, 13 aa, Homo sapiens
  CDR3 for alpha chain variable domain of TCR clone 19133 (TRAV29/DV5, TRAJ31)
CAASRNNNARLMF

SEQ ID NO: 38266 - protein, 12 aa, Homo sapiens
  CDR3 for beta chain variable domain of TCR clone 19133 (TRBV14, TRBJ2-7)
CASSSLRGEQYF

SEQ ID NO: 38267 - protein, 14 aa, Homo sapiens
  CDR3 for alpha chain variable domain of TCR clone 19134 (TRAV12-2, TRAJ40)
CAVKIPAGTYKYIF

SEQ ID NO: 38268 - protein, 14 aa, Homo sapiens
  CDR3 for beta chain variable domain of TCR clone 19134 (TRBV20-1, TRBJ1-1)
CSAQTRIGGTEAFF

SEQ ID NO: 38269 - protein, 12 aa, Homo sapiens
  CDR3 for alpha chain variable domain of TCR clone 19135 (TRAV13-2, TRAJ23)
CAERHRGRKLIF

SEQ ID NO: 38270 - protein, 16 aa, Homo sapiens
  CDR3 for beta chain variable domain of TCR clone 19135 (TRBV20-1, TRBJ1-4)
CSAPGQGLLTNEKLFF

SEQ ID NO: 38271 - protein, 10 aa, Homo sapiens
  CDR3 for alpha chain variable domain of TCR clone 19136 (TRAV36/DV7, TRAJ48)
CAVGNVKLTF

SEQ ID NO: 38272 - protein, 16 aa, Homo sapiens
  CDR3 for beta chain variable domain of TCR clone 19136 (TRBV15, TRBJ2-3)
CATRLSGGRAPDTQYF

SEQ ID NO: 38273 - protein, 15 aa, Homo sapiens
  CDR3 for alpha chain variable domain of TCR clone 19137 (TRAV27, TRAJ38)
CAARRNAGNNRKLIW

SEQ ID NO: 38274 - protein, 13 aa, Homo sapiens
  CDR3 for beta chain variable domain of TCR clone 19137 (TRBV7-3, TRBJ1-1)
CASSQDWGAEAFF

SEQ ID NO: 38275 - protein, 17 aa, Homo sapiens
  CDR3 for alpha chain variable domain of TCR clone 19138 (TRAV8-3, TRAJ52)
CAVGAGAGGTSYGKLTF

SEQ ID NO: 38276 - protein, 15 aa, Homo sapiens
  CDR3 for beta chain variable domain of TCR clone 19138 (TRBV5-1, TRBJ2-5)
CASSRQGLGQETQYF

SEQ ID NO: 38277 - protein, 16 aa, Homo sapiens
  CDR3 for alpha chain variable domain of TCR clone 19139 (TRAV2, TRAJ4)
CAVEDRFSGGYNKLIF

SEQ ID NO: 38278 - protein, 13 aa, Homo sapiens
  CDR3 for beta chain variable domain of TCR clone 19139 (TRBV7-7, TRBJ2-5)
CASSHSGQETQYF

SEQ ID NO: 38279 - protein, 15 aa, Homo sapiens
  CDR3 for alpha chain variable domain of TCR clone 19140 (TRAV8-3, TRAJ40)
CAAPSLGSGTSKYIF

SEQ ID NO: 38280 - protein, 16 aa, Homo sapiens
  CDR3 for beta chain variable domain of TCR clone 19140 (TRBV7-3, TRBJ2-3)
CASSLSGYRPEDTQYF

SEQ ID NO: 38281 - protein, 13 aa, Homo sapiens
  CDR3 for alpha chain variable domain of TCR clone 19141 (TRAV1-1, TRAJ9)
CAAKNTGGFKTIF

SEQ ID NO: 38282 - protein, 14 aa, Homo sapiens
  CDR3 for beta chain variable domain of TCR clone 19141 (TRBV20-1, TRBJ2-1)
CSAQIGGSANEQFS

SEQ ID NO: 38283 - protein, 14 aa, Homo sapiens
  CDR3 for alpha chain variable domain of TCR clone 19142 (TRAV29/DV5, TRAJ36)
CAARRKTGANNLFF

SEQ ID NO: 38284 - protein, 14 aa, Homo sapiens
  CDR3 for beta chain variable domain of TCR clone 19142 (TRBV7-8, TRBJ2-3)
CASSLEAGTDTQYF

SEQ ID NO: 38285 - protein, 15 aa, Homo sapiens
  CDR3 for alpha chain variable domain of TCR clone 19143 (TRAV27, TRAJ38)
CAARRNAGNNHKLIW

SEQ ID NO: 38286 - protein, 13 aa, Homo sapiens
  CDR3 for beta chain variable domain of TCR clone 19143 (TRBV12-5, TRBJ2-3)
CASGDRQSDTQYF

SEQ ID NO: 38287 - protein, 14 aa, Homo sapiens
  CDR3 for alpha chain variable domain of TCR clone 19144 (TRAV13-1, TRAJ44)
CAAKATGTASKLTF

SEQ ID NO: 38288 - protein, 15 aa, Homo sapiens
  CDR3 for beta chain variable domain of TCR clone 19144 (TRBV18, TRBJ2-1)
CASSPPSASYNEQFF

SEQ ID NO: 38289 - protein, 16 aa, Homo sapiens
  CDR3 for alpha chain variable domain of TCR clone 19145 (TRAV30, TRAJ24)
CGTEIVDADSWGKFTF

SEQ ID NO: 38290 - protein, 14 aa, Homo sapiens
  CDR3 for beta chain variable domain of TCR clone 19145 (TRBV12-5, TRBJ2-5)
CASGSRTHQETQYF

SEQ ID NO: 38291 - protein, 15 aa, Homo sapiens
  CDR3 for alpha chain variable domain of TCR clone 19146 (TRAV27, TRAJ38)
WAARRNAGNNRKLIW

SEQ ID NO: 38292 - protein, 13 aa, Homo sapiens
  CDR3 for beta chain variable domain of TCR clone 19146 (TRBV12-5, TRBJ2-3)
CASGDRQSDTQYF

SEQ ID NO: 38293 - protein, 13 aa, Homo sapiens
  CDR3 for alpha chain variable domain of TCR clone 19147 (TRAV2, TRAJ40)
CALVTSGTYKYIF

SEQ ID NO: 38294 - protein, 15 aa, Homo sapiens
  CDR3 for beta chain variable domain of TCR clone 19147 (TRBV11-3, TRBJ2-3)
CASLKDGREGDTQYF

SEQ ID NO: 38295 - protein, 17 aa, Homo sapiens
  CDR3 for alpha chain variable domain of TCR clone 19148 (TRAV21, TRAJ40)
CAVRPQSGTSGTYKYIF

SEQ ID NO: 38296 - protein, 13 aa, Homo sapiens
  CDR3 for beta chain variable domain of TCR clone 19148 (TRBV12-4, TRBJ2-7)
CASSPSQDTPRSF

SEQ ID NO: 38297 - protein, 12 aa, Homo sapiens
  CDR3 for alpha chain variable domain of TCR clone 19149 (TRAV12-1, TRAJ40)
CVVYSGTYKYIF

SEQ ID NO: 38298 - protein, 16 aa, Homo sapiens
  CDR3 for beta chain variable domain of TCR clone 19149 (TRBV20-1, TRBJ2-1)
CSARDLKQGMNNEQSF

SEQ ID NO: 38299 - protein, 15 aa, Homo sapiens
  CDR3 for alpha chain variable domain of TCR clone 19150 (TRAV26-1, TRAJ29)
CIVRVEGSGNTPLVF

SEQ ID NO: 38300 - protein, 14 aa, Homo sapiens
  CDR3 for beta chain variable domain of TCR clone 19150 (TRBV18, TRBJ2-5)
CASSPGVSQETQFF

SEQ ID NO: 38301 - protein, 13 aa, Homo sapiens
  CDR3 for alpha chain variable domain of TCR clone 19151 (TRAV8-3, TRAJ28)
CAAGAVGSYQLTF

SEQ ID NO: 38302 - protein, 15 aa, Homo sapiens
  CDR3 for beta chain variable domain of TCR clone 19151 (TRBV7-9, TRBJ1-5)
CASSQGHQPNQPQHF

SEQ ID NO: 38303 - protein, 13 aa, Homo sapiens
  CDR3 for alpha chain variable domain of TCR clone 19152 (TRAV27, TRAJ42)
CAGARGSQGNLIF

SEQ ID NO: 38304 - protein, 15 aa, Homo sapiens
  CDR3 for beta chain variable domain of TCR clone 19152 (TRBV10-3, TRBJ2-2)
CAIRTDREDTGGLFF

SEQ ID NO: 38305 - protein, 14 aa, Homo sapiens
  CDR3 for alpha chain variable domain of TCR clone 19153 (TRAV13-1, TRAJ24)
CAASRTDSWGKLQF

SEQ ID NO: 38306 - protein, 13 aa, Homo sapiens
  CDR3 for beta chain variable domain of TCR clone 19153 (TRBV20-1, TRBJ1-1)
CSAPPGGHTEAFF

SEQ ID NO: 38307 - protein, 13 aa, Homo sapiens
  CDR3 for alpha chain variable domain of TCR clone 19154 (TRAV2, TRAJ40)
CAVVTSGTYKYIF

SEQ ID NO: 38308 - protein, 14 aa, Homo sapiens
  CDR3 for beta chain variable domain of TCR clone 19154 (TRBV19, TRBJ2-1)
CASPTFVLCGEQFF

SEQ ID NO: 38309 - protein, 13 aa, Homo sapiens
  CDR3 for alpha chain variable domain of TCR clone 19155 (TRAV2, TRAJ40)
CAVVTSGTYKYIF

SEQ ID NO: 38310 - protein, 12 aa, Homo sapiens
  CDR3 for beta chain variable domain of TCR clone 19155 (TRBV7-8, TRBJ2-7)
CASSLGDREQYF

SEQ ID NO: 38311 - protein, 15 aa, Homo sapiens
  CDR3 for alpha chain variable domain of TCR clone 19156 (TRAV8-3, TRAJ45)
CASSYSGGGADGLTF

SEQ ID NO: 38312 - protein, 13 aa, Homo sapiens
  CDR3 for beta chain variable domain of TCR clone 19156 (TRBV7-3, TRBJ1-1)
CASSQDWGAEAFF

SEQ ID NO: 38313 - protein, 11 aa, Homo sapiens
  CDR3 for alpha chain variable domain of TCR clone 19157 (TRAV12-2, TRAJ29)
CAVTLRSPLVF

SEQ ID NO: 38314 - protein, 18 aa, Homo sapiens
  CDR3 for beta chain variable domain of TCR clone 19157 (TRBV19, TRBJ1-5)
CASSIDRGALDSPSILVM

SEQ ID NO: 38315 - protein, 14 aa, Homo sapiens
  CDR3 for alpha chain variable domain of TCR clone 19158 (TRAV1-2, TRAJ16)
CAVNRFSDGQKLLF

SEQ ID NO: 38316 - protein, 16 aa, Homo sapiens
  CDR3 for beta chain variable domain of TCR clone 19158 (TRBV9, TRBJ1-2)
CASSVEEKVSPYGYTF

SEQ ID NO: 38317 - protein, 13 aa, Homo sapiens
  CDR3 for alpha chain variable domain of TCR clone 19159 (TRAV21, TRAJ20)
CAVGLRVDYELSF

SEQ ID NO: 38318 - protein, 13 aa, Homo sapiens
  CDR3 for beta chain variable domain of TCR clone 19159 (TRBV29-1, TRBJ2-1)
CSVEGGRVNEQFF

SEQ ID NO: 38319 - protein, 10 aa, Homo sapiens
  CDR3 for alpha chain variable domain of TCR clone 19160 (TRAV12-3, TRAJ49)
CAMNDDPFYF

SEQ ID NO: 38320 - protein, 13 aa, Homo sapiens
  CDR3 for beta chain variable domain of TCR clone 19160 (TRBV12-4, TRBJ1-1)
CASSPGTGFEAFF

SEQ ID NO: 38321 - protein, 12 aa, Homo sapiens
  CDR3 for alpha chain variable domain of TCR clone 19161 (TRAV21, TRAJ3)
CCFYSSASKIIF

SEQ ID NO: 38322 - protein, 12 aa, Homo sapiens
  CDR3 for beta chain variable domain of TCR clone 19161 (TRBV19, TRBJ2-1)
KAGPSSYNEQFF

SEQ ID NO: 38323 - protein, 14 aa, Homo sapiens
  CDR3 for alpha chain variable domain of TCR clone 19162 (TRAV20, TRAJ56)
CAVQLGGANSKLTF

SEQ ID NO: 38324 - protein, 14 aa, Homo sapiens
  CDR3 for beta chain variable domain of TCR clone 19162 (TRBV20-1, TRBJ2-7)
CSAKRGRSSYEQYF

SEQ ID NO: 38325 - protein, 15 aa, Homo sapiens
  CDR3 for alpha chain variable domain of TCR clone 19163 (TRAV27, TRAJ38)
CAGRVNAGNNRKLIW

SEQ ID NO: 38326 - protein, 13 aa, Homo sapiens
  CDR3 for beta chain variable domain of TCR clone 19163 (TRBV12-5, TRBJ2-3)
CASQNRGTDTQYF

SEQ ID NO: 38327 - protein, 14 aa, Homo sapiens
  CDR3 for alpha chain variable domain of TCR clone 19164 (TRAV1-2, TRAJ6)
CAVSLSGGSYIPTF

SEQ ID NO: 38328 - protein, 15 aa, Homo sapiens
  CDR3 for beta chain variable domain of TCR clone 19164 (TRBV28, TRBJ2-7)
CAGSPGGRGFYEQYF

SEQ ID NO: 38329 - protein, 17 aa, Homo sapiens
  CDR3 for alpha chain variable domain of TCR clone 19165 (TRAV3, TRAJ6)
CAVRDGPRAGGSYIPTF

SEQ ID NO: 38330 - protein, 14 aa, Homo sapiens
  CDR3 for beta chain variable domain of TCR clone 19165 (TRBV18, TRBJ2-7)
CASSPRGGAYEQYF

SEQ ID NO: 38331 - protein, 11 aa, Homo sapiens
  CDR3 for alpha chain variable domain of TCR clone 19166 (TRAV2, TRAJ13)
CASGGYQKVTF

SEQ ID NO: 38332 - protein, 16 aa, Homo sapiens
  CDR3 for beta chain variable domain of TCR clone 19166 (TRBV6-1, TRBJ2-5)
CASSETMDRGAETQYF

SEQ ID NO: 38333 - protein, 14 aa, Homo sapiens
  CDR3 for alpha chain variable domain of TCR clone 19167 (TRAV2, TRAJ9)
CAVEDRSGGFKTIF

SEQ ID NO: 38334 - protein, 16 aa, Homo sapiens
  CDR3 for beta chain variable domain of TCR clone 19167 (TRBV7-7, TRBJ2-1)
CASSLASGTSYNEQFF

SEQ ID NO: 38335 - protein, 13 aa, Homo sapiens
  CDR3 for alpha chain variable domain of TCR clone 19168 (TRAV1-1, TRAJ9)
CAAKSTGGFKTIF

SEQ ID NO: 38336 - protein, 14 aa, Homo sapiens
  CDR3 for beta chain variable domain of TCR clone 19168 (TRBV20-1, TRBJ2-1)
CSAQIGGSANEQFF

SEQ ID NO: 38337 - protein, 16 aa, Homo sapiens
  CDR3 for alpha chain variable domain of TCR clone 19169 (TRAV2, TRAJ4)
CAVEDRLSGGYNKLIF

SEQ ID NO: 38338 - protein, 13 aa, Homo sapiens
  CDR3 for beta chain variable domain of TCR clone 19169 (TRBV7-7, TRBJ2-5)
CASSRSGQETQYF

SEQ ID NO: 38339 - protein, 14 aa, Homo sapiens
  CDR3 for alpha chain variable domain of TCR clone 19170 (TRAV29/DV5, TRAJ36)
CAARRKTGANNLFF

SEQ ID NO: 38340 - protein, 14 aa, Homo sapiens
  CDR3 for beta chain variable domain of TCR clone 19170 (TRBV19, TRBJ2-1)
CASKDPSSYNEQFF

SEQ ID NO: 38341 - protein, 13 aa, Homo sapiens
  CDR3 for alpha chain variable domain of TCR clone 19171 (TRAV27, TRAJ45)
CRSSGGGADGLTF

SEQ ID NO: 38342 - protein, 17 aa, Homo sapiens
  CDR3 for beta chain variable domain of TCR clone 19171 (TRBV11-2, TRBJ2-1)
CTSSLYPPGVEYNEQFF

SEQ ID NO: 38343 - protein, 17 aa, Homo sapiens
  CDR3 for alpha chain variable domain of TCR clone 19172 (TRAV2, TRAJ22)
ILQVREADAAEQRQLTF

SEQ ID NO: 38344 - protein, 16 aa, Homo sapiens
  CDR3 for beta chain variable domain of TCR clone 19172 (TRBV2, TRBJ2-5)
CASSEAQGVGEETQYF

SEQ ID NO: 38345 - protein, 17 aa, Homo sapiens
  CDR3 for alpha chain variable domain of TCR clone 19173 (TRAV8-6, TRAJ58)
CAVSSWVRETSGSRLTF

SEQ ID NO: 38346 - protein, 14 aa, Homo sapiens
  CDR3 for beta chain variable domain of TCR clone 19173 (TRBV4-2, TRBJ2-1)
CASGLDRAYNEQFF

SEQ ID NO: 38347 - protein, 14 aa, Homo sapiens
  CDR3 for alpha chain variable domain of TCR clone 19174 (TRAV1-2, TRAJ16)
CAVNRFSDGQKLLF

SEQ ID NO: 38348 - protein, 14 aa, Homo sapiens
  CDR3 for beta chain variable domain of TCR clone 19174 (TRBV11-2, TRBJ2-7)
CASSLGAGAYEQYF

SEQ ID NO: 38349 - protein, 13 aa, Homo sapiens
  CDR3 for alpha chain variable domain of TCR clone 19175 (TRAV2, TRAJ40)
CAVVTSGTYKYIF

SEQ ID NO: 38350 - protein, 16 aa, Homo sapiens
  CDR3 for beta chain variable domain of TCR clone 19175 (TRBV7-9, TRBJ1-2)
CASSLGFSSGEDGYTF

SEQ ID NO: 38351 - protein, 15 aa, Homo sapiens
  CDR3 for alpha chain variable domain of TCR clone 19176 (TRAV21, TRAJ24)
CAARSSTASWGKLQF

SEQ ID NO: 38352 - protein, 13 aa, Homo sapiens
  CDR3 for beta chain variable domain of TCR clone 19176 (TRBV11-2, TRBJ2-5)
CASSSTGEETQYF

SEQ ID NO: 38353 - protein, 14 aa, Homo sapiens
  CDR3 for alpha chain variable domain of TCR clone 19177 (TRAV2, TRAJ37)
CAVDFTSNTGKLIF

SEQ ID NO: 38354 - protein, 17 aa, Homo sapiens
  CDR3 for beta chain variable domain of TCR clone 19177 (TRBV20-1, TRBJ1-1)
CSASRGVTGNTEAFLDK

SEQ ID NO: 38355 - protein, 11 aa, Homo sapiens
  CDR3 for alpha chain variable domain of TCR clone 19178 (TRAV12-1, TRAJ31)
CVGRVQCQTHV

SEQ ID NO: 38356 - protein, 15 aa, Homo sapiens
  CDR3 for beta chain variable domain of TCR clone 19178 (TRBV9, TRBJ1-6)
CASSVAGTGDSPLHF

SEQ ID NO: 38357 - protein, 14 aa, Homo sapiens
  CDR3 for alpha chain variable domain of TCR clone 19179 (TRAV1-2, TRAJ16)
CAVNRFSDGQKLLF

SEQ ID NO: 38358 - protein, 13 aa, Homo sapiens
  CDR3 for beta chain variable domain of TCR clone 19179 (TRBV11-2, TRBJ2-5)
CASSSTGEETQYF

SEQ ID NO: 38359 - protein, 13 aa, Homo sapiens
  CDR3 for alpha chain variable domain of TCR clone 19180 (TRAV27, TRAJ41)
RAGEGNSGYALNF

SEQ ID NO: 38360 - protein, 14 aa, Homo sapiens
  CDR3 for beta chain variable domain of TCR clone 19180 (TRBV7-2, TRBJ1-1)
CASSFLTGTTEAFF

SEQ ID NO: 38361 - protein, 10 aa, Homo sapiens
  CDR3 for alpha chain variable domain of TCR clone 19181 (TRAV1-2, TRAJ20)
CALNDYKLSF

SEQ ID NO: 38362 - protein, 16 aa, Homo sapiens
  CDR3 for beta chain variable domain of TCR clone 19181 (TRBV20-1, TRBJ1-1)
CSARALTQGMNAEAFF

SEQ ID NO: 38363 - protein, 13 aa, Homo sapiens
  CDR3 for alpha chain variable domain of TCR clone 19182 (TRAV17, TRAJ9)
CATDYTGGFTTIF

SEQ ID NO: 38364 - protein, 16 aa, Homo sapiens
  CDR3 for beta chain variable domain of TCR clone 19182 (TRBV7-7, TRBJ2-1)
CASSLASGTSYNEQFF

SEQ ID NO: 38365 - protein, 14 aa, Homo sapiens
  CDR3 for alpha chain variable domain of TCR clone 19183 (TRAV2, TRAJ37)
CAVYFTSNTGKLIF

SEQ ID NO: 38366 - protein, 15 aa, Homo sapiens
  CDR3 for beta chain variable domain of TCR clone 19183 (TRBV20-1, TRBJ1-1)
CSASRGVTGNTEAFF

SEQ ID NO: 38367 - protein, 14 aa, Homo sapiens
  CDR3 for alpha chain variable domain of TCR clone 19184 (TRAV2, TRAJ37)
CAVDFTSNTGNLIF

SEQ ID NO: 38368 - protein, 15 aa, Homo sapiens
  CDR3 for beta chain variable domain of TCR clone 19184 (TRBV20-1, TRBJ1-1)
CSASRGVTGNTEAFF

SEQ ID NO: 38369 - protein, 18 aa, Homo sapiens
  CDR3 for alpha chain variable domain of TCR clone 19185 (TRAV13-1, TRAJ52)
CAASKRSAGGTSYGKLTF

SEQ ID NO: 38370 - protein, 13 aa, Homo sapiens
  CDR3 for beta chain variable domain of TCR clone 19185 (TRBV12-4, TRBJ1-2)
CASSLRQGKGYTL

SEQ ID NO: 38371 - protein, 13 aa, Homo sapiens
  CDR3 for alpha chain variable domain of TCR clone 19186 (TRAV2, TRAJ24)
CVVSTDSWGKLQF

SEQ ID NO: 38372 - protein, 14 aa, Homo sapiens
  CDR3 for beta chain variable domain of TCR clone 19186 (TRBV13, TRBJ2-5)
CASSLGTAQETQYF

SEQ ID NO: 38373 - protein, 14 aa, Homo sapiens
  CDR3 for alpha chain variable domain of TCR clone 19187 (TRAV1-2, TRAJ16)
CAVNRFSDGQELLF

SEQ ID NO: 38374 - protein, 16 aa, Homo sapiens
  CDR3 for beta chain variable domain of TCR clone 19187 (TRBV12-5, TRBJ2-5)
CASGPRTSGNQETQYF

SEQ ID NO: 38375 - protein, 14 aa, Homo sapiens
  CDR3 for alpha chain variable domain of TCR clone 19188 (TRAV1-1, TRAJ27)
CAVIYNTNAGKSTL

SEQ ID NO: 38376 - protein, 15 aa, Homo sapiens
  CDR3 for beta chain variable domain of TCR clone 19188 (TRBV7-2, TRBJ2-1)
CASSSGLAGGNEQFF

SEQ ID NO: 38377 - protein, 15 aa, Homo sapiens
  CDR3 for alpha chain variable domain of TCR clone 19189 (TRAV12-3, TRAJ6)
CAMSATKGGSYIPTF

SEQ ID NO: 38378 - protein, 16 aa, Homo sapiens
  CDR3 for beta chain variable domain of TCR clone 19189 (TRBV20-1, TRBJ1-2)
CSASMGQGVANYGYTF

SEQ ID NO: 38379 - protein, 15 aa, Homo sapiens
  CDR3 for alpha chain variable domain of TCR clone 19190 (TRAV23/DV6, TRAJ21)
CAASREQLQQILLWI

SEQ ID NO: 38380 - protein, 16 aa, Homo sapiens
  CDR3 for beta chain variable domain of TCR clone 19190 (TRBV20-1, TRBJ2-3)
CSAVRDRGPIADTQYF

SEQ ID NO: 38381 - protein, 16 aa, Homo sapiens
  CDR3 for alpha chain variable domain of TCR clone 19191 (TRAV1-2, TRAJ10)
CAVRGVLTGGGNKLTF

SEQ ID NO: 38382 - protein, 11 aa, Homo sapiens
  CDR3 for beta chain variable domain of TCR clone 19191 (TRBV11-2, TRBJ2-2)
CASSLPGELFF

SEQ ID NO: 38383 - protein, 15 aa, Homo sapiens
  CDR3 for alpha chain variable domain of TCR clone 19192 (TRAV8-3, TRAJ45)
CASSYSGGGADGLTF

SEQ ID NO: 38384 - protein, 13 aa, Homo sapiens
  CDR3 for beta chain variable domain of TCR clone 19192 (TRBV10-3, TRBJ2-7)
CASKLAVNYERYF

SEQ ID NO: 38385 - protein, 16 aa, Homo sapiens
  CDR3 for alpha chain variable domain of TCR clone 19193 (TRAV3, TRAJ23)
CAVRDSSYNQGGKLIF

SEQ ID NO: 38386 - protein, 15 aa, Homo sapiens
  CDR3 for beta chain variable domain of TCR clone 19193 (TRBV6-3, TRBJ2-5)
CASRTRTSSRETQYF

SEQ ID NO: 38387 - protein, 13 aa, Homo sapiens
  CDR3 for alpha chain variable domain of TCR clone 19194 (TRAV12-2, TRAJ47)
CAVSMEYGNKLVF

SEQ ID NO: 38388 - protein, 14 aa, Homo sapiens
  CDR3 for beta chain variable domain of TCR clone 19194 (TRBV4-1, TRBJ1-5)
CASSQGPTNQPQHF

SEQ ID NO: 38389 - protein, 13 aa, Homo sapiens
  CDR3 for alpha chain variable domain of TCR clone 19195 (TRAV12-1, TRAJ6)
CVVFPGGSYIPTF

SEQ ID NO: 38390 - protein, 13 aa, Homo sapiens
  CDR3 for beta chain variable domain of TCR clone 19195 (TRBV10-3, TRBJ2-7)
CASKLAVNYEQYF

SEQ ID NO: 38391 - protein, 15 aa, Homo sapiens
  CDR3 for alpha chain variable domain of TCR clone 19196 (TRAV2, TRAJ9)
CAVEDRGTGGFKNIF

SEQ ID NO: 38392 - protein, 16 aa, Homo sapiens
  CDR3 for beta chain variable domain of TCR clone 19196 (TRBV24-1, TRBJ2-3)
CATSDPGTGATDTQYF

SEQ ID NO: 38393 - protein, 13 aa, Homo sapiens
  CDR3 for alpha chain variable domain of TCR clone 19197 (TRAV8-6, TRAJ8)
CAVSNTGFQKLVF

SEQ ID NO: 38394 - protein, 15 aa, Homo sapiens
  CDR3 for beta chain variable domain of TCR clone 19197 (TRBV28, TRBJ2-5)
RASSSGRTIQETQYF

SEQ ID NO: 38395 - protein, 17 aa, Homo sapiens
  CDR3 for alpha chain variable domain of TCR clone 19198 (TRAV4, TRAJ42)
CLVGVLNYGGSQGSLIF

SEQ ID NO: 38396 - protein, 12 aa, Homo sapiens
  CDR3 for beta chain variable domain of TCR clone 19198 (TRBV20-1, TRBJ2-1)
CSAQYTYNEQFF

SEQ ID NO: 38397 - protein, 14 aa, Homo sapiens
  CDR3 for alpha chain variable domain of TCR clone 19199 (TRAV3, TRAJ9)
CAVSLNTGGFKTIF

SEQ ID NO: 38398 - protein, 15 aa, Homo sapiens
  CDR3 for beta chain variable domain of TCR clone 19199 (TRBV7-2, TRBJ2-1)
CASSLASGRVNEQFF

SEQ ID NO: 38399 - protein, 15 aa, Homo sapiens
  CDR3 for alpha chain variable domain of TCR clone 19200 (TRAV13-1, TRAJ3)
CAASKLASSASEIIF

SEQ ID NO: 38400 - protein, 16 aa, Homo sapiens
  CDR3 for beta chain variable domain of TCR clone 19200 (TRBV25-1, TRBJ1-5)
CASGAPTVNSNQPQHF

SEQ ID NO: 38401 - protein, 14 aa, Homo sapiens
  CDR3 for alpha chain variable domain of TCR clone 19201 (TRAV2, TRAJ29)
CAGPFQYGNTPLVF

SEQ ID NO: 38402 - protein, 11 aa, Homo sapiens
  CDR3 for beta chain variable domain of TCR clone 19201 (TRBV29-1, TRBJ2-5)
CGEDRTGTQYF

SEQ ID NO: 38403 - protein, 15 aa, Homo sapiens
  CDR3 for alpha chain variable domain of TCR clone 19202 (TRAV26-1, TRAJ17)
CIVRVVRAAGNKLTF

SEQ ID NO: 38404 - protein, 16 aa, Homo sapiens
  CDR3 for beta chain variable domain of TCR clone 19202 (TRBV7-9, TRBJ2-1)
CASSLVSGPSYNEQFF

SEQ ID NO: 38405 - protein, 12 aa, Homo sapiens
  CDR3 for alpha chain variable domain of TCR clone 19203 (TRAV13-1, TRAJ48)
CAANFGNEKLTF

SEQ ID NO: 38406 - protein, 14 aa, Homo sapiens
  CDR3 for beta chain variable domain of TCR clone 19203 (TRBV6-1, TRBJ1-3)
CASVQGGGGNTIYF

SEQ ID NO: 38407 - protein, 16 aa, Homo sapiens
  CDR3 for alpha chain variable domain of TCR clone 19204 (TRAV8-3, TRAJ10)
CAVGPMLTGGGNKLTF

SEQ ID NO: 38408 - protein, 16 aa, Homo sapiens
  CDR3 for beta chain variable domain of TCR clone 19204 (TRBV7-2, TRBJ2-5)
CASSSKWLSGQETQYF

SEQ ID NO: 38409 - protein, 15 aa, Homo sapiens
  CDR3 for alpha chain variable domain of TCR clone 19205 (TRAV17, TRAJ57)
CATGPSQGGSEKLVF

SEQ ID NO: 38410 - protein, 16 aa, Homo sapiens
  CDR3 for beta chain variable domain of TCR clone 19205 (TRBV12-4, TRBJ1-5)
CASSRPVGGSNRPQHF

SEQ ID NO: 38411 - protein, 13 aa, Homo sapiens
  CDR3 for alpha chain variable domain of TCR clone 19206 (TRAV13-1, TRAJ39)
CSKYSNAGNMLTF

SEQ ID NO: 38412 - protein, 15 aa, Homo sapiens
  CDR3 for beta chain variable domain of TCR clone 19206 (TRBV11-3, TRBJ2-3)
CASLKDGREGDTQYF

SEQ ID NO: 38413 - protein, 14 aa, Homo sapiens
  CDR3 for alpha chain variable domain of TCR clone 19207 (TRAV12-2, TRAJ53)
CAVKGGGSNYKLTF

SEQ ID NO: 38414 - protein, 13 aa, Homo sapiens
  CDR3 for beta chain variable domain of TCR clone 19207 (TRBV7-7, TRBJ2-2)
CHPSGLRHRGAVF

SEQ ID NO: 38415 - protein, 12 aa, Homo sapiens
  CDR3 for alpha chain variable domain of TCR clone 19208 (TRAV30, TRAJ43)
CGTEERGNDMRS

SEQ ID NO: 38416 - protein, 13 aa, Homo sapiens
  CDR3 for beta chain variable domain of TCR clone 19208 (TRBV27, TRBJ2-7)
CASSFSQGYEQYF

SEQ ID NO: 38417 - protein, 18 aa, Homo sapiens
  CDR3 for alpha chain variable domain of TCR clone 19209 (TRAV21, TRAJ52)
CAVRPSPAGGTSYGKLTF

SEQ ID NO: 38418 - protein, 15 aa, Homo sapiens
  CDR3 for beta chain variable domain of TCR clone 19209 (TRBV2, TRBJ2-1)
CASSELAGSYNEQFF

SEQ ID NO: 38419 - protein, 13 aa, Homo sapiens
  CDR3 for alpha chain variable domain of TCR clone 19210 (TRAV1-2, TRAJ9)
CAALNTGGFKTIF

SEQ ID NO: 38420 - protein, 15 aa, Homo sapiens
  CDR3 for beta chain variable domain of TCR clone 19210 (TRBV7-9, TRBJ1-5)
CASSQGHQPNQPQHF

SEQ ID NO: 38421 - protein, 13 aa, Homo sapiens
  CDR3 for alpha chain variable domain of TCR clone 19211 (TRAV17, TRAJ9)
CATDYTGGFKTIF

SEQ ID NO: 38422 - protein, 14 aa, Homo sapiens
  CDR3 for beta chain variable domain of TCR clone 19211 (TRBV19, TRBJ2-5)
CASSMTGQQETQHF

SEQ ID NO: 38423 - protein, 15 aa, Homo sapiens
  CDR3 for alpha chain variable domain of TCR clone 19212 (TRAV8-4, TRAJ45)
CAVIWTGGSADGLTF

SEQ ID NO: 38424 - protein, 12 aa, Homo sapiens
  CDR3 for beta chain variable domain of TCR clone 19212 (TRBV29-1, TRBJ2-7)
CSVGPSGDEQYF

SEQ ID NO: 38425 - protein, 13 aa, Homo sapiens
  CDR3 for alpha chain variable domain of TCR clone 19213 (TRAV8-6, TRAJ49)
CAVITNTGNQFSF

SEQ ID NO: 38426 - protein, 14 aa, Homo sapiens
  CDR3 for beta chain variable domain of TCR clone 19213 (TRBV5-1, TRBJ2-7)
CASSRGESLYEQYF

SEQ ID NO: 38427 - protein, 17 aa, Homo sapiens
  CDR3 for alpha chain variable domain of TCR clone 19214 (TRAV26-1, TRAJ53)
CIVRVDDSGGRNYKLTF

SEQ ID NO: 38428 - protein, 15 aa, Homo sapiens
  CDR3 for beta chain variable domain of TCR clone 19214 (TRBV20-1, TRBJ2-7)
CSARVPAAYFYEQYF

SEQ ID NO: 38429 - protein, 13 aa, Homo sapiens
  CDR3 for alpha chain variable domain of TCR clone 19215 (TRAV27, TRAJ45)
CRSSGGGAYGLTF

SEQ ID NO: 38430 - protein, 17 aa, Homo sapiens
  CDR3 for beta chain variable domain of TCR clone 19215 (TRBV11-2, TRBJ2-1)
CASSLYPPGVEYNEQFF

SEQ ID NO: 38431 - protein, 14 aa, Homo sapiens
  CDR3 for alpha chain variable domain of TCR clone 19216 (TRAV12-3, TRAJ10)
SHLPLTGGGNKLTF

SEQ ID NO: 38432 - protein, 12 aa, Homo sapiens
  CDR3 for beta chain variable domain of TCR clone 19216 (TRBV5-4, TRBJ2-5)
CASSSTRETQYF

SEQ ID NO: 38433 - protein, 14 aa, Homo sapiens
  CDR3 for alpha chain variable domain of TCR clone 19217 (TRAV20, TRAJ42)
CAVQAGGSHGNLIF

SEQ ID NO: 38434 - protein, 14 aa, Homo sapiens
  CDR3 for beta chain variable domain of TCR clone 19217 (TRBV28, TRBJ1-2)
CASRIQGANYGYTF

SEQ ID NO: 38435 - protein, 14 aa, Homo sapiens
  CDR3 for alpha chain variable domain of TCR clone 19218 (TRAV1-2, TRAJ16)
CAVNRFSDGQKLHF

SEQ ID NO: 38436 - protein, 15 aa, Homo sapiens
  CDR3 for beta chain variable domain of TCR clone 19218 (TRBV9, TRBJ1-6)
CASSVAGTGDSPLHF

SEQ ID NO: 38437 - protein, 13 aa, Homo sapiens
  CDR3 for alpha chain variable domain of TCR clone 19219 (TRAV21, TRAJ20)
CAVGLRGDYKLSF

SEQ ID NO: 38438 - protein, 13 aa, Homo sapiens
  CDR3 for beta chain variable domain of TCR clone 19219 (TRBV6-1, TRBJ1-1)
CASSRQGNTEAFF

SEQ ID NO: 38439 - protein, 16 aa, Homo sapiens
  CDR3 for alpha chain variable domain of TCR clone 19220 (TRAV13-2, TRAJ23)
CAETRRFYNQGGKLIF

SEQ ID NO: 38440 - protein, 13 aa, Homo sapiens
  CDR3 for beta chain variable domain of TCR clone 19220 (TRBV20-1, TRBJ1-1)
CSARGGANTEAFF

SEQ ID NO: 38441 - protein, 13 aa, Homo sapiens
  CDR3 for alpha chain variable domain of TCR clone 19221 (TRAV1-2, TRAJ9)
CAALNTGGFKTIF

SEQ ID NO: 38442 - protein, 13 aa, Homo sapiens
  CDR3 for beta chain variable domain of TCR clone 19221 (TRBV19, TRBJ1-2)
CASSVPGQDGCTF

SEQ ID NO: 38443 - protein, 12 aa, Homo sapiens
  CDR3 for alpha chain variable domain of TCR clone 19222 (TRAV12-1, TRAJ40)
CVVYSGTYKYIF

SEQ ID NO: 38444 - protein, 13 aa, Homo sapiens
  CDR3 for beta chain variable domain of TCR clone 19222 (TRBV7-9, TRBJ1-2)
CASSLKQNYGYTF

SEQ ID NO: 38445 - protein, 16 aa, Homo sapiens
  CDR3 for alpha chain variable domain of TCR clone 19223 (TRAV12-1, TRAJ48)
CVVNMVSNFGNEKLTF

SEQ ID NO: 38446 - protein, 18 aa, Homo sapiens
  CDR3 for beta chain variable domain of TCR clone 19223 (TRBV11-2, TRBJ2-6)
CASSLNPFLGTGANDLTF

SEQ ID NO: 38447 - protein, 15 aa, Homo sapiens
  CDR3 for alpha chain variable domain of TCR clone 19224 (TRAV2, TRAJ15)
CAVEDRGQAGTALIF

SEQ ID NO: 38448 - protein, 13 aa, Homo sapiens
  CDR3 for beta chain variable domain of TCR clone 19224 (TRBV10-2, TRBJ2-7)
CAGGASGGYEQYF

SEQ ID NO: 38449 - protein, 15 aa, Homo sapiens
  CDR3 for alpha chain variable domain of TCR clone 19225 (TRAV17, TRAJ57)
CASGPSQGGSEKLVF

SEQ ID NO: 38450 - protein, 16 aa, Homo sapiens
  CDR3 for beta chain variable domain of TCR clone 19225 (TRBV12-4, TRBJ1-5)
CASSRPVGGSNQPQHF

SEQ ID NO: 38451 - protein, 12 aa, Homo sapiens
  CDR3 for alpha chain variable domain of TCR clone 19226 (TRAV12-1, TRAJ17)
CAMTLTGNKLTF

SEQ ID NO: 38452 - protein, 15 aa, Homo sapiens
  CDR3 for beta chain variable domain of TCR clone 19226 (TRBV20-1, TRBJ2-7)
CSARDRVSGMDEQYF

SEQ ID NO: 38453 - protein, 16 aa, Homo sapiens
  CDR3 for alpha chain variable domain of TCR clone 19227 (TRAV30, TRAJ24)
CGTEIVDADSWGKVQF

SEQ ID NO: 38454 - protein, 14 aa, Homo sapiens
  CDR3 for beta chain variable domain of TCR clone 19227 (TRBV12-5, TRBJ2-5)
CASGSRTHQETQYF

SEQ ID NO: 38455 - protein, 14 aa, Homo sapiens
  CDR3 for alpha chain variable domain of TCR clone 19228 (TRAV1-2, TRAJ16)
CAVNRFSDGQKMLF

SEQ ID NO: 38456 - protein, 15 aa, Homo sapiens
  CDR3 for beta chain variable domain of TCR clone 19228 (TRBV9, TRBJ1-6)
CASSVAGTGDSPLHF

SEQ ID NO: 38457 - protein, 14 aa, Homo sapiens
  CDR3 for alpha chain variable domain of TCR clone 19229 (TRAV8-4, TRAJ13)
CAVTLSGGYQKVTF

SEQ ID NO: 38458 - protein, 14 aa, Homo sapiens
  CDR3 for beta chain variable domain of TCR clone 19229 (TRBV12-5, TRBJ2-5)
CASGSRTHQETQYF

SEQ ID NO: 38459 - protein, 16 aa, Homo sapiens
  CDR3 for alpha chain variable domain of TCR clone 19230 (TRAV23/DV6, TRAJ9)
CAASIGGNTGGFKTIF

SEQ ID NO: 38460 - protein, 15 aa, Homo sapiens
  CDR3 for beta chain variable domain of TCR clone 19230 (TRBV5-1, TRBJ2-1)
CASSPPRAPYNEQFF

SEQ ID NO: 38461 - protein, 13 aa, Homo sapiens
  CDR3 for alpha chain variable domain of TCR clone 19231 (TRAV36/DV7, TRAJ54)
CAVDIQGAQKLVF

SEQ ID NO: 38462 - protein, 14 aa, Homo sapiens
  CDR3 for beta chain variable domain of TCR clone 19231 (TRBV19, TRBJ2-7)
CASNFRDTFTGMYL

SEQ ID NO: 38463 - protein, 13 aa, Homo sapiens
  CDR3 for alpha chain variable domain of TCR clone 19232 (TRAV1-1, TRAJ9)
CAAKNTGGFKTNF

SEQ ID NO: 38464 - protein, 14 aa, Homo sapiens
  CDR3 for beta chain variable domain of TCR clone 19232 (TRBV20-1, TRBJ2-1)
CSAQIGGSANEQFF

SEQ ID NO: 38465 - protein, 14 aa, Homo sapiens
  CDR3 for alpha chain variable domain of TCR clone 19233 (TRAV1-2, TRAJ16)
CAVNRFSDGQKLLF

SEQ ID NO: 38466 - protein, 16 aa, Homo sapiens
  CDR3 for beta chain variable domain of TCR clone 19233 (TRBV5-1, TRBJ2-2)
CASSSYREGDTGELFF

SEQ ID NO: 38467 - protein, 14 aa, Homo sapiens
  CDR3 for alpha chain variable domain of TCR clone 19234 (TRAV17, TRAJ22)
CATNPSGSARQLTF

SEQ ID NO: 38468 - protein, 15 aa, Homo sapiens
  CDR3 for beta chain variable domain of TCR clone 19234 (TRBV4-1, TRBJ2-5)
CASSQWDLYQETQYF

SEQ ID NO: 38469 - protein, 13 aa, Homo sapiens
  CDR3 for alpha chain variable domain of TCR clone 19235 (TRAV8-4, TRAJ43)
CAVTLINNNDMRF

SEQ ID NO: 38470 - protein, 13 aa, Homo sapiens
  CDR3 for beta chain variable domain of TCR clone 19235 (TRBV2, TRBJ1-2)
CASTLGTGDGYTF

SEQ ID NO: 38471 - protein, 20 aa, Homo sapiens
  CDR3 for alpha chain variable domain of TCR clone 19236 (TRAV26-1, TRAJ42)
CCVLLHRQTYYGGSQGNLIF

SEQ ID NO: 38472 - protein, 16 aa, Homo sapiens
  CDR3 for beta chain variable domain of TCR clone 19236 (TRBV7-3, TRBJ2-2)
CASSLKRGTLSGGLFF

SEQ ID NO: 38473 - protein, 14 aa, Homo sapiens
  CDR3 for alpha chain variable domain of TCR clone 19237 (TRAV35, TRAJ13)
CAGSPSGGYQEVTF

SEQ ID NO: 38474 - protein, 13 aa, Homo sapiens
  CDR3 for beta chain variable domain of TCR clone 19237 (TRBV29-1, TRBJ1-1)
CSVGDSRNTEAFF

SEQ ID NO: 38475 - protein, 15 aa, Homo sapiens
  CDR3 for alpha chain variable domain of TCR clone 19238 (TRAV8-3, TRAJ20)
CAVEAEGSNDYKLSF

SEQ ID NO: 38476 - protein, 12 aa, Homo sapiens
  CDR3 for beta chain variable domain of TCR clone 19238 (TRBV7-2, TRBJ1-2)
CASRDSIYGYTF

SEQ ID NO: 38477 - protein, 17 aa, Homo sapiens
  CDR3 for alpha chain variable domain of TCR clone 19239 (TRAV3, TRAJ42)
CAVRDMDYGGSQGNLIF

SEQ ID NO: 38478 - protein, 15 aa, Homo sapiens
  CDR3 for beta chain variable domain of TCR clone 19239 (TRBV6-6, TRBJ2-7)
CASSYSYGGSYEQYF

SEQ ID NO: 38479 - protein, 15 aa, Homo sapiens
  CDR3 for alpha chain variable domain of TCR clone 19240 (TRAV12-3, TRAJ6)
CAMSATTGGSYIPTF

SEQ ID NO: 38480 - protein, 20 aa, Homo sapiens
  CDR3 for beta chain variable domain of TCR clone 19240 (TRBV7-8, TRBJ2-2)
CASSHLFPGPTIHITGELFF

SEQ ID NO: 38481 - protein, 14 aa, Homo sapiens
  CDR3 for alpha chain variable domain of TCR clone 19241 (TRAV12-1, TRAJ17)
CVVNYKAAGNKLTF

SEQ ID NO: 38482 - protein, 17 aa, Homo sapiens
  CDR3 for beta chain variable domain of TCR clone 19241 (TRBV20-1, TRBJ2-1)
CSASSSGLAGSYNEQVF

SEQ ID NO: 38483 - protein, 14 aa, Homo sapiens
  CDR3 for alpha chain variable domain of TCR clone 19242 (TRAV35, TRAJ33)
CAGSSQDSNYQLIW

SEQ ID NO: 38484 - protein, 15 aa, Homo sapiens
  CDR3 for beta chain variable domain of TCR clone 19242 (TRBV20-1, TRBJ2-7)
CNAESGTSGAYEQYF

SEQ ID NO: 38485 - protein, 18 aa, Homo sapiens
  CDR3 for alpha chain variable domain of TCR clone 19243 (TRAV13-1, TRAJ52)
CAAKNPNAGGTSYGKLTF

SEQ ID NO: 38486 - protein, 14 aa, Homo sapiens
  CDR3 for beta chain variable domain of TCR clone 19243 (TRBV25-1, TRBJ1-1)
CASTHLGGNTEAFF

SEQ ID NO: 38487 - protein, 13 aa, Homo sapiens
  CDR3 for alpha chain variable domain of TCR clone 19244 (TRAV30, TRAJ24)
CGTVTDSWGKLQF

SEQ ID NO: 38488 - protein, 15 aa, Homo sapiens
  CDR3 for beta chain variable domain of TCR clone 19244 (TRBV9, TRBJ1-6)
CASSVAGTGDSLLHF

SEQ ID NO: 38489 - protein, 14 aa, Homo sapiens
  CDR3 for alpha chain variable domain of TCR clone 19245 (TRAV26-1, TRAJ38)
CIADNAGNNRNLIW

SEQ ID NO: 38490 - protein, 13 aa, Homo sapiens
  CDR3 for beta chain variable domain of TCR clone 19245 (TRBV20-1, TRBJ1-1)
CSARGGGNTEAFF

SEQ ID NO: 38491 - protein, 12 aa, Homo sapiens
  CDR3 for alpha chain variable domain of TCR clone 19246 (TRAV8-3, TRAJ26)
CAGDNYGQNFAF

SEQ ID NO: 38492 - protein, 15 aa, Homo sapiens
  CDR3 for beta chain variable domain of TCR clone 19246 (TRBV5-1, TRBJ2-3)
CASSVTSGSTDTQYF

SEQ ID NO: 38493 - protein, 14 aa, Homo sapiens
  CDR3 for alpha chain variable domain of TCR clone 19247 (TRAV1-2, TRAJ16)
CAVNRFSDGQKLLF

SEQ ID NO: 38494 - protein, 15 aa, Homo sapiens
  CDR3 for beta chain variable domain of TCR clone 19247 (TRBV18, TRBJ2-1)
CASSPPSASYNEQFF

SEQ ID NO: 38495 - protein, 15 aa, Homo sapiens
  CDR3 for alpha chain variable domain of TCR clone 19248 (TRAV26-1, TRAJ29)
CIVRVEGSGNTPLVF

SEQ ID NO: 38496 - protein, 15 aa, Homo sapiens
  CDR3 for beta chain variable domain of TCR clone 19248 (TRBV7-9, TRBJ1-5)
FASSQGHQPNQPQHF

SEQ ID NO: 38497 - protein, 18 aa, Homo sapiens
  CDR3 for alpha chain variable domain of TCR clone 19249 (TRAV12-3, TRAJ52)
CAMSRTNAGGTSYGKLTF

SEQ ID NO: 38498 - protein, 17 aa, Homo sapiens
  CDR3 for beta chain variable domain of TCR clone 19249 (TRBV7-3, TRBJ2-3)
RASSLMKRMRGADTQYF

SEQ ID NO: 38499 - protein, 12 aa, Homo sapiens
  CDR3 for alpha chain variable domain of TCR clone 19250 (TRAV8-3, TRAJ27)
CAVGAEAGKSTF

SEQ ID NO: 38500 - protein, 14 aa, Homo sapiens
  CDR3 for beta chain variable domain of TCR clone 19250 (TRBV2, TRBJ2-1)
CASRLVVGHDEQFF

SEQ ID NO: 38501 - protein, 14 aa, Homo sapiens
  CDR3 for alpha chain variable domain of TCR clone 19251 (TRAV35, TRAJ42)
CAGRYGGSQGNLIL

SEQ ID NO: 38502 - protein, 15 aa, Homo sapiens
  CDR3 for beta chain variable domain of TCR clone 19251 (TRBV7-9, TRBJ2-1)
CASSLGWGRANEQFF

SEQ ID NO: 38503 - protein, 14 aa, Homo sapiens
  CDR3 for alpha chain variable domain of TCR clone 19252 (TRAV8-4, TRAJ13)
CAVTLSGGYQQVTF

SEQ ID NO: 38504 - protein, 14 aa, Homo sapiens
  CDR3 for beta chain variable domain of TCR clone 19252 (TRBV7-2, TRBJ1-2)
CASSQTGSTYGYTF

SEQ ID NO: 38505 - protein, 14 aa, Homo sapiens
  CDR3 for alpha chain variable domain of TCR clone 19253 (TRAV20, TRAJ56)
CAVQFCGANSKLTF

SEQ ID NO: 38506 - protein, 14 aa, Homo sapiens
  CDR3 for beta chain variable domain of TCR clone 19253 (TRBV20-1, TRBJ2-7)
CSAKRGRSSYEQYF

SEQ ID NO: 38507 - protein, 11 aa, Homo sapiens
  CDR3 for alpha chain variable domain of TCR clone 19254 (TRAV21, TRAJ11)
CAVNGYSTLTF

SEQ ID NO: 38508 - protein, 11 aa, Homo sapiens
  CDR3 for beta chain variable domain of TCR clone 19254 (TRBV19, TRBJ1-1)
CASSIGSEALF

SEQ ID NO: 38509 - protein, 14 aa, Homo sapiens
  CDR3 for alpha chain variable domain of TCR clone 19255 (TRAV12-3, TRAJ42)
CAMNYGGSQGNLIF

SEQ ID NO: 38510 - protein, 15 aa, Homo sapiens
  CDR3 for beta chain variable domain of TCR clone 19255 (TRBV5-7, TRBJ1-5)
CASGYGKLWDQPQHF

SEQ ID NO: 38511 - protein, 12 aa, Homo sapiens
  CDR3 for alpha chain variable domain of TCR clone 19256 (TRAV12-3, TRAJ34)
CAMGYNTDKPIF

SEQ ID NO: 38512 - protein, 14 aa, Homo sapiens
  CDR3 for beta chain variable domain of TCR clone 19256 (TRBV4-1, TRBJ2-2)
CASSQAVNTGELFF

SEQ ID NO: 38513 - protein, 14 aa, Homo sapiens
  CDR3 for alpha chain variable domain of TCR clone 19257 (TRAV38-1, TRAJ33)
CAFMKPYSNYQLIW

SEQ ID NO: 38514 - protein, 15 aa, Homo sapiens
  CDR3 for beta chain variable domain of TCR clone 19257 (TRBV7-6, TRBJ2-1)
CASSLGGQSHNEQFF

SEQ ID NO: 38515 - protein, 17 aa, Homo sapiens
  CDR3 for alpha chain variable domain of TCR clone 19258 (TRAV3, TRAJ42)
FAVRDRDYGGSQGNLIF

SEQ ID NO: 38516 - protein, 15 aa, Homo sapiens
  CDR3 for beta chain variable domain of TCR clone 19258 (TRBV6-6, TRBJ2-7)
CASSYSYGGSYEQYF

SEQ ID NO: 38517 - protein, 18 aa, Homo sapiens
  CDR3 for alpha chain variable domain of TCR clone 19259 (TRAV21, TRAJ52)
CAVRPSPAGGTSYEKLTF

SEQ ID NO: 38518 - protein, 17 aa, Homo sapiens
  CDR3 for beta chain variable domain of TCR clone 19259 (TRBV13, TRBJ2-3)
CASSLSRVAGGRNTQYF

SEQ ID NO: 38519 - protein, 14 aa, Homo sapiens
  CDR3 for alpha chain variable domain of TCR clone 19260 (TRAV1-2, TRAJ16)
CAVNRFSDGQKLLF

SEQ ID NO: 38520 - protein, 12 aa, Homo sapiens
  CDR3 for beta chain variable domain of TCR clone 19260 (TRBV14, TRBJ2-7)
CASSSLKGEQYF

SEQ ID NO: 38521 - protein, 15 aa, Homo sapiens
  CDR3 for alpha chain variable domain of TCR clone 19261 (TRAV41, TRAJ45)
CAASYSGGGADGLTF

SEQ ID NO: 38522 - protein, 16 aa, Homo sapiens
  CDR3 for beta chain variable domain of TCR clone 19261 (TRBV19, TRBJ2-1)
CASSKAGPSSYNEQFF

SEQ ID NO: 38523 - protein, 18 aa, Homo sapiens
  CDR3 for alpha chain variable domain of TCR clone 19262 (TRAV13-1, TRAJ52)
CAASKRGAGGTSYGKLTF

SEQ ID NO: 38524 - protein, 13 aa, Homo sapiens
  CDR3 for beta chain variable domain of TCR clone 19262 (TRBV12-4, TRBJ1-2)
CACSLRQGKGYTF

SEQ ID NO: 38525 - protein, 19 aa, Homo sapiens
  CDR3 for alpha chain variable domain of TCR clone 19263 (TRAV38-1, TRAJ53)
CAFMKHGLESGGSNDKLTF

SEQ ID NO: 38526 - protein, 13 aa, Homo sapiens
  CDR3 for beta chain variable domain of TCR clone 19263 (TRBV19, TRBJ2-7)
CASSPRQSYEQYF

SEQ ID NO: 38527 - protein, 13 aa, Homo sapiens
  CDR3 for alpha chain variable domain of TCR clone 19264 (TRAV12-2, TRAJ52)
CAVGGTSYGKLTF

SEQ ID NO: 38528 - protein, 16 aa, Homo sapiens
  CDR3 for beta chain variable domain of TCR clone 19264 (TRBV4-2, TRBJ2-3)
CASSQELAGDTDTQYF

SEQ ID NO: 38529 - protein, 15 aa, Homo sapiens
  CDR3 for alpha chain variable domain of TCR clone 19265 (TRAV17, TRAJ57)
CAMGPSQGGSEKLVF

SEQ ID NO: 38530 - protein, 16 aa, Homo sapiens
  CDR3 for beta chain variable domain of TCR clone 19265 (TRBV12-4, TRBJ1-5)
CASSRPVGGSNQPQHF

SEQ ID NO: 38531 - protein, 14 aa, Homo sapiens
  CDR3 for alpha chain variable domain of TCR clone 19266 (TRAV12-2, TRAJ40)
CAVKIPSGSYKYIF

SEQ ID NO: 38532 - protein, 14 aa, Homo sapiens
  CDR3 for beta chain variable domain of TCR clone 19266 (TRBV20-1, TRBJ1-1)
CSAQTRIGGTEAFF

SEQ ID NO: 38533 - protein, 14 aa, Homo sapiens
  CDR3 for alpha chain variable domain of TCR clone 19267 (TRAV2, TRAJ37)
CAVDFTSNTGKLIF

SEQ ID NO: 38534 - protein, 15 aa, Homo sapiens
  CDR3 for beta chain variable domain of TCR clone 19267 (TRBV20-1, TRBJ1-1)
CSASRGVTGNTEAFC

SEQ ID NO: 38535 - protein, 12 aa, Homo sapiens
  CDR3 for alpha chain variable domain of TCR clone 19268 (TRAV17, TRAJ57)
CATDGGSEKLVF

SEQ ID NO: 38536 - protein, 16 aa, Homo sapiens
  CDR3 for beta chain variable domain of TCR clone 19268 (TRBV2, TRBJ2-1)
CASSVGGSLSYNEQLF

SEQ ID NO: 38537 - protein, 13 aa, Homo sapiens
  CDR3 for alpha chain variable domain of TCR clone 19269 (TRAV23/DV6, TRAJ40)
CAASPSGTYKYIF

SEQ ID NO: 38538 - protein, 17 aa, Homo sapiens
  CDR3 for beta chain variable domain of TCR clone 19269 (TRBV5-1, TRBJ2-1)
CASSLPSTSGSGDEQFF

SEQ ID NO: 38539 - protein, 12 aa, Homo sapiens
  CDR3 for alpha chain variable domain of TCR clone 19270 (TRAV12-3, TRAJ5)
CAMDTGRRALTF

SEQ ID NO: 38540 - protein, 13 aa, Homo sapiens
  CDR3 for beta chain variable domain of TCR clone 19270 (TRBV7-7, TRBJ2-2)
CASSLTSAGELSF

SEQ ID NO: 38541 - protein, 14 aa, Homo sapiens
  CDR3 for alpha chain variable domain of TCR clone 19271 (TRAV23/DV6, TRAJ22)
CAASVTGSARQLTF

SEQ ID NO: 38542 - protein, 16 aa, Homo sapiens
  CDR3 for beta chain variable domain of TCR clone 19271 (TRBV19, TRBJ2-2)
CASSFPGQGLAGELFF

SEQ ID NO: 38543 - protein, 16 aa, Homo sapiens
  CDR3 for alpha chain variable domain of TCR clone 19272 (TRAV26-1, TRAJ37)
CIVRGDDSGNTGKLIF

SEQ ID NO: 38544 - protein, 17 aa, Homo sapiens
  CDR3 for beta chain variable domain of TCR clone 19272 (TRBV4-1, TRBJ2-7)
CASSRDPLGVRGGEQYF

SEQ ID NO: 38545 - protein, 17 aa, Homo sapiens
  CDR3 for alpha chain variable domain of TCR clone 19273 (TRAV2, TRAJ22)
ILQVREADAAEQRQLTF

SEQ ID NO: 38546 - protein, 16 aa, Homo sapiens
  CDR3 for beta chain variable domain of TCR clone 19273 (TRBV2, TRBJ2-5)
CASSETQGVGEETQCF

SEQ ID NO: 38547 - protein, 16 aa, Homo sapiens
  CDR3 for alpha chain variable domain of TCR clone 19274 (TRAV12-3, TRAJ53)
CAMSPGSGGSNFKLTF

SEQ ID NO: 38548 - protein, 11 aa, Homo sapiens
  CDR3 for beta chain variable domain of TCR clone 19274 (TRBV29-1, TRBJ2-5)
CSEDRTGTQYF

SEQ ID NO: 38549 - protein, 11 aa, Homo sapiens
  CDR3 for alpha chain variable domain of TCR clone 19275 (TRAV2, TRAJ13)
CASGGYQKVTF

SEQ ID NO: 38550 - protein, 16 aa, Homo sapiens
  CDR3 for beta chain variable domain of TCR clone 19275 (TRBV7-9, TRBJ1-2)
CASSLGFSSGEDGYTF

SEQ ID NO: 38551 - protein, 14 aa, Homo sapiens
  CDR3 for alpha chain variable domain of TCR clone 19276 (TRAV13-1, TRAJ35)
CAASKGGFGNVLHC

SEQ ID NO: 38552 - protein, 15 aa, Homo sapiens
  CDR3 for beta chain variable domain of TCR clone 19276 (TRBV6-3, TRBJ2-7)
CASSSPGTVFYEQYF

SEQ ID NO: 38553 - protein, 15 aa, Homo sapiens
  CDR3 for alpha chain variable domain of TCR clone 19277 (TRAV26-1, TRAJ39)
CIVRVASNAGNMLTL

SEQ ID NO: 38554 - protein, 14 aa, Homo sapiens
  CDR3 for beta chain variable domain of TCR clone 19277 (TRBV7-6, TRBJ2-3)
CASSVAGGTDTQYF

SEQ ID NO: 38555 - protein, 14 aa, Homo sapiens
  CDR3 for alpha chain variable domain of TCR clone 19278 (TRAV8-3, TRAJ7)
CAAIELYGNNRLAS

SEQ ID NO: 38556 - protein, 15 aa, Homo sapiens
  CDR3 for beta chain variable domain of TCR clone 19278 (TRBV3-1, TRBJ2-1)
CASSTGDTNYNEQFF

SEQ ID NO: 38557 - protein, 12 aa, Homo sapiens
  CDR3 for alpha chain variable domain of TCR clone 19279 (TRAV12-3, TRAJ17)
CAMTLTGNKLTF

SEQ ID NO: 38558 - protein, 14 aa, Homo sapiens
  CDR3 for beta chain variable domain of TCR clone 19279 (TRBV4-1, TRBJ1-1)
CASSQQGNGNEAFF

SEQ ID NO: 38559 - protein, 15 aa, Homo sapiens
  CDR3 for alpha chain variable domain of TCR clone 19280 (TRAV27, TRAJ38)
CAARRNAGNTRKLIW

SEQ ID NO: 38560 - protein, 13 aa, Homo sapiens
  CDR3 for beta chain variable domain of TCR clone 19280 (TRBV12-5, TRBJ2-3)
CASGDRQSDTQYF

SEQ ID NO: 38561 - protein, 15 aa, Homo sapiens
  CDR3 for alpha chain variable domain of TCR clone 19281 (TRAV23/DV6, TRAJ18)
CAARYRGSTLGRLSF

SEQ ID NO: 38562 - protein, 13 aa, Homo sapiens
  CDR3 for beta chain variable domain of TCR clone 19281 (TRBV7-2, TRBJ2-7)
CASSSPSGSEQYF

SEQ ID NO: 38563 - protein, 16 aa, Homo sapiens
  CDR3 for alpha chain variable domain of TCR clone 19282 (TRAV3, TRAJ18)
CAVRDGRGSTLGRLYF

SEQ ID NO: 38564 - protein, 15 aa, Homo sapiens
  CDR3 for beta chain variable domain of TCR clone 19282 (TRBV7-9, TRBJ1-6)
CASSSPGRGDSPLHF

SEQ ID NO: 38565 - protein, 14 aa, Homo sapiens
  CDR3 for alpha chain variable domain of TCR clone 19283 (TRAV12-2, TRAJ11)
CAVNRESGYSTLTF

SEQ ID NO: 38566 - protein, 14 aa, Homo sapiens
  CDR3 for beta chain variable domain of TCR clone 19283 (TRBV6-1, TRBJ1-3)
CASVQGGGGNTIYF

SEQ ID NO: 38567 - protein, 12 aa, Homo sapiens
  CDR3 for alpha chain variable domain of TCR clone 19284 (TRAV26-2, TRAJ21)
CILKGNFNKFYS

SEQ ID NO: 38568 - protein, 14 aa, Homo sapiens
  CDR3 for beta chain variable domain of TCR clone 19284 (TRBV7-9, TRBJ1-1)
CASTPLQSYTEAFF

SEQ ID NO: 38569 - protein, 13 aa, Homo sapiens
  CDR3 for alpha chain variable domain of TCR clone 19285 (TRAV8-3, TRAJ44)
CAVVPGTASKLTF

SEQ ID NO: 38570 - protein, 12 aa, Homo sapiens
  CDR3 for beta chain variable domain of TCR clone 19285 (TRBV11-2, TRBJ2-1)
CASSPGNNEQFF

SEQ ID NO: 38571 - protein, 14 aa, Homo sapiens
  CDR3 for alpha chain variable domain of TCR clone 19286 (TRAV17, TRAJ16)
CATADFSDGQKLLF

SEQ ID NO: 38572 - protein, 15 aa, Homo sapiens
  CDR3 for beta chain variable domain of TCR clone 19286 (TRBV18, TRBJ2-1)
CASSPPRASYNEQFF

SEQ ID NO: 38573 - protein, 14 aa, Homo sapiens
  CDR3 for alpha chain variable domain of TCR clone 19287 (TRAV26-1, TRAJ38)
CIADNAGNNRKLIW

SEQ ID NO: 38574 - protein, 13 aa, Homo sapiens
  CDR3 for beta chain variable domain of TCR clone 19287 (TRBV20-1, TRBJ1-1)
CSASGGGNTEAFF

SEQ ID NO: 38575 - protein, 18 aa, Homo sapiens
  CDR3 for alpha chain variable domain of TCR clone 19288 (TRAV13-1, TRAJ52)
CAASKRSAGGTSYGKLTF

SEQ ID NO: 38576 - protein, 16 aa, Homo sapiens
  CDR3 for beta chain variable domain of TCR clone 19288 (TRBV19, TRBJ2-3)
CASSPGAASRTDTQYF

SEQ ID NO: 38577 - protein, 14 aa, Homo sapiens
  CDR3 for alpha chain variable domain of TCR clone 19289 (TRAV35, TRAJ22)
CAGLRPGSARQLTF

SEQ ID NO: 38578 - protein, 15 aa, Homo sapiens
  CDR3 for beta chain variable domain of TCR clone 19289 (TRBV12-4, TRBJ2-5)
CASRPPTGLQETQYF

SEQ ID NO: 38579 - protein, 14 aa, Homo sapiens
  CDR3 for alpha chain variable domain of TCR clone 19290 (TRAV1-1, TRAJ20)
CAVRDRTTSSALEP

SEQ ID NO: 38580 - protein, 18 aa, Homo sapiens
  CDR3 for beta chain variable domain of TCR clone 19290 (TRBV20-1, TRBJ2-6)
CSAETTPTHGSGANVLTF

SEQ ID NO: 38581 - protein, 11 aa, Homo sapiens
  CDR3 for alpha chain variable domain of TCR clone 19291 (TRAV1-2, TRAJ20)
CAVANDYKLSF

SEQ ID NO: 38582 - protein, 12 aa, Homo sapiens
  CDR3 for beta chain variable domain of TCR clone 19291 (TRBV11-2, TRBJ2-2)
CASSLGGGELFF

SEQ ID NO: 38583 - protein, 21 aa, Homo sapiens
  CDR3 for alpha chain variable domain of TCR clone 19292 (TRAV26-1, TRAJ38)
CIADNAGNNHIQNPDPAVYQL

SEQ ID NO: 38584 - protein, 12 aa, Homo sapiens
  CDR3 for beta chain variable domain of TCR clone 19292 (TRBV11-2, TRBJ2-2)
CASSLGGGELFF

SEQ ID NO: 38585 - protein, 12 aa, Homo sapiens
  CDR3 for alpha chain variable domain of TCR clone 19293 (TRAV17, TRAJ20)
CATDSNDYKLSF

SEQ ID NO: 38586 - protein, 14 aa, Homo sapiens
  CDR3 for beta chain variable domain of TCR clone 19293 (TRBV7-6, TRBJ2-3)
CASSLGTVTDTQYF

SEQ ID NO: 38587 - protein, 14 aa, Homo sapiens
  CDR3 for alpha chain variable domain of TCR clone 19294 (TRAV8-3, TRAJ4)
CAVGAAGGYNRLIF

SEQ ID NO: 38588 - protein, 15 aa, Homo sapiens
  CDR3 for beta chain variable domain of TCR clone 19294 (TRBV6-5, TRBJ2-1)
CASSYDAGAGNEQFF

SEQ ID NO: 38589 - protein, 23 aa, Homo sapiens
  CDR3 for alpha chain variable domain of TCR clone 19295 (TRAV26-1, )
CIADNAGDNHIQNPDPAVYQLRD

SEQ ID NO: 38590 - protein, 13 aa, Homo sapiens
  CDR3 for beta chain variable domain of TCR clone 19295 (TRBV20-1, TRBJ1-1)
CSARGGGNTEAFF

SEQ ID NO: 38591 - protein, 15 aa, Homo sapiens
  CDR3 for alpha chain variable domain of TCR clone 19296 (TRAV25, TRAJ52)
CAGRPGGTSYGNLTF

SEQ ID NO: 38592 - protein, 17 aa, Homo sapiens
  CDR3 for beta chain variable domain of TCR clone 19296 (TRBV7-8, TRBJ2-6)
CASSAGTGGAGANVLTF

SEQ ID NO: 38593 - protein, 17 aa, Homo sapiens
  CDR3 for alpha chain variable domain of TCR clone 19297 (TRAV3, TRAJ6)
CAVRDGPRAGGTYIPTF

SEQ ID NO: 38594 - protein, 14 aa, Homo sapiens
  CDR3 for beta chain variable domain of TCR clone 19297 (TRBV7-2, TRBJ2-7)
CASSPKTSFYEQYF

SEQ ID NO: 38595 - protein, 13 aa, Homo sapiens
  CDR3 for alpha chain variable domain of TCR clone 19298 (TRAV8-3, TRAJ36)
CAVGATGANNLSF

SEQ ID NO: 38596 - protein, 15 aa, Homo sapiens
  CDR3 for beta chain variable domain of TCR clone 19298 (TRBV7-2, TRBJ1-2)
CASSPRAGWNYGYTF

SEQ ID NO: 38597 - protein, 11 aa, Homo sapiens
  CDR3 for alpha chain variable domain of TCR clone 19299 (TRAV12-1, TRAJ30)
CVVNGQDKIIF

SEQ ID NO: 38598 - protein, 12 aa, Homo sapiens
  CDR3 for beta chain variable domain of TCR clone 19299 (TRBV11-1, TRBJ2-2)
CASKLFTGELFF

SEQ ID NO: 38599 - protein, 14 aa, Homo sapiens
  CDR3 for alpha chain variable domain of TCR clone 19300 (TRAV12-2, TRAJ13)
CAVKKTGGYQKVTF

SEQ ID NO: 38600 - protein, 15 aa, Homo sapiens
  CDR3 for beta chain variable domain of TCR clone 19300 (TRBV11-2, TRBJ2-2)
CAGSSDRVNAGELFF

SEQ ID NO: 38601 - protein, 14 aa, Homo sapiens
  CDR3 for alpha chain variable domain of TCR clone 19301 (TRAV2, TRAJ37)
CAVDFISNTGKLIF

SEQ ID NO: 38602 - protein, 15 aa, Homo sapiens
  CDR3 for beta chain variable domain of TCR clone 19301 (TRBV20-1, TRBJ1-1)
CSASRGVTGNTEAFF

SEQ ID NO: 38603 - protein, 12 aa, Homo sapiens
  CDR3 for alpha chain variable domain of TCR clone 19302 (TRAV27, TRAJ35)
CAGADFGNVPHC

SEQ ID NO: 38604 - protein, 16 aa, Homo sapiens
  CDR3 for beta chain variable domain of TCR clone 19302 (TRBV6-1, TRBJ2-1)
CASILRQGSSYNEQFF

SEQ ID NO: 38605 - protein, 15 aa, Homo sapiens
  CDR3 for alpha chain variable domain of TCR clone 19303 (TRAV12-2, TRAJ53)
CAVNGGGGSNYKLTF

SEQ ID NO: 38606 - protein, 15 aa, Homo sapiens
  CDR3 for beta chain variable domain of TCR clone 19303 (TRBV5-1, TRBJ1-1)
CASSLGEGENTEAFF

SEQ ID NO: 38607 - protein, 14 aa, Homo sapiens
  CDR3 for alpha chain variable domain of TCR clone 19304 (TRAV13-1, TRAJ44)
CAAKANGTASKLTF

SEQ ID NO: 38608 - protein, 17 aa, Homo sapiens
  CDR3 for beta chain variable domain of TCR clone 19304 (TRBV7-3, TRBJ2-3)
CASSLMKRMRGADTQYF

SEQ ID NO: 38609 - protein, 12 aa, Homo sapiens
  CDR3 for alpha chain variable domain of TCR clone 19305 (TRAV2, TRAJ9)
CAMGAGGFKTIF

SEQ ID NO: 38610 - protein, 16 aa, Homo sapiens
  CDR3 for beta chain variable domain of TCR clone 19305 (TRBV13, TRBJ2-2)
CASSPRTGEHTGELFF

SEQ ID NO: 38611 - protein, 15 aa, Homo sapiens
  CDR3 for alpha chain variable domain of TCR clone 19306 (TRAV4, TRAJ39)
CLVGPNNNAGNMLTF

SEQ ID NO: 38612 - protein, 12 aa, Homo sapiens
  CDR3 for beta chain variable domain of TCR clone 19306 (TRBV11-2, TRBJ2-2)
CASSLGGGELFF

SEQ ID NO: 38613 - protein, 19 aa, Homo sapiens
  CDR3 for alpha chain variable domain of TCR clone 19307 (TRAV26-1, TRAJ28)
CIVRVAHACSGAGSYQLTF

SEQ ID NO: 38614 - protein, 12 aa, Homo sapiens
  CDR3 for beta chain variable domain of TCR clone 19307 (TRBV27, TRBJ2-2)
CASKLFTGELFF

SEQ ID NO: 38615 - protein, 13 aa, Homo sapiens
  CDR3 for alpha chain variable domain of TCR clone 19308 (TRAV36/DV7, TRAJ37)
CAVFSSNTGRLIF

SEQ ID NO: 38616 - protein, 12 aa, Homo sapiens
  CDR3 for beta chain variable domain of TCR clone 19308 (TRBV11-2, TRBJ2-2)
CASSLGGGELFF

SEQ ID NO: 38617 - protein, 14 aa, Homo sapiens
  CDR3 for alpha chain variable domain of TCR clone 19309 (TRAV8-3, TRAJ4)
CAVGAAGGYHKLIF

SEQ ID NO: 38618 - protein, 15 aa, Homo sapiens
  CDR3 for beta chain variable domain of TCR clone 19309 (TRBV6-5, TRBJ2-1)
CASSYDAGAGNEQFF

SEQ ID NO: 38619 - protein, 16 aa, Homo sapiens
  CDR3 for alpha chain variable domain of TCR clone 19310 (TRAV30, TRAJ24)
CGTEIVDADSWGKFQF

SEQ ID NO: 38620 - protein, 15 aa, Homo sapiens
  CDR3 for beta chain variable domain of TCR clone 19310 (TRBV19, TRBJ2-1)
CASSSPGVPLDEQFF

SEQ ID NO: 38621 - protein, 16 aa, Homo sapiens
  CDR3 for alpha chain variable domain of TCR clone 19311 (TRAV38-1, TRAJ37)
CAFKGDGSSNTGKLIF

SEQ ID NO: 38622 - protein, 13 aa, Homo sapiens
  CDR3 for beta chain variable domain of TCR clone 19311 (TRBV12-4, TRBJ2-5)
CASSVFRRETQYF

SEQ ID NO: 38623 - protein, 14 aa, Homo sapiens
  CDR3 for alpha chain variable domain of TCR clone 19312 (TRAV1-2, TRAJ16)
CAVNRFSDGQKLLF

SEQ ID NO: 38624 - protein, 15 aa, Homo sapiens
  CDR3 for beta chain variable domain of TCR clone 19312 (TRBV5-1, TRBJ1-1)
CASSSTTGTNTEAFF

SEQ ID NO: 38625 - protein, 11 aa, Homo sapiens
  CDR3 for alpha chain variable domain of TCR clone 19313 (TRAV21, TRAJ34)
CAVTNTDTLIF

SEQ ID NO: 38626 - protein, 16 aa, Homo sapiens
  CDR3 for beta chain variable domain of TCR clone 19313 (TRBV18, TRBJ1-1)
CASSPGVGGRGGEAFF

SEQ ID NO: 38627 - protein, 11 aa, Homo sapiens
  CDR3 for alpha chain variable domain of TCR clone 19314 (TRAV1-1, TRAJ23)
CAVRQGRKLIF

SEQ ID NO: 38628 - protein, 20 aa, Homo sapiens
  CDR3 for beta chain variable domain of TCR clone 19314 (TRBV7-8, TRBJ2-2)
CASSHLFPGPTIHITGELFF

SEQ ID NO: 38629 - protein, 11 aa, Homo sapiens
  CDR3 for alpha chain variable domain of TCR clone 19315 (TRAV2, TRAJ21)
CAVFHFNKFYF

SEQ ID NO: 38630 - protein, 14 aa, Homo sapiens
  CDR3 for beta chain variable domain of TCR clone 19315 (TRBV15, TRBJ2-3)
CATRSGTSTDTQYF

SEQ ID NO: 38631 - protein, 14 aa, Homo sapiens
  CDR3 for alpha chain variable domain of TCR clone 19316 (TRAV38-1, TRAJ45)
CAYYSGGGAYGLTF

SEQ ID NO: 38632 - protein, 20 aa, Homo sapiens
  CDR3 for beta chain variable domain of TCR clone 19316 (TRBV28, TRBJ2-1)
CASTPIGRSPGLAGGNEQFF

SEQ ID NO: 38633 - protein, 14 aa, Homo sapiens
  CDR3 for alpha chain variable domain of TCR clone 19317 (TRAV26-1, TRAJ38)
CIADNAGNNRKLIW

SEQ ID NO: 38634 - protein, 13 aa, Homo sapiens
  CDR3 for beta chain variable domain of TCR clone 19317 (TRBV20-1, TRBJ1-1)
CSARGGGNTGAFF

SEQ ID NO: 38635 - protein, 13 aa, Homo sapiens
  CDR3 for alpha chain variable domain of TCR clone 19318 (TRAV27, TRAJ3)
ASLRGSSASKIIF

SEQ ID NO: 38636 - protein, 15 aa, Homo sapiens
  CDR3 for beta chain variable domain of TCR clone 19318 (TRBV28, TRBJ1-3)
RASSMGWASGNTIYF

SEQ ID NO: 38637 - protein, 11 aa, Homo sapiens
  CDR3 for alpha chain variable domain of TCR clone 19319 (TRAV20, TRAJ40)
CAVGGTYKYTF

SEQ ID NO: 38638 - protein, 15 aa, Homo sapiens
  CDR3 for beta chain variable domain of TCR clone 19319 (TRBV6-3, TRBJ2-2)
CASSFLATLTGELFF

SEQ ID NO: 38639 - protein, 13 aa, Homo sapiens
  CDR3 for alpha chain variable domain of TCR clone 19320 (TRAV3, TRAJ20)
CAVRDTPRYKPSF

SEQ ID NO: 38640 - protein, 16 aa, Homo sapiens
  CDR3 for beta chain variable domain of TCR clone 19320 (TRBV20-1, TRBJ2-7)
CSARAPGLALSYEQYF

SEQ ID NO: 38641 - protein, 14 aa, Homo sapiens
  CDR3 for alpha chain variable domain of TCR clone 19321 (TRAV38-1, TRAJ40)
CALRPTSGTYKYIF

SEQ ID NO: 38642 - protein, 17 aa, Homo sapiens
  CDR3 for beta chain variable domain of TCR clone 19321 (TRBV13, TRBJ2-3)
CASSLSRVAGGRNTQYF

SEQ ID NO: 38643 - protein, 12 aa, Homo sapiens
  CDR3 for alpha chain variable domain of TCR clone 19322 (TRAV29/DV5, TRAJ36)
CAARRKTGQTTS

SEQ ID NO: 38644 - protein, 14 aa, Homo sapiens
  CDR3 for beta chain variable domain of TCR clone 19322 (TRBV12-5, TRBJ2-5)
CASGSRTHQETQYF

SEQ ID NO: 38645 - protein, 14 aa, Homo sapiens
  CDR3 for alpha chain variable domain of TCR clone 19323 (TRAV1-2, TRAJ8)
CAVGEDTGFQKLVF

SEQ ID NO: 38646 - protein, 14 aa, Homo sapiens
  CDR3 for beta chain variable domain of TCR clone 19323 (TRBV6-3, TRBJ2-7)
CSSSPGTVFYEQYF

SEQ ID NO: 38647 - protein, 15 aa, Homo sapiens
  CDR3 for alpha chain variable domain of TCR clone 19324 (TRAV2, TRAJ37)
CAVGDGSSNTGELIF

SEQ ID NO: 38648 - protein, 13 aa, Homo sapiens
  CDR3 for beta chain variable domain of TCR clone 19324 (TRBV20-1, TRBJ2-7)
CSAQTGLSYEQYF

SEQ ID NO: 38649 - protein, 15 aa, Homo sapiens
  CDR3 for alpha chain variable domain of TCR clone 19325 (TRAV25, TRAJ53)
CPTSNSGGSNYKLAF

SEQ ID NO: 38650 - protein, 14 aa, Homo sapiens
  CDR3 for beta chain variable domain of TCR clone 19325 (TRBV11-2, TRBJ2-3)
CASSRLARTDTQYF

SEQ ID NO: 38651 - protein, 13 aa, Homo sapiens
  CDR3 for alpha chain variable domain of TCR clone 19326 (TRAV1-1, TRAJ11)
CAVHSSPGSTLTF

SEQ ID NO: 38652 - protein, 14 aa, Homo sapiens
  CDR3 for beta chain variable domain of TCR clone 19326 (TRBV6-1, TRBJ2-7)
CASSEGGGQYEQYF

SEQ ID NO: 38653 - protein, 14 aa, Homo sapiens
  CDR3 for alpha chain variable domain of TCR clone 19327 (TRAV3, TRAJ22)
CAVRDYGSARQLTF

SEQ ID NO: 38654 - protein, 13 aa, Homo sapiens
  CDR3 for beta chain variable domain of TCR clone 19327 (TRBV11-2, TRBJ2-5)
CASGYGAKETQYF

SEQ ID NO: 38655 - protein, 15 aa, Homo sapiens
  CDR3 for alpha chain variable domain of TCR clone 19328 (TRAV26-1, TRAJ29)
CIVRVEGSGNTPLVF

SEQ ID NO: 38656 - protein, 14 aa, Homo sapiens
  CDR3 for beta chain variable domain of TCR clone 19328 (TRBV18, TRBJ2-5)
CASSPGVSQETQYV

SEQ ID NO: 38657 - protein, 11 aa, Homo sapiens
  CDR3 for alpha chain variable domain of TCR clone 19329 (TRAV21, TRAJ34)
CAVTNTDKLIF

SEQ ID NO: 38658 - protein, 14 aa, Homo sapiens
  CDR3 for beta chain variable domain of TCR clone 19329 (TRBV18, TRBJ2-7)
CASSPRGGAYEQYF

SEQ ID NO: 38659 - protein, 11 aa, Homo sapiens
  CDR3 for alpha chain variable domain of TCR clone 19330 (TRAV1-2, TRAJ40)
CAVPGTYKYIS

SEQ ID NO: 38660 - protein, 16 aa, Homo sapiens
  CDR3 for beta chain variable domain of TCR clone 19330 (TRBV29-1, TRBJ2-7)
CSVEVVGTSGSYEQYF

SEQ ID NO: 38661 - protein, 14 aa, Homo sapiens
  CDR3 for alpha chain variable domain of TCR clone 19331 (TRAV12-1, TRAJ12)
CVVTRMDSSYKLIF

SEQ ID NO: 38662 - protein, 13 aa, Homo sapiens
  CDR3 for beta chain variable domain of TCR clone 19331 (TRBV20-1, TRBJ1-1)
CSARGGGNTEAVF

SEQ ID NO: 38663 - protein, 13 aa, Homo sapiens
  CDR3 for alpha chain variable domain of TCR clone 19332 (TRAV1-1, TRAJ9)
CDAKNTGGFKTIF

SEQ ID NO: 38664 - protein, 14 aa, Homo sapiens
  CDR3 for beta chain variable domain of TCR clone 19332 (TRBV20-1, TRBJ2-1)
CSAQIGGSANEQFF

SEQ ID NO: 38665 - protein, 12 aa, Homo sapiens
  CDR3 for alpha chain variable domain of TCR clone 19333 (TRAV12-1, TRAJ40)
CVVYSGTYKYIF

SEQ ID NO: 38666 - protein, 17 aa, Homo sapiens
  CDR3 for beta chain variable domain of TCR clone 19333 (TRBV11-2, TRBJ2-1)
CASSLYPPGVEYNEQFF

SEQ ID NO: 38667 - protein, 12 aa, Homo sapiens
  CDR3 for alpha chain variable domain of TCR clone 19334 (TRAV12-3, TRAJ17)
CAMTLTGNKLTF

SEQ ID NO: 38668 - protein, 15 aa, Homo sapiens
  CDR3 for beta chain variable domain of TCR clone 19334 (TRBV7-9, TRBJ1-4)
CASSRTGGFNEKLFF

SEQ ID NO: 38669 - protein, 15 aa, Homo sapiens
  CDR3 for alpha chain variable domain of TCR clone 19335 (TRAV35, TRAJ50)
CAGQLRKTSYDKVIF

SEQ ID NO: 38670 - protein, 12 aa, Homo sapiens
  CDR3 for beta chain variable domain of TCR clone 19335 (TRBV5-1, TRBJ2-5)
CAGSLGLETQYF

SEQ ID NO: 38671 - protein, 16 aa, Homo sapiens
  CDR3 for alpha chain variable domain of TCR clone 19336 (TRAV1-2, TRAJ10)
CAVRGVLTGGGNKLTF

SEQ ID NO: 38672 - protein, 13 aa, Homo sapiens
  CDR3 for beta chain variable domain of TCR clone 19336 (TRBV4-2, TRBJ1-1)
CASSQAGNTEAFF

SEQ ID NO: 38673 - protein, 14 aa, Homo sapiens
  CDR3 for alpha chain variable domain of TCR clone 19337 (TRAV3, TRAJ7)
CAVRGEEREQQTRF

SEQ ID NO: 38674 - protein, 12 aa, Homo sapiens
  CDR3 for beta chain variable domain of TCR clone 19337 (TRBV7-8, TRBJ2-7)
CASSLGDREQYF

SEQ ID NO: 38675 - protein, 14 aa, Homo sapiens
  CDR3 for alpha chain variable domain of TCR clone 19338 (TRAV13-1, TRAJ44)
CAAKATGTASKLTF

SEQ ID NO: 38676 - protein, 16 aa, Homo sapiens
  CDR3 for beta chain variable domain of TCR clone 19338 (TRBV7-9, TRBJ2-6)
CASSLKGPLRANDLTF

SEQ ID NO: 38677 - protein, 13 aa, Homo sapiens
  CDR3 for alpha chain variable domain of TCR clone 19339 (TRAV12-3, TRAJ7)
CAMTPYGNNRLAF

SEQ ID NO: 38678 - protein, 16 aa, Homo sapiens
  CDR3 for beta chain variable domain of TCR clone 19339 (TRBV20-1, TRBJ1-4)
CSARPYGGELNDKLFF

SEQ ID NO: 38679 - protein, 15 aa, Homo sapiens
  CDR3 for alpha chain variable domain of TCR clone 19340 (TRAV35, TRAJ50)
CAGQLRKTSHDKVIF

SEQ ID NO: 38680 - protein, 12 aa, Homo sapiens
  CDR3 for beta chain variable domain of TCR clone 19340 (TRBV5-1, TRBJ2-5)
CASSLGLETQYF

SEQ ID NO: 38681 - protein, 13 aa, Homo sapiens
  CDR3 for alpha chain variable domain of TCR clone 19341 (TRAV19, TRAJ57)
CALLQGGSEKLVF

SEQ ID NO: 38682 - protein, 15 aa, Homo sapiens
  CDR3 for beta chain variable domain of TCR clone 19341 (TRBV9, TRBJ1-6)
CASSVAGTGDSPLHF

SEQ ID NO: 38683 - protein, 16 aa, Homo sapiens
  CDR3 for alpha chain variable domain of TCR clone 19342 (TRAV4, TRAJ22)
CLVGDLYSGSARQLTF

SEQ ID NO: 38684 - protein, 16 aa, Homo sapiens
  CDR3 for beta chain variable domain of TCR clone 19342 (TRBV7-9, TRBJ2-1)
CASSDVAGGPYNEQFF

SEQ ID NO: 38685 - protein, 14 aa, Homo sapiens
  CDR3 for alpha chain variable domain of TCR clone 19343 (TRAV9-2, TRAJ39)
CALYIYNAGNMLTF

SEQ ID NO: 38686 - protein, 16 aa, Homo sapiens
  CDR3 for beta chain variable domain of TCR clone 19343 (TRBV6-1, TRBJ1-3)
CASVQGGVETPYILER

SEQ ID NO: 38687 - protein, 12 aa, Homo sapiens
  CDR3 for alpha chain variable domain of TCR clone 19344 (TRAV8-3, TRAJ20)
CAVGANDYKLIF

SEQ ID NO: 38688 - protein, 16 aa, Homo sapiens
  CDR3 for beta chain variable domain of TCR clone 19344 (TRBV19, TRBJ2-2)
CASRSPGTGATGELFF

SEQ ID NO: 38689 - protein, 18 aa, Homo sapiens
  CDR3 for alpha chain variable domain of TCR clone 19345 (TRAV21, TRAJ52)
SAVRPSPAGGTSYGKLTF

SEQ ID NO: 38690 - protein, 17 aa, Homo sapiens
  CDR3 for beta chain variable domain of TCR clone 19345 (TRBV13, TRBJ2-3)
CASSLSRVAGGRNTQYF

SEQ ID NO: 38691 - protein, 11 aa, Homo sapiens
  CDR3 for alpha chain variable domain of TCR clone 19346 (TRAV21, TRAJ34)
CAHYNTDKLIF

SEQ ID NO: 38692 - protein, 14 aa, Homo sapiens
  CDR3 for beta chain variable domain of TCR clone 19346 (TRBV12-5, TRBJ2-5)
CASGSRTHQETQYF

SEQ ID NO: 38693 - protein, 12 aa, Homo sapiens
  CDR3 for alpha chain variable domain of TCR clone 19347 (TRAV2, TRAJ5)
CALDTGGRALTF

SEQ ID NO: 38694 - protein, 15 aa, Homo sapiens
  CDR3 for beta chain variable domain of TCR clone 19347 (TRBV10-3, TRBJ2-1)
CAISDVQDRAYEQFF

SEQ ID NO: 38695 - protein, 17 aa, Homo sapiens
  CDR3 for alpha chain variable domain of TCR clone 19348 (TRAV13-1, TRAJ52)
CAAGRNAGGTSYGRLTF

SEQ ID NO: 38696 - protein, 13 aa, Homo sapiens
  CDR3 for beta chain variable domain of TCR clone 19348 (TRBV7-2, TRBJ1-1)
CASNLKGAKVAFF

SEQ ID NO: 38697 - protein, 18 aa, Homo sapiens
  CDR3 for alpha chain variable domain of TCR clone 19349 (TRAV21, TRAJ52)
CAVRPSPAGGTSYGKLTF

SEQ ID NO: 38698 - protein, 17 aa, Homo sapiens
  CDR3 for beta chain variable domain of TCR clone 19349 (TRBV13, TRBJ2-3)
CASSLSRVAGGRNTLYF

SEQ ID NO: 38699 - protein, 15 aa, Homo sapiens
  CDR3 for alpha chain variable domain of TCR clone 19350 (TRAV8-2, TRAJ28)
CVVSESGAGSYQLTF

SEQ ID NO: 38700 - protein, 16 aa, Homo sapiens
  CDR3 for beta chain variable domain of TCR clone 19350 (TRBV19, TRBJ2-1)
CASSKAGPSSYNEQFF

SEQ ID NO: 38701 - protein, 12 aa, Homo sapiens
  CDR3 for alpha chain variable domain of TCR clone 19351 (TRAV17, TRAJ4)
CATDVGYNKLIF

SEQ ID NO: 38702 - protein, 13 aa, Homo sapiens
  CDR3 for beta chain variable domain of TCR clone 19351 (TRBV29-1, TRBJ2-2)
CSTTGVNTGELFF

SEQ ID NO: 38703 - protein, 17 aa, Homo sapiens
  CDR3 for alpha chain variable domain of TCR clone 19352 (TRAV26-2, TRAJ42)
CILRDGGYGGSQGNLIF

SEQ ID NO: 38704 - protein, 16 aa, Homo sapiens
  CDR3 for beta chain variable domain of TCR clone 19352 (TRBV12-4, TRBJ2-7)
CASSLIGGTGTYEQYF

SEQ ID NO: 38705 - protein, 13 aa, Homo sapiens
  CDR3 for alpha chain variable domain of TCR clone 19353 (TRAV2, TRAJ40)
CAVVTSGTYKYIF

SEQ ID NO: 38706 - protein, 15 aa, Homo sapiens
  CDR3 for beta chain variable domain of TCR clone 19353 (TRBV11-3, TRBJ2-3)
CASLKDGREGDTQYC

SEQ ID NO: 38707 - protein, 11 aa, Homo sapiens
  CDR3 for alpha chain variable domain of TCR clone 19354 (TRAV17, TRAJ9)
CGFTGGFKTIF

SEQ ID NO: 38708 - protein, 14 aa, Homo sapiens
  CDR3 for beta chain variable domain of TCR clone 19354 (TRBV7-9, TRBJ2-2)
CTSSLVQDTGELFF

SEQ ID NO: 38709 - protein, 11 aa, Homo sapiens
  CDR3 for alpha chain variable domain of TCR clone 19355 (TRAV2, TRAJ13)
CASGGYQKVTF

SEQ ID NO: 38710 - protein, 16 aa, Homo sapiens
  CDR3 for beta chain variable domain of TCR clone 19355 (TRBV6-1, TRBJ2-5)
CAGSETLDRGAETQYF

SEQ ID NO: 38711 - protein, 16 aa, Homo sapiens
  CDR3 for alpha chain variable domain of TCR clone 19356 (TRAV3, TRAJ37)
CAVRPHGSGNTGKLIF

SEQ ID NO: 38712 - protein, 13 aa, Homo sapiens
  CDR3 for beta chain variable domain of TCR clone 19356 (TRBV12-4, TRBJ2-3)
CASSSPLGGTQYF

SEQ ID NO: 38713 - protein, 12 aa, Homo sapiens
  CDR3 for alpha chain variable domain of TCR clone 19357 (TRAV21, TRAJ11)
CAATSGYRTLTF

SEQ ID NO: 38714 - protein, 14 aa, Homo sapiens
  CDR3 for beta chain variable domain of TCR clone 19357 (TRBV20-1, TRBJ2-7)
CSAPELAGVGEQYF

SEQ ID NO: 38715 - protein, 13 aa, Homo sapiens
  CDR3 for alpha chain variable domain of TCR clone 19358 (TRAV12-1, TRAJ29)
CVVNGPGNTPLVF

SEQ ID NO: 38716 - protein, 12 aa, Homo sapiens
  CDR3 for beta chain variable domain of TCR clone 19358 (TRBV7-2, TRBJ2-5)
CQQQGGLETQYF

SEQ ID NO: 38717 - protein, 12 aa, Homo sapiens
  CDR3 for alpha chain variable domain of TCR clone 19359 (TRAV6, TRAJ27)
CSRIRGAGKSTF

SEQ ID NO: 38718 - protein, 16 aa, Homo sapiens
  CDR3 for beta chain variable domain of TCR clone 19359 (TRBV9, TRBJ2-1)
CASSVGGGGNYNEQFF

SEQ ID NO: 38719 - protein, 12 aa, Homo sapiens
  CDR3 for alpha chain variable domain of TCR clone 19360 (TRAV12-2, TRAJ42)
CAVGGSQGNLIF

SEQ ID NO: 38720 - protein, 15 aa, Homo sapiens
  CDR3 for beta chain variable domain of TCR clone 19360 (TRBV7-3, TRBJ2-2)
CQQLKAGDLVRGAVF

SEQ ID NO: 38721 - protein, 19 aa, Homo sapiens
  CDR3 for alpha chain variable domain of TCR clone 19361 (TRAV26-1, TRAJ52)
CIVRAHRNAGGTSYGKLTF

SEQ ID NO: 38722 - protein, 15 aa, Homo sapiens
  CDR3 for beta chain variable domain of TCR clone 19361 (TRBV29-1, TRBJ2-1)
CSGRDRRSSYNEQFF

SEQ ID NO: 38723 - protein, 12 aa, Homo sapiens
  CDR3 for alpha chain variable domain of TCR clone 19362 (TRAV16, TRAJ10)
CSRTGGGNKLTF

SEQ ID NO: 38724 - protein, 15 aa, Homo sapiens
  CDR3 for beta chain variable domain of TCR clone 19362 (TRBV20-1, TRBJ2-7)
CSARDRVSGMDEQYF

SEQ ID NO: 38725 - protein, 12 aa, Homo sapiens
  CDR3 for alpha chain variable domain of TCR clone 19363 (TRAV12-1, TRAJ23)
CVVNNQGGKLIF

SEQ ID NO: 38726 - protein, 16 aa, Homo sapiens
  CDR3 for beta chain variable domain of TCR clone 19363 (TRBV11-1, TRBJ2-7)
CASGAQTGTLSYEQYF

SEQ ID NO: 38727 - protein, 16 aa, Homo sapiens
  CDR3 for alpha chain variable domain of TCR clone 19364 (TRAV3, TRAJ37)
CAVRGKGPGNTGKLIF

SEQ ID NO: 38728 - protein, 13 aa, Homo sapiens
  CDR3 for beta chain variable domain of TCR clone 19364 (TRBV14, TRBJ2-7)
CASSQDRRYEQYF

SEQ ID NO: 38729 - protein, 13 aa, Homo sapiens
  CDR3 for alpha chain variable domain of TCR clone 19365 (TRAV2, TRAJ15)
CAVASQAGTAPIF

SEQ ID NO: 38730 - protein, 16 aa, Homo sapiens
  CDR3 for beta chain variable domain of TCR clone 19365 (TRBV5-1, TRBJ1-1)
CASSSGGNSLNTEAFF

SEQ ID NO: 38731 - protein, 10 aa, Homo sapiens
  CDR3 for alpha chain variable domain of TCR clone 19366 (TRAV12-2, TRAJ43)
CAVKVLSMRF

SEQ ID NO: 38732 - protein, 14 aa, Homo sapiens
  CDR3 for beta chain variable domain of TCR clone 19366 (TRBV11-2, TRBJ2-7)
SASSLGNSLYEQYF

SEQ ID NO: 38733 - protein, 14 aa, Homo sapiens
  CDR3 for alpha chain variable domain of TCR clone 19367 (TRAV12-2, TRAJ11)
CAVNRESGYSTLTF

SEQ ID NO: 38734 - protein, 10 aa, Homo sapiens
  CDR3 for beta chain variable domain of TCR clone 19367 (TRBV20-1, TRBJ2-5)
CSARFETQYL

SEQ ID NO: 38735 - protein, 18 aa, Homo sapiens
  CDR3 for alpha chain variable domain of TCR clone 19368 (TRAV12-3, TRAJ52)
CAMSRTNAGGTSYGNLTF

SEQ ID NO: 38736 - protein, 17 aa, Homo sapiens
  CDR3 for beta chain variable domain of TCR clone 19368 (TRBV7-3, TRBJ2-3)
CASSLMKRMRGADTQYF

SEQ ID NO: 38737 - protein, 14 aa, Homo sapiens
  CDR3 for alpha chain variable domain of TCR clone 19369 (TRAV1-2, TRAJ8)
CAVREDTGFQKLVF

SEQ ID NO: 38738 - protein, 15 aa, Homo sapiens
  CDR3 for beta chain variable domain of TCR clone 19369 (TRBV6-3, TRBJ2-7)
CASSYPGTVFYEQYF

SEQ ID NO: 38739 - protein, 14 aa, Homo sapiens
  CDR3 for alpha chain variable domain of TCR clone 19370 (TRAV17, TRAJ22)
CSTSPSGSARQLTF

SEQ ID NO: 38740 - protein, 15 aa, Homo sapiens
  CDR3 for beta chain variable domain of TCR clone 19370 (TRBV4-1, TRBJ2-5)
CASSQWDLYQETQYF

SEQ ID NO: 38741 - protein, 12 aa, Homo sapiens
  CDR3 for alpha chain variable domain of TCR clone 19371 (TRAV13-2, TRAJ8)
CAPWLGFQKLVF

SEQ ID NO: 38742 - protein, 15 aa, Homo sapiens
  CDR3 for beta chain variable domain of TCR clone 19371 (TRBV20-1, TRBJ2-7)
CSARDRVSGMDEQYF

SEQ ID NO: 38743 - protein, 15 aa, Homo sapiens
  CDR3 for alpha chain variable domain of TCR clone 19372 (TRAV8-3, TRAJ45)
CASSDSGGGADGLTF

SEQ ID NO: 38744 - protein, 13 aa, Homo sapiens
  CDR3 for beta chain variable domain of TCR clone 19372 (TRBV10-3, TRBJ2-7)
CASKLAVNYEQYF

SEQ ID NO: 38745 - protein, 16 aa, Homo sapiens
  CDR3 for alpha chain variable domain of TCR clone 19373 (TRAV27, TRAJ13)
CSGAKSDSGGYQKVTF

SEQ ID NO: 38746 - protein, 15 aa, Homo sapiens
  CDR3 for beta chain variable domain of TCR clone 19373 (TRBV29-1, TRBJ2-1)
CSVGRHALFYNEQFF

SEQ ID NO: 38747 - protein, 13 aa, Homo sapiens
  CDR3 for alpha chain variable domain of TCR clone 19374 (TRAV8-3, TRAJ21)
CAVGAYNFNKFYF

SEQ ID NO: 38748 - protein, 16 aa, Homo sapiens
  CDR3 for beta chain variable domain of TCR clone 19374 (TRBV19, TRBJ2-1)
CASSMGGGSSYNEQSF

SEQ ID NO: 38749 - protein, 15 aa, Homo sapiens
  CDR3 for alpha chain variable domain of TCR clone 19375 (TRAV27, TRAJ38)
CAARRNAGNNRKLIW

SEQ ID NO: 38750 - protein, 13 aa, Homo sapiens
  CDR3 for beta chain variable domain of TCR clone 19375 (TRBV12-5, TRBJ2-3)
YASGDRQSDTQYF

SEQ ID NO: 38751 - protein, 14 aa, Homo sapiens
  CDR3 for alpha chain variable domain of TCR clone 19376 (TRAV35, TRAJ33)
CAGSSQDSNYQLIG

SEQ ID NO: 38752 - protein, 15 aa, Homo sapiens
  CDR3 for beta chain variable domain of TCR clone 19376 (TRBV20-1, TRBJ2-7)
CSAESGTSGAYEQYF

SEQ ID NO: 38753 - protein, 15 aa, Homo sapiens
  CDR3 for alpha chain variable domain of TCR clone 19377 (TRAV12-3, TRAJ49)
CAMAVTPNTGNQFYF

SEQ ID NO: 38754 - protein, 18 aa, Homo sapiens
  CDR3 for beta chain variable domain of TCR clone 19377 (TRBV4-1, TRBJ1-5)
CASSQDPRGQGLNQPQHS

SEQ ID NO: 38755 - protein, 16 aa, Homo sapiens
  CDR3 for alpha chain variable domain of TCR clone 19378 (TRAV1-2, TRAJ10)
CAVRGVLTGGGNKLTF

SEQ ID NO: 38756 - protein, 12 aa, Homo sapiens
  CDR3 for beta chain variable domain of TCR clone 19378 (TRBV7-8, TRBJ2-7)
CASSLGDREQCF

SEQ ID NO: 38757 - protein, 14 aa, Homo sapiens
  CDR3 for alpha chain variable domain of TCR clone 19379 (TRAV2, TRAJ37)
YAVDFTSNTGKLIF

SEQ ID NO: 38758 - protein, 15 aa, Homo sapiens
  CDR3 for beta chain variable domain of TCR clone 19379 (TRBV20-1, TRBJ1-1)
CSASRGVTGNTEAFF

SEQ ID NO: 38759 - protein, 14 aa, Homo sapiens
  CDR3 for alpha chain variable domain of TCR clone 19380 (TRAV1-2, TRAJ8)
CAVREDTGFQKLVF

SEQ ID NO: 38760 - protein, 15 aa, Homo sapiens
  CDR3 for beta chain variable domain of TCR clone 19380 (TRBV2, TRBJ2-1)
CASSEEREGDNEQFF

SEQ ID NO: 38761 - protein, 18 aa, Homo sapiens
  CDR3 for alpha chain variable domain of TCR clone 19381 (TRAV26-1, TRAJ52)
CIIRVEGAGGTSYGKLTF

SEQ ID NO: 38762 - protein, 13 aa, Homo sapiens
  CDR3 for beta chain variable domain of TCR clone 19381 (TRBV7-3, TRBJ1-2)
CASSLKRGYGYTF

SEQ ID NO: 38763 - protein, 14 aa, Homo sapiens
  CDR3 for alpha chain variable domain of TCR clone 19382 (TRAV12-2, TRAJ5)
CAVNRSTGRRALTF

SEQ ID NO: 38764 - protein, 12 aa, Homo sapiens
  CDR3 for beta chain variable domain of TCR clone 19382 (TRBV19, TRBJ1-5)
CASSIAQQPRHF

SEQ ID NO: 38765 - protein, 13 aa, Homo sapiens
  CDR3 for alpha chain variable domain of TCR clone 19383 (TRAV35, TRAJ42)
CAGFPGSQGNRIF

SEQ ID NO: 38766 - protein, 13 aa, Homo sapiens
  CDR3 for beta chain variable domain of TCR clone 19383 (TRBV29-1, TRBJ2-1)
CSVEGGRVNEQFF

SEQ ID NO: 38767 - protein, 15 aa, Homo sapiens
  CDR3 for alpha chain variable domain of TCR clone 19384 (TRAV17, TRAJ57)
CATGPSQGGSEKLVF

SEQ ID NO: 38768 - protein, 16 aa, Homo sapiens
  CDR3 for beta chain variable domain of TCR clone 19384 (TRBV12-4, TRBJ1-5)
CASSRPVGGSNQPQYF

SEQ ID NO: 38769 - protein, 11 aa, Homo sapiens
  CDR3 for alpha chain variable domain of TCR clone 19385 (TRAV2, TRAJ21)
CAVFNFDKFYF

SEQ ID NO: 38770 - protein, 14 aa, Homo sapiens
  CDR3 for beta chain variable domain of TCR clone 19385 (TRBV15, TRBJ2-3)
CATRSGTSTDTQYF

SEQ ID NO: 38771 - protein, 13 aa, Homo sapiens
  CDR3 for alpha chain variable domain of TCR clone 19386 (TRAV17, TRAJ9)
CATDYTVGFKTIF

SEQ ID NO: 38772 - protein, 16 aa, Homo sapiens
  CDR3 for beta chain variable domain of TCR clone 19386 (TRBV7-7, TRBJ2-1)
CASSLASGTSYNEQFF

SEQ ID NO: 38773 - protein, 14 aa, Homo sapiens
  CDR3 for alpha chain variable domain of TCR clone 19387 (TRAV12-2, TRAJ40)
CAVKIPSGAYKYIF

SEQ ID NO: 38774 - protein, 13 aa, Homo sapiens
  CDR3 for beta chain variable domain of TCR clone 19387 (TRBV7-9, TRBJ1-2)
CASSLKQNYGYTF

SEQ ID NO: 38775 - protein, 14 aa, Homo sapiens
  CDR3 for alpha chain variable domain of TCR clone 19388 (TRAV12-2, TRAJ13)
CAVKKTGGYQKVTF

SEQ ID NO: 38776 - protein, 14 aa, Homo sapiens
  CDR3 for beta chain variable domain of TCR clone 19388 (TRBV7-8, TRBJ2-3)
CASSLEAGTDTQYF

SEQ ID NO: 38777 - protein, 14 aa, Homo sapiens
  CDR3 for alpha chain variable domain of TCR clone 19389 (TRAV12-2, TRAJ53)
CAVKGGGSNYKLTF

SEQ ID NO: 38778 - protein, 14 aa, Homo sapiens
  CDR3 for beta chain variable domain of TCR clone 19389 (TRBV7-7, TRBJ2-2)
CATRQDADTGELFF

SEQ ID NO: 38779 - protein, 15 aa, Homo sapiens
  CDR3 for alpha chain variable domain of TCR clone 19390 (TRAV21, TRAJ32)
CAVNSYGGATNKLIF

SEQ ID NO: 38780 - protein, 15 aa, Homo sapiens
  CDR3 for beta chain variable domain of TCR clone 19390 (TRBV27, TRBJ2-1)
CASSNGGGSSNEQFF

SEQ ID NO: 38781 - protein, 15 aa, Homo sapiens
  CDR3 for alpha chain variable domain of TCR clone 19391 (TRAV16, TRAJ26)
CITVLQRNYGQNFVF

SEQ ID NO: 38782 - protein, 15 aa, Homo sapiens
  CDR3 for beta chain variable domain of TCR clone 19391 (TRBV7-2, TRBJ2-3)
CASSLTGTSTDTQYF

SEQ ID NO: 38783 - protein, 12 aa, Homo sapiens
  CDR3 for alpha chain variable domain of TCR clone 19392 (TRAV21, TRAJ49)
CAVNDGGNKFYF

SEQ ID NO: 38784 - protein, 14 aa, Homo sapiens
  CDR3 for beta chain variable domain of TCR clone 19392 (TRBV18, TRBJ2-7)
CASSPRGGSYEQYF

SEQ ID NO: 38785 - protein, 15 aa, Homo sapiens
  CDR3 for alpha chain variable domain of TCR clone 19393 (TRAV3, TRAJ20)
CAVRDIKLSDYKLSF

SEQ ID NO: 38786 - protein, 15 aa, Homo sapiens
  CDR3 for beta chain variable domain of TCR clone 19393 (TRBV7-9, TRBJ1-6)
CASSSPGRGSSPLHF

SEQ ID NO: 38787 - protein, 14 aa, Homo sapiens
  CDR3 for alpha chain variable domain of TCR clone 19394 (TRAV2, TRAJ23)
CAVGLRNQGGKLIL

SEQ ID NO: 38788 - protein, 13 aa, Homo sapiens
  CDR3 for beta chain variable domain of TCR clone 19394 (TRBV12-4, TRBJ2-5)
CASSPGTEETQYF

SEQ ID NO: 38789 - protein, 13 aa, Homo sapiens
  CDR3 for alpha chain variable domain of TCR clone 19395 (TRAV13-1, TRAJ6)
CAASRGGSYIPTF

SEQ ID NO: 38790 - protein, 11 aa, Homo sapiens
  CDR3 for beta chain variable domain of TCR clone 19395 (TRBV7-8, TRBJ2-7)
CASSLSLEQYF

SEQ ID NO: 38791 - protein, 15 aa, Homo sapiens
  CDR3 for alpha chain variable domain of TCR clone 19396 (TRAV8-2, TRAJ40)
CVVVGTTSGTYKYIF

SEQ ID NO: 38792 - protein, 16 aa, Homo sapiens
  CDR3 for beta chain variable domain of TCR clone 19396 (TRBV7-3, TRBJ2-1)
CASSLEGYRSYNEQFF

SEQ ID NO: 38793 - protein, 13 aa, Homo sapiens
  CDR3 for alpha chain variable domain of TCR clone 19397 (TRAV17, TRAJ5)
CAPMDTGRRALTF

SEQ ID NO: 38794 - protein, 14 aa, Homo sapiens
  CDR3 for beta chain variable domain of TCR clone 19397 (TRBV6-6, TRBJ2-5)
CQQSRGGLEETQYF

SEQ ID NO: 38795 - protein, 15 aa, Homo sapiens
  CDR3 for alpha chain variable domain of TCR clone 19398 (TRAV38-1, TRAJ37)
CAFIHGSVNTGKLIF

SEQ ID NO: 38796 - protein, 12 aa, Homo sapiens
  CDR3 for beta chain variable domain of TCR clone 19398 (TRBV7-9, TRBJ2-7)
CASSFGSYEQYF

SEQ ID NO: 38797 - protein, 12 aa, Homo sapiens
  CDR3 for alpha chain variable domain of TCR clone 19399 (TRAV27, TRAJ41)
CAGRNSGYALNF

SEQ ID NO: 38798 - protein, 15 aa, Homo sapiens
  CDR3 for beta chain variable domain of TCR clone 19399 (TRBV20-1, TRBJ1-5)
CSATSDRGLGRPQHF

SEQ ID NO: 38799 - protein, 13 aa, Homo sapiens
  CDR3 for alpha chain variable domain of TCR clone 19400 (TRAV27, TRAJ3)
ASLRGSSTSKIIF

SEQ ID NO: 38800 - protein, 15 aa, Homo sapiens
  CDR3 for beta chain variable domain of TCR clone 19400 (TRBV28, TRBJ1-3)
CASSMGWASGNTIYF

SEQ ID NO: 38801 - protein, 14 aa, Homo sapiens
  CDR3 for alpha chain variable domain of TCR clone 19401 (TRAV27, TRAJ13)
CRSSNSGGYQEVTF

SEQ ID NO: 38802 - protein, 14 aa, Homo sapiens
  CDR3 for beta chain variable domain of TCR clone 19401 (TRBV7-6, TRBJ2-1)
CASSLGGGADEQFF

SEQ ID NO: 38803 - protein, 14 aa, Homo sapiens
  CDR3 for alpha chain variable domain of TCR clone 19402 (TRAV1-2, TRAJ16)
CAVNRFSDGQKLLF

SEQ ID NO: 38804 - protein, 13 aa, Homo sapiens
  CDR3 for beta chain variable domain of TCR clone 19402 (TRBV20-1, TRBJ2-2)
CSASAAGTGELFF

SEQ ID NO: 38805 - protein, 14 aa, Homo sapiens
  CDR3 for alpha chain variable domain of TCR clone 19403 (TRAV9-2, TRAJ39)
CALYIYNAGNMLTF

SEQ ID NO: 38806 - protein, 12 aa, Homo sapiens
  CDR3 for beta chain variable domain of TCR clone 19403 (TRBV14, TRBJ2-1)
CASSQVDNEQFF

SEQ ID NO: 38807 - protein, 13 aa, Homo sapiens
  CDR3 for alpha chain variable domain of TCR clone 19404 (TRAV8-1, TRAJ28)
CAVSGAGSYQLTF

SEQ ID NO: 38808 - protein, 14 aa, Homo sapiens
  CDR3 for beta chain variable domain of TCR clone 19404 (TRBV7-2, TRBJ2-2)
CASRGQGAAGELLF

SEQ ID NO: 38809 - protein, 18 aa, Homo sapiens
  CDR3 for alpha chain variable domain of TCR clone 19405 (TRAV12-2, TRAJ30)
CAVKMTRSSLEKGHDFIF

SEQ ID NO: 38810 - protein, 13 aa, Homo sapiens
  CDR3 for beta chain variable domain of TCR clone 19405 (TRBV6-6, TRBJ2-7)
CASSPKHLAEQYF

SEQ ID NO: 38811 - protein, 13 aa, Homo sapiens
  CDR3 for alpha chain variable domain of TCR clone 19406 (TRAV2, TRAJ40)
CAVVTSGTYKYIF

SEQ ID NO: 38812 - protein, 14 aa, Homo sapiens
  CDR3 for beta chain variable domain of TCR clone 19406 (TRBV19, TRBJ2-1)
CPSPTFVLSGEQFF

SEQ ID NO: 38813 - protein, 15 aa, Homo sapiens
  CDR3 for alpha chain variable domain of TCR clone 19407 (TRAV26-1, TRAJ22)
CIVRVSFWFCKATEL

SEQ ID NO: 38814 - protein, 13 aa, Homo sapiens
  CDR3 for beta chain variable domain of TCR clone 19407 (TRBV7-9, TRBJ1-2)
CASSLKQNYGYTF

SEQ ID NO: 38815 - protein, 14 aa, Homo sapiens
  CDR3 for alpha chain variable domain of TCR clone 19408 (TRAV8-3, TRAJ4)
CSVGAAGGYNKLIF

SEQ ID NO: 38816 - protein, 15 aa, Homo sapiens
  CDR3 for beta chain variable domain of TCR clone 19408 (TRBV6-5, TRBJ2-1)
CASSYDAGAGNEQFF

SEQ ID NO: 38817 - protein, 15 aa, Homo sapiens
  CDR3 for alpha chain variable domain of TCR clone 19409 (TRAV3, TRAJ5)
CAVRDLDTGRRALTF

SEQ ID NO: 38818 - protein, 13 aa, Homo sapiens
  CDR3 for beta chain variable domain of TCR clone 19409 (TRBV12-4, TRBJ2-7)
CASSPTETYKQYF

SEQ ID NO: 38819 - protein, 13 aa, Homo sapiens
  CDR3 for alpha chain variable domain of TCR clone 19410 (TRAV3, TRAJ21)
CAVREPDFNKFYF

SEQ ID NO: 38820 - protein, 14 aa, Homo sapiens
  CDR3 for beta chain variable domain of TCR clone 19410 (TRBV25-1, TRBJ1-1)
CASTHLGGNTEAFF

SEQ ID NO: 38821 - protein, 12 aa, Homo sapiens
  CDR3 for alpha chain variable domain of TCR clone 19411 (TRAV12-3, TRAJ40)
CAMSSGTYKYIF

SEQ ID NO: 38822 - protein, 15 aa, Homo sapiens
  CDR3 for beta chain variable domain of TCR clone 19411 (TRBV7-3, TRBJ2-2)
CASSETGQGTGELFL

SEQ ID NO: 38823 - protein, 15 aa, Homo sapiens
  CDR3 for alpha chain variable domain of TCR clone 19412 (TRAV3, TRAJ4)
CAVRDGTGCYNKLIF

SEQ ID NO: 38824 - protein, 16 aa, Homo sapiens
  CDR3 for beta chain variable domain of TCR clone 19412 (TRBV27, TRBJ2-2)
CASSSSGVSNTGELFF

SEQ ID NO: 38825 - protein, 14 aa, Homo sapiens
  CDR3 for alpha chain variable domain of TCR clone 19413 (TRAV26-1, TRAJ34)
CIVRVAYNTDKLIF

SEQ ID NO: 38826 - protein, 12 aa, Homo sapiens
  CDR3 for beta chain variable domain of TCR clone 19413 (TRBV12-4, TRBJ2-7)
CASSLGGYEQYF

SEQ ID NO: 38827 - protein, 15 aa, Homo sapiens
  CDR3 for alpha chain variable domain of TCR clone 19414 (TRAV3, TRAJ5)
CAVRDLDTGRRALIF

SEQ ID NO: 38828 - protein, 13 aa, Homo sapiens
  CDR3 for beta chain variable domain of TCR clone 19414 (TRBV12-4, TRBJ2-7)
CASSPTETYEQYF

SEQ ID NO: 38829 - protein, 16 aa, Homo sapiens
  CDR3 for alpha chain variable domain of TCR clone 19415 (TRAV3, TRAJ21)
CAVRDIERGNFNKFYF

SEQ ID NO: 38830 - protein, 13 aa, Homo sapiens
  CDR3 for beta chain variable domain of TCR clone 19415 (TRBV7-9, TRBJ1-2)
CASSLKQNYGYTF

SEQ ID NO: 38831 - protein, 16 aa, Homo sapiens
  CDR3 for alpha chain variable domain of TCR clone 19416 (TRAV3, TRAJ37)
CAVRPHGSGNTGKLIF

SEQ ID NO: 38832 - protein, 14 aa, Homo sapiens
  CDR3 for beta chain variable domain of TCR clone 19416 (TRBV2, TRBJ2-1)
CASSVRAYYNEQFF

SEQ ID NO: 38833 - protein, 14 aa, Homo sapiens
  CDR3 for alpha chain variable domain of TCR clone 19417 (TRAV21, TRAJ35)
CAVMPIGFGNVLHC

SEQ ID NO: 38834 - protein, 12 aa, Homo sapiens
  CDR3 for beta chain variable domain of TCR clone 19417 (TRBV7-9, TRBJ2-7)
CTSSIKREEQYF

SEQ ID NO: 38835 - protein, 13 aa, Homo sapiens
  CDR3 for alpha chain variable domain of TCR clone 19418 (TRAV21, TRAJ20)
CAVGLRVDYKLSF

SEQ ID NO: 38836 - protein, 12 aa, Homo sapiens
  CDR3 for beta chain variable domain of TCR clone 19418 (TRBV7-8, TRBJ2-7)
CASSLGDREQYF

SEQ ID NO: 38837 - protein, 14 aa, Homo sapiens
  CDR3 for alpha chain variable domain of TCR clone 19419 (TRAV12-2, TRAJ13)
CAVKKTGGYQKVTF

SEQ ID NO: 38838 - protein, 13 aa, Homo sapiens
  CDR3 for beta chain variable domain of TCR clone 19419 (TRBV20-1, TRBJ2-2)
CSASAAGTGELFF

SEQ ID NO: 38839 - protein, 12 aa, Homo sapiens
  CDR3 for alpha chain variable domain of TCR clone 19420 (TRAV17, TRAJ39)
CATGVAGNMLTF

SEQ ID NO: 38840 - protein, 14 aa, Homo sapiens
  CDR3 for beta chain variable domain of TCR clone 19420 (TRBV7-9, TRBJ1-2)
CASSRQGANYGYTF

SEQ ID NO: 38841 - protein, 14 aa, Homo sapiens
  CDR3 for alpha chain variable domain of TCR clone 19421 (TRAV17, TRAJ22)
CATSPSGSARQLTF

SEQ ID NO: 38842 - protein, 15 aa, Homo sapiens
  CDR3 for beta chain variable domain of TCR clone 19421 (TRBV4-1, TRBJ2-5)
CASSQWDLYQENQYF

SEQ ID NO: 38843 - protein, 13 aa, Homo sapiens
  CDR3 for alpha chain variable domain of TCR clone 19422 (TRAV13-2, TRAJ53)
CAENMGSNYKLTF

SEQ ID NO: 38844 - protein, 13 aa, Homo sapiens
  CDR3 for beta chain variable domain of TCR clone 19422 (TRBV4-1, TRBJ2-2)
CASSQEDTGELFF

SEQ ID NO: 38845 - protein, 11 aa, Homo sapiens
  CDR3 for alpha chain variable domain of TCR clone 19423 (TRAV1-2, TRAJ20)
CAVANDYRLSF

SEQ ID NO: 38846 - protein, 18 aa, Homo sapiens
  CDR3 for beta chain variable domain of TCR clone 19423 (TRBV20-1, TRBJ2-6)
CSAETTPTHGSGANVLTF

SEQ ID NO: 38847 - protein, 14 aa, Homo sapiens
  CDR3 for alpha chain variable domain of TCR clone 19424 (TRAV36/DV7, TRAJ40)
CAVETTSGAYKYIF

SEQ ID NO: 38848 - protein, 13 aa, Homo sapiens
  CDR3 for beta chain variable domain of TCR clone 19424 (TRBV10-3, TRBJ2-5)
CAMTSGAGETQYF

SEQ ID NO: 38849 - protein, 14 aa, Homo sapiens
  CDR3 for alpha chain variable domain of TCR clone 19425 (TRAV38-1, TRAJ40)
CALRPTSGTYKYIF

SEQ ID NO: 38850 - protein, 14 aa, Homo sapiens
  CDR3 for beta chain variable domain of TCR clone 19425 (TRBV19, TRBJ2-1)
CASPTFVLSGEQSF

SEQ ID NO: 38851 - protein, 18 aa, Homo sapiens
  CDR3 for alpha chain variable domain of TCR clone 19426 (TRAV21, TRAJ52)
CAVRPSPAGGTSYGKLTF

SEQ ID NO: 38852 - protein, 17 aa, Homo sapiens
  CDR3 for beta chain variable domain of TCR clone 19426 (TRBV13, TRBJ2-3)
CASSLSMVAGGRNTQYF

SEQ ID NO: 38853 - protein, 15 aa, Homo sapiens
  CDR3 for alpha chain variable domain of TCR clone 19427 (TRAV26-1, TRAJ22)
CIVRVSFWFCRATDL

SEQ ID NO: 38854 - protein, 13 aa, Homo sapiens
  CDR3 for beta chain variable domain of TCR clone 19427 (TRBV7-9, TRBJ1-2)
CASSLKQNYGYTF

SEQ ID NO: 38855 - protein, 12 aa, Homo sapiens
  CDR3 for alpha chain variable domain of TCR clone 19428 (TRAV12-3, TRAJ41)
CAMSYSGYALNL

SEQ ID NO: 38856 - protein, 13 aa, Homo sapiens
  CDR3 for beta chain variable domain of TCR clone 19428 (TRBV7-3, TRBJ2-1)
CASSLDSYNEQFF

SEQ ID NO: 38857 - protein, 19 aa, Homo sapiens
  CDR3 for alpha chain variable domain of TCR clone 19429 (TRAV25, TRAJ43)
TATQTTDVGTYFCAVFTRF

SEQ ID NO: 38858 - protein, 13 aa, Homo sapiens
  CDR3 for beta chain variable domain of TCR clone 19429 (TRBV7-9, TRBJ1-2)
CASSLKQNYGYTF

SEQ ID NO: 38859 - protein, 15 aa, Homo sapiens
  CDR3 for alpha chain variable domain of TCR clone 19430 (TRAV17, TRAJ28)
CATVDSGAGSYQLTL

SEQ ID NO: 38860 - protein, 13 aa, Homo sapiens
  CDR3 for beta chain variable domain of TCR clone 19430 (TRBV5-4, TRBJ2-5)
CASSRQEGETQYF

SEQ ID NO: 38861 - protein, 15 aa, Homo sapiens
  CDR3 for alpha chain variable domain of TCR clone 19431 (TRAV21, TRAJ53)
CATLNSGGSDYKLTF

SEQ ID NO: 38862 - protein, 16 aa, Homo sapiens
  CDR3 for beta chain variable domain of TCR clone 19431 (TRBV9, TRBJ2-1)
CASSVGGGGNYNEQFF

SEQ ID NO: 38863 - protein, 16 aa, Homo sapiens
  CDR3 for alpha chain variable domain of TCR clone 19432 (TRAV30, TRAJ24)
CGTEIVDADSWGKFQF

SEQ ID NO: 38864 - protein, 13 aa, Homo sapiens
  CDR3 for beta chain variable domain of TCR clone 19432 (TRBV6-1, TRBJ1-1)
CASSRQGNTEAFF

SEQ ID NO: 38865 - protein, 16 aa, Homo sapiens
  CDR3 for alpha chain variable domain of TCR clone 19433 (TRAV1-2, TRAJ10)
CAVRGVLTGGGNKLTC

SEQ ID NO: 38866 - protein, 12 aa, Homo sapiens
  CDR3 for beta chain variable domain of TCR clone 19433 (TRBV7-8, TRBJ2-7)
CASSLGDREQYF

SEQ ID NO: 38867 - protein, 14 aa, Homo sapiens
  CDR3 for alpha chain variable domain of TCR clone 19434 (TRAV17, TRAJ54)
CATDANQGAQKLVF

SEQ ID NO: 38868 - protein, 12 aa, Homo sapiens
  CDR3 for beta chain variable domain of TCR clone 19434 (TRBV6-3, TRBJ2-1)
CASSGSYSEQFF

SEQ ID NO: 38869 - protein, 16 aa, Homo sapiens
  CDR3 for alpha chain variable domain of TCR clone 19435 (TRAV21, TRAJ37)
CAVRTAGSSNTGRLIF

SEQ ID NO: 38870 - protein, 13 aa, Homo sapiens
  CDR3 for beta chain variable domain of TCR clone 19435 (TRBV7-9, TRBJ2-5)
CASLPSGRETQYF

SEQ ID NO: 38871 - protein, 14 aa, Homo sapiens
  CDR3 for alpha chain variable domain of TCR clone 19436 (TRAV9-2, TRAJ39)
CALYIYNAGNMLTF

SEQ ID NO: 38872 - protein, 16 aa, Homo sapiens
  CDR3 for beta chain variable domain of TCR clone 19436 (TRBV13, TRBJ2-2)
CASSPRTGEHTGELFF

SEQ ID NO: 38873 - protein, 14 aa, Homo sapiens
  CDR3 for alpha chain variable domain of TCR clone 19437 (TRAV35, TRAJ42)
CAGRYGGSRGNLIF

SEQ ID NO: 38874 - protein, 15 aa, Homo sapiens
  CDR3 for beta chain variable domain of TCR clone 19437 (TRBV7-9, TRBJ2-1)
CASSLGWGRANEQFF

SEQ ID NO: 38875 - protein, 13 aa, Homo sapiens
  CDR3 for alpha chain variable domain of TCR clone 19438 (TRAV1-2, TRAJ9)
CAVLNTGGFKTIS

SEQ ID NO: 38876 - protein, 14 aa, Homo sapiens
  CDR3 for beta chain variable domain of TCR clone 19438 (TRBV20-1, TRBJ2-3)
CSARGGTSTDTQYF

SEQ ID NO: 38877 - protein, 15 aa, Homo sapiens
  CDR3 for alpha chain variable domain of TCR clone 19439 (TRAV12-3, TRAJ6)
CAMSATTGGSYIPTF

SEQ ID NO: 38878 - protein, 16 aa, Homo sapiens
  CDR3 for beta chain variable domain of TCR clone 19439 (TRBV20-1, TRBJ1-2)
CSASMVQGVANYGYTF

SEQ ID NO: 38879 - protein, 12 aa, Homo sapiens
  CDR3 for alpha chain variable domain of TCR clone 19440 (TRAV3, TRAJ43)
CAVRDPNNDMRF

SEQ ID NO: 38880 - protein, 15 aa, Homo sapiens
  CDR3 for beta chain variable domain of TCR clone 19440 (TRBV9, TRBJ1-6)
CASSVAGTGDSPLHF

SEQ ID NO: 38881 - protein, 17 aa, Homo sapiens
  CDR3 for alpha chain variable domain of TCR clone 19441 (TRAV12-3, TRAJ6)
CAMSARGGAGGSYIPTF

SEQ ID NO: 38882 - protein, 12 aa, Homo sapiens
  CDR3 for beta chain variable domain of TCR clone 19441 (TRBV12-4, TRBJ2-3)
CTSSTLPDTQYF

SEQ ID NO: 38883 - protein, 13 aa, Homo sapiens
  CDR3 for alpha chain variable domain of TCR clone 19442 (TRAV2, TRAJ15)
CAVASQAGTALIF

SEQ ID NO: 38884 - protein, 13 aa, Homo sapiens
  CDR3 for beta chain variable domain of TCR clone 19442 (TRBV27, TRBJ1-1)
CASSLSIGAEAFF

SEQ ID NO: 38885 - protein, 15 aa, Homo sapiens
  CDR3 for alpha chain variable domain of TCR clone 19443 (TRAV17, TRAJ57)
CATGPSQGGSEKLVC

SEQ ID NO: 38886 - protein, 16 aa, Homo sapiens
  CDR3 for beta chain variable domain of TCR clone 19443 (TRBV12-4, TRBJ1-5)
CASSRPVGGSNQPQHF

SEQ ID NO: 38887 - protein, 13 aa, Homo sapiens
  CDR3 for alpha chain variable domain of TCR clone 19444 (TRAV21, TRAJ15)
CAVANQAGTALTF

SEQ ID NO: 38888 - protein, 14 aa, Homo sapiens
  CDR3 for beta chain variable domain of TCR clone 19444 (TRBV27, TRBJ2-2)
CASSLGAATGELFF

SEQ ID NO: 38889 - protein, 14 aa, Homo sapiens
  CDR3 for alpha chain variable domain of TCR clone 19445 (TRAV13-1, TRAJ35)
CAASKGGFGNVLHC

SEQ ID NO: 38890 - protein, 13 aa, Homo sapiens
  CDR3 for beta chain variable domain of TCR clone 19445 (TRBV7-3, TRBJ1-1)
CASSQDGGAEAFF

SEQ ID NO: 38891 - protein, 14 aa, Homo sapiens
  CDR3 for alpha chain variable domain of TCR clone 19446 (TRAV1-2, TRAJ16)
CAVNRFSVGQKLLF

SEQ ID NO: 38892 - protein, 15 aa, Homo sapiens
  CDR3 for beta chain variable domain of TCR clone 19446 (TRBV9, TRBJ1-6)
CASSVAGTGDSPLHF

SEQ ID NO: 38893 - protein, 14 aa, Homo sapiens
  CDR3 for alpha chain variable domain of TCR clone 19447 (TRAV12-2, TRAJ5)
CAVNRSTGRRALTF

SEQ ID NO: 38894 - protein, 12 aa, Homo sapiens
  CDR3 for beta chain variable domain of TCR clone 19447 (TRBV7-8, TRBJ2-7)
CASSLGDREQYF

SEQ ID NO: 38895 - protein, 14 aa, Homo sapiens
  CDR3 for alpha chain variable domain of TCR clone 19448 (TRAV30, TRAJ26)
CGTEIVSYGQNFVF

SEQ ID NO: 38896 - protein, 13 aa, Homo sapiens
  CDR3 for beta chain variable domain of TCR clone 19448 (TRBV19, TRBJ1-3)
CASRVSLGNTIYF

SEQ ID NO: 38897 - protein, 12 aa, Homo sapiens
  CDR3 for alpha chain variable domain of TCR clone 19449 (TRAV13-1, TRAJ21)
CAAKEGFNKFYF

SEQ ID NO: 38898 - protein, 13 aa, Homo sapiens
  CDR3 for beta chain variable domain of TCR clone 19449 (TRBV7-9, TRBJ2-1)
CASSLGTVDEQFF

SEQ ID NO: 38899 - protein, 14 aa, Homo sapiens
  CDR3 for alpha chain variable domain of TCR clone 19450 (TRAV3, TRAJ21)
CAVRDKYNFDKFYF

SEQ ID NO: 38900 - protein, 14 aa, Homo sapiens
  CDR3 for beta chain variable domain of TCR clone 19450 (TRBV27, TRBJ2-3)
CASRDSPITDTQYF

SEQ ID NO: 38901 - protein, 14 aa, Homo sapiens
  CDR3 for alpha chain variable domain of TCR clone 19451 (TRAV13-1, TRAJ24)
CAASPADSWGKFQF

SEQ ID NO: 38902 - protein, 14 aa, Homo sapiens
  CDR3 for beta chain variable domain of TCR clone 19451 (TRBV2, TRBJ1-1)
CASRSGTMNTEAFF

SEQ ID NO: 38903 - protein, 14 aa, Homo sapiens
  CDR3 for alpha chain variable domain of TCR clone 19452 (TRAV1-2, TRAJ16)
CAVNRFSDGQKLLF

SEQ ID NO: 38904 - protein, 14 aa, Homo sapiens
  CDR3 for beta chain variable domain of TCR clone 19452 (TRBV2, TRBJ2-7)
CASSLTSGGYEQYF

SEQ ID NO: 38905 - protein, 17 aa, Homo sapiens
  CDR3 for alpha chain variable domain of TCR clone 19453 (TRAV3, TRAJ6)
CAVRDGPRAGGSYIPTF

SEQ ID NO: 38906 - protein, 14 aa, Homo sapiens
  CDR3 for beta chain variable domain of TCR clone 19453 (TRBV7-2, TRBJ2-7)
CASSAKTSFYEQYF

SEQ ID NO: 38907 - protein, 13 aa, Homo sapiens
  CDR3 for alpha chain variable domain of TCR clone 19454 (TRAV1-2, TRAJ9)
CAALNTGGFKTIF

SEQ ID NO: 38908 - protein, 13 aa, Homo sapiens
  CDR3 for beta chain variable domain of TCR clone 19454 (TRBV19, TRBJ1-2)
CASSVPGQDVYTF

SEQ ID NO: 38909 - protein, 14 aa, Homo sapiens
  CDR3 for alpha chain variable domain of TCR clone 19455 (TRAV9-2, TRAJ39)
CALYIYNAGNMLTF

SEQ ID NO: 38910 - protein, 16 aa, Homo sapiens
  CDR3 for beta chain variable domain of TCR clone 19455 (TRBV20-1, TRBJ2-7)
CSARDWAGGPSSTSGR

SEQ ID NO: 38911 - protein, 13 aa, Homo sapiens
  CDR3 for alpha chain variable domain of TCR clone 19456 (TRAV2, TRAJ40)
CAVVTSGTYKYIF

SEQ ID NO: 38912 - protein, 13 aa, Homo sapiens
  CDR3 for beta chain variable domain of TCR clone 19456 (TRBV19, TRBJ2-1)
CQSDFRLSGEQFF

SEQ ID NO: 38913 - protein, 16 aa, Homo sapiens
  CDR3 for alpha chain variable domain of TCR clone 19457 (TRAV30, TRAJ24)
CGTEIVDADSWGKLQF

SEQ ID NO: 38914 - protein, 18 aa, Homo sapiens
  CDR3 for beta chain variable domain of TCR clone 19457 (TRBV7-9, TRBJ2-7)
CASSLTTSGSRTWYEQYF

SEQ ID NO: 38915 - protein, 14 aa, Homo sapiens
  CDR3 for alpha chain variable domain of TCR clone 19458 (TRAV12-2, TRAJ40)
CAVKIPSGTYKYIF

SEQ ID NO: 38916 - protein, 14 aa, Homo sapiens
  CDR3 for beta chain variable domain of TCR clone 19458 (TRBV7-2, TRBJ2-7)
CASRSQGAAYEQYF

SEQ ID NO: 38917 - protein, 14 aa, Homo sapiens
  CDR3 for alpha chain variable domain of TCR clone 19459 (TRAV3, TRAJ9)
CAVRLNTGGFKTIL

SEQ ID NO: 38918 - protein, 15 aa, Homo sapiens
  CDR3 for beta chain variable domain of TCR clone 19459 (TRBV7-2, TRBJ2-1)
CASSLASGRVNEQFF

SEQ ID NO: 38919 - protein, 14 aa, Homo sapiens
  CDR3 for alpha chain variable domain of TCR clone 19460 (TRAV26-1, TRAJ34)
CIVRVAYNTDKLIF

SEQ ID NO: 38920 - protein, 15 aa, Homo sapiens
  CDR3 for beta chain variable domain of TCR clone 19460 (TRBV20-1, TRBJ2-7)
CSARVPAAYFYGQYF

SEQ ID NO: 38921 - protein, 18 aa, Homo sapiens
  CDR3 for alpha chain variable domain of TCR clone 19461 (TRAV12-3, TRAJ52)
CAMGVGGAGGTSYGKLTF

SEQ ID NO: 38922 - protein, 15 aa, Homo sapiens
  CDR3 for beta chain variable domain of TCR clone 19461 (TRBV27, TRBJ1-6)
CASSFDRGLGSPLHF

SEQ ID NO: 38923 - protein, 14 aa, Homo sapiens
  CDR3 for alpha chain variable domain of TCR clone 19462 (TRAV8-4, TRAJ13)
CAVTLSVGYQKVTF

SEQ ID NO: 38924 - protein, 14 aa, Homo sapiens
  CDR3 for beta chain variable domain of TCR clone 19462 (TRBV7-2, TRBJ1-2)
CASSQTGSTYGYTF

SEQ ID NO: 38925 - protein, 12 aa, Homo sapiens
  CDR3 for alpha chain variable domain of TCR clone 19463 (TRAV16, TRAJ10)
CSRTGGGNKLTF

SEQ ID NO: 38926 - protein, 14 aa, Homo sapiens
  CDR3 for beta chain variable domain of TCR clone 19463 (TRBV12-5, TRBJ2-5)
CASGSRTHQETQYF

SEQ ID NO: 38927 - protein, 20 aa, Homo sapiens
  CDR3 for alpha chain variable domain of TCR clone 19464 (TRAV26-1, TRAJ42)
CCVLLHRQTYYGGSQGNLIF

SEQ ID NO: 38928 - protein, 16 aa, Homo sapiens
  CDR3 for beta chain variable domain of TCR clone 19464 (TRBV7-3, TRBJ2-2)
CASSLRRGTLSGELFF

SEQ ID NO: 38929 - protein, 14 aa, Homo sapiens
  CDR3 for alpha chain variable domain of TCR clone 19465 (TRAV2, TRAJ37)
CAVDFTSNTGKLIF

SEQ ID NO: 38930 - protein, 16 aa, Homo sapiens
  CDR3 for beta chain variable domain of TCR clone 19465 (TRBV12-5, TRBJ2-5)
CASGPRTSGNQETQYF

SEQ ID NO: 38931 - protein, 14 aa, Homo sapiens
  CDR3 for alpha chain variable domain of TCR clone 19466 (TRAV26-1, TRAJ38)
CIADNAGNNRKLIW

SEQ ID NO: 38932 - protein, 17 aa, Homo sapiens
  CDR3 for beta chain variable domain of TCR clone 19466 (TRBV7-9, TRBJ2-3)
CASSPTVAGDLTDTQYF

SEQ ID NO: 38933 - protein, 13 aa, Homo sapiens
  CDR3 for alpha chain variable domain of TCR clone 19467 (TRAV1-1, TRAJ9)
CAAKNTGGFKTIF

SEQ ID NO: 38934 - protein, 14 aa, Homo sapiens
  CDR3 for beta chain variable domain of TCR clone 19467 (TRBV20-1, TRBJ2-1)
CSAQVGGSANEQFF

SEQ ID NO: 38935 - protein, 13 aa, Homo sapiens
  CDR3 for alpha chain variable domain of TCR clone 19468 (TRAV17, TRAJ9)
CATDYTGGFNTIF

SEQ ID NO: 38936 - protein, 16 aa, Homo sapiens
  CDR3 for beta chain variable domain of TCR clone 19468 (TRBV7-7, TRBJ2-1)
CASSLASGTSYNEQFF

SEQ ID NO: 38937 - protein, 14 aa, Homo sapiens
  CDR3 for alpha chain variable domain of TCR clone 19469 (TRAV8-2, TRAJ4)
CVVSPSGGYNKLIF

SEQ ID NO: 38938 - protein, 15 aa, Homo sapiens
  CDR3 for beta chain variable domain of TCR clone 19469 (TRBV4-1, TRBJ1-4)
CASSDTGGTNERLFF

SEQ ID NO: 38939 - protein, 12 aa, Homo sapiens
  CDR3 for alpha chain variable domain of TCR clone 19470 (TRAV21, TRAJ31)
CAVWGNSARLMF

SEQ ID NO: 38940 - protein, 16 aa, Homo sapiens
  CDR3 for beta chain variable domain of TCR clone 19470 (TRBV27, TRBJ2-5)
CASSYGPGGQKETQYF

SEQ ID NO: 38941 - protein, 11 aa, Homo sapiens
  CDR3 for alpha chain variable domain of TCR clone 19471 (TRAV17, TRAJ9)
CATTGGFNTIF

SEQ ID NO: 38942 - protein, 14 aa, Homo sapiens
  CDR3 for beta chain variable domain of TCR clone 19471 (TRBV7-9, TRBJ2-2)
CASSGLADTGELFF

SEQ ID NO: 38943 - protein, 14 aa, Homo sapiens
  CDR3 for alpha chain variable domain of TCR clone 19472 (TRAV1-2, TRAJ8)
CAVREDTGFQKLVF

SEQ ID NO: 38944 - protein, 16 aa, Homo sapiens
  CDR3 for beta chain variable domain of TCR clone 19472 (TRBV27, TRBJ2-1)
SMNVEPGTSGDNEQFF

SEQ ID NO: 38945 - protein, 13 aa, Homo sapiens
  CDR3 for alpha chain variable domain of TCR clone 19473 (TRAV3, TRAJ21)
CAVREPDFNKFYF

SEQ ID NO: 38946 - protein, 12 aa, Homo sapiens
  CDR3 for beta chain variable domain of TCR clone 19473 (TRBV5-1, TRBJ2-4)
LAGEWTKNTQYF

SEQ ID NO: 38947 - protein, 14 aa, Homo sapiens
  CDR3 for alpha chain variable domain of TCR clone 19474 (TRAV25, TRAJ35)
CARRMEGFGNVLHC

SEQ ID NO: 38948 - protein, 13 aa, Homo sapiens
  CDR3 for beta chain variable domain of TCR clone 19474 (TRBV7-2, TRBJ1-4)
CASSLAGLEELFF

SEQ ID NO: 38949 - protein, 14 aa, Homo sapiens
  CDR3 for alpha chain variable domain of TCR clone 19475 (TRAV12-2, TRAJ17)
CAALFKAAGNKLTF

SEQ ID NO: 38950 - protein, 16 aa, Homo sapiens
  CDR3 for beta chain variable domain of TCR clone 19475 (TRBV20-1, TRBJ2-2)
CSASASGMPGAGELFF

SEQ ID NO: 38951 - protein, 17 aa, Homo sapiens
  CDR3 for alpha chain variable domain of TCR clone 19476 (TRAV3, TRAJ38)
CAVRDCLNAGNNRKLLW

SEQ ID NO: 38952 - protein, 13 aa, Homo sapiens
  CDR3 for beta chain variable domain of TCR clone 19476 (TRBV23-1, TRBJ1-4)
CASRGKFNEKLFF

SEQ ID NO: 38953 - protein, 16 aa, Homo sapiens
  CDR3 for alpha chain variable domain of TCR clone 19477 (TRAV12-3, TRAJ53)
CAMSPGSGGSNYKLTF

SEQ ID NO: 38954 - protein, 14 aa, Homo sapiens
  CDR3 for beta chain variable domain of TCR clone 19477 (TRBV6-1, TRBJ1-3)
CASVQGGGGNTIYF

SEQ ID NO: 38955 - protein, 13 aa, Homo sapiens
  CDR3 for alpha chain variable domain of TCR clone 19478 (TRAV12-3, TRAJ7)
CAMTPYGNNRLAF

SEQ ID NO: 38956 - protein, 16 aa, Homo sapiens
  CDR3 for beta chain variable domain of TCR clone 19478 (TRBV20-1, TRBJ1-4)
CSARPYGEELNEKLFF

SEQ ID NO: 38957 - protein, 17 aa, Homo sapiens
  CDR3 for alpha chain variable domain of TCR clone 19479 (TRAV21, TRAJ52)
CAVGVNAGGTSYGMLTF

SEQ ID NO: 38958 - protein, 13 aa, Homo sapiens
  CDR3 for beta chain variable domain of TCR clone 19479 (TRBV5-1, TRBJ1-2)
CASSFQGNYGYTF

SEQ ID NO: 38959 - protein, 12 aa, Homo sapiens
  CDR3 for alpha chain variable domain of TCR clone 19480 (TRAV12-3, TRAJ17)
CAMTLTGNKLTF

SEQ ID NO: 38960 - protein, 12 aa, Homo sapiens
  CDR3 for beta chain variable domain of TCR clone 19480 (TRBV7-9, TRBJ2-7)
CASSIKREEQYF

SEQ ID NO: 38961 - protein, 13 aa, Homo sapiens
  CDR3 for alpha chain variable domain of TCR clone 19481 (TRAV2, TRAJ40)
CAVVTSGTYKYIF

SEQ ID NO: 38962 - protein, 15 aa, Homo sapiens
  CDR3 for beta chain variable domain of TCR clone 19481 (TRBV10-2, TRBJ2-6)
CASSEQGTGANVLTF

SEQ ID NO: 38963 - protein, 14 aa, Homo sapiens
  CDR3 for alpha chain variable domain of TCR clone 19482 (TRAV38-1, TRAJ45)
CAYYSGGGADGLTF

SEQ ID NO: 38964 - protein, 20 aa, Homo sapiens
  CDR3 for beta chain variable domain of TCR clone 19482 (TRBV28, TRBJ2-1)
CASTPIGRSPGLAGGNGQFF

SEQ ID NO: 38965 - protein, 12 aa, Homo sapiens
  CDR3 for alpha chain variable domain of TCR clone 19483 (TRAV35, TRAJ30)
CAGQLADDKTIF

SEQ ID NO: 38966 - protein, 17 aa, Homo sapiens
  CDR3 for beta chain variable domain of TCR clone 19483 (TRBV4-2, TRBJ2-5)
CASSPGRWRNFQETQYF

SEQ ID NO: 38967 - protein, 14 aa, Homo sapiens
  CDR3 for alpha chain variable domain of TCR clone 19484 (TRAV27, TRAJ13)
CRSSNSGGYQEVTF

SEQ ID NO: 38968 - protein, 13 aa, Homo sapiens
  CDR3 for beta chain variable domain of TCR clone 19484 (TRBV7-6, TRBJ2-1)
CQQLGGGADEQFF

SEQ ID NO: 38969 - protein, 11 aa, Homo sapiens
  CDR3 for alpha chain variable domain of TCR clone 19485 (TRAV12-2, TRAJ48)
CASNEKLTFGT

SEQ ID NO: 38970 - protein, 16 aa, Homo sapiens
  CDR3 for beta chain variable domain of TCR clone 19485 (TRBV7-3, TRBJ2-2)
CASSLKRGTLSGELFF

SEQ ID NO: 38971 - protein, 12 aa, Homo sapiens
  CDR3 for alpha chain variable domain of TCR clone 19486 (TRAV12-3, TRAJ41)
CAMSYSGYALDF

SEQ ID NO: 38972 - protein, 13 aa, Homo sapiens
  CDR3 for beta chain variable domain of TCR clone 19486 (TRBV7-3, TRBJ2-1)
CASSLDSYNEQFF

SEQ ID NO: 38973 - protein, 10 aa, Homo sapiens
  CDR3 for alpha chain variable domain of TCR clone 19487 (TRAV16, TRAJ22)
SAMYLRQLTF

SEQ ID NO: 38974 - protein, 15 aa, Homo sapiens
  CDR3 for beta chain variable domain of TCR clone 19487 (TRBV7-9, TRBJ1-6)
CASSSPGRGNSPPHF

SEQ ID NO: 38975 - protein, 13 aa, Homo sapiens
  CDR3 for alpha chain variable domain of TCR clone 19488 (TRAV1-1, TRAJ9)
CAAKNTGGFKTIF

SEQ ID NO: 38976 - protein, 14 aa, Homo sapiens
  CDR3 for beta chain variable domain of TCR clone 19488 (TRBV20-1, TRBJ2-1)
CSAQIGGAANEQFF

SEQ ID NO: 38977 - protein, 13 aa, Homo sapiens
  CDR3 for alpha chain variable domain of TCR clone 19489 (TRAV21, TRAJ27)
CAARPGNAGKSTF

SEQ ID NO: 38978 - protein, 14 aa, Homo sapiens
  CDR3 for beta chain variable domain of TCR clone 19489 (TRBV7-6, TRBJ2-3)
CSSSLGTVTDTQYF

SEQ ID NO: 38979 - protein, 12 aa, Homo sapiens
  CDR3 for alpha chain variable domain of TCR clone 19490 (TRAV13-1, TRAJ21)
CAAKEGFNEFYF

SEQ ID NO: 38980 - protein, 14 aa, Homo sapiens
  CDR3 for beta chain variable domain of TCR clone 19490 (TRBV5-4, TRBJ1-1)
CASSLDSRRDEAFF

SEQ ID NO: 38981 - protein, 14 aa, Homo sapiens
  CDR3 for alpha chain variable domain of TCR clone 19491 (TRAV1-2, TRAJ16)
CAVNRFSDGQKLLF

SEQ ID NO: 38982 - protein, 15 aa, Homo sapiens
  CDR3 for beta chain variable domain of TCR clone 19491 (TRBV7-9, TRBJ1-6)
CASSSPGRVNSPLHF

SEQ ID NO: 38983 - protein, 14 aa, Homo sapiens
  CDR3 for alpha chain variable domain of TCR clone 19492 (TRAV12-3, TRAJ10)
SHLPLTGGGNKLTF

SEQ ID NO: 38984 - protein, 15 aa, Homo sapiens
  CDR3 for beta chain variable domain of TCR clone 19492 (TRBV10-3, TRBJ2-3)
CAISLTSGGTDTQYF

SEQ ID NO: 38985 - protein, 16 aa, Homo sapiens
  CDR3 for alpha chain variable domain of TCR clone 19493 (TRAV30, TRAJ24)
CGTEIVDADSWGKFQF

SEQ ID NO: 38986 - protein, 15 aa, Homo sapiens
  CDR3 for beta chain variable domain of TCR clone 19493 (TRBV7-9, TRBJ1-4)
CASSRTGGFNEKLFF

SEQ ID NO: 38987 - protein, 16 aa, Homo sapiens
  CDR3 for alpha chain variable domain of TCR clone 19494 (TRAV1-2, TRAJ10)
CAVRGVFTGGGNKLTF

SEQ ID NO: 38988 - protein, 12 aa, Homo sapiens
  CDR3 for beta chain variable domain of TCR clone 19494 (TRBV7-8, TRBJ2-7)
CASSLGDREQYF

SEQ ID NO: 38989 - protein, 15 aa, Homo sapiens
  CDR3 for alpha chain variable domain of TCR clone 19495 (TRAV23/DV6, TRAJ42)
CAANYYGGSQGNLIF

SEQ ID NO: 38990 - protein, 14 aa, Homo sapiens
  CDR3 for beta chain variable domain of TCR clone 19495 (TRBV27, TRBJ1-2)
CASRTTGANYGYTF

SEQ ID NO: 38991 - protein, 23 aa, Homo sapiens
  CDR3 for alpha chain variable domain of TCR clone 19496 (TRAV26-1, TRAJ38)
CIADNAGNNHIQNPDPAVYQLRD

SEQ ID NO: 38992 - protein, 13 aa, Homo sapiens
  CDR3 for beta chain variable domain of TCR clone 19496 (TRBV20-1, TRBJ1-1)
CSARGGGNTEDFF

SEQ ID NO: 38993 - protein, 14 aa, Homo sapiens
  CDR3 for alpha chain variable domain of TCR clone 19497 (TRAV14/DV4, TRAJ15)
CAMRRDQAGTALIF

SEQ ID NO: 38994 - protein, 16 aa, Homo sapiens
  CDR3 for beta chain variable domain of TCR clone 19497 (TRBV12-5, TRBJ2-5)
CASGPRTSGNQETQYS

SEQ ID NO: 38995 - protein, 14 aa, Homo sapiens
  CDR3 for alpha chain variable domain of TCR clone 19498 (TRAV17, TRAJ22)
CATSPSGSARQLTF

SEQ ID NO: 38996 - protein, 15 aa, Homo sapiens
  CDR3 for beta chain variable domain of TCR clone 19498 (TRBV4-1, TRBJ2-5)
CASSQWDMYQETQYF

SEQ ID NO: 38997 - protein, 12 aa, Homo sapiens
  CDR3 for alpha chain variable domain of TCR clone 19499 (TRAV8-3, TRAJ47)
CAVGVGGNKLVF

SEQ ID NO: 38998 - protein, 15 aa, Homo sapiens
  CDR3 for beta chain variable domain of TCR clone 19499 (TRBV7-8, TRBJ2-7)
CASSLGTGNPYEQYF

SEQ ID NO: 38999 - protein, 15 aa, Homo sapiens
  CDR3 for alpha chain variable domain of TCR clone 19500 (TRAV3, TRAJ22)
CAVRDRGGSARQLTF

SEQ ID NO: 39000 - protein, 10 aa, Homo sapiens
  CDR3 for beta chain variable domain of TCR clone 19500 (TRBV12-4, TRBJ1-2)
CASSFIWLHL

SEQ ID NO: 39001 - protein, 17 aa, Homo sapiens
  CDR3 for alpha chain variable domain of TCR clone 19501 (TRAV3, TRAJ6)
CAVRDGPRAGGSYIPTF

SEQ ID NO: 39002 - protein, 14 aa, Homo sapiens
  CDR3 for beta chain variable domain of TCR clone 19501 (TRBV7-8, TRBJ2-5)
CASSATGGQETQYF

SEQ ID NO: 39003 - protein, 15 aa, Homo sapiens
  CDR3 for alpha chain variable domain of TCR clone 19502 (TRAV8-3, TRAJ11)
CALGLLNSGYSTLTF

SEQ ID NO: 39004 - protein, 16 aa, Homo sapiens
  CDR3 for beta chain variable domain of TCR clone 19502 (TRBV7-9, TRBJ1-2)
CASSLGFSSGEDGYTF

SEQ ID NO: 39005 - protein, 17 aa, Homo sapiens
  CDR3 for alpha chain variable domain of TCR clone 19503 (TRAV17, TRAJ48)
CFLLLCYGRTGNEKLTF

SEQ ID NO: 39006 - protein, 13 aa, Homo sapiens
  CDR3 for beta chain variable domain of TCR clone 19503 (TRBV7-3, TRBJ1-1)
CASSQDWGAEAFF

SEQ ID NO: 39007 - protein, 11 aa, Homo sapiens
  CDR3 for alpha chain variable domain of TCR clone 19504 (TRAV17, TRAJ36)
CAPTGANNPFF

SEQ ID NO: 39008 - protein, 12 aa, Homo sapiens
  CDR3 for beta chain variable domain of TCR clone 19504 (TRBV29-1, TRBJ2-3)
CSVTGGADTQYF

SEQ ID NO: 39009 - protein, 14 aa, Homo sapiens
  CDR3 for alpha chain variable domain of TCR clone 19505 (TRAV1-1, TRAJ27)
CAVIYNTNAGKSTF

SEQ ID NO: 39010 - protein, 17 aa, Homo sapiens
  CDR3 for beta chain variable domain of TCR clone 19505 (TRBV13, TRBJ2-3)
CASSLSRVAGGRNTQYF

SEQ ID NO: 39011 - protein, 14 aa, Homo sapiens
  CDR3 for alpha chain variable domain of TCR clone 19506 (TRAV8-6, TRAJ15)
CAVTDNQAGTALIF

SEQ ID NO: 39012 - protein, 16 aa, Homo sapiens
  CDR3 for beta chain variable domain of TCR clone 19506 (TRBV12-5, TRBJ2-5)
CASGPRTSGNQETQYF

SEQ ID NO: 39013 - protein, 14 aa, Homo sapiens
  CDR3 for alpha chain variable domain of TCR clone 19507 (TRAV12-2, TRAJ40)
CAVKIPSGTYKYIF

SEQ ID NO: 39014 - protein, 15 aa, Homo sapiens
  CDR3 for beta chain variable domain of TCR clone 19507 (TRBV5-1, TRBJ2-1)
CASSPPRAPYNEQFF

SEQ ID NO: 39015 - protein, 13 aa, Homo sapiens
  CDR3 for alpha chain variable domain of TCR clone 19508 (TRAV38-2/DV8, TRAJ34)
CAYRTWNTDKLIF

SEQ ID NO: 39016 - protein, 15 aa, Homo sapiens
  CDR3 for beta chain variable domain of TCR clone 19508 (TRBV6-1, TRBJ2-1)
CASSELRGQYNEQFF

SEQ ID NO: 39017 - protein, 13 aa, Homo sapiens
  CDR3 for alpha chain variable domain of TCR clone 19509 (TRAV12-3, TRAJ53)
CAMRGGSNYKLTF

SEQ ID NO: 39018 - protein, 15 aa, Homo sapiens
  CDR3 for beta chain variable domain of TCR clone 19509 (TRBV2, TRBJ2-1)
CATQARLVMIGGQFF

SEQ ID NO: 39019 - protein, 13 aa, Homo sapiens
  CDR3 for alpha chain variable domain of TCR clone 19510 (TRAV38-2/DV8, TRAJ34)
CAYRNYNTDKLIF

SEQ ID NO: 39020 - protein, 15 aa, Homo sapiens
  CDR3 for beta chain variable domain of TCR clone 19510 (TRBV20-1, TRBJ2-5)
CGAEGTGGLQETQYF

SEQ ID NO: 39021 - protein, 17 aa, Homo sapiens
  CDR3 for alpha chain variable domain of TCR clone 19511 (TRAV3, TRAJ6)
CAVRDGPRAGGSYIPTF

SEQ ID NO: 39022 - protein, 20 aa, Homo sapiens
  CDR3 for beta chain variable domain of TCR clone 19511 (TRBV28, TRBJ2-1)
CASTPIGRPPGLAGGNEQFF

SEQ ID NO: 39023 - protein, 18 aa, Homo sapiens
  CDR3 for alpha chain variable domain of TCR clone 19512 (TRAV13-1, TRAJ52)
CSAKNPNAGGTSYGKLTF

SEQ ID NO: 39024 - protein, 15 aa, Homo sapiens
  CDR3 for beta chain variable domain of TCR clone 19512 (TRBV6-1, TRBJ2-3)
CASSERGGITDTQYF

SEQ ID NO: 39025 - protein, 12 aa, Homo sapiens
  CDR3 for alpha chain variable domain of TCR clone 19513 (TRAV16, TRAJ10)
CSRTGGGNKLTF

SEQ ID NO: 39026 - protein, 15 aa, Homo sapiens
  CDR3 for beta chain variable domain of TCR clone 19513 (TRBV6-3, TRBJ2-7)
CASSSPGTGFYEQYF

SEQ ID NO: 39027 - protein, 14 aa, Homo sapiens
  CDR3 for alpha chain variable domain of TCR clone 19514 (TRAV17, TRAJ11)
CATDTSRGYSTLTF

SEQ ID NO: 39028 - protein, 13 aa, Homo sapiens
  CDR3 for beta chain variable domain of TCR clone 19514 (TRBV19, TRBJ2-5)
RASRDSRRETQYF

SEQ ID NO: 39029 - protein, 14 aa, Homo sapiens
  CDR3 for alpha chain variable domain of TCR clone 19515 (TRAV38-1, TRAJ29)
CAFINPSGNTPLVF

SEQ ID NO: 39030 - protein, 14 aa, Homo sapiens
  CDR3 for beta chain variable domain of TCR clone 19515 (TRBV18, TRBJ2-7)
CASSPRGGAYEQYF

SEQ ID NO: 39031 - protein, 18 aa, Homo sapiens
  CDR3 for alpha chain variable domain of TCR clone 19516 (TRAV26-1, TRAJ23)
CIVRVGLEVWNQGGQLIF

SEQ ID NO: 39032 - protein, 16 aa, Homo sapiens
  CDR3 for beta chain variable domain of TCR clone 19516 (TRBV12-4, TRBJ2-5)
CASSFFVRGRQETQYF

SEQ ID NO: 39033 - protein, 14 aa, Homo sapiens
  CDR3 for alpha chain variable domain of TCR clone 19517 (TRAV16, TRAJ57)
CALPTQGGSEKLVF

SEQ ID NO: 39034 - protein, 15 aa, Homo sapiens
  CDR3 for beta chain variable domain of TCR clone 19517 (TRBV28, TRBJ1-3)
CASWGGHLSGNTMYF

SEQ ID NO: 39035 - protein, 16 aa, Homo sapiens
  CDR3 for alpha chain variable domain of TCR clone 19518 (TRAV1-2, TRAJ10)
CAVRGVLTGGGTKLTF

SEQ ID NO: 39036 - protein, 12 aa, Homo sapiens
  CDR3 for beta chain variable domain of TCR clone 19518 (TRBV7-8, TRBJ2-7)
CASSLGDREQYF

SEQ ID NO: 39037 - protein, 15 aa, Homo sapiens
  CDR3 for alpha chain variable domain of TCR clone 19519 (TRAV8-4, TRAJ13)
CAVSDWSGGYQKVTF

SEQ ID NO: 39038 - protein, 15 aa, Homo sapiens
  CDR3 for beta chain variable domain of TCR clone 19519 (TRBV11-2, TRBJ1-6)
CASTLRGTGNSPLHF

SEQ ID NO: 39039 - protein, 14 aa, Homo sapiens
  CDR3 for alpha chain variable domain of TCR clone 19520 (TRAV26-1, TRAJ38)
CIADNAGNNRKLIW

SEQ ID NO: 39040 - protein, 13 aa, Homo sapiens
  CDR3 for beta chain variable domain of TCR clone 19520 (TRBV20-1, TRBJ1-1)
CSSRGGGNTEAFF

SEQ ID NO: 39041 - protein, 13 aa, Homo sapiens
  CDR3 for alpha chain variable domain of TCR clone 19521 (TRAV13-2, TRAJ48)
CAEMDFGNEKLTS

SEQ ID NO: 39042 - protein, 15 aa, Homo sapiens
  CDR3 for beta chain variable domain of TCR clone 19521 (TRBV7-9, TRBJ1-6)
CASSSPGRGNSPLHF

SEQ ID NO: 39043 - protein, 14 aa, Homo sapiens
  CDR3 for alpha chain variable domain of TCR clone 19522 (TRAV13-2, TRAJ43)
CAEIPTYNNNDMRF

SEQ ID NO: 39044 - protein, 10 aa, Homo sapiens
  CDR3 for beta chain variable domain of TCR clone 19522 (TRBV7-9, TRBJ2-2)
CASGPLDTFP

SEQ ID NO: 39045 - protein, 15 aa, Homo sapiens
  CDR3 for alpha chain variable domain of TCR clone 19523 (TRAV12-3, TRAJ6)
CAMSTTTGGSYIPTF

SEQ ID NO: 39046 - protein, 16 aa, Homo sapiens
  CDR3 for beta chain variable domain of TCR clone 19523 (TRBV20-1, TRBJ1-2)
CSASMGQGVANYGYTF

SEQ ID NO: 39047 - protein, 15 aa, Homo sapiens
  CDR3 for alpha chain variable domain of TCR clone 19524 (TRAV29/DV5, TRAJ30)
CAASALLGRDDKIIF

SEQ ID NO: 39048 - protein, 14 aa, Homo sapiens
  CDR3 for beta chain variable domain of TCR clone 19524 (TRBV5-1, TRBJ2-5)
CASSTDRGGETQYF

SEQ ID NO: 39049 - protein, 15 aa, Homo sapiens
  CDR3 for alpha chain variable domain of TCR clone 19525 (TRAV21, TRAJ24)
CAARSSTDRWGKLQF

SEQ ID NO: 39050 - protein, 13 aa, Homo sapiens
  CDR3 for beta chain variable domain of TCR clone 19525 (TRBV11-2, TRBJ2-5)
CASSSTGEETQYF

SEQ ID NO: 39051 - protein, 14 aa, Homo sapiens
  CDR3 for alpha chain variable domain of TCR clone 19526 (TRAV35, TRAJ33)
CAGSSQDSNHQLIW

SEQ ID NO: 39052 - protein, 15 aa, Homo sapiens
  CDR3 for beta chain variable domain of TCR clone 19526 (TRBV20-1, TRBJ2-7)
CSAESGTSGAYEQYF

SEQ ID NO: 39053 - protein, 12 aa, Homo sapiens
  CDR3 for alpha chain variable domain of TCR clone 19527 (TRAV12-3, TRAJ3)
CAIDSSASKIIF

SEQ ID NO: 39054 - protein, 17 aa, Homo sapiens
  CDR3 for beta chain variable domain of TCR clone 19527 (TRBV7-9, TRBJ2-3)
CASSLEEAGAYPDTRYF

SEQ ID NO: 39055 - protein, 12 aa, Homo sapiens
  CDR3 for alpha chain variable domain of TCR clone 19528 (TRAV2, TRAJ9)
CAVGAGGFKTIF

SEQ ID NO: 39056 - protein, 16 aa, Homo sapiens
  CDR3 for beta chain variable domain of TCR clone 19528 (TRBV13, TRBJ2-2)
CASSPRTEEHTGELFF

SEQ ID NO: 39057 - protein, 13 aa, Homo sapiens
  CDR3 for alpha chain variable domain of TCR clone 19529 (TRAV14/DV4, TRAJ16)
CAMRGTDGQKLLF

SEQ ID NO: 39058 - protein, 18 aa, Homo sapiens
  CDR3 for beta chain variable domain of TCR clone 19529 (TRBV4-1, TRBJ2-3)
CASSHQLAGGRSTDTQYL

SEQ ID NO: 39059 - protein, 13 aa, Homo sapiens
  CDR3 for alpha chain variable domain of TCR clone 19530 (TRAV2, TRAJ40)
CAVVTSGTYKYIF

SEQ ID NO: 39060 - protein, 15 aa, Homo sapiens
  CDR3 for beta chain variable domain of TCR clone 19530 (TRBV11-3, TRBJ2-3)
CASLKDGREGDTQYS

SEQ ID NO: 39061 - protein, 14 aa, Homo sapiens
  CDR3 for alpha chain variable domain of TCR clone 19531 (TRAV38-1, TRAJ45)
CASHSGGGADGPTF

SEQ ID NO: 39062 - protein, 13 aa, Homo sapiens
  CDR3 for beta chain variable domain of TCR clone 19531 (TRBV10-3, TRBJ1-2)
CAISERDSYGYTF

SEQ ID NO: 39063 - protein, 15 aa, Homo sapiens
  CDR3 for alpha chain variable domain of TCR clone 19532 (TRAV13-1, TRAJ44)
CAASRGGGTASKPTF

SEQ ID NO: 39064 - protein, 14 aa, Homo sapiens
  CDR3 for beta chain variable domain of TCR clone 19532 (TRBV7-2, TRBJ2-5)
CASSPRGSSETQYF

SEQ ID NO: 39065 - protein, 12 aa, Homo sapiens
  CDR3 for alpha chain variable domain of TCR clone 19533 (TRAV12-1, TRAJ34)
CVVAGATDKLIF

SEQ ID NO: 39066 - protein, 12 aa, Homo sapiens
  CDR3 for beta chain variable domain of TCR clone 19533 (TRBV7-9, TRBJ1-1)
CASSLVRGEAFL

SEQ ID NO: 39067 - protein, 14 aa, Homo sapiens
  CDR3 for alpha chain variable domain of TCR clone 19534 (TRAV13-1, TRAJ35)
CAASKGGFGNVLHC

SEQ ID NO: 39068 - protein, 15 aa, Homo sapiens
  CDR3 for beta chain variable domain of TCR clone 19534 (TRBV5-7, TRBJ2-7)
CASSLGPGRGHEQYF

SEQ ID NO: 39069 - protein, 15 aa, Homo sapiens
  CDR3 for alpha chain variable domain of TCR clone 19535 (TRAV25, TRAJ52)
CAGRPGGTSYGKLTF

SEQ ID NO: 39070 - protein, 17 aa, Homo sapiens
  CDR3 for beta chain variable domain of TCR clone 19535 (TRBV7-8, TRBJ2-6)
CASSAGTGGAGANVLTV

SEQ ID NO: 39071 - protein, 16 aa, Homo sapiens
  CDR3 for alpha chain variable domain of TCR clone 19536 (TRAV27, TRAJ52)
CAGAPAGGTSYGKPTF

SEQ ID NO: 39072 - protein, 12 aa, Homo sapiens
  CDR3 for beta chain variable domain of TCR clone 19536 (TRBV27, TRBJ2-1)
CASRGFYNEQFF

SEQ ID NO: 39073 - protein, 14 aa, Homo sapiens
  CDR3 for alpha chain variable domain of TCR clone 19537 (TRAV8-4, TRAJ48)
CAVSETFGNEKLTF

SEQ ID NO: 39074 - protein, 14 aa, Homo sapiens
  CDR3 for beta chain variable domain of TCR clone 19537 (TRBV13, TRBJ2-7)
CASSLKGASYEKYF

SEQ ID NO: 39075 - protein, 11 aa, Homo sapiens
  CDR3 for alpha chain variable domain of TCR clone 19538 (TRAV27, TRAJ45)
CAGAQEEGLTD

SEQ ID NO: 39076 - protein, 17 aa, Homo sapiens
  CDR3 for beta chain variable domain of TCR clone 19538 (TRBV11-2, TRBJ2-1)
CASSLYPPGVEYNEQFF

SEQ ID NO: 39077 - protein, 11 aa, Homo sapiens
  CDR3 for alpha chain variable domain of TCR clone 19539 (TRAV17, TRAJ9)
CGFTGGFKTIS

SEQ ID NO: 39078 - protein, 14 aa, Homo sapiens
  CDR3 for beta chain variable domain of TCR clone 19539 (TRBV7-9, TRBJ2-2)
CASSLVQDTGELFF

SEQ ID NO: 39079 - protein, 13 aa, Homo sapiens
  CDR3 for alpha chain variable domain of TCR clone 19540 (TRAV27, TRAJ41)
CAGEGNSGYARNF

SEQ ID NO: 39080 - protein, 14 aa, Homo sapiens
  CDR3 for beta chain variable domain of TCR clone 19540 (TRBV7-2, TRBJ1-1)
CASSFLTGTTEAFF

SEQ ID NO: 39081 - protein, 16 aa, Homo sapiens
  CDR3 for alpha chain variable domain of TCR clone 19541 (TRAV26-1, TRAJ23)
CIVRVHPYNQGGKLIF

SEQ ID NO: 39082 - protein, 15 aa, Homo sapiens
  CDR3 for beta chain variable domain of TCR clone 19541 (TRBV5-6, TRBJ2-7)
CASSPYFEGSYEQYF

SEQ ID NO: 39083 - protein, 15 aa, Homo sapiens
  CDR3 for alpha chain variable domain of TCR clone 19542 (TRAV3, TRAJ3)
RAVRDRDSSASKIIF

SEQ ID NO: 39084 - protein, 18 aa, Homo sapiens
  CDR3 for beta chain variable domain of TCR clone 19542 (TRBV25-1, TRBJ1-2)
CASSGLQNGQGLIFGYTF

SEQ ID NO: 39085 - protein, 13 aa, Homo sapiens
  CDR3 for alpha chain variable domain of TCR clone 19543 (TRAV21, TRAJ27)
CAARPGNAGKSTF

SEQ ID NO: 39086 - protein, 14 aa, Homo sapiens
  CDR3 for beta chain variable domain of TCR clone 19543 (TRBV7-6, TRBJ2-3)
CASSLGTITDTQYF

SEQ ID NO: 39087 - protein, 15 aa, Homo sapiens
  CDR3 for alpha chain variable domain of TCR clone 19544 (TRAV25, TRAJ52)
CAGRPGGTSYGKLTF

SEQ ID NO: 39088 - protein, 16 aa, Homo sapiens
  CDR3 for beta chain variable domain of TCR clone 19544 (TRBV7-3, TRBJ2-2)
CASSLKRGTLSGELFF

SEQ ID NO: 39089 - protein, 14 aa, Homo sapiens
  CDR3 for alpha chain variable domain of TCR clone 19545 (TRAV8-4, TRAJ9)
CAVRINTGGFKTIF

SEQ ID NO: 39090 - protein, 16 aa, Homo sapiens
  CDR3 for beta chain variable domain of TCR clone 19545 (TRBV7-3, TRBJ2-2)
CASSLKRGTLSGELFF

SEQ ID NO: 39091 - protein, 16 aa, Homo sapiens
  CDR3 for alpha chain variable domain of TCR clone 19546 (TRAV14/DV4, TRAJ54)
CAMREGRIQGAQKLVF

SEQ ID NO: 39092 - protein, 16 aa, Homo sapiens
  CDR3 for beta chain variable domain of TCR clone 19546 (TRBV20-1, TRBJ1-4)
CSAPGQGLLTNEKLFF

SEQ ID NO: 39093 - protein, 18 aa, Homo sapiens
  CDR3 for alpha chain variable domain of TCR clone 19547 (TRAV29/DV5, TRAJ52)
CAAGFRGAGGTSYGKLTF

SEQ ID NO: 39094 - protein, 16 aa, Homo sapiens
  CDR3 for beta chain variable domain of TCR clone 19547 (TRBV7-3, TRBJ2-2)
RASSLKRGTLSGELFF

SEQ ID NO: 39095 - protein, 13 aa, Homo sapiens
  CDR3 for alpha chain variable domain of TCR clone 19548 (TRAV21, TRAJ57)
CAVTQGRSEKLVF

SEQ ID NO: 39096 - protein, 16 aa, Homo sapiens
  CDR3 for beta chain variable domain of TCR clone 19548 (TRBV29-1, TRBJ2-7)
CSVEDAEDGTAYEQYF

SEQ ID NO: 39097 - protein, 10 aa, Homo sapiens
  CDR3 for alpha chain variable domain of TCR clone 19549 (TRAV21, TRAJ31)
CAVDNARLMF

SEQ ID NO: 39098 - protein, 13 aa, Homo sapiens
  CDR3 for beta chain variable domain of TCR clone 19549 (TRBV4-1, TRBJ1-1)
CASSRKMNAEAFF

SEQ ID NO: 39099 - protein, 22 aa, Homo sapiens
  CDR3 for alpha chain variable domain of TCR clone 19550 (TRAV21, )
CAVRQDAGNNHIRNPDPAVYQL

SEQ ID NO: 39100 - protein, 16 aa, Homo sapiens
  CDR3 for beta chain variable domain of TCR clone 19550 (TRBV4-2, TRBJ1-1)
CASRPLDGGGDTEAFF

SEQ ID NO: 39101 - protein, 14 aa, Homo sapiens
  CDR3 for alpha chain variable domain of TCR clone 19551 (TRAV16, TRAJ15)
CSLSGPQAGTALIF

SEQ ID NO: 39102 - protein, 12 aa, Homo sapiens
  CDR3 for beta chain variable domain of TCR clone 19551 (TRBV18, TRBJ2-5)
CASSPSKETQYF

SEQ ID NO: 39103 - protein, 12 aa, Homo sapiens
  CDR3 for alpha chain variable domain of TCR clone 19552 (TRAV13-1, TRAJ17)
CAARTAGNKLTF

SEQ ID NO: 39104 - protein, 18 aa, Homo sapiens
  CDR3 for beta chain variable domain of TCR clone 19552 (TRBV7-6, TRBJ1-1)
CIAVPAAPRGGANTEAFF

SEQ ID NO: 39105 - protein, 14 aa, Homo sapiens
  CDR3 for alpha chain variable domain of TCR clone 19553 (TRAV8-4, TRAJ13)
CAVTLSGGYQKVTF

SEQ ID NO: 39106 - protein, 14 aa, Homo sapiens
  CDR3 for beta chain variable domain of TCR clone 19553 (TRBV7-2, TRBJ1-2)
CASSQTGSTYGYSF

SEQ ID NO: 39107 - protein, 13 aa, Homo sapiens
  CDR3 for alpha chain variable domain of TCR clone 19554 (TRAV12-3, TRAJ9)
CAMSADGGFKTIL

SEQ ID NO: 39108 - protein, 14 aa, Homo sapiens
  CDR3 for beta chain variable domain of TCR clone 19554 (TRBV6-1, TRBJ2-7)
CASSERVNPYEQYF

SEQ ID NO: 39109 - protein, 11 aa, Homo sapiens
  CDR3 for alpha chain variable domain of TCR clone 19555 (TRAV14/DV4, )
CAMREISRTLT

SEQ ID NO: 39110 - protein, 14 aa, Homo sapiens
  CDR3 for beta chain variable domain of TCR clone 19555 (TRBV2, TRBJ2-1)
CASSDRACYNEQFF

SEQ ID NO: 39111 - protein, 13 aa, Homo sapiens
  CDR3 for alpha chain variable domain of TCR clone 19556 (TRAV12-2, TRAJ20)
CRDGQGNDYKLSF

SEQ ID NO: 39112 - protein, 14 aa, Homo sapiens
  CDR3 for beta chain variable domain of TCR clone 19556 (TRBV7-2, TRBJ2-5)
CASSFGGAQETQYF

SEQ ID NO: 39113 - protein, 10 aa, Homo sapiens
  CDR3 for alpha chain variable domain of TCR clone 19557 (TRAV12-3, TRAJ49)
CAMNDDQFYF

SEQ ID NO: 39114 - protein, 13 aa, Homo sapiens
  CDR3 for beta chain variable domain of TCR clone 19557 (TRBV12-4, TRBJ1-1)
CASSPGTGYEAFF

SEQ ID NO: 39115 - protein, 14 aa, Homo sapiens
  CDR3 for alpha chain variable domain of TCR clone 19558 (TRAV20, TRAJ56)
CAVQFGGANSKLTF

SEQ ID NO: 39116 - protein, 14 aa, Homo sapiens
  CDR3 for beta chain variable domain of TCR clone 19558 (TRBV20-1, TRBJ2-7)
CSAKRGRSSCEQYF

SEQ ID NO: 39117 - protein, 14 aa, Homo sapiens
  CDR3 for alpha chain variable domain of TCR clone 19559 (TRAV35, TRAJ40)
CAGSTTSGTYKYTF

SEQ ID NO: 39118 - protein, 13 aa, Homo sapiens
  CDR3 for beta chain variable domain of TCR clone 19559 (TRBV20-1, TRBJ1-6)
CSAPLGVGSPLHF

SEQ ID NO: 39119 - protein, 13 aa, Homo sapiens
  CDR3 for alpha chain variable domain of TCR clone 19560 (TRAV27, TRAJ45)
CRSSGGGADGLTF

SEQ ID NO: 39120 - protein, 17 aa, Homo sapiens
  CDR3 for beta chain variable domain of TCR clone 19560 (TRBV11-2, TRBJ2-1)
CASRLYPPGVEYNEQFF

SEQ ID NO: 39121 - protein, 15 aa, Homo sapiens
  CDR3 for alpha chain variable domain of TCR clone 19561 (TRAV3, TRAJ22)
CAVRDRGGSARQLTF

SEQ ID NO: 39122 - protein, 14 aa, Homo sapiens
  CDR3 for beta chain variable domain of TCR clone 19561 (TRBV7-6, TRBJ2-3)
CASSLGTVTDTQYF

SEQ ID NO: 39123 - protein, 12 aa, Homo sapiens
  CDR3 for alpha chain variable domain of TCR clone 19562 (TRAV3, TRAJ34)
CAVLGNIDKLIF

SEQ ID NO: 39124 - protein, 13 aa, Homo sapiens
  CDR3 for beta chain variable domain of TCR clone 19562 (TRBV19, TRBJ2-1)
CASSIGTGNEQFF

SEQ ID NO: 39125 - protein, 12 aa, Homo sapiens
  CDR3 for alpha chain variable domain of TCR clone 19563 (TRAV13-2, TRAJ8)
CAPWLGFQKLVF

SEQ ID NO: 39126 - protein, 16 aa, Homo sapiens
  CDR3 for beta chain variable domain of TCR clone 19563 (TRBV18, TRBJ1-1)
CASSPGVGGRGGEAFF

SEQ ID NO: 39127 - protein, 16 aa, Homo sapiens
  CDR3 for alpha chain variable domain of TCR clone 19564 (TRAV30, TRAJ24)
CGTEIVDADSWGKFQF

SEQ ID NO: 39128 - protein, 15 aa, Homo sapiens
  CDR3 for beta chain variable domain of TCR clone 19564 (TRBV20-1, TRBJ1-1)
CSASRGVTGNTEAFF

SEQ ID NO: 39129 - protein, 13 aa, Homo sapiens
  CDR3 for alpha chain variable domain of TCR clone 19565 (TRAV13-1, TRAJ39)
CAASIWAGNMLTF

SEQ ID NO: 39130 - protein, 17 aa, Homo sapiens
  CDR3 for beta chain variable domain of TCR clone 19565 (TRBV7-9, TRBJ1-1)
CASSLLEQGALKLSLDK

SEQ ID NO: 39131 - protein, 14 aa, Homo sapiens
  CDR3 for alpha chain variable domain of TCR clone 19566 (TRAV38-1, TRAJ45)
CAYYSGGGADGLTF

SEQ ID NO: 39132 - protein, 20 aa, Homo sapiens
  CDR3 for beta chain variable domain of TCR clone 19566 (TRBV28, TRBJ2-1)
CASTPIGRSPGLAGGDEQFF

SEQ ID NO: 39133 - protein, 12 aa, Homo sapiens
  CDR3 for alpha chain variable domain of TCR clone 19567 (TRAV21, TRAJ17)
CAMTLTGNKLTF

SEQ ID NO: 39134 - protein, 15 aa, Homo sapiens
  CDR3 for beta chain variable domain of TCR clone 19567 (TRBV20-1, TRBJ2-7)
CSARDRVSGMDEQYF

SEQ ID NO: 39135 - protein, 14 aa, Homo sapiens
  CDR3 for alpha chain variable domain of TCR clone 19568 (TRAV1-2, TRAJ8)
CAVREDTGFQKLVF

SEQ ID NO: 39136 - protein, 16 aa, Homo sapiens
  CDR3 for beta chain variable domain of TCR clone 19568 (TRBV11-2, TRBJ2-7)
CASSPTTGGVSYEQYF

SEQ ID NO: 39137 - protein, 13 aa, Homo sapiens
  CDR3 for alpha chain variable domain of TCR clone 19569 (TRAV23/DV6, TRAJ16)
CAASISDGQKLPF

SEQ ID NO: 39138 - protein, 15 aa, Homo sapiens
  CDR3 for beta chain variable domain of TCR clone 19569 (TRBV2, TRBJ2-2)
CASSRETVGTGELFF

SEQ ID NO: 39139 - protein, 15 aa, Homo sapiens
  CDR3 for alpha chain variable domain of TCR clone 19570 (TRAV26-1, TRAJ29)
CIVRGEGSGNTPLVF

SEQ ID NO: 39140 - protein, 14 aa, Homo sapiens
  CDR3 for beta chain variable domain of TCR clone 19570 (TRBV18, TRBJ2-5)
CASSPGVSQETQYF

SEQ ID NO: 39141 - protein, 15 aa, Homo sapiens
  CDR3 for alpha chain variable domain of TCR clone 19571 (TRAV3, TRAJ45)
CAVRTPWGGADGLPF

SEQ ID NO: 39142 - protein, 16 aa, Homo sapiens
  CDR3 for beta chain variable domain of TCR clone 19571 (TRBV6-1, TRBJ2-2)
CASSFGQGANTGELFF

SEQ ID NO: 39143 - protein, 13 aa, Homo sapiens
  CDR3 for alpha chain variable domain of TCR clone 19572 (TRAV1-1, TRAJ9)
CAAKNTGGFKPIF

SEQ ID NO: 39144 - protein, 14 aa, Homo sapiens
  CDR3 for beta chain variable domain of TCR clone 19572 (TRBV20-1, TRBJ2-1)
CSAQIGGSANEQFF

SEQ ID NO: 39145 - protein, 16 aa, Homo sapiens
  CDR3 for alpha chain variable domain of TCR clone 19573 (TRAV3, TRAJ28)
CAVLPRSGAGSYQLTF

SEQ ID NO: 39146 - protein, 13 aa, Homo sapiens
  CDR3 for beta chain variable domain of TCR clone 19573 (TRBV12-4, TRBJ2-5)
CASRLAVQEAQYF

SEQ ID NO: 39147 - protein, 14 aa, Homo sapiens
  CDR3 for alpha chain variable domain of TCR clone 19574 (TRAV12-2, TRAJ17)
CAVLFKAAGNKLTF

SEQ ID NO: 39148 - protein, 17 aa, Homo sapiens
  CDR3 for beta chain variable domain of TCR clone 19574 (TRBV20-1, TRBJ2-2)
CSASGSRQGGLTGELFF

SEQ ID NO: 39149 - protein, 17 aa, Homo sapiens
  CDR3 for alpha chain variable domain of TCR clone 19575 (TRAV23/DV6, TRAJ57)
CAASSTLSQGGSEKLVF

SEQ ID NO: 39150 - protein, 14 aa, Homo sapiens
  CDR3 for beta chain variable domain of TCR clone 19575 (TRBV13, TRBJ2-5)
CASSLGQGKETQYF

SEQ ID NO: 39151 - protein, 11 aa, Homo sapiens
  CDR3 for alpha chain variable domain of TCR clone 19576 (TRAV21, TRAJ17)
CAAPAGNKLTF

SEQ ID NO: 39152 - protein, 17 aa, Homo sapiens
  CDR3 for beta chain variable domain of TCR clone 19576 (TRBV9, TRBJ2-5)
CASSVAGQGPSIETQHF

SEQ ID NO: 39153 - protein, 15 aa, Homo sapiens
  CDR3 for alpha chain variable domain of TCR clone 19577 (TRAV2, TRAJ22)
CAAPSRGGSARQLTF

SEQ ID NO: 39154 - protein, 14 aa, Homo sapiens
  CDR3 for beta chain variable domain of TCR clone 19577 (TRBV7-6, TRBJ2-3)
CASSLGTVTDTQYF

SEQ ID NO: 39155 - protein, 13 aa, Homo sapiens
  CDR3 for alpha chain variable domain of TCR clone 19578 (TRAV8-3, TRAJ28)
CAVGAVGSYQLTF

SEQ ID NO: 39156 - protein, 15 aa, Homo sapiens
  CDR3 for beta chain variable domain of TCR clone 19578 (TRBV7-9, TRBJ1-5)
CASSQGHQPSQPQHF

SEQ ID NO: 39157 - protein, 15 aa, Homo sapiens
  CDR3 for alpha chain variable domain of TCR clone 19579 (TRAV2, TRAJ9)
CAVEDRGTGGFKTIF

SEQ ID NO: 39158 - protein, 13 aa, Homo sapiens
  CDR3 for beta chain variable domain of TCR clone 19579 (TRBV5-5, TRBJ1-2)
CASSFWRGEDYTF

SEQ ID NO: 39159 - protein, 13 aa, Homo sapiens
  CDR3 for alpha chain variable domain of TCR clone 19580 (TRAV21, TRAJ20)
RAVGLRVDYKLSF

SEQ ID NO: 39160 - protein, 13 aa, Homo sapiens
  CDR3 for beta chain variable domain of TCR clone 19580 (TRBV6-1, TRBJ1-1)
CASSRQGNTEAFF

SEQ ID NO: 39161 - protein, 12 aa, Homo sapiens
  CDR3 for alpha chain variable domain of TCR clone 19581 (TRAV13-2, TRAJ23)
CAERHRGGKLIF

SEQ ID NO: 39162 - protein, 17 aa, Homo sapiens
  CDR3 for beta chain variable domain of TCR clone 19581 (TRBV11-2, TRBJ2-1)
CASSLYPPGVEYNEQFF

SEQ ID NO: 39163 - protein, 10 aa, Homo sapiens
  CDR3 for alpha chain variable domain of TCR clone 19582 (TRAV1-2, TRAJ20)
CALNDYKLSF

SEQ ID NO: 39164 - protein, 15 aa, Homo sapiens
  CDR3 for beta chain variable domain of TCR clone 19582 (TRBV5-1, TRBJ2-1)
CASSPPRAPYNEQFF

SEQ ID NO: 39165 - protein, 12 aa, Homo sapiens
  CDR3 for alpha chain variable domain of TCR clone 19583 (TRAV8-2, TRAJ45)
DAAEYSADGLTF

SEQ ID NO: 39166 - protein, 13 aa, Homo sapiens
  CDR3 for beta chain variable domain of TCR clone 19583 (TRBV7-3, TRBJ2-1)
CASSPVAYNEQFF

SEQ ID NO: 39167 - protein, 11 aa, Homo sapiens
  CDR3 for alpha chain variable domain of TCR clone 19584 (TRAV12-1, TRAJ8)
CVVTGFQELVF

SEQ ID NO: 39168 - protein, 14 aa, Homo sapiens
  CDR3 for beta chain variable domain of TCR clone 19584 (TRBV19, TRBJ2-1)
CASGKSTQYNEQFF

SEQ ID NO: 39169 - protein, 11 aa, Homo sapiens
  CDR3 for alpha chain variable domain of TCR clone 19585 (TRAV2, TRAJ13)
CASEGYQKVTF

SEQ ID NO: 39170 - protein, 16 aa, Homo sapiens
  CDR3 for beta chain variable domain of TCR clone 19585 (TRBV6-1, TRBJ2-5)
CASSETLDRGAETQYF

SEQ ID NO: 39171 - protein, 13 aa, Homo sapiens
  CDR3 for alpha chain variable domain of TCR clone 19586 (TRAV13-1, TRAJ5)
CAASDTGRRALTF

SEQ ID NO: 39172 - protein, 12 aa, Homo sapiens
  CDR3 for beta chain variable domain of TCR clone 19586 (TRBV28, TRBJ2-3)
CASSLYQDTQYF

SEQ ID NO: 39173 - protein, 15 aa, Homo sapiens
  CDR3 for alpha chain variable domain of TCR clone 19587 (TRAV27, TRAJ38)
CAARRNAGNNRKLIW

SEQ ID NO: 39174 - protein, 13 aa, Homo sapiens
  CDR3 for beta chain variable domain of TCR clone 19587 (TRBV12-5, TRBJ2-3)
CASGDRQSDKQYF

SEQ ID NO: 39175 - protein, 14 aa, Homo sapiens
  CDR3 for alpha chain variable domain of TCR clone 19588 (TRAV4, TRAJ26)
CLVGPHNYGQNFVL

SEQ ID NO: 39176 - protein, 17 aa, Homo sapiens
  CDR3 for beta chain variable domain of TCR clone 19588 (TRBV24-1, TRBJ2-1)
CATSDVSTSGTYNEQFF

SEQ ID NO: 39177 - protein, 12 aa, Homo sapiens
  CDR3 for alpha chain variable domain of TCR clone 19589 (TRAV21, TRAJ33)
CAKMDINYQLIW

SEQ ID NO: 39178 - protein, 14 aa, Homo sapiens
  CDR3 for beta chain variable domain of TCR clone 19589 (TRBV2, TRBJ2-7)
CASSLTSGGYEQYF

SEQ ID NO: 39179 - protein, 15 aa, Homo sapiens
  CDR3 for alpha chain variable domain of TCR clone 19590 (TRAV8-3, TRAJ27)
CAVGPSKTNAGKSTF

SEQ ID NO: 39180 - protein, 15 aa, Homo sapiens
  CDR3 for beta chain variable domain of TCR clone 19590 (TRBV7-2, TRBJ2-1)
CASGSGLAGGNEQFF

SEQ ID NO: 39181 - protein, 14 aa, Homo sapiens
  CDR3 for alpha chain variable domain of TCR clone 19591 (TRAV35, TRAJ22)
CAGLRPGSARQLTL

SEQ ID NO: 39182 - protein, 15 aa, Homo sapiens
  CDR3 for beta chain variable domain of TCR clone 19591 (TRBV12-4, TRBJ2-5)
CASSPPTGLQETQYF

SEQ ID NO: 39183 - protein, 13 aa, Homo sapiens
  CDR3 for alpha chain variable domain of TCR clone 19592 (TRAV20, TRAJ37)
CAGCSRNTGKLIF

SEQ ID NO: 39184 - protein, 11 aa, Homo sapiens
  CDR3 for beta chain variable domain of TCR clone 19592 (TRBV12-4, TRBJ2-3)
CASTATDTQYF

SEQ ID NO: 39185 - protein, 14 aa, Homo sapiens
  CDR3 for alpha chain variable domain of TCR clone 19593 (TRAV1-1, TRAJ27)
CAVIITPMQANQPL

SEQ ID NO: 39186 - protein, 13 aa, Homo sapiens
  CDR3 for beta chain variable domain of TCR clone 19593 (TRBV7-9, TRBJ1-2)
CASSLKQNYGYTF

SEQ ID NO: 39187 - protein, 13 aa, Homo sapiens
  CDR3 for alpha chain variable domain of TCR clone 19594 (TRAV2, TRAJ40)
CAVVTSGTYKYIF

SEQ ID NO: 39188 - protein, 14 aa, Homo sapiens
  CDR3 for beta chain variable domain of TCR clone 19594 (TRBV19, TRBJ2-1)
CASSTFVLSGEQFF

SEQ ID NO: 39189 - protein, 20 aa, Homo sapiens
  CDR3 for alpha chain variable domain of TCR clone 19595 (TRAV26-1, TRAJ42)
CCVLLHRQTYYGGSQGNLIF

SEQ ID NO: 39190 - protein, 16 aa, Homo sapiens
  CDR3 for beta chain variable domain of TCR clone 19595 (TRBV7-3, TRBJ2-2)
CASSLKRGTLSGEPFF

SEQ ID NO: 39191 - protein, 15 aa, Homo sapiens
  CDR3 for alpha chain variable domain of TCR clone 19596 (TRAV27, TRAJ38)
CEARRNAGNNRKLIW

SEQ ID NO: 39192 - protein, 13 aa, Homo sapiens
  CDR3 for beta chain variable domain of TCR clone 19596 (TRBV12-5, TRBJ2-3)
CASGDRQSDTQYF

SEQ ID NO: 39193 - protein, 12 aa, Homo sapiens
  CDR3 for alpha chain variable domain of TCR clone 19597 (TRAV12-3, TRAJ17)
CAMTLTGNKLTF

SEQ ID NO: 39194 - protein, 15 aa, Homo sapiens
  CDR3 for beta chain variable domain of TCR clone 19597 (TRBV19, TRBJ2-1)
CASSSPGVPLDEQFF

SEQ ID NO: 39195 - protein, 15 aa, Homo sapiens
  CDR3 for alpha chain variable domain of TCR clone 19598 (TRAV3, TRAJ20)
CAVGDIKLSDYKLSF

SEQ ID NO: 39196 - protein, 15 aa, Homo sapiens
  CDR3 for beta chain variable domain of TCR clone 19598 (TRBV7-9, TRBJ1-6)
CASSSPGRGNSPLHF

SEQ ID NO: 39197 - protein, 16 aa, Homo sapiens
  CDR3 for alpha chain variable domain of TCR clone 19599 (TRAV26-1, TRAJ53)
CIVRVAMGGSNYKMTF

SEQ ID NO: 39198 - protein, 12 aa, Homo sapiens
  CDR3 for beta chain variable domain of TCR clone 19599 (TRBV7-9, TRBJ1-5)
CASSPQGQPQHF

SEQ ID NO: 39199 - protein, 15 aa, Homo sapiens
  CDR3 for alpha chain variable domain of TCR clone 19600 (TRAV12-2, TRAJ53)
CAVNGGGGSNYKLTL

SEQ ID NO: 39200 - protein, 13 aa, Homo sapiens
  CDR3 for beta chain variable domain of TCR clone 19600 (TRBV3-1, TRBJ1-1)
CASSPGVITEAFF

SEQ ID NO: 39201 - protein, 14 aa, Homo sapiens
  CDR3 for alpha chain variable domain of TCR clone 19601 (TRAV12-1, TRAJ5)
CVVNERTGRRALTF

SEQ ID NO: 39202 - protein, 15 aa, Homo sapiens
  CDR3 for beta chain variable domain of TCR clone 19601 (TRBV27, TRBJ2-7)
CASSLSAGTVGEQYF

SEQ ID NO: 39203 - protein, 11 aa, Homo sapiens
  CDR3 for alpha chain variable domain of TCR clone 19602 (TRAV3, TRAJ21)
CAVGNFNKFYF

SEQ ID NO: 39204 - protein, 16 aa, Homo sapiens
  CDR3 for beta chain variable domain of TCR clone 19602 (TRBV19, TRBJ2-1)
SASSKAGPSSYNEQFF

SEQ ID NO: 39205 - protein, 14 aa, Homo sapiens
  CDR3 for alpha chain variable domain of TCR clone 19603 (TRAV16, TRAJ39)
CALSKNNAGNMLTF

SEQ ID NO: 39206 - protein, 17 aa, Homo sapiens
  CDR3 for beta chain variable domain of TCR clone 19603 (TRBV6-6, TRBJ2-1)
CASSYEQFLGPGTRLTV

SEQ ID NO: 39207 - protein, 13 aa, Homo sapiens
  CDR3 for alpha chain variable domain of TCR clone 19604 (TRAV21, TRAJ27)
CAARPGNAGKSTF

SEQ ID NO: 39208 - protein, 14 aa, Homo sapiens
  CDR3 for beta chain variable domain of TCR clone 19604 (TRBV7-6, TRBJ2-3)
CASILGTVTDTQYF

SEQ ID NO: 39209 - protein, 11 aa, Homo sapiens
  CDR3 for alpha chain variable domain of TCR clone 19605 (TRAV12-3, TRAJ27)
CAMANAGKSTF

SEQ ID NO: 39210 - protein, 13 aa, Homo sapiens
  CDR3 for beta chain variable domain of TCR clone 19605 (TRBV20-1, TRBJ1-1)
CSARVGGNTESFF

SEQ ID NO: 39211 - protein, 12 aa, Homo sapiens
  CDR3 for alpha chain variable domain of TCR clone 19606 (TRAV12-3, TRAJ17)
CAMTLTGNKLTF

SEQ ID NO: 39212 - protein, 13 aa, Homo sapiens
  CDR3 for beta chain variable domain of TCR clone 19606 (TRBV7-9, TRBJ1-2)
CASSLKQNYGCTF

SEQ ID NO: 39213 - protein, 13 aa, Homo sapiens
  CDR3 for alpha chain variable domain of TCR clone 19607 (TRAV12-3, TRAJ7)
CTMTPYGNNRLAF

SEQ ID NO: 39214 - protein, 16 aa, Homo sapiens
  CDR3 for beta chain variable domain of TCR clone 19607 (TRBV20-1, TRBJ1-4)
CSARPYGGELNEKLFF

SEQ ID NO: 39215 - protein, 11 aa, Homo sapiens
  CDR3 for alpha chain variable domain of TCR clone 19608 (TRAV1-2, TRAJ20)
CAVSNDYKLSF

SEQ ID NO: 39216 - protein, 16 aa, Homo sapiens
  CDR3 for beta chain variable domain of TCR clone 19608 (TRBV29-1, TRBJ2-6)
CSAEDITYSGANVLTF

SEQ ID NO: 39217 - protein, 11 aa, Homo sapiens
  CDR3 for alpha chain variable domain of TCR clone 19609 (TRAV1-1, TRAJ23)
CAVRQRGKLIF

SEQ ID NO: 39218 - protein, 20 aa, Homo sapiens
  CDR3 for beta chain variable domain of TCR clone 19609 (TRBV7-8, TRBJ2-2)
CASSHLFPGPTIHITGELFF

SEQ ID NO: 39219 - protein, 14 aa, Homo sapiens
  CDR3 for alpha chain variable domain of TCR clone 19610 (TRAV1-2, TRAJ16)
GAVNRFSDGQKLLF

SEQ ID NO: 39220 - protein, 15 aa, Homo sapiens
  CDR3 for beta chain variable domain of TCR clone 19610 (TRBV9, TRBJ1-6)
CASSVAGTGDSPLHF

SEQ ID NO: 39221 - protein, 14 aa, Homo sapiens
  CDR3 for alpha chain variable domain of TCR clone 19611 (TRAV17, TRAJ57)
CATDPQGGSEKLVF

SEQ ID NO: 39222 - protein, 14 aa, Homo sapiens
  CDR3 for beta chain variable domain of TCR clone 19611 (TRBV4-1, TRBJ2-2)
CASSQAVNTGELFF

SEQ ID NO: 39223 - protein, 12 aa, Homo sapiens
  CDR3 for alpha chain variable domain of TCR clone 19612 (TRAV17, TRAJ20)
CATDGDDYKLSF

SEQ ID NO: 39224 - protein, 13 aa, Homo sapiens
  CDR3 for beta chain variable domain of TCR clone 19612 (TRBV20-1, TRBJ1-1)
CSARVGGNTEAFF

SEQ ID NO: 39225 - protein, 15 aa, Homo sapiens
  CDR3 for alpha chain variable domain of TCR clone 19613 (TRAV20, TRAJ23)
CAVQAVRSQGGKLIF

SEQ ID NO: 39226 - protein, 13 aa, Homo sapiens
  CDR3 for beta chain variable domain of TCR clone 19613 (TRBV9, TRBJ2-7)
CASSASDSYEQYF

SEQ ID NO: 39227 - protein, 13 aa, Homo sapiens
  CDR3 for alpha chain variable domain of TCR clone 19614 (TRAV20, TRAJ21)
CAVEGYNFNKFYF

SEQ ID NO: 39228 - protein, 14 aa, Homo sapiens
  CDR3 for beta chain variable domain of TCR clone 19614 (TRBV3-1, TRBJ2-5)
RASSQGPDQETQYF

SEQ ID NO: 39229 - protein, 15 aa, Homo sapiens
  CDR3 for alpha chain variable domain of TCR clone 19615 (TRAV12-3, TRAJ49)
CAMAVTPNTGNQFYF

SEQ ID NO: 39230 - protein, 18 aa, Homo sapiens
  CDR3 for beta chain variable domain of TCR clone 19615 (TRBV4-1, TRBJ1-5)
CASSQGPRGQGLNQPQHF

SEQ ID NO: 39231 - protein, 17 aa, Homo sapiens
  CDR3 for alpha chain variable domain of TCR clone 19616 (TRAV13-1, TRAJ52)
CAASSGAGGTSYGTLTF

SEQ ID NO: 39232 - protein, 15 aa, Homo sapiens
  CDR3 for beta chain variable domain of TCR clone 19616 (TRBV2, TRBJ2-1)
CASSELAGSYNEQFF

SEQ ID NO: 39233 - protein, 18 aa, Homo sapiens
  CDR3 for alpha chain variable domain of TCR clone 19617 (TRAV13-1, TRAJ52)
CAAKNPNAGGTSYGKLTF

SEQ ID NO: 39234 - protein, 16 aa, Homo sapiens
  CDR3 for beta chain variable domain of TCR clone 19617 (TRBV12-5, TRBJ2-5)
CASGPRTSGNQETQYF

SEQ ID NO: 39235 - protein, 13 aa, Homo sapiens
  CDR3 for alpha chain variable domain of TCR clone 19618 (TRAV38-1, TRAJ42)
CARWGGSRGNLIF

SEQ ID NO: 39236 - protein, 17 aa, Homo sapiens
  CDR3 for beta chain variable domain of TCR clone 19618 (TRBV20-1, TRBJ2-1)
CSARDPLAGVWDNEQFF

SEQ ID NO: 39237 - protein, 14 aa, Homo sapiens
  CDR3 for alpha chain variable domain of TCR clone 19619 (TRAV12-2, TRAJ5)
CAVNRSTGRRALTF

SEQ ID NO: 39238 - protein, 12 aa, Homo sapiens
  CDR3 for beta chain variable domain of TCR clone 19619 (TRBV19, TRBJ1-5)
CASSIAQQAQHF

SEQ ID NO: 39239 - protein, 15 aa, Homo sapiens
  CDR3 for alpha chain variable domain of TCR clone 19620 (TRAV4, TRAJ39)
CLVGPNNNAGNMLTF

SEQ ID NO: 39240 - protein, 15 aa, Homo sapiens
  CDR3 for beta chain variable domain of TCR clone 19620 (TRBV4-2, TRBJ1-2)
CASSQRTGGRDGYTF

SEQ ID NO: 39241 - protein, 17 aa, Homo sapiens
  CDR3 for alpha chain variable domain of TCR clone 19621 (TRAV13-1, TRAJ31)
YAPRDRLMFGDGTQLVV

SEQ ID NO: 39242 - protein, 12 aa, Homo sapiens
  CDR3 for beta chain variable domain of TCR clone 19621 (TRBV7-9, TRBJ2-7)
CASSLEGYEQYF

SEQ ID NO: 39243 - protein, 15 aa, Homo sapiens
  CDR3 for alpha chain variable domain of TCR clone 19622 (TRAV8-6, TRAJ28)
CAVRPLRAGSYQLTF

SEQ ID NO: 39244 - protein, 16 aa, Homo sapiens
  CDR3 for beta chain variable domain of TCR clone 19622 (TRBV7-3, TRBJ2-2)
CASSLKRGTLSGELFF

SEQ ID NO: 39245 - protein, 17 aa, Homo sapiens
  CDR3 for alpha chain variable domain of TCR clone 19623 (TRAV13-1, TRAJ31)
CAPRDRLMFGDGTQLAV

SEQ ID NO: 39246 - protein, 12 aa, Homo sapiens
  CDR3 for beta chain variable domain of TCR clone 19623 (TRBV7-9, TRBJ2-7)
CASSLEGYEQYF

SEQ ID NO: 39247 - protein, 15 aa, Homo sapiens
  CDR3 for alpha chain variable domain of TCR clone 19624 (TRAV16, TRAJ17)
CALSGQEAAGNKLTF

SEQ ID NO: 39248 - protein, 14 aa, Homo sapiens
  CDR3 for beta chain variable domain of TCR clone 19624 (TRBV7-2, TRBJ2-7)
CASSLDPGGGEQYF

SEQ ID NO: 39249 - protein, 13 aa, Homo sapiens
  CDR3 for alpha chain variable domain of TCR clone 19625 (TRAV13-1, TRAJ39)
CSKYSNAGNMLTF

SEQ ID NO: 39250 - protein, 14 aa, Homo sapiens
  CDR3 for beta chain variable domain of TCR clone 19625 (TRBV7-6, TRBJ2-3)
CASSVAGGTDTQYF

SEQ ID NO: 39251 - protein, 20 aa, Homo sapiens
  CDR3 for alpha chain variable domain of TCR clone 19626 (TRAV12-1, TRAJ42)
SSVIQPPTSVKGGSQGNLIF

SEQ ID NO: 39252 - protein, 18 aa, Homo sapiens
  CDR3 for beta chain variable domain of TCR clone 19626 (TRBV11-2, TRBJ2-3)
CASSLGGASRGAPNTQYL

SEQ ID NO: 39253 - protein, 14 aa, Homo sapiens
  CDR3 for alpha chain variable domain of TCR clone 19627 (TRAV12-3, TRAJ12)
CAMSEVDSSYKLIL

SEQ ID NO: 39254 - protein, 12 aa, Homo sapiens
  CDR3 for beta chain variable domain of TCR clone 19627 (TRBV18, TRBJ1-4)
CASSPSREKLFF

SEQ ID NO: 39255 - protein, 14 aa, Homo sapiens
  CDR3 for alpha chain variable domain of TCR clone 19628 (TRAV38-1, TRAJ45)
CAYYSGGGADGLTF

SEQ ID NO: 39256 - protein, 20 aa, Homo sapiens
  CDR3 for beta chain variable domain of TCR clone 19628 (TRBV28, TRBJ2-1)
CASTPIGRSPGLAGGSEQFF

SEQ ID NO: 39257 - protein, 23 aa, Homo sapiens
  CDR3 for alpha chain variable domain of TCR clone 19629 (TRAV26-1, TRAJ38)
CIADNAGNNHIQNPDPAVYQLRD

SEQ ID NO: 39258 - protein, 13 aa, Homo sapiens
  CDR3 for beta chain variable domain of TCR clone 19629 (TRBV20-1, TRBJ1-1)
CSARGRGNTEAFF

SEQ ID NO: 39259 - protein, 14 aa, Homo sapiens
  CDR3 for alpha chain variable domain of TCR clone 19630 (TRAV13-1, TRAJ35)
CAASKGGFGNVLHC

SEQ ID NO: 39260 - protein, 13 aa, Homo sapiens
  CDR3 for beta chain variable domain of TCR clone 19630 (TRBV7-3, TRBJ1-1)
CASSQDWGAEAFF

SEQ ID NO: 39261 - protein, 18 aa, Homo sapiens
  CDR3 for alpha chain variable domain of TCR clone 19631 (TRAV21, TRAJ52)
CAVRPSPAGGTSYGKLRF

SEQ ID NO: 39262 - protein, 17 aa, Homo sapiens
  CDR3 for beta chain variable domain of TCR clone 19631 (TRBV13, TRBJ2-3)
CASSLSRVAGGRNTQYF

SEQ ID NO: 39263 - protein, 14 aa, Homo sapiens
  CDR3 for alpha chain variable domain of TCR clone 19632 (TRAV1-1, TRAJ35)
CAVRSIGFGNVLHC

SEQ ID NO: 39264 - protein, 14 aa, Homo sapiens
  CDR3 for beta chain variable domain of TCR clone 19632 (TRBV5-7, TRBJ2-7)
CASSGGLSSYEQYF

SEQ ID NO: 39265 - protein, 12 aa, Homo sapiens
  CDR3 for alpha chain variable domain of TCR clone 19633 (TRAV21, TRAJ33)
CAKMDSKYQLIW

SEQ ID NO: 39266 - protein, 14 aa, Homo sapiens
  CDR3 for beta chain variable domain of TCR clone 19633 (TRBV2, TRBJ2-7)
CASSLTSGGYEQYF

SEQ ID NO: 39267 - protein, 16 aa, Homo sapiens
  CDR3 for alpha chain variable domain of TCR clone 19634 (TRAV3, TRAJ18)
RAVRDGRGSTLGRLYF

SEQ ID NO: 39268 - protein, 15 aa, Homo sapiens
  CDR3 for beta chain variable domain of TCR clone 19634 (TRBV7-9, TRBJ1-6)
CASSSPGRGNSPLHF

SEQ ID NO: 39269 - protein, 12 aa, Homo sapiens
  CDR3 for alpha chain variable domain of TCR clone 19635 (TRAV17, TRAJ57)
CATDGGSVKLVF

SEQ ID NO: 39270 - protein, 13 aa, Homo sapiens
  CDR3 for beta chain variable domain of TCR clone 19635 (TRBV7-9, TRBJ2-7)
CASSFAGAYEQYF

SEQ ID NO: 39271 - protein, 10 aa, Homo sapiens
  CDR3 for alpha chain variable domain of TCR clone 19636 (TRAV13-1, TRAJ8)
CAAPFQKLVF

SEQ ID NO: 39272 - protein, 17 aa, Homo sapiens
  CDR3 for beta chain variable domain of TCR clone 19636 (TRBV11-2, TRBJ2-1)
CASSLYPPGVEYNEQFF

SEQ ID NO: 39273 - protein, 14 aa, Homo sapiens
  CDR3 for alpha chain variable domain of TCR clone 19637 (TRAV13-2, TRAJ17)
CAENSKAAGNKLTF

SEQ ID NO: 39274 - protein, 13 aa, Homo sapiens
  CDR3 for beta chain variable domain of TCR clone 19637 (TRBV7-9, TRBJ1-2)
CASSLKQNYGYTF

SEQ ID NO: 39275 - protein, 11 aa, Homo sapiens
  CDR3 for alpha chain variable domain of TCR clone 19638 (TRAV3, TRAJ21)
CAVGNFNKFYF

SEQ ID NO: 39276 - protein, 16 aa, Homo sapiens
  CDR3 for beta chain variable domain of TCR clone 19638 (TRBV19, TRBJ2-1)
WASSKAGPSSYNEQFF

SEQ ID NO: 39277 - protein, 13 aa, Homo sapiens
  CDR3 for alpha chain variable domain of TCR clone 19639 (TRAV3, TRAJ20)
CAVRSLNDYKLSF

SEQ ID NO: 39278 - protein, 13 aa, Homo sapiens
  CDR3 for beta chain variable domain of TCR clone 19639 (TRBV6-1, TRBJ2-1)
CAGVDPTNNEQFF

SEQ ID NO: 39279 - protein, 14 aa, Homo sapiens
  CDR3 for alpha chain variable domain of TCR clone 19640 (TRAV1-2, TRAJ6)
CAVSLSGGSYVPTF

SEQ ID NO: 39280 - protein, 15 aa, Homo sapiens
  CDR3 for beta chain variable domain of TCR clone 19640 (TRBV28, TRBJ2-7)
CASSPGGRGFYEQYF

SEQ ID NO: 39281 - protein, 13 aa, Homo sapiens
  CDR3 for alpha chain variable domain of TCR clone 19641 (TRAV2, TRAJ40)
CAVVTSGTYKYIF

SEQ ID NO: 39282 - protein, 14 aa, Homo sapiens
  CDR3 for beta chain variable domain of TCR clone 19641 (TRBV19, TRBJ2-1)
CASPTYVLSGEQFF

SEQ ID NO: 39283 - protein, 15 aa, Homo sapiens
  CDR3 for alpha chain variable domain of TCR clone 19642 (TRAV12-3, TRAJ6)
CAMGATSGGSYIPTF

SEQ ID NO: 39284 - protein, 11 aa, Homo sapiens
  CDR3 for beta chain variable domain of TCR clone 19642 (TRBV20-1, TRBJ1-5)
CSAQGDQPQHF

SEQ ID NO: 39285 - protein, 12 aa, Homo sapiens
  CDR3 for alpha chain variable domain of TCR clone 19643 (TRAV23/DV6, TRAJ30)
CAASKGDDKIIF

SEQ ID NO: 39286 - protein, 18 aa, Homo sapiens
  CDR3 for beta chain variable domain of TCR clone 19643 (TRBV10-3, TRBJ2-3)
CAISESRVGPMRGGTQYF

SEQ ID NO: 39287 - protein, 14 aa, Homo sapiens
  CDR3 for alpha chain variable domain of TCR clone 19644 (TRAV1-2, TRAJ8)
CAVREDTGFQKLVF

SEQ ID NO: 39288 - protein, 14 aa, Homo sapiens
  CDR3 for beta chain variable domain of TCR clone 19644 (TRBV11-2, TRBJ2-7)
CASSLGAGAYEQYF

SEQ ID NO: 39289 - protein, 13 aa, Homo sapiens
  CDR3 for alpha chain variable domain of TCR clone 19645 (TRAV8-3, TRAJ28)
CAVGAVGSYQLTF

SEQ ID NO: 39290 - protein, 17 aa, Homo sapiens
  CDR3 for beta chain variable domain of TCR clone 19645 (TRBV13, TRBJ2-3)
CASSLSRVAGGRNTQYF

SEQ ID NO: 39291 - protein, 12 aa, Homo sapiens
  CDR3 for alpha chain variable domain of TCR clone 19646 (TRAV8-3, TRAJ20)
CAVGATDYKLSF

SEQ ID NO: 39292 - protein, 16 aa, Homo sapiens
  CDR3 for beta chain variable domain of TCR clone 19646 (TRBV19, TRBJ2-2)
CASRSPGTGATGELFF

SEQ ID NO: 39293 - protein, 15 aa, Homo sapiens
  CDR3 for alpha chain variable domain of TCR clone 19647 (TRAV35, TRAJ58)
CAGRRQETSGSRLTF

SEQ ID NO: 39294 - protein, 14 aa, Homo sapiens
  CDR3 for beta chain variable domain of TCR clone 19647 (TRBV20-1, TRBJ1-1)
CSAQTRIGGTEAFF

SEQ ID NO: 39295 - protein, 12 aa, Homo sapiens
  CDR3 for alpha chain variable domain of TCR clone 19648 (TRAV1-1, TRAJ9)
CAVGTGGFKTIF

SEQ ID NO: 39296 - protein, 14 aa, Homo sapiens
  CDR3 for beta chain variable domain of TCR clone 19648 (TRBV7-8, TRBJ2-5)
CASSATGGQETQYF

SEQ ID NO: 39297 - protein, 23 aa, Homo sapiens
  CDR3 for alpha chain variable domain of TCR clone 19649 (TRAV26-1, TRAJ38)
CIADNAGNNHIQNPDPAVYQLRY

SEQ ID NO: 39298 - protein, 13 aa, Homo sapiens
  CDR3 for beta chain variable domain of TCR clone 19649 (TRBV20-1, TRBJ1-1)
CSARGGGNTEAFF

SEQ ID NO: 39299 - protein, 11 aa, Homo sapiens
  CDR3 for alpha chain variable domain of TCR clone 19650 (TRAV2, TRAJ33)
CAVESNYQLIW

SEQ ID NO: 39300 - protein, 15 aa, Homo sapiens
  CDR3 for beta chain variable domain of TCR clone 19650 (TRBV9, TRBJ1-6)
CASSVAGTGDSPLHF

SEQ ID NO: 39301 - protein, 14 aa, Homo sapiens
  CDR3 for alpha chain variable domain of TCR clone 19651 (TRAV12-2, TRAJ13)
CAVKKTGGYQKVTF

SEQ ID NO: 39302 - protein, 15 aa, Homo sapiens
  CDR3 for beta chain variable domain of TCR clone 19651 (TRBV27, TRBJ2-1)
CASSYGGGSSNEQFF

SEQ ID NO: 39303 - protein, 18 aa, Homo sapiens
  CDR3 for alpha chain variable domain of TCR clone 19652 (TRAV8-2, TRAJ41)
CVVSELRRTQIPGMHSTS

SEQ ID NO: 39304 - protein, 14 aa, Homo sapiens
  CDR3 for beta chain variable domain of TCR clone 19652 (TRBV28, TRBJ1-5)
CASSLFPGVQPQHF

SEQ ID NO: 39305 - protein, 14 aa, Homo sapiens
  CDR3 for alpha chain variable domain of TCR clone 19653 (TRAV1-2, TRAJ8)
CAVREDTGVQKLVF

SEQ ID NO: 39306 - protein, 15 aa, Homo sapiens
  CDR3 for beta chain variable domain of TCR clone 19653 (TRBV6-3, TRBJ2-7)
CASSSPGTVFYEQYF

SEQ ID NO: 39307 - protein, 14 aa, Homo sapiens
  CDR3 for alpha chain variable domain of TCR clone 19654 (TRAV16, TRAJ57)
CALPTQGGSEKLVF

SEQ ID NO: 39308 - protein, 17 aa, Homo sapiens
  CDR3 for beta chain variable domain of TCR clone 19654 (TRBV28, TRBJ1-3)
CASWGGISLETPYILER

SEQ ID NO: 39309 - protein, 14 aa, Homo sapiens
  CDR3 for alpha chain variable domain of TCR clone 19655 (TRAV38-1, TRAJ40)
CALRPTSGTYQYIF

SEQ ID NO: 39310 - protein, 14 aa, Homo sapiens
  CDR3 for beta chain variable domain of TCR clone 19655 (TRBV25-1, TRBJ1-1)
CASTHLGGNTEAFF

SEQ ID NO: 39311 - protein, 15 aa, Homo sapiens
  CDR3 for alpha chain variable domain of TCR clone 19656 (TRAV35, TRAJ50)
CAGRLRKTSYDKVIF

SEQ ID NO: 39312 - protein, 12 aa, Homo sapiens
  CDR3 for beta chain variable domain of TCR clone 19656 (TRBV5-1, TRBJ2-5)
CASSLGLETQYF

SEQ ID NO: 39313 - protein, 15 aa, Homo sapiens
  CDR3 for alpha chain variable domain of TCR clone 19657 (TRAV8-3, TRAJ11)
CAVGLLHSGYSTLTF

SEQ ID NO: 39314 - protein, 16 aa, Homo sapiens
  CDR3 for beta chain variable domain of TCR clone 19657 (TRBV7-9, TRBJ1-2)
CASSLGFSSGEDGYTF

SEQ ID NO: 39315 - protein, 14 aa, Homo sapiens
  CDR3 for alpha chain variable domain of TCR clone 19658 (TRAV8-4, TRAJ9)
CAVRINTGGFETIF

SEQ ID NO: 39316 - protein, 15 aa, Homo sapiens
  CDR3 for beta chain variable domain of TCR clone 19658 (TRBV10-2, TRBJ2-6)
CASSEQGTGANVLTF

SEQ ID NO: 39317 - protein, 12 aa, Homo sapiens
  CDR3 for alpha chain variable domain of TCR clone 19659 (TRAV41, TRAJ58)
CAVETGGSRLTF

SEQ ID NO: 39318 - protein, 15 aa, Homo sapiens
  CDR3 for beta chain variable domain of TCR clone 19659 (TRBV29-1, TRBJ2-6)
CSVGDRGSGANVLTF

SEQ ID NO: 39319 - protein, 14 aa, Homo sapiens
  CDR3 for alpha chain variable domain of TCR clone 19660 (TRAV8-3, TRAJ4)
CAVGAAGGYNKLIF

SEQ ID NO: 39320 - protein, 15 aa, Homo sapiens
  CDR3 for beta chain variable domain of TCR clone 19660 (TRBV20-1, TRBJ2-5)
CSAPPQTGFGETQYF

SEQ ID NO: 39321 - protein, 11 aa, Homo sapiens
  CDR3 for alpha chain variable domain of TCR clone 19661 (TRAV17, TRAJ43)
CATPRSNDMRF

SEQ ID NO: 39322 - protein, 15 aa, Homo sapiens
  CDR3 for beta chain variable domain of TCR clone 19661 (TRBV11-2, TRBJ2-1)
CASSLGTSGLNEQLF

SEQ ID NO: 39323 - protein, 11 aa, Homo sapiens
  CDR3 for alpha chain variable domain of TCR clone 19662 (TRAV2, TRAJ13)
CASGGYQKVTF

SEQ ID NO: 39324 - protein, 16 aa, Homo sapiens
  CDR3 for beta chain variable domain of TCR clone 19662 (TRBV6-1, TRBJ2-5)
CASSETLDRGAETHYF

SEQ ID NO: 39325 - protein, 13 aa, Homo sapiens
  CDR3 for alpha chain variable domain of TCR clone 19663 (TRAV35, TRAJ42)
CAGFPESQGNLIF

SEQ ID NO: 39326 - protein, 12 aa, Homo sapiens
  CDR3 for beta chain variable domain of TCR clone 19663 (TRBV11-2, TRBJ2-2)
CASSLGGGELFF

SEQ ID NO: 39327 - protein, 12 aa, Homo sapiens
  CDR3 for alpha chain variable domain of TCR clone 19664 (TRAV12-1, TRAJ40)
CVVYSGTYKYIF

SEQ ID NO: 39328 - protein, 18 aa, Homo sapiens
  CDR3 for beta chain variable domain of TCR clone 19664 (TRBV11-2, TRBJ2-3)
CASSLGEASRGAPNTQYF

SEQ ID NO: 39329 - protein, 14 aa, Homo sapiens
  CDR3 for alpha chain variable domain of TCR clone 19665 (TRAV12-2, TRAJ17)
CAVLFKAAGNKLTF

SEQ ID NO: 39330 - protein, 17 aa, Homo sapiens
  CDR3 for beta chain variable domain of TCR clone 19665 (TRBV20-1, TRBJ2-2)
CSASGSGQGGLNGELFF

SEQ ID NO: 39331 - protein, 17 aa, Homo sapiens
  CDR3 for alpha chain variable domain of TCR clone 19666 (TRAV8-6, TRAJ58)
CAVSSWVGETSGSRLTF

SEQ ID NO: 39332 - protein, 14 aa, Homo sapiens
  CDR3 for beta chain variable domain of TCR clone 19666 (TRBV4-2, TRBJ2-1)
CASGLDRAYNGQFF

SEQ ID NO: 39333 - protein, 17 aa, Homo sapiens
  CDR3 for alpha chain variable domain of TCR clone 19667 (TRAV3, TRAJ6)
CAVRDGPRAGGSYIPIF

SEQ ID NO: 39334 - protein, 20 aa, Homo sapiens
  CDR3 for beta chain variable domain of TCR clone 19667 (TRBV28, TRBJ2-1)
CASTPIGRSPGLAGGNEQFF

SEQ ID NO: 39335 - protein, 12 aa, Homo sapiens
  CDR3 for alpha chain variable domain of TCR clone 19668 (TRAV17, TRAJ57)
RATDGGSEKLVF

SEQ ID NO: 39336 - protein, 13 aa, Homo sapiens
  CDR3 for beta chain variable domain of TCR clone 19668 (TRBV7-9, TRBJ2-7)
CASSFAGAYEQYF

SEQ ID NO: 39337 - protein, 16 aa, Homo sapiens
  CDR3 for alpha chain variable domain of TCR clone 19669 (TRAV21, TRAJ37)
CAVRTAGSSNTGKLIF

SEQ ID NO: 39338 - protein, 13 aa, Homo sapiens
  CDR3 for beta chain variable domain of TCR clone 19669 (TRBV7-9, TRBJ2-5)
RASLPSGRETQYF

SEQ ID NO: 39339 - protein, 14 aa, Homo sapiens
  CDR3 for alpha chain variable domain of TCR clone 19670 (TRAV29/DV5, TRAJ36)
CAARRKTGANNLFF

SEQ ID NO: 39340 - protein, 15 aa, Homo sapiens
  CDR3 for beta chain variable domain of TCR clone 19670 (TRBV7-9, TRBJ1-4)
CASSARTGGNEKLFF

SEQ ID NO: 39341 - protein, 13 aa, Homo sapiens
  CDR3 for alpha chain variable domain of TCR clone 19671 (TRAV1-2, TRAJ9)
CAALNTGGFKTIF

SEQ ID NO: 39342 - protein, 13 aa, Homo sapiens
  CDR3 for beta chain variable domain of TCR clone 19671 (TRBV19, TRBJ1-2)
CASSVHGQDGYTF

SEQ ID NO: 39343 - protein, 13 aa, Homo sapiens
  CDR3 for alpha chain variable domain of TCR clone 19672 (TRAV12-3, TRAJ13)
CAMSSGGYQKVIF

SEQ ID NO: 39344 - protein, 14 aa, Homo sapiens
  CDR3 for beta chain variable domain of TCR clone 19672 (TRBV2, TRBJ2-1)
CASRTGSSYNEQFF

SEQ ID NO: 39345 - protein, 16 aa, Homo sapiens
  CDR3 for alpha chain variable domain of TCR clone 19673 (TRAV3, TRAJ10)
CAVRDMRAGGGDKLTF

SEQ ID NO: 39346 - protein, 14 aa, Homo sapiens
  CDR3 for beta chain variable domain of TCR clone 19673 (TRBV7-2, TRBJ1-1)
CASSFLTGTTEAFF

SEQ ID NO: 39347 - protein, 18 aa, Homo sapiens
  CDR3 for alpha chain variable domain of TCR clone 19674 (TRAV21, TRAJ52)
CAVRPSPAGGTSYGKLTF

SEQ ID NO: 39348 - protein, 16 aa, Homo sapiens
  CDR3 for beta chain variable domain of TCR clone 19674 (TRBV13, TRBJ2-3)
CQQPLQGSGGEDTQYF

SEQ ID NO: 39349 - protein, 14 aa, Homo sapiens
  CDR3 for alpha chain variable domain of TCR clone 19675 (TRAV12-3, TRAJ10)
SHLPLTGGGNKLTF

SEQ ID NO: 39350 - protein, 12 aa, Homo sapiens
  CDR3 for beta chain variable domain of TCR clone 19675 (TRBV28, TRBJ2-3)
CASSLYRDTQYF

SEQ ID NO: 39351 - protein, 14 aa, Homo sapiens
  CDR3 for alpha chain variable domain of TCR clone 19676 (TRAV8-2, TRAJ4)
RVVSPSGGYNKLIF

SEQ ID NO: 39352 - protein, 15 aa, Homo sapiens
  CDR3 for beta chain variable domain of TCR clone 19676 (TRBV4-1, TRBJ1-4)
CASSDTGGTNEKLFF

SEQ ID NO: 39353 - protein, 20 aa, Homo sapiens
  CDR3 for alpha chain variable domain of TCR clone 19677 (TRAV12-1, TRAJ42)
SSVIQPPTSVKGGSQGNLIF

SEQ ID NO: 39354 - protein, 17 aa, Homo sapiens
  CDR3 for beta chain variable domain of TCR clone 19677 (TRBV11-2, TRBJ2-3)
CQQLRGGLAGAPNTQYF

SEQ ID NO: 39355 - protein, 11 aa, Homo sapiens
  CDR3 for alpha chain variable domain of TCR clone 19678 (TRAV21, TRAJ9)
CAVPGGFKTIF

SEQ ID NO: 39356 - protein, 20 aa, Homo sapiens
  CDR3 for beta chain variable domain of TCR clone 19678 (TRBV7-9, TRBJ2-5)
RGTRPCISVPLQGAQETQYF

SEQ ID NO: 39357 - protein, 18 aa, Homo sapiens
  CDR3 for alpha chain variable domain of TCR clone 19679 (TRAV13-1, TRAJ52)
CAASKRSAGGTSYGKRTF

SEQ ID NO: 39358 - protein, 13 aa, Homo sapiens
  CDR3 for beta chain variable domain of TCR clone 19679 (TRBV12-4, TRBJ1-2)
CASSLRQGKGYTF

SEQ ID NO: 39359 - protein, 14 aa, Homo sapiens
  CDR3 for alpha chain variable domain of TCR clone 19680 (TRAV1-2, TRAJ16)
CAVNRFSAGQKLLF

SEQ ID NO: 39360 - protein, 15 aa, Homo sapiens
  CDR3 for beta chain variable domain of TCR clone 19680 (TRBV7-9, TRBJ1-6)
CASSSPGRGNSPLHF

SEQ ID NO: 39361 - protein, 13 aa, Homo sapiens
  CDR3 for alpha chain variable domain of TCR clone 19681 (TRAV12-1, TRAJ34)
CVVAGYNTDKLIF

SEQ ID NO: 39362 - protein, 13 aa, Homo sapiens
  CDR3 for beta chain variable domain of TCR clone 19681 (TRBV28, TRBJ2-7)
CASKAGGVYEQYF

SEQ ID NO: 39363 - protein, 14 aa, Homo sapiens
  CDR3 for alpha chain variable domain of TCR clone 19682 (TRAV26-1, TRAJ45)
CIEGTGGGADGLTF

SEQ ID NO: 39364 - protein, 13 aa, Homo sapiens
  CDR3 for beta chain variable domain of TCR clone 19682 (TRBV7-6, TRBJ1-2)
CASSLVADYGYTF

SEQ ID NO: 39365 - protein, 14 aa, Homo sapiens
  CDR3 for alpha chain variable domain of TCR clone 19683 (TRAV12-2, TRAJ40)
CAVKIPSGTYKYIF

SEQ ID NO: 39366 - protein, 14 aa, Homo sapiens
  CDR3 for beta chain variable domain of TCR clone 19683 (TRBV20-1, TRBJ1-1)
CSAQTRIGSTEAFF

SEQ ID NO: 39367 - protein, 13 aa, Homo sapiens
  CDR3 for alpha chain variable domain of TCR clone 19684 (TRAV12-1, TRAJ33)
CGDAPDSNYRLIW

SEQ ID NO: 39368 - protein, 15 aa, Homo sapiens
  CDR3 for beta chain variable domain of TCR clone 19684 (TRBV27, TRBJ2-1)
CASSNGGGSSNEQFF

SEQ ID NO: 39369 - protein, 13 aa, Homo sapiens
  CDR3 for alpha chain variable domain of TCR clone 19685 (TRAV17, TRAJ39)
CATDEDAGNMLTF

SEQ ID NO: 39370 - protein, 17 aa, Homo sapiens
  CDR3 for beta chain variable domain of TCR clone 19685 (TRBV13, TRBJ2-3)
CASSLSRVAGGRNTQYF

SEQ ID NO: 39371 - protein, 13 aa, Homo sapiens
  CDR3 for alpha chain variable domain of TCR clone 19686 (TRAV1-2, TRAJ9)
CAALNTGGFQTIF

SEQ ID NO: 39372 - protein, 13 aa, Homo sapiens
  CDR3 for beta chain variable domain of TCR clone 19686 (TRBV19, TRBJ1-2)
CASSVPGQDGYTF

SEQ ID NO: 39373 - protein, 13 aa, Homo sapiens
  CDR3 for alpha chain variable domain of TCR clone 19687 (TRAV16, TRAJ9)
CALRATGGSKTIF

SEQ ID NO: 39374 - protein, 16 aa, Homo sapiens
  CDR3 for beta chain variable domain of TCR clone 19687 (TRBV5-1, TRBJ1-3)
CASSRSGEDSGNTIYF

SEQ ID NO: 39375 - protein, 12 aa, Homo sapiens
  CDR3 for alpha chain variable domain of TCR clone 19688 (TRAV12-1, TRAJ40)
CVVYSGTYKYIF

SEQ ID NO: 39376 - protein, 14 aa, Homo sapiens
  CDR3 for beta chain variable domain of TCR clone 19688 (TRBV7-2, TRBJ2-5)
CASSPRGSSETQYF

SEQ ID NO: 39377 - protein, 11 aa, Homo sapiens
  CDR3 for alpha chain variable domain of TCR clone 19689 (TRAV21, TRAJ34)
CAHYNTDKLIL

SEQ ID NO: 39378 - protein, 13 aa, Homo sapiens
  CDR3 for beta chain variable domain of TCR clone 19689 (TRBV7-6, TRBJ1-2)
CASSLVADYGYTF

SEQ ID NO: 39379 - protein, 11 aa, Homo sapiens
  CDR3 for alpha chain variable domain of TCR clone 19690 (TRAV21, TRAJ34)
CAVYNTDKLIF

SEQ ID NO: 39380 - protein, 13 aa, Homo sapiens
  CDR3 for beta chain variable domain of TCR clone 19690 (TRBV4-3, TRBJ2-1)
CASGLSIYNEQFF

SEQ ID NO: 39381 - protein, 15 aa, Homo sapiens
  CDR3 for alpha chain variable domain of TCR clone 19691 (TRAV8-2, TRAJ40)
CVVLGTTSGTYKYIF

SEQ ID NO: 39382 - protein, 14 aa, Homo sapiens
  CDR3 for beta chain variable domain of TCR clone 19691 (TRBV6-1, TRBJ1-3)
CASVQGGGGNTIYF

SEQ ID NO: 39383 - protein, 14 aa, Homo sapiens
  CDR3 for alpha chain variable domain of TCR clone 19692 (TRAV1-2, TRAJ16)
CAVNRFSDGQKLLF

SEQ ID NO: 39384 - protein, 13 aa, Homo sapiens
  CDR3 for beta chain variable domain of TCR clone 19692 (TRBV9, TRBJ2-1)
CASSPSGGNEQFF

SEQ ID NO: 39385 - protein, 13 aa, Homo sapiens
  CDR3 for alpha chain variable domain of TCR clone 19693 (TRAV1-2, TRAJ9)
CAALNTGGFKTIF

SEQ ID NO: 39386 - protein, 13 aa, Homo sapiens
  CDR3 for beta chain variable domain of TCR clone 19693 (TRBV19, TRBJ1-2)
CTSSVPGQDGYTF

SEQ ID NO: 39387 - protein, 12 aa, Homo sapiens
  CDR3 for alpha chain variable domain of TCR clone 19694 (TRAV21, TRAJ13)
PGPSGGYQKVTF

SEQ ID NO: 39388 - protein, 12 aa, Homo sapiens
  CDR3 for beta chain variable domain of TCR clone 19694 (TRBV11-2, TRBJ2-2)
CASSLGGGELFF

SEQ ID NO: 39389 - protein, 16 aa, Homo sapiens
  CDR3 for alpha chain variable domain of TCR clone 19695 (TRAV35, TRAJ28)
CAGQRYSGAGSYQLTF

SEQ ID NO: 39390 - protein, 13 aa, Homo sapiens
  CDR3 for beta chain variable domain of TCR clone 19695 (TRBV19, TRBJ1-2)
CASSQGQVYGDTF

SEQ ID NO: 39391 - protein, 12 aa, Homo sapiens
  CDR3 for alpha chain variable domain of TCR clone 19696 (TRAV16, TRAJ10)
CSRTGGGNKLTF

SEQ ID NO: 39392 - protein, 15 aa, Homo sapiens
  CDR3 for beta chain variable domain of TCR clone 19696 (TRBV6-3, TRBJ2-7)
CASSPPGTVFYEQYF

SEQ ID NO: 39393 - protein, 14 aa, Homo sapiens
  CDR3 for alpha chain variable domain of TCR clone 19697 (TRAV12-2, TRAJ13)
CAVKKTGGYQKVTF

SEQ ID NO: 39394 - protein, 12 aa, Homo sapiens
  CDR3 for beta chain variable domain of TCR clone 19697 (TRBV12-4, TRBJ1-2)
CASSFIWRHLRF

SEQ ID NO: 39395 - protein, 12 aa, Homo sapiens
  CDR3 for alpha chain variable domain of TCR clone 19698 (TRAV8-3, TRAJ20)
CAVGANDYKLSF

SEQ ID NO: 39396 - protein, 18 aa, Homo sapiens
  CDR3 for beta chain variable domain of TCR clone 19698 (TRBV11-2, TRBJ2-3)
CASSLGGASRGAPNTQYF

SEQ ID NO: 39397 - protein, 14 aa, Homo sapiens
  CDR3 for alpha chain variable domain of TCR clone 19699 (TRAV1-2, TRAJ16)
CAVNRFSDGQKLLF

SEQ ID NO: 39398 - protein, 16 aa, Homo sapiens
  CDR3 for beta chain variable domain of TCR clone 19699 (TRBV7-3, TRBJ2-2)
CASSLRRGTLSGELFF

SEQ ID NO: 39399 - protein, 13 aa, Homo sapiens
  CDR3 for alpha chain variable domain of TCR clone 19700 (TRAV1-2, TRAJ9)
CAALNTGGFKTIF

SEQ ID NO: 39400 - protein, 13 aa, Homo sapiens
  CDR3 for beta chain variable domain of TCR clone 19700 (TRBV19, TRBJ1-2)
CASSVPGQYGYTF

SEQ ID NO: 39401 - protein, 12 aa, Homo sapiens
  CDR3 for alpha chain variable domain of TCR clone 19701 (TRAV8-3, TRAJ26)
CAGDNYGQNFVF

SEQ ID NO: 39402 - protein, 12 aa, Homo sapiens
  CDR3 for beta chain variable domain of TCR clone 19701 (TRBV20-1, TRBJ1-1)
QCSTWGGTEAFF

SEQ ID NO: 39403 - protein, 14 aa, Homo sapiens
  CDR3 for alpha chain variable domain of TCR clone 19702 (TRAV35, TRAJ22)
CAGLRPGSARQLTF

SEQ ID NO: 39404 - protein, 13 aa, Homo sapiens
  CDR3 for beta chain variable domain of TCR clone 19702 (TRBV19, TRBJ1-2)
CASSVPGQDGYTF

SEQ ID NO: 39405 - protein, 14 aa, Homo sapiens
  CDR3 for alpha chain variable domain of TCR clone 19703 (TRAV1-2, TRAJ8)
CAVREDTGFQRLVF

SEQ ID NO: 39406 - protein, 16 aa, Homo sapiens
  CDR3 for beta chain variable domain of TCR clone 19703 (TRBV4-1, TRBJ1-4)
CASSQDLRRGGEKLFF

SEQ ID NO: 39407 - protein, 16 aa, Homo sapiens
  CDR3 for alpha chain variable domain of TCR clone 19704 (TRAV14/DV4, TRAJ54)
CAMREGRIQGAQKLVF

SEQ ID NO: 39408 - protein, 14 aa, Homo sapiens
  CDR3 for beta chain variable domain of TCR clone 19704 (TRBV25-1, TRBJ1-1)
CASTHLGGNTEAFF

SEQ ID NO: 39409 - protein, 16 aa, Homo sapiens
  CDR3 for alpha chain variable domain of TCR clone 19705 (TRAV3, TRAJ21)
CALRDIERGNFNKFYF

SEQ ID NO: 39410 - protein, 13 aa, Homo sapiens
  CDR3 for beta chain variable domain of TCR clone 19705 (TRBV27, TRBJ2-7)
CASSLTTGYEQYF

SEQ ID NO: 39411 - protein, 18 aa, Homo sapiens
  CDR3 for alpha chain variable domain of TCR clone 19706 (TRAV21, TRAJ52)
CAVRHSPAGGTSYGKLTF

SEQ ID NO: 39412 - protein, 13 aa, Homo sapiens
  CDR3 for beta chain variable domain of TCR clone 19706 (TRBV7-3, TRBJ1-1)
CASSQDWGAEAFF

SEQ ID NO: 39413 - protein, 12 aa, Homo sapiens
  CDR3 for alpha chain variable domain of TCR clone 19707 (TRAV1-1, TRAJ8)
CAGGTGFQKLVF

SEQ ID NO: 39414 - protein, 15 aa, Homo sapiens
  CDR3 for beta chain variable domain of TCR clone 19707 (TRBV7-9, TRBJ1-4)
CASSRKGGFNEKLFF

SEQ ID NO: 39415 - protein, 15 aa, Homo sapiens
  CDR3 for alpha chain variable domain of TCR clone 19708 (TRAV38-1, TRAJ37)
CAFIFGSGNTGKLIF

SEQ ID NO: 39416 - protein, 12 aa, Homo sapiens
  CDR3 for beta chain variable domain of TCR clone 19708 (TRBV7-9, TRBJ2-7)
CASSLEGCEQYF

SEQ ID NO: 39417 - protein, 14 aa, Homo sapiens
  CDR3 for alpha chain variable domain of TCR clone 19709 (TRAV1-2, TRAJ16)
CAVNRFSDGQKLPF

SEQ ID NO: 39418 - protein, 13 aa, Homo sapiens
  CDR3 for beta chain variable domain of TCR clone 19709 (TRBV7-9, TRBJ1-2)
CASSLKQNYGYTF

SEQ ID NO: 39419 - protein, 13 aa, Homo sapiens
  CDR3 for alpha chain variable domain of TCR clone 19710 (TRAV27, TRAJ3)
ASLRGSSASKIIF

SEQ ID NO: 39420 - protein, 15 aa, Homo sapiens
  CDR3 for beta chain variable domain of TCR clone 19710 (TRBV28, TRBJ1-3)
CASSMGWASGNTIYC

SEQ ID NO: 39421 - protein, 11 aa, Homo sapiens
  CDR3 for alpha chain variable domain of TCR clone 19711 (TRAV17, TRAJ9)
CGFTGGFKTIF

SEQ ID NO: 39422 - protein, 14 aa, Homo sapiens
  CDR3 for beta chain variable domain of TCR clone 19711 (TRBV7-9, TRBJ2-2)
CASSLVQDTGEPFF

SEQ ID NO: 39423 - protein, 14 aa, Homo sapiens
  CDR3 for alpha chain variable domain of TCR clone 19712 (TRAV13-2, TRAJ22)
CADGTLGSARQLTF

SEQ ID NO: 39424 - protein, 16 aa, Homo sapiens
  CDR3 for beta chain variable domain of TCR clone 19712 (TRBV19, TRBJ2-1)
CASSSKGTGSYNEQFF

SEQ ID NO: 39425 - protein, 12 aa, Homo sapiens
  CDR3 for alpha chain variable domain of TCR clone 19713 (TRAV13-1, TRAJ42)
VNYGGGQGNLIF

SEQ ID NO: 39426 - protein, 15 aa, Homo sapiens
  CDR3 for beta chain variable domain of TCR clone 19713 (TRBV20-1, TRBJ2-1)
CSASSAGSSYNEQFF

SEQ ID NO: 39427 - protein, 14 aa, Homo sapiens
  CDR3 for alpha chain variable domain of TCR clone 19714 (TRAV12-2, TRAJ13)
CAVKKTGGYQKVTF

SEQ ID NO: 39428 - protein, 15 aa, Homo sapiens
  CDR3 for beta chain variable domain of TCR clone 19714 (TRBV7-9, TRBJ1-5)
CASSQGHQPNQPQHF

SEQ ID NO: 39429 - protein, 17 aa, Homo sapiens
  CDR3 for alpha chain variable domain of TCR clone 19715 (TRAV3, TRAJ42)
CAVRDREYGGSQGNLIF

SEQ ID NO: 39430 - protein, 15 aa, Homo sapiens
  CDR3 for beta chain variable domain of TCR clone 19715 (TRBV6-6, TRBJ2-7)
CASSYSYGGSYEQYF

SEQ ID NO: 39431 - protein, 14 aa, Homo sapiens
  CDR3 for alpha chain variable domain of TCR clone 19716 (TRAV8-4, TRAJ9)
CAVRINTGGFNTIF

SEQ ID NO: 39432 - protein, 15 aa, Homo sapiens
  CDR3 for beta chain variable domain of TCR clone 19716 (TRBV10-2, TRBJ2-6)
CASSEQGTGANVLTF

SEQ ID NO: 39433 - protein, 10 aa, Homo sapiens
  CDR3 for alpha chain variable domain of TCR clone 19717 (TRAV23/DV6, TRAJ18)
CAARYRGSTL

SEQ ID NO: 39434 - protein, 13 aa, Homo sapiens
  CDR3 for beta chain variable domain of TCR clone 19717 (TRBV7-2, TRBJ2-7)
CASSSPSGSEQYF

SEQ ID NO: 39435 - protein, 12 aa, Homo sapiens
  CDR3 for alpha chain variable domain of TCR clone 19718 (TRAV4, TRAJ26)
CLVGDYGQNFVF

SEQ ID NO: 39436 - protein, 16 aa, Homo sapiens
  CDR3 for beta chain variable domain of TCR clone 19718 (TRBV7-2, TRBJ1-2)
CASSSNQDRRGHGYTL

SEQ ID NO: 39437 - protein, 14 aa, Homo sapiens
  CDR3 for alpha chain variable domain of TCR clone 19719 (TRAV1-2, TRAJ8)
CAVREDTGFQKLVF

SEQ ID NO: 39438 - protein, 15 aa, Homo sapiens
  CDR3 for beta chain variable domain of TCR clone 19719 (TRBV6-3, TRBJ2-7)
CASSSPGTGFYEQYF

SEQ ID NO: 39439 - protein, 14 aa, Homo sapiens
  CDR3 for alpha chain variable domain of TCR clone 19720 (TRAV12-1, TRAJ17)
CVVNYKAAGNKLPF

SEQ ID NO: 39440 - protein, 17 aa, Homo sapiens
  CDR3 for beta chain variable domain of TCR clone 19720 (TRBV20-1, TRBJ2-1)
CSASSSGLAGSYNEQFF

SEQ ID NO: 39441 - protein, 15 aa, Homo sapiens
  CDR3 for alpha chain variable domain of TCR clone 19721 (TRAV26-1, TRAJ42)
FIVIVKGGSQGNLIF

SEQ ID NO: 39442 - protein, 14 aa, Homo sapiens
  CDR3 for beta chain variable domain of TCR clone 19721 (TRBV19, TRBJ2-2)
CATTGHANTGELFF

SEQ ID NO: 39443 - protein, 14 aa, Homo sapiens
  CDR3 for alpha chain variable domain of TCR clone 19722 (TRAV12-2, TRAJ40)
CAVKIPSGTYKYIF

SEQ ID NO: 39444 - protein, 16 aa, Homo sapiens
  CDR3 for beta chain variable domain of TCR clone 19722 (TRBV7-3, TRBJ2-1)
CASSLEGYRSYNEQFF

SEQ ID NO: 39445 - protein, 14 aa, Homo sapiens
  CDR3 for alpha chain variable domain of TCR clone 19723 (TRAV9-2, TRAJ39)
CALYIYNAGNMLTF

SEQ ID NO: 39446 - protein, 13 aa, Homo sapiens
  CDR3 for beta chain variable domain of TCR clone 19723 (TRBV7-9, TRBJ2-3)
CASSPGSTDTQYF

SEQ ID NO: 39447 - protein, 23 aa, Homo sapiens
  CDR3 for alpha chain variable domain of TCR clone 19724 (TRAV26-1, TRAJ38)
CIADNAGNNHIQNPDPAVYQLRE

SEQ ID NO: 39448 - protein, 13 aa, Homo sapiens
  CDR3 for beta chain variable domain of TCR clone 19724 (TRBV20-1, TRBJ1-1)
CSARGGGNTEAFF

SEQ ID NO: 39449 - protein, 13 aa, Homo sapiens
  CDR3 for alpha chain variable domain of TCR clone 19725 (TRAV12-3, TRAJ33)
CAMSVNSNYQLIW

SEQ ID NO: 39450 - protein, 13 aa, Homo sapiens
  CDR3 for beta chain variable domain of TCR clone 19725 (TRBV7-2, TRBJ2-2)
CASSLAVTGKLFF

SEQ ID NO: 39451 - protein, 12 aa, Homo sapiens
  CDR3 for alpha chain variable domain of TCR clone 19726 (TRAV36/DV7, TRAJ54)
CAVVRGAQKLVF

SEQ ID NO: 39452 - protein, 14 aa, Homo sapiens
  CDR3 for beta chain variable domain of TCR clone 19726 (TRBV7-3, TRBJ1-1)
CASSLKGGNTEAFS

SEQ ID NO: 39453 - protein, 15 aa, Homo sapiens
  CDR3 for alpha chain variable domain of TCR clone 19727 (TRAV17, TRAJ57)
CATGPSQCGSEKLVF

SEQ ID NO: 39454 - protein, 16 aa, Homo sapiens
  CDR3 for beta chain variable domain of TCR clone 19727 (TRBV12-4, TRBJ1-5)
CASSRPVGGSNQPQHF

SEQ ID NO: 39455 - protein, 16 aa, Homo sapiens
  CDR3 for alpha chain variable domain of TCR clone 19728 (TRAV1-2, TRAJ10)
CSVRGVLTGGGNKLTF

SEQ ID NO: 39456 - protein, 12 aa, Homo sapiens
  CDR3 for beta chain variable domain of TCR clone 19728 (TRBV7-8, TRBJ2-7)
CASSLGDREQYF

SEQ ID NO: 39457 - protein, 18 aa, Homo sapiens
  CDR3 for alpha chain variable domain of TCR clone 19729 (TRAV21, TRAJ52)
CAVRPSPAGGTSYGKLTF

SEQ ID NO: 39458 - protein, 15 aa, Homo sapiens
  CDR3 for beta chain variable domain of TCR clone 19729 (TRBV12-4, TRBJ2-5)
CASSPPTGLQETQYF

SEQ ID NO: 39459 - protein, 16 aa, Homo sapiens
  CDR3 for alpha chain variable domain of TCR clone 19730 (TRAV14/DV4, TRAJ54)
CAMREGRIQGAQKLVF

SEQ ID NO: 39460 - protein, 16 aa, Homo sapiens
  CDR3 for beta chain variable domain of TCR clone 19730 (TRBV12-5, TRBJ2-5)
CASGPRTSGNQETQYF

SEQ ID NO: 39461 - protein, 13 aa, Homo sapiens
  CDR3 for alpha chain variable domain of TCR clone 19731 (TRAV29/DV5, TRAJ31)
CAASRNNNARLMF

SEQ ID NO: 39462 - protein, 17 aa, Homo sapiens
  CDR3 for beta chain variable domain of TCR clone 19731 (TRBV20-1, TRBJ2-1)
CSARDPLAGVWDNEQFF

SEQ ID NO: 39463 - protein, 14 aa, Homo sapiens
  CDR3 for alpha chain variable domain of TCR clone 19732 (TRAV17, TRAJ34)
CAPAEVRVSDKLIF

SEQ ID NO: 39464 - protein, 12 aa, Homo sapiens
  CDR3 for beta chain variable domain of TCR clone 19732 (TRBV10-3, TRBJ1-1)
CAIRDMNTEAFF

SEQ ID NO: 39465 - protein, 14 aa, Homo sapiens
  CDR3 for alpha chain variable domain of TCR clone 19733 (TRAV34, TRAJ44)
CGADGAGTASKLTF

SEQ ID NO: 39466 - protein, 15 aa, Homo sapiens
  CDR3 for beta chain variable domain of TCR clone 19733 (TRBV5-1, TRBJ2-1)
CASSPPRAPYNEQFF

SEQ ID NO: 39467 - protein, 15 aa, Homo sapiens
  CDR3 for alpha chain variable domain of TCR clone 19734 (TRAV26-1, TRAJ29)
CIVRVEGSGNTPLVF

SEQ ID NO: 39468 - protein, 17 aa, Homo sapiens
  CDR3 for beta chain variable domain of TCR clone 19734 (TRBV13, TRBJ2-3)
CASSLSRVAGGRNTQYF

SEQ ID NO: 39469 - protein, 15 aa, Homo sapiens
  CDR3 for alpha chain variable domain of TCR clone 19735 (TRAV26-1, TRAJ29)
CIVRVEGSGNTPRVF

SEQ ID NO: 39470 - protein, 14 aa, Homo sapiens
  CDR3 for beta chain variable domain of TCR clone 19735 (TRBV18, TRBJ2-5)
CASSPGVSQETQYF

SEQ ID NO: 39471 - protein, 12 aa, Homo sapiens
  CDR3 for alpha chain variable domain of TCR clone 19736 (TRAV22, TRAJ22)
CAPGGSARQLTF

SEQ ID NO: 39472 - protein, 15 aa, Homo sapiens
  CDR3 for beta chain variable domain of TCR clone 19736 (TRBV20-1, TRBJ2-7)
CSARDRVSGMDEQYF

SEQ ID NO: 39473 - protein, 18 aa, Homo sapiens
  CDR3 for alpha chain variable domain of TCR clone 19737 (TRAV29/DV5, TRAJ52)
CAAGFRGAGGTSYGKLTF

SEQ ID NO: 39474 - protein, 15 aa, Homo sapiens
  CDR3 for beta chain variable domain of TCR clone 19737 (TRBV7-3, TRBJ2-2)
CQQLKAGDLVRGAVF

SEQ ID NO: 39475 - protein, 13 aa, Homo sapiens
  CDR3 for alpha chain variable domain of TCR clone 19738 (TRAV38-1, TRAJ42)
CARWGGSQGSLIF

SEQ ID NO: 39476 - protein, 17 aa, Homo sapiens
  CDR3 for beta chain variable domain of TCR clone 19738 (TRBV20-1, TRBJ2-1)
CSARDPLAGVWDNEQFF

SEQ ID NO: 39477 - protein, 15 aa, Homo sapiens
  CDR3 for alpha chain variable domain of TCR clone 19739 (TRAV8-3, TRAJ23)
CAVGDRYNQGGKLIF

SEQ ID NO: 39478 - protein, 15 aa, Homo sapiens
  CDR3 for beta chain variable domain of TCR clone 19739 (TRBV29-1, TRBJ2-5)
EDSSIYLCSAGTQYF

SEQ ID NO: 39479 - protein, 14 aa, Homo sapiens
  CDR3 for alpha chain variable domain of TCR clone 19740 (TRAV21, TRAJ35)
CAVMPIGFGNLLHC

SEQ ID NO: 39480 - protein, 12 aa, Homo sapiens
  CDR3 for beta chain variable domain of TCR clone 19740 (TRBV7-9, TRBJ2-7)
CASSIKREEQYF

SEQ ID NO: 39481 - protein, 12 aa, Homo sapiens
  CDR3 for alpha chain variable domain of TCR clone 19741 (TRAV26-2, TRAJ21)
CILKGNFNKFYF

SEQ ID NO: 39482 - protein, 14 aa, Homo sapiens
  CDR3 for beta chain variable domain of TCR clone 19741 (TRBV7-9, TRBJ1-1)
CASTPLQAYTEAFF

SEQ ID NO: 39483 - protein, 17 aa, Homo sapiens
  CDR3 for alpha chain variable domain of TCR clone 19742 (TRAV3, TRAJ42)
CAVRDRDYGGSQGNLIF

SEQ ID NO: 39484 - protein, 14 aa, Homo sapiens
  CDR3 for beta chain variable domain of TCR clone 19742 (TRBV7-3, TRBJ2-1)
CASSLAGGTNEQFF

SEQ ID NO: 39485 - protein, 13 aa, Homo sapiens
  CDR3 for alpha chain variable domain of TCR clone 19743 (TRAV26-2, TRAJ45)
CIPYRRRCWRTHL

SEQ ID NO: 39486 - protein, 20 aa, Homo sapiens
  CDR3 for beta chain variable domain of TCR clone 19743 (TRBV28, TRBJ2-1)
CASTPIGRSPGLAGGNEQFF

SEQ ID NO: 39487 - protein, 14 aa, Homo sapiens
  CDR3 for alpha chain variable domain of TCR clone 19744 (TRAV26-1, TRAJ34)
CIVRAAYNTDKLIF

SEQ ID NO: 39488 - protein, 15 aa, Homo sapiens
  CDR3 for beta chain variable domain of TCR clone 19744 (TRBV7-9, TRBJ1-4)
CASSRTGGFNEKLFF

SEQ ID NO: 39489 - protein, 13 aa, Homo sapiens
  CDR3 for alpha chain variable domain of TCR clone 19745 (TRAV2, TRAJ40)
CAVVTSGTYKYIF

SEQ ID NO: 39490 - protein, 12 aa, Homo sapiens
  CDR3 for beta chain variable domain of TCR clone 19745 (TRBV11-2, TRBJ2-2)
CASSLPTGELFF

SEQ ID NO: 39491 - protein, 15 aa, Homo sapiens
  CDR3 for alpha chain variable domain of TCR clone 19746 (TRAV21, TRAJ53)
CATLNSGGSNYKLTF

SEQ ID NO: 39492 - protein, 15 aa, Homo sapiens
  CDR3 for beta chain variable domain of TCR clone 19746 (TRBV9, TRBJ1-6)
CASSVAGAGDSPLHF

SEQ ID NO: 39493 - protein, 12 aa, Homo sapiens
  CDR3 for alpha chain variable domain of TCR clone 19747 (TRAV8-3, TRAJ20)
CAVGANDYKLSF

SEQ ID NO: 39494 - protein, 15 aa, Homo sapiens
  CDR3 for beta chain variable domain of TCR clone 19747 (TRBV19, TRBJ2-2)
CQPISRDRGHRELFF

SEQ ID NO: 39495 - protein, 16 aa, Homo sapiens
  CDR3 for alpha chain variable domain of TCR clone 19748 (TRAV3, TRAJ37)
CAVRGKGSGNTGKLIF

SEQ ID NO: 39496 - protein, 13 aa, Homo sapiens
  CDR3 for beta chain variable domain of TCR clone 19748 (TRBV14, TRBJ2-7)
CASSQDRRYERYF

SEQ ID NO: 39497 - protein, 13 aa, Homo sapiens
  CDR3 for alpha chain variable domain of TCR clone 19749 (TRAV8-3, TRAJ28)
CAVGAVGCYQLTF

SEQ ID NO: 39498 - protein, 14 aa, Homo sapiens
  CDR3 for beta chain variable domain of TCR clone 19749 (TRBV7-2, TRBJ2-7)
CASRSQGAAYEQYF

SEQ ID NO: 39499 - protein, 15 aa, Homo sapiens
  CDR3 for alpha chain variable domain of TCR clone 19750 (TRAV3, TRAJ5)
RAVRDRKTGRRALTF

SEQ ID NO: 39500 - protein, 15 aa, Homo sapiens
  CDR3 for beta chain variable domain of TCR clone 19750 (TRBV7-8, TRBJ2-1)
CASSLADSLYNEQFF

SEQ ID NO: 39501 - protein, 15 aa, Homo sapiens
  CDR3 for alpha chain variable domain of TCR clone 19751 (TRAV8-3, TRAJ27)
CAVGPSKTNAGKSTF

SEQ ID NO: 39502 - protein, 15 aa, Homo sapiens
  CDR3 for beta chain variable domain of TCR clone 19751 (TRBV7-2, TRBJ2-1)
CASSSGLAVGNEQFF

SEQ ID NO: 39503 - protein, 14 aa, Homo sapiens
  CDR3 for alpha chain variable domain of TCR clone 19752 (TRAV30, TRAJ33)
CGTVAPRSNYQLIW

SEQ ID NO: 39504 - protein, 14 aa, Homo sapiens
  CDR3 for beta chain variable domain of TCR clone 19752 (TRBV9, TRBJ2-4)
CASSPSGTSGFQYF

SEQ ID NO: 39505 - protein, 15 aa, Homo sapiens
  CDR3 for alpha chain variable domain of TCR clone 19753 (TRAV17, TRAJ23)
CATDAEDNQGGTLIF

SEQ ID NO: 39506 - protein, 12 aa, Homo sapiens
  CDR3 for beta chain variable domain of TCR clone 19753 (TRBV2, TRBJ2-1)
CAKREGYNEQFF

SEQ ID NO: 39507 - protein, 10 aa, Homo sapiens
  CDR3 for alpha chain variable domain of TCR clone 19754 (TRAV23/DV6, TRAJ57)
CAASSTLSQG

SEQ ID NO: 39508 - protein, 14 aa, Homo sapiens
  CDR3 for beta chain variable domain of TCR clone 19754 (TRBV25-1, TRBJ1-1)
CASTHLGGNNEAFF

SEQ ID NO: 39509 - protein, 13 aa, Homo sapiens
  CDR3 for alpha chain variable domain of TCR clone 19755 (TRAV35, TRAJ36)
CAGPRIGANNLFF

SEQ ID NO: 39510 - protein, 15 aa, Homo sapiens
  CDR3 for beta chain variable domain of TCR clone 19755 (TRBV28, TRBJ2-5)
CDSSPPWSYQETQYF

SEQ ID NO: 39511 - protein, 15 aa, Homo sapiens
  CDR3 for alpha chain variable domain of TCR clone 19756 (TRAV4, TRAJ39)
CLVGPNNNAGNMLTF

SEQ ID NO: 39512 - protein, 14 aa, Homo sapiens
  CDR3 for beta chain variable domain of TCR clone 19756 (TRBV19, TRBJ2-1)
CASPTFVLSGEQFL

SEQ ID NO: 39513 - protein, 16 aa, Homo sapiens
  CDR3 for alpha chain variable domain of TCR clone 19757 (TRAV30, TRAJ24)
CGTEIVDADSWGKFKF

SEQ ID NO: 39514 - protein, 14 aa, Homo sapiens
  CDR3 for beta chain variable domain of TCR clone 19757 (TRBV7-2, TRBJ2-7)
CASSPKTSFYEQYF

SEQ ID NO: 39515 - protein, 14 aa, Homo sapiens
  CDR3 for alpha chain variable domain of TCR clone 19758 (TRAV29/DV5, TRAJ47)
CAASSIEYGNKLVF

SEQ ID NO: 39516 - protein, 15 aa, Homo sapiens
  CDR3 for beta chain variable domain of TCR clone 19758 (TRBV5-7, TRBJ2-7)
CASSGGRPVPYEQYF

SEQ ID NO: 39517 - protein, 18 aa, Homo sapiens
  CDR3 for alpha chain variable domain of TCR clone 19759 (TRAV13-1, TRAJ52)
CAAKNPNSGGTSYGKLTF

SEQ ID NO: 39518 - protein, 15 aa, Homo sapiens
  CDR3 for beta chain variable domain of TCR clone 19759 (TRBV6-1, TRBJ2-3)
CASSERGGITDTQYF

SEQ ID NO: 39519 - protein, 16 aa, Homo sapiens
  CDR3 for alpha chain variable domain of TCR clone 19760 (TRAV21, TRAJ37)
CAVRTAGSSNTGKLIF

SEQ ID NO: 39520 - protein, 13 aa, Homo sapiens
  CDR3 for beta chain variable domain of TCR clone 19760 (TRBV7-9, TRBJ1-2)
CASSLKQNYGYTF

SEQ ID NO: 39521 - protein, 13 aa, Homo sapiens
  CDR3 for alpha chain variable domain of TCR clone 19761 (TRAV8-3, TRAJ21)
CAVGAYNFNKFYF

SEQ ID NO: 39522 - protein, 12 aa, Homo sapiens
  CDR3 for beta chain variable domain of TCR clone 19761 (TRBV11-2, TRBJ2-2)
CASSLGGGELFF

SEQ ID NO: 39523 - protein, 16 aa, Homo sapiens
  CDR3 for alpha chain variable domain of TCR clone 19762 (TRAV12-3, TRAJ53)
CAMSPGSGGSNDKLTF

SEQ ID NO: 39524 - protein, 16 aa, Homo sapiens
  CDR3 for beta chain variable domain of TCR clone 19762 (TRBV4-2, TRBJ1-1)
CASSQAGFGMNTEAFF

SEQ ID NO: 39525 - protein, 15 aa, Homo sapiens
  CDR3 for alpha chain variable domain of TCR clone 19763 (TRAV12-3, TRAJ42)
CAMSGHGGSQGNLIL

SEQ ID NO: 39526 - protein, 13 aa, Homo sapiens
  CDR3 for beta chain variable domain of TCR clone 19763 (TRBV19, TRBJ2-5)
CASSGRAGETQYF

SEQ ID NO: 39527 - protein, 12 aa, Homo sapiens
  CDR3 for alpha chain variable domain of TCR clone 19764 (TRAV13-1, TRAJ27)
CAAHANAGKSTF

SEQ ID NO: 39528 - protein, 14 aa, Homo sapiens
  CDR3 for beta chain variable domain of TCR clone 19764 (TRBV19, TRBJ2-2)
CASSGQGIAGELFF

SEQ ID NO: 39529 - protein, 16 aa, Homo sapiens
  CDR3 for alpha chain variable domain of TCR clone 19765 (TRAV12-2, TRAJ10)
CAVNRVLTGGGNKPTF

SEQ ID NO: 39530 - protein, 12 aa, Homo sapiens
  CDR3 for beta chain variable domain of TCR clone 19765 (TRBV28, TRBJ2-7)
CASSFSSYEQYF

SEQ ID NO: 39531 - protein, 12 aa, Homo sapiens
  CDR3 for alpha chain variable domain of TCR clone 19766 (TRAV8-3, TRAJ26)
CTGDNYGQNFVF

SEQ ID NO: 39532 - protein, 15 aa, Homo sapiens
  CDR3 for beta chain variable domain of TCR clone 19766 (TRBV9, TRBJ2-1)
CASSLAGSSYNEQFF

SEQ ID NO: 39533 - protein, 14 aa, Homo sapiens
  CDR3 for alpha chain variable domain of TCR clone 19767 (TRAV1-2, TRAJ16)
CAVNRFSDGQKLLF

SEQ ID NO: 39534 - protein, 13 aa, Homo sapiens
  CDR3 for beta chain variable domain of TCR clone 19767 (TRBV7-3, TRBJ1-2)
CASSLKRGYGYTF

SEQ ID NO: 39535 - protein, 14 aa, Homo sapiens
  CDR3 for alpha chain variable domain of TCR clone 19768 (TRAV12-3, TRAJ12)
CAMSEVDSSYKLIF

SEQ ID NO: 39536 - protein, 12 aa, Homo sapiens
  CDR3 for beta chain variable domain of TCR clone 19768 (TRBV18, TRBJ1-4)
CASAPSREKLFF

SEQ ID NO: 39537 - protein, 13 aa, Homo sapiens
  CDR3 for alpha chain variable domain of TCR clone 19769 (TRAV2, TRAJ29)
CAAGDSGNTPLVF

SEQ ID NO: 39538 - protein, 16 aa, Homo sapiens
  CDR3 for beta chain variable domain of TCR clone 19769 (TRBV7-9, TRBJ1-2)
CASSPGGGAINYGYTF

SEQ ID NO: 39539 - protein, 13 aa, Homo sapiens
  CDR3 for alpha chain variable domain of TCR clone 19770 (TRAV13-1, TRAJ6)
CAASSGGSYIPTS

SEQ ID NO: 39540 - protein, 15 aa, Homo sapiens
  CDR3 for beta chain variable domain of TCR clone 19770 (TRBV12-4, TRBJ2-5)
CASSPPTGLQETQYF

SEQ ID NO: 39541 - protein, 13 aa, Homo sapiens
  CDR3 for alpha chain variable domain of TCR clone 19771 (TRAV27, TRAJ45)
CRSSGGGADGLTF

SEQ ID NO: 39542 - protein, 17 aa, Homo sapiens
  CDR3 for beta chain variable domain of TCR clone 19771 (TRBV11-2, TRBJ2-1)
CASSLYPPGVEYNEQFV

SEQ ID NO: 39543 - protein, 14 aa, Homo sapiens
  CDR3 for alpha chain variable domain of TCR clone 19772 (TRAV1-2, TRAJ8)
CAVREDTGFQKLVF

SEQ ID NO: 39544 - protein, 14 aa, Homo sapiens
  CDR3 for beta chain variable domain of TCR clone 19772 (TRBV19, TRBJ1-2)
CASSVLGYNYGYTF

SEQ ID NO: 39545 - protein, 14 aa, Homo sapiens
  CDR3 for alpha chain variable domain of TCR clone 19773 (TRAV12-1, TRAJ34)
CVVNLDYNTDKLIF

SEQ ID NO: 39546 - protein, 19 aa, Homo sapiens
  CDR3 for beta chain variable domain of TCR clone 19773 (TRBV20-1, TRBJ2-7)
CSAAGTSGGEAPTSSTSGR

SEQ ID NO: 39547 - protein, 15 aa, Homo sapiens
  CDR3 for alpha chain variable domain of TCR clone 19774 (TRAV17, TRAJ16)
CATALRFSDGQKLPF

SEQ ID NO: 39548 - protein, 12 aa, Homo sapiens
  CDR3 for beta chain variable domain of TCR clone 19774 (TRBV2, TRBJ2-7)
CASSDPDYEQYF

SEQ ID NO: 39549 - protein, 11 aa, Homo sapiens
  CDR3 for alpha chain variable domain of TCR clone 19775 (TRAV1-2, TRAJ20)
CAVANDCKLSF

SEQ ID NO: 39550 - protein, 18 aa, Homo sapiens
  CDR3 for beta chain variable domain of TCR clone 19775 (TRBV20-1, TRBJ2-6)
CSAETTPTHGSGANVLTF

SEQ ID NO: 39551 - protein, 19 aa, Homo sapiens
  CDR3 for alpha chain variable domain of TCR clone 19776 (TRAV3, TRAJ6)
CAVRDGPRAGGSYIPTLEE

SEQ ID NO: 39552 - protein, 14 aa, Homo sapiens
  CDR3 for beta chain variable domain of TCR clone 19776 (TRBV7-2, TRBJ2-7)
CASSPKTSFYEQYF

SEQ ID NO: 39553 - protein, 14 aa, Homo sapiens
  CDR3 for alpha chain variable domain of TCR clone 19777 (TRAV21, TRAJ15)
CAVSLNQAGTALIF

SEQ ID NO: 39554 - protein, 11 aa, Homo sapiens
  CDR3 for beta chain variable domain of TCR clone 19777 (TRBV20-1, TRBJ2-7)
CSARTSYEQYS

SEQ ID NO: 39555 - protein, 14 aa, Homo sapiens
  CDR3 for alpha chain variable domain of TCR clone 19778 (TRAV1-2, TRAJ8)
CAVREDTGFQKLVF

SEQ ID NO: 39556 - protein, 15 aa, Homo sapiens
  CDR3 for beta chain variable domain of TCR clone 19778 (TRBV6-3, TRBJ2-7)
GASSSPGTVFYEQYF

SEQ ID NO: 39557 - protein, 13 aa, Homo sapiens
  CDR3 for alpha chain variable domain of TCR clone 19779 (TRAV35, TRAJ42)
CAGFPGSQGNLIF

SEQ ID NO: 39558 - protein, 14 aa, Homo sapiens
  CDR3 for beta chain variable domain of TCR clone 19779 (TRBV4-2, TRBJ1-5)
CASSQDSINQPQHF

SEQ ID NO: 39559 - protein, 15 aa, Homo sapiens
  CDR3 for alpha chain variable domain of TCR clone 19780 (TRAV17, TRAJ57)
CATGPSQGVSEKLVF

SEQ ID NO: 39560 - protein, 14 aa, Homo sapiens
  CDR3 for beta chain variable domain of TCR clone 19780 (TRBV12-5, TRBJ2-5)
CASGSRTHQETQYF

SEQ ID NO: 39561 - protein, 11 aa, Homo sapiens
  CDR3 for alpha chain variable domain of TCR clone 19781 (TRAV20, TRAJ23)
CACNQGGKLIF

SEQ ID NO: 39562 - protein, 16 aa, Homo sapiens
  CDR3 for beta chain variable domain of TCR clone 19781 (TRBV7-8, TRBJ2-5)
CASSCGGQPAQETQYF

SEQ ID NO: 39563 - protein, 15 aa, Homo sapiens
  CDR3 for alpha chain variable domain of TCR clone 19782 (TRAV25, TRAJ52)
CAGRPGGTSYGKLTF

SEQ ID NO: 39564 - protein, 14 aa, Homo sapiens
  CDR3 for beta chain variable domain of TCR clone 19782 (TRBV19, TRBJ2-1)
CASPTFVLSGEQFF

SEQ ID NO: 39565 - protein, 11 aa, Homo sapiens
  CDR3 for alpha chain variable domain of TCR clone 19783 (TRAV3, TRAJ21)
CAVGNFNKFYF

SEQ ID NO: 39566 - protein, 16 aa, Homo sapiens
  CDR3 for beta chain variable domain of TCR clone 19783 (TRBV19, TRBJ2-1)
CASSKAGPSCYNEQFF

SEQ ID NO: 39567 - protein, 11 aa, Homo sapiens
  CDR3 for alpha chain variable domain of TCR clone 19784 (TRAV4, TRAJ23)
CLVAPGGKLIF

SEQ ID NO: 39568 - protein, 15 aa, Homo sapiens
  CDR3 for beta chain variable domain of TCR clone 19784 (TRBV7-2, TRBJ2-1)
CASSFQAGEYNEQFF

SEQ ID NO: 39569 - protein, 13 aa, Homo sapiens
  CDR3 for alpha chain variable domain of TCR clone 19785 (TRAV1-2, TRAJ9)
CAALNTGGFKTIF

SEQ ID NO: 39570 - protein, 15 aa, Homo sapiens
  CDR3 for beta chain variable domain of TCR clone 19785 (TRBV27, TRBJ2-1)
CASSNGGGSSNEQFF

SEQ ID NO: 39571 - protein, 14 aa, Homo sapiens
  CDR3 for alpha chain variable domain of TCR clone 19786 (TRAV12-1, TRAJ12)
CVVTRMDSSYKLIF

SEQ ID NO: 39572 - protein, 13 aa, Homo sapiens
  CDR3 for beta chain variable domain of TCR clone 19786 (TRBV20-1, TRBJ1-1)
CSARGVGNTEAFF

SEQ ID NO: 39573 - protein, 17 aa, Homo sapiens
  CDR3 for alpha chain variable domain of TCR clone 19787 (TRAV3, TRAJ6)
CAARDGPRAGGSYIPTF

SEQ ID NO: 39574 - protein, 16 aa, Homo sapiens
  CDR3 for beta chain variable domain of TCR clone 19787 (TRBV7-8, TRBJ2-3)
CASSTEGQRETDTQYF

SEQ ID NO: 39575 - protein, 14 aa, Homo sapiens
  CDR3 for alpha chain variable domain of TCR clone 19788 (TRAV8-3, TRAJ4)
CAMGAAGGYNKLIF

SEQ ID NO: 39576 - protein, 15 aa, Homo sapiens
  CDR3 for beta chain variable domain of TCR clone 19788 (TRBV6-5, TRBJ2-1)
CASSYDAGAGNEQFF

SEQ ID NO: 39577 - protein, 18 aa, Homo sapiens
  CDR3 for alpha chain variable domain of TCR clone 19789 (TRAV12-2, )
CAVEDIQNPDPAVYQLRD

SEQ ID NO: 39578 - protein, 17 aa, Homo sapiens
  CDR3 for beta chain variable domain of TCR clone 19789 (TRBV20-1, TRBJ2-1)
CSASSSGLAGSYNEQFF

SEQ ID NO: 39579 - protein, 15 aa, Homo sapiens
  CDR3 for alpha chain variable domain of TCR clone 19790 (TRAV8-3, TRAJ45)
CATSYSGGGADGLTF

SEQ ID NO: 39580 - protein, 13 aa, Homo sapiens
  CDR3 for beta chain variable domain of TCR clone 19790 (TRBV10-3, TRBJ2-7)
CASKLAVNYEQYF

SEQ ID NO: 39581 - protein, 17 aa, Homo sapiens
  CDR3 for alpha chain variable domain of TCR clone 19791 (TRAV13-1, TRAJ29)
CAATTPLVFGKGTRLSV

SEQ ID NO: 39582 - protein, 16 aa, Homo sapiens
  CDR3 for beta chain variable domain of TCR clone 19791 (TRBV7-2, TRBJ2-1)
CASSSQGAAAYNEQFF

SEQ ID NO: 39583 - protein, 15 aa, Homo sapiens
  CDR3 for alpha chain variable domain of TCR clone 19792 (TRAV26-1, TRAJ15)
CIVRAANQAGTALIF

SEQ ID NO: 39584 - protein, 15 aa, Homo sapiens
  CDR3 for beta chain variable domain of TCR clone 19792 (TRBV20-1, TRBJ1-1)
CSARSAATSNTEAFL

SEQ ID NO: 39585 - protein, 15 aa, Homo sapiens
  CDR3 for alpha chain variable domain of TCR clone 19793 (TRAV16, TRAJ58)
TVLSNGETSGSRLTF

SEQ ID NO: 39586 - protein, 13 aa, Homo sapiens
  CDR3 for beta chain variable domain of TCR clone 19793 (TRBV20-1, TRBJ2-2)
CSASAAGTGELFF

SEQ ID NO: 39587 - protein, 14 aa, Homo sapiens
  CDR3 for alpha chain variable domain of TCR clone 19794 (TRAV12-3, TRAJ42)
CAMNYGGSQGNLIF

SEQ ID NO: 39588 - protein, 14 aa, Homo sapiens
  CDR3 for beta chain variable domain of TCR clone 19794 (TRBV19, TRBJ2-1)
CASPTFVLSGEQFF

SEQ ID NO: 39589 - protein, 15 aa, Homo sapiens
  CDR3 for alpha chain variable domain of TCR clone 19795 (TRAV17, TRAJ16)
CATALRFSDGQKLLF

SEQ ID NO: 39590 - protein, 15 aa, Homo sapiens
  CDR3 for beta chain variable domain of TCR clone 19795 (TRBV20-1, TRBJ1-1)
CSASRGVTGSTEAFF

SEQ ID NO: 39591 - protein, 12 aa, Homo sapiens
  CDR3 for alpha chain variable domain of TCR clone 19796 (TRAV4, TRAJ26)
CLVGDYGQNFVF

SEQ ID NO: 39592 - protein, 16 aa, Homo sapiens
  CDR3 for beta chain variable domain of TCR clone 19796 (TRBV7-2, TRBJ1-2)
CASSSNQDRRGHGCTF

SEQ ID NO: 39593 - protein, 14 aa, Homo sapiens
  CDR3 for alpha chain variable domain of TCR clone 19797 (TRAV17, TRAJ22)
CATSPSGSARQLTF

SEQ ID NO: 39594 - protein, 14 aa, Homo sapiens
  CDR3 for beta chain variable domain of TCR clone 19797 (TRBV7-2, TRBJ2-7)
CASSPKTSFYEQYF

SEQ ID NO: 39595 - protein, 15 aa, Homo sapiens
  CDR3 for alpha chain variable domain of TCR clone 19798 (TRAV8-3, TRAJ44)
CAVGAGAGTASKLTF

SEQ ID NO: 39596 - protein, 12 aa, Homo sapiens
  CDR3 for beta chain variable domain of TCR clone 19798 (TRBV7-8, TRBJ2-4)
CASSLGGNMQYF

SEQ ID NO: 39597 - protein, 23 aa, Homo sapiens
  CDR3 for alpha chain variable domain of TCR clone 19799 (TRAV8-4, )
CAVSYAGNNHIQNPDPAVYQLRD

SEQ ID NO: 39598 - protein, 15 aa, Homo sapiens
  CDR3 for beta chain variable domain of TCR clone 19799 (TRBV12-4, TRBJ2-1)
CASSLLATGNNEQFF

SEQ ID NO: 39599 - protein, 14 aa, Homo sapiens
  CDR3 for alpha chain variable domain of TCR clone 19800 (TRAV17, TRAJ22)
CATSPSGSARQLTF

SEQ ID NO: 39600 - protein, 15 aa, Homo sapiens
  CDR3 for beta chain variable domain of TCR clone 19800 (TRBV4-1, TRBJ2-5)
CDSSQWDLYQETQYF

SEQ ID NO: 39601 - protein, 18 aa, Homo sapiens
  CDR3 for alpha chain variable domain of TCR clone 19801 (TRAV21, TRAJ52)
CAVRPSPADGTSYGKLTF

SEQ ID NO: 39602 - protein, 17 aa, Homo sapiens
  CDR3 for beta chain variable domain of TCR clone 19801 (TRBV13, TRBJ2-3)
CASSLSRVAGGRNTQYF

SEQ ID NO: 39603 - protein, 15 aa, Homo sapiens
  CDR3 for alpha chain variable domain of TCR clone 19802 (TRAV12-2, TRAJ53)
CAVNGGGGSNYKLTF

SEQ ID NO: 39604 - protein, 18 aa, Homo sapiens
  CDR3 for beta chain variable domain of TCR clone 19802 (TRBV11-2, TRBJ2-3)
CASSLGGASRGAPNTQYF

SEQ ID NO: 39605 - protein, 12 aa, Homo sapiens
  CDR3 for alpha chain variable domain of TCR clone 19803 (TRAV21, TRAJ11)
CAATSGYSTLTF

SEQ ID NO: 39606 - protein, 14 aa, Homo sapiens
  CDR3 for beta chain variable domain of TCR clone 19803 (TRBV4-2, TRBJ2-1)
CASGLDRAYNEQFF

SEQ ID NO: 39607 - protein, 14 aa, Homo sapiens
  CDR3 for alpha chain variable domain of TCR clone 19804 (TRAV12-2, TRAJ17)
CAVLFKAAGNKLTF

SEQ ID NO: 39608 - protein, 17 aa, Homo sapiens
  CDR3 for beta chain variable domain of TCR clone 19804 (TRBV20-1, TRBJ2-2)
CSAIGSGQGGLTGELFF

SEQ ID NO: 39609 - protein, 15 aa, Homo sapiens
  CDR3 for alpha chain variable domain of TCR clone 19805 (TRAV3, TRAJ22)
CAVRDRGGSARQLTF

SEQ ID NO: 39610 - protein, 14 aa, Homo sapiens
  CDR3 for beta chain variable domain of TCR clone 19805 (TRBV6-1, TRBJ1-3)
CASVQGGGGNTIYF

SEQ ID NO: 39611 - protein, 15 aa, Homo sapiens
  CDR3 for alpha chain variable domain of TCR clone 19806 (TRAV29/DV5, TRAJ28)
CAASVMGAGSYQLTF

SEQ ID NO: 39612 - protein, 14 aa, Homo sapiens
  CDR3 for beta chain variable domain of TCR clone 19806 (TRBV7-2, TRBJ1-5)
CASSWVGENQPQHF

SEQ ID NO: 39613 - protein, 23 aa, Homo sapiens
  CDR3 for alpha chain variable domain of TCR clone 19807 (TRAV26-1, TRAJ38)
CIADNAGNNHIQNPYPAVYQLRD

SEQ ID NO: 39614 - protein, 13 aa, Homo sapiens
  CDR3 for beta chain variable domain of TCR clone 19807 (TRBV20-1, TRBJ1-1)
CSARGGGNTEAFF

SEQ ID NO: 39615 - protein, 15 aa, Homo sapiens
  CDR3 for alpha chain variable domain of TCR clone 19808 (TRAV26-1, TRAJ29)
CIVRVEGSGNTPLVF

SEQ ID NO: 39616 - protein, 17 aa, Homo sapiens
  CDR3 for beta chain variable domain of TCR clone 19808 (TRBV11-2, TRBJ2-1)
CASSLYPPGVEYNEQFF

SEQ ID NO: 39617 - protein, 13 aa, Homo sapiens
  CDR3 for alpha chain variable domain of TCR clone 19809 (TRAV1-1, TRAJ9)
CAAKNTGGFQTIF

SEQ ID NO: 39618 - protein, 14 aa, Homo sapiens
  CDR3 for beta chain variable domain of TCR clone 19809 (TRBV20-1, TRBJ2-1)
CSAQIGGSANEQFF

SEQ ID NO: 39619 - protein, 13 aa, Homo sapiens
  CDR3 for alpha chain variable domain of TCR clone 19810 (TRAV20, TRAJ37)
CAGCSSNTGKLIF

SEQ ID NO: 39620 - protein, 11 aa, Homo sapiens
  CDR3 for beta chain variable domain of TCR clone 19810 (TRBV12-4, TRBJ2-3)
CASTATDKQYF

SEQ ID NO: 39621 - protein, 14 aa, Homo sapiens
  CDR3 for alpha chain variable domain of TCR clone 19811 (TRAV13-1, TRAJ35)
CAASKGGFGNVLHC

SEQ ID NO: 39622 - protein, 13 aa, Homo sapiens
  CDR3 for beta chain variable domain of TCR clone 19811 (TRBV7-3, TRBJ1-1)
CASTQDWGAEAFF

SEQ ID NO: 39623 - protein, 11 aa, Homo sapiens
  CDR3 for alpha chain variable domain of TCR clone 19812 (TRAV3, TRAJ21)
CAVGNFNKFYF

SEQ ID NO: 39624 - protein, 16 aa, Homo sapiens
  CDR3 for beta chain variable domain of TCR clone 19812 (TRBV19, TRBJ2-1)
CASSKAGPSSYNEQFY

SEQ ID NO: 39625 - protein, 12 aa, Homo sapiens
  CDR3 for alpha chain variable domain of TCR clone 19813 (TRAV8-3, TRAJ26)
CAGDSYGQNFVF

SEQ ID NO: 39626 - protein, 15 aa, Homo sapiens
  CDR3 for beta chain variable domain of TCR clone 19813 (TRBV9, TRBJ2-1)
CASSLAGSSYNEQFF

SEQ ID NO: 39627 - protein, 12 aa, Homo sapiens
  CDR3 for alpha chain variable domain of TCR clone 19814 (TRAV14/DV4, TRAJ9)
CAMNPGGFKTTF

SEQ ID NO: 39628 - protein, 16 aa, Homo sapiens
  CDR3 for beta chain variable domain of TCR clone 19814 (TRBV28, TRBJ2-5)
CASSFSPAGGWETQYF

SEQ ID NO: 39629 - protein, 12 aa, Homo sapiens
  CDR3 for alpha chain variable domain of TCR clone 19815 (TRAV2, TRAJ9)
CAVGAGCFKTIF

SEQ ID NO: 39630 - protein, 16 aa, Homo sapiens
  CDR3 for beta chain variable domain of TCR clone 19815 (TRBV13, TRBJ2-2)
CASSPRTGEHTGELFF

SEQ ID NO: 39631 - protein, 13 aa, Homo sapiens
  CDR3 for alpha chain variable domain of TCR clone 19816 (TRAV8-3, TRAJ28)
CDVGAVGSYQLTF

SEQ ID NO: 39632 - protein, 15 aa, Homo sapiens
  CDR3 for beta chain variable domain of TCR clone 19816 (TRBV7-9, TRBJ1-5)
CASSQGHQPNQPQHF

SEQ ID NO: 39633 - protein, 14 aa, Homo sapiens
  CDR3 for alpha chain variable domain of TCR clone 19817 (TRAV13-1, TRAJ53)
CATSTGGSNYKLTF

SEQ ID NO: 39634 - protein, 14 aa, Homo sapiens
  CDR3 for beta chain variable domain of TCR clone 19817 (TRBV5-4, TRBJ1-4)
CASSFSGGAEKLFF

SEQ ID NO: 39635 - protein, 16 aa, Homo sapiens
  CDR3 for alpha chain variable domain of TCR clone 19818 (TRAV3, TRAJ21)
CAVRDIERGNFKKFYF

SEQ ID NO: 39636 - protein, 13 aa, Homo sapiens
  CDR3 for beta chain variable domain of TCR clone 19818 (TRBV27, TRBJ2-7)
CASSLTTGYEQYF

SEQ ID NO: 39637 - protein, 17 aa, Homo sapiens
  CDR3 for alpha chain variable domain of TCR clone 19819 (TRAV3, TRAJ6)
CAVRDGPRAGGSYIPTF

SEQ ID NO: 39638 - protein, 11 aa, Homo sapiens
  CDR3 for beta chain variable domain of TCR clone 19819 (TRBV11-2, TRBJ2-2)
CASSLPGELFF

SEQ ID NO: 39639 - protein, 12 aa, Homo sapiens
  CDR3 for alpha chain variable domain of TCR clone 19820 (TRAV2, TRAJ24)
CAATDSWGKFQF

SEQ ID NO: 39640 - protein, 15 aa, Homo sapiens
  CDR3 for beta chain variable domain of TCR clone 19820 (TRBV5-8, TRBJ1-1)
CASSLGGALKLSLDK

SEQ ID NO: 39641 - protein, 15 aa, Homo sapiens
  CDR3 for alpha chain variable domain of TCR clone 19821 (TRAV26-1, TRAJ29)
CIVRVEGSGNTPLVF

SEQ ID NO: 39642 - protein, 15 aa, Homo sapiens
  CDR3 for beta chain variable domain of TCR clone 19821 (TRBV7-9, TRBJ1-5)
CASSQVHQPNQPQHF

SEQ ID NO: 39643 - protein, 10 aa, Homo sapiens
  CDR3 for alpha chain variable domain of TCR clone 19822 (TRAV23/DV6, TRAJ57)
CAASSTLSQG

SEQ ID NO: 39644 - protein, 14 aa, Homo sapiens
  CDR3 for beta chain variable domain of TCR clone 19822 (TRBV19, TRBJ2-1)
CASPTFVLSGEQFF

SEQ ID NO: 39645 - protein, 23 aa, Homo sapiens
  CDR3 for alpha chain variable domain of TCR clone 19823 (TRAV26-1, TRAJ38)
CIADNAGNNHIQNPDPSVYQLRD

SEQ ID NO: 39646 - protein, 13 aa, Homo sapiens
  CDR3 for beta chain variable domain of TCR clone 19823 (TRBV20-1, TRBJ1-1)
CSARGGGNTEAFF

SEQ ID NO: 39647 - protein, 13 aa, Homo sapiens
  CDR3 for alpha chain variable domain of TCR clone 19824 (TRAV27, TRAJ3)
ASLRGSSAYKIIF

SEQ ID NO: 39648 - protein, 15 aa, Homo sapiens
  CDR3 for beta chain variable domain of TCR clone 19824 (TRBV28, TRBJ1-3)
CASSMGWASGNTIYF

SEQ ID NO: 39649 - protein, 13 aa, Homo sapiens
  CDR3 for alpha chain variable domain of TCR clone 19825 (TRAV13-1, TRAJ20)
CAARVSNDYKLSF

SEQ ID NO: 39650 - protein, 12 aa, Homo sapiens
  CDR3 for beta chain variable domain of TCR clone 19825 (TRBV20-1, TRBJ2-1)
CSARLGTDERFF

SEQ ID NO: 39651 - protein, 14 aa, Homo sapiens
  CDR3 for alpha chain variable domain of TCR clone 19826 (TRAV1-2, TRAJ8)
CAVREDTGFQKLVF

SEQ ID NO: 39652 - protein, 15 aa, Homo sapiens
  CDR3 for beta chain variable domain of TCR clone 19826 (TRBV6-3, TRBJ2-7)
CASSSPGTVFYEQDF

SEQ ID NO: 39653 - protein, 13 aa, Homo sapiens
  CDR3 for alpha chain variable domain of TCR clone 19827 (TRAV29/DV5, TRAJ33)
CAASVESNYQLIW

SEQ ID NO: 39654 - protein, 14 aa, Homo sapiens
  CDR3 for beta chain variable domain of TCR clone 19827 (TRBV11-2, TRBJ2-5)
CASSRTGGIETQYL

SEQ ID NO: 39655 - protein, 14 aa, Homo sapiens
  CDR3 for alpha chain variable domain of TCR clone 19828 (TRAV13-1, TRAJ20)
CAARPGSNDYKPSF

SEQ ID NO: 39656 - protein, 13 aa, Homo sapiens
  CDR3 for beta chain variable domain of TCR clone 19828 (TRBV20-1, TRBJ1-1)
CSAPPGGHTEAFF

SEQ ID NO: 39657 - protein, 16 aa, Homo sapiens
  CDR3 for alpha chain variable domain of TCR clone 19829 (TRAV21, TRAJ37)
CAVRPRGSSNTGKLIF

SEQ ID NO: 39658 - protein, 13 aa, Homo sapiens
  CDR3 for beta chain variable domain of TCR clone 19829 (TRBV7-9, TRBJ1-2)
CASSLKQNYGYTF

SEQ ID NO: 39659 - protein, 15 aa, Homo sapiens
  CDR3 for alpha chain variable domain of TCR clone 19830 (TRAV3, TRAJ22)
CAVRDRGGSARQLTF

SEQ ID NO: 39660 - protein, 17 aa, Homo sapiens
  CDR3 for beta chain variable domain of TCR clone 19830 (TRBV10-1, TRBJ2-1)
CASSPQRAGGPFNEQFF

SEQ ID NO: 39661 - protein, 13 aa, Homo sapiens
  CDR3 for alpha chain variable domain of TCR clone 19831 (TRAV27, TRAJ49)
CAPRPYTGNQFSF

SEQ ID NO: 39662 - protein, 16 aa, Homo sapiens
  CDR3 for beta chain variable domain of TCR clone 19831 (TRBV4-1, TRBJ1-2)
CASSQDAGQVLYGYTF

SEQ ID NO: 39663 - protein, 16 aa, Homo sapiens
  CDR3 for alpha chain variable domain of TCR clone 19832 (TRAV8-3, TRAJ44)
CAVGASNTGTASKPTF

SEQ ID NO: 39664 - protein, 15 aa, Homo sapiens
  CDR3 for beta chain variable domain of TCR clone 19832 (TRBV27, TRBJ1-5)
CASTFNRGSNQPQHF

SEQ ID NO: 39665 - protein, 14 aa, Homo sapiens
  CDR3 for alpha chain variable domain of TCR clone 19833 (TRAV13-1, TRAJ40)
CAASMTSGTYTYIF

SEQ ID NO: 39666 - protein, 15 aa, Homo sapiens
  CDR3 for beta chain variable domain of TCR clone 19833 (TRBV7-3, TRBJ2-1)
CASSPTGGGEVEQFF

SEQ ID NO: 39667 - protein, 12 aa, Homo sapiens
  CDR3 for alpha chain variable domain of TCR clone 19834 (TRAV2, TRAJ10)
CASTGGGNRLTF

SEQ ID NO: 39668 - protein, 14 aa, Homo sapiens
  CDR3 for beta chain variable domain of TCR clone 19834 (TRBV7-2, TRBJ2-2)
CASRGQGAAGELFF

SEQ ID NO: 39669 - protein, 14 aa, Homo sapiens
  CDR3 for alpha chain variable domain of TCR clone 19835 (TRAV13-2, TRAJ41)
CAERPDWAGYALNF

SEQ ID NO: 39670 - protein, 15 aa, Homo sapiens
  CDR3 for beta chain variable domain of TCR clone 19835 (TRBV27, TRBJ2-1)
CASSNGGGSSNEQFF

SEQ ID NO: 39671 - protein, 12 aa, Homo sapiens
  CDR3 for alpha chain variable domain of TCR clone 19836 (TRAV17, TRAJ5)
CSYDTGRRALTF

SEQ ID NO: 39672 - protein, 13 aa, Homo sapiens
  CDR3 for beta chain variable domain of TCR clone 19836 (TRBV7-9, TRBJ1-2)
CASSLKQNYGYTF

SEQ ID NO: 39673 - protein, 12 aa, Homo sapiens
  CDR3 for alpha chain variable domain of TCR clone 19837 (TRAV3, TRAJ39)
CAVIEWSNMLTF

SEQ ID NO: 39674 - protein, 14 aa, Homo sapiens
  CDR3 for beta chain variable domain of TCR clone 19837 (TRBV7-8, TRBJ2-3)
CASSFPDGQDTQYL

SEQ ID NO: 39675 - protein, 14 aa, Homo sapiens
  CDR3 for alpha chain variable domain of TCR clone 19838 (TRAV12-3, TRAJ10)
SHLPLTGGGNKLTF

SEQ ID NO: 39676 - protein, 15 aa, Homo sapiens
  CDR3 for beta chain variable domain of TCR clone 19838 (TRBV20-1, TRBJ1-1)
CSASRGVTGNTEAFF

SEQ ID NO: 39677 - protein, 11 aa, Homo sapiens
  CDR3 for alpha chain variable domain of TCR clone 19839 (TRAV17, TRAJ36)
CAPTGANNLFF

SEQ ID NO: 39678 - protein, 14 aa, Homo sapiens
  CDR3 for beta chain variable domain of TCR clone 19839 (TRBV4-1, TRBJ2-2)
CASSQAVNTGELFF

SEQ ID NO: 39679 - protein, 14 aa, Homo sapiens
  CDR3 for alpha chain variable domain of TCR clone 19840 (TRAV1-2, TRAJ16)
CAVNRFSDGQKLLF

SEQ ID NO: 39680 - protein, 15 aa, Homo sapiens
  CDR3 for beta chain variable domain of TCR clone 19840 (TRBV7-9, TRBJ1-6)
CASGSPGRGNSPLHF

SEQ ID NO: 39681 - protein, 10 aa, Homo sapiens
  CDR3 for alpha chain variable domain of TCR clone 19841 (TRAV26-1, TRAJ22)
CIVSLNFFCF

SEQ ID NO: 39682 - protein, 15 aa, Homo sapiens
  CDR3 for beta chain variable domain of TCR clone 19841 (TRBV4-2, TRBJ1-2)
CASSQRTGGRDGYTF

SEQ ID NO: 39683 - protein, 14 aa, Homo sapiens
  CDR3 for alpha chain variable domain of TCR clone 19842 (TRAV3, TRAJ9)
CAVRLNTGGFKTIF

SEQ ID NO: 39684 - protein, 15 aa, Homo sapiens
  CDR3 for beta chain variable domain of TCR clone 19842 (TRBV20-1, TRBJ2-7)
CSARDRVSGMDEQYF

SEQ ID NO: 39685 - protein, 14 aa, Homo sapiens
  CDR3 for alpha chain variable domain of TCR clone 19843 (TRAV26-1, TRAJ45)
CVEVTGGGADGLTF

SEQ ID NO: 39686 - protein, 13 aa, Homo sapiens
  CDR3 for beta chain variable domain of TCR clone 19843 (TRBV7-6, TRBJ1-2)
CASSLVADYGYTF

SEQ ID NO: 39687 - protein, 16 aa, Homo sapiens
  CDR3 for alpha chain variable domain of TCR clone 19844 (TRAV26-1, TRAJ42)
CIVRPIMEEAKEISSF

SEQ ID NO: 39688 - protein, 16 aa, Homo sapiens
  CDR3 for beta chain variable domain of TCR clone 19844 (TRBV7-3, TRBJ2-2)
CASSLKRGTLSGELFF

SEQ ID NO: 39689 - protein, 14 aa, Homo sapiens
  CDR3 for alpha chain variable domain of TCR clone 19845 (TRAV12-2, TRAJ13)
CAVKKTGGYQKVTF

SEQ ID NO: 39690 - protein, 12 aa, Homo sapiens
  CDR3 for beta chain variable domain of TCR clone 19845 (TRBV7-9, TRBJ2-7)
CASSLEGYEQYF

SEQ ID NO: 39691 - protein, 15 aa, Homo sapiens
  CDR3 for alpha chain variable domain of TCR clone 19846 (TRAV8-4, TRAJ3)
CAVTGENLVQQCFQA

SEQ ID NO: 39692 - protein, 16 aa, Homo sapiens
  CDR3 for beta chain variable domain of TCR clone 19846 (TRBV4-2, TRBJ1-1)
CASSQAGFGMNTEAFF

SEQ ID NO: 39693 - protein, 14 aa, Homo sapiens
  CDR3 for alpha chain variable domain of TCR clone 19847 (TRAV38-1, TRAJ40)
CALCPTSGTYKYIF

SEQ ID NO: 39694 - protein, 14 aa, Homo sapiens
  CDR3 for beta chain variable domain of TCR clone 19847 (TRBV25-1, TRBJ1-1)
CASTHLGGNTEAFF

SEQ ID NO: 39695 - protein, 13 aa, Homo sapiens
  CDR3 for alpha chain variable domain of TCR clone 19848 (TRAV20, TRAJ37)
CAGYSSNTGKLIF

SEQ ID NO: 39696 - protein, 11 aa, Homo sapiens
  CDR3 for beta chain variable domain of TCR clone 19848 (TRBV12-4, TRBJ2-3)
CASTATDTQYF

SEQ ID NO: 39697 - protein, 10 aa, Homo sapiens
  CDR3 for alpha chain variable domain of TCR clone 19849 (TRAV12-1, TRAJ43)
CVVHNNDMRF

SEQ ID NO: 39698 - protein, 13 aa, Homo sapiens
  CDR3 for beta chain variable domain of TCR clone 19849 (TRBV12-4, TRBJ1-2)
CASSSGLTVISAF

SEQ ID NO: 39699 - protein, 13 aa, Homo sapiens
  CDR3 for alpha chain variable domain of TCR clone 19850 (TRAV27, TRAJ3)
ASLRGSSASKIIF

SEQ ID NO: 39700 - protein, 15 aa, Homo sapiens
  CDR3 for beta chain variable domain of TCR clone 19850 (TRBV28, TRBJ1-3)
CASSMGWAPGNTIYF

SEQ ID NO: 39701 - protein, 10 aa, Homo sapiens
  CDR3 for alpha chain variable domain of TCR clone 19851 (TRAV13-2, TRAJ49)
CADTGNQFYF

SEQ ID NO: 39702 - protein, 15 aa, Homo sapiens
  CDR3 for beta chain variable domain of TCR clone 19851 (TRBV6-6, TRBJ1-1)
CASSPRGDVETEAFF

SEQ ID NO: 39703 - protein, 18 aa, Homo sapiens
  CDR3 for alpha chain variable domain of TCR clone 19852 (TRAV12-3, TRAJ52)
CAMSRTNAGGTSYGKLTF

SEQ ID NO: 39704 - protein, 17 aa, Homo sapiens
  CDR3 for beta chain variable domain of TCR clone 19852 (TRBV7-3, TRBJ2-3)
CASSLMKRMRGADTRYF

SEQ ID NO: 39705 - protein, 14 aa, Homo sapiens
  CDR3 for alpha chain variable domain of TCR clone 19853 (TRAV13-1, TRAJ40)
CAARMTSGTYKYIF

SEQ ID NO: 39706 - protein, 15 aa, Homo sapiens
  CDR3 for beta chain variable domain of TCR clone 19853 (TRBV7-3, TRBJ2-1)
CASSPTGGGEVEQFF

SEQ ID NO: 39707 - protein, 15 aa, Homo sapiens
  CDR3 for alpha chain variable domain of TCR clone 19854 (TRAV8-3, TRAJ11)
CAVGLLNSRYSTLTF

SEQ ID NO: 39708 - protein, 16 aa, Homo sapiens
  CDR3 for beta chain variable domain of TCR clone 19854 (TRBV7-9, TRBJ1-2)
CASSLGFSSGEDGYTF

SEQ ID NO: 39709 - protein, 18 aa, Homo sapiens
  CDR3 for alpha chain variable domain of TCR clone 19855 (TRAV26-1, TRAJ23)
CIVRVGLDVWNQGGKLIF

SEQ ID NO: 39710 - protein, 16 aa, Homo sapiens
  CDR3 for beta chain variable domain of TCR clone 19855 (TRBV12-4, TRBJ2-5)
CASSFFVRGRQETQYF

SEQ ID NO: 39711 - protein, 15 aa, Homo sapiens
  CDR3 for alpha chain variable domain of TCR clone 19856 (TRAV3, TRAJ5)
CAVRDLDTGWRALTF

SEQ ID NO: 39712 - protein, 13 aa, Homo sapiens
  CDR3 for beta chain variable domain of TCR clone 19856 (TRBV12-4, TRBJ2-7)
CASSPTETYEQYF

SEQ ID NO: 39713 - protein, 19 aa, Homo sapiens
  CDR3 for alpha chain variable domain of TCR clone 19857 (TRAV35, TRAJ47)
VLGLLDCRTHTEYGNKLVF

SEQ ID NO: 39714 - protein, 11 aa, Homo sapiens
  CDR3 for beta chain variable domain of TCR clone 19857 (TRBV29-1, TRBJ1-1)
CSVEVGTRTFF

SEQ ID NO: 39715 - protein, 14 aa, Homo sapiens
  CDR3 for alpha chain variable domain of TCR clone 19858 (TRAV12-2, TRAJ17)
CAVLFKAAGNKLTF

SEQ ID NO: 39716 - protein, 14 aa, Homo sapiens
  CDR3 for beta chain variable domain of TCR clone 19858 (TRBV7-2, TRBJ2-7)
RASRSQGAAYEQYF

SEQ ID NO: 39717 - protein, 15 aa, Homo sapiens
  CDR3 for alpha chain variable domain of TCR clone 19859 (TRAV35, TRAJ50)
CAGQLRKASYDKVIF

SEQ ID NO: 39718 - protein, 12 aa, Homo sapiens
  CDR3 for beta chain variable domain of TCR clone 19859 (TRBV5-1, TRBJ2-5)
CASSLGLETQYF

SEQ ID NO: 39719 - protein, 13 aa, Homo sapiens
  CDR3 for alpha chain variable domain of TCR clone 19860 (TRAV3, TRAJ36)
CAVRDTGANNLFL

SEQ ID NO: 39720 - protein, 15 aa, Homo sapiens
  CDR3 for beta chain variable domain of TCR clone 19860 (TRBV24-1, TRBJ2-1)
CATSGSGGFYNEQFF

SEQ ID NO: 39721 - protein, 10 aa, Homo sapiens
  CDR3 for alpha chain variable domain of TCR clone 19861 (TRAV23/DV6, TRAJ57)
CAASSTLSQG

SEQ ID NO: 39722 - protein, 14 aa, Homo sapiens
  CDR3 for beta chain variable domain of TCR clone 19861 (TRBV25-1, TRBJ1-1)
CASTHQGGNTEAFF

SEQ ID NO: 39723 - protein, 10 aa, Homo sapiens
  CDR3 for alpha chain variable domain of TCR clone 19862 (TRAV12-3, TRAJ18)
CAMSAEAQPW

SEQ ID NO: 39724 - protein, 14 aa, Homo sapiens
  CDR3 for beta chain variable domain of TCR clone 19862 (TRBV10-2, TRBJ1-5)
CASSSTGRNQPQHF

SEQ ID NO: 39725 - protein, 14 aa, Homo sapiens
  CDR3 for alpha chain variable domain of TCR clone 19863 (TRAV35, TRAJ33)
RAGSSQDSNYQLIW

SEQ ID NO: 39726 - protein, 15 aa, Homo sapiens
  CDR3 for beta chain variable domain of TCR clone 19863 (TRBV20-1, TRBJ2-7)
CSAESGTSGAYEQYF

SEQ ID NO: 39727 - protein, 15 aa, Homo sapiens
  CDR3 for alpha chain variable domain of TCR clone 19864 (TRAV3, TRAJ22)
CAVRDRSGSARQLTF

SEQ ID NO: 39728 - protein, 16 aa, Homo sapiens
  CDR3 for beta chain variable domain of TCR clone 19864 (TRBV5-4, TRBJ2-3)
CASQQPGAGGADTQYF

SEQ ID NO: 39729 - protein, 13 aa, Homo sapiens
  CDR3 for alpha chain variable domain of TCR clone 19865 (TRAV27, TRAJ17)
CAGAATAGNKLTF

SEQ ID NO: 39730 - protein, 13 aa, Homo sapiens
  CDR3 for beta chain variable domain of TCR clone 19865 (TRBV4-2, TRBJ1-1)
CASSQAGNTEAFF

SEQ ID NO: 39731 - protein, 12 aa, Homo sapiens
  CDR3 for alpha chain variable domain of TCR clone 19866 (TRAV12-3, TRAJ17)
CAMTLTGNKLTF

SEQ ID NO: 39732 - protein, 13 aa, Homo sapiens
  CDR3 for beta chain variable domain of TCR clone 19866 (TRBV7-6, TRBJ1-2)
CASSLVADYGYTF

SEQ ID NO: 39733 - protein, 14 aa, Homo sapiens
  CDR3 for alpha chain variable domain of TCR clone 19867 (TRAV8-2, TRAJ4)
CVVSPSGGYNKLIF

SEQ ID NO: 39734 - protein, 17 aa, Homo sapiens
  CDR3 for beta chain variable domain of TCR clone 19867 (TRBV4-1, TRBJ1-4)
CASSDTGELMKNCFLAV

SEQ ID NO: 39735 - protein, 12 aa, Homo sapiens
  CDR3 for alpha chain variable domain of TCR clone 19868 (TRAV13-2, TRAJ23)
CAERHRGGKPIF

SEQ ID NO: 39736 - protein, 12 aa, Homo sapiens
  CDR3 for beta chain variable domain of TCR clone 19868 (TRBV5-5, TRBJ2-5)
CASSYFGETQYF

SEQ ID NO: 39737 - protein, 13 aa, Homo sapiens
  CDR3 for alpha chain variable domain of TCR clone 19869 (TRAV8-3, TRAJ36)
CAVGATVANNLFF

SEQ ID NO: 39738 - protein, 15 aa, Homo sapiens
  CDR3 for beta chain variable domain of TCR clone 19869 (TRBV7-2, TRBJ1-2)
CASSPRAGWNYGYTF

SEQ ID NO: 39739 - protein, 12 aa, Homo sapiens
  CDR3 for alpha chain variable domain of TCR clone 19870 (TRAV13-2, TRAJ42)
CAEGGSQGNLIF

SEQ ID NO: 39740 - protein, 15 aa, Homo sapiens
  CDR3 for beta chain variable domain of TCR clone 19870 (TRBV23-1, TRBJ2-2)
CASRGQGVYTGELFF

SEQ ID NO: 39741 - protein, 14 aa, Homo sapiens
  CDR3 for alpha chain variable domain of TCR clone 19871 (TRAV1-2, TRAJ16)
CAVNRFSDGQKLIF

SEQ ID NO: 39742 - protein, 15 aa, Homo sapiens
  CDR3 for beta chain variable domain of TCR clone 19871 (TRBV7-9, TRBJ1-6)
CASSSPGRGNSPLHF

SEQ ID NO: 39743 - protein, 12 aa, Homo sapiens
  CDR3 for alpha chain variable domain of TCR clone 19872 (TRAV12-3, TRAJ17)
CAMTLTGNKLTF

SEQ ID NO: 39744 - protein, 13 aa, Homo sapiens
  CDR3 for beta chain variable domain of TCR clone 19872 (TRBV20-1, TRBJ1-1)
CSAPLGGGTEAFF

SEQ ID NO: 39745 - protein, 14 aa, Homo sapiens
  CDR3 for alpha chain variable domain of TCR clone 19873 (TRAV12-3, TRAJ10)
SHLPLTGGGNKLTF

SEQ ID NO: 39746 - protein, 14 aa, Homo sapiens
  CDR3 for beta chain variable domain of TCR clone 19873 (TRBV7-3, TRBJ1-1)
CASSLKGGNTEAFF

SEQ ID NO: 39747 - protein, 12 aa, Homo sapiens
  CDR3 for alpha chain variable domain of TCR clone 19874 (TRAV21, TRAJ33)
CAKMDSNYQLIW

SEQ ID NO: 39748 - protein, 14 aa, Homo sapiens
  CDR3 for beta chain variable domain of TCR clone 19874 (TRBV2, TRBJ2-7)
CASSLTSGGYERYF

SEQ ID NO: 39749 - protein, 14 aa, Homo sapiens
  CDR3 for alpha chain variable domain of TCR clone 19875 (TRAV1-2, TRAJ16)
CAVNRFSDGQKLLF

SEQ ID NO: 39750 - protein, 12 aa, Homo sapiens
  CDR3 for beta chain variable domain of TCR clone 19875 (TRBV5-1, TRBJ1-2)
CASSQDTYGYTF

SEQ ID NO: 39751 - protein, 14 aa, Homo sapiens
  CDR3 for alpha chain variable domain of TCR clone 19876 (TRAV12-1, TRAJ17)
CVVNYKAAGNKLTF

SEQ ID NO: 39752 - protein, 17 aa, Homo sapiens
  CDR3 for beta chain variable domain of TCR clone 19876 (TRBV20-1, TRBJ2-1)
CSASSSGLVGSYNEQFF

SEQ ID NO: 39753 - protein, 14 aa, Homo sapiens
  CDR3 for alpha chain variable domain of TCR clone 19877 (TRAV1-2, TRAJ16)
CAVNRFSDGQKLLF

SEQ ID NO: 39754 - protein, 16 aa, Homo sapiens
  CDR3 for beta chain variable domain of TCR clone 19877 (TRBV19, TRBJ2-1)
CASSEILVGDGNEQFF

SEQ ID NO: 39755 - protein, 11 aa, Homo sapiens
  CDR3 for alpha chain variable domain of TCR clone 19878 (TRAV12-3, TRAJ41)
CAMNAREALNF

SEQ ID NO: 39756 - protein, 14 aa, Homo sapiens
  CDR3 for beta chain variable domain of TCR clone 19878 (TRBV4-3, TRBJ1-1)
CASSQGWTPARAFF

SEQ ID NO: 39757 - protein, 11 aa, Homo sapiens
  CDR3 for alpha chain variable domain of TCR clone 19879 (TRAV13-1, TRAJ39)
CASHAGNMLTL

SEQ ID NO: 39758 - protein, 14 aa, Homo sapiens
  CDR3 for beta chain variable domain of TCR clone 19879 (TRBV11-2, TRBJ1-5)
CASSLDRGRQPQHF

SEQ ID NO: 39759 - protein, 14 aa, Homo sapiens
  CDR3 for alpha chain variable domain of TCR clone 19880 (TRAV8-2, TRAJ4)
CVVSPSGGSNKLIF

SEQ ID NO: 39760 - protein, 15 aa, Homo sapiens
  CDR3 for beta chain variable domain of TCR clone 19880 (TRBV4-1, TRBJ1-4)
CASSDTGGTNEKLFF

SEQ ID NO: 39761 - protein, 13 aa, Homo sapiens
  CDR3 for alpha chain variable domain of TCR clone 19881 (TRAV8-3, TRAJ36)
CAVVATGANNLFF

SEQ ID NO: 39762 - protein, 15 aa, Homo sapiens
  CDR3 for beta chain variable domain of TCR clone 19881 (TRBV7-2, TRBJ1-2)
CASSPRAGWNYGYTF

SEQ ID NO: 39763 - protein, 14 aa, Homo sapiens
  CDR3 for alpha chain variable domain of TCR clone 19882 (TRAV1-2, TRAJ8)
CAVREDTGFQKLVF

SEQ ID NO: 39764 - protein, 16 aa, Homo sapiens
  CDR3 for beta chain variable domain of TCR clone 19882 (TRBV15, TRBJ1-2)
CATSRGPRTGGGGYTF

SEQ ID NO: 39765 - protein, 12 aa, Homo sapiens
  CDR3 for alpha chain variable domain of TCR clone 19883 (TRAV25, TRAJ30)
CAAPIRDDKIIF

SEQ ID NO: 39766 - protein, 15 aa, Homo sapiens
  CDR3 for beta chain variable domain of TCR clone 19883 (TRBV7-2, TRBJ2-3)
CASSFEGPPGDTQYF

SEQ ID NO: 39767 - protein, 13 aa, Homo sapiens
  CDR3 for alpha chain variable domain of TCR clone 19884 (TRAV30, TRAJ24)
CGTVTDSWGKLQF

SEQ ID NO: 39768 - protein, 14 aa, Homo sapiens
  CDR3 for beta chain variable domain of TCR clone 19884 (TRBV6-3, TRBJ2-2)
CASTYTPDTGELLF

SEQ ID NO: 39769 - protein, 16 aa, Homo sapiens
  CDR3 for alpha chain variable domain of TCR clone 19885 (TRAV21, TRAJ52)
CAVTNAGGTSYGKLTF

SEQ ID NO: 39770 - protein, 11 aa, Homo sapiens
  CDR3 for beta chain variable domain of TCR clone 19885 (TRBV2, TRBJ1-1)
CASREGTEASF

SEQ ID NO: 39771 - protein, 15 aa, Homo sapiens
  CDR3 for alpha chain variable domain of TCR clone 19886 (TRAV12-2, TRAJ43)
CAFDMRFGAGTRLTV

SEQ ID NO: 39772 - protein, 18 aa, Homo sapiens
  CDR3 for beta chain variable domain of TCR clone 19886 (TRBV20-1, TRBJ2-3)
CSAPGLAGGPGTTDTQYF

SEQ ID NO: 39773 - protein, 10 aa, Homo sapiens
  CDR3 for alpha chain variable domain of TCR clone 19887 (TRAV16, TRAJ22)
SAMYLRQLTF

SEQ ID NO: 39774 - protein, 15 aa, Homo sapiens
  CDR3 for beta chain variable domain of TCR clone 19887 (TRBV7-9, TRBJ1-6)
CASSSPGRGSSPLHF

SEQ ID NO: 39775 - protein, 14 aa, Homo sapiens
  CDR3 for alpha chain variable domain of TCR clone 19888 (TRAV17, TRAJ39)
CATDPVRACNMLTF

SEQ ID NO: 39776 - protein, 15 aa, Homo sapiens
  CDR3 for beta chain variable domain of TCR clone 19888 (TRBV13, TRBJ1-5)
CASSFGQGGVQPQHF

SEQ ID NO: 39777 - protein, 12 aa, Homo sapiens
  CDR3 for alpha chain variable domain of TCR clone 19889 (TRAV12-3, TRAJ17)
CAMTLTGNKLTF

SEQ ID NO: 39778 - protein, 16 aa, Homo sapiens
  CDR3 for beta chain variable domain of TCR clone 19889 (TRBV4-2, TRBJ1-1)
CASSQAGFGMNTEAFF

SEQ ID NO: 39779 - protein, 12 aa, Homo sapiens
  CDR3 for alpha chain variable domain of TCR clone 19890 (TRAV13-1, TRAJ54)
CAASERPGSPEA

SEQ ID NO: 39780 - protein, 16 aa, Homo sapiens
  CDR3 for beta chain variable domain of TCR clone 19890 (TRBV5-4, TRBJ2-3)
CASQQPGAGGADTQYF

SEQ ID NO: 39781 - protein, 13 aa, Homo sapiens
  CDR3 for alpha chain variable domain of TCR clone 19891 (TRAV21, TRAJ57)
CAVTQGGSEKLVF

SEQ ID NO: 39782 - protein, 16 aa, Homo sapiens
  CDR3 for beta chain variable domain of TCR clone 19891 (TRBV29-1, TRBJ2-7)
CSVEDAEDGTAYKQYF

SEQ ID NO: 39783 - protein, 12 aa, Homo sapiens
  CDR3 for alpha chain variable domain of TCR clone 19892 (TRAV2, TRAJ9)
CAVGAGGFKTIV

SEQ ID NO: 39784 - protein, 16 aa, Homo sapiens
  CDR3 for beta chain variable domain of TCR clone 19892 (TRBV13, TRBJ2-2)
CASSPRTGEHTGELFF

SEQ ID NO: 39785 - protein, 23 aa, Homo sapiens
  CDR3 for alpha chain variable domain of TCR clone 19893 (TRAV8-3, )
CAVVTTRIPDIQNPDPAVYQLID

SEQ ID NO: 39786 - protein, 14 aa, Homo sapiens
  CDR3 for beta chain variable domain of TCR clone 19893 (TRBV11-2, TRBJ2-7)
CASSPSTTSYEQYF

SEQ ID NO: 39787 - protein, 14 aa, Homo sapiens
  CDR3 for alpha chain variable domain of TCR clone 19894 (TRAV38-1, TRAJ45)
CAYYSGGGAEGLTF

SEQ ID NO: 39788 - protein, 20 aa, Homo sapiens
  CDR3 for beta chain variable domain of TCR clone 19894 (TRBV28, TRBJ2-1)
CASTPIGRSPGLAGGNEQFF

SEQ ID NO: 39789 - protein, 14 aa, Homo sapiens
  CDR3 for alpha chain variable domain of TCR clone 19895 (TRAV26-1, TRAJ39)
CVVRGSRAGNMLTF

SEQ ID NO: 39790 - protein, 15 aa, Homo sapiens
  CDR3 for beta chain variable domain of TCR clone 19895 (TRBV7-9, TRBJ1-5)
CASSQGHQPNQPQHF

SEQ ID NO: 39791 - protein, 14 aa, Homo sapiens
  CDR3 for alpha chain variable domain of TCR clone 19896 (TRAV14/DV4, TRAJ26)
CAMREGTYGQNFVF

SEQ ID NO: 39792 - protein, 17 aa, Homo sapiens
  CDR3 for beta chain variable domain of TCR clone 19896 (TRBV6-1, TRBJ1-1)
CASSPRGWGDGNTEAFF

SEQ ID NO: 39793 - protein, 16 aa, Homo sapiens
  CDR3 for alpha chain variable domain of TCR clone 19897 (TRAV8-6, TRAJ53)
CAVRENSGGSNYKLTF

SEQ ID NO: 39794 - protein, 15 aa, Homo sapiens
  CDR3 for beta chain variable domain of TCR clone 19897 (TRBV20-1, TRBJ2-7)
CSARDRVSGMDEQYF

SEQ ID NO: 39795 - protein, 12 aa, Homo sapiens
  CDR3 for alpha chain variable domain of TCR clone 19898 (TRAV25, TRAJ11)
CAGYSGYSTLTF

SEQ ID NO: 39796 - protein, 13 aa, Homo sapiens
  CDR3 for beta chain variable domain of TCR clone 19898 (TRBV7-9, TRBJ1-2)
CASSLRQNYGYTF

SEQ ID NO: 39797 - protein, 15 aa, Homo sapiens
  CDR3 for alpha chain variable domain of TCR clone 19899 (TRAV26-1, TRAJ23)
CIVRVAGYQGGKLIF

SEQ ID NO: 39798 - protein, 18 aa, Homo sapiens
  CDR3 for beta chain variable domain of TCR clone 19899 (TRBV28, TRBJ2-1)
CASSSTSGRANAYNEQFF

SEQ ID NO: 39799 - protein, 12 aa, Homo sapiens
  CDR3 for alpha chain variable domain of TCR clone 19900 (TRAV20, TRAJ56)
CDVTGANSKLTF

SEQ ID NO: 39800 - protein, 14 aa, Homo sapiens
  CDR3 for beta chain variable domain of TCR clone 19900 (TRBV20-1, TRBJ2-5)
CSALVPGYQETQYF

SEQ ID NO: 39801 - protein, 16 aa, Homo sapiens
  CDR3 for alpha chain variable domain of TCR clone 19901 (TRAV8-3, TRAJ13)
CAVGAYPSGGYQKFTF

SEQ ID NO: 39802 - protein, 15 aa, Homo sapiens
  CDR3 for beta chain variable domain of TCR clone 19901 (TRBV19, TRBJ1-5)
CASSIVWADNQPQHF

SEQ ID NO: 39803 - protein, 17 aa, Homo sapiens
  CDR3 for alpha chain variable domain of TCR clone 19902 (TRAV3, TRAJ6)
CAVRDGPRAGGSYMPTF

SEQ ID NO: 39804 - protein, 15 aa, Homo sapiens
  CDR3 for beta chain variable domain of TCR clone 19902 (TRBV5-8, TRBJ2-2)
CASSLDRGATGELFF

SEQ ID NO: 39805 - protein, 14 aa, Homo sapiens
  CDR3 for alpha chain variable domain of TCR clone 19903 (TRAV16, TRAJ37)
FALDISGNTGKLIF

SEQ ID NO: 39806 - protein, 14 aa, Homo sapiens
  CDR3 for beta chain variable domain of TCR clone 19903 (TRBV7-6, TRBJ2-7)
CASSFRQGADEQYF

SEQ ID NO: 39807 - protein, 16 aa, Homo sapiens
  CDR3 for alpha chain variable domain of TCR clone 19904 (TRAV16, TRAJ52)
CALSAAGGTSYGKLTF

SEQ ID NO: 39808 - protein, 16 aa, Homo sapiens
  CDR3 for beta chain variable domain of TCR clone 19904 (TRBV12-4, TRBJ2-7)
CASSLIGGTGTYEQYF

SEQ ID NO: 39809 - protein, 14 aa, Homo sapiens
  CDR3 for alpha chain variable domain of TCR clone 19905 (TRAV12-2, TRAJ33)
CAVKRARSNYQLIW

SEQ ID NO: 39810 - protein, 12 aa, Homo sapiens
  CDR3 for beta chain variable domain of TCR clone 19905 (TRBV24-1, TRBJ2-3)
CATSGSTDTQYF

SEQ ID NO: 39811 - protein, 15 aa, Homo sapiens
  CDR3 for alpha chain variable domain of TCR clone 19906 (TRAV2, TRAJ15)
CAVEDRGQAGTAPIF

SEQ ID NO: 39812 - protein, 13 aa, Homo sapiens
  CDR3 for beta chain variable domain of TCR clone 19906 (TRBV10-2, TRBJ2-7)
CASGASGGYEQYF

SEQ ID NO: 39813 - protein, 14 aa, Homo sapiens
  CDR3 for alpha chain variable domain of TCR clone 19907 (TRAV38-1, TRAJ29)
CAFITPSGKTPLVF

SEQ ID NO: 39814 - protein, 14 aa, Homo sapiens
  CDR3 for beta chain variable domain of TCR clone 19907 (TRBV18, TRBJ2-7)
CASSPRGGAYEQYF

SEQ ID NO: 39815 - protein, 11 aa, Homo sapiens
  CDR3 for alpha chain variable domain of TCR clone 19908 (TRAV2, TRAJ13)
CASGGYQKVTF

SEQ ID NO: 39816 - protein, 16 aa, Homo sapiens
  CDR3 for beta chain variable domain of TCR clone 19908 (TRBV6-1, TRBJ2-5)
CASSETLDRGAETQYS

SEQ ID NO: 39817 - protein, 15 aa, Homo sapiens
  CDR3 for alpha chain variable domain of TCR clone 19909 (TRAV3, TRAJ22)
CAVRDRGGSAWQLTF

SEQ ID NO: 39818 - protein, 16 aa, Homo sapiens
  CDR3 for beta chain variable domain of TCR clone 19909 (TRBV5-4, TRBJ2-3)
CASQQPGAGGADTQYF

SEQ ID NO: 39819 - protein, 15 aa, Homo sapiens
  CDR3 for alpha chain variable domain of TCR clone 19910 (TRAV12-3, TRAJ49)
CAVAVTPNTGNQFYF

SEQ ID NO: 39820 - protein, 18 aa, Homo sapiens
  CDR3 for beta chain variable domain of TCR clone 19910 (TRBV4-1, TRBJ1-5)
CASSQDPRGQGLNQPQHF

SEQ ID NO: 39821 - protein, 12 aa, Homo sapiens
  CDR3 for alpha chain variable domain of TCR clone 19911 (TRAV8-4, TRAJ37)
CAVKSNTGKLIF

SEQ ID NO: 39822 - protein, 16 aa, Homo sapiens
  CDR3 for beta chain variable domain of TCR clone 19911 (TRBV7-2, TRBJ2-3)
CASSLVGDASTDTQYF

SEQ ID NO: 39823 - protein, 12 aa, Homo sapiens
  CDR3 for alpha chain variable domain of TCR clone 19912 (TRAV12-3, TRAJ17)
CAMTLTGNKLTF

SEQ ID NO: 39824 - protein, 16 aa, Homo sapiens
  CDR3 for beta chain variable domain of TCR clone 19912 (TRBV27, TRBJ2-2)
CASSFRGLVRTGELFF

SEQ ID NO: 39825 - protein, 11 aa, Homo sapiens
  CDR3 for alpha chain variable domain of TCR clone 19913 (TRAV12-3, TRAJ43)
CAMSVSNDMRF

SEQ ID NO: 39826 - protein, 13 aa, Homo sapiens
  CDR3 for beta chain variable domain of TCR clone 19913 (TRBV20-1, TRBJ1-1)
CSAPLGGCTEAFF

SEQ ID NO: 39827 - protein, 13 aa, Homo sapiens
  CDR3 for alpha chain variable domain of TCR clone 19914 (TRAV16, TRAJ27)
CALRRTNAGKSTF

SEQ ID NO: 39828 - protein, 17 aa, Homo sapiens
  CDR3 for beta chain variable domain of TCR clone 19914 (TRBV6-3, TRBJ2-1)
CASSYISSGRVYNEQFF

SEQ ID NO: 39829 - protein, 14 aa, Homo sapiens
  CDR3 for alpha chain variable domain of TCR clone 19915 (TRAV12-2, TRAJ17)
CAVNIKAAGNKLTF

SEQ ID NO: 39830 - protein, 16 aa, Homo sapiens
  CDR3 for beta chain variable domain of TCR clone 19915 (TRBV20-1, TRBJ2-6)
CSASSQGDDGANVLTF

SEQ ID NO: 39831 - protein, 12 aa, Homo sapiens
  CDR3 for alpha chain variable domain of TCR clone 19916 (TRAV13-2, TRAJ23)
CAERHRGGKLIF

SEQ ID NO: 39832 - protein, 14 aa, Homo sapiens
  CDR3 for beta chain variable domain of TCR clone 19916 (TRBV12-5, TRBJ2-5)
CASGSRTHQETQYF

SEQ ID NO: 39833 - protein, 11 aa, Homo sapiens
  CDR3 for alpha chain variable domain of TCR clone 19917 (TRAV23/DV6, TRAJ48)
CAPRWGAKLTF

SEQ ID NO: 39834 - protein, 13 aa, Homo sapiens
  CDR3 for beta chain variable domain of TCR clone 19917 (TRBV12-4, TRBJ2-5)
CASSPGTEETQYF

SEQ ID NO: 39835 - protein, 15 aa, Homo sapiens
  CDR3 for alpha chain variable domain of TCR clone 19918 (TRAV38-1, TRAJ37)
CAFIHGSGNTGKLIF

SEQ ID NO: 39836 - protein, 12 aa, Homo sapiens
  CDR3 for beta chain variable domain of TCR clone 19918 (TRBV7-9, TRBJ2-7)
CASSVGSYEQYF

SEQ ID NO: 39837 - protein, 14 aa, Homo sapiens
  CDR3 for alpha chain variable domain of TCR clone 19919 (TRAV12-2, TRAJ45)
CAVNIGGGADGLTF

SEQ ID NO: 39838 - protein, 16 aa, Homo sapiens
  CDR3 for beta chain variable domain of TCR clone 19919 (TRBV12-4, TRBJ1-5)
CASSRPVGGSNQPQHF

SEQ ID NO: 39839 - protein, 12 aa, Homo sapiens
  CDR3 for alpha chain variable domain of TCR clone 19920 (TRAV12-3, TRAJ21)
CAMFNNFNKFYL

SEQ ID NO: 39840 - protein, 14 aa, Homo sapiens
  CDR3 for beta chain variable domain of TCR clone 19920 (TRBV28, TRBJ2-1)
CASSIQGTVGEQFF

SEQ ID NO: 39841 - protein, 15 aa, Homo sapiens
  CDR3 for alpha chain variable domain of TCR clone 19921 (TRAV26-1, TRAJ22)
CIVRVSFWFCKATDL

SEQ ID NO: 39842 - protein, 13 aa, Homo sapiens
  CDR3 for beta chain variable domain of TCR clone 19921 (TRBV7-9, TRBJ1-2)
CASSLKQNYGYIF

SEQ ID NO: 39843 - protein, 14 aa, Homo sapiens
  CDR3 for alpha chain variable domain of TCR clone 19922 (TRAV12-3, TRAJ10)
SHLPLTGGGNKLTF

SEQ ID NO: 39844 - protein, 14 aa, Homo sapiens
  CDR3 for beta chain variable domain of TCR clone 19922 (TRBV6-1, TRBJ1-3)
CASVQGGGGNTIYS

SEQ ID NO: 39845 - protein, 16 aa, Homo sapiens
  CDR3 for alpha chain variable domain of TCR clone 19923 (TRAV12-3, TRAJ53)
CAMSAGSGGSNYRLTF

SEQ ID NO: 39846 - protein, 13 aa, Homo sapiens
  CDR3 for beta chain variable domain of TCR clone 19923 (TRBV29-1, TRBJ2-3)
CSVGPRGTDTQYF

SEQ ID NO: 39847 - protein, 13 aa, Homo sapiens
  CDR3 for alpha chain variable domain of TCR clone 19924 (TRAV20, TRAJ37)
CAGCSINTGKLIF

SEQ ID NO: 39848 - protein, 11 aa, Homo sapiens
  CDR3 for beta chain variable domain of TCR clone 19924 (TRBV12-4, TRBJ2-3)
CASTATDTQYF

SEQ ID NO: 39849 - protein, 15 aa, Homo sapiens
  CDR3 for alpha chain variable domain of TCR clone 19925 (TRAV3, TRAJ3)
CAVRDRDSSASKIIF

SEQ ID NO: 39850 - protein, 18 aa, Homo sapiens
  CDR3 for beta chain variable domain of TCR clone 19925 (TRBV25-1, TRBJ1-2)
CASSGLQDGQGLIFGYTF

SEQ ID NO: 39851 - protein, 12 aa, Homo sapiens
  CDR3 for alpha chain variable domain of TCR clone 19926 (TRAV17, TRAJ39)
CATGAAGNMLTF

SEQ ID NO: 39852 - protein, 14 aa, Homo sapiens
  CDR3 for beta chain variable domain of TCR clone 19926 (TRBV7-9, TRBJ1-2)
CASGRQGANYGYTF

SEQ ID NO: 39853 - protein, 15 aa, Homo sapiens
  CDR3 for alpha chain variable domain of TCR clone 19927 (TRAV8-3, TRAJ27)
CAVGPSKTNAGKSTF

SEQ ID NO: 39854 - protein, 15 aa, Homo sapiens
  CDR3 for beta chain variable domain of TCR clone 19927 (TRBV7-2, TRBJ2-1)
RASSSGLAGGNEQFF

SEQ ID NO: 39855 - protein, 14 aa, Homo sapiens
  CDR3 for alpha chain variable domain of TCR clone 19928 (TRAV1-2, TRAJ16)
CAVSRFSDGQKLLF

SEQ ID NO: 39856 - protein, 15 aa, Homo sapiens
  CDR3 for beta chain variable domain of TCR clone 19928 (TRBV7-9, TRBJ1-6)
CASSSPGRGNSPLHF

SEQ ID NO: 39857 - protein, 13 aa, Homo sapiens
  CDR3 for alpha chain variable domain of TCR clone 19929 (TRAV13-2, TRAJ40)
CAEFTSGTYKYIF

SEQ ID NO: 39858 - protein, 14 aa, Homo sapiens
  CDR3 for beta chain variable domain of TCR clone 19929 (TRBV10-2, TRBJ1-5)
CASSSTGRNQTQHF

SEQ ID NO: 39859 - protein, 14 aa, Homo sapiens
  CDR3 for alpha chain variable domain of TCR clone 19930 (TRAV12-2, TRAJ13)
CAVKKTGGYQKVTF

SEQ ID NO: 39860 - protein, 15 aa, Homo sapiens
  CDR3 for beta chain variable domain of TCR clone 19930 (TRBV27, TRBJ2-1)
CASSNGGGSSNDQFF

SEQ ID NO: 39861 - protein, 14 aa, Homo sapiens
  CDR3 for alpha chain variable domain of TCR clone 19931 (TRAV26-1, TRAJ38)
CIADNAGNNCKLIW

SEQ ID NO: 39862 - protein, 17 aa, Homo sapiens
  CDR3 for beta chain variable domain of TCR clone 19931 (TRBV15, TRBJ1-1)
CATSRVGGADGDTEAFF

SEQ ID NO: 39863 - protein, 14 aa, Homo sapiens
  CDR3 for alpha chain variable domain of TCR clone 19932 (TRAV6, TRAJ5)
CALDAPTGRRALTF

SEQ ID NO: 39864 - protein, 15 aa, Homo sapiens
  CDR3 for beta chain variable domain of TCR clone 19932 (TRBV27, TRBJ2-7)
CASRFWGQGADEQYF

SEQ ID NO: 39865 - protein, 13 aa, Homo sapiens
  CDR3 for alpha chain variable domain of TCR clone 19933 (TRAV2, TRAJ40)
CAVVTSGTYKYIF

SEQ ID NO: 39866 - protein, 15 aa, Homo sapiens
  CDR3 for beta chain variable domain of TCR clone 19933 (TRBV11-3, TRBJ2-3)
CASLKDGREGDTQYV

SEQ ID NO: 39867 - protein, 14 aa, Homo sapiens
  CDR3 for alpha chain variable domain of TCR clone 19934 (TRAV8-3, TRAJ4)
CAVGAAGGYNKLIF

SEQ ID NO: 39868 - protein, 13 aa, Homo sapiens
  CDR3 for beta chain variable domain of TCR clone 19934 (TRBV7-9, TRBJ1-2)
CASSLKQNYGYTF

SEQ ID NO: 39869 - protein, 15 aa, Homo sapiens
  CDR3 for alpha chain variable domain of TCR clone 19935 (TRAV12-1, TRAJ44)
CVADLPTGTASKLTF

SEQ ID NO: 39870 - protein, 13 aa, Homo sapiens
  CDR3 for beta chain variable domain of TCR clone 19935 (TRBV6-5, TRBJ2-5)
CASSPQGGETRYF

SEQ ID NO: 39871 - protein, 13 aa, Homo sapiens
  CDR3 for alpha chain variable domain of TCR clone 19936 (TRAV21, TRAJ27)
CAALNTNAGKSTF

SEQ ID NO: 39872 - protein, 14 aa, Homo sapiens
  CDR3 for beta chain variable domain of TCR clone 19936 (TRBV27, TRBJ1-1)
CASSLLSGLSEALF

SEQ ID NO: 39873 - protein, 14 aa, Homo sapiens
  CDR3 for alpha chain variable domain of TCR clone 19937 (TRAV12-3, TRAJ12)
CAMSEGDSSYKLIF

SEQ ID NO: 39874 - protein, 12 aa, Homo sapiens
  CDR3 for beta chain variable domain of TCR clone 19937 (TRBV18, TRBJ1-4)
CASSPSREKLFF

SEQ ID NO: 39875 - protein, 16 aa, Homo sapiens
  CDR3 for alpha chain variable domain of TCR clone 19938 (TRAV30, TRAJ24)
CGTEIVDADSWGKFQF

SEQ ID NO: 39876 - protein, 14 aa, Homo sapiens
  CDR3 for beta chain variable domain of TCR clone 19938 (TRBV12-5, TRBJ2-5)
CASGSGTHQETQYF

SEQ ID NO: 39877 - protein, 12 aa, Homo sapiens
  CDR3 for alpha chain variable domain of TCR clone 19939 (TRAV13-1, TRAJ21)
YAAKEGFNKFYF

SEQ ID NO: 39878 - protein, 18 aa, Homo sapiens
  CDR3 for beta chain variable domain of TCR clone 19939 (TRBV20-1, TRBJ2-6)
CSAETTPTHGSGANVLTF

SEQ ID NO: 39879 - protein, 15 aa, Homo sapiens
  CDR3 for alpha chain variable domain of TCR clone 19940 (TRAV3, TRAJ5)
CAVRDWKTGRRALTF

SEQ ID NO: 39880 - protein, 15 aa, Homo sapiens
  CDR3 for beta chain variable domain of TCR clone 19940 (TRBV7-8, TRBJ2-1)
CASSLADSLYNEQFF

SEQ ID NO: 39881 - protein, 14 aa, Homo sapiens
  CDR3 for alpha chain variable domain of TCR clone 19941 (TRAV38-1, TRAJ45)
CAYYSGGGADGLTF

SEQ ID NO: 39882 - protein, 20 aa, Homo sapiens
  CDR3 for beta chain variable domain of TCR clone 19941 (TRBV28, TRBJ2-1)
CDSTPIGRSPGLAGGNEQFF

SEQ ID NO: 39883 - protein, 11 aa, Homo sapiens
  CDR3 for alpha chain variable domain of TCR clone 19942 (TRAV3, TRAJ21)
CAVGNFNKFYF

SEQ ID NO: 39884 - protein, 16 aa, Homo sapiens
  CDR3 for beta chain variable domain of TCR clone 19942 (TRBV19, TRBJ2-1)
CASSKAGPSSYNEQIF

SEQ ID NO: 39885 - protein, 12 aa, Homo sapiens
  CDR3 for alpha chain variable domain of TCR clone 19943 (TRAV12-3, TRAJ17)
CAMTLTGNKLTF

SEQ ID NO: 39886 - protein, 14 aa, Homo sapiens
  CDR3 for beta chain variable domain of TCR clone 19943 (TRBV6-6, TRBJ2-5)
CQQSRGGLEETQYF

SEQ ID NO: 39887 - protein, 11 aa, Homo sapiens
  CDR3 for alpha chain variable domain of TCR clone 19944 (TRAV1-1, TRAJ23)
CAVRQGVKLIF

SEQ ID NO: 39888 - protein, 20 aa, Homo sapiens
  CDR3 for beta chain variable domain of TCR clone 19944 (TRBV7-8, TRBJ2-2)
CASSHLFPGPTIHITGELFF

SEQ ID NO: 39889 - protein, 17 aa, Homo sapiens
  CDR3 for alpha chain variable domain of TCR clone 19945 (TRAV4, TRAJ42)
CLVGVLNYGGSKGNLIF

SEQ ID NO: 39890 - protein, 12 aa, Homo sapiens
  CDR3 for beta chain variable domain of TCR clone 19945 (TRBV20-1, TRBJ2-1)
CSAQYTYNEQFF

SEQ ID NO: 39891 - protein, 13 aa, Homo sapiens
  CDR3 for alpha chain variable domain of TCR clone 19946 (TRAV12-3, TRAJ7)
CAMTHMGTTDSLL

SEQ ID NO: 39892 - protein, 16 aa, Homo sapiens
  CDR3 for beta chain variable domain of TCR clone 19946 (TRBV20-1, TRBJ1-4)
CSARPYGGELNEKLFF

SEQ ID NO: 39893 - protein, 15 aa, Homo sapiens
  CDR3 for alpha chain variable domain of TCR clone 19947 (TRAV21, TRAJ24)
CAARSSTDSWGKLQF

SEQ ID NO: 39894 - protein, 13 aa, Homo sapiens
  CDR3 for beta chain variable domain of TCR clone 19947 (TRBV11-2, TRBJ2-5)
CASSSTGEETQYL

SEQ ID NO: 39895 - protein, 15 aa, Homo sapiens
  CDR3 for alpha chain variable domain of TCR clone 19948 (TRAV38-1, TRAJ37)
CAFIFGSGNTGKLVF

SEQ ID NO: 39896 - protein, 12 aa, Homo sapiens
  CDR3 for beta chain variable domain of TCR clone 19948 (TRBV7-9, TRBJ2-7)
CASSLEGYEQYF

SEQ ID NO: 39897 - protein, 17 aa, Homo sapiens
  CDR3 for alpha chain variable domain of TCR clone 19949 (TRAV13-1, TRAJ31)
CAPRDRLMFGDGTQLVV

SEQ ID NO: 39898 - protein, 12 aa, Homo sapiens
  CDR3 for beta chain variable domain of TCR clone 19949 (TRBV7-9, TRBJ2-7)
CASSLEGYGQYF

SEQ ID NO: 39899 - protein, 15 aa, Homo sapiens
  CDR3 for alpha chain variable domain of TCR clone 19950 (TRAV3, TRAJ5)
CAVRDRKTGRRALTF

SEQ ID NO: 39900 - protein, 15 aa, Homo sapiens
  CDR3 for beta chain variable domain of TCR clone 19950 (TRBV7-8, TRBJ2-1)
CASSLADSLYDEQFF

SEQ ID NO: 39901 - protein, 10 aa, Homo sapiens
  CDR3 for alpha chain variable domain of TCR clone 19951 (TRAV30, TRAJ48)
CGIGNEKLTF

SEQ ID NO: 39902 - protein, 13 aa, Homo sapiens
  CDR3 for beta chain variable domain of TCR clone 19951 (TRBV7-6, TRBJ2-3)
CQQRSGGTDTQYF

SEQ ID NO: 39903 - protein, 11 aa, Homo sapiens
  CDR3 for alpha chain variable domain of TCR clone 19952 (TRAV1-2, TRAJ31)
CAVNNNARLMF

SEQ ID NO: 39904 - protein, 15 aa, Homo sapiens
  CDR3 for beta chain variable domain of TCR clone 19952 (TRBV28, TRBJ2-1)
CASSIIAGGRGEQFF

SEQ ID NO: 39905 - protein, 15 aa, Homo sapiens
  CDR3 for alpha chain variable domain of TCR clone 19953 (TRAV23/DV6, TRAJ18)
CAARYRGSTLGGLYF

SEQ ID NO: 39906 - protein, 13 aa, Homo sapiens
  CDR3 for beta chain variable domain of TCR clone 19953 (TRBV7-2, TRBJ2-7)
CASSSPSGSEQYF

SEQ ID NO: 39907 - protein, 13 aa, Homo sapiens
  CDR3 for alpha chain variable domain of TCR clone 19954 (TRAV17, TRAJ9)
CATDYTGGFKTIF

SEQ ID NO: 39908 - protein, 14 aa, Homo sapiens
  CDR3 for beta chain variable domain of TCR clone 19954 (TRBV19, TRBJ2-1)
CASPTFVLSGEQFF

SEQ ID NO: 39909 - protein, 15 aa, Homo sapiens
  CDR3 for alpha chain variable domain of TCR clone 19955 (TRAV12-1, TRAJ42)
CVVTRDGGSQGNLIL

SEQ ID NO: 39910 - protein, 14 aa, Homo sapiens
  CDR3 for beta chain variable domain of TCR clone 19955 (TRBV11-2, TRBJ2-3)
CASSLGGGANTQYF

SEQ ID NO: 39911 - protein, 18 aa, Homo sapiens
  CDR3 for alpha chain variable domain of TCR clone 19956 (TRAV12-3, TRAJ52)
CAMSRTNAGGTSYGRLTF

SEQ ID NO: 39912 - protein, 17 aa, Homo sapiens
  CDR3 for beta chain variable domain of TCR clone 19956 (TRBV7-3, TRBJ2-3)
CASSLMKRMRGADTQYF

SEQ ID NO: 39913 - protein, 17 aa, Homo sapiens
  CDR3 for alpha chain variable domain of TCR clone 19957 (TRAV19, TRAJ58)
CALRGLRVGTSGSRLTF

SEQ ID NO: 39914 - protein, 15 aa, Homo sapiens
  CDR3 for beta chain variable domain of TCR clone 19957 (TRBV5-1, TRBJ2-5)
CASSFKGGDQETQYF

SEQ ID NO: 39915 - protein, 12 aa, Homo sapiens
  CDR3 for alpha chain variable domain of TCR clone 19958 (TRAV2, TRAJ34)
CAVERNTGKLIF

SEQ ID NO: 39916 - protein, 14 aa, Homo sapiens
  CDR3 for beta chain variable domain of TCR clone 19958 (TRBV7-9, TRBJ2-1)
CASSDNSGYNEQFF

SEQ ID NO: 39917 - protein, 14 aa, Homo sapiens
  CDR3 for alpha chain variable domain of TCR clone 19959 (TRAV12-2, TRAJ5)
CAVNRSTGRGALTF

SEQ ID NO: 39918 - protein, 12 aa, Homo sapiens
  CDR3 for beta chain variable domain of TCR clone 19959 (TRBV19, TRBJ1-5)
CASSIAQQPQHF

SEQ ID NO: 39919 - protein, 13 aa, Homo sapiens
  CDR3 for alpha chain variable domain of TCR clone 19960 (TRAV8-3, TRAJ28)
CAVGAVGSYQFTF

SEQ ID NO: 39920 - protein, 14 aa, Homo sapiens
  CDR3 for beta chain variable domain of TCR clone 19960 (TRBV7-2, TRBJ2-7)
CASRSQGAAYEQYF

SEQ ID NO: 39921 - protein, 14 aa, Homo sapiens
  CDR3 for alpha chain variable domain of TCR clone 19961 (TRAV27, TRAJ15)
CAGFDDQAGTALIF

SEQ ID NO: 39922 - protein, 11 aa, Homo sapiens
  CDR3 for beta chain variable domain of TCR clone 19961 (TRBV29-1, TRBJ1-1)
CSVEVGTRTFF

SEQ ID NO: 39923 - protein, 12 aa, Homo sapiens
  CDR3 for alpha chain variable domain of TCR clone 19962 (TRAV8-3, TRAJ20)
CAVGANDYKLSF

SEQ ID NO: 39924 - protein, 16 aa, Homo sapiens
  CDR3 for beta chain variable domain of TCR clone 19962 (TRBV19, TRBJ2-2)
CSSRSPGTGATGELFF

SEQ ID NO: 39925 - protein, 16 aa, Homo sapiens
  CDR3 for alpha chain variable domain of TCR clone 19963 (TRAV22, TRAJ45)
CAVEGGKRGGADGLTF

SEQ ID NO: 39926 - protein, 13 aa, Homo sapiens
  CDR3 for beta chain variable domain of TCR clone 19963 (TRBV27, TRBJ1-1)
CASSLSIGAEAFF

SEQ ID NO: 39927 - protein, 14 aa, Homo sapiens
  CDR3 for alpha chain variable domain of TCR clone 19964 (TRAV13-1, TRAJ35)
CAASKGGFGIVLHC

SEQ ID NO: 39928 - protein, 13 aa, Homo sapiens
  CDR3 for beta chain variable domain of TCR clone 19964 (TRBV7-3, TRBJ1-1)
CASSQDWGAEAFF

SEQ ID NO: 39929 - protein, 15 aa, Homo sapiens
  CDR3 for alpha chain variable domain of TCR clone 19965 (TRAV21, TRAJ24)
CAARSSTYSWGKLQF

SEQ ID NO: 39930 - protein, 13 aa, Homo sapiens
  CDR3 for beta chain variable domain of TCR clone 19965 (TRBV11-2, TRBJ2-5)
CASSSTGEETQYF

SEQ ID NO: 39931 - protein, 15 aa, Homo sapiens
  CDR3 for alpha chain variable domain of TCR clone 19966 (TRAV17, TRAJ16)
CATALRFSDGQKLLF

SEQ ID NO: 39932 - protein, 12 aa, Homo sapiens
  CDR3 for beta chain variable domain of TCR clone 19966 (TRBV2, TRBJ2-7)
CASSDPDYEQYL

SEQ ID NO: 39933 - protein, 13 aa, Homo sapiens
  CDR3 for alpha chain variable domain of TCR clone 19967 (TRAV20, TRAJ37)
CAGCSSNTGKPIF

SEQ ID NO: 39934 - protein, 11 aa, Homo sapiens
  CDR3 for beta chain variable domain of TCR clone 19967 (TRBV12-4, TRBJ2-3)
CASTATDTQYF

SEQ ID NO: 39935 - protein, 16 aa, Homo sapiens
  CDR3 for alpha chain variable domain of TCR clone 19968 (TRAV4, TRAJ22)
CLVGDLYSGSAGQLTF

SEQ ID NO: 39936 - protein, 16 aa, Homo sapiens
  CDR3 for beta chain variable domain of TCR clone 19968 (TRBV7-9, TRBJ2-1)
CASSDVAGGSYNEQFF

SEQ ID NO: 39937 - protein, 14 aa, Homo sapiens
  CDR3 for alpha chain variable domain of TCR clone 19969 (TRAV13-1, TRAJ35)
CAASKGGFGNVLHC

SEQ ID NO: 39938 - protein, 13 aa, Homo sapiens
  CDR3 for beta chain variable domain of TCR clone 19969 (TRBV20-1, TRBJ1-1)
CSARGGGNTEAFF

SEQ ID NO: 39939 - protein, 11 aa, Homo sapiens
  CDR3 for alpha chain variable domain of TCR clone 19970 (TRAV35, TRAJ30)
CAGPGGDKIIF

SEQ ID NO: 39940 - protein, 14 aa, Homo sapiens
  CDR3 for beta chain variable domain of TCR clone 19970 (TRBV7-6, TRBJ1-6)
CASSQAGGGSPLHF

SEQ ID NO: 39941 - protein, 14 aa, Homo sapiens
  CDR3 for alpha chain variable domain of TCR clone 19971 (TRAV12-1, TRAJ17)
CVVNCKAAGNKLTF

SEQ ID NO: 39942 - protein, 17 aa, Homo sapiens
  CDR3 for beta chain variable domain of TCR clone 19971 (TRBV20-1, TRBJ2-1)
CSASSSGLAGSYNEQFF

SEQ ID NO: 39943 - protein, 14 aa, Homo sapiens
  CDR3 for alpha chain variable domain of TCR clone 19972 (TRAV1-2, TRAJ16)
CAVNRFSGGQKLLF

SEQ ID NO: 39944 - protein, 16 aa, Homo sapiens
  CDR3 for beta chain variable domain of TCR clone 19972 (TRBV20-1, TRBJ1-4)
CSAPGQGLLTNEKLFF

SEQ ID NO: 39945 - protein, 11 aa, Homo sapiens
  CDR3 for alpha chain variable domain of TCR clone 19973 (TRAV12-3, TRAJ27)
CAIANAGKSTF

SEQ ID NO: 39946 - protein, 13 aa, Homo sapiens
  CDR3 for beta chain variable domain of TCR clone 19973 (TRBV20-1, TRBJ1-1)
CSARVGGNTEAFF

SEQ ID NO: 39947 - protein, 14 aa, Homo sapiens
  CDR3 for alpha chain variable domain of TCR clone 19974 (TRAV12-2, TRAJ13)
CAVKKTGGYQKVTF

SEQ ID NO: 39948 - protein, 16 aa, Homo sapiens
  CDR3 for beta chain variable domain of TCR clone 19974 (TRBV5-1, TRBJ1-1)
CASSSGGNSLNTEAFF

SEQ ID NO: 39949 - protein, 14 aa, Homo sapiens
  CDR3 for alpha chain variable domain of TCR clone 19975 (TRAV8-2, TRAJ4)
WVVSPSGGYNKLIF

SEQ ID NO: 39950 - protein, 15 aa, Homo sapiens
  CDR3 for beta chain variable domain of TCR clone 19975 (TRBV4-1, TRBJ1-4)
CASSDTGGTNEKLFF

SEQ ID NO: 39951 - protein, 15 aa, Homo sapiens
  CDR3 for alpha chain variable domain of TCR clone 19976 (TRAV3, TRAJ5)
CAVRDLDTGRRALTF

SEQ ID NO: 39952 - protein, 17 aa, Homo sapiens
  CDR3 for beta chain variable domain of TCR clone 19976 (TRBV13, TRBJ2-3)
CASSLSRVAGGRNTQYF

SEQ ID NO: 39953 - protein, 16 aa, Homo sapiens
  CDR3 for alpha chain variable domain of TCR clone 19977 (TRAV3, TRAJ37)
CAVRGKGSGNKGKLIF

SEQ ID NO: 39954 - protein, 13 aa, Homo sapiens
  CDR3 for beta chain variable domain of TCR clone 19977 (TRBV14, TRBJ2-7)
CASSQDRRYEQYF

SEQ ID NO: 39955 - protein, 17 aa, Homo sapiens
  CDR3 for alpha chain variable domain of TCR clone 19978 (TRAV3, TRAJ42)
CAVRDRDYGGRQGNLIF

SEQ ID NO: 39956 - protein, 15 aa, Homo sapiens
  CDR3 for beta chain variable domain of TCR clone 19978 (TRBV6-6, TRBJ2-7)
CASSYSYGGSYEQYF

SEQ ID NO: 39957 - protein, 13 aa, Homo sapiens
  CDR3 for alpha chain variable domain of TCR clone 19979 (TRAV21, TRAJ27)
CAARPGNAGKSTF

SEQ ID NO: 39958 - protein, 14 aa, Homo sapiens
  CDR3 for beta chain variable domain of TCR clone 19979 (TRBV4-2, TRBJ2-1)
CASGLDRAYNEQFF

SEQ ID NO: 39959 - protein, 14 aa, Homo sapiens
  CDR3 for alpha chain variable domain of TCR clone 19980 (TRAV35, TRAJ22)
CAGLRPGSARQLTF

SEQ ID NO: 39960 - protein, 19 aa, Homo sapiens
  CDR3 for beta chain variable domain of TCR clone 19980 (TRBV4-1, TRBJ2-7)
CASSPVAGGGRAVLRAGHQ

SEQ ID NO: 39961 - protein, 17 aa, Homo sapiens
  CDR3 for alpha chain variable domain of TCR clone 19981 (TRAV3, TRAJ42)
CAVRDRDYGGSRGNLIF

SEQ ID NO: 39962 - protein, 15 aa, Homo sapiens
  CDR3 for beta chain variable domain of TCR clone 19981 (TRBV6-6, TRBJ2-7)
CASSYSYGGSYEQYF

SEQ ID NO: 39963 - protein, 13 aa, Homo sapiens
  CDR3 for alpha chain variable domain of TCR clone 19982 (TRAV12-1, TRAJ21)
CVVVGDNFNKFYF

SEQ ID NO: 39964 - protein, 14 aa, Homo sapiens
  CDR3 for beta chain variable domain of TCR clone 19982 (TRBV7-3, TRBJ2-2)
CASSLYPLTGELFF

SEQ ID NO: 39965 - protein, 14 aa, Homo sapiens
  CDR3 for alpha chain variable domain of TCR clone 19983 (TRAV35, TRAJ33)
CAGSSQASNYQLIW

SEQ ID NO: 39966 - protein, 15 aa, Homo sapiens
  CDR3 for beta chain variable domain of TCR clone 19983 (TRBV20-1, TRBJ2-7)
CSAESGTSGAYEQYF

SEQ ID NO: 39967 - protein, 18 aa, Homo sapiens
  CDR3 for alpha chain variable domain of TCR clone 19984 (TRAV29/DV5, TRAJ52)
CAAGFRGAGGTSYGKLAF

SEQ ID NO: 39968 - protein, 16 aa, Homo sapiens
  CDR3 for beta chain variable domain of TCR clone 19984 (TRBV7-3, TRBJ2-2)
CASSLKRGTLSGELFF

SEQ ID NO: 39969 - protein, 14 aa, Homo sapiens
  CDR3 for alpha chain variable domain of TCR clone 19985 (TRAV9-2, TRAJ39)
CALYIYNAGNMLTF

SEQ ID NO: 39970 - protein, 14 aa, Homo sapiens
  CDR3 for beta chain variable domain of TCR clone 19985 (TRBV7-3, TRBJ2-1)
CASSLAGGTNEQFF

SEQ ID NO: 39971 - protein, 11 aa, Homo sapiens
  CDR3 for alpha chain variable domain of TCR clone 19986 (TRAV12-3, TRAJ43)
CAMNVSNDMRF

SEQ ID NO: 39972 - protein, 13 aa, Homo sapiens
  CDR3 for beta chain variable domain of TCR clone 19986 (TRBV20-1, TRBJ1-1)
CSAPLGGGTEAFF

SEQ ID NO: 39973 - protein, 14 aa, Homo sapiens
  CDR3 for alpha chain variable domain of TCR clone 19987 (TRAV8-6, TRAJ52)
CAVIGGTSYGKLTF

SEQ ID NO: 39974 - protein, 13 aa, Homo sapiens
  CDR3 for beta chain variable domain of TCR clone 19987 (TRBV4-1, TRBJ1-1)
CASSRKMNTEAFF

SEQ ID NO: 39975 - protein, 13 aa, Homo sapiens
  CDR3 for alpha chain variable domain of TCR clone 19988 (TRAV2, TRAJ15)
CAVASQAGTALTF

SEQ ID NO: 39976 - protein, 16 aa, Homo sapiens
  CDR3 for beta chain variable domain of TCR clone 19988 (TRBV5-1, TRBJ1-1)
CASSSGGNSLNTEAFF

SEQ ID NO: 39977 - protein, 16 aa, Homo sapiens
  CDR3 for alpha chain variable domain of TCR clone 19989 (TRAV16, TRAJ52)
CALSAAGGTSYGKLTF

SEQ ID NO: 39978 - protein, 12 aa, Homo sapiens
  CDR3 for beta chain variable domain of TCR clone 19989 (TRBV12-4, TRBJ1-3)
CASSSSGNTIYF

SEQ ID NO: 39979 - protein, 13 aa, Homo sapiens
  CDR3 for alpha chain variable domain of TCR clone 19990 (TRAV27, TRAJ49)
CAPRPYTGNQFYF

SEQ ID NO: 39980 - protein, 16 aa, Homo sapiens
  CDR3 for beta chain variable domain of TCR clone 19990 (TRBV4-1, TRBJ1-2)
CASSQDAGQILYGYTF

SEQ ID NO: 39981 - protein, 12 aa, Homo sapiens
  CDR3 for alpha chain variable domain of TCR clone 19991 (TRAV27, TRAJ35)
CAGADFGNVLHC

SEQ ID NO: 39982 - protein, 16 aa, Homo sapiens
  CDR3 for beta chain variable domain of TCR clone 19991 (TRBV6-1, TRBJ2-1)
CASILRQGSSYNEQFL

SEQ ID NO: 39983 - protein, 15 aa, Homo sapiens
  CDR3 for alpha chain variable domain of TCR clone 19992 (TRAV26-1, TRAJ44)
CTVRANTGTASKLTF

SEQ ID NO: 39984 - protein, 16 aa, Homo sapiens
  CDR3 for beta chain variable domain of TCR clone 19992 (TRBV7-7, TRBJ2-1)
CASSLASGTSYNEQFF

SEQ ID NO: 39985 - protein, 16 aa, Homo sapiens
  CDR3 for alpha chain variable domain of TCR clone 19993 (TRAV21, TRAJ37)
CAVRTAGSSNTGKQIF

SEQ ID NO: 39986 - protein, 13 aa, Homo sapiens
  CDR3 for beta chain variable domain of TCR clone 19993 (TRBV7-9, TRBJ2-5)
CASLPSGRETQYF

SEQ ID NO: 39987 - protein, 13 aa, Homo sapiens
  CDR3 for alpha chain variable domain of TCR clone 19994 (TRAV21, TRAJ27)
CAARPGNAGKSTF

SEQ ID NO: 39988 - protein, 14 aa, Homo sapiens
  CDR3 for beta chain variable domain of TCR clone 19994 (TRBV7-2, TRBJ2-7)
CASRSQGAAYEQYF

SEQ ID NO: 39989 - protein, 14 aa, Homo sapiens
  CDR3 for alpha chain variable domain of TCR clone 19995 (TRAV12-1, TRAJ30)
CVVNIGGRDDKSIF

SEQ ID NO: 39990 - protein, 13 aa, Homo sapiens
  CDR3 for beta chain variable domain of TCR clone 19995 (TRBV12-5, TRBJ2-1)
CASGLGRGNEQFF

SEQ ID NO: 39991 - protein, 10 aa, Homo sapiens
  CDR3 for alpha chain variable domain of TCR clone 19996 (TRAV12-3, TRAJ49)
CAMNDDQFYF

SEQ ID NO: 39992 - protein, 17 aa, Homo sapiens
  CDR3 for beta chain variable domain of TCR clone 19996 (TRBV13, TRBJ2-3)
CASSLSRVAGGRNTQYF

SEQ ID NO: 39993 - protein, 14 aa, Homo sapiens
  CDR3 for alpha chain variable domain of TCR clone 19997 (TRAV17, TRAJ11)
CATDARSGYSTLTF

SEQ ID NO: 39994 - protein, 16 aa, Homo sapiens
  CDR3 for beta chain variable domain of TCR clone 19997 (TRBV14, TRBJ1-5)
CASSLSRVHSNQPQHF

SEQ ID NO: 39995 - protein, 14 aa, Homo sapiens
  CDR3 for alpha chain variable domain of TCR clone 19998 (TRAV16, TRAJ33)
CALSAMDSNYQLIW

SEQ ID NO: 39996 - protein, 14 aa, Homo sapiens
  CDR3 for beta chain variable domain of TCR clone 19998 (TRBV19, TRBJ2-1)
CASPTFVLSGEQFF

SEQ ID NO: 39997 - protein, 13 aa, Homo sapiens
  CDR3 for alpha chain variable domain of TCR clone 19999 (TRAV12-3, TRAJ7)
CAMSASGNNRLAF

SEQ ID NO: 39998 - protein, 14 aa, Homo sapiens
  CDR3 for beta chain variable domain of TCR clone 19999 (TRBV13, TRBJ2-5)
CASSVGPRGETQYF

SEQ ID NO: 39999 - protein, 13 aa, Homo sapiens
  CDR3 for alpha chain variable domain of TCR clone 20000 (TRAV13-2, TRAJ5)
CAVMDTGRRALTF

SEQ ID NO: 40000 - protein, 15 aa, Homo sapiens
  CDR3 for beta chain variable domain of TCR clone 20000 (TRBV9, TRBJ1-6)
CASSVAGTGDSPLHF

SEQ ID NO: 40001 - protein, 21 aa, Homo sapiens
  CDR3 for alpha chain variable domain of TCR clone 20001 (TRAV8-3, TRAJ32)
CAVEVVLQTSSSLELALCLLS

SEQ ID NO: 40002 - protein, 12 aa, Homo sapiens
  CDR3 for beta chain variable domain of TCR clone 20001 (TRBV7-8, TRBJ2-7)
CASSLGDREQYF

SEQ ID NO: 40003 - protein, 13 aa, Homo sapiens
  CDR3 for alpha chain variable domain of TCR clone 20002 (TRAV8-3, TRAJ36)
CAVGATRANNLFF

SEQ ID NO: 40004 - protein, 15 aa, Homo sapiens
  CDR3 for beta chain variable domain of TCR clone 20002 (TRBV7-2, TRBJ1-2)
CASSPRAGWNYGYTF

SEQ ID NO: 40005 - protein, 15 aa, Homo sapiens
  CDR3 for alpha chain variable domain of TCR clone 20003 (TRAV3, TRAJ13)
CAVRVYSGGYQKVTF

SEQ ID NO: 40006 - protein, 15 aa, Homo sapiens
  CDR3 for beta chain variable domain of TCR clone 20003 (TRBV5-7, TRBJ1-2)
CASSLGVAANYGYTL

SEQ ID NO: 40007 - protein, 14 aa, Homo sapiens
  CDR3 for alpha chain variable domain of TCR clone 20004 (TRAV1-1, TRAJ27)
CAVIYNTNAGKSTF

SEQ ID NO: 40008 - protein, 18 aa, Homo sapiens
  CDR3 for beta chain variable domain of TCR clone 20004 (TRBV7-3, TRBJ2-1)
CASSLTLASGRATVSSSS

SEQ ID NO: 40009 - protein, 11 aa, Homo sapiens
  CDR3 for alpha chain variable domain of TCR clone 20005 (TRAV1-1, TRAJ23)
CAVRQGGKFIF

SEQ ID NO: 40010 - protein, 20 aa, Homo sapiens
  CDR3 for beta chain variable domain of TCR clone 20005 (TRBV7-8, TRBJ2-2)
CASSHLFPGPTIHITGELFF

SEQ ID NO: 40011 - protein, 16 aa, Homo sapiens
  CDR3 for alpha chain variable domain of TCR clone 20006 (TRAV26-1, TRAJ37)
CIVRGDGSGNKGKLIF

SEQ ID NO: 40012 - protein, 17 aa, Homo sapiens
  CDR3 for beta chain variable domain of TCR clone 20006 (TRBV4-1, TRBJ2-7)
CASSRDPLGVRGGEQYF

SEQ ID NO: 40013 - protein, 16 aa, Homo sapiens
  CDR3 for alpha chain variable domain of TCR clone 20007 (TRAV14/DV4, TRAJ53)
CAMREGGGGSNYKLTF

SEQ ID NO: 40014 - protein, 13 aa, Homo sapiens
  CDR3 for beta chain variable domain of TCR clone 20007 (TRBV7-3, TRBJ1-1)
CASSQDWGAEAFF

SEQ ID NO: 40015 - protein, 14 aa, Homo sapiens
  CDR3 for alpha chain variable domain of TCR clone 20008 (TRAV16, TRAJ39)
CALSKNNAGNMLTF

SEQ ID NO: 40016 - protein, 15 aa, Homo sapiens
  CDR3 for beta chain variable domain of TCR clone 20008 (TRBV19, TRBJ1-6)
CASSTQGAVGSPLHF

SEQ ID NO: 40017 - protein, 12 aa, Homo sapiens
  CDR3 for alpha chain variable domain of TCR clone 20009 (TRAV13-2, TRAJ23)
CAERHRGGKLIF

SEQ ID NO: 40018 - protein, 16 aa, Homo sapiens
  CDR3 for beta chain variable domain of TCR clone 20009 (TRBV20-1, TRBJ1-4)
CSAPGQGLSTNEKLFF

SEQ ID NO: 40019 - protein, 13 aa, Homo sapiens
  CDR3 for alpha chain variable domain of TCR clone 20010 (TRAV12-2, TRAJ20)
CAVYPSNDYKLSF

SEQ ID NO: 40020 - protein, 15 aa, Homo sapiens
  CDR3 for beta chain variable domain of TCR clone 20010 (TRBV6-3, TRBJ2-7)
CASSSPGTVFYEQYF

SEQ ID NO: 40021 - protein, 15 aa, Homo sapiens
  CDR3 for alpha chain variable domain of TCR clone 20011 (TRAV12-1, TRAJ47)
CVVTNRLKGGNKLVF

SEQ ID NO: 40022 - protein, 19 aa, Homo sapiens
  CDR3 for beta chain variable domain of TCR clone 20011 (TRBV20-1, TRBJ2-5)
CSARPQGLAGTSKSGAQYF

SEQ ID NO: 40023 - protein, 11 aa, Homo sapiens
  CDR3 for alpha chain variable domain of TCR clone 20012 (TRAV1-2, TRAJ20)
CAVANDYKLSF

SEQ ID NO: 40024 - protein, 18 aa, Homo sapiens
  CDR3 for beta chain variable domain of TCR clone 20012 (TRBV20-1, TRBJ2-6)
CSAETTPTHGSRANVLTF

SEQ ID NO: 40025 - protein, 20 aa, Homo sapiens
  CDR3 for alpha chain variable domain of TCR clone 20013 (TRAV12-1, TRAJ42)
SSVIQPPTSVKGGSQGNLIF

SEQ ID NO: 40026 - protein, 18 aa, Homo sapiens
  CDR3 for beta chain variable domain of TCR clone 20013 (TRBV11-2, TRBJ2-3)
CASSLRGASRGAPNTQYF

SEQ ID NO: 40027 - protein, 14 aa, Homo sapiens
  CDR3 for alpha chain variable domain of TCR clone 20014 (TRAV26-1, TRAJ45)
CIEVTGGGADGRTF

SEQ ID NO: 40028 - protein, 13 aa, Homo sapiens
  CDR3 for beta chain variable domain of TCR clone 20014 (TRBV7-6, TRBJ1-2)
CASSLVADYGYTF

SEQ ID NO: 40029 - protein, 13 aa, Homo sapiens
  CDR3 for alpha chain variable domain of TCR clone 20015 (TRAV38-1, TRAJ42)
CARWGGSQGNLIF

SEQ ID NO: 40030 - protein, 17 aa, Homo sapiens
  CDR3 for beta chain variable domain of TCR clone 20015 (TRBV20-1, TRBJ2-1)
CSAGDPLAGVWDNEQFF

SEQ ID NO: 40031 - protein, 13 aa, Homo sapiens
  CDR3 for alpha chain variable domain of TCR clone 20016 (TRAV2, TRAJ40)
CTVVTSGTYKYIF

SEQ ID NO: 40032 - protein, 15 aa, Homo sapiens
  CDR3 for beta chain variable domain of TCR clone 20016 (TRBV11-3, TRBJ2-3)
CASLKDGREGDTQYF

SEQ ID NO: 40033 - protein, 14 aa, Homo sapiens
  CDR3 for alpha chain variable domain of TCR clone 20017 (TRAV2, TRAJ9)
CAVEDRSGGFKTIF

SEQ ID NO: 40034 - protein, 15 aa, Homo sapiens
  CDR3 for beta chain variable domain of TCR clone 20017 (TRBV6-1, TRBJ2-3)
CASSERGGITDTQYF

SEQ ID NO: 40035 - protein, 23 aa, Homo sapiens
  CDR3 for alpha chain variable domain of TCR clone 20018 (TRAV26-1, TRAJ38)
CIADNAGNNHIQNSDPAVYQLRD

SEQ ID NO: 40036 - protein, 13 aa, Homo sapiens
  CDR3 for beta chain variable domain of TCR clone 20018 (TRBV20-1, TRBJ1-1)
CSARGGGNTEAFF

SEQ ID NO: 40037 - protein, 13 aa, Homo sapiens
  CDR3 for alpha chain variable domain of TCR clone 20019 (TRAV1-2, TRAJ9)
CAALNTGGFKTIF

SEQ ID NO: 40038 - protein, 13 aa, Homo sapiens
  CDR3 for beta chain variable domain of TCR clone 20019 (TRBV19, TRBJ1-2)
CASSVPGQDGYNF

SEQ ID NO: 40039 - protein, 15 aa, Homo sapiens
  CDR3 for alpha chain variable domain of TCR clone 20020 (TRAV3, TRAJ20)
CAVRDIKLSDYKLSF

SEQ ID NO: 40040 - protein, 15 aa, Homo sapiens
  CDR3 for beta chain variable domain of TCR clone 20020 (TRBV7-9, TRBJ1-6)
CASSSPGRGNSPLRF

SEQ ID NO: 40041 - protein, 13 aa, Homo sapiens
  CDR3 for alpha chain variable domain of TCR clone 20021 (TRAV26-1, TRAJ33)
CIVRVEGNYQLIW

SEQ ID NO: 40042 - protein, 16 aa, Homo sapiens
  CDR3 for beta chain variable domain of TCR clone 20021 (TRBV15, TRBJ2-7)
CATSRDRGRRRGERYF

SEQ ID NO: 40043 - protein, 12 aa, Homo sapiens
  CDR3 for alpha chain variable domain of TCR clone 20022 (TRAV3, TRAJ43)
CAVRDPNNDIRF

SEQ ID NO: 40044 - protein, 17 aa, Homo sapiens
  CDR3 for beta chain variable domain of TCR clone 20022 (TRBV7-8, TRBJ2-6)
CASSAGTGGAGANVLTF

SEQ ID NO: 40045 - protein, 13 aa, Homo sapiens
  CDR3 for alpha chain variable domain of TCR clone 20023 (TRAV35, TRAJ36)
CAGPRIGANNLFF

SEQ ID NO: 40046 - protein, 15 aa, Homo sapiens
  CDR3 for beta chain variable domain of TCR clone 20023 (TRBV28, TRBJ2-5)
CASGPPWSYQETQYF

SEQ ID NO: 40047 - protein, 13 aa, Homo sapiens
  CDR3 for alpha chain variable domain of TCR clone 20024 (TRAV30, TRAJ6)
CGFIEGGSYVPTF

SEQ ID NO: 40048 - protein, 13 aa, Homo sapiens
  CDR3 for beta chain variable domain of TCR clone 20024 (TRBV5-4, TRBJ2-5)
CASSPVSQETQYF

SEQ ID NO: 40049 - protein, 18 aa, Homo sapiens
  CDR3 for alpha chain variable domain of TCR clone 20025 (TRAV13-1, TRAJ52)
CAARNPNAGGTSYGKLTF

SEQ ID NO: 40050 - protein, 15 aa, Homo sapiens
  CDR3 for beta chain variable domain of TCR clone 20025 (TRBV6-1, TRBJ2-3)
CASSERGGITDTQYF

SEQ ID NO: 40051 - protein, 17 aa, Homo sapiens
  CDR3 for alpha chain variable domain of TCR clone 20026 (TRAV3, TRAJ42)
CAVRDRDYGGSPGNLIF

SEQ ID NO: 40052 - protein, 15 aa, Homo sapiens
  CDR3 for beta chain variable domain of TCR clone 20026 (TRBV6-6, TRBJ2-7)
CASSYSYGGSYEQYF

SEQ ID NO: 40053 - protein, 22 aa, Homo sapiens
  CDR3 for alpha chain variable domain of TCR clone 20027 (TRAV12-2, TRAJ32)
CSSETPSPVVQPPKSATNKLIF

SEQ ID NO: 40054 - protein, 14 aa, Homo sapiens
  CDR3 for beta chain variable domain of TCR clone 20027 (TRBV7-3, TRBJ2-1)
CASSLSGSYNEQFF

SEQ ID NO: 40055 - protein, 14 aa, Homo sapiens
  CDR3 for alpha chain variable domain of TCR clone 20028 (TRAV23/DV6, TRAJ4)
CAAPSSGGYNKLIF

SEQ ID NO: 40056 - protein, 16 aa, Homo sapiens
  CDR3 for beta chain variable domain of TCR clone 20028 (TRBV19, TRBJ1-1)
CASRFGGPVTGTEALF

SEQ ID NO: 40057 - protein, 14 aa, Homo sapiens
  CDR3 for alpha chain variable domain of TCR clone 20029 (TRAV12-2, TRAJ40)
CAVKIPSGTYKYIF

SEQ ID NO: 40058 - protein, 14 aa, Homo sapiens
  CDR3 for beta chain variable domain of TCR clone 20029 (TRBV20-1, TRBJ1-1)
CSAQTRIGGTDAFF

SEQ ID NO: 40059 - protein, 11 aa, Homo sapiens
  CDR3 for alpha chain variable domain of TCR clone 20030 (TRAV13-1, TRAJ31)
CAPRDRLMFGD

SEQ ID NO: 40060 - protein, 12 aa, Homo sapiens
  CDR3 for beta chain variable domain of TCR clone 20030 (TRBV7-9, TRBJ2-7)
CASSLEGYEQYF

SEQ ID NO: 40061 - protein, 18 aa, Homo sapiens
  CDR3 for alpha chain variable domain of TCR clone 20031 (TRAV21, TRAJ52)
CAVRPSPAGGTSYGKLTF

SEQ ID NO: 40062 - protein, 15 aa, Homo sapiens
  CDR3 for beta chain variable domain of TCR clone 20031 (TRBV7-9, TRBJ1-5)
CASSQGHQPNQPQHF

SEQ ID NO: 40063 - protein, 16 aa, Homo sapiens
  CDR3 for alpha chain variable domain of TCR clone 20032 (TRAV3, TRAJ21)
CAVRDIERGNINKFYF

SEQ ID NO: 40064 - protein, 13 aa, Homo sapiens
  CDR3 for beta chain variable domain of TCR clone 20032 (TRBV27, TRBJ2-7)
CASSLTTGYEQYF

SEQ ID NO: 40065 - protein, 15 aa, Homo sapiens
  CDR3 for alpha chain variable domain of TCR clone 20033 (TRAV3, TRAJ22)
CAVRDRGGSARQLTF

SEQ ID NO: 40066 - protein, 15 aa, Homo sapiens
  CDR3 for beta chain variable domain of TCR clone 20033 (TRBV6-3, TRBJ2-7)
CASSSPGTVFYEQYF

SEQ ID NO: 40067 - protein, 14 aa, Homo sapiens
  CDR3 for alpha chain variable domain of TCR clone 20034 (TRAV2, TRAJ37)
CAVVFTSNTGKLIF

SEQ ID NO: 40068 - protein, 15 aa, Homo sapiens
  CDR3 for beta chain variable domain of TCR clone 20034 (TRBV20-1, TRBJ1-1)
CSASRGVTGNTEAFF

SEQ ID NO: 40069 - protein, 15 aa, Homo sapiens
  CDR3 for alpha chain variable domain of TCR clone 20035 (TRAV26-1, TRAJ29)
CIVRVEGSGNTPLVF

SEQ ID NO: 40070 - protein, 15 aa, Homo sapiens
  CDR3 for beta chain variable domain of TCR clone 20035 (TRBV7-9, TRBJ1-5)
CASSQGHQPNQPKHF

SEQ ID NO: 40071 - protein, 16 aa, Homo sapiens
  CDR3 for alpha chain variable domain of TCR clone 20036 (TRAV12-2, TRAJ48)
CAVSPTSNFGNEKLTF

SEQ ID NO: 40072 - protein, 12 aa, Homo sapiens
  CDR3 for beta chain variable domain of TCR clone 20036 (TRBV9, TRBJ2-3)
CASSLRAGTQYF

SEQ ID NO: 40073 - protein, 12 aa, Homo sapiens
  CDR3 for alpha chain variable domain of TCR clone 20037 (TRAV36/DV7, TRAJ54)
CAVVRGAQKLVF

SEQ ID NO: 40074 - protein, 14 aa, Homo sapiens
  CDR3 for beta chain variable domain of TCR clone 20037 (TRBV7-3, TRBJ1-1)
CAGSLKGGNTEAFF

SEQ ID NO: 40075 - protein, 13 aa, Homo sapiens
  CDR3 for alpha chain variable domain of TCR clone 20038 (TRAV13-2, TRAJ48)
CAEMDFGYEKLTF

SEQ ID NO: 40076 - protein, 15 aa, Homo sapiens
  CDR3 for beta chain variable domain of TCR clone 20038 (TRBV7-9, TRBJ1-6)
CASSSPGRGNSPLHF

SEQ ID NO: 40077 - protein, 15 aa, Homo sapiens
  CDR3 for alpha chain variable domain of TCR clone 20039 (TRAV21, TRAJ53)
CATLNSGGSNYKLKF

SEQ ID NO: 40078 - protein, 16 aa, Homo sapiens
  CDR3 for beta chain variable domain of TCR clone 20039 (TRBV9, TRBJ2-1)
CASSVGGGGNYNEQFF

SEQ ID NO: 40079 - protein, 12 aa, Homo sapiens
  CDR3 for alpha chain variable domain of TCR clone 20040 (TRAV20, TRAJ39)
CAVGNAGNMLTF

SEQ ID NO: 40080 - protein, 16 aa, Homo sapiens
  CDR3 for beta chain variable domain of TCR clone 20040 (TRBV15, TRBJ1-2)
CATSRGPRTGGGGYAF

SEQ ID NO: 40081 - protein, 13 aa, Homo sapiens
  CDR3 for alpha chain variable domain of TCR clone 20041 (TRAV2, TRAJ24)
CAVTTDSWGKLQL

SEQ ID NO: 40082 - protein, 14 aa, Homo sapiens
  CDR3 for beta chain variable domain of TCR clone 20041 (TRBV13, TRBJ2-5)
CASSLGRGQETQYF

SEQ ID NO: 40083 - protein, 11 aa, Homo sapiens
  CDR3 for alpha chain variable domain of TCR clone 20042 (TRAV2, TRAJ33)
YAVESNYQLIW

SEQ ID NO: 40084 - protein, 15 aa, Homo sapiens
  CDR3 for beta chain variable domain of TCR clone 20042 (TRBV19, TRBJ1-1)
CASTSGQIQNTEAFF

SEQ ID NO: 40085 - protein, 14 aa, Homo sapiens
  CDR3 for alpha chain variable domain of TCR clone 20043 (TRAV8-3, TRAJ9)
CAVVYNNGGFKTIF

SEQ ID NO: 40086 - protein, 14 aa, Homo sapiens
  CDR3 for beta chain variable domain of TCR clone 20043 (TRBV7-3, TRBJ2-2)
CASSSGGYTGELFF

SEQ ID NO: 40087 - protein, 20 aa, Homo sapiens
  CDR3 for alpha chain variable domain of TCR clone 20044 (TRAV1-1, TRAJ39)
CLLLPRCESSAYNAGNMLTF

SEQ ID NO: 40088 - protein, 13 aa, Homo sapiens
  CDR3 for beta chain variable domain of TCR clone 20044 (TRBV12-4, TRBJ1-5)
CASSPDRAQPQHF

SEQ ID NO: 40089 - protein, 17 aa, Homo sapiens
  CDR3 for alpha chain variable domain of TCR clone 20045 (TRAV3, TRAJ42)
CAVRDRDYGGSQGSLIF

SEQ ID NO: 40090 - protein, 15 aa, Homo sapiens
  CDR3 for beta chain variable domain of TCR clone 20045 (TRBV6-6, TRBJ2-7)
CASSYSYGGSYEQYF

SEQ ID NO: 40091 - protein, 15 aa, Homo sapiens
  CDR3 for alpha chain variable domain of TCR clone 20046 (TRAV26-1, TRAJ29)
CIDRVEGSGNTPLVF

SEQ ID NO: 40092 - protein, 15 aa, Homo sapiens
  CDR3 for beta chain variable domain of TCR clone 20046 (TRBV7-9, TRBJ1-5)
CASSQGHQPNQPQHF

SEQ ID NO: 40093 - protein, 15 aa, Homo sapiens
  CDR3 for alpha chain variable domain of TCR clone 20047 (TRAV8-3, TRAJ27)
CAVGPSKTNAGKSTF

SEQ ID NO: 40094 - protein, 15 aa, Homo sapiens
  CDR3 for beta chain variable domain of TCR clone 20047 (TRBV7-2, TRBJ2-1)
CASSSGRAGGNEQFF

SEQ ID NO: 40095 - protein, 14 aa, Homo sapiens
  CDR3 for alpha chain variable domain of TCR clone 20048 (TRAV26-1, TRAJ38)
CIADNTGNNRKLIW

SEQ ID NO: 40096 - protein, 13 aa, Homo sapiens
  CDR3 for beta chain variable domain of TCR clone 20048 (TRBV20-1, TRBJ1-1)
CSARGGGNTEAFF

SEQ ID NO: 40097 - protein, 14 aa, Homo sapiens
  CDR3 for alpha chain variable domain of TCR clone 20049 (TRAV8-3, TRAJ9)
CAVVYDTGGFKTIF

SEQ ID NO: 40098 - protein, 14 aa, Homo sapiens
  CDR3 for beta chain variable domain of TCR clone 20049 (TRBV7-3, TRBJ2-2)
CASSSGGYTGELFF

SEQ ID NO: 40099 - protein, 14 aa, Homo sapiens
  CDR3 for alpha chain variable domain of TCR clone 20050 (TRAV12-2, TRAJ17)
CAVLFKAAGNKLTF

SEQ ID NO: 40100 - protein, 17 aa, Homo sapiens
  CDR3 for beta chain variable domain of TCR clone 20050 (TRBV7-3, TRBJ2-3)
CASSPRGQGYGTDTQYF

SEQ ID NO: 40101 - protein, 15 aa, Homo sapiens
  CDR3 for alpha chain variable domain of TCR clone 20051 (TRAV25, TRAJ52)
CAGRPGGASYGKLTF

SEQ ID NO: 40102 - protein, 17 aa, Homo sapiens
  CDR3 for beta chain variable domain of TCR clone 20051 (TRBV7-8, TRBJ2-6)
CASSAGTGGAGANVLTF

SEQ ID NO: 40103 - protein, 18 aa, Homo sapiens
  CDR3 for alpha chain variable domain of TCR clone 20052 (TRAV21, TRAJ52)
CAVRPSPAGGTSYGKLTF

SEQ ID NO: 40104 - protein, 16 aa, Homo sapiens
  CDR3 for beta chain variable domain of TCR clone 20052 (TRBV10-3, TRBJ2-7)
CAISADFADRPYEQYF

SEQ ID NO: 40105 - protein, 17 aa, Homo sapiens
  CDR3 for alpha chain variable domain of TCR clone 20053 (TRAV3, TRAJ6)
CAVRDGPRAGGSYIPTF

SEQ ID NO: 40106 - protein, 15 aa, Homo sapiens
  CDR3 for beta chain variable domain of TCR clone 20053 (TRBV11-3, TRBJ2-3)
CASLKDGREGDTQYF

SEQ ID NO: 40107 - protein, 16 aa, Homo sapiens
  CDR3 for alpha chain variable domain of TCR clone 20054 (TRAV30, TRAJ24)
CGTEIVDADSWGKFQF

SEQ ID NO: 40108 - protein, 14 aa, Homo sapiens
  CDR3 for beta chain variable domain of TCR clone 20054 (TRBV12-5, TRBJ2-5)
CASGSRTHQVTQYF

SEQ ID NO: 40109 - protein, 16 aa, Homo sapiens
  CDR3 for alpha chain variable domain of TCR clone 20055 (TRAV12-3, TRAJ53)
CAMSPGSGGSNYKLTF

SEQ ID NO: 40110 - protein, 15 aa, Homo sapiens
  CDR3 for beta chain variable domain of TCR clone 20055 (TRBV11-3, TRBJ2-7)
CASSPGPASSYEQYF

SEQ ID NO: 40111 - protein, 13 aa, Homo sapiens
  CDR3 for alpha chain variable domain of TCR clone 20056 (TRAV36/DV7, TRAJ37)
CAVFSSNTGKLIF

SEQ ID NO: 40112 - protein, 14 aa, Homo sapiens
  CDR3 for beta chain variable domain of TCR clone 20056 (TRBV12-5, TRBJ2-5)
CASGSRTHQETQYF

SEQ ID NO: 40113 - protein, 13 aa, Homo sapiens
  CDR3 for alpha chain variable domain of TCR clone 20057 (TRAV13-1, TRAJ6)
CAASKGGSYIPTF

SEQ ID NO: 40114 - protein, 13 aa, Homo sapiens
  CDR3 for beta chain variable domain of TCR clone 20057 (TRBV25-1, TRBJ1-5)
CASSGQVNQPQHF

SEQ ID NO: 40115 - protein, 14 aa, Homo sapiens
  CDR3 for alpha chain variable domain of TCR clone 20058 (TRAV35, TRAJ13)
CAGSPSGGYKKVTF

SEQ ID NO: 40116 - protein, 13 aa, Homo sapiens
  CDR3 for beta chain variable domain of TCR clone 20058 (TRBV29-1, TRBJ1-1)
CSVGDSRNTEAFF

SEQ ID NO: 40117 - protein, 15 aa, Homo sapiens
  CDR3 for alpha chain variable domain of TCR clone 20059 (TRAV27, TRAJ38)
CAARRNAGNNRKLIR

SEQ ID NO: 40118 - protein, 14 aa, Homo sapiens
  CDR3 for beta chain variable domain of TCR clone 20059 (TRBV7-2, TRBJ2-7)
CASSPRDGAYEQYF

SEQ ID NO: 40119 - protein, 14 aa, Homo sapiens
  CDR3 for alpha chain variable domain of TCR clone 20060 (TRAV2, TRAJ9)
CAVEDRSGGFKTIF

SEQ ID NO: 40120 - protein, 15 aa, Homo sapiens
  CDR3 for beta chain variable domain of TCR clone 20060 (TRBV7-9, TRBJ1-6)
CASSSPGRGNSPLHF

SEQ ID NO: 40121 - protein, 14 aa, Homo sapiens
  CDR3 for alpha chain variable domain of TCR clone 20061 (TRAV13-1, TRAJ44)
CAAKATGTASKLTF

SEQ ID NO: 40122 - protein, 17 aa, Homo sapiens
  CDR3 for beta chain variable domain of TCR clone 20061 (TRBV13, TRBJ2-3)
CASSLSRVAGGRNTQYF

SEQ ID NO: 40123 - protein, 12 aa, Homo sapiens
  CDR3 for alpha chain variable domain of TCR clone 20062 (TRAV27, TRAJ9)
CAGESGGFKTIF

SEQ ID NO: 40124 - protein, 14 aa, Homo sapiens
  CDR3 for beta chain variable domain of TCR clone 20062 (TRBV6-1, TRBJ2-1)
CASAKDGFYNEQFF

SEQ ID NO: 40125 - protein, 11 aa, Homo sapiens
  CDR3 for alpha chain variable domain of TCR clone 20063 (TRAV13-1, TRAJ39)
CASHAGNMLTF

SEQ ID NO: 40126 - protein, 14 aa, Homo sapiens
  CDR3 for beta chain variable domain of TCR clone 20063 (TRBV11-2, TRBJ1-5)
CASSLDRGRQTQHF

SEQ ID NO: 40127 - protein, 15 aa, Homo sapiens
  CDR3 for alpha chain variable domain of TCR clone 20064 (TRAV3, TRAJ5)
CAVRDLDTGRRALTF

SEQ ID NO: 40128 - protein, 13 aa, Homo sapiens
  CDR3 for beta chain variable domain of TCR clone 20064 (TRBV12-4, TRBJ2-7)
CASSPTETYEQYF

SEQ ID NO: 40129 - protein, 10 aa, Homo sapiens
  CDR3 for alpha chain variable domain of TCR clone 20065 (TRAV9-2, TRAJ43)
CALRMNDMRF

SEQ ID NO: 40130 - protein, 14 aa, Homo sapiens
  CDR3 for beta chain variable domain of TCR clone 20065 (TRBV7-8, TRBJ2-3)
CASSSRDSTDTQYF

SEQ ID NO: 40131 - protein, 12 aa, Homo sapiens
  CDR3 for alpha chain variable domain of TCR clone 20066 (TRAV12-3, TRAJ40)
CAMSSGTYNYIF

SEQ ID NO: 40132 - protein, 15 aa, Homo sapiens
  CDR3 for beta chain variable domain of TCR clone 20066 (TRBV7-3, TRBJ2-2)
CASSETGQGTGELFF

SEQ ID NO: 40133 - protein, 13 aa, Homo sapiens
  CDR3 for alpha chain variable domain of TCR clone 20067 (TRAV13-2, TRAJ48)
CAELDFGNEKLTF

SEQ ID NO: 40134 - protein, 15 aa, Homo sapiens
  CDR3 for beta chain variable domain of TCR clone 20067 (TRBV7-9, TRBJ1-6)
CASSSPGRGNSPLHF

SEQ ID NO: 40135 - protein, 13 aa, Homo sapiens
  CDR3 for alpha chain variable domain of TCR clone 20068 (TRAV20, TRAJ37)
CAGCSSNTGKLIF

SEQ ID NO: 40136 - protein, 11 aa, Homo sapiens
  CDR3 for beta chain variable domain of TCR clone 20068 (TRBV12-4, TRBJ2-3)
CASTATVTQYF

SEQ ID NO: 40137 - protein, 13 aa, Homo sapiens
  CDR3 for alpha chain variable domain of TCR clone 20069 (TRAV20, TRAJ37)
CAGCSSNTGKIIF

SEQ ID NO: 40138 - protein, 11 aa, Homo sapiens
  CDR3 for beta chain variable domain of TCR clone 20069 (TRBV12-4, TRBJ2-3)
CASTATDTQYF

SEQ ID NO: 40139 - protein, 11 aa, Homo sapiens
  CDR3 for alpha chain variable domain of TCR clone 20070 (TRAV2, TRAJ13)
CASGGYQNVTF

SEQ ID NO: 40140 - protein, 16 aa, Homo sapiens
  CDR3 for beta chain variable domain of TCR clone 20070 (TRBV6-1, TRBJ2-5)
CASSETLDRGAETQYF

SEQ ID NO: 40141 - protein, 12 aa, Homo sapiens
  CDR3 for alpha chain variable domain of TCR clone 20071 (TRAV1-2, TRAJ9)
CAGYTGGFKTIL

SEQ ID NO: 40142 - protein, 15 aa, Homo sapiens
  CDR3 for beta chain variable domain of TCR clone 20071 (TRBV11-2, TRBJ2-1)
CASSPAGQSLNEQFF

SEQ ID NO: 40143 - protein, 12 aa, Homo sapiens
  CDR3 for alpha chain variable domain of TCR clone 20072 (TRAV36/DV7, TRAJ26)
CAVDNYGQNFVF

SEQ ID NO: 40144 - protein, 13 aa, Homo sapiens
  CDR3 for beta chain variable domain of TCR clone 20072 (TRBV19, TRBJ1-1)
CASSVRDISEAFF

SEQ ID NO: 40145 - protein, 11 aa, Homo sapiens
  CDR3 for alpha chain variable domain of TCR clone 20073 (TRAV16, TRAJ26)
CALSGSEFFLW

SEQ ID NO: 40146 - protein, 12 aa, Homo sapiens
  CDR3 for beta chain variable domain of TCR clone 20073 (TRBV11-2, TRBJ2-1)
CASSPGNNEQFF

SEQ ID NO: 40147 - protein, 14 aa, Homo sapiens
  CDR3 for alpha chain variable domain of TCR clone 20074 (TRAV29/DV5, TRAJ36)
CAARRKTGANNLFF

SEQ ID NO: 40148 - protein, 14 aa, Homo sapiens
  CDR3 for beta chain variable domain of TCR clone 20074 (TRBV12-5, TRBJ2-5)
RASGSRTHQETQYF

SEQ ID NO: 40149 - protein, 13 aa, Homo sapiens
  CDR3 for alpha chain variable domain of TCR clone 20075 (TRAV27, TRAJ41)
CAGEGDSGYALNF

SEQ ID NO: 40150 - protein, 14 aa, Homo sapiens
  CDR3 for beta chain variable domain of TCR clone 20075 (TRBV7-2, TRBJ1-1)
CASSFLTGTTEAFF

SEQ ID NO: 40151 - protein, 15 aa, Homo sapiens
  CDR3 for alpha chain variable domain of TCR clone 20076 (TRAV35, TRAJ58)
CAGRRQETSGPRLTF

SEQ ID NO: 40152 - protein, 11 aa, Homo sapiens
  CDR3 for beta chain variable domain of TCR clone 20076 (TRBV11-2, TRBJ1-1)
CASSINTEAFF

SEQ ID NO: 40153 - protein, 14 aa, Homo sapiens
  CDR3 for alpha chain variable domain of TCR clone 20077 (TRAV35, TRAJ22)
CAGPRPGSARQLTF

SEQ ID NO: 40154 - protein, 15 aa, Homo sapiens
  CDR3 for beta chain variable domain of TCR clone 20077 (TRBV12-4, TRBJ2-5)
CASSPPTGLQETQYF

SEQ ID NO: 40155 - protein, 15 aa, Homo sapiens
  CDR3 for alpha chain variable domain of TCR clone 20078 (TRAV8-3, TRAJ45)
CASSYSGGGADGLTF

SEQ ID NO: 40156 - protein, 17 aa, Homo sapiens
  CDR3 for beta chain variable domain of TCR clone 20078 (TRBV7-8, TRBJ1-2)
CASSLRPLQGHSYGYTF

SEQ ID NO: 40157 - protein, 15 aa, Homo sapiens
  CDR3 for alpha chain variable domain of TCR clone 20079 (TRAV3, TRAJ22)
CAVRDRGGSARQPTF

SEQ ID NO: 40158 - protein, 14 aa, Homo sapiens
  CDR3 for beta chain variable domain of TCR clone 20079 (TRBV19, TRBJ1-5)
CASSLGLIGQPQHF

SEQ ID NO: 40159 - protein, 13 aa, Homo sapiens
  CDR3 for alpha chain variable domain of TCR clone 20080 (TRAV35, TRAJ36)
CAGPRIGANNLFF

SEQ ID NO: 40160 - protein, 15 aa, Homo sapiens
  CDR3 for beta chain variable domain of TCR clone 20080 (TRBV28, TRBJ2-5)
CASSPPWPYQETQYF

SEQ ID NO: 40161 - protein, 14 aa, Homo sapiens
  CDR3 for alpha chain variable domain of TCR clone 20081 (TRAV12-2, TRAJ17)
CAVLFKAAGNKLTF

SEQ ID NO: 40162 - protein, 17 aa, Homo sapiens
  CDR3 for beta chain variable domain of TCR clone 20081 (TRBV20-1, TRBJ2-2)
CSASGSGQGVLTGELFF

SEQ ID NO: 40163 - protein, 14 aa, Homo sapiens
  CDR3 for alpha chain variable domain of TCR clone 20082 (TRAV2, TRAJ9)
CAVEDRGGGFKTIF

SEQ ID NO: 40164 - protein, 16 aa, Homo sapiens
  CDR3 for beta chain variable domain of TCR clone 20082 (TRBV7-3, TRBJ2-2)
CASSLKRGTLSGELFF

SEQ ID NO: 40165 - protein, 14 aa, Homo sapiens
  CDR3 for alpha chain variable domain of TCR clone 20083 (TRAV1-2, TRAJ16)
CAVNRFSDGQKLLF

SEQ ID NO: 40166 - protein, 18 aa, Homo sapiens
  CDR3 for beta chain variable domain of TCR clone 20083 (TRBV6-6, TRBJ1-3)
CASSYSKWDSISGNTIYF

SEQ ID NO: 40167 - protein, 12 aa, Homo sapiens
  CDR3 for alpha chain variable domain of TCR clone 20084 (TRAV3, TRAJ43)
CAVRDPNSDMRF

SEQ ID NO: 40168 - protein, 17 aa, Homo sapiens
  CDR3 for beta chain variable domain of TCR clone 20084 (TRBV7-8, TRBJ2-6)
CASSAGTGGAGANVLTF

SEQ ID NO: 40169 - protein, 17 aa, Homo sapiens
  CDR3 for alpha chain variable domain of TCR clone 20085 (TRAV12-3, TRAJ6)
CAMSARGGAGGSYIPTF

SEQ ID NO: 40170 - protein, 12 aa, Homo sapiens
  CDR3 for beta chain variable domain of TCR clone 20085 (TRBV12-4, TRBJ2-3)
CAGSTLPDTQYF

SEQ ID NO: 40171 - protein, 13 aa, Homo sapiens
  CDR3 for alpha chain variable domain of TCR clone 20086 (TRAV8-3, TRAJ36)
CAVGATGANNLFF

SEQ ID NO: 40172 - protein, 13 aa, Homo sapiens
  CDR3 for beta chain variable domain of TCR clone 20086 (TRBV7-9, TRBJ1-2)
CASSLKQNYGYTF

SEQ ID NO: 40173 - protein, 13 aa, Homo sapiens
  CDR3 for alpha chain variable domain of TCR clone 20087 (TRAV2, TRAJ40)
CAVVTSGTYKYIF

SEQ ID NO: 40174 - protein, 13 aa, Homo sapiens
  CDR3 for beta chain variable domain of TCR clone 20087 (TRBV10-3, TRBJ1-2)
CAISERDSYGYTF

SEQ ID NO: 40175 - protein, 11 aa, Homo sapiens
  CDR3 for alpha chain variable domain of TCR clone 20088 (TRAV1-2, TRAJ20)
CAVANDYKLSF

SEQ ID NO: 40176 - protein, 15 aa, Homo sapiens
  CDR3 for beta chain variable domain of TCR clone 20088 (TRBV20-1, TRBJ2-7)
CSARDRVSGMDEQYF

SEQ ID NO: 40177 - protein, 14 aa, Homo sapiens
  CDR3 for alpha chain variable domain of TCR clone 20089 (TRAV13-1, TRAJ44)
CAAKATGTASKLTF

SEQ ID NO: 40178 - protein, 13 aa, Homo sapiens
  CDR3 for beta chain variable domain of TCR clone 20089 (TRBV5-5, TRBJ1-2)
CASSFWRGEDDTF

SEQ ID NO: 40179 - protein, 14 aa, Homo sapiens
  CDR3 for alpha chain variable domain of TCR clone 20090 (TRAV14/DV4, TRAJ15)
CAMRRDQAGTALIF

SEQ ID NO: 40180 - protein, 16 aa, Homo sapiens
  CDR3 for beta chain variable domain of TCR clone 20090 (TRBV15, TRBJ2-3)
RATSRDLGIVTDTQYF

SEQ ID NO: 40181 - protein, 14 aa, Homo sapiens
  CDR3 for alpha chain variable domain of TCR clone 20091 (TRAV8-3, TRAJ4)
CAVGAAVGYNKLIF

SEQ ID NO: 40182 - protein, 15 aa, Homo sapiens
  CDR3 for beta chain variable domain of TCR clone 20091 (TRBV6-5, TRBJ2-1)
CASSYDAGAGNEQFF

SEQ ID NO: 40183 - protein, 15 aa, Homo sapiens
  CDR3 for alpha chain variable domain of TCR clone 20092 (TRAV17, TRAJ13)
CATDAGSGGYRKVTF

SEQ ID NO: 40184 - protein, 17 aa, Homo sapiens
  CDR3 for beta chain variable domain of TCR clone 20092 (TRBV11-2, TRBJ2-1)
CASSLYPPGVEYNEQFF

SEQ ID NO: 40185 - protein, 13 aa, Homo sapiens
  CDR3 for alpha chain variable domain of TCR clone 20093 (TRAV2, TRAJ40)
CAVVTSGTYKYIF

SEQ ID NO: 40186 - protein, 12 aa, Homo sapiens
  CDR3 for beta chain variable domain of TCR clone 20093 (TRBV7-9, TRBJ2-7)
CASSIKREEQYF

SEQ ID NO: 40187 - protein, 13 aa, Homo sapiens
  CDR3 for alpha chain variable domain of TCR clone 20094 (TRAV27, TRAJ45)
CRSSRGGADGLTF

SEQ ID NO: 40188 - protein, 17 aa, Homo sapiens
  CDR3 for beta chain variable domain of TCR clone 20094 (TRBV11-2, TRBJ2-1)
CASSLYPPGVEYNEQFF

SEQ ID NO: 40189 - protein, 14 aa, Homo sapiens
  CDR3 for alpha chain variable domain of TCR clone 20095 (TRAV29/DV5, TRAJ45)
CAASFGGGADGLTF

SEQ ID NO: 40190 - protein, 11 aa, Homo sapiens
  CDR3 for beta chain variable domain of TCR clone 20095 (TRBV11-2, TRBJ2-2)
CASSLPGELFF

SEQ ID NO: 40191 - protein, 11 aa, Homo sapiens
  CDR3 for alpha chain variable domain of TCR clone 20096 (TRAV3, TRAJ21)
CAVGNFNKFYF

SEQ ID NO: 40192 - protein, 14 aa, Homo sapiens
  CDR3 for beta chain variable domain of TCR clone 20096 (TRBV20-1, TRBJ1-1)
CSAQTRIGGTEAFF

SEQ ID NO: 40193 - protein, 13 aa, Homo sapiens
  CDR3 for alpha chain variable domain of TCR clone 20097 (TRAV13-1, TRAJ21)
CAASIYNFNKFYF

SEQ ID NO: 40194 - protein, 13 aa, Homo sapiens
  CDR3 for beta chain variable domain of TCR clone 20097 (TRBV27, TRBJ1-4)
CASSLMGDENLFF

SEQ ID NO: 40195 - protein, 15 aa, Homo sapiens
  CDR3 for alpha chain variable domain of TCR clone 20098 (TRAV8-3, TRAJ45)
CASSYAGGGADGLTF

SEQ ID NO: 40196 - protein, 13 aa, Homo sapiens
  CDR3 for beta chain variable domain of TCR clone 20098 (TRBV10-3, TRBJ2-7)
CASKLAVNYEQYF

SEQ ID NO: 40197 - protein, 12 aa, Homo sapiens
  CDR3 for alpha chain variable domain of TCR clone 20099 (TRAV4, TRAJ26)
CLVGDYGQNFFF

SEQ ID NO: 40198 - protein, 16 aa, Homo sapiens
  CDR3 for beta chain variable domain of TCR clone 20099 (TRBV7-2, TRBJ1-2)
CASSSNQDRRGHGYTF

SEQ ID NO: 40199 - protein, 14 aa, Homo sapiens
  CDR3 for alpha chain variable domain of TCR clone 20100 (TRAV1-2, TRAJ8)
CAVREDTGFQKLVF

SEQ ID NO: 40200 - protein, 14 aa, Homo sapiens
  CDR3 for beta chain variable domain of TCR clone 20100 (TRBV5-1, TRBJ2-7)
CASSRGESLYEQYF

SEQ ID NO: 40201 - protein, 14 aa, Homo sapiens
  CDR3 for alpha chain variable domain of TCR clone 20101 (TRAV1-2, TRAJ16)
RAVNRFSDGQKLLF

SEQ ID NO: 40202 - protein, 13 aa, Homo sapiens
  CDR3 for beta chain variable domain of TCR clone 20101 (TRBV20-1, TRBJ1-1)
CSARGGGNTEAFF

SEQ ID NO: 40203 - protein, 15 aa, Homo sapiens
  CDR3 for alpha chain variable domain of TCR clone 20102 (TRAV17, TRAJ13)
CATDAGSGGYQKGTF

SEQ ID NO: 40204 - protein, 17 aa, Homo sapiens
  CDR3 for beta chain variable domain of TCR clone 20102 (TRBV11-2, TRBJ2-1)
CASSLYPPGVEYNEQFF

SEQ ID NO: 40205 - protein, 15 aa, Homo sapiens
  CDR3 for alpha chain variable domain of TCR clone 20103 (TRAV3, TRAJ5)
CAVRDLDTGRRALTF

SEQ ID NO: 40206 - protein, 13 aa, Homo sapiens
  CDR3 for beta chain variable domain of TCR clone 20103 (TRBV12-4, TRBJ2-7)
CASSPKETYEQYF

SEQ ID NO: 40207 - protein, 15 aa, Homo sapiens
  CDR3 for alpha chain variable domain of TCR clone 20104 (TRAV3, TRAJ5)
CAVRDRKTGRRALPF

SEQ ID NO: 40208 - protein, 15 aa, Homo sapiens
  CDR3 for beta chain variable domain of TCR clone 20104 (TRBV7-8, TRBJ2-1)
CASSLADSLYNEQFF

SEQ ID NO: 40209 - protein, 14 aa, Homo sapiens
  CDR3 for alpha chain variable domain of TCR clone 20105 (TRAV12-1, TRAJ13)
CVVIDSGGYQEVTF

SEQ ID NO: 40210 - protein, 11 aa, Homo sapiens
  CDR3 for beta chain variable domain of TCR clone 20105 (TRBV19, TRBJ1-1)
CASSTTGQAFF

SEQ ID NO: 40211 - protein, 14 aa, Homo sapiens
  CDR3 for alpha chain variable domain of TCR clone 20106 (TRAV26-1, TRAJ38)
CIADNAGNNRKLIW

SEQ ID NO: 40212 - protein, 13 aa, Homo sapiens
  CDR3 for beta chain variable domain of TCR clone 20106 (TRBV20-1, TRBJ1-1)
CSVRGGGNTEAFF

SEQ ID NO: 40213 - protein, 15 aa, Homo sapiens
  CDR3 for alpha chain variable domain of TCR clone 20107 (TRAV38-1, TRAJ37)
CAFVHGSGNTGKLIF

SEQ ID NO: 40214 - protein, 12 aa, Homo sapiens
  CDR3 for beta chain variable domain of TCR clone 20107 (TRBV7-9, TRBJ2-7)
CASSFGSYEQYF

SEQ ID NO: 40215 - protein, 12 aa, Homo sapiens
  CDR3 for alpha chain variable domain of TCR clone 20108 (TRAV2, TRAJ31)
CAVEDNNARLMF

SEQ ID NO: 40216 - protein, 16 aa, Homo sapiens
  CDR3 for beta chain variable domain of TCR clone 20108 (TRBV10-3, TRBJ2-1)
CASSGVGDGGGGEQFF

SEQ ID NO: 40217 - protein, 12 aa, Homo sapiens
  CDR3 for alpha chain variable domain of TCR clone 20109 (TRAV3, TRAJ26)
CAVRDYGQNFVF

SEQ ID NO: 40218 - protein, 16 aa, Homo sapiens
  CDR3 for beta chain variable domain of TCR clone 20109 (TRBV11-2, TRBJ1-2)
CASSPSGREANYGYTL

SEQ ID NO: 40219 - protein, 13 aa, Homo sapiens
  CDR3 for alpha chain variable domain of TCR clone 20110 (TRAV9-2, TRAJ49)
CALRPNTGNQFYF

SEQ ID NO: 40220 - protein, 14 aa, Homo sapiens
  CDR3 for beta chain variable domain of TCR clone 20110 (TRBV9, TRBJ2-7)
CASSVAGGAYEQYF

SEQ ID NO: 40221 - protein, 14 aa, Homo sapiens
  CDR3 for alpha chain variable domain of TCR clone 20111 (TRAV12-1, TRAJ17)
CVVNYKAAGNKLTF

SEQ ID NO: 40222 - protein, 17 aa, Homo sapiens
  CDR3 for beta chain variable domain of TCR clone 20111 (TRBV20-1, TRBJ2-1)
CSASYSGLAGSYNEQFF

SEQ ID NO: 40223 - protein, 13 aa, Homo sapiens
  CDR3 for alpha chain variable domain of TCR clone 20112 (TRAV27, TRAJ45)
CRSSGGGADGITF

SEQ ID NO: 40224 - protein, 17 aa, Homo sapiens
  CDR3 for beta chain variable domain of TCR clone 20112 (TRBV11-2, TRBJ2-1)
CASSLYPPGVEYNEQFF

SEQ ID NO: 40225 - protein, 12 aa, Homo sapiens
  CDR3 for alpha chain variable domain of TCR clone 20113 (TRAV13-1, TRAJ21)
CAAKEGFNKFYF

SEQ ID NO: 40226 - protein, 13 aa, Homo sapiens
  CDR3 for beta chain variable domain of TCR clone 20113 (TRBV6-1, TRBJ1-1)
CASSRQGNTEAFF

SEQ ID NO: 40227 - protein, 12 aa, Homo sapiens
  CDR3 for alpha chain variable domain of TCR clone 20114 (TRAV13-1, TRAJ21)
CAAKEGFNKFYF

SEQ ID NO: 40228 - protein, 18 aa, Homo sapiens
  CDR3 for beta chain variable domain of TCR clone 20114 (TRBV20-1, TRBJ2-6)
CSAETTPTHGSGANDLTF

SEQ ID NO: 40229 - protein, 14 aa, Homo sapiens
  CDR3 for alpha chain variable domain of TCR clone 20115 (TRAV19, TRAJ49)
CALSEGNTGNQFYF

SEQ ID NO: 40230 - protein, 13 aa, Homo sapiens
  CDR3 for beta chain variable domain of TCR clone 20115 (TRBV7-2, TRBJ2-2)
CASSSVRAGELFF

SEQ ID NO: 40231 - protein, 17 aa, Homo sapiens
  CDR3 for alpha chain variable domain of TCR clone 20116 (TRAV3, TRAJ12)
CAVRDGGRMDSSDKLIF

SEQ ID NO: 40232 - protein, 14 aa, Homo sapiens
  CDR3 for beta chain variable domain of TCR clone 20116 (TRBV7-9, TRBJ1-2)
CASSRQGANYGYTF

SEQ ID NO: 40233 - protein, 13 aa, Homo sapiens
  CDR3 for alpha chain variable domain of TCR clone 20117 (TRAV35, TRAJ48)
CAGHEFGNEKLTF

SEQ ID NO: 40234 - protein, 16 aa, Homo sapiens
  CDR3 for beta chain variable domain of TCR clone 20117 (TRBV12-5, TRBJ2-5)
CASGPRTSGNQEAQYF

SEQ ID NO: 40235 - protein, 13 aa, Homo sapiens
  CDR3 for alpha chain variable domain of TCR clone 20118 (TRAV26-2, TRAJ43)
CILRAVNNNYMRF

SEQ ID NO: 40236 - protein, 15 aa, Homo sapiens
  CDR3 for beta chain variable domain of TCR clone 20118 (TRBV7-2, TRBJ2-1)
CASTHGTGIYNEQFF

SEQ ID NO: 40237 - protein, 14 aa, Homo sapiens
  CDR3 for alpha chain variable domain of TCR clone 20119 (TRAV13-1, TRAJ44)
CAARATGTASKLTF

SEQ ID NO: 40238 - protein, 17 aa, Homo sapiens
  CDR3 for beta chain variable domain of TCR clone 20119 (TRBV7-3, TRBJ2-3)
CASSLMKRMRGADTQYF

SEQ ID NO: 40239 - protein, 14 aa, Homo sapiens
  CDR3 for alpha chain variable domain of TCR clone 20120 (TRAV29/DV5, TRAJ36)
CAARRKTGANNLFF

SEQ ID NO: 40240 - protein, 13 aa, Homo sapiens
  CDR3 for beta chain variable domain of TCR clone 20120 (TRBV12-4, TRBJ1-2)
CASSLRQGKGYTF

SEQ ID NO: 40241 - protein, 15 aa, Homo sapiens
  CDR3 for alpha chain variable domain of TCR clone 20121 (TRAV38-1, TRAJ37)
CAFIHGSGNPGKLIF

SEQ ID NO: 40242 - protein, 12 aa, Homo sapiens
  CDR3 for beta chain variable domain of TCR clone 20121 (TRBV7-9, TRBJ2-7)
CASSFGSYEQYF

SEQ ID NO: 40243 - protein, 16 aa, Homo sapiens
  CDR3 for alpha chain variable domain of TCR clone 20122 (TRAV30, TRAJ24)
CGTEIVDADSWGKFQF

SEQ ID NO: 40244 - protein, 14 aa, Homo sapiens
  CDR3 for beta chain variable domain of TCR clone 20122 (TRBV5-1, TRBJ2-7)
CASSRGESLYEQYF

SEQ ID NO: 40245 - protein, 17 aa, Homo sapiens
  CDR3 for alpha chain variable domain of TCR clone 20123 (TRAV38-2/DV8, TRAJ28)
CAFLTLYSGAGSYQLTF

SEQ ID NO: 40246 - protein, 19 aa, Homo sapiens
  CDR3 for beta chain variable domain of TCR clone 20123 (TRBV7-2, TRBJ2-5)
CASSLSGGGGDPVLRARHA

SEQ ID NO: 40247 - protein, 17 aa, Homo sapiens
  CDR3 for alpha chain variable domain of TCR clone 20124 (TRAV3, TRAJ28)
CAVREAYSGAGSYQLTF

SEQ ID NO: 40248 - protein, 18 aa, Homo sapiens
  CDR3 for beta chain variable domain of TCR clone 20124 (TRBV27, TRBJ2-1)
CASGNRAVGVGSKNEQLF

SEQ ID NO: 40249 - protein, 14 aa, Homo sapiens
  CDR3 for alpha chain variable domain of TCR clone 20125 (TRAV13-2, TRAJ10)
CAERGTGGGNKLTF

SEQ ID NO: 40250 - protein, 15 aa, Homo sapiens
  CDR3 for beta chain variable domain of TCR clone 20125 (TRBV5-1, TRBJ1-1)
CASSLGMGTSTEAFF

SEQ ID NO: 40251 - protein, 13 aa, Homo sapiens
  CDR3 for alpha chain variable domain of TCR clone 20126 (TRAV21, TRAJ27)
CAARPGNAGKSTF

SEQ ID NO: 40252 - protein, 14 aa, Homo sapiens
  CDR3 for beta chain variable domain of TCR clone 20126 (TRBV7-6, TRBJ2-3)
CASSLGPVTDTQYF

SEQ ID NO: 40253 - protein, 13 aa, Homo sapiens
  CDR3 for alpha chain variable domain of TCR clone 20127 (TRAV12-2, TRAJ20)
CAAYPSNDYKLSF

SEQ ID NO: 40254 - protein, 15 aa, Homo sapiens
  CDR3 for beta chain variable domain of TCR clone 20127 (TRBV27, TRBJ2-5)
CASSLYPRGGETQYF

SEQ ID NO: 40255 - protein, 15 aa, Homo sapiens
  CDR3 for alpha chain variable domain of TCR clone 20128 (TRAV2, TRAJ15)
CAVEDRGQAGTALIC

SEQ ID NO: 40256 - protein, 13 aa, Homo sapiens
  CDR3 for beta chain variable domain of TCR clone 20128 (TRBV10-2, TRBJ2-7)
CASGASGGYEQYF

SEQ ID NO: 40257 - protein, 11 aa, Homo sapiens
  CDR3 for alpha chain variable domain of TCR clone 20129 (TRAV17, TRAJ9)
CATTGGFKTIF

SEQ ID NO: 40258 - protein, 14 aa, Homo sapiens
  CDR3 for beta chain variable domain of TCR clone 20129 (TRBV7-9, TRBJ2-2)
CTSSGLADTGELFF

SEQ ID NO: 40259 - protein, 23 aa, Homo sapiens
  CDR3 for alpha chain variable domain of TCR clone 20130 (TRAV26-1, TRAJ38)
CIADNAGNNHIQNPDPAVYQLRD

SEQ ID NO: 40260 - protein, 14 aa, Homo sapiens
  CDR3 for beta chain variable domain of TCR clone 20130 (TRBV19, TRBJ2-1)
CASPTFVLSGEQFF

SEQ ID NO: 40261 - protein, 14 aa, Homo sapiens
  CDR3 for alpha chain variable domain of TCR clone 20131 (TRAV30, TRAJ26)
CGTEIVSYDQNFVF

SEQ ID NO: 40262 - protein, 13 aa, Homo sapiens
  CDR3 for beta chain variable domain of TCR clone 20131 (TRBV19, TRBJ1-3)
CASRLSLGNTIYF

SEQ ID NO: 40263 - protein, 11 aa, Homo sapiens
  CDR3 for alpha chain variable domain of TCR clone 20132 (TRAV17, TRAJ9)
RATTGGFKTIF

SEQ ID NO: 40264 - protein, 14 aa, Homo sapiens
  CDR3 for beta chain variable domain of TCR clone 20132 (TRBV7-9, TRBJ2-2)
CASSGLADTGELFF

SEQ ID NO: 40265 - protein, 11 aa, Homo sapiens
  CDR3 for alpha chain variable domain of TCR clone 20133 (TRAV17, TRAJ43)
CATPRSNDMRF

SEQ ID NO: 40266 - protein, 15 aa, Homo sapiens
  CDR3 for beta chain variable domain of TCR clone 20133 (TRBV11-2, TRBJ2-1)
CASSLGTSGLNEQFL

SEQ ID NO: 40267 - protein, 14 aa, Homo sapiens
  CDR3 for alpha chain variable domain of TCR clone 20134 (TRAV12-2, TRAJ17)
CAVLFKAAGNKLTF

SEQ ID NO: 40268 - protein, 14 aa, Homo sapiens
  CDR3 for beta chain variable domain of TCR clone 20134 (TRBV7-6, TRBJ2-3)
CASSLGTVTDTQYF

SEQ ID NO: 40269 - protein, 16 aa, Homo sapiens
  CDR3 for alpha chain variable domain of TCR clone 20135 (TRAV30, TRAJ24)
CGTEIVDADSWGKFQF

SEQ ID NO: 40270 - protein, 17 aa, Homo sapiens
  CDR3 for beta chain variable domain of TCR clone 20135 (TRBV28, TRBJ2-5)
CASSTPEGDALQETQYF

SEQ ID NO: 40271 - protein, 16 aa, Homo sapiens
  CDR3 for alpha chain variable domain of TCR clone 20136 (TRAV30, TRAJ24)
CGTEIVDADSWGKFQF

SEQ ID NO: 40272 - protein, 16 aa, Homo sapiens
  CDR3 for beta chain variable domain of TCR clone 20136 (TRBV4-2, TRBJ2-3)
CASSQELAGDTDTQYF

SEQ ID NO: 40273 - protein, 13 aa, Homo sapiens
  CDR3 for alpha chain variable domain of TCR clone 20137 (TRAV2, TRAJ15)
CAVASQAGTALIF

SEQ ID NO: 40274 - protein, 15 aa, Homo sapiens
  CDR3 for beta chain variable domain of TCR clone 20137 (TRBV10-2, TRBJ2-6)
CASSEQGTGANVLTF

SEQ ID NO: 40275 - protein, 14 aa, Homo sapiens
  CDR3 for alpha chain variable domain of TCR clone 20138 (TRAV38-1, TRAJ40)
CALRPTSGTYKYIF

SEQ ID NO: 40276 - protein, 14 aa, Homo sapiens
  CDR3 for beta chain variable domain of TCR clone 20138 (TRBV25-1, TRBJ1-1)
CASPHLGGNTEAFF

SEQ ID NO: 40277 - protein, 13 aa, Homo sapiens
  CDR3 for alpha chain variable domain of TCR clone 20139 (TRAV27, TRAJ45)
CRSSGGGADGLTF

SEQ ID NO: 40278 - protein, 16 aa, Homo sapiens
  CDR3 for beta chain variable domain of TCR clone 20139 (TRBV7-3, TRBJ2-2)
CASSLKRGTLSGELFF

SEQ ID NO: 40279 - protein, 19 aa, Homo sapiens
  CDR3 for alpha chain variable domain of TCR clone 20140 (TRAV2, TRAJ20)
ILQVREADAAVYRDCKLSS

SEQ ID NO: 40280 - protein, 13 aa, Homo sapiens
  CDR3 for beta chain variable domain of TCR clone 20140 (TRBV15, TRBJ1-6)
CATSGGLNSPLHF

SEQ ID NO: 40281 - protein, 14 aa, Homo sapiens
  CDR3 for alpha chain variable domain of TCR clone 20141 (TRAV1-2, TRAJ16)
CAVNRFSDGQKLLL

SEQ ID NO: 40282 - protein, 14 aa, Homo sapiens
  CDR3 for beta chain variable domain of TCR clone 20141 (TRBV7-9, TRBJ2-3)
CASSLEDGTDTQYF

SEQ ID NO: 40283 - protein, 14 aa, Homo sapiens
  CDR3 for alpha chain variable domain of TCR clone 20142 (TRAV12-1, TRAJ17)
CVVNYKAADNKLTF

SEQ ID NO: 40284 - protein, 17 aa, Homo sapiens
  CDR3 for beta chain variable domain of TCR clone 20142 (TRBV20-1, TRBJ2-1)
CSASSSGLAGSYNEQFF

SEQ ID NO: 40285 - protein, 14 aa, Homo sapiens
  CDR3 for alpha chain variable domain of TCR clone 20143 (TRAV17, TRAJ17)
CATEGGAAGNKLTF

SEQ ID NO: 40286 - protein, 13 aa, Homo sapiens
  CDR3 for beta chain variable domain of TCR clone 20143 (TRBV11-1, TRBJ2-5)
CASSFWAQETQYF

SEQ ID NO: 40287 - protein, 13 aa, Homo sapiens
  CDR3 for alpha chain variable domain of TCR clone 20144 (TRAV2, TRAJ21)
CAVEELNFNKFYF

SEQ ID NO: 40288 - protein, 15 aa, Homo sapiens
  CDR3 for beta chain variable domain of TCR clone 20144 (TRBV28, TRBJ2-5)
CASSPGQGSIETQYF

SEQ ID NO: 40289 - protein, 13 aa, Homo sapiens
  CDR3 for alpha chain variable domain of TCR clone 20145 (TRAV38-1, TRAJ42)
CARWGGGQGNLIF

SEQ ID NO: 40290 - protein, 17 aa, Homo sapiens
  CDR3 for beta chain variable domain of TCR clone 20145 (TRBV20-1, TRBJ2-1)
CSARDPLAGVWDNEQFF

SEQ ID NO: 40291 - protein, 15 aa, Homo sapiens
  CDR3 for alpha chain variable domain of TCR clone 20146 (TRAV26-1, TRAJ44)
CIVRIGTRTASKLTF

SEQ ID NO: 40292 - protein, 15 aa, Homo sapiens
  CDR3 for beta chain variable domain of TCR clone 20146 (TRBV7-6, TRBJ2-1)
CASSSLAGEGNEQFF

SEQ ID NO: 40293 - protein, 14 aa, Homo sapiens
  CDR3 for alpha chain variable domain of TCR clone 20147 (TRAV8-4, TRAJ13)
RAVTLSGGYQKVTF

SEQ ID NO: 40294 - protein, 14 aa, Homo sapiens
  CDR3 for beta chain variable domain of TCR clone 20147 (TRBV7-2, TRBJ1-2)
CASSQTGSTYGYTF

SEQ ID NO: 40295 - protein, 12 aa, Homo sapiens
  CDR3 for alpha chain variable domain of TCR clone 20148 (TRAV2, TRAJ9)
CAVGAGGFKTVF

SEQ ID NO: 40296 - protein, 16 aa, Homo sapiens
  CDR3 for beta chain variable domain of TCR clone 20148 (TRBV13, TRBJ2-2)
CASSPRTGEHTGELFF

SEQ ID NO: 40297 - protein, 11 aa, Homo sapiens
  CDR3 for alpha chain variable domain of TCR clone 20149 (TRAV13-2, TRAJ15)
CVLRAGTALIF

SEQ ID NO: 40298 - protein, 16 aa, Homo sapiens
  CDR3 for beta chain variable domain of TCR clone 20149 (TRBV24-1, TRBJ2-2)
CATSDSSPGLGGELFF

SEQ ID NO: 40299 - protein, 13 aa, Homo sapiens
  CDR3 for alpha chain variable domain of TCR clone 20150 (TRAV21, TRAJ57)
CAVTQGGSEKRVF

SEQ ID NO: 40300 - protein, 16 aa, Homo sapiens
  CDR3 for beta chain variable domain of TCR clone 20150 (TRBV29-1, TRBJ2-7)
CSVEDAEDGTAYEQYF

SEQ ID NO: 40301 - protein, 15 aa, Homo sapiens
  CDR3 for alpha chain variable domain of TCR clone 20151 (TRAV3, TRAJ4)
CAVRDGTGGYNKLLF

SEQ ID NO: 40302 - protein, 16 aa, Homo sapiens
  CDR3 for beta chain variable domain of TCR clone 20151 (TRBV27, TRBJ2-2)
CASSSSGVSNTGELFF

SEQ ID NO: 40303 - protein, 12 aa, Homo sapiens
  CDR3 for alpha chain variable domain of TCR clone 20152 (TRAV41, TRAJ58)
CAVETSGSRLTF

SEQ ID NO: 40304 - protein, 15 aa, Homo sapiens
  CDR3 for beta chain variable domain of TCR clone 20152 (TRBV29-1, TRBJ2-6)
CSVGDRGSGANALTF

SEQ ID NO: 40305 - protein, 17 aa, Homo sapiens
  CDR3 for alpha chain variable domain of TCR clone 20153 (TRAV26-1, TRAJ53)
CIVRGDDSGGSNYKLTF

SEQ ID NO: 40306 - protein, 15 aa, Homo sapiens
  CDR3 for beta chain variable domain of TCR clone 20153 (TRBV20-1, TRBJ2-7)
CSARVPAAYFYEQYF

SEQ ID NO: 40307 - protein, 14 aa, Homo sapiens
  CDR3 for alpha chain variable domain of TCR clone 20154 (TRAV20, TRAJ42)
CAVHAGGSQGNLIF

SEQ ID NO: 40308 - protein, 14 aa, Homo sapiens
  CDR3 for beta chain variable domain of TCR clone 20154 (TRBV28, TRBJ1-2)
CASRIQGANYGYTF

SEQ ID NO: 40309 - protein, 12 aa, Homo sapiens
  CDR3 for alpha chain variable domain of TCR clone 20155 (TRAV12-3, TRAJ17)
CAMTLTGNKLTF

SEQ ID NO: 40310 - protein, 13 aa, Homo sapiens
  CDR3 for beta chain variable domain of TCR clone 20155 (TRBV20-1, TRBJ1-1)
CSARVGGNTEAFF

SEQ ID NO: 40311 - protein, 14 aa, Homo sapiens
  CDR3 for alpha chain variable domain of TCR clone 20156 (TRAV12-2, TRAJ4)
CAEDLSGGYNKLIL

SEQ ID NO: 40312 - protein, 10 aa, Homo sapiens
  CDR3 for beta chain variable domain of TCR clone 20156 (TRBV7-9, TRBJ1-2)
CASSLKQNYG

SEQ ID NO: 40313 - protein, 15 aa, Homo sapiens
  CDR3 for alpha chain variable domain of TCR clone 20157 (TRAV26-1, TRAJ48)
CIVRVGDFGNEKLNF

SEQ ID NO: 40314 - protein, 16 aa, Homo sapiens
  CDR3 for beta chain variable domain of TCR clone 20157 (TRBV4-1, TRBJ2-3)
CASSQRAGGLTDTQYF

SEQ ID NO: 40315 - protein, 14 aa, Homo sapiens
  CDR3 for alpha chain variable domain of TCR clone 20158 (TRAV8-4, TRAJ9)
CAVRLNTGGFKTIF

SEQ ID NO: 40316 - protein, 15 aa, Homo sapiens
  CDR3 for beta chain variable domain of TCR clone 20158 (TRBV10-2, TRBJ2-6)
CASSEQGTGANVLTF

SEQ ID NO: 40317 - protein, 16 aa, Homo sapiens
  CDR3 for alpha chain variable domain of TCR clone 20159 (TRAV3, TRAJ34)
CAVRARGTPTSSSLGL

SEQ ID NO: 40318 - protein, 13 aa, Homo sapiens
  CDR3 for beta chain variable domain of TCR clone 20159 (TRBV2, TRBJ1-1)
CARNPTGGFHAFF

SEQ ID NO: 40319 - protein, 13 aa, Homo sapiens
  CDR3 for alpha chain variable domain of TCR clone 20160 (TRAV12-3, TRAJ13)
CAMSSGSYQKVTF

SEQ ID NO: 40320 - protein, 14 aa, Homo sapiens
  CDR3 for beta chain variable domain of TCR clone 20160 (TRBV2, TRBJ2-1)
CASRTGSSYNEQFF

SEQ ID NO: 40321 - protein, 14 aa, Homo sapiens
  CDR3 for alpha chain variable domain of TCR clone 20161 (TRAV12-2, TRAJ13)
CAVKKTGGYQKVTF

SEQ ID NO: 40322 - protein, 16 aa, Homo sapiens
  CDR3 for beta chain variable domain of TCR clone 20161 (TRBV24-1, TRBJ2-3)
CATSDPGTGATDTQYF

SEQ ID NO: 40323 - protein, 10 aa, Homo sapiens
  CDR3 for alpha chain variable domain of TCR clone 20162 (TRAV23/DV6, TRAJ57)
CAASSTLSQG

SEQ ID NO: 40324 - protein, 14 aa, Homo sapiens
  CDR3 for beta chain variable domain of TCR clone 20162 (TRBV25-1, TRBJ1-1)
CASTHLGGNTEAFC

SEQ ID NO: 40325 - protein, 10 aa, Homo sapiens
  CDR3 for alpha chain variable domain of TCR clone 20163 (TRAV12-3, TRAJ18)
CAMSAEAQPW

SEQ ID NO: 40326 - protein, 13 aa, Homo sapiens
  CDR3 for beta chain variable domain of TCR clone 20163 (TRBV15, TRBJ1-6)
CATSGGLNSPLLF

SEQ ID NO: 40327 - protein, 12 aa, Homo sapiens
  CDR3 for alpha chain variable domain of TCR clone 20164 (TRAV8-6, TRAJ7)
CAVFYGNNRLAF

SEQ ID NO: 40328 - protein, 14 aa, Homo sapiens
  CDR3 for beta chain variable domain of TCR clone 20164 (TRBV19, TRBJ2-1)
CASSRLASINEQFF

SEQ ID NO: 40329 - protein, 12 aa, Homo sapiens
  CDR3 for alpha chain variable domain of TCR clone 20165 (TRAV12-3, TRAJ36)
CAAPRGANNLFF

SEQ ID NO: 40330 - protein, 15 aa, Homo sapiens
  CDR3 for beta chain variable domain of TCR clone 20165 (TRBV11-2, TRBJ1-3)
CASSLDGTVGNTIYF

SEQ ID NO: 40331 - protein, 15 aa, Homo sapiens
  CDR3 for alpha chain variable domain of TCR clone 20166 (TRAV26-1, TRAJ29)
CIVRVEGSGNTPLVL

SEQ ID NO: 40332 - protein, 15 aa, Homo sapiens
  CDR3 for beta chain variable domain of TCR clone 20166 (TRBV7-9, TRBJ1-5)
CASSQGHQPNQPQHF

SEQ ID NO: 40333 - protein, 15 aa, Homo sapiens
  CDR3 for alpha chain variable domain of TCR clone 20167 (TRAV17, TRAJ35)
CATAFVIGLGNVLHC

SEQ ID NO: 40334 - protein, 15 aa, Homo sapiens
  CDR3 for beta chain variable domain of TCR clone 20167 (TRBV7-9, TRBJ2-7)
CASSLALAEAYEQYF

SEQ ID NO: 40335 - protein, 14 aa, Homo sapiens
  CDR3 for alpha chain variable domain of TCR clone 20168 (TRAV12-2, TRAJ17)
CAVLFKAAGNKLTF

SEQ ID NO: 40336 - protein, 17 aa, Homo sapiens
  CDR3 for beta chain variable domain of TCR clone 20168 (TRBV20-1, TRBJ2-2)
CSASGSGQGGLTVELFF

SEQ ID NO: 40337 - protein, 13 aa, Homo sapiens
  CDR3 for alpha chain variable domain of TCR clone 20169 (TRAV13-1, TRAJ40)
CVAISPGTYKYIF

SEQ ID NO: 40338 - protein, 13 aa, Homo sapiens
  CDR3 for beta chain variable domain of TCR clone 20169 (TRBV10-3, TRBJ2-7)
CAIRAGGPHEQYF

SEQ ID NO: 40339 - protein, 14 aa, Homo sapiens
  CDR3 for alpha chain variable domain of TCR clone 20170 (TRAV13-1, TRAJ26)
CAASSAHYGQNFFF

SEQ ID NO: 40340 - protein, 17 aa, Homo sapiens
  CDR3 for beta chain variable domain of TCR clone 20170 (TRBV25-1, TRBJ2-5)
CASSRRGGRGGQETQYF

SEQ ID NO: 40341 - protein, 16 aa, Homo sapiens
  CDR3 for alpha chain variable domain of TCR clone 20171 (TRAV1-2, TRAJ10)
CAVRGVLTGGGNKLTF

SEQ ID NO: 40342 - protein, 17 aa, Homo sapiens
  CDR3 for beta chain variable domain of TCR clone 20171 (TRBV11-2, TRBJ2-1)
CASSLYPPGVEYNEQFF

SEQ ID NO: 40343 - protein, 13 aa, Homo sapiens
  CDR3 for alpha chain variable domain of TCR clone 20172 (TRAV20, TRAJ37)
CAGCSSNTGKLIF

SEQ ID NO: 40344 - protein, 11 aa, Homo sapiens
  CDR3 for beta chain variable domain of TCR clone 20172 (TRBV12-4, TRBJ2-3)
CASTATDTQCF

SEQ ID NO: 40345 - protein, 13 aa, Homo sapiens
  CDR3 for alpha chain variable domain of TCR clone 20173 (TRAV27, TRAJ41)
CAGEGNSGYALNF

SEQ ID NO: 40346 - protein, 14 aa, Homo sapiens
  CDR3 for beta chain variable domain of TCR clone 20173 (TRBV7-2, TRBJ1-1)
CASSFLAGTTEAFF

SEQ ID NO: 40347 - protein, 13 aa, Homo sapiens
  CDR3 for alpha chain variable domain of TCR clone 20174 (TRAV21, TRAJ27)
CAARPGNAGKSTF

SEQ ID NO: 40348 - protein, 15 aa, Homo sapiens
  CDR3 for beta chain variable domain of TCR clone 20174 (TRBV11-3, TRBJ2-3)
CASLKDGREGDTQYF

SEQ ID NO: 40349 - protein, 13 aa, Homo sapiens
  CDR3 for alpha chain variable domain of TCR clone 20175 (TRAV21, TRAJ57)
CAVTQGGSEKLVF

SEQ ID NO: 40350 - protein, 16 aa, Homo sapiens
  CDR3 for beta chain variable domain of TCR clone 20175 (TRBV29-1, TRBJ2-7)
CSVEDAEDGTDYEQYF

SEQ ID NO: 40351 - protein, 11 aa, Homo sapiens
  CDR3 for alpha chain variable domain of TCR clone 20176 (TRAV3, TRAJ21)
CAVGNFNKFYF

SEQ ID NO: 40352 - protein, 15 aa, Homo sapiens
  CDR3 for beta chain variable domain of TCR clone 20176 (TRBV19, TRBJ1-1)
CASTSGQIQNTEAFF

SEQ ID NO: 40353 - protein, 14 aa, Homo sapiens
  CDR3 for alpha chain variable domain of TCR clone 20177 (TRAV38-1, TRAJ45)
CAYYSGGGADGLTF

SEQ ID NO: 40354 - protein, 20 aa, Homo sapiens
  CDR3 for beta chain variable domain of TCR clone 20177 (TRBV28, TRBJ2-1)
CASTPIGRLPGLAGGNEQFF

SEQ ID NO: 40355 - protein, 15 aa, Homo sapiens
  CDR3 for alpha chain variable domain of TCR clone 20178 (TRAV2, TRAJ9)
CAVEDRGTGGFKTLF

SEQ ID NO: 40356 - protein, 16 aa, Homo sapiens
  CDR3 for beta chain variable domain of TCR clone 20178 (TRBV24-1, TRBJ2-3)
CATSDPGTGATDTQYF

SEQ ID NO: 40357 - protein, 10 aa, Homo sapiens
  CDR3 for alpha chain variable domain of TCR clone 20179 (TRAV30, TRAJ48)
CGIGNEKLTF

SEQ ID NO: 40358 - protein, 15 aa, Homo sapiens
  CDR3 for beta chain variable domain of TCR clone 20179 (TRBV28, TRBJ2-5)
CASSPPWSYQETRYF

SEQ ID NO: 40359 - protein, 14 aa, Homo sapiens
  CDR3 for alpha chain variable domain of TCR clone 20180 (TRAV1-2, TRAJ16)
CAVNRFSDGQKLLF

SEQ ID NO: 40360 - protein, 16 aa, Homo sapiens
  CDR3 for beta chain variable domain of TCR clone 20180 (TRBV6-6, TRBJ2-1)
CASSYSFSGSYNEQFF

SEQ ID NO: 40361 - protein, 17 aa, Homo sapiens
  CDR3 for alpha chain variable domain of TCR clone 20181 (TRAV3, TRAJ6)
CAVRDGPRAGGSYIPTF

SEQ ID NO: 40362 - protein, 18 aa, Homo sapiens
  CDR3 for beta chain variable domain of TCR clone 20181 (TRBV7-9, TRBJ2-7)
CASSLTTSGSRTRYEQYF

SEQ ID NO: 40363 - protein, 13 aa, Homo sapiens
  CDR3 for alpha chain variable domain of TCR clone 20182 (TRAV20, TRAJ37)
CAGGSSNTGKLIF

SEQ ID NO: 40364 - protein, 11 aa, Homo sapiens
  CDR3 for beta chain variable domain of TCR clone 20182 (TRBV12-4, TRBJ2-3)
CASTATDTQYF

SEQ ID NO: 40365 - protein, 18 aa, Homo sapiens
  CDR3 for alpha chain variable domain of TCR clone 20183 (TRAV1-2, TRAJ18)
CAVRDMGDRGSTLGRLYF

SEQ ID NO: 40366 - protein, 16 aa, Homo sapiens
  CDR3 for beta chain variable domain of TCR clone 20183 (TRBV29-1, TRBJ1-2)
CSVEANRDIANYGYAF

SEQ ID NO: 40367 - protein, 17 aa, Homo sapiens
  CDR3 for alpha chain variable domain of TCR clone 20184 (TRAV20, TRAJ28)
CAVQGGILWGWELPTHF

SEQ ID NO: 40368 - protein, 15 aa, Homo sapiens
  CDR3 for beta chain variable domain of TCR clone 20184 (TRBV7-2, TRBJ2-7)
CASSLSSGRTYEQYF

SEQ ID NO: 40369 - protein, 14 aa, Homo sapiens
  CDR3 for alpha chain variable domain of TCR clone 20185 (TRAV26-1, TRAJ34)
CIVRVAYKTDKLIF

SEQ ID NO: 40370 - protein, 15 aa, Homo sapiens
  CDR3 for beta chain variable domain of TCR clone 20185 (TRBV20-1, TRBJ2-7)
CSARVPAAYFYEQYF

SEQ ID NO: 40371 - protein, 15 aa, Homo sapiens
  CDR3 for alpha chain variable domain of TCR clone 20186 (TRAV8-3, TRAJ27)
CAVGPSRTNAGKSTF

SEQ ID NO: 40372 - protein, 15 aa, Homo sapiens
  CDR3 for beta chain variable domain of TCR clone 20186 (TRBV7-2, TRBJ2-1)
CASSSGLAGGNEQFF

SEQ ID NO: 40373 - protein, 14 aa, Homo sapiens
  CDR3 for alpha chain variable domain of TCR clone 20187 (TRAV12-2, TRAJ5)
CAVNRSTGRRALTF

SEQ ID NO: 40374 - protein, 12 aa, Homo sapiens
  CDR3 for beta chain variable domain of TCR clone 20187 (TRBV19, TRBJ1-5)
RASSIAQQPQHF

SEQ ID NO: 40375 - protein, 13 aa, Homo sapiens
  CDR3 for alpha chain variable domain of TCR clone 20188 (TRAV13-1, TRAJ5)
CAASDTGRRALTF

SEQ ID NO: 40376 - protein, 12 aa, Homo sapiens
  CDR3 for beta chain variable domain of TCR clone 20188 (TRBV28, TRBJ2-3)
CASSSYRDTQYF

SEQ ID NO: 40377 - protein, 14 aa, Homo sapiens
  CDR3 for alpha chain variable domain of TCR clone 20189 (TRAV29/DV5, TRAJ36)
CAARRKNGANNLFF

SEQ ID NO: 40378 - protein, 14 aa, Homo sapiens
  CDR3 for beta chain variable domain of TCR clone 20189 (TRBV12-5, TRBJ2-5)
CASGSRTHQETQYF

SEQ ID NO: 40379 - protein, 14 aa, Homo sapiens
  CDR3 for alpha chain variable domain of TCR clone 20190 (TRAV1-2, TRAJ8)
CAVREDTGFQKLVF

SEQ ID NO: 40380 - protein, 17 aa, Homo sapiens
  CDR3 for beta chain variable domain of TCR clone 20190 (TRBV4-1, TRBJ1-4)
CASSQEGPRGVEEKLFF

SEQ ID NO: 40381 - protein, 15 aa, Homo sapiens
  CDR3 for alpha chain variable domain of TCR clone 20191 (TRAV26-1, TRAJ44)
CVVRANTGTASKLTF

SEQ ID NO: 40382 - protein, 16 aa, Homo sapiens
  CDR3 for beta chain variable domain of TCR clone 20191 (TRBV7-7, TRBJ2-1)
CASSLASGTSYNEQFF

SEQ ID NO: 40383 - protein, 15 aa, Homo sapiens
  CDR3 for alpha chain variable domain of TCR clone 20192 (TRAV35, TRAJ58)
CTGRRQETSGSRLTF

SEQ ID NO: 40384 - protein, 11 aa, Homo sapiens
  CDR3 for beta chain variable domain of TCR clone 20192 (TRBV11-2, TRBJ1-1)
CASSINTEAFF

SEQ ID NO: 40385 - protein, 17 aa, Homo sapiens
  CDR3 for alpha chain variable domain of TCR clone 20193 (TRAV3, TRAJ28)
CAVRDGYSGAGSYQLTF

SEQ ID NO: 40386 - protein, 14 aa, Homo sapiens
  CDR3 for beta chain variable domain of TCR clone 20193 (TRBV19, TRBJ2-7)
CASRPGTGVNEQYF

SEQ ID NO: 40387 - protein, 13 aa, Homo sapiens
  CDR3 for alpha chain variable domain of TCR clone 20194 (TRAV8-6, TRAJ3)
CAVSAGSASKIIF

SEQ ID NO: 40388 - protein, 13 aa, Homo sapiens
  CDR3 for beta chain variable domain of TCR clone 20194 (TRBV27, TRBJ1-3)
CASSFLRGNTIYF

SEQ ID NO: 40389 - protein, 15 aa, Homo sapiens
  CDR3 for alpha chain variable domain of TCR clone 20195 (TRAV8-3, TRAJ11)
CAVGLLSSGYSTLTF

SEQ ID NO: 40390 - protein, 16 aa, Homo sapiens
  CDR3 for beta chain variable domain of TCR clone 20195 (TRBV7-9, TRBJ1-2)
CASSLGFSSGEDGYTF

SEQ ID NO: 40391 - protein, 14 aa, Homo sapiens
  CDR3 for alpha chain variable domain of TCR clone 20196 (TRAV17, TRAJ6)
CATDASGGSYIPTF

SEQ ID NO: 40392 - protein, 19 aa, Homo sapiens
  CDR3 for beta chain variable domain of TCR clone 20196 (TRBV4-3, TRBJ2-7)
CASSQDFIGWQVTPYEQYF

SEQ ID NO: 40393 - protein, 15 aa, Homo sapiens
  CDR3 for alpha chain variable domain of TCR clone 20197 (TRAV21, TRAJ24)
CAARSSTDSWGKLQF

SEQ ID NO: 40394 - protein, 13 aa, Homo sapiens
  CDR3 for beta chain variable domain of TCR clone 20197 (TRBV11-2, TRBJ2-5)
CASSSTGEENQYF

SEQ ID NO: 40395 - protein, 16 aa, Homo sapiens
  CDR3 for alpha chain variable domain of TCR clone 20198 (TRAV30, TRAJ24)
CGTEIVDADSWGRFQF

SEQ ID NO: 40396 - protein, 16 aa, Homo sapiens
  CDR3 for beta chain variable domain of TCR clone 20198 (TRBV2, TRBJ1-3)
CASSGGAGRSGNTIYF

SEQ ID NO: 40397 - protein, 12 aa, Homo sapiens
  CDR3 for alpha chain variable domain of TCR clone 20199 (TRAV3, TRAJ39)
CAVIEWSNMLTF

SEQ ID NO: 40398 - protein, 14 aa, Homo sapiens
  CDR3 for beta chain variable domain of TCR clone 20199 (TRBV7-8, TRBJ2-3)
CASSFPDGQDTQYS

SEQ ID NO: 40399 - protein, 15 aa, Homo sapiens
  CDR3 for alpha chain variable domain of TCR clone 20200 (TRAV3, TRAJ5)
CAMRDLDTGRRALTF

SEQ ID NO: 40400 - protein, 13 aa, Homo sapiens
  CDR3 for beta chain variable domain of TCR clone 20200 (TRBV12-4, TRBJ2-7)
CASSPTETYEQYF

SEQ ID NO: 40401 - protein, 15 aa, Homo sapiens
  CDR3 for alpha chain variable domain of TCR clone 20201 (TRAV23/DV6, TRAJ33)
CAASNSGGGNYQLIW

SEQ ID NO: 40402 - protein, 12 aa, Homo sapiens
  CDR3 for beta chain variable domain of TCR clone 20201 (TRBV7-3, TRBJ2-1)
CASSFINNEQFF

SEQ ID NO: 40403 - protein, 13 aa, Homo sapiens
  CDR3 for alpha chain variable domain of TCR clone 20202 (TRAV35, TRAJ42)
CAGFPGSQGNLIF

SEQ ID NO: 40404 - protein, 13 aa, Homo sapiens
  CDR3 for beta chain variable domain of TCR clone 20202 (TRBV29-1, TRBJ2-1)
CSVEGGRVSEQFF

SEQ ID NO: 40405 - protein, 13 aa, Homo sapiens
  CDR3 for alpha chain variable domain of TCR clone 20203 (TRAV2, TRAJ36)
CAVDHTGANNLFF

SEQ ID NO: 40406 - protein, 12 aa, Homo sapiens
  CDR3 for beta chain variable domain of TCR clone 20203 (TRBV19, TRBJ1-1)
CASMNRYTEAFF

SEQ ID NO: 40407 - protein, 12 aa, Homo sapiens
  CDR3 for alpha chain variable domain of TCR clone 20204 (TRAV8-1, TRAJ44)
CAVTGTASKLTF

SEQ ID NO: 40408 - protein, 12 aa, Homo sapiens
  CDR3 for beta chain variable domain of TCR clone 20204 (TRBV20-1, TRBJ2-1)
CSAYRGAGEQFF

SEQ ID NO: 40409 - protein, 14 aa, Homo sapiens
  CDR3 for alpha chain variable domain of TCR clone 20205 (TRAV16, TRAJ33)
CALSAMDSNYQLIW

SEQ ID NO: 40410 - protein, 12 aa, Homo sapiens
  CDR3 for beta chain variable domain of TCR clone 20205 (TRBV5-1, TRBJ1-2)
CASSQDAYGYTF

SEQ ID NO: 40411 - protein, 12 aa, Homo sapiens
  CDR3 for alpha chain variable domain of TCR clone 20206 (TRAV21, TRAJ33)
CAKMDSNYQLIW

SEQ ID NO: 40412 - protein, 14 aa, Homo sapiens
  CDR3 for beta chain variable domain of TCR clone 20206 (TRBV2, TRBJ2-7)
CASSLPSGGYEQYF

SEQ ID NO: 40413 - protein, 18 aa, Homo sapiens
  CDR3 for alpha chain variable domain of TCR clone 20207 (TRAV29/DV5, TRAJ52)
CAAGFRGAGGTSYGKLTF

SEQ ID NO: 40414 - protein, 14 aa, Homo sapiens
  CDR3 for beta chain variable domain of TCR clone 20207 (TRBV4-1, TRBJ2-2)
CASSQAVNTGELFF

SEQ ID NO: 40415 - protein, 14 aa, Homo sapiens
  CDR3 for alpha chain variable domain of TCR clone 20208 (TRAV8-4, TRAJ13)
CAVTLSGGYQKFTF

SEQ ID NO: 40416 - protein, 14 aa, Homo sapiens
  CDR3 for beta chain variable domain of TCR clone 20208 (TRBV7-2, TRBJ1-2)
CASSQTGSTYGYTF

SEQ ID NO: 40417 - protein, 16 aa, Homo sapiens
  CDR3 for alpha chain variable domain of TCR clone 20209 (TRAV3, TRAJ21)
CAVRDIERGNFNKFYF

SEQ ID NO: 40418 - protein, 16 aa, Homo sapiens
  CDR3 for beta chain variable domain of TCR clone 20209 (TRBV12-4, TRBJ1-5)
CASSRPVGGSNQTQHF

SEQ ID NO: 40419 - protein, 13 aa, Homo sapiens
  CDR3 for alpha chain variable domain of TCR clone 20210 (TRAV3, TRAJ21)
CSVREPDFNKFYF

SEQ ID NO: 40420 - protein, 13 aa, Homo sapiens
  CDR3 for beta chain variable domain of TCR clone 20210 (TRBV9, TRBJ2-1)
CASSPSGGNEQFF

SEQ ID NO: 40421 - protein, 14 aa, Homo sapiens
  CDR3 for alpha chain variable domain of TCR clone 20211 (TRAV13-1, TRAJ44)
CSAKATGTASKLTF

SEQ ID NO: 40422 - protein, 17 aa, Homo sapiens
  CDR3 for beta chain variable domain of TCR clone 20211 (TRBV7-3, TRBJ2-3)
CASSLMKRMRGADTQYF

SEQ ID NO: 40423 - protein, 12 aa, Homo sapiens
  CDR3 for alpha chain variable domain of TCR clone 20212 (TRAV2, TRAJ9)
CAVGAGGFKTIF

SEQ ID NO: 40424 - protein, 16 aa, Homo sapiens
  CDR3 for beta chain variable domain of TCR clone 20212 (TRBV13, TRBJ2-2)
CASSPRTGVHTGELFF

SEQ ID NO: 40425 - protein, 14 aa, Homo sapiens
  CDR3 for alpha chain variable domain of TCR clone 20213 (TRAV13-1, TRAJ35)
CAASKGGFGNVLHC

SEQ ID NO: 40426 - protein, 13 aa, Homo sapiens
  CDR3 for beta chain variable domain of TCR clone 20213 (TRBV7-3, TRBJ1-1)
CTSSQDWGAEAFF

SEQ ID NO: 40427 - protein, 14 aa, Homo sapiens
  CDR3 for alpha chain variable domain of TCR clone 20214 (TRAV1-2, TRAJ33)
CAVGAPDSNYQLIW

SEQ ID NO: 40428 - protein, 14 aa, Homo sapiens
  CDR3 for beta chain variable domain of TCR clone 20214 (TRBV11-3, TRBJ1-6)
CASSFSGGDSPLHF

SEQ ID NO: 40429 - protein, 14 aa, Homo sapiens
  CDR3 for alpha chain variable domain of TCR clone 20215 (TRAV23/DV6, TRAJ4)
CAALSSGGYNKLIF

SEQ ID NO: 40430 - protein, 14 aa, Homo sapiens
  CDR3 for beta chain variable domain of TCR clone 20215 (TRBV20-1, TRBJ2-7)
CSAKTGTGGYEQYF

SEQ ID NO: 40431 - protein, 13 aa, Homo sapiens
  CDR3 for alpha chain variable domain of TCR clone 20216 (TRAV16, TRAJ48)
CSPLNFGDEKLTF

SEQ ID NO: 40432 - protein, 11 aa, Homo sapiens
  CDR3 for beta chain variable domain of TCR clone 20216 (TRBV7-9, TRBJ2-3)
CASSPTDTQYF

SEQ ID NO: 40433 - protein, 14 aa, Homo sapiens
  CDR3 for alpha chain variable domain of TCR clone 20217 (TRAV38-1, TRAJ45)
CAYYSGGGADRLTF

SEQ ID NO: 40434 - protein, 20 aa, Homo sapiens
  CDR3 for beta chain variable domain of TCR clone 20217 (TRBV28, TRBJ2-1)
CASTPIGRSPGLAGGNEQFF

SEQ ID NO: 40435 - protein, 19 aa, Homo sapiens
  CDR3 for alpha chain variable domain of TCR clone 20218 (TRAV2, TRAJ20)
ILQVREADAAVYRDCKLCF

SEQ ID NO: 40436 - protein, 13 aa, Homo sapiens
  CDR3 for beta chain variable domain of TCR clone 20218 (TRBV7-3, TRBJ1-1)
CASSQDWGAEAFF

SEQ ID NO: 40437 - protein, 14 aa, Homo sapiens
  CDR3 for alpha chain variable domain of TCR clone 20219 (TRAV8-1, TRAJ5)
CAVRTDTGRRALTF

SEQ ID NO: 40438 - protein, 14 aa, Homo sapiens
  CDR3 for beta chain variable domain of TCR clone 20219 (TRBV7-8, TRBJ2-3)
RASSFPDGQDTQYF

SEQ ID NO: 40439 - protein, 12 aa, Homo sapiens
  CDR3 for alpha chain variable domain of TCR clone 20220 (TRAV21, TRAJ33)
CAKMDSNYQVIW

SEQ ID NO: 40440 - protein, 14 aa, Homo sapiens
  CDR3 for beta chain variable domain of TCR clone 20220 (TRBV2, TRBJ2-7)
CASSLTSGGYEQYF

SEQ ID NO: 40441 - protein, 15 aa, Homo sapiens
  CDR3 for alpha chain variable domain of TCR clone 20221 (TRAV25, TRAJ52)
CAGRPGGTSYGKLTF

SEQ ID NO: 40442 - protein, 17 aa, Homo sapiens
  CDR3 for beta chain variable domain of TCR clone 20221 (TRBV7-8, TRBJ2-6)
CASSAGTGGAGDNVLTF

SEQ ID NO: 40443 - protein, 17 aa, Homo sapiens
  CDR3 for alpha chain variable domain of TCR clone 20222 (TRAV8-6, TRAJ58)
CAVSSWVGETSGSRLTF

SEQ ID NO: 40444 - protein, 13 aa, Homo sapiens
  CDR3 for beta chain variable domain of TCR clone 20222 (TRBV10-3, TRBJ2-7)
CASKLAVNYEQYF

SEQ ID NO: 40445 - protein, 18 aa, Homo sapiens
  CDR3 for alpha chain variable domain of TCR clone 20223 (TRAV21, TRAJ52)
CAVRPSPAGGTSYGKLTF

SEQ ID NO: 40446 - protein, 17 aa, Homo sapiens
  CDR3 for beta chain variable domain of TCR clone 20223 (TRBV13, TRBJ2-3)
CANSLSRVAGGRNTQYF

SEQ ID NO: 40447 - protein, 14 aa, Homo sapiens
  CDR3 for alpha chain variable domain of TCR clone 20224 (TRAV12-2, TRAJ13)
CAVKKTGGYQKVTF

SEQ ID NO: 40448 - protein, 16 aa, Homo sapiens
  CDR3 for beta chain variable domain of TCR clone 20224 (TRBV28, TRBJ2-7)
CTSVPAKRGGVYEQYF

SEQ ID NO: 40449 - protein, 17 aa, Homo sapiens
  CDR3 for alpha chain variable domain of TCR clone 20225 (TRAV3, TRAJ6)
CAVRDGPRAGGSYIPTF

SEQ ID NO: 40450 - protein, 16 aa, Homo sapiens
  CDR3 for beta chain variable domain of TCR clone 20225 (TRBV7-3, TRBJ2-1)
CASSLEGYRSYNEQFF

SEQ ID NO: 40451 - protein, 14 aa, Homo sapiens
  CDR3 for alpha chain variable domain of TCR clone 20226 (TRAV1-2, TRAJ16)
CAVNRFSDGQKLLF

SEQ ID NO: 40452 - protein, 12 aa, Homo sapiens
  CDR3 for beta chain variable domain of TCR clone 20226 (TRBV5-1, TRBJ1-1)
CASSFGNTEAFF

SEQ ID NO: 40453 - protein, 11 aa, Homo sapiens
  CDR3 for alpha chain variable domain of TCR clone 20227 (TRAV2, TRAJ13)
CASGGYQKVAF

SEQ ID NO: 40454 - protein, 16 aa, Homo sapiens
  CDR3 for beta chain variable domain of TCR clone 20227 (TRBV6-1, TRBJ2-5)
CASSETLDRGAETQYF

SEQ ID NO: 40455 - protein, 14 aa, Homo sapiens
  CDR3 for alpha chain variable domain of TCR clone 20228 (TRAV8-3, TRAJ4)
CAVGAAGGYNKLIF

SEQ ID NO: 40456 - protein, 15 aa, Homo sapiens
  CDR3 for beta chain variable domain of TCR clone 20228 (TRBV6-5, TRBJ2-1)
CASSYDAGAGNEQSF

SEQ ID NO: 40457 - protein, 13 aa, Homo sapiens
  CDR3 for alpha chain variable domain of TCR clone 20229 (TRAV12-2, TRAJ50)
CAVIVTSYDKVIF

SEQ ID NO: 40458 - protein, 14 aa, Homo sapiens
  CDR3 for beta chain variable domain of TCR clone 20229 (TRBV9, TRBJ2-1)
CASSVEPRGKEQFF

SEQ ID NO: 40459 - protein, 18 aa, Homo sapiens
  CDR3 for alpha chain variable domain of TCR clone 20230 (TRAV13-1, TRAJ52)
CAASKRSAGGTSYVKLTF

SEQ ID NO: 40460 - protein, 13 aa, Homo sapiens
  CDR3 for beta chain variable domain of TCR clone 20230 (TRBV12-4, TRBJ1-2)
CASSLRQGKGYTF

SEQ ID NO: 40461 - protein, 11 aa, Homo sapiens
  CDR3 for alpha chain variable domain of TCR clone 20231 (TRAV2, TRAJ13)
CASGGYQKVTF

SEQ ID NO: 40462 - protein, 15 aa, Homo sapiens
  CDR3 for beta chain variable domain of TCR clone 20231 (TRBV7-3, TRBJ2-2)
CASSETGQGTGELFF

SEQ ID NO: 40463 - protein, 15 aa, Homo sapiens
  CDR3 for alpha chain variable domain of TCR clone 20232 (TRAV8-3, TRAJ27)
CAVGPSKTNAGKSTF

SEQ ID NO: 40464 - protein, 15 aa, Homo sapiens
  CDR3 for beta chain variable domain of TCR clone 20232 (TRBV7-2, TRBJ2-1)
CASSSGIAGGNEQFF

SEQ ID NO: 40465 - protein, 12 aa, Homo sapiens
  CDR3 for alpha chain variable domain of TCR clone 20233 (TRAV27, TRAJ35)
CAGADFGNVLHC

SEQ ID NO: 40466 - protein, 16 aa, Homo sapiens
  CDR3 for beta chain variable domain of TCR clone 20233 (TRBV6-1, TRBJ2-1)
CASILRQGGSYNEQFF

SEQ ID NO: 40467 - protein, 11 aa, Homo sapiens
  CDR3 for alpha chain variable domain of TCR clone 20234 (TRAV21, TRAJ34)
CAYYNTDKLIF

SEQ ID NO: 40468 - protein, 13 aa, Homo sapiens
  CDR3 for beta chain variable domain of TCR clone 20234 (TRBV7-6, TRBJ1-2)
CASSLVADYGYTF

SEQ ID NO: 40469 - protein, 16 aa, Homo sapiens
  CDR3 for alpha chain variable domain of TCR clone 20235 (TRAV30, TRAJ24)
CGTEIVDADSWGKFQF

SEQ ID NO: 40470 - protein, 15 aa, Homo sapiens
  CDR3 for beta chain variable domain of TCR clone 20235 (TRBV5-1, TRBJ1-1)
CASSLAPRGNTEAFS

SEQ ID NO: 40471 - protein, 14 aa, Homo sapiens
  CDR3 for alpha chain variable domain of TCR clone 20236 (TRAV26-1, TRAJ39)
CIVRGSRAGNMLTF

SEQ ID NO: 40472 - protein, 15 aa, Homo sapiens
  CDR3 for beta chain variable domain of TCR clone 20236 (TRBV7-9, TRBJ1-5)
CASSQGNQPNQPQHF

SEQ ID NO: 40473 - protein, 12 aa, Homo sapiens
  CDR3 for alpha chain variable domain of TCR clone 20237 (TRAV17, TRAJ12)
CATLRSSYKLIF

SEQ ID NO: 40474 - protein, 16 aa, Homo sapiens
  CDR3 for beta chain variable domain of TCR clone 20237 (TRBV28, TRBJ2-7)
SASSLFFETGGPEQYF

SEQ ID NO: 40475 - protein, 12 aa, Homo sapiens
  CDR3 for alpha chain variable domain of TCR clone 20238 (TRAV13-1, TRAJ49)
CAAPNTGNQFYS

SEQ ID NO: 40476 - protein, 17 aa, Homo sapiens
  CDR3 for beta chain variable domain of TCR clone 20238 (TRBV25-1, TRBJ2-7)
CASSDARVVFSSYEQYF

SEQ ID NO: 40477 - protein, 17 aa, Homo sapiens
  CDR3 for alpha chain variable domain of TCR clone 20239 (TRAV4, TRAJ31)
CLVARMPDSCLEMELSW

SEQ ID NO: 40478 - protein, 15 aa, Homo sapiens
  CDR3 for beta chain variable domain of TCR clone 20239 (TRBV7-8, TRBJ1-2)
CASSLVRDGGLGYTF

SEQ ID NO: 40479 - protein, 18 aa, Homo sapiens
  CDR3 for alpha chain variable domain of TCR clone 20240 (TRAV13-1, TRAJ10)
CAASKGRAVTGGGNKLTF

SEQ ID NO: 40480 - protein, 15 aa, Homo sapiens
  CDR3 for beta chain variable domain of TCR clone 20240 (TRBV27, TRBJ2-7)
CASSPIVTGAYEQYF

SEQ ID NO: 40481 - protein, 16 aa, Homo sapiens
  CDR3 for alpha chain variable domain of TCR clone 20241 (TRAV20, TRAJ22)
CAVQASSPGSARQLTF

SEQ ID NO: 40482 - protein, 13 aa, Homo sapiens
  CDR3 for beta chain variable domain of TCR clone 20241 (TRBV7-2, TRBJ2-5)
CASSQTSVETQYF

SEQ ID NO: 40483 - protein, 15 aa, Homo sapiens
  CDR3 for alpha chain variable domain of TCR clone 20242 (TRAV3, TRAJ4)
CAVRDGTGGYNKLMF

SEQ ID NO: 40484 - protein, 16 aa, Homo sapiens
  CDR3 for beta chain variable domain of TCR clone 20242 (TRBV27, TRBJ2-2)
CASSSSGVSNTGELFF

SEQ ID NO: 40485 - protein, 17 aa, Homo sapiens
  CDR3 for alpha chain variable domain of TCR clone 20243 (TRAV3, TRAJ6)
CAVRDGPRAGGSYIATF

SEQ ID NO: 40486 - protein, 14 aa, Homo sapiens
  CDR3 for beta chain variable domain of TCR clone 20243 (TRBV7-2, TRBJ2-7)
CASSPKTSFYEQYF

SEQ ID NO: 40487 - protein, 18 aa, Homo sapiens
  CDR3 for alpha chain variable domain of TCR clone 20244 (TRAV13-1, TRAJ45)
CAANAVADSGGGADGLTF

SEQ ID NO: 40488 - protein, 13 aa, Homo sapiens
  CDR3 for beta chain variable domain of TCR clone 20244 (TRBV7-9, TRBJ1-2)
CASSLKQNYGYTF

SEQ ID NO: 40489 - protein, 15 aa, Homo sapiens
  CDR3 for alpha chain variable domain of TCR clone 20245 (TRAV2, TRAJ15)
CAVEDRGQARTALIF

SEQ ID NO: 40490 - protein, 13 aa, Homo sapiens
  CDR3 for beta chain variable domain of TCR clone 20245 (TRBV10-2, TRBJ2-7)
CASGASGGYEQYF

SEQ ID NO: 40491 - protein, 15 aa, Homo sapiens
  CDR3 for alpha chain variable domain of TCR clone 20246 (TRAV38-1, TRAJ37)
CAFIHGSGNTGKLIF

SEQ ID NO: 40492 - protein, 12 aa, Homo sapiens
  CDR3 for beta chain variable domain of TCR clone 20246 (TRBV7-9, TRBJ2-7)
CASSSGSYEQYF

SEQ ID NO: 40493 - protein, 13 aa, Homo sapiens
  CDR3 for alpha chain variable domain of TCR clone 20247 (TRAV36/DV7, TRAJ54)
CAVLIQGAQKLVF

SEQ ID NO: 40494 - protein, 13 aa, Homo sapiens
  CDR3 for beta chain variable domain of TCR clone 20247 (TRBV29-1, TRBJ2-4)
CSVGEGTKNMQYF

SEQ ID NO: 40495 - protein, 12 aa, Homo sapiens
  CDR3 for alpha chain variable domain of TCR clone 20248 (TRAV8-1, TRAJ6)
CASSGGSYVPTF

SEQ ID NO: 40496 - protein, 12 aa, Homo sapiens
  CDR3 for beta chain variable domain of TCR clone 20248 (TRBV19, TRBJ1-1)
CASMNRYTEAFF

SEQ ID NO: 40497 - protein, 15 aa, Homo sapiens
  CDR3 for alpha chain variable domain of TCR clone 20249 (TRAV26-1, TRAJ22)
CIVRVSFWFCKATDL

SEQ ID NO: 40498 - protein, 13 aa, Homo sapiens
  CDR3 for beta chain variable domain of TCR clone 20249 (TRBV7-9, TRBJ1-2)
CASSLKQNCGYTF

SEQ ID NO: 40499 - protein, 16 aa, Homo sapiens
  CDR3 for alpha chain variable domain of TCR clone 20250 (TRAV8-6, TRAJ28)
CAVTSKPGAGSTNSLS

SEQ ID NO: 40500 - protein, 16 aa, Homo sapiens
  CDR3 for beta chain variable domain of TCR clone 20250 (TRBV12-4, TRBJ2-5)
CASSWRPSGDLETQYF

SEQ ID NO: 40501 - protein, 13 aa, Homo sapiens
  CDR3 for alpha chain variable domain of TCR clone 20251 (TRAV23/DV6, TRAJ22)
CAPYSGSARQLTF

SEQ ID NO: 40502 - protein, 15 aa, Homo sapiens
  CDR3 for beta chain variable domain of TCR clone 20251 (TRBV11-2, TRBJ1-6)
CASGLDPWAVSPLHF

SEQ ID NO: 40503 - protein, 12 aa, Homo sapiens
  CDR3 for alpha chain variable domain of TCR clone 20252 (TRAV8-3, TRAJ20)
CAVGANDYKLSF

SEQ ID NO: 40504 - protein, 16 aa, Homo sapiens
  CDR3 for beta chain variable domain of TCR clone 20252 (TRBV19, TRBJ2-2)
CASRAPGTGATGELFF

SEQ ID NO: 40505 - protein, 10 aa, Homo sapiens
  CDR3 for alpha chain variable domain of TCR clone 20253 (TRAV1-2, TRAJ20)
CACNDYKLSF

SEQ ID NO: 40506 - protein, 15 aa, Homo sapiens
  CDR3 for beta chain variable domain of TCR clone 20253 (TRBV6-3, TRBJ2-7)
CASSSPGTVFYEQYF

SEQ ID NO: 40507 - protein, 14 aa, Homo sapiens
  CDR3 for alpha chain variable domain of TCR clone 20254 (TRAV8-4, TRAJ17)
CAVSDQAAGNKLTF

SEQ ID NO: 40508 - protein, 15 aa, Homo sapiens
  CDR3 for beta chain variable domain of TCR clone 20254 (TRBV7-2, TRBJ1-6)
CASSLGPDRGMPLHF

SEQ ID NO: 40509 - protein, 12 aa, Homo sapiens
  CDR3 for alpha chain variable domain of TCR clone 20255 (TRAV3, TRAJ26)
CAVRDYGQNFVF

SEQ ID NO: 40510 - protein, 16 aa, Homo sapiens
  CDR3 for beta chain variable domain of TCR clone 20255 (TRBV11-2, TRBJ1-2)
CASSPSGREANYGDTF

SEQ ID NO: 40511 - protein, 14 aa, Homo sapiens
  CDR3 for alpha chain variable domain of TCR clone 20256 (TRAV26-1, TRAJ26)
CIVRATFLGQSFVF

SEQ ID NO: 40512 - protein, 16 aa, Homo sapiens
  CDR3 for beta chain variable domain of TCR clone 20256 (TRBV12-4, TRBJ2-7)
CASRSTGTGPSYEQYF

SEQ ID NO: 40513 - protein, 13 aa, Homo sapiens
  CDR3 for alpha chain variable domain of TCR clone 20257 (TRAV1-2, TRAJ9)
YAVLNTGGFKTIF

SEQ ID NO: 40514 - protein, 14 aa, Homo sapiens
  CDR3 for beta chain variable domain of TCR clone 20257 (TRBV20-1, TRBJ2-3)
CSARGGTSTDTQYF

SEQ ID NO: 40515 - protein, 16 aa, Homo sapiens
  CDR3 for alpha chain variable domain of TCR clone 20258 (TRAV27, TRAJ13)
CAGAKSDSGGYQRVTF

SEQ ID NO: 40516 - protein, 15 aa, Homo sapiens
  CDR3 for beta chain variable domain of TCR clone 20258 (TRBV29-1, TRBJ2-1)
CSVGRHALFYNEQFF

SEQ ID NO: 40517 - protein, 14 aa, Homo sapiens
  CDR3 for alpha chain variable domain of TCR clone 20259 (TRAV12-3, TRAJ9)
CAMSPNTGGFNTIF

SEQ ID NO: 40518 - protein, 12 aa, Homo sapiens
  CDR3 for beta chain variable domain of TCR clone 20259 (TRBV19, TRBJ1-5)
CASSIAQQPQHF

SEQ ID NO: 40519 - protein, 15 aa, Homo sapiens
  CDR3 for alpha chain variable domain of TCR clone 20260 (TRAV38-1, TRAJ57)
CAFMDSQGGSEKLVS

SEQ ID NO: 40520 - protein, 16 aa, Homo sapiens
  CDR3 for beta chain variable domain of TCR clone 20260 (TRBV10-3, TRBJ2-1)
CAIRGGGRGDYNEQFF

SEQ ID NO: 40521 - protein, 12 aa, Homo sapiens
  CDR3 for alpha chain variable domain of TCR clone 20261 (TRAV21, TRAJ33)
CAKMDSNYQLIW

SEQ ID NO: 40522 - protein, 17 aa, Homo sapiens
  CDR3 for beta chain variable domain of TCR clone 20261 (TRBV13, TRBJ2-3)
CASSLSRVAGGRNTQYF

SEQ ID NO: 40523 - protein, 14 aa, Homo sapiens
  CDR3 for alpha chain variable domain of TCR clone 20262 (TRAV8-2, TRAJ4)
CVVSPSGGYNKLIF

SEQ ID NO: 40524 - protein, 15 aa, Homo sapiens
  CDR3 for beta chain variable domain of TCR clone 20262 (TRBV4-1, TRBJ1-4)
CASSDTGGTNEKPFF

SEQ ID NO: 40525 - protein, 18 aa, Homo sapiens
  CDR3 for alpha chain variable domain of TCR clone 20263 (TRAV21, TRAJ52)
CAVRPSPAGGTSYGKLTF

SEQ ID NO: 40526 - protein, 15 aa, Homo sapiens
  CDR3 for beta chain variable domain of TCR clone 20263 (TRBV10-2, TRBJ2-6)
CASSEQGTGANVLTF

SEQ ID NO: 40527 - protein, 13 aa, Homo sapiens
  CDR3 for alpha chain variable domain of TCR clone 20264 (TRAV2, TRAJ15)
CAVASRAGTALIF

SEQ ID NO: 40528 - protein, 16 aa, Homo sapiens
  CDR3 for beta chain variable domain of TCR clone 20264 (TRBV7-8, TRBJ2-4)
CASSAERTLAKNIQYF

SEQ ID NO: 40529 - protein, 17 aa, Homo sapiens
  CDR3 for alpha chain variable domain of TCR clone 20265 (TRAV13-1, TRAJ52)
CAAGRNAGGTSYGELTF

SEQ ID NO: 40530 - protein, 13 aa, Homo sapiens
  CDR3 for beta chain variable domain of TCR clone 20265 (TRBV7-2, TRBJ1-1)
CASNLKGAKVAFF

SEQ ID NO: 40531 - protein, 15 aa, Homo sapiens
  CDR3 for alpha chain variable domain of TCR clone 20266 (TRAV35, TRAJ40)
YAGQLGTSGTYKYIF

SEQ ID NO: 40532 - protein, 14 aa, Homo sapiens
  CDR3 for beta chain variable domain of TCR clone 20266 (TRBV7-3, TRBJ2-1)
CASSLAGGTNEQFF

SEQ ID NO: 40533 - protein, 13 aa, Homo sapiens
  CDR3 for alpha chain variable domain of TCR clone 20267 (TRAV23/DV6, TRAJ22)
CAPYSGSARQLTF

SEQ ID NO: 40534 - protein, 15 aa, Homo sapiens
  CDR3 for beta chain variable domain of TCR clone 20267 (TRBV11-2, TRBJ1-6)
CASSLDPWAVSPLLF

SEQ ID NO: 40535 - protein, 14 aa, Homo sapiens
  CDR3 for alpha chain variable domain of TCR clone 20268 (TRAV26-1, TRAJ34)
CIVRVAYNTDKLIF

SEQ ID NO: 40536 - protein, 15 aa, Homo sapiens
  CDR3 for beta chain variable domain of TCR clone 20268 (TRBV20-1, TRBJ2-7)
CSARVPAAYFNEQYF

SEQ ID NO: 40537 - protein, 15 aa, Homo sapiens
  CDR3 for alpha chain variable domain of TCR clone 20269 (TRAV25, TRAJ52)
CAWRPGGTSYGKLTF

SEQ ID NO: 40538 - protein, 17 aa, Homo sapiens
  CDR3 for beta chain variable domain of TCR clone 20269 (TRBV7-8, TRBJ2-6)
CASSAGTGGAGANVLTF

SEQ ID NO: 40539 - protein, 13 aa, Homo sapiens
  CDR3 for alpha chain variable domain of TCR clone 20270 (TRAV27, TRAJ39)
CAGDTPAGNMLTF

SEQ ID NO: 40540 - protein, 15 aa, Homo sapiens
  CDR3 for beta chain variable domain of TCR clone 20270 (TRBV20-1, TRBJ2-1)
CSARRLAGGYNEQFF

SEQ ID NO: 40541 - protein, 15 aa, Homo sapiens
  CDR3 for alpha chain variable domain of TCR clone 20271 (TRAV12-3, TRAJ6)
CAMNATTGGSYIPTF

SEQ ID NO: 40542 - protein, 16 aa, Homo sapiens
  CDR3 for beta chain variable domain of TCR clone 20271 (TRBV20-1, TRBJ1-2)
CSASMGQGVANYGYTF

SEQ ID NO: 40543 - protein, 11 aa, Homo sapiens
  CDR3 for alpha chain variable domain of TCR clone 20272 (TRAV23/DV6, TRAJ21)
CAANNFNKFYF

SEQ ID NO: 40544 - protein, 17 aa, Homo sapiens
  CDR3 for beta chain variable domain of TCR clone 20272 (TRBV28, TRBJ2-1)
CASSFPLTSGKANEQFF

SEQ ID NO: 40545 - protein, 11 aa, Homo sapiens
  CDR3 for alpha chain variable domain of TCR clone 20273 (TRAV12-3, TRAJ43)
CAMSVSNDMRF

SEQ ID NO: 40546 - protein, 13 aa, Homo sapiens
  CDR3 for beta chain variable domain of TCR clone 20273 (TRBV20-1, TRBJ1-1)
CSAPRGGGTEAFF

SEQ ID NO: 40547 - protein, 13 aa, Homo sapiens
  CDR3 for alpha chain variable domain of TCR clone 20274 (TRAV8-3, TRAJ21)
CAVGAYNFNKFYF

SEQ ID NO: 40548 - protein, 14 aa, Homo sapiens
  CDR3 for beta chain variable domain of TCR clone 20274 (TRBV19, TRBJ2-1)
CASPTFVLSGEQFF

SEQ ID NO: 40549 - protein, 14 aa, Homo sapiens
  CDR3 for alpha chain variable domain of TCR clone 20275 (TRAV12-3, TRAJ10)
SHLPLTGGGNKLTF

SEQ ID NO: 40550 - protein, 15 aa, Homo sapiens
  CDR3 for beta chain variable domain of TCR clone 20275 (TRBV7-9, TRBJ1-4)
CASSARTGGNEKLFF

SEQ ID NO: 40551 - protein, 15 aa, Homo sapiens
  CDR3 for alpha chain variable domain of TCR clone 20276 (TRAV3, TRAJ43)
CAVRGVGTMTCALEQ

SEQ ID NO: 40552 - protein, 12 aa, Homo sapiens
  CDR3 for beta chain variable domain of TCR clone 20276 (TRBV5-1, TRBJ2-7)
CASSLDSYEQYF

SEQ ID NO: 40553 - protein, 11 aa, Homo sapiens
  CDR3 for alpha chain variable domain of TCR clone 20277 (TRAV1-2, TRAJ11)
CAVRGYSTLTF

SEQ ID NO: 40554 - protein, 13 aa, Homo sapiens
  CDR3 for beta chain variable domain of TCR clone 20277 (TRBV20-1, TRBJ1-2)
CSAPRSGRYGYTF

SEQ ID NO: 40555 - protein, 14 aa, Homo sapiens
  CDR3 for alpha chain variable domain of TCR clone 20278 (TRAV2, TRAJ37)
CAVDFTSNTGKLIF

SEQ ID NO: 40556 - protein, 15 aa, Homo sapiens
  CDR3 for beta chain variable domain of TCR clone 20278 (TRBV20-1, TRBJ1-1)
CSASRGVTVNTEAFF

SEQ ID NO: 40557 - protein, 13 aa, Homo sapiens
  CDR3 for alpha chain variable domain of TCR clone 20279 (TRAV21, TRAJ57)
CAVTQGESEKLVF

SEQ ID NO: 40558 - protein, 16 aa, Homo sapiens
  CDR3 for beta chain variable domain of TCR clone 20279 (TRBV29-1, TRBJ2-7)
CSVEDAEDGTAYEQYF

SEQ ID NO: 40559 - protein, 14 aa, Homo sapiens
  CDR3 for alpha chain variable domain of TCR clone 20280 (TRAV12-2, TRAJ9)
CAVNTEGGGFKTIF

SEQ ID NO: 40560 - protein, 14 aa, Homo sapiens
  CDR3 for beta chain variable domain of TCR clone 20280 (TRBV27, TRBJ2-5)
CASSSLKGWETQYF

SEQ ID NO: 40561 - protein, 11 aa, Homo sapiens
  CDR3 for alpha chain variable domain of TCR clone 20281 (TRAV21, TRAJ11)
CAVNGYSTLTF

SEQ ID NO: 40562 - protein, 11 aa, Homo sapiens
  CDR3 for beta chain variable domain of TCR clone 20281 (TRBV19, TRBJ1-1)
CASSTGSEAFF

SEQ ID NO: 40563 - protein, 13 aa, Homo sapiens
  CDR3 for alpha chain variable domain of TCR clone 20282 (TRAV21, TRAJ49)
CAVRQSPGNQFYF

SEQ ID NO: 40564 - protein, 13 aa, Homo sapiens
  CDR3 for beta chain variable domain of TCR clone 20282 (TRBV6-6, TRBJ1-5)
CASRAYQDQPQHF

SEQ ID NO: 40565 - protein, 13 aa, Homo sapiens
  CDR3 for alpha chain variable domain of TCR clone 20283 (TRAV2, TRAJ15)
CAVASQAGTALIF

SEQ ID NO: 40566 - protein, 18 aa, Homo sapiens
  CDR3 for beta chain variable domain of TCR clone 20283 (TRBV11-2, TRBJ2-3)
CASSLGGASRGAPNTQYF

SEQ ID NO: 40567 - protein, 13 aa, Homo sapiens
  CDR3 for alpha chain variable domain of TCR clone 20284 (TRAV2, TRAJ40)
CAVVTSGTYKYIF

SEQ ID NO: 40568 - protein, 15 aa, Homo sapiens
  CDR3 for beta chain variable domain of TCR clone 20284 (TRBV7-2, TRBJ2-1)
CASSSGLAGGNEQFF

SEQ ID NO: 40569 - protein, 14 aa, Homo sapiens
  CDR3 for alpha chain variable domain of TCR clone 20285 (TRAV12-2, TRAJ13)
CAVKKTGGYQKVTF

SEQ ID NO: 40570 - protein, 15 aa, Homo sapiens
  CDR3 for beta chain variable domain of TCR clone 20285 (TRBV27, TRBJ2-1)
CASSNGGGSSNEQYF

SEQ ID NO: 40571 - protein, 15 aa, Homo sapiens
  CDR3 for alpha chain variable domain of TCR clone 20286 (TRAV17, TRAJ56)
CATDANTGANSKLTF

SEQ ID NO: 40572 - protein, 14 aa, Homo sapiens
  CDR3 for beta chain variable domain of TCR clone 20286 (TRBV19, TRBJ1-5)
CASSLGTGGQTQHF

SEQ ID NO: 40573 - protein, 12 aa, Homo sapiens
  CDR3 for alpha chain variable domain of TCR clone 20287 (TRAV13-2, TRAJ23)
CAEHHRGGKLIF

SEQ ID NO: 40574 - protein, 13 aa, Homo sapiens
  CDR3 for beta chain variable domain of TCR clone 20287 (TRBV7-9, TRBJ2-3)
CASSPGSTDTQYF

SEQ ID NO: 40575 - protein, 13 aa, Homo sapiens
  CDR3 for alpha chain variable domain of TCR clone 20288 (TRAV12-1, TRAJ16)
CVVNGPDGQKLLF

SEQ ID NO: 40576 - protein, 13 aa, Homo sapiens
  CDR3 for beta chain variable domain of TCR clone 20288 (TRBV2, TRBJ1-1)
CARNPTGGLHAFF

SEQ ID NO: 40577 - protein, 15 aa, Homo sapiens
  CDR3 for alpha chain variable domain of TCR clone 20289 (TRAV3, TRAJ20)
CAARDIKLSDYKLSF

SEQ ID NO: 40578 - protein, 15 aa, Homo sapiens
  CDR3 for beta chain variable domain of TCR clone 20289 (TRBV7-9, TRBJ1-6)
CASSSPGRGNSPLHF

SEQ ID NO: 40579 - protein, 14 aa, Homo sapiens
  CDR3 for alpha chain variable domain of TCR clone 20290 (TRAV1-2, TRAJ16)
CAVNRFSDGQRLLF

SEQ ID NO: 40580 - protein, 16 aa, Homo sapiens
  CDR3 for beta chain variable domain of TCR clone 20290 (TRBV20-1, TRBJ1-4)
CSAPGQGLLTNEKLFF

SEQ ID NO: 40581 - protein, 14 aa, Homo sapiens
  CDR3 for alpha chain variable domain of TCR clone 20291 (TRAV13-1, TRAJ44)
CAAKATGTASKLTF

SEQ ID NO: 40582 - protein, 16 aa, Homo sapiens
  CDR3 for beta chain variable domain of TCR clone 20291 (TRBV5-4, TRBJ2-3)
CASQQPGAGGADTQYF

SEQ ID NO: 40583 - protein, 23 aa, Homo sapiens
  CDR3 for alpha chain variable domain of TCR clone 20292 (TRAV26-1, )
CIADDAGNNHIQNPDPAVYQLRD

SEQ ID NO: 40584 - protein, 13 aa, Homo sapiens
  CDR3 for beta chain variable domain of TCR clone 20292 (TRBV20-1, TRBJ1-1)
CSARGGGNTEAFF

SEQ ID NO: 40585 - protein, 14 aa, Homo sapiens
  CDR3 for alpha chain variable domain of TCR clone 20293 (TRAV30, TRAJ26)
CGTETVSYGQNFVF

SEQ ID NO: 40586 - protein, 13 aa, Homo sapiens
  CDR3 for beta chain variable domain of TCR clone 20293 (TRBV19, TRBJ1-3)
CASRLSLGNTIYF

SEQ ID NO: 40587 - protein, 16 aa, Homo sapiens
  CDR3 for alpha chain variable domain of TCR clone 20294 (TRAV16, TRAJ4)
CAPSRMFSGGYNKLIF

SEQ ID NO: 40588 - protein, 16 aa, Homo sapiens
  CDR3 for beta chain variable domain of TCR clone 20294 (TRBV24-1, TRBJ2-3)
CATSDPGTGATDTQYF

SEQ ID NO: 40589 - protein, 16 aa, Homo sapiens
  CDR3 for alpha chain variable domain of TCR clone 20295 (TRAV12-3, TRAJ57)
CAMSYGTQGGSEKLVF

SEQ ID NO: 40590 - protein, 15 aa, Homo sapiens
  CDR3 for beta chain variable domain of TCR clone 20295 (TRBV9, TRBJ1-6)
CASSVAGTGDSPLHF

SEQ ID NO: 40591 - protein, 15 aa, Homo sapiens
  CDR3 for alpha chain variable domain of TCR clone 20296 (TRAV9-2, TRAJ10)
CALKVLTGGGNKLTF

SEQ ID NO: 40592 - protein, 15 aa, Homo sapiens
  CDR3 for beta chain variable domain of TCR clone 20296 (TRBV20-1, TRBJ2-5)
CSASGTSGGGETQYF

SEQ ID NO: 40593 - protein, 17 aa, Homo sapiens
  CDR3 for alpha chain variable domain of TCR clone 20297 (TRAV3, TRAJ42)
CAVRDRDYGGSQGNLIV

SEQ ID NO: 40594 - protein, 15 aa, Homo sapiens
  CDR3 for beta chain variable domain of TCR clone 20297 (TRBV6-6, TRBJ2-7)
CASSYSYGGSYEQYF

SEQ ID NO: 40595 - protein, 14 aa, Homo sapiens
  CDR3 for alpha chain variable domain of TCR clone 20298 (TRAV26-1, TRAJ26)
CIVRATFLGQNFVF

SEQ ID NO: 40596 - protein, 16 aa, Homo sapiens
  CDR3 for beta chain variable domain of TCR clone 20298 (TRBV12-4, TRBJ2-7)
CASSSTGTGPSYEQYF

SEQ ID NO: 40597 - protein, 13 aa, Homo sapiens
  CDR3 for alpha chain variable domain of TCR clone 20299 (TRAV12-1, TRAJ40)
CVAPTSGTYKYIF

SEQ ID NO: 40598 - protein, 16 aa, Homo sapiens
  CDR3 for beta chain variable domain of TCR clone 20299 (TRBV7-9, TRBJ1-2)
CASSLGFSSGEDGYTF

SEQ ID NO: 40599 - protein, 13 aa, Homo sapiens
  CDR3 for alpha chain variable domain of TCR clone 20300 (TRAV13-2, TRAJ48)
CAEMDFGNENLTF

SEQ ID NO: 40600 - protein, 15 aa, Homo sapiens
  CDR3 for beta chain variable domain of TCR clone 20300 (TRBV7-9, TRBJ1-6)
CASSSPGRGNSPLHF

SEQ ID NO: 40601 - protein, 12 aa, Homo sapiens
  CDR3 for alpha chain variable domain of TCR clone 20301 (TRAV12-3, TRAJ17)
CAMTLTGNKLTF

SEQ ID NO: 40602 - protein, 15 aa, Homo sapiens
  CDR3 for beta chain variable domain of TCR clone 20301 (TRBV7-2, TRBJ2-1)
CASTHGTGIYNEQFF

SEQ ID NO: 40603 - protein, 13 aa, Homo sapiens
  CDR3 for alpha chain variable domain of TCR clone 20302 (TRAV17, TRAJ9)
CSTDYTGGFKTIF

SEQ ID NO: 40604 - protein, 16 aa, Homo sapiens
  CDR3 for beta chain variable domain of TCR clone 20302 (TRBV7-7, TRBJ2-1)
CASSLASGTSYNEQFF

SEQ ID NO: 40605 - protein, 15 aa, Homo sapiens
  CDR3 for alpha chain variable domain of TCR clone 20303 (TRAV2, TRAJ9)
CAVAASNTGGFKTIF

SEQ ID NO: 40606 - protein, 14 aa, Homo sapiens
  CDR3 for beta chain variable domain of TCR clone 20303 (TRBV7-8, TRBJ2-5)
CASSATGGQETQYF

SEQ ID NO: 40607 - protein, 14 aa, Homo sapiens
  CDR3 for alpha chain variable domain of TCR clone 20304 (TRAV1-2, TRAJ16)
CAVNRFSDGQKLLF

SEQ ID NO: 40608 - protein, 15 aa, Homo sapiens
  CDR3 for beta chain variable domain of TCR clone 20304 (TRBV9, TRBJ1-6)
CASSVAGIGDSPLHF

SEQ ID NO: 40609 - protein, 15 aa, Homo sapiens
  CDR3 for alpha chain variable domain of TCR clone 20305 (TRAV17, TRAJ57)
CATGPSQGGSEKLVF

SEQ ID NO: 40610 - protein, 13 aa, Homo sapiens
  CDR3 for beta chain variable domain of TCR clone 20305 (TRBV7-9, TRBJ1-2)
CASSLKQNYGYTF

SEQ ID NO: 40611 - protein, 13 aa, Homo sapiens
  CDR3 for alpha chain variable domain of TCR clone 20306 (TRAV21, TRAJ27)
CAARPGNAGKSTF

SEQ ID NO: 40612 - protein, 14 aa, Homo sapiens
  CDR3 for beta chain variable domain of TCR clone 20306 (TRBV7-6, TRBJ2-3)
CASNLGTVTDTQYF

SEQ ID NO: 40613 - protein, 14 aa, Homo sapiens
  CDR3 for alpha chain variable domain of TCR clone 20307 (TRAV12-2, TRAJ40)
CAVKIPSGTYKYIF

SEQ ID NO: 40614 - protein, 14 aa, Homo sapiens
  CDR3 for beta chain variable domain of TCR clone 20307 (TRBV7-9, TRBJ2-1)
CASSPRDSLYEQFF

SEQ ID NO: 40615 - protein, 14 aa, Homo sapiens
  CDR3 for alpha chain variable domain of TCR clone 20308 (TRAV3, TRAJ36)
CAVRDGTGANSLFF

SEQ ID NO: 40616 - protein, 19 aa, Homo sapiens
  CDR3 for beta chain variable domain of TCR clone 20308 (TRBV19, TRBJ2-6)
CASTPTWGRAASGANVLTF

SEQ ID NO: 40617 - protein, 12 aa, Homo sapiens
  CDR3 for alpha chain variable domain of TCR clone 20309 (TRAV8-3, TRAJ26)
CAGDDYGQNFVF

SEQ ID NO: 40618 - protein, 15 aa, Homo sapiens
  CDR3 for beta chain variable domain of TCR clone 20309 (TRBV9, TRBJ2-1)
CASSLAGSSYNEQFF

SEQ ID NO: 40619 - protein, 11 aa, Homo sapiens
  CDR3 for alpha chain variable domain of TCR clone 20310 (TRAV12-3, TRAJ27)
CTMANAGKSTF

SEQ ID NO: 40620 - protein, 13 aa, Homo sapiens
  CDR3 for beta chain variable domain of TCR clone 20310 (TRBV20-1, TRBJ1-1)
CSARVGGNTEAFF

SEQ ID NO: 40621 - protein, 13 aa, Homo sapiens
  CDR3 for alpha chain variable domain of TCR clone 20311 (TRAV13-1, TRAJ21)
CAASIYNFNKFYF

SEQ ID NO: 40622 - protein, 14 aa, Homo sapiens
  CDR3 for beta chain variable domain of TCR clone 20311 (TRBV7-2, TRBJ2-7)
CASSPKTSFYEQYF

SEQ ID NO: 40623 - protein, 14 aa, Homo sapiens
  CDR3 for alpha chain variable domain of TCR clone 20312 (TRAV12-2, TRAJ13)
CAVKKTGGYQKVTF

SEQ ID NO: 40624 - protein, 14 aa, Homo sapiens
  CDR3 for beta chain variable domain of TCR clone 20312 (TRBV18, TRBJ2-7)
CASSPRGGAYEQYF

SEQ ID NO: 40625 - protein, 17 aa, Homo sapiens
  CDR3 for alpha chain variable domain of TCR clone 20313 (TRAV26-2, TRAJ42)
CILRDVGYGGSQGNLIF

SEQ ID NO: 40626 - protein, 16 aa, Homo sapiens
  CDR3 for beta chain variable domain of TCR clone 20313 (TRBV12-4, TRBJ2-7)
CTSSLIGGTGTYEQYF

SEQ ID NO: 40627 - protein, 15 aa, Homo sapiens
  CDR3 for alpha chain variable domain of TCR clone 20314 (TRAV2, TRAJ37)
CAVGDGSSNTGKLIF

SEQ ID NO: 40628 - protein, 13 aa, Homo sapiens
  CDR3 for beta chain variable domain of TCR clone 20314 (TRBV20-1, TRBJ2-7)
CSAQTGLSYEQYS

SEQ ID NO: 40629 - protein, 16 aa, Homo sapiens
  CDR3 for alpha chain variable domain of TCR clone 20315 (TRAV12-3, TRAJ28)
CAMRANSGAGSYQLTF

SEQ ID NO: 40630 - protein, 16 aa, Homo sapiens
  CDR3 for beta chain variable domain of TCR clone 20315 (TRBV7-2, TRBJ1-3)
CASSRLEASSGNTMYF

SEQ ID NO: 40631 - protein, 17 aa, Homo sapiens
  CDR3 for alpha chain variable domain of TCR clone 20316 (TRAV13-1, TRAJ52)
CAAGRNAGGTSYGKLTF

SEQ ID NO: 40632 - protein, 13 aa, Homo sapiens
  CDR3 for beta chain variable domain of TCR clone 20316 (TRBV7-2, TRBJ1-1)
CASNLKGAKVALF

SEQ ID NO: 40633 - protein, 14 aa, Homo sapiens
  CDR3 for alpha chain variable domain of TCR clone 20317 (TRAV12-2, TRAJ40)
CAVKIPSGTYKYIF

SEQ ID NO: 40634 - protein, 14 aa, Homo sapiens
  CDR3 for beta chain variable domain of TCR clone 20317 (TRBV18, TRBJ2-7)
CASSPRGGAYEQYF

SEQ ID NO: 40635 - protein, 17 aa, Homo sapiens
  CDR3 for alpha chain variable domain of TCR clone 20318 (TRAV21, TRAJ52)
CCEAFPAGGTSYGKLTF

SEQ ID NO: 40636 - protein, 16 aa, Homo sapiens
  CDR3 for beta chain variable domain of TCR clone 20318 (TRBV7-3, TRBJ2-1)
CASSLEGYRSYNEQFF

SEQ ID NO: 40637 - protein, 15 aa, Homo sapiens
  CDR3 for alpha chain variable domain of TCR clone 20319 (TRAV21, TRAJ53)
CATLNSGGSNYKLTS

SEQ ID NO: 40638 - protein, 16 aa, Homo sapiens
  CDR3 for beta chain variable domain of TCR clone 20319 (TRBV9, TRBJ2-1)
CASSVGGGGNYNEQFF

SEQ ID NO: 40639 - protein, 12 aa, Homo sapiens
  CDR3 for alpha chain variable domain of TCR clone 20320 (TRAV12-3, TRAJ17)
CAMTLTGNKLTF

SEQ ID NO: 40640 - protein, 15 aa, Homo sapiens
  CDR3 for beta chain variable domain of TCR clone 20320 (TRBV28, TRBJ1-3)
CASSMGWASGNTIYF

SEQ ID NO: 40641 - protein, 14 aa, Homo sapiens
  CDR3 for alpha chain variable domain of TCR clone 20321 (TRAV12-3, TRAJ10)
SHLPLTGGGNKLTF

SEQ ID NO: 40642 - protein, 15 aa, Homo sapiens
  CDR3 for beta chain variable domain of TCR clone 20321 (TRBV6-6, TRBJ2-7)
CASSYSYGGSYEQYF

SEQ ID NO: 40643 - protein, 14 aa, Homo sapiens
  CDR3 for alpha chain variable domain of TCR clone 20322 (TRAV30, TRAJ33)
CGTVAPRSNYQLIW

SEQ ID NO: 40644 - protein, 16 aa, Homo sapiens
  CDR3 for beta chain variable domain of TCR clone 20322 (TRBV3-1, TRBJ2-5)
CASSPGQLNGFGTQYF

SEQ ID NO: 40645 - protein, 11 aa, Homo sapiens
  CDR3 for alpha chain variable domain of TCR clone 20323 (TRAV2, TRAJ21)
CAVFDFNKFYF

SEQ ID NO: 40646 - protein, 14 aa, Homo sapiens
  CDR3 for beta chain variable domain of TCR clone 20323 (TRBV15, TRBJ2-3)
CATRSGTSTDTQYF

SEQ ID NO: 40647 - protein, 16 aa, Homo sapiens
  CDR3 for alpha chain variable domain of TCR clone 20324 (TRAV3, TRAJ18)
CAVRDGRGSTLGRLYL

SEQ ID NO: 40648 - protein, 15 aa, Homo sapiens
  CDR3 for beta chain variable domain of TCR clone 20324 (TRBV7-9, TRBJ1-6)
CASSSPGRGNSPLHF

SEQ ID NO: 40649 - protein, 14 aa, Homo sapiens
  CDR3 for alpha chain variable domain of TCR clone 20325 (TRAV12-1, TRAJ17)
CVVNYKAAGNKLTF

SEQ ID NO: 40650 - protein, 17 aa, Homo sapiens
  CDR3 for beta chain variable domain of TCR clone 20325 (TRBV20-1, TRBJ2-1)
CSASSPGLAGSYNEQFF

SEQ ID NO: 40651 - protein, 16 aa, Homo sapiens
  CDR3 for alpha chain variable domain of TCR clone 20326 (TRAV4, TRAJ22)
CLVGGLYSGSARQLTF

SEQ ID NO: 40652 - protein, 16 aa, Homo sapiens
  CDR3 for beta chain variable domain of TCR clone 20326 (TRBV7-9, TRBJ2-1)
CASSDVAGGSYNEQFF

SEQ ID NO: 40653 - protein, 12 aa, Homo sapiens
  CDR3 for alpha chain variable domain of TCR clone 20327 (TRAV2, TRAJ31)
CAVEDNNARLMF

SEQ ID NO: 40654 - protein, 13 aa, Homo sapiens
  CDR3 for beta chain variable domain of TCR clone 20327 (TRBV7-9, TRBJ1-2)
CASSLKQNYGYTF

SEQ ID NO: 40655 - protein, 14 aa, Homo sapiens
  CDR3 for alpha chain variable domain of TCR clone 20328 (TRAV12-2, TRAJ40)
CAAKIPSGAYKCIL

SEQ ID NO: 40656 - protein, 14 aa, Homo sapiens
  CDR3 for beta chain variable domain of TCR clone 20328 (TRBV20-1, TRBJ1-1)
CSAQTRIGGTEAFF

SEQ ID NO: 40657 - protein, 13 aa, Homo sapiens
  CDR3 for alpha chain variable domain of TCR clone 20329 (TRAV8-6, TRAJ50)
CAVIKTPYDKVIF

SEQ ID NO: 40658 - protein, 15 aa, Homo sapiens
  CDR3 for beta chain variable domain of TCR clone 20329 (TRBV7-2, TRBJ2-2)
CASRRPGQNTGELFF

SEQ ID NO: 40659 - protein, 18 aa, Homo sapiens
  CDR3 for alpha chain variable domain of TCR clone 20330 (TRAV12-3, TRAJ52)
CAMSVGGAGGTSCGKLTF

SEQ ID NO: 40660 - protein, 15 aa, Homo sapiens
  CDR3 for beta chain variable domain of TCR clone 20330 (TRBV27, TRBJ1-6)
CASSFDRGLGSPLHF

SEQ ID NO: 40661 - protein, 15 aa, Homo sapiens
  CDR3 for alpha chain variable domain of TCR clone 20331 (TRAV38-1, TRAJ57)
RAFMDSQGGSEKLVF

SEQ ID NO: 40662 - protein, 16 aa, Homo sapiens
  CDR3 for beta chain variable domain of TCR clone 20331 (TRBV10-3, TRBJ2-1)
CAIRGGGRGDYNEQFF

SEQ ID NO: 40663 - protein, 15 aa, Homo sapiens
  CDR3 for alpha chain variable domain of TCR clone 20332 (TRAV3, TRAJ3)
CAVRDRDSSASKIIF

SEQ ID NO: 40664 - protein, 18 aa, Homo sapiens
  CDR3 for beta chain variable domain of TCR clone 20332 (TRBV25-1, TRBJ1-2)
CASSGLQNGQGLIFGYSF

SEQ ID NO: 40665 - protein, 15 aa, Homo sapiens
  CDR3 for alpha chain variable domain of TCR clone 20333 (TRAV21, TRAJ45)
CAVSYSGGGADGLTF

SEQ ID NO: 40666 - protein, 13 aa, Homo sapiens
  CDR3 for beta chain variable domain of TCR clone 20333 (TRBV20-1, TRBJ2-5)
CSAATELQETQYS

SEQ ID NO: 40667 - protein, 11 aa, Homo sapiens
  CDR3 for alpha chain variable domain of TCR clone 20334 (TRAV3, TRAJ21)
CAVGNFNKFYF

SEQ ID NO: 40668 - protein, 16 aa, Homo sapiens
  CDR3 for beta chain variable domain of TCR clone 20334 (TRBV19, TRBJ2-1)
CASSKAGPSSSNEQFF

SEQ ID NO: 40669 - protein, 15 aa, Homo sapiens
  CDR3 for alpha chain variable domain of TCR clone 20335 (TRAV39, TRAJ32)
CAVDMEGGATNKLIF

SEQ ID NO: 40670 - protein, 19 aa, Homo sapiens
  CDR3 for beta chain variable domain of TCR clone 20335 (TRBV7-2, TRBJ1-4)
CASSFKAGPTTNEKLFLAV

SEQ ID NO: 40671 - protein, 18 aa, Homo sapiens
  CDR3 for alpha chain variable domain of TCR clone 20336 (TRAV9-2, TRAJ13)
CQTQRCTEPSGGYQKVTF

SEQ ID NO: 40672 - protein, 12 aa, Homo sapiens
  CDR3 for beta chain variable domain of TCR clone 20336 (TRBV5-7, TRBJ2-5)
CQQIERGGTQYF

SEQ ID NO: 40673 - protein, 11 aa, Homo sapiens
  CDR3 for alpha chain variable domain of TCR clone 20337 (TRAV1-2, TRAJ31)
CAVNNNARLMF

SEQ ID NO: 40674 - protein, 15 aa, Homo sapiens
  CDR3 for beta chain variable domain of TCR clone 20337 (TRBV28, TRBJ2-1)
CASSIIAGGRSEQFS

SEQ ID NO: 40675 - protein, 14 aa, Homo sapiens
  CDR3 for alpha chain variable domain of TCR clone 20338 (TRAV38-1, TRAJ40)
CALRPTSGTYKYIF

SEQ ID NO: 40676 - protein, 13 aa, Homo sapiens
  CDR3 for beta chain variable domain of TCR clone 20338 (TRBV7-3, TRBJ1-1)
CASSQDWGAEAFF

SEQ ID NO: 40677 - protein, 13 aa, Homo sapiens
  CDR3 for alpha chain variable domain of TCR clone 20339 (TRAV21, TRAJ36)
CAVIKTGANNLLF

SEQ ID NO: 40678 - protein, 13 aa, Homo sapiens
  CDR3 for beta chain variable domain of TCR clone 20339 (TRBV29-1, TRBJ2-3)
CSATRGGRDTQYF

SEQ ID NO: 40679 - protein, 14 aa, Homo sapiens
  CDR3 for alpha chain variable domain of TCR clone 20340 (TRAV3, TRAJ21)
CALGRGSTNFTLDL

SEQ ID NO: 40680 - protein, 14 aa, Homo sapiens
  CDR3 for beta chain variable domain of TCR clone 20340 (TRBV7-9, TRBJ2-4)
CASSLAMGGNMQYF

SEQ ID NO: 40681 - protein, 11 aa, Homo sapiens
  CDR3 for alpha chain variable domain of TCR clone 20341 (TRAV3, TRAJ21)
CAVGNFNKFYF

SEQ ID NO: 40682 - protein, 18 aa, Homo sapiens
  CDR3 for beta chain variable domain of TCR clone 20341 (TRBV11-2, TRBJ2-3)
CASSLGGASRGAPNTQYF

SEQ ID NO: 40683 - protein, 11 aa, Homo sapiens
  CDR3 for alpha chain variable domain of TCR clone 20342 (TRAV3, TRAJ21)
CAMGNFNKFYF

SEQ ID NO: 40684 - protein, 15 aa, Homo sapiens
  CDR3 for beta chain variable domain of TCR clone 20342 (TRBV29-1, TRBJ2-1)
CSVEGGPASYNEQFF

SEQ ID NO: 40685 - protein, 10 aa, Homo sapiens
  CDR3 for alpha chain variable domain of TCR clone 20343 (TRAV16, TRAJ22)
SAMYLRQLTF

SEQ ID NO: 40686 - protein, 15 aa, Homo sapiens
  CDR3 for beta chain variable domain of TCR clone 20343 (TRBV7-9, TRBJ1-6)
CASSSPGRGNSLLHF

SEQ ID NO: 40687 - protein, 11 aa, Homo sapiens
  CDR3 for alpha chain variable domain of TCR clone 20344 (TRAV1-2, TRAJ31)
CAVNNNARLMF

SEQ ID NO: 40688 - protein, 15 aa, Homo sapiens
  CDR3 for beta chain variable domain of TCR clone 20344 (TRBV28, TRBJ2-1)
CASSITAGGRSEQFF

SEQ ID NO: 40689 - protein, 15 aa, Homo sapiens
  CDR3 for alpha chain variable domain of TCR clone 20345 (TRAV12-3, TRAJ23)
CAMILIYNQGGRLIF

SEQ ID NO: 40690 - protein, 14 aa, Homo sapiens
  CDR3 for beta chain variable domain of TCR clone 20345 (TRBV27, TRBJ1-5)
CASSLDPRNQPQHF

SEQ ID NO: 40691 - protein, 13 aa, Homo sapiens
  CDR3 for alpha chain variable domain of TCR clone 20346 (TRAV38-1, TRAJ42)
CARWGGRQGNLIF

SEQ ID NO: 40692 - protein, 17 aa, Homo sapiens
  CDR3 for beta chain variable domain of TCR clone 20346 (TRBV20-1, TRBJ2-1)
CSARDPLAGVWDNEQFF

SEQ ID NO: 40693 - protein, 14 aa, Homo sapiens
  CDR3 for alpha chain variable domain of TCR clone 20347 (TRAV1-2, TRAJ8)
CAVREDTGFQKLVF

SEQ ID NO: 40694 - protein, 15 aa, Homo sapiens
  CDR3 for beta chain variable domain of TCR clone 20347 (TRBV13, TRBJ1-5)
CASSFGQGGVQPQHF

SEQ ID NO: 40695 - protein, 14 aa, Homo sapiens
  CDR3 for alpha chain variable domain of TCR clone 20348 (TRAV17, TRAJ16)
CSTADFSDGQKLLF

SEQ ID NO: 40696 - protein, 15 aa, Homo sapiens
  CDR3 for beta chain variable domain of TCR clone 20348 (TRBV18, TRBJ2-1)
CASSPPSASYNEQFF

SEQ ID NO: 40697 - protein, 13 aa, Homo sapiens
  CDR3 for alpha chain variable domain of TCR clone 20349 (TRAV17, TRAJ9)
CATDYTGGFKTIF

SEQ ID NO: 40698 - protein, 14 aa, Homo sapiens
  CDR3 for beta chain variable domain of TCR clone 20349 (TRBV19, TRBJ2-5)
CASSMTGQQDTQYF

SEQ ID NO: 40699 - protein, 14 aa, Homo sapiens
  CDR3 for alpha chain variable domain of TCR clone 20350 (TRAV8-2, TRAJ4)
CVVSPSGGYNKLIF

SEQ ID NO: 40700 - protein, 15 aa, Homo sapiens
  CDR3 for beta chain variable domain of TCR clone 20350 (TRBV4-1, TRBJ1-4)
CASSDTEGTNEKLFF

SEQ ID NO: 40701 - protein, 14 aa, Homo sapiens
  CDR3 for alpha chain variable domain of TCR clone 20351 (TRAV26-1, TRAJ45)
CIEVTGGGADGLTF

SEQ ID NO: 40702 - protein, 19 aa, Homo sapiens
  CDR3 for beta chain variable domain of TCR clone 20351 (TRBV19, TRBJ2-2)
CACTRPGLAGGRVTGELFF

SEQ ID NO: 40703 - protein, 13 aa, Homo sapiens
  CDR3 for alpha chain variable domain of TCR clone 20352 (TRAV27, TRAJ6)
CAGGTRGSYIPTF

SEQ ID NO: 40704 - protein, 13 aa, Homo sapiens
  CDR3 for beta chain variable domain of TCR clone 20352 (TRBV7-3, TRBJ1-1)
CASSQDWGAEAFF

SEQ ID NO: 40705 - protein, 16 aa, Homo sapiens
  CDR3 for alpha chain variable domain of TCR clone 20353 (TRAV3, TRAJ21)
CAVRDIERGNFNKFYF

SEQ ID NO: 40706 - protein, 13 aa, Homo sapiens
  CDR3 for beta chain variable domain of TCR clone 20353 (TRBV27, TRBJ2-7)
CASSLATGYEQYF

SEQ ID NO: 40707 - protein, 13 aa, Homo sapiens
  CDR3 for alpha chain variable domain of TCR clone 20354 (TRAV27, TRAJ56)
CAGKPGADSKLTF

SEQ ID NO: 40708 - protein, 18 aa, Homo sapiens
  CDR3 for beta chain variable domain of TCR clone 20354 (TRBV11-2, TRBJ2-3)
CASSLGGASRGAPNTQYF

SEQ ID NO: 40709 - protein, 16 aa, Homo sapiens
  CDR3 for alpha chain variable domain of TCR clone 20355 (TRAV1-2, TRAJ10)
CAVRGVLTGGGNKLTF

SEQ ID NO: 40710 - protein, 14 aa, Homo sapiens
  CDR3 for beta chain variable domain of TCR clone 20355 (TRBV20-1, TRBJ1-1)
CSARATGVGTEAFF

SEQ ID NO: 40711 - protein, 14 aa, Homo sapiens
  CDR3 for alpha chain variable domain of TCR clone 20356 (TRAV1-1, TRAJ27)
CAVIYNTNAGKSTF

SEQ ID NO: 40712 - protein, 15 aa, Homo sapiens
  CDR3 for beta chain variable domain of TCR clone 20356 (TRBV7-2, TRBJ2-1)
CASSSGLAGGNKQFF

SEQ ID NO: 40713 - protein, 15 aa, Homo sapiens
  CDR3 for alpha chain variable domain of TCR clone 20357 (TRAV12-2, TRAJ43)
CASDMRFGAGTRLTV

SEQ ID NO: 40714 - protein, 18 aa, Homo sapiens
  CDR3 for beta chain variable domain of TCR clone 20357 (TRBV20-1, TRBJ2-3)
CSASGLAGGPGTTDTQYF

SEQ ID NO: 40715 - protein, 14 aa, Homo sapiens
  CDR3 for alpha chain variable domain of TCR clone 20358 (TRAV8-4, TRAJ13)
CAVTLSGGYQKVTF

SEQ ID NO: 40716 - protein, 14 aa, Homo sapiens
  CDR3 for beta chain variable domain of TCR clone 20358 (TRBV7-2, TRBJ1-2)
CASSQTGSTYGYTV

SEQ ID NO: 40717 - protein, 11 aa, Homo sapiens
  CDR3 for alpha chain variable domain of TCR clone 20359 (TRAV17, TRAJ9)
CGFTGGFKTIF

SEQ ID NO: 40718 - protein, 14 aa, Homo sapiens
  CDR3 for beta chain variable domain of TCR clone 20359 (TRBV7-9, TRBJ2-2)
CASSLVRDTGELFF

SEQ ID NO: 40719 - protein, 11 aa, Homo sapiens
  CDR3 for alpha chain variable domain of TCR clone 20360 (TRAV1-2, TRAJ31)
CAVNNNASLMF

SEQ ID NO: 40720 - protein, 15 aa, Homo sapiens
  CDR3 for beta chain variable domain of TCR clone 20360 (TRBV28, TRBJ2-1)
CASSIIAGGRSEQFF

SEQ ID NO: 40721 - protein, 14 aa, Homo sapiens
  CDR3 for alpha chain variable domain of TCR clone 20361 (TRAV26-1, TRAJ21)
CIVRPPYNFNKFYF

SEQ ID NO: 40722 - protein, 17 aa, Homo sapiens
  CDR3 for beta chain variable domain of TCR clone 20361 (TRBV13, TRBJ2-3)
CASSLSRVAGGRNTQYF

SEQ ID NO: 40723 - protein, 14 aa, Homo sapiens
  CDR3 for alpha chain variable domain of TCR clone 20362 (TRAV12-2, TRAJ17)
CAVLFTAAGNKLTF

SEQ ID NO: 40724 - protein, 17 aa, Homo sapiens
  CDR3 for beta chain variable domain of TCR clone 20362 (TRBV20-1, TRBJ2-2)
CSASGSGQGGLTGELFF

SEQ ID NO: 40725 - protein, 15 aa, Homo sapiens
  CDR3 for alpha chain variable domain of TCR clone 20363 (TRAV8-3, TRAJ45)
CASSYSGGGADGLTF

SEQ ID NO: 40726 - protein, 15 aa, Homo sapiens
  CDR3 for beta chain variable domain of TCR clone 20363 (TRBV7-9, TRBJ1-6)
CASSSPGRGNSPLHF

SEQ ID NO: 40727 - protein, 14 aa, Homo sapiens
  CDR3 for alpha chain variable domain of TCR clone 20364 (TRAV20, TRAJ56)
CAVQFGGATSKLTF

SEQ ID NO: 40728 - protein, 14 aa, Homo sapiens
  CDR3 for beta chain variable domain of TCR clone 20364 (TRBV20-1, TRBJ2-7)
CSAKRGRSSYEQYF

SEQ ID NO: 40729 - protein, 15 aa, Homo sapiens
  CDR3 for alpha chain variable domain of TCR clone 20365 (TRAV8-3, TRAJ6)
CAVGPLGGGSYIPTL

SEQ ID NO: 40730 - protein, 14 aa, Homo sapiens
  CDR3 for beta chain variable domain of TCR clone 20365 (TRBV19, TRBJ2-2)
CASSTGQGAGELFF

SEQ ID NO: 40731 - protein, 15 aa, Homo sapiens
  CDR3 for alpha chain variable domain of TCR clone 20366 (TRAV12-3, TRAJ17)
CAMSPSLAAGNKLTF

SEQ ID NO: 40732 - protein, 14 aa, Homo sapiens
  CDR3 for beta chain variable domain of TCR clone 20366 (TRBV6-5, TRBJ1-3)
CASSYRSSGNTIYF

SEQ ID NO: 40733 - protein, 12 aa, Homo sapiens
  CDR3 for alpha chain variable domain of TCR clone 20367 (TRAV29/DV5, TRAJ34)
CAARHNTDKLIF

SEQ ID NO: 40734 - protein, 15 aa, Homo sapiens
  CDR3 for beta chain variable domain of TCR clone 20367 (TRBV19, TRBJ2-7)
CASSPAGSGEAVRYF

SEQ ID NO: 40735 - protein, 14 aa, Homo sapiens
  CDR3 for alpha chain variable domain of TCR clone 20368 (TRAV12-1, TRAJ12)
CVATRMDSSYKLIF

SEQ ID NO: 40736 - protein, 13 aa, Homo sapiens
  CDR3 for beta chain variable domain of TCR clone 20368 (TRBV20-1, TRBJ1-1)
CSARGGGNTEAFF

SEQ ID NO: 40737 - protein, 12 aa, Homo sapiens
  CDR3 for alpha chain variable domain of TCR clone 20369 (TRAV12-3, TRAJ17)
CAMTLTGNKLTF

SEQ ID NO: 40738 - protein, 14 aa, Homo sapiens
  CDR3 for beta chain variable domain of TCR clone 20369 (TRBV28, TRBJ1-2)
CASRIQGANYGYTF

SEQ ID NO: 40739 - protein, 14 aa, Homo sapiens
  CDR3 for alpha chain variable domain of TCR clone 20370 (TRAV17, TRAJ57)
CATDPQGGSEKLVF

SEQ ID NO: 40740 - protein, 13 aa, Homo sapiens
  CDR3 for beta chain variable domain of TCR clone 20370 (TRBV12-5, TRBJ2-3)
CASGDRQSDTQYF

SEQ ID NO: 40741 - protein, 14 aa, Homo sapiens
  CDR3 for alpha chain variable domain of TCR clone 20371 (TRAV21, TRAJ35)
CALMPIGFGNVLHC

SEQ ID NO: 40742 - protein, 12 aa, Homo sapiens
  CDR3 for beta chain variable domain of TCR clone 20371 (TRBV7-9, TRBJ2-7)
CASSIKREEQYF

SEQ ID NO: 40743 - protein, 17 aa, Homo sapiens
  CDR3 for alpha chain variable domain of TCR clone 20372 (TRAV23/DV6, TRAJ57)
CAASSTLSQGGSEKLVF

SEQ ID NO: 40744 - protein, 15 aa, Homo sapiens
  CDR3 for beta chain variable domain of TCR clone 20372 (TRBV20-1, TRBJ2-7)
CSARDRVSGMDEQYF

SEQ ID NO: 40745 - protein, 16 aa, Homo sapiens
  CDR3 for alpha chain variable domain of TCR clone 20373 (TRAV1-2, TRAJ10)
CAVIGVLTGGGNKLTF

SEQ ID NO: 40746 - protein, 12 aa, Homo sapiens
  CDR3 for beta chain variable domain of TCR clone 20373 (TRBV7-8, TRBJ2-7)
CASSLGDREQYF

SEQ ID NO: 40747 - protein, 11 aa, Homo sapiens
  CDR3 for alpha chain variable domain of TCR clone 20374 (TRAV2, TRAJ13)
CASGGYQKVTF

SEQ ID NO: 40748 - protein, 16 aa, Homo sapiens
  CDR3 for beta chain variable domain of TCR clone 20374 (TRBV19, TRBJ2-2)
CASRSPGTGATGELFF

SEQ ID NO: 40749 - protein, 15 aa, Homo sapiens
  CDR3 for alpha chain variable domain of TCR clone 20375 (TRAV3, TRAJ13)
CAVRVYSGGYQKVTF

SEQ ID NO: 40750 - protein, 15 aa, Homo sapiens
  CDR3 for beta chain variable domain of TCR clone 20375 (TRBV5-6, TRBJ1-2)
CASSLGVAANYGYTF

SEQ ID NO: 40751 - protein, 12 aa, Homo sapiens
  CDR3 for alpha chain variable domain of TCR clone 20376 (TRAV20, TRAJ33)
CAVRGSSYQLIW

SEQ ID NO: 40752 - protein, 15 aa, Homo sapiens
  CDR3 for beta chain variable domain of TCR clone 20376 (TRBV11-3, TRBJ2-3)
CASLKDGREGDTQYF

SEQ ID NO: 40753 - protein, 13 aa, Homo sapiens
  CDR3 for alpha chain variable domain of TCR clone 20377 (TRAV1-2, TRAJ9)
CAVLSTGGFKTIF

SEQ ID NO: 40754 - protein, 13 aa, Homo sapiens
  CDR3 for beta chain variable domain of TCR clone 20377 (TRBV19, TRBJ2-7)
CASRKAGGSEQYF

SEQ ID NO: 40755 - protein, 13 aa, Homo sapiens
  CDR3 for alpha chain variable domain of TCR clone 20378 (TRAV13-2, TRAJ48)
CAEMDFGNEKLTF

SEQ ID NO: 40756 - protein, 14 aa, Homo sapiens
  CDR3 for beta chain variable domain of TCR clone 20378 (TRBV7-2, TRBJ2-7)
CASRSQGAAYEQYF

SEQ ID NO: 40757 - protein, 16 aa, Homo sapiens
  CDR3 for alpha chain variable domain of TCR clone 20379 (TRAV3, TRAJ10)
CAVRDMRAGGGNKLTF

SEQ ID NO: 40758 - protein, 16 aa, Homo sapiens
  CDR3 for beta chain variable domain of TCR clone 20379 (TRBV7-9, TRBJ1-2)
CASSLGFSSGEDGYTF

SEQ ID NO: 40759 - protein, 14 aa, Homo sapiens
  CDR3 for alpha chain variable domain of TCR clone 20380 (TRAV12-2, TRAJ17)
CAVLFKAAGNKLTF

SEQ ID NO: 40760 - protein, 17 aa, Homo sapiens
  CDR3 for beta chain variable domain of TCR clone 20380 (TRBV20-1, TRBJ2-2)
CSASGSGQGGLIGELFF

SEQ ID NO: 40761 - protein, 14 aa, Homo sapiens
  CDR3 for alpha chain variable domain of TCR clone 20381 (TRAV12-1, TRAJ17)
CVVNYKAAGNKLTF

SEQ ID NO: 40762 - protein, 17 aa, Homo sapiens
  CDR3 for beta chain variable domain of TCR clone 20381 (TRBV20-1, TRBJ2-1)
CSASSSVLAGSYNEQFF

SEQ ID NO: 40763 - protein, 14 aa, Homo sapiens
  CDR3 for alpha chain variable domain of TCR clone 20382 (TRAV12-2, TRAJ13)
CAVKKTGGYQKVTF

SEQ ID NO: 40764 - protein, 15 aa, Homo sapiens
  CDR3 for beta chain variable domain of TCR clone 20382 (TRBV27, TRBJ2-1)
CGSSNGGGSSNEQFF

SEQ ID NO: 40765 - protein, 14 aa, Homo sapiens
  CDR3 for alpha chain variable domain of TCR clone 20383 (TRAV12-3, TRAJ33)
CAMSVPGSNYQLIW

SEQ ID NO: 40766 - protein, 17 aa, Homo sapiens
  CDR3 for beta chain variable domain of TCR clone 20383 (TRBV13, TRBJ2-3)
CASSLSRVAGGRNTQYF

SEQ ID NO: 40767 - protein, 15 aa, Homo sapiens
  CDR3 for alpha chain variable domain of TCR clone 20384 (TRAV2, TRAJ15)
CAVEDREQAGTALIF

SEQ ID NO: 40768 - protein, 14 aa, Homo sapiens
  CDR3 for beta chain variable domain of TCR clone 20384 (TRBV11-2, TRBJ2-7)
CASGLGAGAYEQYF

SEQ ID NO: 40769 - protein, 13 aa, Homo sapiens
  CDR3 for alpha chain variable domain of TCR clone 20385 (TRAV2, TRAJ40)
CAVVTSGTYKYFF

SEQ ID NO: 40770 - protein, 14 aa, Homo sapiens
  CDR3 for beta chain variable domain of TCR clone 20385 (TRBV19, TRBJ2-1)
CASPTFVLSGEQFF

SEQ ID NO: 40771 - protein, 14 aa, Homo sapiens
  CDR3 for alpha chain variable domain of TCR clone 20386 (TRAV8-3, TRAJ4)
CAVGEAGGYNKLIF

SEQ ID NO: 40772 - protein, 15 aa, Homo sapiens
  CDR3 for beta chain variable domain of TCR clone 20386 (TRBV6-5, TRBJ2-1)
CASSYDAGAGNEQFF

SEQ ID NO: 40773 - protein, 14 aa, Homo sapiens
  CDR3 for alpha chain variable domain of TCR clone 20387 (TRAV12-3, TRAJ10)
SHLPLTGGGNELTF

SEQ ID NO: 40774 - protein, 14 aa, Homo sapiens
  CDR3 for beta chain variable domain of TCR clone 20387 (TRBV6-1, TRBJ1-3)
CASVQGGGGNTIYF

SEQ ID NO: 40775 - protein, 14 aa, Homo sapiens
  CDR3 for alpha chain variable domain of TCR clone 20388 (TRAV8-2, TRAJ4)
CVVSPSGGYNKRIF

SEQ ID NO: 40776 - protein, 15 aa, Homo sapiens
  CDR3 for beta chain variable domain of TCR clone 20388 (TRBV4-1, TRBJ1-4)
CASSDTGGTNEKLFF

SEQ ID NO: 40777 - protein, 13 aa, Homo sapiens
  CDR3 for alpha chain variable domain of TCR clone 20389 (TRAV12-2, TRAJ31)
CAVKADNNARLMF

SEQ ID NO: 40778 - protein, 12 aa, Homo sapiens
  CDR3 for beta chain variable domain of TCR clone 20389 (TRBV19, TRBJ1-5)
CASSIAQQPQHF

SEQ ID NO: 40779 - protein, 12 aa, Homo sapiens
  CDR3 for alpha chain variable domain of TCR clone 20390 (TRAV21, TRAJ11)
CAATSGYSTLTF

SEQ ID NO: 40780 - protein, 14 aa, Homo sapiens
  CDR3 for beta chain variable domain of TCR clone 20390 (TRBV20-1, TRBJ2-7)
CSAPELAGVGEQHF

SEQ ID NO: 40781 - protein, 16 aa, Homo sapiens
  CDR3 for alpha chain variable domain of TCR clone 20391 (TRAV27, TRAJ13)
CAGAKSDSGGYQKVAF

SEQ ID NO: 40782 - protein, 15 aa, Homo sapiens
  CDR3 for beta chain variable domain of TCR clone 20391 (TRBV29-1, TRBJ2-1)
CSVGRHALFYNEQFF

SEQ ID NO: 40783 - protein, 13 aa, Homo sapiens
  CDR3 for alpha chain variable domain of TCR clone 20392 (TRAV1-2, TRAJ9)
CAALNTGGFKTIF

SEQ ID NO: 40784 - protein, 15 aa, Homo sapiens
  CDR3 for beta chain variable domain of TCR clone 20392 (TRBV19, TRBJ1-2)
CASSVGQVLNYGYTF

SEQ ID NO: 40785 - protein, 12 aa, Homo sapiens
  CDR3 for alpha chain variable domain of TCR clone 20393 (TRAV12-3, TRAJ17)
CAKTLTGNKLTF

SEQ ID NO: 40786 - protein, 15 aa, Homo sapiens
  CDR3 for beta chain variable domain of TCR clone 20393 (TRBV20-1, TRBJ2-7)
CSARDRVSGMDEQYF

SEQ ID NO: 40787 - protein, 13 aa, Homo sapiens
  CDR3 for alpha chain variable domain of TCR clone 20394 (TRAV20, TRAJ37)
CAGCSSNTGKLLF

SEQ ID NO: 40788 - protein, 11 aa, Homo sapiens
  CDR3 for beta chain variable domain of TCR clone 20394 (TRBV12-4, TRBJ2-3)
CASTATDTQYF

SEQ ID NO: 40789 - protein, 12 aa, Homo sapiens
  CDR3 for alpha chain variable domain of TCR clone 20395 (TRAV12-1, TRAJ40)
CVVYSGNYKYIF

SEQ ID NO: 40790 - protein, 18 aa, Homo sapiens
  CDR3 for beta chain variable domain of TCR clone 20395 (TRBV11-2, TRBJ2-3)
CASSLGGASRGAPNTQYF

SEQ ID NO: 40791 - protein, 12 aa, Homo sapiens
  CDR3 for alpha chain variable domain of TCR clone 20396 (TRAV26-1, TRAJ36)
CIVRVRADNLLF

SEQ ID NO: 40792 - protein, 13 aa, Homo sapiens
  CDR3 for beta chain variable domain of TCR clone 20396 (TRBV11-2, TRBJ2-5)
CASSRGPSETQYF

SEQ ID NO: 40793 - protein, 14 aa, Homo sapiens
  CDR3 for alpha chain variable domain of TCR clone 20397 (TRAV9-2, TRAJ39)
CALYIYNAGNMLTF

SEQ ID NO: 40794 - protein, 12 aa, Homo sapiens
  CDR3 for beta chain variable domain of TCR clone 20397 (TRBV12-4, TRBJ2-1)
CASSLQGSEQFF

SEQ ID NO: 40795 - protein, 10 aa, Homo sapiens
  CDR3 for alpha chain variable domain of TCR clone 20398 (TRAV2, TRAJ34)
CAVVNDRLIF

SEQ ID NO: 40796 - protein, 15 aa, Homo sapiens
  CDR3 for beta chain variable domain of TCR clone 20398 (TRBV3-1, TRBJ2-2)
CASSQDWTRAGELFF

SEQ ID NO: 40797 - protein, 15 aa, Homo sapiens
  CDR3 for alpha chain variable domain of TCR clone 20399 (TRAV23/DV6, TRAJ18)
CAARNRGSTLGRLYF

SEQ ID NO: 40798 - protein, 13 aa, Homo sapiens
  CDR3 for beta chain variable domain of TCR clone 20399 (TRBV7-2, TRBJ2-7)
CASSSPSGSEQYF

SEQ ID NO: 40799 - protein, 11 aa, Homo sapiens
  CDR3 for alpha chain variable domain of TCR clone 20400 (TRAV1-2, TRAJ20)
CAVSNDYKLSF

SEQ ID NO: 40800 - protein, 16 aa, Homo sapiens
  CDR3 for beta chain variable domain of TCR clone 20400 (TRBV29-1, TRBJ2-6)
CSVEDVTYSGANVLTF

SEQ ID NO: 40801 - protein, 16 aa, Homo sapiens
  CDR3 for alpha chain variable domain of TCR clone 20401 (TRAV8-3, TRAJ13)
CAVGAYPSGGYQKVTF

SEQ ID NO: 40802 - protein, 15 aa, Homo sapiens
  CDR3 for beta chain variable domain of TCR clone 20401 (TRBV19, TRBJ1-5)
CASSIVWADNQPQHS

SEQ ID NO: 40803 - protein, 14 aa, Homo sapiens
  CDR3 for alpha chain variable domain of TCR clone 20402 (TRAV8-3, TRAJ9)
CAVVYNTGGFKTIF

SEQ ID NO: 40804 - protein, 14 aa, Homo sapiens
  CDR3 for beta chain variable domain of TCR clone 20402 (TRBV7-3, TRBJ2-2)
CASSSGGYTGELLF

SEQ ID NO: 40805 - protein, 17 aa, Homo sapiens
  CDR3 for alpha chain variable domain of TCR clone 20403 (TRAV26-1, TRAJ53)
YIVRVDDSGGSNYKLTF

SEQ ID NO: 40806 - protein, 15 aa, Homo sapiens
  CDR3 for beta chain variable domain of TCR clone 20403 (TRBV20-1, TRBJ2-7)
CSARVPAAYFYEQYF

SEQ ID NO: 40807 - protein, 11 aa, Homo sapiens
  CDR3 for alpha chain variable domain of TCR clone 20404 (TRAV12-1, TRAJ30)
CVVNGQDRIIF

SEQ ID NO: 40808 - protein, 12 aa, Homo sapiens
  CDR3 for beta chain variable domain of TCR clone 20404 (TRBV27, TRBJ2-2)
CASKLFTGELFF

SEQ ID NO: 40809 - protein, 16 aa, Homo sapiens
  CDR3 for alpha chain variable domain of TCR clone 20405 (TRAV3, TRAJ23)
CAVKIGIYNQGGRLIF

SEQ ID NO: 40810 - protein, 17 aa, Homo sapiens
  CDR3 for beta chain variable domain of TCR clone 20405 (TRBV10-3, TRBJ2-6)
CAISESTAPSGANVLTF

SEQ ID NO: 40811 - protein, 14 aa, Homo sapiens
  CDR3 for alpha chain variable domain of TCR clone 20406 (TRAV13-1, TRAJ40)
CAASMTSGTYKYIF

SEQ ID NO: 40812 - protein, 15 aa, Homo sapiens
  CDR3 for beta chain variable domain of TCR clone 20406 (TRBV7-3, TRBJ2-1)
CASSPTGGGEVEQFL

SEQ ID NO: 40813 - protein, 15 aa, Homo sapiens
  CDR3 for alpha chain variable domain of TCR clone 20407 (TRAV2, TRAJ22)
CAVPSRGGSARQLAF

SEQ ID NO: 40814 - protein, 11 aa, Homo sapiens
  CDR3 for beta chain variable domain of TCR clone 20407 (TRBV27, TRBJ2-3)
CASSLGDTQYF

SEQ ID NO: 40815 - protein, 12 aa, Homo sapiens
  CDR3 for alpha chain variable domain of TCR clone 20408 (TRAV29/DV5, TRAJ53)
CAASGGNYKLTF

SEQ ID NO: 40816 - protein, 14 aa, Homo sapiens
  CDR3 for beta chain variable domain of TCR clone 20408 (TRBV12-4, TRBJ1-4)
CASRMTGRSEKLFF

SEQ ID NO: 40817 - protein, 15 aa, Homo sapiens
  CDR3 for alpha chain variable domain of TCR clone 20409 (TRAV26-1, TRAJ29)
CIVRVEGSGNTPLVF

SEQ ID NO: 40818 - protein, 15 aa, Homo sapiens
  CDR3 for beta chain variable domain of TCR clone 20409 (TRBV7-9, TRBJ1-5)
CASSQGHQPTQPQHF

SEQ ID NO: 40819 - protein, 16 aa, Homo sapiens
  CDR3 for alpha chain variable domain of TCR clone 20410 (TRAV25, )
CADIQNPDPAVYQLRD

SEQ ID NO: 40820 - protein, 15 aa, Homo sapiens
  CDR3 for beta chain variable domain of TCR clone 20410 (TRBV28, TRBJ1-4)
CASSVSGSGLEKLFF

SEQ ID NO: 40821 - protein, 14 aa, Homo sapiens
  CDR3 for alpha chain variable domain of TCR clone 20411 (TRAV9-2, TRAJ39)
CALYIYNAGNMLTF

SEQ ID NO: 40822 - protein, 12 aa, Homo sapiens
  CDR3 for beta chain variable domain of TCR clone 20411 (TRBV29-1, TRBJ2-3)
CSVTGGADTQYF

SEQ ID NO: 40823 - protein, 13 aa, Homo sapiens
  CDR3 for alpha chain variable domain of TCR clone 20412 (TRAV12-3, TRAJ33)
CAMSVNSNYQLIW

SEQ ID NO: 40824 - protein, 13 aa, Homo sapiens
  CDR3 for beta chain variable domain of TCR clone 20412 (TRBV7-2, TRBJ2-2)
CASSLAVTGEPFF

SEQ ID NO: 40825 - protein, 18 aa, Homo sapiens
  CDR3 for alpha chain variable domain of TCR clone 20413 (TRAV21, TRAJ52)
CAVRPSPAGGTSYGKLTF

SEQ ID NO: 40826 - protein, 13 aa, Homo sapiens
  CDR3 for beta chain variable domain of TCR clone 20413 (TRBV12-4, TRBJ2-3)
CASSSPLGGTQYF

SEQ ID NO: 40827 - protein, 15 aa, Homo sapiens
  CDR3 for alpha chain variable domain of TCR clone 20414 (TRAV35, TRAJ40)
CAGQLGTLGTYKYIF

SEQ ID NO: 40828 - protein, 14 aa, Homo sapiens
  CDR3 for beta chain variable domain of TCR clone 20414 (TRBV7-3, TRBJ2-1)
CASSLAGGTNEQFF

SEQ ID NO: 40829 - protein, 15 aa, Homo sapiens
  CDR3 for alpha chain variable domain of TCR clone 20415 (TRAV12-2, TRAJ43)
CAFDMRFGAGTRLTV

SEQ ID NO: 40830 - protein, 18 aa, Homo sapiens
  CDR3 for beta chain variable domain of TCR clone 20415 (TRBV20-1, TRBJ2-3)
CSASGLAGGPGTTDTQYF

SEQ ID NO: 40831 - protein, 14 aa, Homo sapiens
  CDR3 for alpha chain variable domain of TCR clone 20416 (TRAV13-1, TRAJ35)
CAASKGGFGNVLHC

SEQ ID NO: 40832 - protein, 16 aa, Homo sapiens
  CDR3 for beta chain variable domain of TCR clone 20416 (TRBV2, TRBJ1-4)
CASNLLQGATNEKLFF

SEQ ID NO: 40833 - protein, 13 aa, Homo sapiens
  CDR3 for alpha chain variable domain of TCR clone 20417 (TRAV1-2, TRAJ12)
CAVSMDSSYKLIF

SEQ ID NO: 40834 - protein, 15 aa, Homo sapiens
  CDR3 for beta chain variable domain of TCR clone 20417 (TRBV27, TRBJ2-5)
CASSLIPSGGETRYF

SEQ ID NO: 40835 - protein, 14 aa, Homo sapiens
  CDR3 for alpha chain variable domain of TCR clone 20418 (TRAV8-2, TRAJ4)
CVVSPSGGYNKLFF

SEQ ID NO: 40836 - protein, 15 aa, Homo sapiens
  CDR3 for beta chain variable domain of TCR clone 20418 (TRBV4-1, TRBJ1-4)
CASSDTGGTNEKLFF

SEQ ID NO: 40837 - protein, 14 aa, Homo sapiens
  CDR3 for alpha chain variable domain of TCR clone 20419 (TRAV9-2, TRAJ39)
CALYIYNAGNMLTF

SEQ ID NO: 40838 - protein, 11 aa, Homo sapiens
  CDR3 for beta chain variable domain of TCR clone 20419 (TRBV7-8, TRBJ2-7)
CASSLSLEQYF

SEQ ID NO: 40839 - protein, 14 aa, Homo sapiens
  CDR3 for alpha chain variable domain of TCR clone 20420 (TRAV12-3, TRAJ9)
CAMSPNTGGSKTIF

SEQ ID NO: 40840 - protein, 12 aa, Homo sapiens
  CDR3 for beta chain variable domain of TCR clone 20420 (TRBV11-2, TRBJ2-2)
CASNLGGGELFF

SEQ ID NO: 40841 - protein, 13 aa, Homo sapiens
  CDR3 for alpha chain variable domain of TCR clone 20421 (TRAV13-2, TRAJ48)
CAEMDFGNEQLTF

SEQ ID NO: 40842 - protein, 15 aa, Homo sapiens
  CDR3 for beta chain variable domain of TCR clone 20421 (TRBV7-9, TRBJ1-6)
CASSSPGRGNSPLHF

SEQ ID NO: 40843 - protein, 16 aa, Homo sapiens
  CDR3 for alpha chain variable domain of TCR clone 20422 (TRAV2, TRAJ4)
CAVEDRVSGGYNKLIF

SEQ ID NO: 40844 - protein, 13 aa, Homo sapiens
  CDR3 for beta chain variable domain of TCR clone 20422 (TRBV7-7, TRBJ2-5)
CASSRSGQETQYF

SEQ ID NO: 40845 - protein, 14 aa, Homo sapiens
  CDR3 for alpha chain variable domain of TCR clone 20423 (TRAV13-1, TRAJ31)
CAASSRPNNARLMF

SEQ ID NO: 40846 - protein, 15 aa, Homo sapiens
  CDR3 for beta chain variable domain of TCR clone 20423 (TRBV4-2, TRBJ2-4)
CASSPLGAAKNMQYF

SEQ ID NO: 40847 - protein, 14 aa, Homo sapiens
  CDR3 for alpha chain variable domain of TCR clone 20424 (TRAV17, TRAJ16)
CATADFSDGQKPLF

SEQ ID NO: 40848 - protein, 15 aa, Homo sapiens
  CDR3 for beta chain variable domain of TCR clone 20424 (TRBV18, TRBJ2-1)
CASSPPSASYNEQFF

SEQ ID NO: 40849 - protein, 18 aa, Homo sapiens
  CDR3 for alpha chain variable domain of TCR clone 20425 (TRAV13-1, TRAJ52)
CAASERSAGGTSYGKLTS

SEQ ID NO: 40850 - protein, 13 aa, Homo sapiens
  CDR3 for beta chain variable domain of TCR clone 20425 (TRBV12-4, TRBJ1-2)
CASSLRQGKGYTF

SEQ ID NO: 40851 - protein, 17 aa, Homo sapiens
  CDR3 for alpha chain variable domain of TCR clone 20426 (TRAV3, TRAJ42)
CAVRDRDYGGSQGNLIF

SEQ ID NO: 40852 - protein, 15 aa, Homo sapiens
  CDR3 for beta chain variable domain of TCR clone 20426 (TRBV6-6, TRBJ2-7)
CASSYSYGGSYEQYL

SEQ ID NO: 40853 - protein, 12 aa, Homo sapiens
  CDR3 for alpha chain variable domain of TCR clone 20427 (TRAV8-3, TRAJ20)
CAVGANDYKLSF

SEQ ID NO: 40854 - protein, 13 aa, Homo sapiens
  CDR3 for beta chain variable domain of TCR clone 20427 (TRBV27, TRBJ1-4)
CASSLMGDEKLFF

SEQ ID NO: 40855 - protein, 22 aa, Homo sapiens
  CDR3 for alpha chain variable domain of TCR clone 20428 (TRAV27, TRAJ38)
CAARRNAGNNHIQNPDPAVYQL

SEQ ID NO: 40856 - protein, 13 aa, Homo sapiens
  CDR3 for beta chain variable domain of TCR clone 20428 (TRBV7-9, TRBJ1-2)
CASSLKQNYGYTF

SEQ ID NO: 40857 - protein, 18 aa, Homo sapiens
  CDR3 for alpha chain variable domain of TCR clone 20429 (TRAV21, TRAJ52)
CAVRPSPAGGTSSGKLTF

SEQ ID NO: 40858 - protein, 13 aa, Homo sapiens
  CDR3 for beta chain variable domain of TCR clone 20429 (TRBV7-3, TRBJ1-1)
CASSQDWGAEAFF

SEQ ID NO: 40859 - protein, 17 aa, Homo sapiens
  CDR3 for alpha chain variable domain of TCR clone 20430 (TRAV1-1, TRAJ15)
CAVRAPHKNQAGTALIF

SEQ ID NO: 40860 - protein, 16 aa, Homo sapiens
  CDR3 for beta chain variable domain of TCR clone 20430 (TRBV12-5, TRBJ2-5)
CASGPRTSGNQETQYF

SEQ ID NO: 40861 - protein, 12 aa, Homo sapiens
  CDR3 for alpha chain variable domain of TCR clone 20431 (TRAV12-1, TRAJ40)
CVVYSGTYKYIF

SEQ ID NO: 40862 - protein, 16 aa, Homo sapiens
  CDR3 for beta chain variable domain of TCR clone 20431 (TRBV12-5, TRBJ2-5)
CASGPRTSGNQETQYF

SEQ ID NO: 40863 - protein, 14 aa, Homo sapiens
  CDR3 for alpha chain variable domain of TCR clone 20432 (TRAV2, TRAJ9)
CAVEDRSGGFKTIF

SEQ ID NO: 40864 - protein, 16 aa, Homo sapiens
  CDR3 for beta chain variable domain of TCR clone 20432 (TRBV19, TRBJ2-2)
CASRSPGTGATGELFF

SEQ ID NO: 40865 - protein, 13 aa, Homo sapiens
  CDR3 for alpha chain variable domain of TCR clone 20433 (TRAV20, TRAJ48)
CAVHLFGNEKLTF

SEQ ID NO: 40866 - protein, 15 aa, Homo sapiens
  CDR3 for beta chain variable domain of TCR clone 20433 (TRBV2, TRBJ2-3)
CASSDAGGPPDTQYF

SEQ ID NO: 40867 - protein, 12 aa, Homo sapiens
  CDR3 for alpha chain variable domain of TCR clone 20434 (TRAV21, TRAJ33)
CAKLDSNYQLIW

SEQ ID NO: 40868 - protein, 14 aa, Homo sapiens
  CDR3 for beta chain variable domain of TCR clone 20434 (TRBV2, TRBJ2-7)
CASSLTSGGYEQYF

SEQ ID NO: 40869 - protein, 11 aa, Homo sapiens
  CDR3 for alpha chain variable domain of TCR clone 20435 (TRAV35, TRAJ30)
CAGPEDDKIIF

SEQ ID NO: 40870 - protein, 14 aa, Homo sapiens
  CDR3 for beta chain variable domain of TCR clone 20435 (TRBV7-6, TRBJ1-6)
CASSQAGGGSPLHF

SEQ ID NO: 40871 - protein, 13 aa, Homo sapiens
  CDR3 for alpha chain variable domain of TCR clone 20436 (TRAV30, TRAJ6)
CGFIEGGSYIPTF

SEQ ID NO: 40872 - protein, 15 aa, Homo sapiens
  CDR3 for beta chain variable domain of TCR clone 20436 (TRBV20-1, TRBJ2-1)
CSARGIGGTYNEQFF

SEQ ID NO: 40873 - protein, 14 aa, Homo sapiens
  CDR3 for alpha chain variable domain of TCR clone 20437 (TRAV12-2, TRAJ17)
CAVLFKAAGNKLTF

SEQ ID NO: 40874 - protein, 17 aa, Homo sapiens
  CDR3 for beta chain variable domain of TCR clone 20437 (TRBV20-1, TRBJ2-2)
CSASVSGQGGLTGELFF

SEQ ID NO: 40875 - protein, 22 aa, Homo sapiens
  CDR3 for alpha chain variable domain of TCR clone 20438 (TRAV27, TRAJ41)
CAVRTQIPDIQNPDPAVYQLRY

SEQ ID NO: 40876 - protein, 16 aa, Homo sapiens
  CDR3 for beta chain variable domain of TCR clone 20438 (TRBV5-1, TRBJ2-3)
CASSLGLAVYTDTQYF

SEQ ID NO: 40877 - protein, 14 aa, Homo sapiens
  CDR3 for alpha chain variable domain of TCR clone 20439 (TRAV38-1, TRAJ45)
CAYYSGGGADGLTF

SEQ ID NO: 40878 - protein, 20 aa, Homo sapiens
  CDR3 for beta chain variable domain of TCR clone 20439 (TRBV28, TRBJ2-1)
CACTPIGRSPGLAGGNEQFF

SEQ ID NO: 40879 - protein, 14 aa, Homo sapiens
  CDR3 for alpha chain variable domain of TCR clone 20440 (TRAV35, TRAJ22)
CAGLKPGSARQLTF

SEQ ID NO: 40880 - protein, 15 aa, Homo sapiens
  CDR3 for beta chain variable domain of TCR clone 20440 (TRBV12-4, TRBJ2-5)
CASSPPTGLQETQYF

SEQ ID NO: 40881 - protein, 18 aa, Homo sapiens
  CDR3 for alpha chain variable domain of TCR clone 20441 (TRAV21, TRAJ53)
CAVKGGENSGGSNYKLTF

SEQ ID NO: 40882 - protein, 13 aa, Homo sapiens
  CDR3 for beta chain variable domain of TCR clone 20441 (TRBV7-9, TRBJ1-2)
CASSLKQNYGYTF

SEQ ID NO: 40883 - protein, 15 aa, Homo sapiens
  CDR3 for alpha chain variable domain of TCR clone 20442 (TRAV12-1, TRAJ44)
CVVFVNTGTASKLTF

SEQ ID NO: 40884 - protein, 17 aa, Homo sapiens
  CDR3 for beta chain variable domain of TCR clone 20442 (TRBV7-8, TRBJ2-6)
CASSAGTGGAGASVLTF

SEQ ID NO: 40885 - protein, 12 aa, Homo sapiens
  CDR3 for alpha chain variable domain of TCR clone 20443 (TRAV8-3, TRAJ26)
CAGDNYGQDFVF

SEQ ID NO: 40886 - protein, 14 aa, Homo sapiens
  CDR3 for beta chain variable domain of TCR clone 20443 (TRBV7-2, TRBJ2-7)
CASRSQGAAYEQYF

SEQ ID NO: 40887 - protein, 12 aa, Homo sapiens
  CDR3 for alpha chain variable domain of TCR clone 20444 (TRAV8-3, TRAJ26)
CAGDNYGQNFVF

SEQ ID NO: 40888 - protein, 13 aa, Homo sapiens
  CDR3 for beta chain variable domain of TCR clone 20444 (TRBV4-2, TRBJ1-1)
CASSQAGNTEAFF

SEQ ID NO: 40889 - protein, 12 aa, Homo sapiens
  CDR3 for alpha chain variable domain of TCR clone 20445 (TRAV3, TRAJ39)
CAVIEWSNMLTF

SEQ ID NO: 40890 - protein, 14 aa, Homo sapiens
  CDR3 for beta chain variable domain of TCR clone 20445 (TRBV7-8, TRBJ2-3)
CASSLPDGQDTQYF

SEQ ID NO: 40891 - protein, 12 aa, Homo sapiens
  CDR3 for alpha chain variable domain of TCR clone 20446 (TRAV8-3, TRAJ20)
CAVGANDYKLSF

SEQ ID NO: 40892 - protein, 13 aa, Homo sapiens
  CDR3 for beta chain variable domain of TCR clone 20446 (TRBV7-9, TRBJ1-2)
CASSLKQNYGYTF

SEQ ID NO: 40893 - protein, 16 aa, Homo sapiens
  CDR3 for alpha chain variable domain of TCR clone 20447 (TRAV3, TRAJ21)
CAVRDIERGNFDKFYF

SEQ ID NO: 40894 - protein, 13 aa, Homo sapiens
  CDR3 for beta chain variable domain of TCR clone 20447 (TRBV27, TRBJ2-7)
CASSLTTGYEQYF

SEQ ID NO: 40895 - protein, 12 aa, Homo sapiens
  CDR3 for alpha chain variable domain of TCR clone 20448 (TRAV12-1, TRAJ40)
CVVSSGTYKYIF

SEQ ID NO: 40896 - protein, 18 aa, Homo sapiens
  CDR3 for beta chain variable domain of TCR clone 20448 (TRBV11-2, TRBJ2-3)
CASSLGGASRGAPNTQYF

SEQ ID NO: 40897 - protein, 15 aa, Homo sapiens
  CDR3 for alpha chain variable domain of TCR clone 20449 (TRAV8-3, TRAJ27)
CAVGPSKTNACKSTF

SEQ ID NO: 40898 - protein, 15 aa, Homo sapiens
  CDR3 for beta chain variable domain of TCR clone 20449 (TRBV7-2, TRBJ2-1)
CASSSGLAGGNEQFF

SEQ ID NO: 40899 - protein, 16 aa, Homo sapiens
  CDR3 for alpha chain variable domain of TCR clone 20450 (TRAV12-3, TRAJ53)
CAMSPGIGGSNYKLTF

SEQ ID NO: 40900 - protein, 11 aa, Homo sapiens
  CDR3 for beta chain variable domain of TCR clone 20450 (TRBV29-1, TRBJ2-5)
CSEDRTGTQYF

SEQ ID NO: 40901 - protein, 14 aa, Homo sapiens
  CDR3 for alpha chain variable domain of TCR clone 20451 (TRAV17, TRAJ16)
CATADFSDGQKLLF

SEQ ID NO: 40902 - protein, 15 aa, Homo sapiens
  CDR3 for beta chain variable domain of TCR clone 20451 (TRBV18, TRBJ2-1)
CASSPPSASYNEQFL

SEQ ID NO: 40903 - protein, 13 aa, Homo sapiens
  CDR3 for alpha chain variable domain of TCR clone 20452 (TRAV2, TRAJ40)
CAVVTSGTYKYIF

SEQ ID NO: 40904 - protein, 11 aa, Homo sapiens
  CDR3 for beta chain variable domain of TCR clone 20452 (TRBV11-2, TRBJ2-2)
CASSLPGELFF

SEQ ID NO: 40905 - protein, 13 aa, Homo sapiens
  CDR3 for alpha chain variable domain of TCR clone 20453 (TRAV9-2, TRAJ53)
CALSGGSNYKLAF

SEQ ID NO: 40906 - protein, 17 aa, Homo sapiens
  CDR3 for beta chain variable domain of TCR clone 20453 (TRBV11-2, TRBJ2-1)
CASSLYPPGVEYNEQFF

SEQ ID NO: 40907 - protein, 16 aa, Homo sapiens
  CDR3 for alpha chain variable domain of TCR clone 20454 (TRAV3, TRAJ37)
CAVRVRGSGNTGKLIF

SEQ ID NO: 40908 - protein, 15 aa, Homo sapiens
  CDR3 for beta chain variable domain of TCR clone 20454 (TRBV9, TRBJ1-6)
CASSVAGTGDSPLHF

SEQ ID NO: 40909 - protein, 14 aa, Homo sapiens
  CDR3 for alpha chain variable domain of TCR clone 20455 (TRAV2, TRAJ37)
CAVDFTSNTGKLIF

SEQ ID NO: 40910 - protein, 11 aa, Homo sapiens
  CDR3 for beta chain variable domain of TCR clone 20455 (TRBV12-4, TRBJ2-3)
CASTATDTQYF

SEQ ID NO: 40911 - protein, 14 aa, Homo sapiens
  CDR3 for alpha chain variable domain of TCR clone 20456 (TRAV12-1, TRAJ17)
CVVNYKAAGNKLTF

SEQ ID NO: 40912 - protein, 17 aa, Homo sapiens
  CDR3 for beta chain variable domain of TCR clone 20456 (TRBV20-1, TRBJ2-1)
CIASSSGLAGSYNEQFF

SEQ ID NO: 40913 - protein, 13 aa, Homo sapiens
  CDR3 for alpha chain variable domain of TCR clone 20457 (TRAV3, TRAJ27)
CAVRPLGAGKSTF

SEQ ID NO: 40914 - protein, 13 aa, Homo sapiens
  CDR3 for beta chain variable domain of TCR clone 20457 (TRBV7-9, TRBJ2-3)
CASSPVSTDTQYF

SEQ ID NO: 40915 - protein, 13 aa, Homo sapiens
  CDR3 for alpha chain variable domain of TCR clone 20458 (TRAV2, TRAJ21)
CAVEDLNFNKFYF

SEQ ID NO: 40916 - protein, 15 aa, Homo sapiens
  CDR3 for beta chain variable domain of TCR clone 20458 (TRBV5-1, TRBJ2-1)
CASSLVANSYNEQFF

SEQ ID NO: 40917 - protein, 15 aa, Homo sapiens
  CDR3 for alpha chain variable domain of TCR clone 20459 (TRAV26-1, TRAJ29)
CIVRVEGSGNTPLVF

SEQ ID NO: 40918 - protein, 15 aa, Homo sapiens
  CDR3 for beta chain variable domain of TCR clone 20459 (TRBV11-3, TRBJ2-3)
CASLKDGREGDTQYF

SEQ ID NO: 40919 - protein, 13 aa, Homo sapiens
  CDR3 for alpha chain variable domain of TCR clone 20460 (TRAV21, TRAJ57)
CAITQGGSEKLVF

SEQ ID NO: 40920 - protein, 16 aa, Homo sapiens
  CDR3 for beta chain variable domain of TCR clone 20460 (TRBV29-1, TRBJ2-7)
CSVEDAEDGTAYEQYF

SEQ ID NO: 40921 - protein, 12 aa, Homo sapiens
  CDR3 for alpha chain variable domain of TCR clone 20461 (TRAV12-3, TRAJ40)
CAMSSGTYKYIF

SEQ ID NO: 40922 - protein, 15 aa, Homo sapiens
  CDR3 for beta chain variable domain of TCR clone 20461 (TRBV7-3, TRBJ2-2)
CASSETGQGTGELVF

SEQ ID NO: 40923 - protein, 13 aa, Homo sapiens
  CDR3 for alpha chain variable domain of TCR clone 20462 (TRAV17, TRAJ9)
CATDYTGGFKTIF

SEQ ID NO: 40924 - protein, 16 aa, Homo sapiens
  CDR3 for beta chain variable domain of TCR clone 20462 (TRBV7-7, TRBJ2-1)
CASSLARGTSYNEQFF

SEQ ID NO: 40925 - protein, 14 aa, Homo sapiens
  CDR3 for alpha chain variable domain of TCR clone 20463 (TRAV6, TRAJ6)
CALPASGGSYIPTF

SEQ ID NO: 40926 - protein, 16 aa, Homo sapiens
  CDR3 for beta chain variable domain of TCR clone 20463 (TRBV5-8, TRBJ2-3)
CASSLGVSALTDTQYF

SEQ ID NO: 40927 - protein, 17 aa, Homo sapiens
  CDR3 for alpha chain variable domain of TCR clone 20464 (TRAV17, TRAJ7)
CATLGRLAFGKGNQVVV

SEQ ID NO: 40928 - protein, 13 aa, Homo sapiens
  CDR3 for beta chain variable domain of TCR clone 20464 (TRBV12-4, TRBJ2-7)
CASSLERVRERYF

SEQ ID NO: 40929 - protein, 13 aa, Homo sapiens
  CDR3 for alpha chain variable domain of TCR clone 20465 (TRAV8-3, TRAJ36)
CAVGATGANNLFF

SEQ ID NO: 40930 - protein, 15 aa, Homo sapiens
  CDR3 for beta chain variable domain of TCR clone 20465 (TRBV20-1, TRBJ2-7)
CSARDRVSGMDEQYF

SEQ ID NO: 40931 - protein, 18 aa, Homo sapiens
  CDR3 for alpha chain variable domain of TCR clone 20466 (TRAV13-1, TRAJ52)
CAASKRSAGCTSYGKLTF

SEQ ID NO: 40932 - protein, 13 aa, Homo sapiens
  CDR3 for beta chain variable domain of TCR clone 20466 (TRBV12-4, TRBJ1-2)
CASSLRQGKGYTF

SEQ ID NO: 40933 - protein, 16 aa, Homo sapiens
  CDR3 for alpha chain variable domain of TCR clone 20467 (TRAV26-2, TRAJ45)
CTTASPIGGGADGLTF

SEQ ID NO: 40934 - protein, 20 aa, Homo sapiens
  CDR3 for beta chain variable domain of TCR clone 20467 (TRBV28, TRBJ2-1)
CASTPIGRSPGLAGGDEQFF

SEQ ID NO: 40935 - protein, 16 aa, Homo sapiens
  CDR3 for alpha chain variable domain of TCR clone 20468 (TRAV12-3, TRAJ53)
CAMSPGSGGSNYKLTF

SEQ ID NO: 40936 - protein, 15 aa, Homo sapiens
  CDR3 for beta chain variable domain of TCR clone 20468 (TRBV5-1, TRBJ2-1)
CASSLDAGPSYAQFF

SEQ ID NO: 40937 - protein, 15 aa, Homo sapiens
  CDR3 for alpha chain variable domain of TCR clone 20469 (TRAV27, TRAJ50)
CAGVGRGTSYDKGIF

SEQ ID NO: 40938 - protein, 14 aa, Homo sapiens
  CDR3 for beta chain variable domain of TCR clone 20469 (TRBV7-2, TRBJ1-1)
CASSFYDLNTEAFF

SEQ ID NO: 40939 - protein, 11 aa, Homo sapiens
  CDR3 for alpha chain variable domain of TCR clone 20470 (TRAV4, TRAJ31)
CLVGDNARLML

SEQ ID NO: 40940 - protein, 16 aa, Homo sapiens
  CDR3 for beta chain variable domain of TCR clone 20470 (TRBV7-2, TRBJ2-5)
CASSSKWLSGQETQYF

SEQ ID NO: 40941 - protein, 13 aa, Homo sapiens
  CDR3 for alpha chain variable domain of TCR clone 20471 (TRAV12-1, TRAJ26)
CVVRRNHGQNFVF

SEQ ID NO: 40942 - protein, 15 aa, Homo sapiens
  CDR3 for beta chain variable domain of TCR clone 20471 (TRBV28, TRBJ2-1)
CASSIIAGGRSEQFF

SEQ ID NO: 40943 - protein, 14 aa, Homo sapiens
  CDR3 for alpha chain variable domain of TCR clone 20472 (TRAV12-2, TRAJ17)
CAVLFKAAGNKLTF

SEQ ID NO: 40944 - protein, 17 aa, Homo sapiens
  CDR3 for beta chain variable domain of TCR clone 20472 (TRBV20-1, TRBJ2-2)
CSASGSGQDGLTGELFF

SEQ ID NO: 40945 - protein, 12 aa, Homo sapiens
  CDR3 for alpha chain variable domain of TCR clone 20473 (TRAV17, TRAJ57)
CATDGGPEKLVF

SEQ ID NO: 40946 - protein, 13 aa, Homo sapiens
  CDR3 for beta chain variable domain of TCR clone 20473 (TRBV7-9, TRBJ2-7)
CASSFAGAYEQYF

SEQ ID NO: 40947 - protein, 11 aa, Homo sapiens
  CDR3 for alpha chain variable domain of TCR clone 20474 (TRAV2, TRAJ33)
CAVESNYHLIW

SEQ ID NO: 40948 - protein, 15 aa, Homo sapiens
  CDR3 for beta chain variable domain of TCR clone 20474 (TRBV19, TRBJ1-1)
CASTSGQIQNTEAFF

SEQ ID NO: 40949 - protein, 11 aa, Homo sapiens
  CDR3 for alpha chain variable domain of TCR clone 20475 (TRAV1-2, TRAJ20)
CAVANDYKLSF

SEQ ID NO: 40950 - protein, 18 aa, Homo sapiens
  CDR3 for beta chain variable domain of TCR clone 20475 (TRBV20-1, TRBJ2-6)
CSAETTPTHGSVANVLTF

SEQ ID NO: 40951 - protein, 17 aa, Homo sapiens
  CDR3 for alpha chain variable domain of TCR clone 20476 (TRAV3, TRAJ42)
CALRDRDYGGSQGNLIF

SEQ ID NO: 40952 - protein, 15 aa, Homo sapiens
  CDR3 for beta chain variable domain of TCR clone 20476 (TRBV6-6, TRBJ2-7)
CASSYSYGGSYEQYF

SEQ ID NO: 40953 - protein, 11 aa, Homo sapiens
  CDR3 for alpha chain variable domain of TCR clone 20477 (TRAV17, TRAJ9)
CATTGGFKTIF

SEQ ID NO: 40954 - protein, 14 aa, Homo sapiens
  CDR3 for beta chain variable domain of TCR clone 20477 (TRBV7-9, TRBJ2-2)
CASRGLADTGELFF

SEQ ID NO: 40955 - protein, 12 aa, Homo sapiens
  CDR3 for alpha chain variable domain of TCR clone 20478 (TRAV1-1, TRAJ8)
CAGGTGFQKLVF

SEQ ID NO: 40956 - protein, 15 aa, Homo sapiens
  CDR3 for beta chain variable domain of TCR clone 20478 (TRBV7-9, TRBJ1-4)
CASSRTGGFNETLFF

SEQ ID NO: 40957 - protein, 11 aa, Homo sapiens
  CDR3 for alpha chain variable domain of TCR clone 20479 (TRAV2, TRAJ33)
CAVDSNYQLIC

SEQ ID NO: 40958 - protein, 14 aa, Homo sapiens
  CDR3 for beta chain variable domain of TCR clone 20479 (TRBV11-2, TRBJ2-3)
CASSRLARTDTQYF

SEQ ID NO: 40959 - protein, 13 aa, Homo sapiens
  CDR3 for alpha chain variable domain of TCR clone 20480 (TRAV27, TRAJ29)
CAGAHSGNTPLVF

SEQ ID NO: 40960 - protein, 17 aa, Homo sapiens
  CDR3 for beta chain variable domain of TCR clone 20480 (TRBV24-1, TRBJ2-1)
CATSDVSTSGTYNEQFF

SEQ ID NO: 40961 - protein, 13 aa, Homo sapiens
  CDR3 for alpha chain variable domain of TCR clone 20481 (TRAV1-1, TRAJ9)
CAAKNTGGFKNIF

SEQ ID NO: 40962 - protein, 14 aa, Homo sapiens
  CDR3 for beta chain variable domain of TCR clone 20481 (TRBV20-1, TRBJ2-1)
CSAQIGGSANEQFF

SEQ ID NO: 40963 - protein, 12 aa, Homo sapiens
  CDR3 for alpha chain variable domain of TCR clone 20482 (TRAV12-3, TRAJ21)
CAMFNNFNKFYF

SEQ ID NO: 40964 - protein, 14 aa, Homo sapiens
  CDR3 for beta chain variable domain of TCR clone 20482 (TRBV28, TRBJ2-1)
CASSIQGTVGEQLF

SEQ ID NO: 40965 - protein, 14 aa, Homo sapiens
  CDR3 for alpha chain variable domain of TCR clone 20483 (TRAV17, TRAJ53)
CATDAGGSNYKLTF

SEQ ID NO: 40966 - protein, 16 aa, Homo sapiens
  CDR3 for beta chain variable domain of TCR clone 20483 (TRBV4-1, TRBJ1-1)
CASSQGAGMGNTEAFF

SEQ ID NO: 40967 - protein, 20 aa, Homo sapiens
  CDR3 for alpha chain variable domain of TCR clone 20484 (TRAV26-1, TRAJ42)
CCVLLHRQTYYGGIQGNLIF

SEQ ID NO: 40968 - protein, 16 aa, Homo sapiens
  CDR3 for beta chain variable domain of TCR clone 20484 (TRBV7-3, TRBJ2-2)
CASSLKRGTLSGELFF

SEQ ID NO: 40969 - protein, 17 aa, Homo sapiens
  CDR3 for alpha chain variable domain of TCR clone 20485 (TRAV3, TRAJ6)
CAVRDGPRAGGSYIPTF

SEQ ID NO: 40970 - protein, 14 aa, Homo sapiens
  CDR3 for beta chain variable domain of TCR clone 20485 (TRBV7-2, TRBJ2-7)
CASSPKTSFYEQSF

SEQ ID NO: 40971 - protein, 14 aa, Homo sapiens
  CDR3 for alpha chain variable domain of TCR clone 20486 (TRAV26-1, TRAJ38)
CIADNAGNNRKLIW

SEQ ID NO: 40972 - protein, 13 aa, Homo sapiens
  CDR3 for beta chain variable domain of TCR clone 20486 (TRBV20-1, TRBJ1-1)
CSARGVGNTEAFF

SEQ ID NO: 40973 - protein, 13 aa, Homo sapiens
  CDR3 for alpha chain variable domain of TCR clone 20487 (TRAV2, TRAJ40)
CAVVTSGTYKYIF

SEQ ID NO: 40974 - protein, 15 aa, Homo sapiens
  CDR3 for beta chain variable domain of TCR clone 20487 (TRBV11-3, TRBJ2-3)
CASLKDGREGDAQYF

SEQ ID NO: 40975 - protein, 14 aa, Homo sapiens
  CDR3 for alpha chain variable domain of TCR clone 20488 (TRAV38-1, TRAJ39)
CAFAYNNAGNMLTF

SEQ ID NO: 40976 - protein, 15 aa, Homo sapiens
  CDR3 for beta chain variable domain of TCR clone 20488 (TRBV19, TRBJ2-6)
CASSIGPSGANVLTS

SEQ ID NO: 40977 - protein, 14 aa, Homo sapiens
  CDR3 for alpha chain variable domain of TCR clone 20489 (TRAV12-3, TRAJ42)
CAMNYGGSQGNLIF

SEQ ID NO: 40978 - protein, 15 aa, Homo sapiens
  CDR3 for beta chain variable domain of TCR clone 20489 (TRBV9, TRBJ1-6)
CASSVAGTGDSPLHF

SEQ ID NO: 40979 - protein, 23 aa, Homo sapiens
  CDR3 for alpha chain variable domain of TCR clone 20490 (TRAV26-1, TRAJ38)
CIADNAGNNHIQNPDPAVYQLRD

SEQ ID NO: 40980 - protein, 13 aa, Homo sapiens
  CDR3 for beta chain variable domain of TCR clone 20490 (TRBV20-1, TRBJ1-1)
CSARGGGDTEAFF

SEQ ID NO: 40981 - protein, 11 aa, Homo sapiens
  CDR3 for alpha chain variable domain of TCR clone 20491 (TRAV2, TRAJ13)
CASGGYQKVTF

SEQ ID NO: 40982 - protein, 14 aa, Homo sapiens
  CDR3 for beta chain variable domain of TCR clone 20491 (TRBV12-4, TRBJ1-1)
CASSLGTGGTEAFF

SEQ ID NO: 40983 - protein, 11 aa, Homo sapiens
  CDR3 for alpha chain variable domain of TCR clone 20492 (TRAV2, TRAJ13)
CDSGGYQKVTF

SEQ ID NO: 40984 - protein, 16 aa, Homo sapiens
  CDR3 for beta chain variable domain of TCR clone 20492 (TRBV6-1, TRBJ2-5)
CASSETLDRGAETQYF

SEQ ID NO: 40985 - protein, 13 aa, Homo sapiens
  CDR3 for alpha chain variable domain of TCR clone 20493 (TRAV8-4, TRAJ48)
CAVSLFGNEKLTF

SEQ ID NO: 40986 - protein, 12 aa, Homo sapiens
  CDR3 for beta chain variable domain of TCR clone 20493 (TRBV11-2, TRBJ2-2)
CASSLGGGELFF

SEQ ID NO: 40987 - protein, 14 aa, Homo sapiens
  CDR3 for alpha chain variable domain of TCR clone 20494 (TRAV16, TRAJ33)
CALSAMDSNYQLIL

SEQ ID NO: 40988 - protein, 12 aa, Homo sapiens
  CDR3 for beta chain variable domain of TCR clone 20494 (TRBV5-1, TRBJ1-2)
CASSQDTYGYTF

SEQ ID NO: 40989 - protein, 14 aa, Homo sapiens
  CDR3 for alpha chain variable domain of TCR clone 20495 (TRAV12-1, TRAJ17)
CVGNFKAAGNKLTF

SEQ ID NO: 40990 - protein, 17 aa, Homo sapiens
  CDR3 for beta chain variable domain of TCR clone 20495 (TRBV20-1, TRBJ2-1)
CSASASGLAGSYNEQFF

SEQ ID NO: 40991 - protein, 12 aa, Homo sapiens
  CDR3 for alpha chain variable domain of TCR clone 20496 (TRAV13-2, TRAJ8)
CAPWLGFQKLVF

SEQ ID NO: 40992 - protein, 17 aa, Homo sapiens
  CDR3 for beta chain variable domain of TCR clone 20496 (TRBV13, TRBJ2-3)
CASSLSRVAGGRNTQYF

SEQ ID NO: 40993 - protein, 17 aa, Homo sapiens
  CDR3 for alpha chain variable domain of TCR clone 20497 (TRAV3, TRAJ6)
CAVRDGPRAGGSYIPTF

SEQ ID NO: 40994 - protein, 15 aa, Homo sapiens
  CDR3 for beta chain variable domain of TCR clone 20497 (TRBV7-3, TRBJ2-1)
CASSPTGGGEVEQFF

SEQ ID NO: 40995 - protein, 15 aa, Homo sapiens
  CDR3 for alpha chain variable domain of TCR clone 20498 (TRAV12-3, TRAJ6)
CAMSATTGGSYIPTF

SEQ ID NO: 40996 - protein, 16 aa, Homo sapiens
  CDR3 for beta chain variable domain of TCR clone 20498 (TRBV20-1, TRBJ1-2)
CSASMGQGVANYGYTF

SEQ ID NO: 40997 - protein, 13 aa, Homo sapiens
  CDR3 for alpha chain variable domain of TCR clone 20499 (TRAV13-2, TRAJ40)
CAEFTSGTYKYIF

SEQ ID NO: 40998 - protein, 14 aa, Homo sapiens
  CDR3 for beta chain variable domain of TCR clone 20499 (TRBV5-1, TRBJ2-7)
CASSRGESLYEQYF

SEQ ID NO: 40999 - protein, 13 aa, Homo sapiens
  CDR3 for alpha chain variable domain of TCR clone 20500 (TRAV1-2, TRAJ9)
CAALNTGGFKTIF

SEQ ID NO: 41000 - protein, 13 aa, Homo sapiens
  CDR3 for beta chain variable domain of TCR clone 20500 (TRBV19, TRBJ1-2)
CASNVPGQDGYTF

SEQ ID NO: 41001 - protein, 14 aa, Homo sapiens
  CDR3 for alpha chain variable domain of TCR clone 20501 (TRAV17, TRAJ22)
CATSPSGSARQLTF

SEQ ID NO: 41002 - protein, 15 aa, Homo sapiens
  CDR3 for beta chain variable domain of TCR clone 20501 (TRBV4-1, TRBJ2-5)
CASSQWDLYQETQHF

SEQ ID NO: 41003 - protein, 15 aa, Homo sapiens
  CDR3 for alpha chain variable domain of TCR clone 20502 (TRAV26-1, TRAJ29)
CIVRVEGSGNTPLVF

SEQ ID NO: 41004 - protein, 15 aa, Homo sapiens
  CDR3 for beta chain variable domain of TCR clone 20502 (TRBV7-9, TRBJ1-5)
CASSQGHQPNQPQQF

SEQ ID NO: 41005 - protein, 15 aa, Homo sapiens
  CDR3 for alpha chain variable domain of TCR clone 20503 (TRAV13-1, TRAJ43)
CAATPELGGNNDIRF

SEQ ID NO: 41006 - protein, 15 aa, Homo sapiens
  CDR3 for beta chain variable domain of TCR clone 20503 (TRBV10-2, TRBJ2-6)
CASSEQGTGANVLTF

SEQ ID NO: 41007 - protein, 23 aa, Homo sapiens
  CDR3 for alpha chain variable domain of TCR clone 20504 (TRAV30, TRAJ43)
CTLRPPSSVTQEPTSAALSGMRF

SEQ ID NO: 41008 - protein, 13 aa, Homo sapiens
  CDR3 for beta chain variable domain of TCR clone 20504 (TRBV12-4, TRBJ2-2)
CASSITGSGELFF

SEQ ID NO: 41009 - protein, 17 aa, Homo sapiens
  CDR3 for alpha chain variable domain of TCR clone 20505 (TRAV26-1, TRAJ53)
CIVRVDDSGGSNYKMTF

SEQ ID NO: 41010 - protein, 15 aa, Homo sapiens
  CDR3 for beta chain variable domain of TCR clone 20505 (TRBV20-1, TRBJ2-7)
CSARVPAAYFYEQYF

SEQ ID NO: 41011 - protein, 12 aa, Homo sapiens
  CDR3 for alpha chain variable domain of TCR clone 20506 (TRAV12-3, TRAJ17)
CAMALTGNKLTF

SEQ ID NO: 41012 - protein, 15 aa, Homo sapiens
  CDR3 for beta chain variable domain of TCR clone 20506 (TRBV20-1, TRBJ2-7)
CSARDQVSGMDEQYF

SEQ ID NO: 41013 - protein, 13 aa, Homo sapiens
  CDR3 for alpha chain variable domain of TCR clone 20507 (TRAV26-1, TRAJ30)
CIVRVESNDKIIF

SEQ ID NO: 41014 - protein, 16 aa, Homo sapiens
  CDR3 for beta chain variable domain of TCR clone 20507 (TRBV13, TRBJ2-3)
CQQPLQGSGGRNTQYF

SEQ ID NO: 41015 - protein, 14 aa, Homo sapiens
  CDR3 for alpha chain variable domain of TCR clone 20508 (TRAV12-3, TRAJ5)
CAMSTCTGRRALTF

SEQ ID NO: 41016 - protein, 13 aa, Homo sapiens
  CDR3 for beta chain variable domain of TCR clone 20508 (TRBV28, TRBJ2-3)
CASSTGGGDTQYF

SEQ ID NO: 41017 - protein, 10 aa, Homo sapiens
  CDR3 for alpha chain variable domain of TCR clone 20509 (TRAV1-2, TRAJ31)
CVSEDARPMF

SEQ ID NO: 41018 - protein, 14 aa, Homo sapiens
  CDR3 for beta chain variable domain of TCR clone 20509 (TRBV19, TRBJ2-1)
CASPTFVLSGEQFF

SEQ ID NO: 41019 - protein, 13 aa, Homo sapiens
  CDR3 for alpha chain variable domain of TCR clone 20510 (TRAV30, TRAJ34)
CGTVGYNTDELIF

SEQ ID NO: 41020 - protein, 16 aa, Homo sapiens
  CDR3 for beta chain variable domain of TCR clone 20510 (TRBV7-9, TRBJ1-2)
CASSLGFSSGEDGYTF

SEQ ID NO: 41021 - protein, 17 aa, Homo sapiens
  CDR3 for alpha chain variable domain of TCR clone 20511 (TRAV3, TRAJ6)
CAVRDGPRAGGSYIPTF

SEQ ID NO: 41022 - protein, 21 aa, Homo sapiens
  CDR3 for beta chain variable domain of TCR clone 20511 (TRBV7-2, TRBJ2-7)
RRTRPCISVPAALRLVYEQYF

SEQ ID NO: 41023 - protein, 13 aa, Homo sapiens
  CDR3 for alpha chain variable domain of TCR clone 20512 (TRAV30, TRAJ24)
CGTVTDSWGKLQF

SEQ ID NO: 41024 - protein, 14 aa, Homo sapiens
  CDR3 for beta chain variable domain of TCR clone 20512 (TRBV6-3, TRBJ2-2)
CASTYTPDAGELFF

SEQ ID NO: 41025 - protein, 13 aa, Homo sapiens
  CDR3 for alpha chain variable domain of TCR clone 20513 (TRAV23/DV6, TRAJ16)
CAASISDGQKLLF

SEQ ID NO: 41026 - protein, 15 aa, Homo sapiens
  CDR3 for beta chain variable domain of TCR clone 20513 (TRBV2, TRBJ2-2)
CASSRETVGTGELFL

SEQ ID NO: 41027 - protein, 16 aa, Homo sapiens
  CDR3 for alpha chain variable domain of TCR clone 20514 (TRAV3, TRAJ37)
CAARPHGSGNTGKLIF

SEQ ID NO: 41028 - protein, 16 aa, Homo sapiens
  CDR3 for beta chain variable domain of TCR clone 20514 (TRBV9, TRBJ1-2)
CASSVEEKVSPYGYTF

SEQ ID NO: 41029 - protein, 15 aa, Homo sapiens
  CDR3 for alpha chain variable domain of TCR clone 20515 (TRAV38-1, TRAJ37)
CAFIHGSGNTGTLIF

SEQ ID NO: 41030 - protein, 12 aa, Homo sapiens
  CDR3 for beta chain variable domain of TCR clone 20515 (TRBV7-9, TRBJ2-7)
CASSFGSYEQYF

SEQ ID NO: 41031 - protein, 14 aa, Homo sapiens
  CDR3 for alpha chain variable domain of TCR clone 20516 (TRAV1-2, TRAJ8)
CAVREDTGFQKLVF

SEQ ID NO: 41032 - protein, 15 aa, Homo sapiens
  CDR3 for beta chain variable domain of TCR clone 20516 (TRBV28, TRBJ2-7)
CASSPGGRGFYEQYF

SEQ ID NO: 41033 - protein, 10 aa, Homo sapiens
  CDR3 for alpha chain variable domain of TCR clone 20517 (TRAV26-1, TRAJ40)
CIAGTYKYIS

SEQ ID NO: 41034 - protein, 15 aa, Homo sapiens
  CDR3 for beta chain variable domain of TCR clone 20517 (TRBV19, TRBJ2-1)
CASSSPGVPLDEQFF

SEQ ID NO: 41035 - protein, 14 aa, Homo sapiens
  CDR3 for alpha chain variable domain of TCR clone 20518 (TRAV16, TRAJ39)
CALSKNNAGNMLTF

SEQ ID NO: 41036 - protein, 15 aa, Homo sapiens
  CDR3 for beta chain variable domain of TCR clone 20518 (TRBV6-3, TRBJ2-7)
CASSSPGTVFYEQYF

SEQ ID NO: 41037 - protein, 17 aa, Homo sapiens
  CDR3 for alpha chain variable domain of TCR clone 20519 (TRAV8-6, TRAJ58)
CAVSFWVGETSGSRLTF

SEQ ID NO: 41038 - protein, 14 aa, Homo sapiens
  CDR3 for beta chain variable domain of TCR clone 20519 (TRBV4-2, TRBJ2-1)
CASGLDRAYNEQFF

SEQ ID NO: 41039 - protein, 14 aa, Homo sapiens
  CDR3 for alpha chain variable domain of TCR clone 20520 (TRAV26-1, TRAJ38)
CIADNAGNNRKLIW

SEQ ID NO: 41040 - protein, 17 aa, Homo sapiens
  CDR3 for beta chain variable domain of TCR clone 20520 (TRBV11-2, TRBJ2-1)
CASSLYPPGVEYNEQFF

SEQ ID NO: 41041 - protein, 11 aa, Homo sapiens
  CDR3 for alpha chain variable domain of TCR clone 20521 (TRAV2, TRAJ33)
CAAESNYQLIW

SEQ ID NO: 41042 - protein, 15 aa, Homo sapiens
  CDR3 for beta chain variable domain of TCR clone 20521 (TRBV19, TRBJ1-1)
CASTSGQIQNTEAFF

SEQ ID NO: 41043 - protein, 12 aa, Homo sapiens
  CDR3 for alpha chain variable domain of TCR clone 20522 (TRAV12-3, TRAJ17)
CVMTLTGNKLTF

SEQ ID NO: 41044 - protein, 15 aa, Homo sapiens
  CDR3 for beta chain variable domain of TCR clone 20522 (TRBV20-1, TRBJ2-7)
CSARDRVSGMDEQCF

SEQ ID NO: 41045 - protein, 13 aa, Homo sapiens
  CDR3 for alpha chain variable domain of TCR clone 20523 (TRAV26-2, TRAJ43)
CILRAVNNNDVRF

SEQ ID NO: 41046 - protein, 15 aa, Homo sapiens
  CDR3 for beta chain variable domain of TCR clone 20523 (TRBV7-2, TRBJ2-1)
CASTHGTGIYNEQFF

SEQ ID NO: 41047 - protein, 14 aa, Homo sapiens
  CDR3 for alpha chain variable domain of TCR clone 20524 (TRAV12-2, TRAJ4)
CAEDLSGGYNKLIF

SEQ ID NO: 41048 - protein, 13 aa, Homo sapiens
  CDR3 for beta chain variable domain of TCR clone 20524 (TRBV7-9, TRBJ1-2)
RASSLKQNYGYTF

SEQ ID NO: 41049 - protein, 16 aa, Homo sapiens
  CDR3 for alpha chain variable domain of TCR clone 20525 (TRAV30, TRAJ24)
CGTGIVDADSWGKFQF

SEQ ID NO: 41050 - protein, 16 aa, Homo sapiens
  CDR3 for beta chain variable domain of TCR clone 20525 (TRBV12-5, TRBJ2-5)
CASGPRTSGNQETQYF

SEQ ID NO: 41051 - protein, 13 aa, Homo sapiens
  CDR3 for alpha chain variable domain of TCR clone 20526 (TRAV13-1, TRAJ5)
CAASDTGRSALTF

SEQ ID NO: 41052 - protein, 12 aa, Homo sapiens
  CDR3 for beta chain variable domain of TCR clone 20526 (TRBV28, TRBJ2-3)
CASSLYRDTQYF

SEQ ID NO: 41053 - protein, 11 aa, Homo sapiens
  CDR3 for alpha chain variable domain of TCR clone 20527 (TRAV1-2, TRAJ20)
CAVSNDYKLSF

SEQ ID NO: 41054 - protein, 18 aa, Homo sapiens
  CDR3 for beta chain variable domain of TCR clone 20527 (TRBV20-1, TRBJ2-6)
CSAETTPTHGSGANVLTF

SEQ ID NO: 41055 - protein, 13 aa, Homo sapiens
  CDR3 for alpha chain variable domain of TCR clone 20528 (TRAV8-6, TRAJ21)
CAVSPSSLNKFYF

SEQ ID NO: 41056 - protein, 14 aa, Homo sapiens
  CDR3 for beta chain variable domain of TCR clone 20528 (TRBV7-9, TRBJ2-5)
CASSLDTAQETQYF

SEQ ID NO: 41057 - protein, 15 aa, Homo sapiens
  CDR3 for alpha chain variable domain of TCR clone 20529 (TRAV26-1, TRAJ40)
CIVRVTTSGTYKYIF

SEQ ID NO: 41058 - protein, 12 aa, Homo sapiens
  CDR3 for beta chain variable domain of TCR clone 20529 (TRBV7-9, TRBJ1-4)
CASSTDRENLFF

SEQ ID NO: 41059 - protein, 13 aa, Homo sapiens
  CDR3 for alpha chain variable domain of TCR clone 20530 (TRAV12-1, TRAJ31)
CVVNMNNDARLMF

SEQ ID NO: 41060 - protein, 15 aa, Homo sapiens
  CDR3 for beta chain variable domain of TCR clone 20530 (TRBV4-1, TRBJ1-2)
CASSQGQGAAYGYTF

SEQ ID NO: 41061 - protein, 13 aa, Homo sapiens
  CDR3 for alpha chain variable domain of TCR clone 20531 (TRAV8-3, TRAJ44)
CAVVPGTASKLTF

SEQ ID NO: 41062 - protein, 14 aa, Homo sapiens
  CDR3 for beta chain variable domain of TCR clone 20531 (TRBV11-2, TRBJ2-3)
CASGRLARTDTQYF

SEQ ID NO: 41063 - protein, 19 aa, Homo sapiens
  CDR3 for alpha chain variable domain of TCR clone 20532 (TRAV26-1, TRAJ52)
CIVKAHRNAGGTSYGKLTF

SEQ ID NO: 41064 - protein, 15 aa, Homo sapiens
  CDR3 for beta chain variable domain of TCR clone 20532 (TRBV29-1, TRBJ2-1)
CSGRDRKSSYNEQFF

SEQ ID NO: 41065 - protein, 12 aa, Homo sapiens
  CDR3 for alpha chain variable domain of TCR clone 20533 (TRAV2, TRAJ9)
CAVGAGGFKTIF

SEQ ID NO: 41066 - protein, 16 aa, Homo sapiens
  CDR3 for beta chain variable domain of TCR clone 20533 (TRBV13, TRBJ2-2)
CASRPRTGEHTGELFF

SEQ ID NO: 41067 - protein, 11 aa, Homo sapiens
  CDR3 for alpha chain variable domain of TCR clone 20534 (TRAV3, TRAJ21)
WAVGNFNKFYF

SEQ ID NO: 41068 - protein, 16 aa, Homo sapiens
  CDR3 for beta chain variable domain of TCR clone 20534 (TRBV19, TRBJ2-1)
CASSKAGPSSYNEQFF

SEQ ID NO: 41069 - protein, 13 aa, Homo sapiens
  CDR3 for alpha chain variable domain of TCR clone 20535 (TRAV27, TRAJ45)
CRSSGGGADRLTF

SEQ ID NO: 41070 - protein, 17 aa, Homo sapiens
  CDR3 for beta chain variable domain of TCR clone 20535 (TRBV11-2, TRBJ2-1)
CASSLYPPGVEYNEQFF

SEQ ID NO: 41071 - protein, 12 aa, Homo sapiens
  CDR3 for alpha chain variable domain of TCR clone 20536 (TRAV36/DV7, TRAJ54)
CAVVRGAQKLVF

SEQ ID NO: 41072 - protein, 14 aa, Homo sapiens
  CDR3 for beta chain variable domain of TCR clone 20536 (TRBV7-3, TRBJ1-1)
CASSVKGGNTEAFF

SEQ ID NO: 41073 - protein, 15 aa, Homo sapiens
  CDR3 for alpha chain variable domain of TCR clone 20537 (TRAV2, TRAJ9)
CAVEDRGNGGFKTIF

SEQ ID NO: 41074 - protein, 16 aa, Homo sapiens
  CDR3 for beta chain variable domain of TCR clone 20537 (TRBV24-1, TRBJ2-3)
CATSDPGTGATDTQYF

SEQ ID NO: 41075 - protein, 13 aa, Homo sapiens
  CDR3 for alpha chain variable domain of TCR clone 20538 (TRAV17, TRAJ54)
CATSWGGAQKLVF

SEQ ID NO: 41076 - protein, 15 aa, Homo sapiens
  CDR3 for beta chain variable domain of TCR clone 20538 (TRBV4-3, TRBJ2-3)
CASSPSLLATDTQYF

SEQ ID NO: 41077 - protein, 15 aa, Homo sapiens
  CDR3 for alpha chain variable domain of TCR clone 20539 (TRAV21, TRAJ13)
CAVPRSFWGLPESYL

SEQ ID NO: 41078 - protein, 13 aa, Homo sapiens
  CDR3 for beta chain variable domain of TCR clone 20539 (TRBV7-9, TRBJ1-2)
CASSLKQNYGYTF

SEQ ID NO: 41079 - protein, 13 aa, Homo sapiens
  CDR3 for alpha chain variable domain of TCR clone 20540 (TRAV29/DV5, TRAJ31)
CAASRNNNARLMF

SEQ ID NO: 41080 - protein, 14 aa, Homo sapiens
  CDR3 for beta chain variable domain of TCR clone 20540 (TRBV7-2, TRBJ2-5)
CASSPRGSLETQYF

SEQ ID NO: 41081 - protein, 14 aa, Homo sapiens
  CDR3 for alpha chain variable domain of TCR clone 20541 (TRAV13-1, TRAJ35)
CAASKGGFGNVLHC

SEQ ID NO: 41082 - protein, 13 aa, Homo sapiens
  CDR3 for beta chain variable domain of TCR clone 20541 (TRBV7-3, TRBJ1-1)
CANSQDWGAEAFF

SEQ ID NO: 41083 - protein, 13 aa, Homo sapiens
  CDR3 for alpha chain variable domain of TCR clone 20542 (TRAV1-1, TRAJ9)
CSAKNTGGFKTIF

SEQ ID NO: 41084 - protein, 14 aa, Homo sapiens
  CDR3 for beta chain variable domain of TCR clone 20542 (TRBV20-1, TRBJ2-1)
CSAQIGGSANEQFF

SEQ ID NO: 41085 - protein, 14 aa, Homo sapiens
  CDR3 for alpha chain variable domain of TCR clone 20543 (TRAV21, TRAJ35)
CAVMPIGFGNVLHC

SEQ ID NO: 41086 - protein, 12 aa, Homo sapiens
  CDR3 for beta chain variable domain of TCR clone 20543 (TRBV7-9, TRBJ2-7)
CASSIKREEQYS

SEQ ID NO: 41087 - protein, 13 aa, Homo sapiens
  CDR3 for alpha chain variable domain of TCR clone 20544 (TRAV30, TRAJ44)
CGSNTGTASKLTF

SEQ ID NO: 41088 - protein, 15 aa, Homo sapiens
  CDR3 for beta chain variable domain of TCR clone 20544 (TRBV5-1, TRBJ1-1)
CASSLDTVRDTEAFF

SEQ ID NO: 41089 - protein, 12 aa, Homo sapiens
  CDR3 for alpha chain variable domain of TCR clone 20545 (TRAV12-3, TRAJ17)
CAMTLTGNKPTF

SEQ ID NO: 41090 - protein, 13 aa, Homo sapiens
  CDR3 for beta chain variable domain of TCR clone 20545 (TRBV7-9, TRBJ1-2)
CASSLKQNYGYTF

SEQ ID NO: 41091 - protein, 17 aa, Homo sapiens
  CDR3 for alpha chain variable domain of TCR clone 20546 (TRAV23/DV6, TRAJ53)
CAASKLGSGGSNYKLTF

SEQ ID NO: 41092 - protein, 18 aa, Homo sapiens
  CDR3 for beta chain variable domain of TCR clone 20546 (TRBV11-2, TRBJ2-3)
CASSLGGASRGAPNTQYF

SEQ ID NO: 41093 - protein, 16 aa, Homo sapiens
  CDR3 for alpha chain variable domain of TCR clone 20547 (TRAV3, TRAJ21)
CAVGDIERGNFNKFYF

SEQ ID NO: 41094 - protein, 13 aa, Homo sapiens
  CDR3 for beta chain variable domain of TCR clone 20547 (TRBV27, TRBJ2-7)
CASSLTTGYEQYF

SEQ ID NO: 41095 - protein, 14 aa, Homo sapiens
  CDR3 for alpha chain variable domain of TCR clone 20548 (TRAV13-1, TRAJ35)
CAASKGGFGNVLHC

SEQ ID NO: 41096 - protein, 20 aa, Homo sapiens
  CDR3 for beta chain variable domain of TCR clone 20548 (TRBV7-8, TRBJ2-2)
CASSHLFPGPTIHITGELFF

SEQ ID NO: 41097 - protein, 14 aa, Homo sapiens
  CDR3 for alpha chain variable domain of TCR clone 20549 (TRAV1-2, TRAJ16)
CAVNRFSDGQKLLF

SEQ ID NO: 41098 - protein, 15 aa, Homo sapiens
  CDR3 for beta chain variable domain of TCR clone 20549 (TRBV20-1, TRBJ2-7)
CSARDQVSGMDEQYF

SEQ ID NO: 41099 - protein, 12 aa, Homo sapiens
  CDR3 for alpha chain variable domain of TCR clone 20550 (TRAV21, TRAJ31)
CAVWGNNARLLF

SEQ ID NO: 41100 - protein, 16 aa, Homo sapiens
  CDR3 for beta chain variable domain of TCR clone 20550 (TRBV27, TRBJ2-5)
CASSYGPGGQKETQYF

SEQ ID NO: 41101 - protein, 12 aa, Homo sapiens
  CDR3 for alpha chain variable domain of TCR clone 20551 (TRAV16, TRAJ26)
CALRSYGQNFVF

SEQ ID NO: 41102 - protein, 13 aa, Homo sapiens
  CDR3 for beta chain variable domain of TCR clone 20551 (TRBV12-4, TRBJ1-1)
CASSPGTSFEAFF

SEQ ID NO: 41103 - protein, 14 aa, Homo sapiens
  CDR3 for alpha chain variable domain of TCR clone 20552 (TRAV8-2, TRAJ4)
CVVSPSGGYNKLIF

SEQ ID NO: 41104 - protein, 15 aa, Homo sapiens
  CDR3 for beta chain variable domain of TCR clone 20552 (TRBV4-1, TRBJ1-4)
CASSDTGGTNETLFF

SEQ ID NO: 41105 - protein, 14 aa, Homo sapiens
  CDR3 for alpha chain variable domain of TCR clone 20553 (TRAV1-1, TRAJ27)
CAVIYNTNADKSTF

SEQ ID NO: 41106 - protein, 15 aa, Homo sapiens
  CDR3 for beta chain variable domain of TCR clone 20553 (TRBV6-3, TRBJ2-7)
CASSSPGTVFYEQYF

SEQ ID NO: 41107 - protein, 23 aa, Homo sapiens
  CDR3 for alpha chain variable domain of TCR clone 20554 (TRAV12-2, TRAJ36)
SLLIRDSQPSDSATLERANNLFF

SEQ ID NO: 41108 - protein, 15 aa, Homo sapiens
  CDR3 for beta chain variable domain of TCR clone 20554 (TRBV29-1, TRBJ2-7)
CSVEFFDRGSYEQYF

SEQ ID NO: 41109 - protein, 13 aa, Homo sapiens
  CDR3 for alpha chain variable domain of TCR clone 20555 (TRAV2, TRAJ40)
CAVVTSGTYKYIF

SEQ ID NO: 41110 - protein, 14 aa, Homo sapiens
  CDR3 for beta chain variable domain of TCR clone 20555 (TRBV19, TRBJ2-1)
CASPTFVLSGEEFF

SEQ ID NO: 41111 - protein, 15 aa, Homo sapiens
  CDR3 for alpha chain variable domain of TCR clone 20556 (TRAV8-3, TRAJ40)
CAAPSLGSGTYNYIF

SEQ ID NO: 41112 - protein, 16 aa, Homo sapiens
  CDR3 for beta chain variable domain of TCR clone 20556 (TRBV7-3, TRBJ2-3)
CASSLSGYRPEDTQYF

SEQ ID NO: 41113 - protein, 15 aa, Homo sapiens
  CDR3 for alpha chain variable domain of TCR clone 20557 (TRAV8-3, TRAJ27)
CAVGPSKNNAGKSTF

SEQ ID NO: 41114 - protein, 15 aa, Homo sapiens
  CDR3 for beta chain variable domain of TCR clone 20557 (TRBV7-2, TRBJ2-1)
CASSSGLAGGNEQFF

SEQ ID NO: 41115 - protein, 11 aa, Homo sapiens
  CDR3 for alpha chain variable domain of TCR clone 20558 (TRAV17, TRAJ43)
CATPRSNDMRF

SEQ ID NO: 41116 - protein, 15 aa, Homo sapiens
  CDR3 for beta chain variable domain of TCR clone 20558 (TRBV11-2, TRBJ2-1)
CASSLGASGLNEQFF

SEQ ID NO: 41117 - protein, 17 aa, Homo sapiens
  CDR3 for alpha chain variable domain of TCR clone 20559 (TRAV27, TRAJ42)
CAERVIYYGGSQGNLIF

SEQ ID NO: 41118 - protein, 14 aa, Homo sapiens
  CDR3 for beta chain variable domain of TCR clone 20559 (TRBV7-2, TRBJ2-3)
CQQLRGGGRDTQYF

SEQ ID NO: 41119 - protein, 15 aa, Homo sapiens
  CDR3 for alpha chain variable domain of TCR clone 20560 (TRAV12-2, TRAJ53)
CAVNGGGGSNYKLTF

SEQ ID NO: 41120 - protein, 14 aa, Homo sapiens
  CDR3 for beta chain variable domain of TCR clone 20560 (TRBV19, TRBJ2-1)
CASPTFVLSGEQFF

SEQ ID NO: 41121 - protein, 14 aa, Homo sapiens
  CDR3 for alpha chain variable domain of TCR clone 20561 (TRAV29/DV5, TRAJ36)
CAARRKTGANNLFF

SEQ ID NO: 41122 - protein, 14 aa, Homo sapiens
  CDR3 for beta chain variable domain of TCR clone 20561 (TRBV7-3, TRBJ2-1)
CASSLAGGTNEQFF

SEQ ID NO: 41123 - protein, 18 aa, Homo sapiens
  CDR3 for alpha chain variable domain of TCR clone 20562 (TRAV21, TRAJ52)
CAVRPSPAGGTSYGKLTF

SEQ ID NO: 41124 - protein, 15 aa, Homo sapiens
  CDR3 for beta chain variable domain of TCR clone 20562 (TRBV7-2, TRBJ2-1)
CASSSGLAGGNEQFF

SEQ ID NO: 41125 - protein, 11 aa, Homo sapiens
  CDR3 for alpha chain variable domain of TCR clone 20563 (TRAV4, TRAJ31)
CLVGDNARLLF

SEQ ID NO: 41126 - protein, 16 aa, Homo sapiens
  CDR3 for beta chain variable domain of TCR clone 20563 (TRBV7-2, TRBJ2-5)
CASSSKWLSGQETQYF

SEQ ID NO: 41127 - protein, 15 aa, Homo sapiens
  CDR3 for alpha chain variable domain of TCR clone 20564 (TRAV8-4, TRAJ7)
CAVSGGNYGNNRPAF

SEQ ID NO: 41128 - protein, 11 aa, Homo sapiens
  CDR3 for beta chain variable domain of TCR clone 20564 (TRBV20-1, TRBJ2-1)
CSLSSGSEQFF

SEQ ID NO: 41129 - protein, 14 aa, Homo sapiens
  CDR3 for alpha chain variable domain of TCR clone 20565 (TRAV17, TRAJ16)
CATADFSAGQKLLF

SEQ ID NO: 41130 - protein, 15 aa, Homo sapiens
  CDR3 for beta chain variable domain of TCR clone 20565 (TRBV18, TRBJ2-1)
CASSPPSASYNEQFF

SEQ ID NO: 41131 - protein, 16 aa, Homo sapiens
  CDR3 for alpha chain variable domain of TCR clone 20566 (TRAV3, TRAJ21)
CAVRDIGRGNFNKFYF

SEQ ID NO: 41132 - protein, 13 aa, Homo sapiens
  CDR3 for beta chain variable domain of TCR clone 20566 (TRBV27, TRBJ2-7)
CASSLTTGYEQYF

SEQ ID NO: 41133 - protein, 11 aa, Homo sapiens
  CDR3 for alpha chain variable domain of TCR clone 20567 (TRAV8-3, TRAJ36)
CAVGATGQTTS

SEQ ID NO: 41134 - protein, 15 aa, Homo sapiens
  CDR3 for beta chain variable domain of TCR clone 20567 (TRBV7-2, TRBJ1-2)
CASSPRAGWNYGYTF

SEQ ID NO: 41135 - protein, 15 aa, Homo sapiens
  CDR3 for alpha chain variable domain of TCR clone 20568 (TRAV21, TRAJ22)
CAVRLFFWFCKATDL

SEQ ID NO: 41136 - protein, 14 aa, Homo sapiens
  CDR3 for beta chain variable domain of TCR clone 20568 (TRBV19, TRBJ1-5)
CASRAPDSFLAQHF

SEQ ID NO: 41137 - protein, 12 aa, Homo sapiens
  CDR3 for alpha chain variable domain of TCR clone 20569 (TRAV8-3, TRAJ20)
CAVGANDYELSF

SEQ ID NO: 41138 - protein, 16 aa, Homo sapiens
  CDR3 for beta chain variable domain of TCR clone 20569 (TRBV19, TRBJ2-2)
CASRSPGTGATGELSF

SEQ ID NO: 41139 - protein, 13 aa, Homo sapiens
  CDR3 for alpha chain variable domain of TCR clone 20570 (TRAV21, TRAJ27)
CAARPGNAGTSTF

SEQ ID NO: 41140 - protein, 14 aa, Homo sapiens
  CDR3 for beta chain variable domain of TCR clone 20570 (TRBV11-2, TRBJ2-7)
CASSLGAGAYEQYF

SEQ ID NO: 41141 - protein, 14 aa, Homo sapiens
  CDR3 for alpha chain variable domain of TCR clone 20571 (TRAV1-2, TRAJ16)
CAVNRFSDGQKLLF

SEQ ID NO: 41142 - protein, 15 aa, Homo sapiens
  CDR3 for beta chain variable domain of TCR clone 20571 (TRBV7-2, TRBJ2-2)
CASRRPGQNTGELFF

SEQ ID NO: 41143 - protein, 10 aa, Homo sapiens
  CDR3 for alpha chain variable domain of TCR clone 20572 (TRAV23/DV6, TRAJ57)
CAASSTLSQG

SEQ ID NO: 41144 - protein, 13 aa, Homo sapiens
  CDR3 for beta chain variable domain of TCR clone 20572 (TRBV5-7, TRBJ2-3)
CASSLGRTDTQYF

SEQ ID NO: 41145 - protein, 15 aa, Homo sapiens
  CDR3 for alpha chain variable domain of TCR clone 20573 (TRAV26-1, TRAJ29)
CIVRVEGSGTTPLVF

SEQ ID NO: 41146 - protein, 14 aa, Homo sapiens
  CDR3 for beta chain variable domain of TCR clone 20573 (TRBV18, TRBJ2-5)
CASSPGVSQETQYF

SEQ ID NO: 41147 - protein, 12 aa, Homo sapiens
  CDR3 for alpha chain variable domain of TCR clone 20574 (TRAV13-1, TRAJ21)
CAAKEGFNKFYF

SEQ ID NO: 41148 - protein, 12 aa, Homo sapiens
  CDR3 for beta chain variable domain of TCR clone 20574 (TRBV11-2, TRBJ2-2)
CASNLGGGELFF

SEQ ID NO: 41149 - protein, 12 aa, Homo sapiens
  CDR3 for alpha chain variable domain of TCR clone 20575 (TRAV21, TRAJ49)
CAVSWTGNQFYF

SEQ ID NO: 41150 - protein, 18 aa, Homo sapiens
  CDR3 for beta chain variable domain of TCR clone 20575 (TRBV7-8, TRBJ2-1)
CASSPAGGLAGGLNEQFF

SEQ ID NO: 41151 - protein, 15 aa, Homo sapiens
  CDR3 for alpha chain variable domain of TCR clone 20576 (TRAV20, TRAJ58)
CAVQDLETSGSRSTF

SEQ ID NO: 41152 - protein, 12 aa, Homo sapiens
  CDR3 for beta chain variable domain of TCR clone 20576 (TRBV9, TRBJ2-2)
CASSARTGELFF

SEQ ID NO: 41153 - protein, 13 aa, Homo sapiens
  CDR3 for alpha chain variable domain of TCR clone 20577 (TRAV1-2, TRAJ20)
CAVRDGNDYKLSF

SEQ ID NO: 41154 - protein, 14 aa, Homo sapiens
  CDR3 for beta chain variable domain of TCR clone 20577 (TRBV7-2, TRBJ2-3)
CASSLGGGRDTQYF

SEQ ID NO: 41155 - protein, 13 aa, Homo sapiens
  CDR3 for alpha chain variable domain of TCR clone 20578 (TRAV1-2, TRAJ9)
CAALNTGGFKSIF

SEQ ID NO: 41156 - protein, 13 aa, Homo sapiens
  CDR3 for beta chain variable domain of TCR clone 20578 (TRBV19, TRBJ1-2)
CASSVPGQDGYTF

SEQ ID NO: 41157 - protein, 13 aa, Homo sapiens
  CDR3 for alpha chain variable domain of TCR clone 20579 (TRAV3, TRAJ28)
CCEKGAGSYQLTF

SEQ ID NO: 41158 - protein, 16 aa, Homo sapiens
  CDR3 for beta chain variable domain of TCR clone 20579 (TRBV4-1, TRBJ2-7)
CASSQEWTSGPLEQYF

SEQ ID NO: 41159 - protein, 12 aa, Homo sapiens
  CDR3 for alpha chain variable domain of TCR clone 20580 (TRAV12-3, TRAJ17)
CAMTLTGNKLTF

SEQ ID NO: 41160 - protein, 16 aa, Homo sapiens
  CDR3 for beta chain variable domain of TCR clone 20580 (TRBV5-4, TRBJ2-3)
CASQQPGAGGADTQYF

SEQ ID NO: 41161 - protein, 13 aa, Homo sapiens
  CDR3 for alpha chain variable domain of TCR clone 20581 (TRAV13-1, TRAJ21)
CAASKGNFNKFYF

SEQ ID NO: 41162 - protein, 16 aa, Homo sapiens
  CDR3 for beta chain variable domain of TCR clone 20581 (TRBV5-4, TRBJ2-3)
CASSGGTSGGTDTQYF

SEQ ID NO: 41163 - protein, 12 aa, Homo sapiens
  CDR3 for alpha chain variable domain of TCR clone 20582 (TRAV16, TRAJ10)
CSRPGGGNKLTF

SEQ ID NO: 41164 - protein, 15 aa, Homo sapiens
  CDR3 for beta chain variable domain of TCR clone 20582 (TRBV6-3, TRBJ2-7)
CASSSPGTVFYEQYF

SEQ ID NO: 41165 - protein, 14 aa, Homo sapiens
  CDR3 for alpha chain variable domain of TCR clone 20583 (TRAV38-1, TRAJ45)
CAYHSGGGADGLTF

SEQ ID NO: 41166 - protein, 20 aa, Homo sapiens
  CDR3 for beta chain variable domain of TCR clone 20583 (TRBV28, TRBJ2-1)
CASTPIGRSPGLAGGNEQFF

SEQ ID NO: 41167 - protein, 16 aa, Homo sapiens
  CDR3 for alpha chain variable domain of TCR clone 20584 (TRAV1-2, TRAJ10)
CAVRGVLTGGGNKLTF

SEQ ID NO: 41168 - protein, 12 aa, Homo sapiens
  CDR3 for beta chain variable domain of TCR clone 20584 (TRBV7-8, TRBJ2-7)
CASSLEDREQYF

SEQ ID NO: 41169 - protein, 16 aa, Homo sapiens
  CDR3 for alpha chain variable domain of TCR clone 20585 (TRAV8-3, TRAJ13)
CAVGAYPSGGYQQVTF

SEQ ID NO: 41170 - protein, 15 aa, Homo sapiens
  CDR3 for beta chain variable domain of TCR clone 20585 (TRBV19, TRBJ1-5)
CASSIVWADNQPQHF

SEQ ID NO: 41171 - protein, 14 aa, Homo sapiens
  CDR3 for alpha chain variable domain of TCR clone 20586 (TRAV26-1, TRAJ39)
CIVRGSRAGNMLTF

SEQ ID NO: 41172 - protein, 15 aa, Homo sapiens
  CDR3 for beta chain variable domain of TCR clone 20586 (TRBV7-9, TRBJ1-5)
CASSQGHHPNQPQHF

SEQ ID NO: 41173 - protein, 11 aa, Homo sapiens
  CDR3 for alpha chain variable domain of TCR clone 20587 (TRAV2, TRAJ13)
CASGGYQKVTF

SEQ ID NO: 41174 - protein, 14 aa, Homo sapiens
  CDR3 for beta chain variable domain of TCR clone 20587 (TRBV7-2, TRBJ1-1)
CASSFLTGTTEAFF

SEQ ID NO: 41175 - protein, 16 aa, Homo sapiens
  CDR3 for alpha chain variable domain of TCR clone 20588 (TRAV26-1, TRAJ37)
CIVRGDGSGNTGKLIL

SEQ ID NO: 41176 - protein, 17 aa, Homo sapiens
  CDR3 for beta chain variable domain of TCR clone 20588 (TRBV4-1, TRBJ2-7)
CASSRDPLGVRGGEQYF

SEQ ID NO: 41177 - protein, 11 aa, Homo sapiens
  CDR3 for alpha chain variable domain of TCR clone 20589 (TRAV1-1, TRAJ23)
CAVRQGGKLIF

SEQ ID NO: 41178 - protein, 20 aa, Homo sapiens
  CDR3 for beta chain variable domain of TCR clone 20589 (TRBV7-8, TRBJ2-2)
CASSHLFPEPTIHITGELFF

SEQ ID NO: 41179 - protein, 14 aa, Homo sapiens
  CDR3 for alpha chain variable domain of TCR clone 20590 (TRAV12-1, TRAJ13)
CVVIDSGGYQKVTF

SEQ ID NO: 41180 - protein, 12 aa, Homo sapiens
  CDR3 for beta chain variable domain of TCR clone 20590 (TRBV11-2, TRBJ2-2)
CASSLGGGELFF

SEQ ID NO: 41181 - protein, 11 aa, Homo sapiens
  CDR3 for alpha chain variable domain of TCR clone 20591 (TRAV3, TRAJ21)
CAVGNFNKFYV

SEQ ID NO: 41182 - protein, 16 aa, Homo sapiens
  CDR3 for beta chain variable domain of TCR clone 20591 (TRBV19, TRBJ2-1)
CASSKAGPSSYNEQFF

SEQ ID NO: 41183 - protein, 15 aa, Homo sapiens
  CDR3 for alpha chain variable domain of TCR clone 20592 (TRAV3, TRAJ5)
CAVRDLDTGRRALTF

SEQ ID NO: 41184 - protein, 13 aa, Homo sapiens
  CDR3 for beta chain variable domain of TCR clone 20592 (TRBV19, TRBJ1-2)
CASSVPGQDGYTF

SEQ ID NO: 41185 - protein, 18 aa, Homo sapiens
  CDR3 for alpha chain variable domain of TCR clone 20593 (TRAV21, TRAJ52)
CAVRPSPAGGTSYGKLTF

SEQ ID NO: 41186 - protein, 16 aa, Homo sapiens
  CDR3 for beta chain variable domain of TCR clone 20593 (TRBV6-1, TRBJ2-5)
CASSETLDRGAETQYF

SEQ ID NO: 41187 - protein, 11 aa, Homo sapiens
  CDR3 for alpha chain variable domain of TCR clone 20594 (TRAV1-2, TRAJ40)
CAVPGTYKYIF

SEQ ID NO: 41188 - protein, 15 aa, Homo sapiens
  CDR3 for beta chain variable domain of TCR clone 20594 (TRBV20-1, TRBJ2-7)
CSARDRVSGMDEQYF

SEQ ID NO: 41189 - protein, 14 aa, Homo sapiens
  CDR3 for alpha chain variable domain of TCR clone 20595 (TRAV8-3, TRAJ4)
CAVGAAGGYNTLIF

SEQ ID NO: 41190 - protein, 15 aa, Homo sapiens
  CDR3 for beta chain variable domain of TCR clone 20595 (TRBV6-5, TRBJ2-1)
CASSYDAGAGNEQFF

SEQ ID NO: 41191 - protein, 13 aa, Homo sapiens
  CDR3 for alpha chain variable domain of TCR clone 20596 (TRAV3, TRAJ21)
CAVREPDFNKFYF

SEQ ID NO: 41192 - protein, 13 aa, Homo sapiens
  CDR3 for beta chain variable domain of TCR clone 20596 (TRBV9, TRBJ2-1)
CASSPSGGNEEFF

SEQ ID NO: 41193 - protein, 14 aa, Homo sapiens
  CDR3 for alpha chain variable domain of TCR clone 20597 (TRAV35, TRAJ22)
CAGLRPGSARQLNF

SEQ ID NO: 41194 - protein, 15 aa, Homo sapiens
  CDR3 for beta chain variable domain of TCR clone 20597 (TRBV12-4, TRBJ2-5)
CASSPPTGLQETQYF

SEQ ID NO: 41195 - protein, 16 aa, Homo sapiens
  CDR3 for alpha chain variable domain of TCR clone 20598 (TRAV30, TRAJ24)
CGTEIVDADSWGKFQF

SEQ ID NO: 41196 - protein, 14 aa, Homo sapiens
  CDR3 for beta chain variable domain of TCR clone 20598 (TRBV11-2, TRBJ1-2)
CASSLGTANYGYTF

SEQ ID NO: 41197 - protein, 13 aa, Homo sapiens
  CDR3 for alpha chain variable domain of TCR clone 20599 (TRAV21, TRAJ9)
CAVRRSGGFKTIF

SEQ ID NO: 41198 - protein, 14 aa, Homo sapiens
  CDR3 for beta chain variable domain of TCR clone 20599 (TRBV20-1, TRBJ1-1)
CSATGVKGGTEAFF

SEQ ID NO: 41199 - protein, 11 aa, Homo sapiens
  CDR3 for alpha chain variable domain of TCR clone 20600 (TRAV1-1, TRAJ16)
CAAGDGQRLLF

SEQ ID NO: 41200 - protein, 15 aa, Homo sapiens
  CDR3 for beta chain variable domain of TCR clone 20600 (TRBV28, TRBJ1-2)
CASIPQGSDDYGYTF

SEQ ID NO: 41201 - protein, 14 aa, Homo sapiens
  CDR3 for alpha chain variable domain of TCR clone 20601 (TRAV1-2, TRAJ16)
CAVNRSSDGQKLLF

SEQ ID NO: 41202 - protein, 16 aa, Homo sapiens
  CDR3 for beta chain variable domain of TCR clone 20601 (TRBV27, TRBJ2-2)
CASSFRGLVRTGELFF

SEQ ID NO: 41203 - protein, 11 aa, Homo sapiens
  CDR3 for alpha chain variable domain of TCR clone 20602 (TRAV3, TRAJ21)
CAVGNFNKFYF

SEQ ID NO: 41204 - protein, 15 aa, Homo sapiens
  CDR3 for beta chain variable domain of TCR clone 20602 (TRBV27, TRBJ2-1)
CASSNGGGSSNEQFF

SEQ ID NO: 41205 - protein, 15 aa, Homo sapiens
  CDR3 for alpha chain variable domain of TCR clone 20603 (TRAV23/DV6, TRAJ13)
CAAWPGGGGYQKDTF

SEQ ID NO: 41206 - protein, 14 aa, Homo sapiens
  CDR3 for beta chain variable domain of TCR clone 20603 (TRBV6-1, TRBJ2-1)
CASAGGAIKNEQFF

SEQ ID NO: 41207 - protein, 15 aa, Homo sapiens
  CDR3 for alpha chain variable domain of TCR clone 20604 (TRAV3, TRAJ22)
CAVRDRGGSARQLIF

SEQ ID NO: 41208 - protein, 16 aa, Homo sapiens
  CDR3 for beta chain variable domain of TCR clone 20604 (TRBV5-4, TRBJ2-3)
CASQQPGAGGADTQYF

SEQ ID NO: 41209 - protein, 17 aa, Homo sapiens
  CDR3 for alpha chain variable domain of TCR clone 20605 (TRAV3, TRAJ6)
CAVRDGPSAGGSYIPTF

SEQ ID NO: 41210 - protein, 20 aa, Homo sapiens
  CDR3 for beta chain variable domain of TCR clone 20605 (TRBV28, TRBJ2-1)
CASTPIGRSPGLAGGNEQFF

SEQ ID NO: 41211 - protein, 17 aa, Homo sapiens
  CDR3 for alpha chain variable domain of TCR clone 20606 (TRAV13-1, TRAJ28)
CAASPPYSGAGSYQLTF

SEQ ID NO: 41212 - protein, 19 aa, Homo sapiens
  CDR3 for beta chain variable domain of TCR clone 20606 (TRBV25-1, TRBJ2-2)
CATLVYRVDRGRKTGELFF

SEQ ID NO: 41213 - protein, 10 aa, Homo sapiens
  CDR3 for alpha chain variable domain of TCR clone 20607 (TRAV13-1, TRAJ8)
CAAPFRKLVF

SEQ ID NO: 41214 - protein, 20 aa, Homo sapiens
  CDR3 for beta chain variable domain of TCR clone 20607 (TRBV3-1, TRBJ2-6)
CASSPRPGLEGGAGANVLTF

SEQ ID NO: 41215 - protein, 11 aa, Homo sapiens
  CDR3 for alpha chain variable domain of TCR clone 20608 (TRAV1-1, TRAJ23)
CAVRQGGKLIF

SEQ ID NO: 41216 - protein, 13 aa, Homo sapiens
  CDR3 for beta chain variable domain of TCR clone 20608 (TRBV7-8, TRBJ2-2)
CASSHLFPGRLSI

SEQ ID NO: 41217 - protein, 13 aa, Homo sapiens
  CDR3 for alpha chain variable domain of TCR clone 20609 (TRAV35, TRAJ42)
CAGFPGSQGNLIF

SEQ ID NO: 41218 - protein, 13 aa, Homo sapiens
  CDR3 for beta chain variable domain of TCR clone 20609 (TRBV29-1, TRBJ2-1)
CSVEGGRVNEQFF

SEQ ID NO: 41219 - protein, 12 aa, Homo sapiens
  CDR3 for alpha chain variable domain of TCR clone 20610 (TRAV21, TRAJ33)
CAKMDSNNQLIW

SEQ ID NO: 41220 - protein, 14 aa, Homo sapiens
  CDR3 for beta chain variable domain of TCR clone 20610 (TRBV2, TRBJ2-7)
CASSLTSGGYEQYF

SEQ ID NO: 41221 - protein, 12 aa, Homo sapiens
  CDR3 for alpha chain variable domain of TCR clone 20611 (TRAV2, TRAJ31)
CAVEDNNARLTF

SEQ ID NO: 41222 - protein, 16 aa, Homo sapiens
  CDR3 for beta chain variable domain of TCR clone 20611 (TRBV10-3, TRBJ2-1)
CAISGVGDGGGGEQFF

SEQ ID NO: 41223 - protein, 18 aa, Homo sapiens
  CDR3 for alpha chain variable domain of TCR clone 20612 (TRAV21, TRAJ52)
CAVRPSPAGGTSYGKLTF

SEQ ID NO: 41224 - protein, 17 aa, Homo sapiens
  CDR3 for beta chain variable domain of TCR clone 20612 (TRBV13, TRBJ2-3)
CASSLSRVAGGRNTQDF

SEQ ID NO: 41225 - protein, 15 aa, Homo sapiens
  CDR3 for alpha chain variable domain of TCR clone 20613 (TRAV12-3, TRAJ49)
CAMAVTRNTGNQFYF

SEQ ID NO: 41226 - protein, 18 aa, Homo sapiens
  CDR3 for beta chain variable domain of TCR clone 20613 (TRBV4-1, TRBJ1-5)
CASSQDPRGQGLNQPQHF

SEQ ID NO: 41227 - protein, 16 aa, Homo sapiens
  CDR3 for alpha chain variable domain of TCR clone 20614 (TRAV12-3, TRAJ53)
CAMSPGSGGSNYKLTF

SEQ ID NO: 41228 - protein, 12 aa, Homo sapiens
  CDR3 for beta chain variable domain of TCR clone 20614 (TRBV11-2, TRBJ2-1)
CASSPGNNEQFF

SEQ ID NO: 41229 - protein, 18 aa, Homo sapiens
  CDR3 for alpha chain variable domain of TCR clone 20615 (TRAV13-1, TRAJ52)
CAASKRSAGGTSYGKLTF

SEQ ID NO: 41230 - protein, 14 aa, Homo sapiens
  CDR3 for beta chain variable domain of TCR clone 20615 (TRBV7-2, TRBJ1-4)
CASSHSKTNEKLFF

SEQ ID NO: 41231 - protein, 17 aa, Homo sapiens
  CDR3 for alpha chain variable domain of TCR clone 20616 (TRAV13-1, TRAJ52)
CAASSGAGGTSYGKLTL

SEQ ID NO: 41232 - protein, 15 aa, Homo sapiens
  CDR3 for beta chain variable domain of TCR clone 20616 (TRBV2, TRBJ2-1)
CASSELAGSYNEQFF

SEQ ID NO: 41233 - protein, 15 aa, Homo sapiens
  CDR3 for alpha chain variable domain of TCR clone 20617 (TRAV26-1, TRAJ29)
CIVRVEGSGNTPLVF

SEQ ID NO: 41234 - protein, 15 aa, Homo sapiens
  CDR3 for beta chain variable domain of TCR clone 20617 (TRBV7-9, TRBJ1-5)
CAISQGHQPNQPQHF

SEQ ID NO: 41235 - protein, 15 aa, Homo sapiens
  CDR3 for alpha chain variable domain of TCR clone 20618 (TRAV12-1, TRAJ44)
CVSDLPTGTASKLTF

SEQ ID NO: 41236 - protein, 13 aa, Homo sapiens
  CDR3 for beta chain variable domain of TCR clone 20618 (TRBV6-5, TRBJ2-5)
CASSPQGGETQYF

SEQ ID NO: 41237 - protein, 15 aa, Homo sapiens
  CDR3 for alpha chain variable domain of TCR clone 20619 (TRAV3, TRAJ47)
CAVRDIGEYGKKLVF

SEQ ID NO: 41238 - protein, 14 aa, Homo sapiens
  CDR3 for beta chain variable domain of TCR clone 20619 (TRBV13, TRBJ2-5)
CASSLERVGETQYF

SEQ ID NO: 41239 - protein, 15 aa, Homo sapiens
  CDR3 for alpha chain variable domain of TCR clone 20620 (TRAV12-2, TRAJ43)
CAFDMRFGAGTRLTV

SEQ ID NO: 41240 - protein, 18 aa, Homo sapiens
  CDR3 for beta chain variable domain of TCR clone 20620 (TRBV20-1, TRBJ2-3)
GSASGLAGGPGTTDTQYF

SEQ ID NO: 41241 - protein, 10 aa, Homo sapiens
  CDR3 for alpha chain variable domain of TCR clone 20621 (TRAV30, TRAJ48)
CGIGNGKLTF

SEQ ID NO: 41242 - protein, 14 aa, Homo sapiens
  CDR3 for beta chain variable domain of TCR clone 20621 (TRBV7-6, TRBJ2-3)
CASSVAGGTDTQYF

SEQ ID NO: 41243 - protein, 11 aa, Homo sapiens
  CDR3 for alpha chain variable domain of TCR clone 20622 (TRAV12-1, TRAJ15)
CVVNAGTALIF

SEQ ID NO: 41244 - protein, 16 aa, Homo sapiens
  CDR3 for beta chain variable domain of TCR clone 20622 (TRBV28, TRBJ2-1)
CASSSRVRDSYNEQSF

SEQ ID NO: 41245 - protein, 16 aa, Homo sapiens
  CDR3 for alpha chain variable domain of TCR clone 20623 (TRAV30, TRAJ24)
CGTEVVDADSWGKFQF

SEQ ID NO: 41246 - protein, 15 aa, Homo sapiens
  CDR3 for beta chain variable domain of TCR clone 20623 (TRBV7-9, TRBJ1-4)
CASSARTGGNEKLFF

SEQ ID NO: 41247 - protein, 14 aa, Homo sapiens
  CDR3 for alpha chain variable domain of TCR clone 20624 (TRAV23/DV6, TRAJ22)
CAASVPGSARQLTF

SEQ ID NO: 41248 - protein, 16 aa, Homo sapiens
  CDR3 for beta chain variable domain of TCR clone 20624 (TRBV19, TRBJ2-2)
CASSFPGQGLAGELFF

SEQ ID NO: 41249 - protein, 12 aa, Homo sapiens
  CDR3 for alpha chain variable domain of TCR clone 20625 (TRAV21, TRAJ33)
CAKMDSNYQLIW

SEQ ID NO: 41250 - protein, 14 aa, Homo sapiens
  CDR3 for beta chain variable domain of TCR clone 20625 (TRBV2, TRBJ2-7)
CDSSLTSGGYEQYF

SEQ ID NO: 41251 - protein, 13 aa, Homo sapiens
  CDR3 for alpha chain variable domain of TCR clone 20626 (TRAV2, TRAJ40)
CAVVTSGTYKYIF

SEQ ID NO: 41252 - protein, 13 aa, Homo sapiens
  CDR3 for beta chain variable domain of TCR clone 20626 (TRBV7-9, TRBJ2-3)
CASSPGSTDTQYF

SEQ ID NO: 41253 - protein, 13 aa, Homo sapiens
  CDR3 for alpha chain variable domain of TCR clone 20627 (TRAV27, TRAJ3)
ASLRGSSASKIIF

SEQ ID NO: 41254 - protein, 15 aa, Homo sapiens
  CDR3 for beta chain variable domain of TCR clone 20627 (TRBV28, TRBJ1-3)
CASSMGCASGNTIYF

SEQ ID NO: 41255 - protein, 12 aa, Homo sapiens
  CDR3 for alpha chain variable domain of TCR clone 20628 (TRAV13-1, TRAJ53)
AASGGSNYKLTF

SEQ ID NO: 41256 - protein, 15 aa, Homo sapiens
  CDR3 for beta chain variable domain of TCR clone 20628 (TRBV5-1, TRBJ2-1)
GASSPPRAPYNEQFF

SEQ ID NO: 41257 - protein, 14 aa, Homo sapiens
  CDR3 for alpha chain variable domain of TCR clone 20629 (TRAV35, TRAJ22)
CAGLRLGSARQLTF

SEQ ID NO: 41258 - protein, 15 aa, Homo sapiens
  CDR3 for beta chain variable domain of TCR clone 20629 (TRBV12-4, TRBJ2-5)
CASSPPTGLQETQYF

SEQ ID NO: 41259 - protein, 14 aa, Homo sapiens
  CDR3 for alpha chain variable domain of TCR clone 20630 (TRAV12-3, TRAJ10)
SHLPLTGGGNKLTF

SEQ ID NO: 41260 - protein, 15 aa, Homo sapiens
  CDR3 for beta chain variable domain of TCR clone 20630 (TRBV11-2, TRBJ1-3)
CASSLDGTVGNTMYF

SEQ ID NO: 41261 - protein, 16 aa, Homo sapiens
  CDR3 for alpha chain variable domain of TCR clone 20631 (TRAV3, TRAJ21)
CAVRDIDRGNFNKFYF

SEQ ID NO: 41262 - protein, 13 aa, Homo sapiens
  CDR3 for beta chain variable domain of TCR clone 20631 (TRBV27, TRBJ2-7)
CASSLTTGYEQYF

SEQ ID NO: 41263 - protein, 12 aa, Homo sapiens
  CDR3 for alpha chain variable domain of TCR clone 20632 (TRAV8-3, TRAJ20)
CAVGANDYKLSV

SEQ ID NO: 41264 - protein, 16 aa, Homo sapiens
  CDR3 for beta chain variable domain of TCR clone 20632 (TRBV19, TRBJ2-2)
CASRSPGTGATGELFF

SEQ ID NO: 41265 - protein, 16 aa, Homo sapiens
  CDR3 for alpha chain variable domain of TCR clone 20633 (TRAV26-1, TRAJ23)
CIVRPAIYNQGGKLIF

SEQ ID NO: 41266 - protein, 15 aa, Homo sapiens
  CDR3 for beta chain variable domain of TCR clone 20633 (TRBV20-1, TRBJ2-3)
CSARPSGFYTDTQYF

SEQ ID NO: 41267 - protein, 15 aa, Homo sapiens
  CDR3 for alpha chain variable domain of TCR clone 20634 (TRAV17, TRAJ57)
CATGPSQGGSEKLVF

SEQ ID NO: 41268 - protein, 16 aa, Homo sapiens
  CDR3 for beta chain variable domain of TCR clone 20634 (TRBV12-4, TRBJ1-5)
CASSRPVGGSNQSQHF

SEQ ID NO: 41269 - protein, 14 aa, Homo sapiens
  CDR3 for alpha chain variable domain of TCR clone 20635 (TRAV1-2, TRAJ8)
CAVREDTGFQKLVF

SEQ ID NO: 41270 - protein, 15 aa, Homo sapiens
  CDR3 for beta chain variable domain of TCR clone 20635 (TRBV6-3, TRBJ2-7)
CASSSPGTVFYEPYF

SEQ ID NO: 41271 - protein, 12 aa, Homo sapiens
  CDR3 for alpha chain variable domain of TCR clone 20636 (TRAV12-1, TRAJ40)
CVFYSGTYRYIF

SEQ ID NO: 41272 - protein, 18 aa, Homo sapiens
  CDR3 for beta chain variable domain of TCR clone 20636 (TRBV12-4, TRBJ2-2)
CASSLVAGTRGRTGELFF

SEQ ID NO: 41273 - protein, 13 aa, Homo sapiens
  CDR3 for alpha chain variable domain of TCR clone 20637 (TRAV22, TRAJ29)
CAVGGSGNTPLFF

SEQ ID NO: 41274 - protein, 13 aa, Homo sapiens
  CDR3 for beta chain variable domain of TCR clone 20637 (TRBV4-2, TRBJ1-1)
CASSQAGNTEAFF

SEQ ID NO: 41275 - protein, 14 aa, Homo sapiens
  CDR3 for alpha chain variable domain of TCR clone 20638 (TRAV13-1, TRAJ44)
CAAKATGTASKLTF

SEQ ID NO: 41276 - protein, 13 aa, Homo sapiens
  CDR3 for beta chain variable domain of TCR clone 20638 (TRBV5-5, TRBJ1-2)
CASSFWRGEDCTF

SEQ ID NO: 41277 - protein, 15 aa, Homo sapiens
  CDR3 for alpha chain variable domain of TCR clone 20639 (TRAV17, TRAJ57)
CATGPSQGGSEKPVF

SEQ ID NO: 41278 - protein, 16 aa, Homo sapiens
  CDR3 for beta chain variable domain of TCR clone 20639 (TRBV12-4, TRBJ1-5)
CASSRPVGGSNQPQHF

SEQ ID NO: 41279 - protein, 14 aa, Homo sapiens
  CDR3 for alpha chain variable domain of TCR clone 20640 (TRAV13-1, TRAJ44)
CAAKATGTASKLTF

SEQ ID NO: 41280 - protein, 17 aa, Homo sapiens
  CDR3 for beta chain variable domain of TCR clone 20640 (TRBV7-3, TRBJ2-3)
CASSLMKRVRGADTQYF

SEQ ID NO: 41281 - protein, 12 aa, Homo sapiens
  CDR3 for alpha chain variable domain of TCR clone 20641 (TRAV3, TRAJ43)
CAVRDPNNDMRF

SEQ ID NO: 41282 - protein, 14 aa, Homo sapiens
  CDR3 for beta chain variable domain of TCR clone 20641 (TRBV7-2, TRBJ2-7)
CASSPKTSFYEQYF

SEQ ID NO: 41283 - protein, 14 aa, Homo sapiens
  CDR3 for alpha chain variable domain of TCR clone 20642 (TRAV12-2, TRAJ5)
CAVNRSTGRRALTF

SEQ ID NO: 41284 - protein, 12 aa, Homo sapiens
  CDR3 for beta chain variable domain of TCR clone 20642 (TRBV19, TRBJ1-5)
CASSIAQQPQRF

SEQ ID NO: 41285 - protein, 11 aa, Homo sapiens
  CDR3 for alpha chain variable domain of TCR clone 20643 (TRAV2, TRAJ13)
CASGGYRKVTF

SEQ ID NO: 41286 - protein, 13 aa, Homo sapiens
  CDR3 for beta chain variable domain of TCR clone 20643 (TRBV20-1, TRBJ2-2)
CSASAAGTGELFF

SEQ ID NO: 41287 - protein, 13 aa, Homo sapiens
  CDR3 for alpha chain variable domain of TCR clone 20644 (TRAV21, TRAJ56)
CAVRTGANSKLTF

SEQ ID NO: 41288 - protein, 15 aa, Homo sapiens
  CDR3 for beta chain variable domain of TCR clone 20644 (TRBV7-9, TRBJ1-1)
CASSHRGTVNTEASF

SEQ ID NO: 41289 - protein, 14 aa, Homo sapiens
  CDR3 for alpha chain variable domain of TCR clone 20645 (TRAV12-2, TRAJ13)
CAVKKTGGYQKVTL

SEQ ID NO: 41290 - protein, 14 aa, Homo sapiens
  CDR3 for beta chain variable domain of TCR clone 20645 (TRBV12-5, TRBJ2-5)
CASGSRTHQETQYF

SEQ ID NO: 41291 - protein, 14 aa, Homo sapiens
  CDR3 for alpha chain variable domain of TCR clone 20646 (TRAV8-3, TRAJ4)
CAVGAAGGYNKLIF

SEQ ID NO: 41292 - protein, 14 aa, Homo sapiens
  CDR3 for beta chain variable domain of TCR clone 20646 (TRBV4-1, TRBJ2-2)
CASSQAVNTGELFF

SEQ ID NO: 41293 - protein, 14 aa, Homo sapiens
  CDR3 for alpha chain variable domain of TCR clone 20647 (TRAV12-2, TRAJ17)
CAVLFKAAGNKLTF

SEQ ID NO: 41294 - protein, 17 aa, Homo sapiens
  CDR3 for beta chain variable domain of TCR clone 20647 (TRBV20-1, TRBJ2-2)
CSASRSGQGGLTGELFF

SEQ ID NO: 41295 - protein, 14 aa, Homo sapiens
  CDR3 for alpha chain variable domain of TCR clone 20648 (TRAV12-1, TRAJ17)
CVVNYKAAGNKLTF

SEQ ID NO: 41296 - protein, 17 aa, Homo sapiens
  CDR3 for beta chain variable domain of TCR clone 20648 (TRBV13, TRBJ2-3)
CASSLSRVAGGRNTQYF

SEQ ID NO: 41297 - protein, 12 aa, Homo sapiens
  CDR3 for alpha chain variable domain of TCR clone 20649 (TRAV13-2, TRAJ23)
CAERHRGGKLIF

SEQ ID NO: 41298 - protein, 13 aa, Homo sapiens
  CDR3 for beta chain variable domain of TCR clone 20649 (TRBV27, TRBJ1-1)
CASSLSIGAEAFF

SEQ ID NO: 41299 - protein, 14 aa, Homo sapiens
  CDR3 for alpha chain variable domain of TCR clone 20650 (TRAV1-2, TRAJ16)
CAVNRFSDGQKLLF

SEQ ID NO: 41300 - protein, 15 aa, Homo sapiens
  CDR3 for beta chain variable domain of TCR clone 20650 (TRBV20-1, TRBJ2-7)
CSARDRVSGMDKQYF

SEQ ID NO: 41301 - protein, 14 aa, Homo sapiens
  CDR3 for alpha chain variable domain of TCR clone 20651 (TRAV17, TRAJ12)
RATDEKDSSYKLIF

SEQ ID NO: 41302 - protein, 16 aa, Homo sapiens
  CDR3 for beta chain variable domain of TCR clone 20651 (TRBV11-2, TRBJ2-1)
CASSPRLAGVYNEQFF

SEQ ID NO: 41303 - protein, 13 aa, Homo sapiens
  CDR3 for alpha chain variable domain of TCR clone 20652 (TRAV30, TRAJ34)
CGTVGYNTDKLIF

SEQ ID NO: 41304 - protein, 16 aa, Homo sapiens
  CDR3 for beta chain variable domain of TCR clone 20652 (TRBV7-9, TRBJ1-2)
CASSLGFSSGGDGYTF

SEQ ID NO: 41305 - protein, 12 aa, Homo sapiens
  CDR3 for alpha chain variable domain of TCR clone 20653 (TRAV12-3, TRAJ17)
CAMTLTGNKLTF

SEQ ID NO: 41306 - protein, 15 aa, Homo sapiens
  CDR3 for beta chain variable domain of TCR clone 20653 (TRBV6-6, TRBJ2-5)
CAGSPGGGLEETQYF

SEQ ID NO: 41307 - protein, 13 aa, Homo sapiens
  CDR3 for alpha chain variable domain of TCR clone 20654 (TRAV27, TRAJ41)
CAGEGNSGYALNF

SEQ ID NO: 41308 - protein, 12 aa, Homo sapiens
  CDR3 for beta chain variable domain of TCR clone 20654 (TRBV11-2, TRBJ2-2)
CASSLGGGELFF

SEQ ID NO: 41309 - protein, 14 aa, Homo sapiens
  CDR3 for alpha chain variable domain of TCR clone 20655 (TRAV12-2, TRAJ13)
CAVKKTGGYQKVTF

SEQ ID NO: 41310 - protein, 15 aa, Homo sapiens
  CDR3 for beta chain variable domain of TCR clone 20655 (TRBV27, TRBJ2-1)
CASSNGEGSSNEQFF

SEQ ID NO: 41311 - protein, 12 aa, Homo sapiens
  CDR3 for alpha chain variable domain of TCR clone 20656 (TRAV17, TRAJ57)
CATDGGSEKLVF

SEQ ID NO: 41312 - protein, 13 aa, Homo sapiens
  CDR3 for beta chain variable domain of TCR clone 20656 (TRBV7-9, TRBJ2-7)
CVSSFAGAYEQYF

SEQ ID NO: 41313 - protein, 13 aa, Homo sapiens
  CDR3 for alpha chain variable domain of TCR clone 20657 (TRAV8-6, TRAJ21)
CAVSPSSLNKFYF

SEQ ID NO: 41314 - protein, 14 aa, Homo sapiens
  CDR3 for beta chain variable domain of TCR clone 20657 (TRBV7-9, TRBJ2-5)
CASSSDTAQETQYF

SEQ ID NO: 41315 - protein, 14 aa, Homo sapiens
  CDR3 for alpha chain variable domain of TCR clone 20658 (TRAV38-1, TRAJ40)
CALRPTSGTYKYIF

SEQ ID NO: 41316 - protein, 14 aa, Homo sapiens
  CDR3 for beta chain variable domain of TCR clone 20658 (TRBV25-1, TRBJ1-1)
CASTHLGGNAEAFF

SEQ ID NO: 41317 - protein, 16 aa, Homo sapiens
  CDR3 for alpha chain variable domain of TCR clone 20659 (TRAV12-2, TRAJ32)
CAVNLGQGGATNELIF

SEQ ID NO: 41318 - protein, 15 aa, Homo sapiens
  CDR3 for beta chain variable domain of TCR clone 20659 (TRBV20-1, TRBJ2-7)
CSARGPLAGGREQYF

SEQ ID NO: 41319 - protein, 13 aa, Homo sapiens
  CDR3 for alpha chain variable domain of TCR clone 20660 (TRAV3, TRAJ27)
CAVRPLGAGKSTF

SEQ ID NO: 41320 - protein, 13 aa, Homo sapiens
  CDR3 for beta chain variable domain of TCR clone 20660 (TRBV7-9, TRBJ2-3)
CASSPGATDTQYF

SEQ ID NO: 41321 - protein, 13 aa, Homo sapiens
  CDR3 for alpha chain variable domain of TCR clone 20661 (TRAV21, TRAJ27)
CAARPGNAGKSTF

SEQ ID NO: 41322 - protein, 13 aa, Homo sapiens
  CDR3 for beta chain variable domain of TCR clone 20661 (TRBV18, TRBJ2-7)
CASQAGGGYEQYF

SEQ ID NO: 41323 - protein, 15 aa, Homo sapiens
  CDR3 for alpha chain variable domain of TCR clone 20662 (TRAV35, TRAJ40)
CSGQLGTSGTYKYIF

SEQ ID NO: 41324 - protein, 14 aa, Homo sapiens
  CDR3 for beta chain variable domain of TCR clone 20662 (TRBV7-3, TRBJ2-1)
CASSLAGGTNEQFF

SEQ ID NO: 41325 - protein, 13 aa, Homo sapiens
  CDR3 for alpha chain variable domain of TCR clone 20663 (TRAV3, TRAJ30)
CAMRDRGDDKIIF

SEQ ID NO: 41326 - protein, 16 aa, Homo sapiens
  CDR3 for beta chain variable domain of TCR clone 20663 (TRBV7-3, TRBJ2-2)
CASSLKRGTLSGELFF

SEQ ID NO: 41327 - protein, 14 aa, Homo sapiens
  CDR3 for alpha chain variable domain of TCR clone 20664 (TRAV12-3, TRAJ35)
CAMSLIGFGNVLHC

SEQ ID NO: 41328 - protein, 12 aa, Homo sapiens
  CDR3 for beta chain variable domain of TCR clone 20664 (TRBV12-4, TRBJ1-1)
CASSLAGLEAFF

SEQ ID NO: 41329 - protein, 13 aa, Homo sapiens
  CDR3 for alpha chain variable domain of TCR clone 20665 (TRAV26-2, TRAJ43)
CILRAVNNNDMRF

SEQ ID NO: 41330 - protein, 15 aa, Homo sapiens
  CDR3 for beta chain variable domain of TCR clone 20665 (TRBV7-2, TRBJ2-1)
CAGTHGTGIYNEQFF

SEQ ID NO: 41331 - protein, 15 aa, Homo sapiens
  CDR3 for alpha chain variable domain of TCR clone 20666 (TRAV35, TRAJ40)
CAGQLGTSGTYKYIF

SEQ ID NO: 41332 - protein, 14 aa, Homo sapiens
  CDR3 for beta chain variable domain of TCR clone 20666 (TRBV7-3, TRBJ2-1)
CANSLAGGTNEQFF

SEQ ID NO: 41333 - protein, 14 aa, Homo sapiens
  CDR3 for alpha chain variable domain of TCR clone 20667 (TRAV3, TRAJ9)
CAVRLNTGGLKTIF

SEQ ID NO: 41334 - protein, 15 aa, Homo sapiens
  CDR3 for beta chain variable domain of TCR clone 20667 (TRBV7-2, TRBJ2-1)
CASSLASGRVNEQFF

SEQ ID NO: 41335 - protein, 13 aa, Homo sapiens
  CDR3 for alpha chain variable domain of TCR clone 20668 (TRAV27, TRAJ45)
CRSSGGGADGLTF

SEQ ID NO: 41336 - protein, 11 aa, Homo sapiens
  CDR3 for beta chain variable domain of TCR clone 20668 (TRBV11-2, TRBJ2-1)
PPGVEYNEQFF

SEQ ID NO: 41337 - protein, 20 aa, Homo sapiens
  CDR3 for alpha chain variable domain of TCR clone 20669 (TRAV12-1, TRAJ42)
SSVIQPPTSVKGGSQGNLIF

SEQ ID NO: 41338 - protein, 18 aa, Homo sapiens
  CDR3 for beta chain variable domain of TCR clone 20669 (TRBV11-2, TRBJ2-3)
CASSLGGAPRGAPNTQYF

SEQ ID NO: 41339 - protein, 15 aa, Homo sapiens
  CDR3 for alpha chain variable domain of TCR clone 20670 (TRAV3, TRAJ20)
CAVRDIKLSDHKLSF

SEQ ID NO: 41340 - protein, 15 aa, Homo sapiens
  CDR3 for beta chain variable domain of TCR clone 20670 (TRBV7-9, TRBJ1-6)
CASSSPGRGNSPLHF

SEQ ID NO: 41341 - protein, 12 aa, Homo sapiens
  CDR3 for alpha chain variable domain of TCR clone 20671 (TRAV13-2, TRAJ8)
CAPWLGFQRLVF

SEQ ID NO: 41342 - protein, 14 aa, Homo sapiens
  CDR3 for beta chain variable domain of TCR clone 20671 (TRBV18, TRBJ2-7)
CASSPRGGAYEQYF

SEQ ID NO: 41343 - protein, 17 aa, Homo sapiens
  CDR3 for alpha chain variable domain of TCR clone 20672 (TRAV3, TRAJ42)
CAVRARDYGGSQGNLIF

SEQ ID NO: 41344 - protein, 15 aa, Homo sapiens
  CDR3 for beta chain variable domain of TCR clone 20672 (TRBV6-6, TRBJ2-7)
CASSYSYGGSYEQYF

SEQ ID NO: 41345 - protein, 15 aa, Homo sapiens
  CDR3 for alpha chain variable domain of TCR clone 20673 (TRAV35, TRAJ40)
CAGQLGISGTYKYIF

SEQ ID NO: 41346 - protein, 14 aa, Homo sapiens
  CDR3 for beta chain variable domain of TCR clone 20673 (TRBV7-3, TRBJ2-1)
CASSLAGGTNEQFF

SEQ ID NO: 41347 - protein, 15 aa, Homo sapiens
  CDR3 for alpha chain variable domain of TCR clone 20674 (TRAV12-3, TRAJ6)
CAMSATTGGSYIPTF

SEQ ID NO: 41348 - protein, 16 aa, Homo sapiens
  CDR3 for beta chain variable domain of TCR clone 20674 (TRBV20-1, TRBJ1-2)
CSASMGRGVANYGYTF

SEQ ID NO: 41349 - protein, 13 aa, Homo sapiens
  CDR3 for alpha chain variable domain of TCR clone 20675 (TRAV27, TRAJ29)
CAGAHSGNTPLVF

SEQ ID NO: 41350 - protein, 14 aa, Homo sapiens
  CDR3 for beta chain variable domain of TCR clone 20675 (TRBV4-2, TRBJ2-1)
CASGLDRAYNEQFF

SEQ ID NO: 41351 - protein, 10 aa, Homo sapiens
  CDR3 for alpha chain variable domain of TCR clone 20676 (TRAV23/DV6, TRAJ57)
CAASSTLSQG

SEQ ID NO: 41352 - protein, 14 aa, Homo sapiens
  CDR3 for beta chain variable domain of TCR clone 20676 (TRBV25-1, TRBJ1-1)
CDSTHLGGNTEAFF

SEQ ID NO: 41353 - protein, 12 aa, Homo sapiens
  CDR3 for alpha chain variable domain of TCR clone 20677 (TRAV3, TRAJ31)
CAAQRANARLMF

SEQ ID NO: 41354 - protein, 16 aa, Homo sapiens
  CDR3 for beta chain variable domain of TCR clone 20677 (TRBV4-2, TRBJ1-1)
CASSPPPGRAAPEAFF

SEQ ID NO: 41355 - protein, 11 aa, Homo sapiens
  CDR3 for alpha chain variable domain of TCR clone 20678 (TRAV1-2, TRAJ31)
CAGNNNARLMF

SEQ ID NO: 41356 - protein, 15 aa, Homo sapiens
  CDR3 for beta chain variable domain of TCR clone 20678 (TRBV28, TRBJ2-1)
CASSIIAGGRSEQFF

SEQ ID NO: 41357 - protein, 15 aa, Homo sapiens
  CDR3 for alpha chain variable domain of TCR clone 20679 (TRAV26-1, TRAJ29)
CIVRVEGSGNTPLDF

SEQ ID NO: 41358 - protein, 15 aa, Homo sapiens
  CDR3 for beta chain variable domain of TCR clone 20679 (TRBV7-9, TRBJ1-5)
CASSQGHQPNQPQHF

SEQ ID NO: 41359 - protein, 23 aa, Homo sapiens
  CDR3 for alpha chain variable domain of TCR clone 20680 (TRAV26-1, TRAJ38)
CIADNAGNNHIQNPDPAVHQLRD

SEQ ID NO: 41360 - protein, 13 aa, Homo sapiens
  CDR3 for beta chain variable domain of TCR clone 20680 (TRBV20-1, TRBJ1-1)
CSARGGGNTEAFF

SEQ ID NO: 41361 - protein, 11 aa, Homo sapiens
  CDR3 for alpha chain variable domain of TCR clone 20681 (TRAV12-3, TRAJ43)
YAMSVSNDMRF

SEQ ID NO: 41362 - protein, 13 aa, Homo sapiens
  CDR3 for beta chain variable domain of TCR clone 20681 (TRBV20-1, TRBJ1-1)
CSAPLGGGTEAFF

SEQ ID NO: 41363 - protein, 15 aa, Homo sapiens
  CDR3 for alpha chain variable domain of TCR clone 20682 (TRAV38-1, TRAJ57)
CALMDSQGGSEKLVF

SEQ ID NO: 41364 - protein, 16 aa, Homo sapiens
  CDR3 for beta chain variable domain of TCR clone 20682 (TRBV10-3, TRBJ2-1)
CAIRGGGRGDYNEQFF

SEQ ID NO: 41365 - protein, 16 aa, Homo sapiens
  CDR3 for alpha chain variable domain of TCR clone 20683 (TRAV17, TRAJ28)
CATASVSGAGGYQLTF

SEQ ID NO: 41366 - protein, 11 aa, Homo sapiens
  CDR3 for beta chain variable domain of TCR clone 20683 (TRBV7-9, TRBJ2-5)
CASSLGETQYF

SEQ ID NO: 41367 - protein, 11 aa, Homo sapiens
  CDR3 for alpha chain variable domain of TCR clone 20684 (TRAV35, TRAJ30)
CAGPGDDKIIF

SEQ ID NO: 41368 - protein, 14 aa, Homo sapiens
  CDR3 for beta chain variable domain of TCR clone 20684 (TRBV7-6, TRBJ1-6)
CASSQAGGGSTLHF

SEQ ID NO: 41369 - protein, 16 aa, Homo sapiens
  CDR3 for alpha chain variable domain of TCR clone 20685 (TRAV30, TRAJ24)
CGTEIVDADSWGKFKF

SEQ ID NO: 41370 - protein, 12 aa, Homo sapiens
  CDR3 for beta chain variable domain of TCR clone 20685 (TRBV11-2, TRBJ2-2)
CASSLGGGELFF

SEQ ID NO: 41371 - protein, 12 aa, Homo sapiens
  CDR3 for alpha chain variable domain of TCR clone 20686 (TRAV12-3, TRAJ34)
CAMGYNTDKPIF

SEQ ID NO: 41372 - protein, 15 aa, Homo sapiens
  CDR3 for beta chain variable domain of TCR clone 20686 (TRBV28, TRBJ2-1)
CASSIIAGGRSEQFF

SEQ ID NO: 41373 - protein, 14 aa, Homo sapiens
  CDR3 for alpha chain variable domain of TCR clone 20687 (TRAV12-2, TRAJ13)
CAVKKTGGYQKVTF

SEQ ID NO: 41374 - protein, 15 aa, Homo sapiens
  CDR3 for beta chain variable domain of TCR clone 20687 (TRBV27, TRBJ2-1)
CASSNGGGSSMSSSS

SEQ ID NO: 41375 - protein, 13 aa, Homo sapiens
  CDR3 for alpha chain variable domain of TCR clone 20688 (TRAV12-3, TRAJ7)
CAMTPYGNNRLAF

SEQ ID NO: 41376 - protein, 13 aa, Homo sapiens
  CDR3 for beta chain variable domain of TCR clone 20688 (TRBV10-3, TRBJ1-2)
CATNADLNYGYTF

SEQ ID NO: 41377 - protein, 17 aa, Homo sapiens
  CDR3 for alpha chain variable domain of TCR clone 20689 (TRAV3, TRAJ42)
CAVRDRDYGGSQGNLIF

SEQ ID NO: 41378 - protein, 14 aa, Homo sapiens
  CDR3 for beta chain variable domain of TCR clone 20689 (TRBV7-6, TRBJ2-3)
CASSLGTVTDTQYF

SEQ ID NO: 41379 - protein, 14 aa, Homo sapiens
  CDR3 for alpha chain variable domain of TCR clone 20690 (TRAV23/DV6, TRAJ11)
CAASLESGYSTLPF

SEQ ID NO: 41380 - protein, 13 aa, Homo sapiens
  CDR3 for beta chain variable domain of TCR clone 20690 (TRBV4-1, TRBJ2-5)
CASSLTRGETQYF

SEQ ID NO: 41381 - protein, 13 aa, Homo sapiens
  CDR3 for alpha chain variable domain of TCR clone 20691 (TRAV21, TRAJ57)
CAVTQGGSEKLVF

SEQ ID NO: 41382 - protein, 16 aa, Homo sapiens
  CDR3 for beta chain variable domain of TCR clone 20691 (TRBV29-1, TRBJ2-7)
CCVEDAEDGTAYEQYF

SEQ ID NO: 41383 - protein, 13 aa, Homo sapiens
  CDR3 for alpha chain variable domain of TCR clone 20692 (TRAV2, TRAJ20)
CAVEDPSEYKLSF

SEQ ID NO: 41384 - protein, 16 aa, Homo sapiens
  CDR3 for beta chain variable domain of TCR clone 20692 (TRBV25-1, TRBJ2-7)
CASSELTGGGVYEQYF

SEQ ID NO: 41385 - protein, 15 aa, Homo sapiens
  CDR3 for alpha chain variable domain of TCR clone 20693 (TRAV12-1, TRAJ44)
CVVFVNTGTASKLTF

SEQ ID NO: 41386 - protein, 17 aa, Homo sapiens
  CDR3 for beta chain variable domain of TCR clone 20693 (TRBV7-8, TRBJ2-6)
CASSAGTGGAGANVLTL

SEQ ID NO: 41387 - protein, 13 aa, Homo sapiens
  CDR3 for alpha chain variable domain of TCR clone 20694 (TRAV27, TRAJ29)
CAGAHSGNTPLVL

SEQ ID NO: 41388 - protein, 14 aa, Homo sapiens
  CDR3 for beta chain variable domain of TCR clone 20694 (TRBV7-9, TRBJ2-7)
CASSIGQGAGEQYF

SEQ ID NO: 41389 - protein, 13 aa, Homo sapiens
  CDR3 for alpha chain variable domain of TCR clone 20695 (TRAV8-3, TRAJ28)
CAVGVVGSYQLTF

SEQ ID NO: 41390 - protein, 14 aa, Homo sapiens
  CDR3 for beta chain variable domain of TCR clone 20695 (TRBV7-2, TRBJ2-7)
CASRSQGAAYEQYF

SEQ ID NO: 41391 - protein, 15 aa, Homo sapiens
  CDR3 for alpha chain variable domain of TCR clone 20696 (TRAV8-2, TRAJ40)
CVVLGTTSGTYKYIF

SEQ ID NO: 41392 - protein, 16 aa, Homo sapiens
  CDR3 for beta chain variable domain of TCR clone 20696 (TRBV7-3, TRBJ2-1)
CASSLGGYRSYNEQFF

SEQ ID NO: 41393 - protein, 14 aa, Homo sapiens
  CDR3 for alpha chain variable domain of TCR clone 20697 (TRAV1-2, TRAJ16)
CAVNRFSDGQKLLF

SEQ ID NO: 41394 - protein, 18 aa, Homo sapiens
  CDR3 for beta chain variable domain of TCR clone 20697 (TRBV20-1, TRBJ2-6)
CSAETTPTHDSGANVLTF

SEQ ID NO: 41395 - protein, 12 aa, Homo sapiens
  CDR3 for alpha chain variable domain of TCR clone 20698 (TRAV8-3, TRAJ26)
CAGDNYGQNFFF

SEQ ID NO: 41396 - protein, 12 aa, Homo sapiens
  CDR3 for beta chain variable domain of TCR clone 20698 (TRBV11-2, TRBJ2-1)
CASSPGNNEQFF

SEQ ID NO: 41397 - protein, 12 aa, Homo sapiens
  CDR3 for alpha chain variable domain of TCR clone 20699 (TRAV3, TRAJ20)
CAVRDPDYKLSF

SEQ ID NO: 41398 - protein, 13 aa, Homo sapiens
  CDR3 for beta chain variable domain of TCR clone 20699 (TRBV7-9, TRBJ1-2)
CASSLKQNYGYTF

SEQ ID NO: 41399 - protein, 16 aa, Homo sapiens
  CDR3 for alpha chain variable domain of TCR clone 20700 (TRAV16, TRAJ52)
CALSAAGGTSYGKLTL

SEQ ID NO: 41400 - protein, 12 aa, Homo sapiens
  CDR3 for beta chain variable domain of TCR clone 20700 (TRBV12-4, TRBJ1-3)
CASSFSGNTIYF

SEQ ID NO: 41401 - protein, 15 aa, Homo sapiens
  CDR3 for alpha chain variable domain of TCR clone 20701 (TRAV12-2, TRAJ23)
CAVKPIYNQGGKLIF

SEQ ID NO: 41402 - protein, 15 aa, Homo sapiens
  CDR3 for beta chain variable domain of TCR clone 20701 (TRBV20-1, TRBJ2-7)
CSARDRVSGMDEQYF

SEQ ID NO: 41403 - protein, 12 aa, Homo sapiens
  CDR3 for alpha chain variable domain of TCR clone 20702 (TRAV12-1, TRAJ40)
CVVYSETYKYIF

SEQ ID NO: 41404 - protein, 18 aa, Homo sapiens
  CDR3 for beta chain variable domain of TCR clone 20702 (TRBV11-2, TRBJ2-3)
CASSLGGASRGAPNTQYF

SEQ ID NO: 41405 - protein, 13 aa, Homo sapiens
  CDR3 for alpha chain variable domain of TCR clone 20703 (TRAV12-3, TRAJ54)
CAMFARGAQKLVF

SEQ ID NO: 41406 - protein, 16 aa, Homo sapiens
  CDR3 for beta chain variable domain of TCR clone 20703 (TRBV7-6, TRBJ2-3)
CASSPRRGGLGDTQYF

SEQ ID NO: 41407 - protein, 18 aa, Homo sapiens
  CDR3 for alpha chain variable domain of TCR clone 20704 (TRAV21, TRAJ52)
CAARPSPAGGTSYGKLTF

SEQ ID NO: 41408 - protein, 13 aa, Homo sapiens
  CDR3 for beta chain variable domain of TCR clone 20704 (TRBV7-3, TRBJ1-1)
CASSQDWGAEAFF

SEQ ID NO: 41409 - protein, 15 aa, Homo sapiens
  CDR3 for alpha chain variable domain of TCR clone 20705 (TRAV17, TRAJ4)
CATGTWSGGYNKLIL

SEQ ID NO: 41410 - protein, 13 aa, Homo sapiens
  CDR3 for beta chain variable domain of TCR clone 20705 (TRBV6-6, TRBJ2-7)
CASSPKHLAEQYF

SEQ ID NO: 41411 - protein, 15 aa, Homo sapiens
  CDR3 for alpha chain variable domain of TCR clone 20706 (TRAV27, TRAJ38)
CAARRYAGNNRKLIW

SEQ ID NO: 41412 - protein, 13 aa, Homo sapiens
  CDR3 for beta chain variable domain of TCR clone 20706 (TRBV12-5, TRBJ2-3)
CASGDRQSDTQYF

SEQ ID NO: 41413 - protein, 10 aa, Homo sapiens
  CDR3 for alpha chain variable domain of TCR clone 20707 (TRAV1-2, TRAJ31)
CAFFDARLMF

SEQ ID NO: 41414 - protein, 14 aa, Homo sapiens
  CDR3 for beta chain variable domain of TCR clone 20707 (TRBV4-1, TRBJ2-2)
CASSQAVNTGELFF

SEQ ID NO: 41415 - protein, 12 aa, Homo sapiens
  CDR3 for alpha chain variable domain of TCR clone 20708 (TRAV13-1, TRAJ49)
CAASPMGNQFYF

SEQ ID NO: 41416 - protein, 13 aa, Homo sapiens
  CDR3 for beta chain variable domain of TCR clone 20708 (TRBV20-1, TRBJ2-2)
CSASAADTGELFF

SEQ ID NO: 41417 - protein, 14 aa, Homo sapiens
  CDR3 for alpha chain variable domain of TCR clone 20709 (TRAV17, TRAJ16)
CATADFSDGQKLLF

SEQ ID NO: 41418 - protein, 15 aa, Homo sapiens
  CDR3 for beta chain variable domain of TCR clone 20709 (TRBV18, TRBJ2-1)
CASSPPGASYNEQFF

SEQ ID NO: 41419 - protein, 16 aa, Homo sapiens
  CDR3 for alpha chain variable domain of TCR clone 20710 (TRAV8-3, TRAJ8)
CAVPRDGNTGFQKLVF

SEQ ID NO: 41420 - protein, 15 aa, Homo sapiens
  CDR3 for beta chain variable domain of TCR clone 20710 (TRBV6-1, TRBJ2-6)
CASSSRPSGANDLTF

SEQ ID NO: 41421 - protein, 15 aa, Homo sapiens
  CDR3 for alpha chain variable domain of TCR clone 20711 (TRAV26-1, TRAJ29)
CIVRVEGSGNTPLVF

SEQ ID NO: 41422 - protein, 14 aa, Homo sapiens
  CDR3 for beta chain variable domain of TCR clone 20711 (TRBV18, TRBJ2-5)
CASSPGVSEETQYF

SEQ ID NO: 41423 - protein, 16 aa, Homo sapiens
  CDR3 for alpha chain variable domain of TCR clone 20712 (TRAV21, TRAJ37)
CAVRTAGSSNTGKLIF

SEQ ID NO: 41424 - protein, 13 aa, Homo sapiens
  CDR3 for beta chain variable domain of TCR clone 20712 (TRBV7-9, TRBJ2-5)
CASLPSGRETQCF

SEQ ID NO: 41425 - protein, 16 aa, Homo sapiens
  CDR3 for alpha chain variable domain of TCR clone 20713 (TRAV27, TRAJ13)
CAVAKSDSGGYQKVTF

SEQ ID NO: 41426 - protein, 15 aa, Homo sapiens
  CDR3 for beta chain variable domain of TCR clone 20713 (TRBV29-1, TRBJ2-1)
CSVGRHALFYNEQFF

SEQ ID NO: 41427 - protein, 17 aa, Homo sapiens
  CDR3 for alpha chain variable domain of TCR clone 20714 (TRAV4, TRAJ42)
CPVGVLNYGGSQGNLIF

SEQ ID NO: 41428 - protein, 12 aa, Homo sapiens
  CDR3 for beta chain variable domain of TCR clone 20714 (TRBV20-1, TRBJ2-1)
CSAQYTYNEQFF

SEQ ID NO: 41429 - protein, 14 aa, Homo sapiens
  CDR3 for alpha chain variable domain of TCR clone 20715 (TRAV17, TRAJ54)
CATDANHGAQKLVF

SEQ ID NO: 41430 - protein, 12 aa, Homo sapiens
  CDR3 for beta chain variable domain of TCR clone 20715 (TRBV6-3, TRBJ2-1)
CASSGSYNEQFF

SEQ ID NO: 41431 - protein, 15 aa, Homo sapiens
  CDR3 for alpha chain variable domain of TCR clone 20716 (TRAV2, TRAJ28)
CAVPYSGAGSYQLTF

SEQ ID NO: 41432 - protein, 17 aa, Homo sapiens
  CDR3 for beta chain variable domain of TCR clone 20716 (TRBV20-1, TRBJ2-4)
CSARDWASGGRENMQYF

SEQ ID NO: 41433 - protein, 18 aa, Homo sapiens
  CDR3 for alpha chain variable domain of TCR clone 20717 (TRAV26-1, TRAJ23)
CIVRVGLVVWNQGGKLIF

SEQ ID NO: 41434 - protein, 16 aa, Homo sapiens
  CDR3 for beta chain variable domain of TCR clone 20717 (TRBV12-4, TRBJ2-5)
CASSFFVRGRQETQYF

SEQ ID NO: 41435 - protein, 14 aa, Homo sapiens
  CDR3 for alpha chain variable domain of TCR clone 20718 (TRAV1-2, TRAJ16)
CAVNRFSDCQKLLF

SEQ ID NO: 41436 - protein, 15 aa, Homo sapiens
  CDR3 for beta chain variable domain of TCR clone 20718 (TRBV7-9, TRBJ1-6)
CASSSPGRGNSPLHF

SEQ ID NO: 41437 - protein, 16 aa, Homo sapiens
  CDR3 for alpha chain variable domain of TCR clone 20719 (TRAV16, TRAJ4)
CALSRMFSGGDNKLIF

SEQ ID NO: 41438 - protein, 16 aa, Homo sapiens
  CDR3 for beta chain variable domain of TCR clone 20719 (TRBV24-1, TRBJ2-3)
CATSDPGTGATDTQYF

SEQ ID NO: 41439 - protein, 14 aa, Homo sapiens
  CDR3 for alpha chain variable domain of TCR clone 20720 (TRAV12-3, TRAJ9)
CAMSVETGGFKTIF

SEQ ID NO: 41440 - protein, 14 aa, Homo sapiens
  CDR3 for beta chain variable domain of TCR clone 20720 (TRBV7-2, TRBJ2-7)
CASRSQGAAYGQYF

SEQ ID NO: 41441 - protein, 15 aa, Homo sapiens
  CDR3 for alpha chain variable domain of TCR clone 20721 (TRAV21, TRAJ45)
CAVSYSGGGADGLTF

SEQ ID NO: 41442 - protein, 13 aa, Homo sapiens
  CDR3 for beta chain variable domain of TCR clone 20721 (TRBV20-1, TRBJ2-5)
CGAATELQETQYF

SEQ ID NO: 41443 - protein, 14 aa, Homo sapiens
  CDR3 for alpha chain variable domain of TCR clone 20722 (TRAV8-3, TRAJ4)
CAVVAAGGYNKLIF

SEQ ID NO: 41444 - protein, 15 aa, Homo sapiens
  CDR3 for beta chain variable domain of TCR clone 20722 (TRBV6-5, TRBJ2-1)
CASSYDAGAGNEQFF

SEQ ID NO: 41445 - protein, 15 aa, Homo sapiens
  CDR3 for alpha chain variable domain of TCR clone 20723 (TRAV1-2, TRAJ26)
CAVRDLITMVRILSL

SEQ ID NO: 41446 - protein, 15 aa, Homo sapiens
  CDR3 for beta chain variable domain of TCR clone 20723 (TRBV9, TRBJ1-6)
CASSVAGTGDSPLHF

SEQ ID NO: 41447 - protein, 14 aa, Homo sapiens
  CDR3 for alpha chain variable domain of TCR clone 20724 (TRAV8-3, TRAJ4)
CAVGAAGGYNKLIF

SEQ ID NO: 41448 - protein, 15 aa, Homo sapiens
  CDR3 for beta chain variable domain of TCR clone 20724 (TRBV11-2, TRBJ1-6)
CASSLDPWAVSPLHF

SEQ ID NO: 41449 - protein, 12 aa, Homo sapiens
  CDR3 for alpha chain variable domain of TCR clone 20725 (TRAV12-3, TRAJ17)
CAMTLTGNKLTF

SEQ ID NO: 41450 - protein, 15 aa, Homo sapiens
  CDR3 for beta chain variable domain of TCR clone 20725 (TRBV6-5, TRBJ2-1)
CASSYDAGAGNEQFF

SEQ ID NO: 41451 - protein, 14 aa, Homo sapiens
  CDR3 for alpha chain variable domain of TCR clone 20726 (TRAV38-1, TRAJ40)
CALRPTTGTYKYIF

SEQ ID NO: 41452 - protein, 14 aa, Homo sapiens
  CDR3 for beta chain variable domain of TCR clone 20726 (TRBV25-1, TRBJ1-1)
CASTHLGGNTEAFF

SEQ ID NO: 41453 - protein, 12 aa, Homo sapiens
  CDR3 for alpha chain variable domain of TCR clone 20727 (TRAV1-2, TRAJ17)
CAVRAAGNKLTF

SEQ ID NO: 41454 - protein, 16 aa, Homo sapiens
  CDR3 for beta chain variable domain of TCR clone 20727 (TRBV20-1, TRBJ2-1)
CSAPGLAGSYSDEQFL

SEQ ID NO: 41455 - protein, 12 aa, Homo sapiens
  CDR3 for alpha chain variable domain of TCR clone 20728 (TRAV8-3, TRAJ26)
CAGDNYGQNFVF

SEQ ID NO: 41456 - protein, 14 aa, Homo sapiens
  CDR3 for beta chain variable domain of TCR clone 20728 (TRBV7-6, TRBJ2-3)
CASSLGTVTDTQYF

SEQ ID NO: 41457 - protein, 18 aa, Homo sapiens
  CDR3 for alpha chain variable domain of TCR clone 20729 (TRAV26-1, TRAJ23)
CIVRVGLAVWNQGGKLIF

SEQ ID NO: 41458 - protein, 16 aa, Homo sapiens
  CDR3 for beta chain variable domain of TCR clone 20729 (TRBV12-4, TRBJ2-5)
CASSFFVRGRQETQYF

SEQ ID NO: 41459 - protein, 13 aa, Homo sapiens
  CDR3 for alpha chain variable domain of TCR clone 20730 (TRAV30, TRAJ18)
CGTEASTLGRLYS

SEQ ID NO: 41460 - protein, 15 aa, Homo sapiens
  CDR3 for beta chain variable domain of TCR clone 20730 (TRBV7-3, TRBJ2-1)
CASSRIGTGSSEQFF

SEQ ID NO: 41461 - protein, 15 aa, Homo sapiens
  CDR3 for alpha chain variable domain of TCR clone 20731 (TRAV26-1, TRAJ29)
CIVRVEGSGNTPLVF

SEQ ID NO: 41462 - protein, 15 aa, Homo sapiens
  CDR3 for beta chain variable domain of TCR clone 20731 (TRBV7-9, TRBJ1-5)
CANSQGHQPNQPQHF

SEQ ID NO: 41463 - protein, 17 aa, Homo sapiens
  CDR3 for alpha chain variable domain of TCR clone 20732 (TRAV13-1, TRAJ52)
CAASSGAGGTSYGKLTF

SEQ ID NO: 41464 - protein, 15 aa, Homo sapiens
  CDR3 for beta chain variable domain of TCR clone 20732 (TRBV2, TRBJ2-1)
CASSELAGSYNEQFL

SEQ ID NO: 41465 - protein, 14 aa, Homo sapiens
  CDR3 for alpha chain variable domain of TCR clone 20733 (TRAV12-2, TRAJ17)
CAVLFKAAGNKLTF

SEQ ID NO: 41466 - protein, 16 aa, Homo sapiens
  CDR3 for beta chain variable domain of TCR clone 20733 (TRBV19, TRBJ2-1)
CASSKAGPSSYNEQFF

SEQ ID NO: 41467 - protein, 15 aa, Homo sapiens
  CDR3 for alpha chain variable domain of TCR clone 20734 (TRAV12-3, TRAJ6)
CAMSATTGGSYIPTF

SEQ ID NO: 41468 - protein, 13 aa, Homo sapiens
  CDR3 for beta chain variable domain of TCR clone 20734 (TRBV10-3, TRBJ2-7)
CASKLAVNYEQYF

SEQ ID NO: 41469 - protein, 11 aa, Homo sapiens
  CDR3 for alpha chain variable domain of TCR clone 20735 (TRAV13-1, TRAJ6)
CATLGSYIPTF

SEQ ID NO: 41470 - protein, 13 aa, Homo sapiens
  CDR3 for beta chain variable domain of TCR clone 20735 (TRBV6-6, TRBJ2-1)
CASSVHQGDEQFF

SEQ ID NO: 41471 - protein, 11 aa, Homo sapiens
  CDR3 for alpha chain variable domain of TCR clone 20736 (TRAV2, TRAJ33)
CAVDSNYQLIW

SEQ ID NO: 41472 - protein, 16 aa, Homo sapiens
  CDR3 for beta chain variable domain of TCR clone 20736 (TRBV19, TRBJ2-1)
CASSKAGPSSYNEQFF

SEQ ID NO: 41473 - protein, 12 aa, Homo sapiens
  CDR3 for alpha chain variable domain of TCR clone 20737 (TRAV13-1, TRAJ45)
CNSGGGADGLTF

SEQ ID NO: 41474 - protein, 13 aa, Homo sapiens
  CDR3 for beta chain variable domain of TCR clone 20737 (TRBV9, TRBJ2-1)
CASSPSGGNEQFF

SEQ ID NO: 41475 - protein, 18 aa, Homo sapiens
  CDR3 for alpha chain variable domain of TCR clone 20738 (TRAV8-1, TRAJ5)
CAVKTEQPGRRAGEHLLL

SEQ ID NO: 41476 - protein, 15 aa, Homo sapiens
  CDR3 for beta chain variable domain of TCR clone 20738 (TRBV7-3, TRBJ2-1)
CASSLAGAGADEQFF

SEQ ID NO: 41477 - protein, 13 aa, Homo sapiens
  CDR3 for alpha chain variable domain of TCR clone 20739 (TRAV17, TRAJ9)
CATDHTGGFKTIF

SEQ ID NO: 41478 - protein, 16 aa, Homo sapiens
  CDR3 for beta chain variable domain of TCR clone 20739 (TRBV7-7, TRBJ2-1)
CASSLASGTSYNEQFF

SEQ ID NO: 41479 - protein, 11 aa, Homo sapiens
  CDR3 for alpha chain variable domain of TCR clone 20740 (TRAV3, TRAJ21)
CAVGNFNKFHF

SEQ ID NO: 41480 - protein, 14 aa, Homo sapiens
  CDR3 for beta chain variable domain of TCR clone 20740 (TRBV29-1, TRBJ2-2)
CSGRGSGNTGELFF

SEQ ID NO: 41481 - protein, 13 aa, Homo sapiens
  CDR3 for alpha chain variable domain of TCR clone 20741 (TRAV35, TRAJ43)
CAGYPYNNNDMRL

SEQ ID NO: 41482 - protein, 15 aa, Homo sapiens
  CDR3 for beta chain variable domain of TCR clone 20741 (TRBV25-1, TRBJ1-4)
CASSKRIATNEKLFF

SEQ ID NO: 41483 - protein, 18 aa, Homo sapiens
  CDR3 for alpha chain variable domain of TCR clone 20742 (TRAV13-1, TRAJ52)
CAAKNPNAGGTSYVKLTF

SEQ ID NO: 41484 - protein, 15 aa, Homo sapiens
  CDR3 for beta chain variable domain of TCR clone 20742 (TRBV6-1, TRBJ2-3)
CASSERGGITDTQYF

SEQ ID NO: 41485 - protein, 14 aa, Homo sapiens
  CDR3 for alpha chain variable domain of TCR clone 20743 (TRAV12-3, TRAJ10)
SHLPLTGGGNKLTF

SEQ ID NO: 41486 - protein, 11 aa, Homo sapiens
  CDR3 for beta chain variable domain of TCR clone 20743 (TRBV11-2, TRBJ1-1)
CASSINTEAFF

SEQ ID NO: 41487 - protein, 12 aa, Homo sapiens
  CDR3 for alpha chain variable domain of TCR clone 20744 (TRAV13-1, TRAJ21)
CAAKEGFNKFYL

SEQ ID NO: 41488 - protein, 14 aa, Homo sapiens
  CDR3 for beta chain variable domain of TCR clone 20744 (TRBV5-4, TRBJ1-1)
CASSLDSRRDEAFF

SEQ ID NO: 41489 - protein, 14 aa, Homo sapiens
  CDR3 for alpha chain variable domain of TCR clone 20745 (TRAV1-2, TRAJ16)
CAVNRFSDGQKLLF

SEQ ID NO: 41490 - protein, 16 aa, Homo sapiens
  CDR3 for beta chain variable domain of TCR clone 20745 (TRBV2, TRBJ2-5)
CASSETQGVGEETQYF

SEQ ID NO: 41491 - protein, 11 aa, Homo sapiens
  CDR3 for alpha chain variable domain of TCR clone 20746 (TRAV3, TRAJ21)
CAVGNFNKFYF

SEQ ID NO: 41492 - protein, 14 aa, Homo sapiens
  CDR3 for beta chain variable domain of TCR clone 20746 (TRBV4-2, TRBJ2-1)
CASGLDRAYNEQFF

SEQ ID NO: 41493 - protein, 15 aa, Homo sapiens
  CDR3 for alpha chain variable domain of TCR clone 20747 (TRAV25, TRAJ52)
CAGTSGGTSYGKLTF

SEQ ID NO: 41494 - protein, 13 aa, Homo sapiens
  CDR3 for beta chain variable domain of TCR clone 20747 (TRBV15, TRBJ1-2)
CATSRGPRTGAVA

SEQ ID NO: 41495 - protein, 13 aa, Homo sapiens
  CDR3 for alpha chain variable domain of TCR clone 20748 (TRAV29/DV5, TRAJ47)
CAASEEYGNKLVF

SEQ ID NO: 41496 - protein, 13 aa, Homo sapiens
  CDR3 for beta chain variable domain of TCR clone 20748 (TRBV6-1, TRBJ1-1)
CASSEVFGTEAFF

SEQ ID NO: 41497 - protein, 16 aa, Homo sapiens
  CDR3 for alpha chain variable domain of TCR clone 20749 (TRAV12-2, TRAJ40)
CAVIRGGTPGTYKYIF

SEQ ID NO: 41498 - protein, 14 aa, Homo sapiens
  CDR3 for beta chain variable domain of TCR clone 20749 (TRBV20-1, TRBJ2-5)
CSARDGRAGETQYF

SEQ ID NO: 41499 - protein, 13 aa, Homo sapiens
  CDR3 for alpha chain variable domain of TCR clone 20750 (TRAV12-2, TRAJ37)
CAGGSGNTGKLIF

SEQ ID NO: 41500 - protein, 16 aa, Homo sapiens
  CDR3 for beta chain variable domain of TCR clone 20750 (TRBV2, TRBJ2-3)
CASSTSVEGVTDTQYF

SEQ ID NO: 41501 - protein, 14 aa, Homo sapiens
  CDR3 for alpha chain variable domain of TCR clone 20751 (TRAV2, TRAJ9)
CAVDPNTGGFETIF

SEQ ID NO: 41502 - protein, 13 aa, Homo sapiens
  CDR3 for beta chain variable domain of TCR clone 20751 (TRBV20-1, TRBJ2-1)
CSASTGTSNEQFF

SEQ ID NO: 41503 - protein, 10 aa, Homo sapiens
  CDR3 for alpha chain variable domain of TCR clone 20752 (TRAV8-4, TRAJ43)
CAGSADDMRF

SEQ ID NO: 41504 - protein, 15 aa, Homo sapiens
  CDR3 for beta chain variable domain of TCR clone 20752 (TRBV5-1, TRBJ2-3)
CASSVTSGSTDTQYF

SEQ ID NO: 41505 - protein, 13 aa, Homo sapiens
  CDR3 for alpha chain variable domain of TCR clone 20753 (TRAV12-2, TRAJ10)
CAVPTGGGNKLTF

SEQ ID NO: 41506 - protein, 13 aa, Homo sapiens
  CDR3 for beta chain variable domain of TCR clone 20753 (TRBV7-9, TRBJ1-2)
CASSLKQNYGYTF

SEQ ID NO: 41507 - protein, 16 aa, Homo sapiens
  CDR3 for alpha chain variable domain of TCR clone 20754 (TRAV20, TRAJ53)
CAVRRGSGGSNYKLAF

SEQ ID NO: 41508 - protein, 12 aa, Homo sapiens
  CDR3 for beta chain variable domain of TCR clone 20754 (TRBV29-1, TRBJ2-3)
CSVVLGADTQYF

SEQ ID NO: 41509 - protein, 13 aa, Homo sapiens
  CDR3 for alpha chain variable domain of TCR clone 20755 (TRAV8-3, TRAJ36)
CAVGATGANNLFF

SEQ ID NO: 41510 - protein, 15 aa, Homo sapiens
  CDR3 for beta chain variable domain of TCR clone 20755 (TRBV7-2, TRBJ1-2)
CASSSRAGWNYGYTF

SEQ ID NO: 41511 - protein, 14 aa, Homo sapiens
  CDR3 for alpha chain variable domain of TCR clone 20756 (TRAV12-3, TRAJ42)
CAMNYGGSQGDLIF

SEQ ID NO: 41512 - protein, 15 aa, Homo sapiens
  CDR3 for beta chain variable domain of TCR clone 20756 (TRBV5-7, TRBJ1-5)
CASSYGKLWDQPQHF

SEQ ID NO: 41513 - protein, 13 aa, Homo sapiens
  CDR3 for alpha chain variable domain of TCR clone 20757 (TRAV30, TRAJ31)
CGTEVTNNARLMF

SEQ ID NO: 41514 - protein, 13 aa, Homo sapiens
  CDR3 for beta chain variable domain of TCR clone 20757 (TRBV12-5, TRBJ2-3)
CASGDRQSDTQYF

SEQ ID NO: 41515 - protein, 14 aa, Homo sapiens
  CDR3 for alpha chain variable domain of TCR clone 20758 (TRAV34, TRAJ44)
CGADGTGTASKLTF

SEQ ID NO: 41516 - protein, 15 aa, Homo sapiens
  CDR3 for beta chain variable domain of TCR clone 20758 (TRBV27, TRBJ2-1)
CASSNGGGSSNEQFF

SEQ ID NO: 41517 - protein, 13 aa, Homo sapiens
  CDR3 for alpha chain variable domain of TCR clone 20759 (TRAV8-6, TRAJ54)
CAVIAQGAQKLVF

SEQ ID NO: 41518 - protein, 15 aa, Homo sapiens
  CDR3 for beta chain variable domain of TCR clone 20759 (TRBV19, TRBJ2-7)
CASSIAGTGGYEQYF

SEQ ID NO: 41519 - protein, 14 aa, Homo sapiens
  CDR3 for alpha chain variable domain of TCR clone 20760 (TRAV1-2, TRAJ16)
CAVNRFSDGQKLLF

SEQ ID NO: 41520 - protein, 15 aa, Homo sapiens
  CDR3 for beta chain variable domain of TCR clone 20760 (TRBV9, TRBJ1-6)
CASSVAGTGDSPFHF

SEQ ID NO: 41521 - protein, 15 aa, Homo sapiens
  CDR3 for alpha chain variable domain of TCR clone 20761 (TRAV38-1, TRAJ37)
CAFIFCSGNTGKLIF

SEQ ID NO: 41522 - protein, 12 aa, Homo sapiens
  CDR3 for beta chain variable domain of TCR clone 20761 (TRBV7-9, TRBJ2-7)
CASSLEGYEQYF

SEQ ID NO: 41523 - protein, 13 aa, Homo sapiens
  CDR3 for alpha chain variable domain of TCR clone 20762 (TRAV2, TRAJ21)
CAVEDLNFNKFYL

SEQ ID NO: 41524 - protein, 15 aa, Homo sapiens
  CDR3 for beta chain variable domain of TCR clone 20762 (TRBV28, TRBJ2-5)
CASSPGQGSIETQYF

SEQ ID NO: 41525 - protein, 12 aa, Homo sapiens
  CDR3 for alpha chain variable domain of TCR clone 20763 (TRAV12-3, TRAJ17)
CAMTLTGNKLTF

SEQ ID NO: 41526 - protein, 14 aa, Homo sapiens
  CDR3 for beta chain variable domain of TCR clone 20763 (TRBV7-2, TRBJ2-2)
CASRGQGAAGELFF

SEQ ID NO: 41527 - protein, 17 aa, Homo sapiens
  CDR3 for alpha chain variable domain of TCR clone 20764 (TRAV19, TRAJ17)
CALSEEKEEAAGNKLTF

SEQ ID NO: 41528 - protein, 14 aa, Homo sapiens
  CDR3 for beta chain variable domain of TCR clone 20764 (TRBV28, TRBJ2-7)
CASTFYGRAHEQYF

SEQ ID NO: 41529 - protein, 16 aa, Homo sapiens
  CDR3 for alpha chain variable domain of TCR clone 20765 (TRAV3, TRAJ10)
CAVRDMRAGGGNRLTF

SEQ ID NO: 41530 - protein, 15 aa, Homo sapiens
  CDR3 for beta chain variable domain of TCR clone 20765 (TRBV20-1, TRBJ2-7)
CSARVPAAYFYEQYF

SEQ ID NO: 41531 - protein, 12 aa, Homo sapiens
  CDR3 for alpha chain variable domain of TCR clone 20766 (TRAV29/DV5, TRAJ34)
CAAHHNTDKLIF

SEQ ID NO: 41532 - protein, 15 aa, Homo sapiens
  CDR3 for beta chain variable domain of TCR clone 20766 (TRBV19, TRBJ2-7)
CASSPAGSGEALRYF

SEQ ID NO: 41533 - protein, 17 aa, Homo sapiens
  CDR3 for alpha chain variable domain of TCR clone 20767 (TRAV3, TRAJ42)
CAVRDRDYGVSQGNLIF

SEQ ID NO: 41534 - protein, 15 aa, Homo sapiens
  CDR3 for beta chain variable domain of TCR clone 20767 (TRBV6-6, TRBJ2-7)
CASSYSYGGSYEQYF

SEQ ID NO: 41535 - protein, 15 aa, Homo sapiens
  CDR3 for alpha chain variable domain of TCR clone 20768 (TRAV38-1, TRAJ37)
CAFILGSGNTGKLIF

SEQ ID NO: 41536 - protein, 12 aa, Homo sapiens
  CDR3 for beta chain variable domain of TCR clone 20768 (TRBV7-9, TRBJ2-7)
CASSLEGYEQYF

SEQ ID NO: 41537 - protein, 15 aa, Homo sapiens
  CDR3 for alpha chain variable domain of TCR clone 20769 (TRAV4, TRAJ36)
CLVGDRQTGANNPFF

SEQ ID NO: 41538 - protein, 15 aa, Homo sapiens
  CDR3 for beta chain variable domain of TCR clone 20769 (TRBV7-6, TRBJ2-1)
CASSSLAGEGNEQFF

SEQ ID NO: 41539 - protein, 10 aa, Homo sapiens
  CDR3 for alpha chain variable domain of TCR clone 20770 (TRAV12-1, TRAJ22)
HSGSARQLTF

SEQ ID NO: 41540 - protein, 16 aa, Homo sapiens
  CDR3 for beta chain variable domain of TCR clone 20770 (TRBV5-1, TRBJ2-1)
CASSHGLAGPQNEQFF

SEQ ID NO: 41541 - protein, 12 aa, Homo sapiens
  CDR3 for alpha chain variable domain of TCR clone 20771 (TRAV16, TRAJ10)
CSRTGGGNKLTF

SEQ ID NO: 41542 - protein, 15 aa, Homo sapiens
  CDR3 for beta chain variable domain of TCR clone 20771 (TRBV4-1, TRBJ2-7)
CASSQQGQGFDEQYF

SEQ ID NO: 41543 - protein, 12 aa, Homo sapiens
  CDR3 for alpha chain variable domain of TCR clone 20772 (TRAV29/DV5, TRAJ49)
CAATDTGNQFYF

SEQ ID NO: 41544 - protein, 11 aa, Homo sapiens
  CDR3 for beta chain variable domain of TCR clone 20772 (TRBV12-4, TRBJ2-7)
CQQLGGYEQYF

SEQ ID NO: 41545 - protein, 13 aa, Homo sapiens
  CDR3 for alpha chain variable domain of TCR clone 20773 (TRAV35, TRAJ42)
CAGFPGSQGNLIF

SEQ ID NO: 41546 - protein, 13 aa, Homo sapiens
  CDR3 for beta chain variable domain of TCR clone 20773 (TRBV29-1, TRBJ2-1)
CGVEGGRVNEQFF

SEQ ID NO: 41547 - protein, 15 aa, Homo sapiens
  CDR3 for alpha chain variable domain of TCR clone 20774 (TRAV3, TRAJ4)
CAVRDGPGGYNKLIF

SEQ ID NO: 41548 - protein, 16 aa, Homo sapiens
  CDR3 for beta chain variable domain of TCR clone 20774 (TRBV27, TRBJ2-2)
CASSSSGVSNTGELFF

SEQ ID NO: 41549 - protein, 14 aa, Homo sapiens
  CDR3 for alpha chain variable domain of TCR clone 20775 (TRAV13-1, TRAJ40)
CAASMTSGNYKYIF

SEQ ID NO: 41550 - protein, 15 aa, Homo sapiens
  CDR3 for beta chain variable domain of TCR clone 20775 (TRBV7-3, TRBJ2-1)
CASSPTGGGEVEQFF

SEQ ID NO: 41551 - protein, 12 aa, Homo sapiens
  CDR3 for alpha chain variable domain of TCR clone 20776 (TRAV8-3, TRAJ26)
CAGDNYGQNFVF

SEQ ID NO: 41552 - protein, 15 aa, Homo sapiens
  CDR3 for beta chain variable domain of TCR clone 20776 (TRBV6-3, TRBJ2-7)
CASSSPGTVFYEQYF

SEQ ID NO: 41553 - protein, 13 aa, Homo sapiens
  CDR3 for alpha chain variable domain of TCR clone 20777 (TRAV2, TRAJ15)
CAVASQAGTALIF

SEQ ID NO: 41554 - protein, 16 aa, Homo sapiens
  CDR3 for beta chain variable domain of TCR clone 20777 (TRBV5-1, TRBJ1-1)
CASSSGGNSLNAEAFF

SEQ ID NO: 41555 - protein, 17 aa, Homo sapiens
  CDR3 for alpha chain variable domain of TCR clone 20778 (TRAV3, TRAJ6)
CPVRDGPRAGGSYIPTF

SEQ ID NO: 41556 - protein, 14 aa, Homo sapiens
  CDR3 for beta chain variable domain of TCR clone 20778 (TRBV7-2, TRBJ2-7)
CASSPKTSFYEQYF

SEQ ID NO: 41557 - protein, 18 aa, Homo sapiens
  CDR3 for alpha chain variable domain of TCR clone 20779 (TRAV12-3, TRAJ52)
CAMSRTNAGGTSYGKLTF

SEQ ID NO: 41558 - protein, 17 aa, Homo sapiens
  CDR3 for beta chain variable domain of TCR clone 20779 (TRBV7-3, TRBJ2-3)
CASSLIKRMRGADTQYF

SEQ ID NO: 41559 - protein, 11 aa, Homo sapiens
  CDR3 for alpha chain variable domain of TCR clone 20780 (TRAV2, TRAJ13)
CASWGYQKVTF

SEQ ID NO: 41560 - protein, 16 aa, Homo sapiens
  CDR3 for beta chain variable domain of TCR clone 20780 (TRBV6-1, TRBJ2-5)
CASSETLDRGAETQYF

SEQ ID NO: 41561 - protein, 19 aa, Homo sapiens
  CDR3 for alpha chain variable domain of TCR clone 20781 (TRAV12-1, TRAJ42)
SVVQPPTSVKGGSQGNLIF

SEQ ID NO: 41562 - protein, 18 aa, Homo sapiens
  CDR3 for beta chain variable domain of TCR clone 20781 (TRBV11-2, TRBJ2-3)
CASSLGGASRGAPNTQYF

SEQ ID NO: 41563 - protein, 12 aa, Homo sapiens
  CDR3 for alpha chain variable domain of TCR clone 20782 (TRAV17, TRAJ4)
CATDGGYNKLIF

SEQ ID NO: 41564 - protein, 13 aa, Homo sapiens
  CDR3 for beta chain variable domain of TCR clone 20782 (TRBV29-1, TRBJ2-2)
RSTTGVNTGELFF

SEQ ID NO: 41565 - protein, 11 aa, Homo sapiens
  CDR3 for alpha chain variable domain of TCR clone 20783 (TRAV13-1, TRAJ43)
CAAHNNNDMRF

SEQ ID NO: 41566 - protein, 15 aa, Homo sapiens
  CDR3 for beta chain variable domain of TCR clone 20783 (TRBV6-1, TRBJ2-2)
CASSGLRGDTGELFF

SEQ ID NO: 41567 - protein, 13 aa, Homo sapiens
  CDR3 for alpha chain variable domain of TCR clone 20784 (TRAV13-2, TRAJ48)
CAEMDCGNEKLTF

SEQ ID NO: 41568 - protein, 15 aa, Homo sapiens
  CDR3 for beta chain variable domain of TCR clone 20784 (TRBV7-9, TRBJ1-6)
CASSSPGRGNSPLHF

SEQ ID NO: 41569 - protein, 13 aa, Homo sapiens
  CDR3 for alpha chain variable domain of TCR clone 20785 (TRAV8-3, TRAJ28)
CAVGAVGSYQRTF

SEQ ID NO: 41570 - protein, 15 aa, Homo sapiens
  CDR3 for beta chain variable domain of TCR clone 20785 (TRBV7-9, TRBJ1-5)
CASSQGHQPNQPQHF

SEQ ID NO: 41571 - protein, 17 aa, Homo sapiens
  CDR3 for alpha chain variable domain of TCR clone 20786 (TRAV21, TRAJ52)
CCEAFPAGGTSYGKLTF

SEQ ID NO: 41572 - protein, 13 aa, Homo sapiens
  CDR3 for beta chain variable domain of TCR clone 20786 (TRBV7-3, TRBJ1-1)
CASSQDWGAEAFF

SEQ ID NO: 41573 - protein, 13 aa, Homo sapiens
  CDR3 for alpha chain variable domain of TCR clone 20787 (TRAV13-1, TRAJ21)
CAASIYSFNKFYF

SEQ ID NO: 41574 - protein, 13 aa, Homo sapiens
  CDR3 for beta chain variable domain of TCR clone 20787 (TRBV27, TRBJ1-4)
CASSLMGDEKLFF

SEQ ID NO: 41575 - protein, 14 aa, Homo sapiens
  CDR3 for alpha chain variable domain of TCR clone 20788 (TRAV12-2, TRAJ13)
CAVKKTGGYQKVTF

SEQ ID NO: 41576 - protein, 15 aa, Homo sapiens
  CDR3 for beta chain variable domain of TCR clone 20788 (TRBV19, TRBJ1-6)
CASSTQGAVGSSLHF

SEQ ID NO: 41577 - protein, 12 aa, Homo sapiens
  CDR3 for alpha chain variable domain of TCR clone 20789 (TRAV16, TRAJ26)
CSLRSYGQNFVF

SEQ ID NO: 41578 - protein, 14 aa, Homo sapiens
  CDR3 for beta chain variable domain of TCR clone 20789 (TRBV10-3, TRBJ2-1)
CAISSDLAYNEQFF

SEQ ID NO: 41579 - protein, 15 aa, Homo sapiens
  CDR3 for alpha chain variable domain of TCR clone 20790 (TRAV8-3, TRAJ27)
CTVGPSKTNAGKSTF

SEQ ID NO: 41580 - protein, 15 aa, Homo sapiens
  CDR3 for beta chain variable domain of TCR clone 20790 (TRBV7-2, TRBJ2-1)
CASSSGLAGGNEQFF

SEQ ID NO: 41581 - protein, 16 aa, Homo sapiens
  CDR3 for alpha chain variable domain of TCR clone 20791 (TRAV30, TRAJ24)
CGTEIADADSWGKFQF

SEQ ID NO: 41582 - protein, 14 aa, Homo sapiens
  CDR3 for beta chain variable domain of TCR clone 20791 (TRBV12-5, TRBJ2-5)
CASGSRTHQGTQYF

SEQ ID NO: 41583 - protein, 13 aa, Homo sapiens
  CDR3 for alpha chain variable domain of TCR clone 20792 (TRAV27, TRAJ49)
CAPRPYTGNQFYF

SEQ ID NO: 41584 - protein, 16 aa, Homo sapiens
  CDR3 for beta chain variable domain of TCR clone 20792 (TRBV4-1, TRBJ1-2)
CASSQDAGQVPYGYTF

SEQ ID NO: 41585 - protein, 12 aa, Homo sapiens
  CDR3 for alpha chain variable domain of TCR clone 20793 (TRAV2, TRAJ9)
CAVGAGGFKTIF

SEQ ID NO: 41586 - protein, 16 aa, Homo sapiens
  CDR3 for beta chain variable domain of TCR clone 20793 (TRBV13, TRBJ2-2)
CASSPRTGEHTGELFF

SEQ ID NO: 41587 - protein, 11 aa, Homo sapiens
  CDR3 for alpha chain variable domain of TCR clone 20794 (TRAV4, TRAJ23)
CPVAPGGKLIF

SEQ ID NO: 41588 - protein, 15 aa, Homo sapiens
  CDR3 for beta chain variable domain of TCR clone 20794 (TRBV7-2, TRBJ2-1)
CASSFQADEYNEQFF

SEQ ID NO: 41589 - protein, 11 aa, Homo sapiens
  CDR3 for alpha chain variable domain of TCR clone 20795 (TRAV35, TRAJ30)
CAPGGDDKITF

SEQ ID NO: 41590 - protein, 14 aa, Homo sapiens
  CDR3 for beta chain variable domain of TCR clone 20795 (TRBV7-6, TRBJ2-1)
CASSLGGGADEQFF

SEQ ID NO: 41591 - protein, 13 aa, Homo sapiens
  CDR3 for alpha chain variable domain of TCR clone 20796 (TRAV27, TRAJ49)
CAPRPYTGDQFYF

SEQ ID NO: 41592 - protein, 16 aa, Homo sapiens
  CDR3 for beta chain variable domain of TCR clone 20796 (TRBV4-1, TRBJ1-2)
CASSQDAGQVLYGYTF

SEQ ID NO: 41593 - protein, 22 aa, Homo sapiens
  CDR3 for alpha chain variable domain of TCR clone 20797 (TRAV1-1, TRAJ30)
CAVRDQTEMTRSSLEKGHDFIF

SEQ ID NO: 41594 - protein, 13 aa, Homo sapiens
  CDR3 for beta chain variable domain of TCR clone 20797 (TRBV5-4, TRBJ1-1)
CASSFQVNTEAFF

SEQ ID NO: 41595 - protein, 14 aa, Homo sapiens
  CDR3 for alpha chain variable domain of TCR clone 20798 (TRAV12-3, TRAJ13)
CAMRNSGGYQKVTF

SEQ ID NO: 41596 - protein, 14 aa, Homo sapiens
  CDR3 for beta chain variable domain of TCR clone 20798 (TRBV4-1, TRBJ1-6)
CASSPGSDSSTLHF

SEQ ID NO: 41597 - protein, 13 aa, Homo sapiens
  CDR3 for alpha chain variable domain of TCR clone 20799 (TRAV27, TRAJ45)
CRSSGGGADGLTF

SEQ ID NO: 41598 - protein, 17 aa, Homo sapiens
  CDR3 for beta chain variable domain of TCR clone 20799 (TRBV11-2, TRBJ2-1)
CASSLYPTGVEYNEQFF

SEQ ID NO: 41599 - protein, 14 aa, Homo sapiens
  CDR3 for alpha chain variable domain of TCR clone 20800 (TRAV8-4, TRAJ9)
CAVTFNTGGFKTIF

SEQ ID NO: 41600 - protein, 15 aa, Homo sapiens
  CDR3 for beta chain variable domain of TCR clone 20800 (TRBV7-9, TRBJ2-2)
CASSPETGAGGGLFF

SEQ ID NO: 41601 - protein, 17 aa, Homo sapiens
  CDR3 for alpha chain variable domain of TCR clone 20801 (TRAV4, TRAJ42)
RLVGVLNYGGSQGNLIF

SEQ ID NO: 41602 - protein, 12 aa, Homo sapiens
  CDR3 for beta chain variable domain of TCR clone 20801 (TRBV20-1, TRBJ2-1)
CSAQYTYNEQFF

SEQ ID NO: 41603 - protein, 14 aa, Homo sapiens
  CDR3 for alpha chain variable domain of TCR clone 20802 (TRAV9-2, TRAJ39)
CALYIYNAGNMLTF

SEQ ID NO: 41604 - protein, 12 aa, Homo sapiens
  CDR3 for beta chain variable domain of TCR clone 20802 (TRBV11-2, TRBJ2-1)
CASSPGNNEQFF

SEQ ID NO: 41605 - protein, 13 aa, Homo sapiens
  CDR3 for alpha chain variable domain of TCR clone 20803 (TRAV29/DV5, TRAJ40)
CAARIGGTYKYIF

SEQ ID NO: 41606 - protein, 14 aa, Homo sapiens
  CDR3 for beta chain variable domain of TCR clone 20803 (TRBV9, TRBJ2-1)
CASSTRKGYNEQFF

SEQ ID NO: 41607 - protein, 14 aa, Homo sapiens
  CDR3 for alpha chain variable domain of TCR clone 20804 (TRAV9-2, TRAJ39)
CALYIYNAGNMLTF

SEQ ID NO: 41608 - protein, 16 aa, Homo sapiens
  CDR3 for beta chain variable domain of TCR clone 20804 (TRBV6-1, TRBJ2-5)
CASSETLDRGAETQYF

SEQ ID NO: 41609 - protein, 11 aa, Homo sapiens
  CDR3 for alpha chain variable domain of TCR clone 20805 (TRAV1-1, TRAJ23)
CAVRQGGKLIF

SEQ ID NO: 41610 - protein, 16 aa, Homo sapiens
  CDR3 for beta chain variable domain of TCR clone 20805 (TRBV12-5, TRBJ2-5)
CASGPRTSGNQETQYF

SEQ ID NO: 41611 - protein, 13 aa, Homo sapiens
  CDR3 for alpha chain variable domain of TCR clone 20806 (TRAV13-1, TRAJ5)
CAASNTGRRALTF

SEQ ID NO: 41612 - protein, 12 aa, Homo sapiens
  CDR3 for beta chain variable domain of TCR clone 20806 (TRBV28, TRBJ2-3)
CASSLYRDTQYF

SEQ ID NO: 41613 - protein, 15 aa, Homo sapiens
  CDR3 for alpha chain variable domain of TCR clone 20807 (TRAV8-3, TRAJ27)
CAVGPSNTNAGKSTF

SEQ ID NO: 41614 - protein, 15 aa, Homo sapiens
  CDR3 for beta chain variable domain of TCR clone 20807 (TRBV7-2, TRBJ2-1)
CASSSGLAGGNEQFF

SEQ ID NO: 41615 - protein, 16 aa, Homo sapiens
  CDR3 for alpha chain variable domain of TCR clone 20808 (TRAV4, TRAJ9)
CLVGDPNRPRGFKTIF

SEQ ID NO: 41616 - protein, 16 aa, Homo sapiens
  CDR3 for beta chain variable domain of TCR clone 20808 (TRBV28, TRBJ1-4)
CASSPPYRGRSEKLFF

SEQ ID NO: 41617 - protein, 12 aa, Homo sapiens
  CDR3 for alpha chain variable domain of TCR clone 20809 (TRAV12-3, TRAJ17)
CAMTLTGNKLTF

SEQ ID NO: 41618 - protein, 13 aa, Homo sapiens
  CDR3 for beta chain variable domain of TCR clone 20809 (TRBV15, TRBJ1-6)
CATSGGLNSPLHF

SEQ ID NO: 41619 - protein, 14 aa, Homo sapiens
  CDR3 for alpha chain variable domain of TCR clone 20810 (TRAV29/DV5, TRAJ45)
CAASFRGGADGLTF

SEQ ID NO: 41620 - protein, 15 aa, Homo sapiens
  CDR3 for beta chain variable domain of TCR clone 20810 (TRBV9, TRBJ1-6)
CASSVAGTGDSPLHF

SEQ ID NO: 41621 - protein, 12 aa, Homo sapiens
  CDR3 for alpha chain variable domain of TCR clone 20811 (TRAV3, TRAJ20)
CAVRDPDYKPSF

SEQ ID NO: 41622 - protein, 13 aa, Homo sapiens
  CDR3 for beta chain variable domain of TCR clone 20811 (TRBV9, TRBJ2-1)
CASSVGQGGEQFF

SEQ ID NO: 41623 - protein, 13 aa, Homo sapiens
  CDR3 for alpha chain variable domain of TCR clone 20812 (TRAV13-1, TRAJ21)
CAASIYNFDKFYF

SEQ ID NO: 41624 - protein, 13 aa, Homo sapiens
  CDR3 for beta chain variable domain of TCR clone 20812 (TRBV27, TRBJ1-4)
CASSLMGDEKLFF

SEQ ID NO: 41625 - protein, 18 aa, Homo sapiens
  CDR3 for alpha chain variable domain of TCR clone 20813 (TRAV9-2, TRAJ52)
CSLSRHNAGGTSYGKLTF

SEQ ID NO: 41626 - protein, 13 aa, Homo sapiens
  CDR3 for beta chain variable domain of TCR clone 20813 (TRBV7-9, TRBJ1-2)
CASSLKQNYGYTF

SEQ ID NO: 41627 - protein, 12 aa, Homo sapiens
  CDR3 for alpha chain variable domain of TCR clone 20814 (TRAV2, TRAJ31)
CAVDDNNARLMF

SEQ ID NO: 41628 - protein, 16 aa, Homo sapiens
  CDR3 for beta chain variable domain of TCR clone 20814 (TRBV10-3, TRBJ2-1)
CAISGVGDGGGGEQFF

SEQ ID NO: 41629 - protein, 15 aa, Homo sapiens
  CDR3 for alpha chain variable domain of TCR clone 20815 (TRAV3, TRAJ5)
CVVRDLDTGRRALTF

SEQ ID NO: 41630 - protein, 13 aa, Homo sapiens
  CDR3 for beta chain variable domain of TCR clone 20815 (TRBV12-4, TRBJ2-7)
CASSPTETYEQYF

SEQ ID NO: 41631 - protein, 14 aa, Homo sapiens
  CDR3 for alpha chain variable domain of TCR clone 20816 (TRAV12-2, TRAJ6)
CASKWGEGSYIPTF

SEQ ID NO: 41632 - protein, 13 aa, Homo sapiens
  CDR3 for beta chain variable domain of TCR clone 20816 (TRBV2, TRBJ1-1)
CASSEGGNTEAFF

SEQ ID NO: 41633 - protein, 14 aa, Homo sapiens
  CDR3 for alpha chain variable domain of TCR clone 20817 (TRAV12-1, TRAJ17)
CVVNYKAAGNKLTF

SEQ ID NO: 41634 - protein, 13 aa, Homo sapiens
  CDR3 for beta chain variable domain of TCR clone 20817 (TRBV7-9, TRBJ1-2)
CASSLKQNYGYTF

SEQ ID NO: 41635 - protein, 15 aa, Homo sapiens
  CDR3 for alpha chain variable domain of TCR clone 20818 (TRAV16, TRAJ12)
CSKWPLRDSSYKLIF

SEQ ID NO: 41636 - protein, 12 aa, Homo sapiens
  CDR3 for beta chain variable domain of TCR clone 20818 (TRBV12-5, TRBJ2-5)
CASGQGVETQYF

SEQ ID NO: 41637 - protein, 13 aa, Homo sapiens
  CDR3 for alpha chain variable domain of TCR clone 20819 (TRAV2, TRAJ15)
CAVASQAGTALIF

SEQ ID NO: 41638 - protein, 14 aa, Homo sapiens
  CDR3 for beta chain variable domain of TCR clone 20819 (TRBV18, TRBJ2-7)
CASSPRGGAYEQYF

SEQ ID NO: 41639 - protein, 14 aa, Homo sapiens
  CDR3 for alpha chain variable domain of TCR clone 20820 (TRAV38-1, TRAJ40)
CALRPTSGTYKYIF

SEQ ID NO: 41640 - protein, 14 aa, Homo sapiens
  CDR3 for beta chain variable domain of TCR clone 20820 (TRBV25-1, TRBJ1-1)
CVSTHLGGNTEAFF

SEQ ID NO: 41641 - protein, 14 aa, Homo sapiens
  CDR3 for alpha chain variable domain of TCR clone 20821 (TRAV12-1, TRAJ12)
CVVTRMDSGYKLIF

SEQ ID NO: 41642 - protein, 13 aa, Homo sapiens
  CDR3 for beta chain variable domain of TCR clone 20821 (TRBV20-1, TRBJ1-1)
CSARGGGNTEAFF

SEQ ID NO: 41643 - protein, 13 aa, Homo sapiens
  CDR3 for alpha chain variable domain of TCR clone 20822 (TRAV21, TRAJ20)
CAVGLRVDYKLSF

SEQ ID NO: 41644 - protein, 13 aa, Homo sapiens
  CDR3 for beta chain variable domain of TCR clone 20822 (TRBV6-1, TRBJ1-1)
CASSRRGNTEAFF

SEQ ID NO: 41645 - protein, 11 aa, Homo sapiens
  CDR3 for alpha chain variable domain of TCR clone 20823 (TRAV12-3, TRAJ27)
CAMANSGKSTF

SEQ ID NO: 41646 - protein, 13 aa, Homo sapiens
  CDR3 for beta chain variable domain of TCR clone 20823 (TRBV20-1, TRBJ1-1)
CSARVGGNTEAFF

SEQ ID NO: 41647 - protein, 13 aa, Homo sapiens
  CDR3 for alpha chain variable domain of TCR clone 20824 (TRAV25, TRAJ29)
CAGRFVGNTPPVF

SEQ ID NO: 41648 - protein, 15 aa, Homo sapiens
  CDR3 for beta chain variable domain of TCR clone 20824 (TRBV29-1, TRBJ2-1)
CSVRTSLSSYNEQFF

SEQ ID NO: 41649 - protein, 15 aa, Homo sapiens
  CDR3 for alpha chain variable domain of TCR clone 20825 (TRAV27, TRAJ38)
CAARRNAGNNRKLIW

SEQ ID NO: 41650 - protein, 13 aa, Homo sapiens
  CDR3 for beta chain variable domain of TCR clone 20825 (TRBV12-5, TRBJ2-3)
CSSGDRQSDTQYF

SEQ ID NO: 41651 - protein, 12 aa, Homo sapiens
  CDR3 for alpha chain variable domain of TCR clone 20826 (TRAV1-2, TRAJ17)
CAVGAAGNKLTF

SEQ ID NO: 41652 - protein, 16 aa, Homo sapiens
  CDR3 for beta chain variable domain of TCR clone 20826 (TRBV20-1, TRBJ2-1)
CSAPGLAGSYSDEQFF

SEQ ID NO: 41653 - protein, 13 aa, Homo sapiens
  CDR3 for alpha chain variable domain of TCR clone 20827 (TRAV3, TRAJ21)
CAVREPDFNKFYF

SEQ ID NO: 41654 - protein, 13 aa, Homo sapiens
  CDR3 for beta chain variable domain of TCR clone 20827 (TRBV9, TRBJ2-1)
YASSPSGGNEQFF

SEQ ID NO: 41655 - protein, 12 aa, Homo sapiens
  CDR3 for alpha chain variable domain of TCR clone 20828 (TRAV2, TRAJ10)
CASTGGGDKLTF

SEQ ID NO: 41656 - protein, 14 aa, Homo sapiens
  CDR3 for beta chain variable domain of TCR clone 20828 (TRBV7-2, TRBJ2-2)
CASRGQGAAGELFF

SEQ ID NO: 41657 - protein, 12 aa, Homo sapiens
  CDR3 for alpha chain variable domain of TCR clone 20829 (TRAV12-3, TRAJ17)
CAMTLTGNKLTF

SEQ ID NO: 41658 - protein, 19 aa, Homo sapiens
  CDR3 for beta chain variable domain of TCR clone 20829 (TRBV19, TRBJ2-5)
CASSIGQVTDFFLGETQYF

SEQ ID NO: 41659 - protein, 16 aa, Homo sapiens
  CDR3 for alpha chain variable domain of TCR clone 20830 (TRAV26-1, TRAJ33)
CIVPLWGEDSNYQLIW

SEQ ID NO: 41660 - protein, 14 aa, Homo sapiens
  CDR3 for beta chain variable domain of TCR clone 20830 (TRBV6-3, TRBJ1-1)
CASSYHSKNTEAFF

SEQ ID NO: 41661 - protein, 15 aa, Homo sapiens
  CDR3 for alpha chain variable domain of TCR clone 20831 (TRAV26-1, TRAJ29)
CIVRVEGSGNTPLVF

SEQ ID NO: 41662 - protein, 15 aa, Homo sapiens
  CDR3 for beta chain variable domain of TCR clone 20831 (TRBV7-9, TRBJ1-5)
CASSQGHQPNQSQHF

SEQ ID NO: 41663 - protein, 14 aa, Homo sapiens
  CDR3 for alpha chain variable domain of TCR clone 20832 (TRAV12-3, TRAJ10)
SHLPLTGGGNKLTF

SEQ ID NO: 41664 - protein, 14 aa, Homo sapiens
  CDR3 for beta chain variable domain of TCR clone 20832 (TRBV6-1, TRBJ1-3)
CVSVQGGGGNTIYF

SEQ ID NO: 41665 - protein, 20 aa, Homo sapiens
  CDR3 for alpha chain variable domain of TCR clone 20833 (TRAV26-1, TRAJ42)
CCVLLHRQTYYGGSQGNLIL

SEQ ID NO: 41666 - protein, 16 aa, Homo sapiens
  CDR3 for beta chain variable domain of TCR clone 20833 (TRBV7-3, TRBJ2-2)
CASSLKRGTLSGELFF

SEQ ID NO: 41667 - protein, 15 aa, Homo sapiens
  CDR3 for alpha chain variable domain of TCR clone 20834 (TRAV8-3, TRAJ45)
CASSYSGGGADGLTF

SEQ ID NO: 41668 - protein, 13 aa, Homo sapiens
  CDR3 for beta chain variable domain of TCR clone 20834 (TRBV10-3, TRBJ2-7)
CASKLAVNYKQYF

SEQ ID NO: 41669 - protein, 12 aa, Homo sapiens
  CDR3 for alpha chain variable domain of TCR clone 20835 (TRAV13-1, TRAJ27)
CAAHTNAGKSAF

SEQ ID NO: 41670 - protein, 14 aa, Homo sapiens
  CDR3 for beta chain variable domain of TCR clone 20835 (TRBV19, TRBJ2-2)
CASSGQGIAGELFF

SEQ ID NO: 41671 - protein, 15 aa, Homo sapiens
  CDR3 for alpha chain variable domain of TCR clone 20836 (TRAV8-3, TRAJ45)
CASSYSGGGADGLTF

SEQ ID NO: 41672 - protein, 17 aa, Homo sapiens
  CDR3 for beta chain variable domain of TCR clone 20836 (TRBV7-8, TRBJ1-2)
CASSLRPLQGHLYGYAF

SEQ ID NO: 41673 - protein, 14 aa, Homo sapiens
  CDR3 for alpha chain variable domain of TCR clone 20837 (TRAV8-2, TRAJ4)
CVVSPSGSYNKLIF

SEQ ID NO: 41674 - protein, 15 aa, Homo sapiens
  CDR3 for beta chain variable domain of TCR clone 20837 (TRBV4-1, TRBJ1-4)
CASSDTGGTNEKLFF

SEQ ID NO: 41675 - protein, 13 aa, Homo sapiens
  CDR3 for alpha chain variable domain of TCR clone 20838 (TRAV1-1, TRAJ9)
CAAKNTGVFKTIF

SEQ ID NO: 41676 - protein, 14 aa, Homo sapiens
  CDR3 for beta chain variable domain of TCR clone 20838 (TRBV20-1, TRBJ2-1)
CSAQIGGSANEQFF

SEQ ID NO: 41677 - protein, 15 aa, Homo sapiens
  CDR3 for alpha chain variable domain of TCR clone 20839 (TRAV29/DV5, TRAJ24)
CAASGATDSGGKFQF

SEQ ID NO: 41678 - protein, 12 aa, Homo sapiens
  CDR3 for beta chain variable domain of TCR clone 20839 (TRBV11-2, TRBJ2-2)
CASSLPTGELFF

SEQ ID NO: 41679 - protein, 12 aa, Homo sapiens
  CDR3 for alpha chain variable domain of TCR clone 20840 (TRAV12-3, TRAJ40)
CAMSSGTYKYIS

SEQ ID NO: 41680 - protein, 15 aa, Homo sapiens
  CDR3 for beta chain variable domain of TCR clone 20840 (TRBV7-3, TRBJ2-2)
CASSETGQGTGELFF

SEQ ID NO: 41681 - protein, 13 aa, Homo sapiens
  CDR3 for alpha chain variable domain of TCR clone 20841 (TRAV38-1, TRAJ42)
CARWGGSQGNLIF

SEQ ID NO: 41682 - protein, 17 aa, Homo sapiens
  CDR3 for beta chain variable domain of TCR clone 20841 (TRBV20-1, TRBJ2-1)
CSARDPLAGVWDDEQFF

SEQ ID NO: 41683 - protein, 13 aa, Homo sapiens
  CDR3 for alpha chain variable domain of TCR clone 20842 (TRAV12-3, TRAJ33)
CAMSVNINYQLIW

SEQ ID NO: 41684 - protein, 13 aa, Homo sapiens
  CDR3 for beta chain variable domain of TCR clone 20842 (TRBV7-2, TRBJ2-2)
CASSLAVTGELFF

SEQ ID NO: 41685 - protein, 13 aa, Homo sapiens
  CDR3 for alpha chain variable domain of TCR clone 20843 (TRAV13-2, TRAJ15)
CAERPQAGTALIF

SEQ ID NO: 41686 - protein, 15 aa, Homo sapiens
  CDR3 for beta chain variable domain of TCR clone 20843 (TRBV9, TRBJ2-3)
CASSAYEAGTDTQYF

SEQ ID NO: 41687 - protein, 13 aa, Homo sapiens
  CDR3 for alpha chain variable domain of TCR clone 20844 (TRAV8-3, TRAJ4)
WVFYSDGYNKLIF

SEQ ID NO: 41688 - protein, 14 aa, Homo sapiens
  CDR3 for beta chain variable domain of TCR clone 20844 (TRBV7-9, TRBJ2-3)
CASSLEDGTDTQYF

SEQ ID NO: 41689 - protein, 11 aa, Homo sapiens
  CDR3 for alpha chain variable domain of TCR clone 20845 (TRAV1-2, TRAJ40)
CAVPGTYKYIF

SEQ ID NO: 41690 - protein, 16 aa, Homo sapiens
  CDR3 for beta chain variable domain of TCR clone 20845 (TRBV29-1, TRBJ2-7)
CSVEVVGTSRSYEQYF

SEQ ID NO: 41691 - protein, 14 aa, Homo sapiens
  CDR3 for alpha chain variable domain of TCR clone 20846 (TRAV10, TRAJ32)
CGEPRGGATNKPIF

SEQ ID NO: 41692 - protein, 14 aa, Homo sapiens
  CDR3 for beta chain variable domain of TCR clone 20846 (TRBV5-4, TRBJ2-2)
CASRLDGGTGELFF

SEQ ID NO: 41693 - protein, 13 aa, Homo sapiens
  CDR3 for alpha chain variable domain of TCR clone 20847 (TRAV12-2, TRAJ15)
CAVFNQAGTALIF

SEQ ID NO: 41694 - protein, 14 aa, Homo sapiens
  CDR3 for beta chain variable domain of TCR clone 20847 (TRBV7-8, TRBJ1-5)
CQQPGGGAGQPQHF

SEQ ID NO: 41695 - protein, 12 aa, Homo sapiens
  CDR3 for alpha chain variable domain of TCR clone 20848 (TRAV8-3, TRAJ20)
CAVGVNDYKLSF

SEQ ID NO: 41696 - protein, 16 aa, Homo sapiens
  CDR3 for beta chain variable domain of TCR clone 20848 (TRBV19, TRBJ2-2)
CASRSPGTGATGELFF

SEQ ID NO: 41697 - protein, 14 aa, Homo sapiens
  CDR3 for alpha chain variable domain of TCR clone 20849 (TRAV20, TRAJ42)
CAVQAGGSKGNLIF

SEQ ID NO: 41698 - protein, 14 aa, Homo sapiens
  CDR3 for beta chain variable domain of TCR clone 20849 (TRBV28, TRBJ1-2)
CASRIQGANYGYTF

SEQ ID NO: 41699 - protein, 16 aa, Homo sapiens
  CDR3 for alpha chain variable domain of TCR clone 20850 (TRAV30, TRAJ24)
CGTEIVDADSWGKFQF

SEQ ID NO: 41700 - protein, 16 aa, Homo sapiens
  CDR3 for beta chain variable domain of TCR clone 20850 (TRBV29-1, TRBJ2-7)
CSVEDAEDGTAYEQYF

SEQ ID NO: 41701 - protein, 13 aa, Homo sapiens
  CDR3 for alpha chain variable domain of TCR clone 20851 (TRAV29/DV5, TRAJ31)
CAASRNNNARLMF

SEQ ID NO: 41702 - protein, 13 aa, Homo sapiens
  CDR3 for beta chain variable domain of TCR clone 20851 (TRBV9, TRBJ2-7)
CASSVAEYYEQYF

SEQ ID NO: 41703 - protein, 14 aa, Homo sapiens
  CDR3 for alpha chain variable domain of TCR clone 20852 (TRAV8-2, TRAJ32)
CVVSAGGATNKLIF

SEQ ID NO: 41704 - protein, 13 aa, Homo sapiens
  CDR3 for beta chain variable domain of TCR clone 20852 (TRBV11-2, TRBJ2-5)
CASSSTGEETQYF

SEQ ID NO: 41705 - protein, 16 aa, Homo sapiens
  CDR3 for alpha chain variable domain of TCR clone 20853 (TRAV8-3, TRAJ42)
CAAGEGNGGSQGNLIF

SEQ ID NO: 41706 - protein, 14 aa, Homo sapiens
  CDR3 for beta chain variable domain of TCR clone 20853 (TRBV7-2, TRBJ2-1)
CASSRGGARNEQFF

SEQ ID NO: 41707 - protein, 14 aa, Homo sapiens
  CDR3 for alpha chain variable domain of TCR clone 20854 (TRAV1-2, TRAJ8)
CAVREDTGFQKLVF

SEQ ID NO: 41708 - protein, 16 aa, Homo sapiens
  CDR3 for beta chain variable domain of TCR clone 20854 (TRBV2, TRBJ2-3)
CASSTSVEGVTDTQYF

SEQ ID NO: 41709 - protein, 15 aa, Homo sapiens
  CDR3 for alpha chain variable domain of TCR clone 20855 (TRAV2, TRAJ9)
CAVEDRSTGGFKTIF

SEQ ID NO: 41710 - protein, 16 aa, Homo sapiens
  CDR3 for beta chain variable domain of TCR clone 20855 (TRBV24-1, TRBJ2-3)
CATSDPGTGATDTQYF

SEQ ID NO: 41711 - protein, 16 aa, Homo sapiens
  CDR3 for alpha chain variable domain of TCR clone 20856 (TRAV14/DV4, TRAJ53)
CAMREGGGGSNYKLTF

SEQ ID NO: 41712 - protein, 14 aa, Homo sapiens
  CDR3 for beta chain variable domain of TCR clone 20856 (TRBV7-2, TRBJ2-7)
CASSPKTSFYEQYF

SEQ ID NO: 41713 - protein, 23 aa, Homo sapiens
  CDR3 for alpha chain variable domain of TCR clone 20857 (TRAV26-1, TRAJ38)
CIADNAGNNHIQNPDPAVYQLRD

SEQ ID NO: 41714 - protein, 13 aa, Homo sapiens
  CDR3 for beta chain variable domain of TCR clone 20857 (TRBV20-1, TRBJ1-1)
CSARGGGNTEAFS

SEQ ID NO: 41715 - protein, 13 aa, Homo sapiens
  CDR3 for alpha chain variable domain of TCR clone 20858 (TRAV21, TRAJ27)
CAARPGNAGKSTF

SEQ ID NO: 41716 - protein, 12 aa, Homo sapiens
  CDR3 for beta chain variable domain of TCR clone 20858 (TRBV11-2, TRBJ2-2)
CASSLPTGELFF

SEQ ID NO: 41717 - protein, 12 aa, Homo sapiens
  CDR3 for alpha chain variable domain of TCR clone 20859 (TRAV13-2, TRAJ23)
CAERHRGGKLIF

SEQ ID NO: 41718 - protein, 16 aa, Homo sapiens
  CDR3 for beta chain variable domain of TCR clone 20859 (TRBV20-1, TRBJ1-4)
CSAPGQGLLTNEKLFS

SEQ ID NO: 41719 - protein, 10 aa, Homo sapiens
  CDR3 for alpha chain variable domain of TCR clone 20860 (TRAV30, TRAJ24)
CGTEIWMLTA

SEQ ID NO: 41720 - protein, 14 aa, Homo sapiens
  CDR3 for beta chain variable domain of TCR clone 20860 (TRBV12-5, TRBJ2-5)
CASGSRTHQETQYF

SEQ ID NO: 41721 - protein, 13 aa, Homo sapiens
  CDR3 for alpha chain variable domain of TCR clone 20861 (TRAV1-2, TRAJ9)
CAALNTGGFTTIF

SEQ ID NO: 41722 - protein, 13 aa, Homo sapiens
  CDR3 for beta chain variable domain of TCR clone 20861 (TRBV19, TRBJ1-2)
CASSVPGQDGYTF

SEQ ID NO: 41723 - protein, 12 aa, Homo sapiens
  CDR3 for alpha chain variable domain of TCR clone 20862 (TRAV8-3, TRAJ26)
CAGNNYGQNFVF

SEQ ID NO: 41724 - protein, 15 aa, Homo sapiens
  CDR3 for beta chain variable domain of TCR clone 20862 (TRBV9, TRBJ2-1)
CASSLAGSSYNEQFF

SEQ ID NO: 41725 - protein, 16 aa, Homo sapiens
  CDR3 for alpha chain variable domain of TCR clone 20863 (TRAV21, TRAJ37)
CAVRTSGSSNTGKLIF

SEQ ID NO: 41726 - protein, 13 aa, Homo sapiens
  CDR3 for beta chain variable domain of TCR clone 20863 (TRBV7-9, TRBJ2-5)
CASLPSGRETQYF

SEQ ID NO: 41727 - protein, 14 aa, Homo sapiens
  CDR3 for alpha chain variable domain of TCR clone 20864 (TRAV12-2, TRAJ13)
CAVKKTGGYQKVTF

SEQ ID NO: 41728 - protein, 18 aa, Homo sapiens
  CDR3 for beta chain variable domain of TCR clone 20864 (TRBV4-1, TRBJ1-5)
CASSQDPRGQGLNQPQHF

SEQ ID NO: 41729 - protein, 16 aa, Homo sapiens
  CDR3 for alpha chain variable domain of TCR clone 20865 (TRAV3, TRAJ37)
CAVRPHGSGNTGKLIF

SEQ ID NO: 41730 - protein, 16 aa, Homo sapiens
  CDR3 for beta chain variable domain of TCR clone 20865 (TRBV9, TRBJ1-2)
CASSVEERVSPYGYTF

SEQ ID NO: 41731 - protein, 18 aa, Homo sapiens
  CDR3 for alpha chain variable domain of TCR clone 20866 (TRAV21, TRAJ52)
CAVRPSPAGGTSYGKLTF

SEQ ID NO: 41732 - protein, 14 aa, Homo sapiens
  CDR3 for beta chain variable domain of TCR clone 20866 (TRBV7-3, TRBJ2-1)
CASSLAGGTNEQFF

SEQ ID NO: 41733 - protein, 14 aa, Homo sapiens
  CDR3 for alpha chain variable domain of TCR clone 20867 (TRAV26-1, TRAJ49)
CIVRLTNTGNQFYF

SEQ ID NO: 41734 - protein, 13 aa, Homo sapiens
  CDR3 for beta chain variable domain of TCR clone 20867 (TRBV4-1, TRBJ2-7)
CASSQGQAYGQYF

SEQ ID NO: 41735 - protein, 11 aa, Homo sapiens
  CDR3 for alpha chain variable domain of TCR clone 20868 (TRAV12-1, TRAJ44)
SLRGTASKLTF

SEQ ID NO: 41736 - protein, 16 aa, Homo sapiens
  CDR3 for beta chain variable domain of TCR clone 20868 (TRBV7-2, TRBJ2-7)
CASSLAGLAGTYEQYF

SEQ ID NO: 41737 - protein, 14 aa, Homo sapiens
  CDR3 for alpha chain variable domain of TCR clone 20869 (TRAV13-1, TRAJ45)
CAAIGRGGADGLTF

SEQ ID NO: 41738 - protein, 16 aa, Homo sapiens
  CDR3 for beta chain variable domain of TCR clone 20869 (TRBV7-2, TRBJ1-1)
CASSLGAGWTNTEAFF

SEQ ID NO: 41739 - protein, 13 aa, Homo sapiens
  CDR3 for alpha chain variable domain of TCR clone 20870 (TRAV20, TRAJ37)
CAGCSSNTGQLIF

SEQ ID NO: 41740 - protein, 11 aa, Homo sapiens
  CDR3 for beta chain variable domain of TCR clone 20870 (TRBV12-4, TRBJ2-3)
CASTATDTQYF

SEQ ID NO: 41741 - protein, 15 aa, Homo sapiens
  CDR3 for alpha chain variable domain of TCR clone 20871 (TRAV3, TRAJ20)
CAVRDIKLSDYKLSF

SEQ ID NO: 41742 - protein, 15 aa, Homo sapiens
  CDR3 for beta chain variable domain of TCR clone 20871 (TRBV7-9, TRBJ1-6)
CASGSPGRGNSPLHF

SEQ ID NO: 41743 - protein, 12 aa, Homo sapiens
  CDR3 for alpha chain variable domain of TCR clone 20872 (TRAV12-3, TRAJ20)
CAMVRGDYKLSF

SEQ ID NO: 41744 - protein, 12 aa, Homo sapiens
  CDR3 for beta chain variable domain of TCR clone 20872 (TRBV6-1, TRBJ2-7)
CTSSDYSYEQYF

SEQ ID NO: 41745 - protein, 12 aa, Homo sapiens
  CDR3 for alpha chain variable domain of TCR clone 20873 (TRAV12-3, TRAJ17)
CAMTLTGNKLAF

SEQ ID NO: 41746 - protein, 14 aa, Homo sapiens
  CDR3 for beta chain variable domain of TCR clone 20873 (TRBV20-1, TRBJ1-1)
CSAQTRIGGTEAFF

SEQ ID NO: 41747 - protein, 14 aa, Homo sapiens
  CDR3 for alpha chain variable domain of TCR clone 20874 (TRAV13-1, TRAJ35)
CAASKGGFGNVLHC

SEQ ID NO: 41748 - protein, 13 aa, Homo sapiens
  CDR3 for beta chain variable domain of TCR clone 20874 (TRBV7-3, TRBJ1-1)
CASSQDWGAEAFY

SEQ ID NO: 41749 - protein, 13 aa, Homo sapiens
  CDR3 for alpha chain variable domain of TCR clone 20875 (TRAV8-3, TRAJ28)
CAGGAVGSYQLTF

SEQ ID NO: 41750 - protein, 14 aa, Homo sapiens
  CDR3 for beta chain variable domain of TCR clone 20875 (TRBV7-2, TRBJ2-7)
CASRSQGAAYEQYF

SEQ ID NO: 41751 - protein, 11 aa, Homo sapiens
  CDR3 for alpha chain variable domain of TCR clone 20876 (TRAV27, TRAJ49)
CAGVPPNQFYF

SEQ ID NO: 41752 - protein, 18 aa, Homo sapiens
  CDR3 for beta chain variable domain of TCR clone 20876 (TRBV7-8, TRBJ2-1)
CASSPYLGQRGSNNEQFF

SEQ ID NO: 41753 - protein, 14 aa, Homo sapiens
  CDR3 for alpha chain variable domain of TCR clone 20877 (TRAV1-2, TRAJ16)
CAVNRFSDGQKLLF

SEQ ID NO: 41754 - protein, 15 aa, Homo sapiens
  CDR3 for beta chain variable domain of TCR clone 20877 (TRBV7-9, TRBJ1-4)
CASSRTGGFNEKLFF

SEQ ID NO: 41755 - protein, 12 aa, Homo sapiens
  CDR3 for alpha chain variable domain of TCR clone 20878 (TRAV13-2, TRAJ23)
CAERHRGGKLIF

SEQ ID NO: 41756 - protein, 16 aa, Homo sapiens
  CDR3 for beta chain variable domain of TCR clone 20878 (TRBV7-2, TRBJ2-6)
CASSLAGRSGANVLTF

SEQ ID NO: 41757 - protein, 15 aa, Homo sapiens
  CDR3 for alpha chain variable domain of TCR clone 20879 (TRAV12-3, TRAJ49)
CAMAVTPNTGNQLYF

SEQ ID NO: 41758 - protein, 18 aa, Homo sapiens
  CDR3 for beta chain variable domain of TCR clone 20879 (TRBV4-1, TRBJ1-5)
CASSQDPRGQGLNQPQHF

SEQ ID NO: 41759 - protein, 12 aa, Homo sapiens
  CDR3 for alpha chain variable domain of TCR clone 20880 (TRAV21, TRAJ33)
CAKTDSNYQLIW

SEQ ID NO: 41760 - protein, 14 aa, Homo sapiens
  CDR3 for beta chain variable domain of TCR clone 20880 (TRBV2, TRBJ2-7)
CASSLTSGGYEQYF

SEQ ID NO: 41761 - protein, 16 aa, Homo sapiens
  CDR3 for alpha chain variable domain of TCR clone 20881 (TRAV14/DV4, TRAJ53)
CAMREGGGGSNYKLTF

SEQ ID NO: 41762 - protein, 14 aa, Homo sapiens
  CDR3 for beta chain variable domain of TCR clone 20881 (TRBV7-6, TRBJ2-3)
CASSLGTVTDTQYF

SEQ ID NO: 41763 - protein, 16 aa, Homo sapiens
  CDR3 for alpha chain variable domain of TCR clone 20882 (TRAV30, TRAJ24)
CGTEIVDADSWGKFQF

SEQ ID NO: 41764 - protein, 13 aa, Homo sapiens
  CDR3 for beta chain variable domain of TCR clone 20882 (TRBV27, TRBJ1-1)
CASSVSANTEAFF

SEQ ID NO: 41765 - protein, 14 aa, Homo sapiens
  CDR3 for alpha chain variable domain of TCR clone 20883 (TRAV12-1, TRAJ8)
CVVNSNTGFQKLVF

SEQ ID NO: 41766 - protein, 17 aa, Homo sapiens
  CDR3 for beta chain variable domain of TCR clone 20883 (TRBV7-8, TRBJ2-6)
CTSSAGTGGAGANVLTF

SEQ ID NO: 41767 - protein, 11 aa, Homo sapiens
  CDR3 for alpha chain variable domain of TCR clone 20884 (TRAV13-2, TRAJ54)
RAVQGAQKLVF

SEQ ID NO: 41768 - protein, 16 aa, Homo sapiens
  CDR3 for beta chain variable domain of TCR clone 20884 (TRBV7-3, TRBJ2-2)
CASSLKRGTLSGELFF

SEQ ID NO: 41769 - protein, 14 aa, Homo sapiens
  CDR3 for alpha chain variable domain of TCR clone 20885 (TRAV1-2, TRAJ16)
CAVNRFSDGQKLLF

SEQ ID NO: 41770 - protein, 13 aa, Homo sapiens
  CDR3 for beta chain variable domain of TCR clone 20885 (TRBV12-4, TRBJ1-1)
CASSPGTGFEAFF

SEQ ID NO: 41771 - protein, 14 aa, Homo sapiens
  CDR3 for alpha chain variable domain of TCR clone 20886 (TRAV2, TRAJ37)
CAVDFTSNTGKLIF

SEQ ID NO: 41772 - protein, 15 aa, Homo sapiens
  CDR3 for beta chain variable domain of TCR clone 20886 (TRBV20-1, TRBJ1-1)
CSASRGVTGNTEDFF

SEQ ID NO: 41773 - protein, 14 aa, Homo sapiens
  CDR3 for alpha chain variable domain of TCR clone 20887 (TRAV17, TRAJ16)
CATADFSDGQKLLF

SEQ ID NO: 41774 - protein, 16 aa, Homo sapiens
  CDR3 for beta chain variable domain of TCR clone 20887 (TRBV12-5, TRBJ2-5)
CASGPRTSGNQETQYF

SEQ ID NO: 41775 - protein, 13 aa, Homo sapiens
  CDR3 for alpha chain variable domain of TCR clone 20888 (TRAV30, TRAJ24)
RGTVTDSWGKLQF

SEQ ID NO: 41776 - protein, 15 aa, Homo sapiens
  CDR3 for beta chain variable domain of TCR clone 20888 (TRBV4-1, TRBJ2-1)
CASSQDPGNYNEQFF

SEQ ID NO: 41777 - protein, 14 aa, Homo sapiens
  CDR3 for alpha chain variable domain of TCR clone 20889 (TRAV1-2, TRAJ16)
CAVNRFSDGQKLLF

SEQ ID NO: 41778 - protein, 14 aa, Homo sapiens
  CDR3 for beta chain variable domain of TCR clone 20889 (TRBV19, TRBJ2-5)
CASSMTGQQETQYF

SEQ ID NO: 41779 - protein, 15 aa, Homo sapiens
  CDR3 for alpha chain variable domain of TCR clone 20890 (TRAV17, TRAJ23)
CATDAEDKQGGKLIF

SEQ ID NO: 41780 - protein, 12 aa, Homo sapiens
  CDR3 for beta chain variable domain of TCR clone 20890 (TRBV2, TRBJ2-1)
CAKREGYNEQFF

SEQ ID NO: 41781 - protein, 16 aa, Homo sapiens
  CDR3 for alpha chain variable domain of TCR clone 20891 (TRAV12-3, TRAJ32)
CAVNMNYGGATNKLIF

SEQ ID NO: 41782 - protein, 16 aa, Homo sapiens
  CDR3 for beta chain variable domain of TCR clone 20891 (TRBV7-8, TRBJ2-3)
CASSTEGQRETDTQYF

SEQ ID NO: 41783 - protein, 16 aa, Homo sapiens
  CDR3 for alpha chain variable domain of TCR clone 20892 (TRAV17, TRAJ22)
CATGPISSGSARQLTF

SEQ ID NO: 41784 - protein, 13 aa, Homo sapiens
  CDR3 for beta chain variable domain of TCR clone 20892 (TRBV11-2, TRBJ2-1)
CASSLGLAGGGSS

SEQ ID NO: 41785 - protein, 14 aa, Homo sapiens
  CDR3 for alpha chain variable domain of TCR clone 20893 (TRAV3, TRAJ28)
CALRSGAGSYQLTF

SEQ ID NO: 41786 - protein, 15 aa, Homo sapiens
  CDR3 for beta chain variable domain of TCR clone 20893 (TRBV7-6, TRBJ2-3)
CASSLGGSGPDTQYF

SEQ ID NO: 41787 - protein, 13 aa, Homo sapiens
  CDR3 for alpha chain variable domain of TCR clone 20894 (TRAV27, TRAJ3)
ASLRGSSASKIIF

SEQ ID NO: 41788 - protein, 15 aa, Homo sapiens
  CDR3 for beta chain variable domain of TCR clone 20894 (TRBV28, TRBJ1-3)
CASSMGWASGNTIYF

SEQ ID NO: 41789 - protein, 13 aa, Homo sapiens
  CDR3 for alpha chain variable domain of TCR clone 20895 (TRAV21, TRAJ20)
CAVGLRVDYKLSF

SEQ ID NO: 41790 - protein, 15 aa, Homo sapiens
  CDR3 for beta chain variable domain of TCR clone 20895 (TRBV19, TRBJ1-1)
CASTSGQIQNTEAFF

SEQ ID NO: 41791 - protein, 11 aa, Homo sapiens
  CDR3 for alpha chain variable domain of TCR clone 20896 (TRAV2, TRAJ13)
CASGGYQKVTF

SEQ ID NO: 41792 - protein, 16 aa, Homo sapiens
  CDR3 for beta chain variable domain of TCR clone 20896 (TRBV6-1, TRBJ2-5)
CASSETLERGAETQYF

SEQ ID NO: 41793 - protein, 17 aa, Homo sapiens
  CDR3 for alpha chain variable domain of TCR clone 20897 (TRAV13-1, TRAJ52)
CSKNPNAGGTSYGKLTF

SEQ ID NO: 41794 - protein, 14 aa, Homo sapiens
  CDR3 for beta chain variable domain of TCR clone 20897 (TRBV6-5, TRBJ1-1)
CASSFGQGLTEAFF

SEQ ID NO: 41795 - protein, 14 aa, Homo sapiens
  CDR3 for alpha chain variable domain of TCR clone 20898 (TRAV9-2, TRAJ28)
CASYSGAGSYQLTF

SEQ ID NO: 41796 - protein, 15 aa, Homo sapiens
  CDR3 for beta chain variable domain of TCR clone 20898 (TRBV18, TRBJ2-1)
CASLPDRGRDNEQFF

SEQ ID NO: 41797 - protein, 12 aa, Homo sapiens
  CDR3 for alpha chain variable domain of TCR clone 20899 (TRAV21, TRAJ11)
CAATSGYSPLTF

SEQ ID NO: 41798 - protein, 14 aa, Homo sapiens
  CDR3 for beta chain variable domain of TCR clone 20899 (TRBV20-1, TRBJ2-7)
CSAPELAGVGEQYF

SEQ ID NO: 41799 - protein, 14 aa, Homo sapiens
  CDR3 for alpha chain variable domain of TCR clone 20900 (TRAV38-1, TRAJ40)
CALRPTSGTYKYIF

SEQ ID NO: 41800 - protein, 14 aa, Homo sapiens
  CDR3 for beta chain variable domain of TCR clone 20900 (TRBV25-1, TRBJ1-1)
CASTHLGGNTEAFC

SEQ ID NO: 41801 - protein, 12 aa, Homo sapiens
  CDR3 for alpha chain variable domain of TCR clone 20901 (TRAV12-3, TRAJ40)
CAMSSGTYKYIF

SEQ ID NO: 41802 - protein, 15 aa, Homo sapiens
  CDR3 for beta chain variable domain of TCR clone 20901 (TRBV7-3, TRBJ2-2)
RASSETGQGTGELFF

SEQ ID NO: 41803 - protein, 13 aa, Homo sapiens
  CDR3 for alpha chain variable domain of TCR clone 20902 (TRAV2, TRAJ40)
CAVVTSGTYKYIF

SEQ ID NO: 41804 - protein, 14 aa, Homo sapiens
  CDR3 for beta chain variable domain of TCR clone 20902 (TRBV19, TRBJ2-1)
CASPTFVLSGEQFF

SEQ ID NO: 41805 - protein, 13 aa, Homo sapiens
  CDR3 for alpha chain variable domain of TCR clone 20903 (TRAV12-3, TRAJ41)
CAIAPNSGYALNF

SEQ ID NO: 41806 - protein, 14 aa, Homo sapiens
  CDR3 for beta chain variable domain of TCR clone 20903 (TRBV7-2, TRBJ1-3)
CASSLGTAGNTMYF

SEQ ID NO: 41807 - protein, 14 aa, Homo sapiens
  CDR3 for alpha chain variable domain of TCR clone 20904 (TRAV9-2, TRAJ20)
CALRDPLNDYKLSF

SEQ ID NO: 41808 - protein, 16 aa, Homo sapiens
  CDR3 for beta chain variable domain of TCR clone 20904 (TRBV7-2, TRBJ2-3)
CASSLVALYSTDTQYF

SEQ ID NO: 41809 - protein, 16 aa, Homo sapiens
  CDR3 for alpha chain variable domain of TCR clone 20905 (TRAV8-3, TRAJ13)
CAVGAYPSGGYQKVTF

SEQ ID NO: 41810 - protein, 15 aa, Homo sapiens
  CDR3 for beta chain variable domain of TCR clone 20905 (TRBV19, TRBJ1-5)
CASSIVWADKQPQHF

SEQ ID NO: 41811 - protein, 14 aa, Homo sapiens
  CDR3 for alpha chain variable domain of TCR clone 20906 (TRAV3, TRAJ37)
CAVKESGNTGKLIF

SEQ ID NO: 41812 - protein, 15 aa, Homo sapiens
  CDR3 for beta chain variable domain of TCR clone 20906 (TRBV9, TRBJ1-6)
CASSVAGTGDSPLHF

SEQ ID NO: 41813 - protein, 11 aa, Homo sapiens
  CDR3 for alpha chain variable domain of TCR clone 20907 (TRAV2, TRAJ13)
CASRGYQKVTF

SEQ ID NO: 41814 - protein, 16 aa, Homo sapiens
  CDR3 for beta chain variable domain of TCR clone 20907 (TRBV6-1, TRBJ2-5)
CASSETLDRGAETQYF

SEQ ID NO: 41815 - protein, 16 aa, Homo sapiens
  CDR3 for alpha chain variable domain of TCR clone 20908 (TRAV21, TRAJ37)
CAVSTAGSSNTGKLIF

SEQ ID NO: 41816 - protein, 13 aa, Homo sapiens
  CDR3 for beta chain variable domain of TCR clone 20908 (TRBV7-9, TRBJ2-5)
CASLPSGRETQYF

SEQ ID NO: 41817 - protein, 17 aa, Homo sapiens
  CDR3 for alpha chain variable domain of TCR clone 20909 (TRAV13-1, TRAJ31)
CAPRDGLMFGDGTQLVV

SEQ ID NO: 41818 - protein, 12 aa, Homo sapiens
  CDR3 for beta chain variable domain of TCR clone 20909 (TRBV7-9, TRBJ2-7)
CASSLEGYEQYF

SEQ ID NO: 41819 - protein, 12 aa, Homo sapiens
  CDR3 for alpha chain variable domain of TCR clone 20910 (TRAV13-1, TRAJ15)
CAASQAGTALIL

SEQ ID NO: 41820 - protein, 14 aa, Homo sapiens
  CDR3 for beta chain variable domain of TCR clone 20910 (TRBV19, TRBJ2-2)
CASSTLHRSGELFF

SEQ ID NO: 41821 - protein, 11 aa, Homo sapiens
  CDR3 for alpha chain variable domain of TCR clone 20911 (TRAV8-1, TRAJ15)
CAVGPGTALIF

SEQ ID NO: 41822 - protein, 18 aa, Homo sapiens
  CDR3 for beta chain variable domain of TCR clone 20911 (TRBV18, TRBJ2-3)
CASSYTSGAAGGTDTQYF

SEQ ID NO: 41823 - protein, 10 aa, Homo sapiens
  CDR3 for alpha chain variable domain of TCR clone 20912 (TRAV12-3, TRAJ49)
CAMNDAQFYF

SEQ ID NO: 41824 - protein, 13 aa, Homo sapiens
  CDR3 for beta chain variable domain of TCR clone 20912 (TRBV12-4, TRBJ1-1)
CASSPGTGFEAFF

SEQ ID NO: 41825 - protein, 17 aa, Homo sapiens
  CDR3 for alpha chain variable domain of TCR clone 20913 (TRAV17, TRAJ28)
CATDPRRGGAGSYQLTF

SEQ ID NO: 41826 - protein, 16 aa, Homo sapiens
  CDR3 for beta chain variable domain of TCR clone 20913 (TRBV25-1, TRBJ1-1)
CASSGDRDRGRTEAFF

SEQ ID NO: 41827 - protein, 11 aa, Homo sapiens
  CDR3 for alpha chain variable domain of TCR clone 20914 (TRAV12-3, TRAJ43)
CAMSVSNDMRS

SEQ ID NO: 41828 - protein, 13 aa, Homo sapiens
  CDR3 for beta chain variable domain of TCR clone 20914 (TRBV20-1, TRBJ1-1)
CSAPLGGGTEAFF

SEQ ID NO: 41829 - protein, 14 aa, Homo sapiens
  CDR3 for alpha chain variable domain of TCR clone 20915 (TRAV12-1, TRAJ27)
CGEHIRTYAGKSTF

SEQ ID NO: 41830 - protein, 15 aa, Homo sapiens
  CDR3 for beta chain variable domain of TCR clone 20915 (TRBV19, TRBJ1-1)
CASTSGQIQNTEAFF

SEQ ID NO: 41831 - protein, 14 aa, Homo sapiens
  CDR3 for alpha chain variable domain of TCR clone 20916 (TRAV38-1, TRAJ29)
CAFITPSGDTPLVF

SEQ ID NO: 41832 - protein, 15 aa, Homo sapiens
  CDR3 for beta chain variable domain of TCR clone 20916 (TRBV5-1, TRBJ2-1)
CASSPPRAPYNEQFF

SEQ ID NO: 41833 - protein, 16 aa, Homo sapiens
  CDR3 for alpha chain variable domain of TCR clone 20917 (TRAV30, TRAJ24)
CGTEIVDADSWGKFQF

SEQ ID NO: 41834 - protein, 13 aa, Homo sapiens
  CDR3 for beta chain variable domain of TCR clone 20917 (TRBV7-9, TRBJ2-1)
CASSLDVGNEQFF

SEQ ID NO: 41835 - protein, 15 aa, Homo sapiens
  CDR3 for alpha chain variable domain of TCR clone 20918 (TRAV20, TRAJ53)
CAVQASGGSNYKLTF

SEQ ID NO: 41836 - protein, 14 aa, Homo sapiens
  CDR3 for beta chain variable domain of TCR clone 20918 (TRBV7-2, TRBJ1-2)
CASSQTGSTYGYTS

SEQ ID NO: 41837 - protein, 15 aa, Homo sapiens
  CDR3 for alpha chain variable domain of TCR clone 20919 (TRAV8-6, TRAJ48)
CAVSPTNFGNEKLTF

SEQ ID NO: 41838 - protein, 15 aa, Homo sapiens
  CDR3 for beta chain variable domain of TCR clone 20919 (TRBV7-9, TRBJ2-1)
CASSLGLAGGTEQFF

SEQ ID NO: 41839 - protein, 14 aa, Homo sapiens
  CDR3 for alpha chain variable domain of TCR clone 20920 (TRAV35, TRAJ33)
CAGSSQDSNYQLIW

SEQ ID NO: 41840 - protein, 15 aa, Homo sapiens
  CDR3 for beta chain variable domain of TCR clone 20920 (TRBV20-1, TRBJ2-7)
CSAESGTSGAYERYF

SEQ ID NO: 41841 - protein, 14 aa, Homo sapiens
  CDR3 for alpha chain variable domain of TCR clone 20921 (TRAV1-2, TRAJ16)
CAVNRFSDGQKLLF

SEQ ID NO: 41842 - protein, 13 aa, Homo sapiens
  CDR3 for beta chain variable domain of TCR clone 20921 (TRBV11-2, TRBJ2-5)
CASSRGPSETQYF

SEQ ID NO: 41843 - protein, 13 aa, Homo sapiens
  CDR3 for alpha chain variable domain of TCR clone 20922 (TRAV20, TRAJ37)
CAGCSSNTGKLIF

SEQ ID NO: 41844 - protein, 11 aa, Homo sapiens
  CDR3 for beta chain variable domain of TCR clone 20922 (TRBV12-4, TRBJ2-3)
CASTATDTKYF

SEQ ID NO: 41845 - protein, 15 aa, Homo sapiens
  CDR3 for alpha chain variable domain of TCR clone 20923 (TRAV17, TRAJ57)
CAKGPSQGGSEKLVF

SEQ ID NO: 41846 - protein, 16 aa, Homo sapiens
  CDR3 for beta chain variable domain of TCR clone 20923 (TRBV12-4, TRBJ1-5)
CASSRPVGGSNQPQHF

SEQ ID NO: 41847 - protein, 12 aa, Homo sapiens
  CDR3 for alpha chain variable domain of TCR clone 20924 (TRAV12-3, TRAJ41)
CAMSYSGYALNF

SEQ ID NO: 41848 - protein, 13 aa, Homo sapiens
  CDR3 for beta chain variable domain of TCR clone 20924 (TRBV7-3, TRBJ2-1)
CASSLDGYNEQFF

SEQ ID NO: 41849 - protein, 15 aa, Homo sapiens
  CDR3 for alpha chain variable domain of TCR clone 20925 (TRAV35, TRAJ50)
CARQLRKTSYDKVIF

SEQ ID NO: 41850 - protein, 12 aa, Homo sapiens
  CDR3 for beta chain variable domain of TCR clone 20925 (TRBV5-1, TRBJ2-5)
CASSLGLETQYF

SEQ ID NO: 41851 - protein, 14 aa, Homo sapiens
  CDR3 for alpha chain variable domain of TCR clone 20926 (TRAV12-1, TRAJ17)
CVVNYKTAGNKLTF

SEQ ID NO: 41852 - protein, 17 aa, Homo sapiens
  CDR3 for beta chain variable domain of TCR clone 20926 (TRBV20-1, TRBJ2-1)
CSASSSGLAGSYNEQFF

SEQ ID NO: 41853 - protein, 14 aa, Homo sapiens
  CDR3 for alpha chain variable domain of TCR clone 20927 (TRAV9-2, TRAJ36)
CALPWRTGANNLFL

SEQ ID NO: 41854 - protein, 14 aa, Homo sapiens
  CDR3 for beta chain variable domain of TCR clone 20927 (TRBV2, TRBJ1-2)
CASSELQVNYGYTF

SEQ ID NO: 41855 - protein, 12 aa, Homo sapiens
  CDR3 for alpha chain variable domain of TCR clone 20928 (TRAV2, TRAJ10)
CASTGGGNKLTL

SEQ ID NO: 41856 - protein, 14 aa, Homo sapiens
  CDR3 for beta chain variable domain of TCR clone 20928 (TRBV7-2, TRBJ2-2)
CASRGQGAAGELFF

SEQ ID NO: 41857 - protein, 14 aa, Homo sapiens
  CDR3 for alpha chain variable domain of TCR clone 20929 (TRAV13-1, TRAJ40)
CAASMTSGTYKYIF

SEQ ID NO: 41858 - protein, 15 aa, Homo sapiens
  CDR3 for beta chain variable domain of TCR clone 20929 (TRBV7-3, TRBJ2-1)
CASRPTGGGEVEQFF

SEQ ID NO: 41859 - protein, 15 aa, Homo sapiens
  CDR3 for alpha chain variable domain of TCR clone 20930 (TRAV8-3, TRAJ45)
CASSYSGGGADGLTF

SEQ ID NO: 41860 - protein, 13 aa, Homo sapiens
  CDR3 for beta chain variable domain of TCR clone 20930 (TRBV4-1, TRBJ2-2)
CASSQENTGELFF

SEQ ID NO: 41861 - protein, 13 aa, Homo sapiens
  CDR3 for alpha chain variable domain of TCR clone 20931 (TRAV29/DV5, TRAJ28)
CAAHRTRSYQLTF

SEQ ID NO: 41862 - protein, 15 aa, Homo sapiens
  CDR3 for beta chain variable domain of TCR clone 20931 (TRBV27, TRBJ2-1)
CASSNGGGSSNEQFF

SEQ ID NO: 41863 - protein, 16 aa, Homo sapiens
  CDR3 for alpha chain variable domain of TCR clone 20932 (TRAV27, TRAJ52)
CAGAPASGTSYGKLTF

SEQ ID NO: 41864 - protein, 12 aa, Homo sapiens
  CDR3 for beta chain variable domain of TCR clone 20932 (TRBV27, TRBJ2-1)
CASRGFYNEQFF

SEQ ID NO: 41865 - protein, 13 aa, Homo sapiens
  CDR3 for alpha chain variable domain of TCR clone 20933 (TRAV21, TRAJ57)
CAVTQGGSEKLVF

SEQ ID NO: 41866 - protein, 16 aa, Homo sapiens
  CDR3 for beta chain variable domain of TCR clone 20933 (TRBV29-1, TRBJ2-7)
CSVEDAEDGTAYEQYV

SEQ ID NO: 41867 - protein, 14 aa, Homo sapiens
  CDR3 for alpha chain variable domain of TCR clone 20934 (TRAV14/DV4, TRAJ42)
CPRGSLRSQGNLIF

SEQ ID NO: 41868 - protein, 13 aa, Homo sapiens
  CDR3 for beta chain variable domain of TCR clone 20934 (TRBV24-1, TRBJ2-1)
CATSAGPYNEQFF

SEQ ID NO: 41869 - protein, 12 aa, Homo sapiens
  CDR3 for alpha chain variable domain of TCR clone 20935 (TRAV3, TRAJ20)
CAVRDGDYKLSF

SEQ ID NO: 41870 - protein, 15 aa, Homo sapiens
  CDR3 for beta chain variable domain of TCR clone 20935 (TRBV20-1, TRBJ2-7)
CSARDRVSGMDEQYF

SEQ ID NO: 41871 - protein, 13 aa, Homo sapiens
  CDR3 for alpha chain variable domain of TCR clone 20936 (TRAV23/DV6, TRAJ48)
CAAIPERNEKLTF

SEQ ID NO: 41872 - protein, 13 aa, Homo sapiens
  CDR3 for beta chain variable domain of TCR clone 20936 (TRBV5-4, TRBJ2-3)
CASSRTGLGTQYF

SEQ ID NO: 41873 - protein, 17 aa, Homo sapiens
  CDR3 for alpha chain variable domain of TCR clone 20937 (TRAV3, TRAJ6)
CAVRDGPRAGGSYIPTF

SEQ ID NO: 41874 - protein, 17 aa, Homo sapiens
  CDR3 for beta chain variable domain of TCR clone 20937 (TRBV20-1, TRBJ2-2)
CSASGSGQGGLTGELFF

SEQ ID NO: 41875 - protein, 14 aa, Homo sapiens
  CDR3 for alpha chain variable domain of TCR clone 20938 (TRAV38-1, TRAJ45)
CAYYSGGGADGLTF

SEQ ID NO: 41876 - protein, 20 aa, Homo sapiens
  CDR3 for beta chain variable domain of TCR clone 20938 (TRBV28, TRBJ2-1)
CASTPIGRSPGPAGGNEQFF

SEQ ID NO: 41877 - protein, 17 aa, Homo sapiens
  CDR3 for alpha chain variable domain of TCR clone 20939 (TRAV13-1, TRAJ52)
CAASSGAGGTSYGELTF

SEQ ID NO: 41878 - protein, 15 aa, Homo sapiens
  CDR3 for beta chain variable domain of TCR clone 20939 (TRBV2, TRBJ2-1)
CASSELAGSYNEQFF

SEQ ID NO: 41879 - protein, 11 aa, Homo sapiens
  CDR3 for alpha chain variable domain of TCR clone 20940 (TRAV1-2, TRAJ40)
FAVPGTYKYIF

SEQ ID NO: 41880 - protein, 16 aa, Homo sapiens
  CDR3 for beta chain variable domain of TCR clone 20940 (TRBV29-1, TRBJ2-7)
CSVEVVGTSGSYEQYF

SEQ ID NO: 41881 - protein, 12 aa, Homo sapiens
  CDR3 for alpha chain variable domain of TCR clone 20941 (TRAV8-3, TRAJ20)
CAVGANDYTLSF

SEQ ID NO: 41882 - protein, 16 aa, Homo sapiens
  CDR3 for beta chain variable domain of TCR clone 20941 (TRBV19, TRBJ2-2)
CASRSPGTGATGELFF

SEQ ID NO: 41883 - protein, 13 aa, Homo sapiens
  CDR3 for alpha chain variable domain of TCR clone 20942 (TRAV23/DV6, TRAJ16)
CAASISDGQKLLL

SEQ ID NO: 41884 - protein, 15 aa, Homo sapiens
  CDR3 for beta chain variable domain of TCR clone 20942 (TRBV2, TRBJ2-2)
CASSRETVGTGELFF

SEQ ID NO: 41885 - protein, 13 aa, Homo sapiens
  CDR3 for alpha chain variable domain of TCR clone 20943 (TRAV12-3, TRAJ43)
CAMIRPNNNDMRF

SEQ ID NO: 41886 - protein, 12 aa, Homo sapiens
  CDR3 for beta chain variable domain of TCR clone 20943 (TRBV11-2, TRBJ2-5)
CASSVGQETQYF

SEQ ID NO: 41887 - protein, 13 aa, Homo sapiens
  CDR3 for alpha chain variable domain of TCR clone 20944 (TRAV27, TRAJ41)
CAGEGNSGYALNF

SEQ ID NO: 41888 - protein, 14 aa, Homo sapiens
  CDR3 for beta chain variable domain of TCR clone 20944 (TRBV12-5, TRBJ2-5)
CASGSRTHQETQYF

SEQ ID NO: 41889 - protein, 11 aa, Homo sapiens
  CDR3 for alpha chain variable domain of TCR clone 20945 (TRAV12-3, TRAJ27)
CAMANAGKSTF

SEQ ID NO: 41890 - protein, 16 aa, Homo sapiens
  CDR3 for beta chain variable domain of TCR clone 20945 (TRBV7-3, TRBJ2-2)
CASSLKRGTLSGELFF

SEQ ID NO: 41891 - protein, 11 aa, Homo sapiens
  CDR3 for alpha chain variable domain of TCR clone 20946 (TRAV21, TRAJ11)
CAVNGYSTLTF

SEQ ID NO: 41892 - protein, 12 aa, Homo sapiens
  CDR3 for beta chain variable domain of TCR clone 20946 (TRBV11-2, TRBJ2-2)
CASSLGGGELFF

SEQ ID NO: 41893 - protein, 16 aa, Homo sapiens
  CDR3 for alpha chain variable domain of TCR clone 20947 (TRAV3, TRAJ37)
CAVRGKGSGNTGKIIF

SEQ ID NO: 41894 - protein, 13 aa, Homo sapiens
  CDR3 for beta chain variable domain of TCR clone 20947 (TRBV14, TRBJ2-7)
CASSQDRRYEQYF

SEQ ID NO: 41895 - protein, 17 aa, Homo sapiens
  CDR3 for alpha chain variable domain of TCR clone 20948 (TRAV16, TRAJ26)
CALSGSEFCLCSRNQIV

SEQ ID NO: 41896 - protein, 12 aa, Homo sapiens
  CDR3 for beta chain variable domain of TCR clone 20948 (TRBV11-2, TRBJ2-1)
CASSPGNNEQFF

SEQ ID NO: 41897 - protein, 11 aa, Homo sapiens
  CDR3 for alpha chain variable domain of TCR clone 20949 (TRAV3, TRAJ21)
CAVGNFNKFYF

SEQ ID NO: 41898 - protein, 12 aa, Homo sapiens
  CDR3 for beta chain variable domain of TCR clone 20949 (TRBV11-2, TRBJ2-1)
CASSPGNNEQFF

SEQ ID NO: 41899 - protein, 13 aa, Homo sapiens
  CDR3 for alpha chain variable domain of TCR clone 20950 (TRAV36/DV7, TRAJ37)
CAVFSSNTGKLIF

SEQ ID NO: 41900 - protein, 15 aa, Homo sapiens
  CDR3 for beta chain variable domain of TCR clone 20950 (TRBV20-1, TRBJ1-1)
CSARDPRGEYIEAFF

SEQ ID NO: 41901 - protein, 12 aa, Homo sapiens
  CDR3 for alpha chain variable domain of TCR clone 20951 (TRAV35, TRAJ39)
LAPNNAGNMLTF

SEQ ID NO: 41902 - protein, 16 aa, Homo sapiens
  CDR3 for beta chain variable domain of TCR clone 20951 (TRBV2, TRBJ2-3)
CASSTAVEGVTDTQYF

SEQ ID NO: 41903 - protein, 11 aa, Homo sapiens
  CDR3 for alpha chain variable domain of TCR clone 20952 (TRAV3, TRAJ21)
CAVGNFNKFYF

SEQ ID NO: 41904 - protein, 20 aa, Homo sapiens
  CDR3 for beta chain variable domain of TCR clone 20952 (TRBV7-8, TRBJ2-2)
CASSHLFPGPTIHITGELFF

SEQ ID NO: 41905 - protein, 13 aa, Homo sapiens
  CDR3 for alpha chain variable domain of TCR clone 20953 (TRAV8-6, TRAJ49)
CAVITDTGNQFYF

SEQ ID NO: 41906 - protein, 17 aa, Homo sapiens
  CDR3 for beta chain variable domain of TCR clone 20953 (TRBV11-2, TRBJ2-1)
CASSLYPPGVEYNEQFF

SEQ ID NO: 41907 - protein, 13 aa, Homo sapiens
  CDR3 for alpha chain variable domain of TCR clone 20954 (TRAV16, TRAJ10)
CALLTGGGNKLTF

SEQ ID NO: 41908 - protein, 12 aa, Homo sapiens
  CDR3 for beta chain variable domain of TCR clone 20954 (TRBV28, TRBJ2-7)
CAGTGNHYEQYF

SEQ ID NO: 41909 - protein, 14 aa, Homo sapiens
  CDR3 for alpha chain variable domain of TCR clone 20955 (TRAV12-2, TRAJ13)
CAVKKTGGYQKVTF

SEQ ID NO: 41910 - protein, 13 aa, Homo sapiens
  CDR3 for beta chain variable domain of TCR clone 20955 (TRBV12-4, TRBJ1-2)
CASSFIWLHLRFG

SEQ ID NO: 41911 - protein, 14 aa, Homo sapiens
  CDR3 for alpha chain variable domain of TCR clone 20956 (TRAV17, TRAJ12)
CATDEKDSSYKLIS

SEQ ID NO: 41912 - protein, 16 aa, Homo sapiens
  CDR3 for beta chain variable domain of TCR clone 20956 (TRBV11-2, TRBJ2-1)
CASSPRLAGVYNEQFF

SEQ ID NO: 41913 - protein, 16 aa, Homo sapiens
  CDR3 for alpha chain variable domain of TCR clone 20957 (TRAV17, TRAJ28)
CATASVSGAGSYQPTF

SEQ ID NO: 41914 - protein, 11 aa, Homo sapiens
  CDR3 for beta chain variable domain of TCR clone 20957 (TRBV7-9, TRBJ2-5)
CASSLGETQYF

SEQ ID NO: 41915 - protein, 14 aa, Homo sapiens
  CDR3 for alpha chain variable domain of TCR clone 20958 (TRAV8-3, TRAJ9)
CAVVYNTGGSKTIF

SEQ ID NO: 41916 - protein, 14 aa, Homo sapiens
  CDR3 for beta chain variable domain of TCR clone 20958 (TRBV7-3, TRBJ2-2)
CASSSGGYTGELFF

SEQ ID NO: 41917 - protein, 13 aa, Homo sapiens
  CDR3 for alpha chain variable domain of TCR clone 20959 (TRAV38-2/DV8, TRAJ34)
CAYRNYNTDKLIF

SEQ ID NO: 41918 - protein, 15 aa, Homo sapiens
  CDR3 for beta chain variable domain of TCR clone 20959 (TRBV20-1, TRBJ2-5)
CSAGGTGGLQETQYF

SEQ ID NO: 41919 - protein, 15 aa, Homo sapiens
  CDR3 for alpha chain variable domain of TCR clone 20960 (TRAV17, TRAJ57)
CATGPSQGGSEKLVF

SEQ ID NO: 41920 - protein, 15 aa, Homo sapiens
  CDR3 for beta chain variable domain of TCR clone 20960 (TRBV6-3, TRBJ2-7)
CASSSPGTVLYEQYF

SEQ ID NO: 41921 - protein, 14 aa, Homo sapiens
  CDR3 for alpha chain variable domain of TCR clone 20961 (TRAV12-1, TRAJ17)
CGVNYKAAGNKLTF

SEQ ID NO: 41922 - protein, 17 aa, Homo sapiens
  CDR3 for beta chain variable domain of TCR clone 20961 (TRBV20-1, TRBJ2-1)
CSASSSGLAGSYNEQFF

SEQ ID NO: 41923 - protein, 15 aa, Homo sapiens
  CDR3 for alpha chain variable domain of TCR clone 20962 (TRAV3, TRAJ5)
CAVRDRKTGRSALTF

SEQ ID NO: 41924 - protein, 15 aa, Homo sapiens
  CDR3 for beta chain variable domain of TCR clone 20962 (TRBV7-8, TRBJ2-1)
CASSLADSLYNEQFF

SEQ ID NO: 41925 - protein, 14 aa, Homo sapiens
  CDR3 for alpha chain variable domain of TCR clone 20963 (TRAV9-2, TRAJ39)
CALYIYNAGNMLTF

SEQ ID NO: 41926 - protein, 13 aa, Homo sapiens
  CDR3 for beta chain variable domain of TCR clone 20963 (TRBV5-1, TRBJ2-3)
CASSSEITDTQYF

SEQ ID NO: 41927 - protein, 13 aa, Homo sapiens
  CDR3 for alpha chain variable domain of TCR clone 20964 (TRAV21, TRAJ20)
CAVGLRVDYKLSF

SEQ ID NO: 41928 - protein, 14 aa, Homo sapiens
  CDR3 for beta chain variable domain of TCR clone 20964 (TRBV4-2, TRBJ2-1)
CASGLDRAYNEQFF

SEQ ID NO: 41929 - protein, 12 aa, Homo sapiens
  CDR3 for alpha chain variable domain of TCR clone 20965 (TRAV17, TRAJ39)
CATGAAGNMLTF

SEQ ID NO: 41930 - protein, 14 aa, Homo sapiens
  CDR3 for beta chain variable domain of TCR clone 20965 (TRBV7-9, TRBJ1-2)
CASSRQGANYGCTF

SEQ ID NO: 41931 - protein, 14 aa, Homo sapiens
  CDR3 for alpha chain variable domain of TCR clone 20966 (TRAV21, TRAJ15)
CAVSLNQAGTALIC

SEQ ID NO: 41932 - protein, 11 aa, Homo sapiens
  CDR3 for beta chain variable domain of TCR clone 20966 (TRBV20-1, TRBJ2-7)
CSARTSYEQYF

SEQ ID NO: 41933 - protein, 14 aa, Homo sapiens
  CDR3 for alpha chain variable domain of TCR clone 20967 (TRAV12-1, TRAJ12)
CVVTRMDSSYKLIF

SEQ ID NO: 41934 - protein, 13 aa, Homo sapiens
  CDR3 for beta chain variable domain of TCR clone 20967 (TRBV20-1, TRBJ1-1)
CSARGGGNTEALF

SEQ ID NO: 41935 - protein, 10 aa, Homo sapiens
  CDR3 for alpha chain variable domain of TCR clone 20968 (TRAV8-2, TRAJ29)
CTGGNTPLAF

SEQ ID NO: 41936 - protein, 17 aa, Homo sapiens
  CDR3 for beta chain variable domain of TCR clone 20968 (TRBV2, TRBJ2-7)
CASSQALTGWDSYEQYF

SEQ ID NO: 41937 - protein, 18 aa, Homo sapiens
  CDR3 for alpha chain variable domain of TCR clone 20969 (TRAV21, TRAJ52)
CAVRPSPAGGTSYGKLTF

SEQ ID NO: 41938 - protein, 16 aa, Homo sapiens
  CDR3 for beta chain variable domain of TCR clone 20969 (TRBV4-3, TRBJ2-2)
CASSHLQGSGTGELFF

SEQ ID NO: 41939 - protein, 17 aa, Homo sapiens
  CDR3 for alpha chain variable domain of TCR clone 20970 (TRAV13-1, TRAJ52)
CAAGRNAGGTSYGKLKF

SEQ ID NO: 41940 - protein, 13 aa, Homo sapiens
  CDR3 for beta chain variable domain of TCR clone 20970 (TRBV7-2, TRBJ1-1)
CASNLKGAKVAFF

SEQ ID NO: 41941 - protein, 14 aa, Homo sapiens
  CDR3 for alpha chain variable domain of TCR clone 20971 (TRAV29/DV5, TRAJ42)
CATHYGGSQGNLIF

SEQ ID NO: 41942 - protein, 13 aa, Homo sapiens
  CDR3 for beta chain variable domain of TCR clone 20971 (TRBV5-1, TRBJ1-2)
CASSLAGFHGYTF

SEQ ID NO: 41943 - protein, 14 aa, Homo sapiens
  CDR3 for alpha chain variable domain of TCR clone 20972 (TRAV38-1, TRAJ45)
CAYYSGGGADGLTF

SEQ ID NO: 41944 - protein, 20 aa, Homo sapiens
  CDR3 for beta chain variable domain of TCR clone 20972 (TRBV28, TRBJ2-1)
CASTPSGRSPGLAGGNEQFF

SEQ ID NO: 41945 - protein, 12 aa, Homo sapiens
  CDR3 for alpha chain variable domain of TCR clone 20973 (TRAV13-1, TRAJ21)
CAAKEGFNKFYF

SEQ ID NO: 41946 - protein, 12 aa, Homo sapiens
  CDR3 for beta chain variable domain of TCR clone 20973 (TRBV11-2, TRBJ2-1)
CASSPGNNEQFF

SEQ ID NO: 41947 - protein, 14 aa, Homo sapiens
  CDR3 for alpha chain variable domain of TCR clone 20974 (TRAV12-3, TRAJ10)
SHLPLTGGGNKLTF

SEQ ID NO: 41948 - protein, 16 aa, Homo sapiens
  CDR3 for beta chain variable domain of TCR clone 20974 (TRBV6-1, TRBJ2-5)
CASSETLDRGAETQYF

SEQ ID NO: 41949 - protein, 12 aa, Homo sapiens
  CDR3 for alpha chain variable domain of TCR clone 20975 (TRAV2, TRAJ31)
CAVEDNNARLMF

SEQ ID NO: 41950 - protein, 15 aa, Homo sapiens
  CDR3 for beta chain variable domain of TCR clone 20975 (TRBV5-1, TRBJ2-3)
CASSVTPGSTDTQYF

SEQ ID NO: 41951 - protein, 13 aa, Homo sapiens
  CDR3 for alpha chain variable domain of TCR clone 20976 (TRAV13-2, TRAJ53)
CAENMGSNYKLTF

SEQ ID NO: 41952 - protein, 13 aa, Homo sapiens
  CDR3 for beta chain variable domain of TCR clone 20976 (TRBV4-1, TRBJ2-2)
CASSQENTGELFS

SEQ ID NO: 41953 - protein, 16 aa, Homo sapiens
  CDR3 for alpha chain variable domain of TCR clone 20977 (TRAV12-2, TRAJ10)
CAVNRVLTGGGNKLTF

SEQ ID NO: 41954 - protein, 12 aa, Homo sapiens
  CDR3 for beta chain variable domain of TCR clone 20977 (TRBV28, TRBJ2-7)
CASSFSSYGQYF

SEQ ID NO: 41955 - protein, 14 aa, Homo sapiens
  CDR3 for alpha chain variable domain of TCR clone 20978 (TRAV26-1, TRAJ45)
CIAVTGGGADGLTF

SEQ ID NO: 41956 - protein, 13 aa, Homo sapiens
  CDR3 for beta chain variable domain of TCR clone 20978 (TRBV7-6, TRBJ1-2)
CASSLVADYGYTF

SEQ ID NO: 41957 - protein, 13 aa, Homo sapiens
  CDR3 for alpha chain variable domain of TCR clone 20979 (TRAV9-2, TRAJ9)
CALSKAGGFKTIF

SEQ ID NO: 41958 - protein, 12 aa, Homo sapiens
  CDR3 for beta chain variable domain of TCR clone 20979 (TRBV28, TRBJ2-6)
CAIQAGANVLTF

SEQ ID NO: 41959 - protein, 14 aa, Homo sapiens
  CDR3 for alpha chain variable domain of TCR clone 20980 (TRAV26-1, TRAJ39)
CIVGGSRAGNMLTF

SEQ ID NO: 41960 - protein, 15 aa, Homo sapiens
  CDR3 for beta chain variable domain of TCR clone 20980 (TRBV7-9, TRBJ1-5)
CASSQGHQPNQPQHF

SEQ ID NO: 41961 - protein, 12 aa, Homo sapiens
  CDR3 for alpha chain variable domain of TCR clone 20981 (TRAV1-1, TRAJ8)
CAWGTGFQKLVF

SEQ ID NO: 41962 - protein, 15 aa, Homo sapiens
  CDR3 for beta chain variable domain of TCR clone 20981 (TRBV7-9, TRBJ1-4)
CASSRTGGFNEKLFF

SEQ ID NO: 41963 - protein, 14 aa, Homo sapiens
  CDR3 for alpha chain variable domain of TCR clone 20982 (TRAV12-3, TRAJ6)
CAMSATGGSYIPTF

SEQ ID NO: 41964 - protein, 16 aa, Homo sapiens
  CDR3 for beta chain variable domain of TCR clone 20982 (TRBV4-2, TRBJ2-1)
CASSPRAGQGANGQFF

SEQ ID NO: 41965 - protein, 13 aa, Homo sapiens
  CDR3 for alpha chain variable domain of TCR clone 20983 (TRAV2, TRAJ32)
CCVVGGATNKLIF

SEQ ID NO: 41966 - protein, 12 aa, Homo sapiens
  CDR3 for beta chain variable domain of TCR clone 20983 (TRBV12-4, TRBJ1-2)
CASSFIWLHLRF

SEQ ID NO: 41967 - protein, 14 aa, Homo sapiens
  CDR3 for alpha chain variable domain of TCR clone 20984 (TRAV12-3, TRAJ33)
CAMSGRDSNYQLIW

SEQ ID NO: 41968 - protein, 15 aa, Homo sapiens
  CDR3 for beta chain variable domain of TCR clone 20984 (TRBV12-4, TRBJ2-5)
CASSLSGAFQETQYF

SEQ ID NO: 41969 - protein, 15 aa, Homo sapiens
  CDR3 for alpha chain variable domain of TCR clone 20985 (TRAV21, TRAJ53)
CATLNSGGSNYKLTF

SEQ ID NO: 41970 - protein, 15 aa, Homo sapiens
  CDR3 for beta chain variable domain of TCR clone 20985 (TRBV20-1, TRBJ2-7)
CSARDRVPGMDEQYF

SEQ ID NO: 41971 - protein, 12 aa, Homo sapiens
  CDR3 for alpha chain variable domain of TCR clone 20986 (TRAV1-1, TRAJ24)
CAATDSWGKLQF

SEQ ID NO: 41972 - protein, 14 aa, Homo sapiens
  CDR3 for beta chain variable domain of TCR clone 20986 (TRBV7-2, TRBJ2-5)
CASSLSGGGETQYF

SEQ ID NO: 41973 - protein, 17 aa, Homo sapiens
  CDR3 for alpha chain variable domain of TCR clone 20987 (TRAV8-6, TRAJ58)
CAVSSWVGGTSGSRLTF

SEQ ID NO: 41974 - protein, 14 aa, Homo sapiens
  CDR3 for beta chain variable domain of TCR clone 20987 (TRBV4-2, TRBJ2-1)
CASGLDRAYNEQFF

SEQ ID NO: 41975 - protein, 14 aa, Homo sapiens
  CDR3 for alpha chain variable domain of TCR clone 20988 (TRAV8-2, TRAJ4)
CVVSPSGGYNKLIF

SEQ ID NO: 41976 - protein, 15 aa, Homo sapiens
  CDR3 for beta chain variable domain of TCR clone 20988 (TRBV4-1, TRBJ1-4)
CASSDTGGTSEKLFF

SEQ ID NO: 41977 - protein, 13 aa, Homo sapiens
  CDR3 for alpha chain variable domain of TCR clone 20989 (TRAV30, TRAJ34)
CGTVGYNTDKLIF

SEQ ID NO: 41978 - protein, 16 aa, Homo sapiens
  CDR3 for beta chain variable domain of TCR clone 20989 (TRBV7-9, TRBJ1-2)
CASSLGLSSGEDGYTF

SEQ ID NO: 41979 - protein, 11 aa, Homo sapiens
  CDR3 for alpha chain variable domain of TCR clone 20990 (TRAV1-1, TRAJ23)
CAVRQGGKLIF

SEQ ID NO: 41980 - protein, 20 aa, Homo sapiens
  CDR3 for beta chain variable domain of TCR clone 20990 (TRBV7-8, TRBJ2-2)
CASSHLFPGPTIHITGELFC

SEQ ID NO: 41981 - protein, 17 aa, Homo sapiens
  CDR3 for alpha chain variable domain of TCR clone 20991 (TRAV26-1, TRAJ53)
CIVRVDDSGGSDYKLTF

SEQ ID NO: 41982 - protein, 15 aa, Homo sapiens
  CDR3 for beta chain variable domain of TCR clone 20991 (TRBV20-1, TRBJ2-7)
CSARVPAAYFYEQYF

SEQ ID NO: 41983 - protein, 14 aa, Homo sapiens
  CDR3 for alpha chain variable domain of TCR clone 20992 (TRAV17, TRAJ16)
CATADFSDCQKLLF

SEQ ID NO: 41984 - protein, 15 aa, Homo sapiens
  CDR3 for beta chain variable domain of TCR clone 20992 (TRBV18, TRBJ2-1)
CASSPPSASYNEQFF

SEQ ID NO: 41985 - protein, 14 aa, Homo sapiens
  CDR3 for alpha chain variable domain of TCR clone 20993 (TRAV12-2, TRAJ17)
CAVIFKAAGNKLTF

SEQ ID NO: 41986 - protein, 17 aa, Homo sapiens
  CDR3 for beta chain variable domain of TCR clone 20993 (TRBV20-1, TRBJ2-2)
CSASGSGQGGLTGELFF

SEQ ID NO: 41987 - protein, 14 aa, Homo sapiens
  CDR3 for alpha chain variable domain of TCR clone 20994 (TRAV12-2, TRAJ13)
CAVKKTGGYQKVTF

SEQ ID NO: 41988 - protein, 15 aa, Homo sapiens
  CDR3 for beta chain variable domain of TCR clone 20994 (TRBV27, TRBJ2-1)
CAISNGGGSSNEQFF

SEQ ID NO: 41989 - protein, 17 aa, Homo sapiens
  CDR3 for alpha chain variable domain of TCR clone 20995 (TRAV16, TRAJ58)
CITLLSNGETSGSRLTF

SEQ ID NO: 41990 - protein, 17 aa, Homo sapiens
  CDR3 for beta chain variable domain of TCR clone 20995 (TRBV18, TRBJ2-1)
CASSKGLSGGADNEQFF

SEQ ID NO: 41991 - protein, 11 aa, Homo sapiens
  CDR3 for alpha chain variable domain of TCR clone 20996 (TRAV1-1, TRAJ23)
CAVRQGGKLIF

SEQ ID NO: 41992 - protein, 20 aa, Homo sapiens
  CDR3 for beta chain variable domain of TCR clone 20996 (TRBV7-8, TRBJ2-2)
YASSHLFPGPTIHITGELFF

SEQ ID NO: 41993 - protein, 12 aa, Homo sapiens
  CDR3 for alpha chain variable domain of TCR clone 20997 (TRAV21, TRAJ33)
CAKMDSNYQLIW

SEQ ID NO: 41994 - protein, 14 aa, Homo sapiens
  CDR3 for beta chain variable domain of TCR clone 20997 (TRBV2, TRBJ2-7)
CASSLTSGGYEQHF

SEQ ID NO: 41995 - protein, 17 aa, Homo sapiens
  CDR3 for alpha chain variable domain of TCR clone 20998 (TRAV3, TRAJ6)
CAVRDGPRAGGSYIPTF

SEQ ID NO: 41996 - protein, 11 aa, Homo sapiens
  CDR3 for beta chain variable domain of TCR clone 20998 (TRBV29-1, TRBJ2-5)
CSEDRTGTQYF

SEQ ID NO: 41997 - protein, 15 aa, Homo sapiens
  CDR3 for alpha chain variable domain of TCR clone 20999 (TRAV25, TRAJ52)
CAGCPGGTSYGKLTF

SEQ ID NO: 41998 - protein, 17 aa, Homo sapiens
  CDR3 for beta chain variable domain of TCR clone 20999 (TRBV7-8, TRBJ2-6)
CASSAGTGGAGANVLTF

SEQ ID NO: 41999 - protein, 18 aa, Homo sapiens
  CDR3 for alpha chain variable domain of TCR clone 21000 (TRAV8-3, TRAJ4)
WVRDPTSSDPGGYNKLIF

SEQ ID NO: 42000 - protein, 13 aa, Homo sapiens
  CDR3 for beta chain variable domain of TCR clone 21000 (TRBV20-1, TRBJ1-2)
CSATGIQGSGYTF

SEQ ID NO: 42001 - protein, 14 aa, Homo sapiens
  CDR3 for alpha chain variable domain of TCR clone 21001 (TRAV12-2, TRAJ13)
CATKKTGGYQKVTF

SEQ ID NO: 42002 - protein, 15 aa, Homo sapiens
  CDR3 for beta chain variable domain of TCR clone 21001 (TRBV27, TRBJ2-1)
CASSNGGGSSNEQFF

SEQ ID NO: 42003 - protein, 13 aa, Homo sapiens
  CDR3 for alpha chain variable domain of TCR clone 21002 (TRAV2, TRAJ15)
CAVASQAGTALIF

SEQ ID NO: 42004 - protein, 16 aa, Homo sapiens
  CDR3 for beta chain variable domain of TCR clone 21002 (TRBV5-1, TRBJ1-1)
CASSSGGNSLNTGAFF

SEQ ID NO: 42005 - protein, 17 aa, Homo sapiens
  CDR3 for alpha chain variable domain of TCR clone 21003 (TRAV3, TRAJ6)
WAVRDGPRAGGSYIPTF

SEQ ID NO: 42006 - protein, 14 aa, Homo sapiens
  CDR3 for beta chain variable domain of TCR clone 21003 (TRBV7-2, TRBJ2-7)
CASSPKTSFYEQYF

SEQ ID NO: 42007 - protein, 15 aa, Homo sapiens
  CDR3 for alpha chain variable domain of TCR clone 21004 (TRAV8-3, TRAJ27)
CAVGPSKTNAGRSTF

SEQ ID NO: 42008 - protein, 15 aa, Homo sapiens
  CDR3 for beta chain variable domain of TCR clone 21004 (TRBV7-2, TRBJ2-1)
CASSSGLAGGNEQFF

SEQ ID NO: 42009 - protein, 11 aa, Homo sapiens
  CDR3 for alpha chain variable domain of TCR clone 21005 (TRAV4, TRAJ31)
CLVGDNARLMF

SEQ ID NO: 42010 - protein, 16 aa, Homo sapiens
  CDR3 for beta chain variable domain of TCR clone 21005 (TRBV7-2, TRBJ2-5)
CASSSKWLSGQETRYF

SEQ ID NO: 42011 - protein, 12 aa, Homo sapiens
  CDR3 for alpha chain variable domain of TCR clone 21006 (TRAV8-3, TRAJ20)
CAVGANDYKLSF

SEQ ID NO: 42012 - protein, 16 aa, Homo sapiens
  CDR3 for beta chain variable domain of TCR clone 21006 (TRBV19, TRBJ2-2)
CASQSPGTGATGELFF

SEQ ID NO: 42013 - protein, 14 aa, Homo sapiens
  CDR3 for alpha chain variable domain of TCR clone 21007 (TRAV2, TRAJ9)
CAVEDRGGGFKTIF

SEQ ID NO: 42014 - protein, 12 aa, Homo sapiens
  CDR3 for beta chain variable domain of TCR clone 21007 (TRBV7-9, TRBJ2-7)
CASSLEGYEQYF

SEQ ID NO: 42015 - protein, 12 aa, Homo sapiens
  CDR3 for alpha chain variable domain of TCR clone 21008 (TRAV12-2, TRAJ31)
CAVNTPDARLMF

SEQ ID NO: 42016 - protein, 15 aa, Homo sapiens
  CDR3 for beta chain variable domain of TCR clone 21008 (TRBV4-2, TRBJ1-1)
CASSQDQGLDTEAFF

SEQ ID NO: 42017 - protein, 14 aa, Homo sapiens
  CDR3 for alpha chain variable domain of TCR clone 21009 (TRAV1-2, TRAJ6)
CAVRSSGGSYIPTF

SEQ ID NO: 42018 - protein, 18 aa, Homo sapiens
  CDR3 for beta chain variable domain of TCR clone 21009 (TRBV20-1, TRBJ2-3)
CSASGLAGGPGTTDTRYF

SEQ ID NO: 42019 - protein, 14 aa, Homo sapiens
  CDR3 for alpha chain variable domain of TCR clone 21010 (TRAV26-1, TRAJ38)
CIADNAGNNHKLIW

SEQ ID NO: 42020 - protein, 13 aa, Homo sapiens
  CDR3 for beta chain variable domain of TCR clone 21010 (TRBV20-1, TRBJ1-1)
CSARGGGNTEAFF

SEQ ID NO: 42021 - protein, 11 aa, Homo sapiens
  CDR3 for alpha chain variable domain of TCR clone 21011 (TRAV1-2, TRAJ31)
CAVTNNARLMF

SEQ ID NO: 42022 - protein, 15 aa, Homo sapiens
  CDR3 for beta chain variable domain of TCR clone 21011 (TRBV28, TRBJ2-1)
CASSIIAGGRSEQFF

SEQ ID NO: 42023 - protein, 12 aa, Homo sapiens
  CDR3 for alpha chain variable domain of TCR clone 21012 (TRAV1-2, TRAJ39)
CAAPSAGNMLTF

SEQ ID NO: 42024 - protein, 18 aa, Homo sapiens
  CDR3 for beta chain variable domain of TCR clone 21012 (TRBV5-5, TRBJ2-2)
CASSLPGLLDRNTGELFF

SEQ ID NO: 42025 - protein, 12 aa, Homo sapiens
  CDR3 for alpha chain variable domain of TCR clone 21013 (TRAV35, TRAJ54)
CADLQGAQKLVF

SEQ ID NO: 42026 - protein, 17 aa, Homo sapiens
  CDR3 for beta chain variable domain of TCR clone 21013 (TRBV13, TRBJ2-3)
CASSLSRVAGGRNTQYF

SEQ ID NO: 42027 - protein, 13 aa, Homo sapiens
  CDR3 for alpha chain variable domain of TCR clone 21014 (TRAV21, TRAJ20)
CAVGLRVDYKLSF

SEQ ID NO: 42028 - protein, 20 aa, Homo sapiens
  CDR3 for beta chain variable domain of TCR clone 21014 (TRBV7-8, TRBJ2-2)
CASSHLFPGPTIHITGELFF

SEQ ID NO: 42029 - protein, 18 aa, Homo sapiens
  CDR3 for alpha chain variable domain of TCR clone 21015 (TRAV9-2, TRAJ52)
CALSRHNAGGTSYGKLTF

SEQ ID NO: 42030 - protein, 13 aa, Homo sapiens
  CDR3 for beta chain variable domain of TCR clone 21015 (TRBV7-9, TRBJ1-2)
CASSVKQNYGYTF

SEQ ID NO: 42031 - protein, 23 aa, Homo sapiens
  CDR3 for alpha chain variable domain of TCR clone 21016 (TRAV26-1, TRAJ38)
CIADNAGNNHIQNPDPAVYQLRD

SEQ ID NO: 42032 - protein, 13 aa, Homo sapiens
  CDR3 for beta chain variable domain of TCR clone 21016 (TRBV20-1, TRBJ1-1)
CSARGGGNTEAFF

SEQ ID NO: 42033 - protein, 14 aa, Homo sapiens
  CDR3 for alpha chain variable domain of TCR clone 21017 (TRAV9-2, TRAJ39)
CALYIYNAGNMLTF

SEQ ID NO: 42034 - protein, 12 aa, Homo sapiens
  CDR3 for beta chain variable domain of TCR clone 21017 (TRBV3-1, TRBJ2-1)
CASSQGSSGQFF

SEQ ID NO: 42035 - protein, 15 aa, Homo sapiens
  CDR3 for alpha chain variable domain of TCR clone 21018 (TRAV1-2, TRAJ30)
CAVRPHGNRDDKIIF

SEQ ID NO: 42036 - protein, 13 aa, Homo sapiens
  CDR3 for beta chain variable domain of TCR clone 21018 (TRBV4-1, TRBJ2-7)
CTSSQGQAYEQYF

SEQ ID NO: 42037 - protein, 14 aa, Homo sapiens
  CDR3 for alpha chain variable domain of TCR clone 21019 (TRAV13-1, TRAJ9)
CAASALTGGFKTIF

SEQ ID NO: 42038 - protein, 13 aa, Homo sapiens
  CDR3 for beta chain variable domain of TCR clone 21019 (TRBV20-1, TRBJ1-1)
CSAGAVGNTEAFF

SEQ ID NO: 42039 - protein, 16 aa, Homo sapiens
  CDR3 for alpha chain variable domain of TCR clone 21020 (TRAV14/DV4, TRAJ54)
CAMREGRIQGAQKLVF

SEQ ID NO: 42040 - protein, 15 aa, Homo sapiens
  CDR3 for beta chain variable domain of TCR clone 21020 (TRBV7-2, TRBJ2-1)
CASTHGTGIYNEQFF

SEQ ID NO: 42041 - protein, 13 aa, Homo sapiens
  CDR3 for alpha chain variable domain of TCR clone 21021 (TRAV36/DV7, TRAJ53)
CALSGGSNYKLTF

SEQ ID NO: 42042 - protein, 13 aa, Homo sapiens
  CDR3 for beta chain variable domain of TCR clone 21021 (TRBV28, TRBJ2-4)
CASSQSSKNSQYF

SEQ ID NO: 42043 - protein, 23 aa, Homo sapiens
  CDR3 for alpha chain variable domain of TCR clone 21022 (TRAV8-4, TRAJ38)
CARPNAGNNHIQNPDPAVYQLRD

SEQ ID NO: 42044 - protein, 12 aa, Homo sapiens
  CDR3 for beta chain variable domain of TCR clone 21022 (TRBV6-1, TRBJ2-7)
CASSEPLYEQYF

SEQ ID NO: 42045 - protein, 14 aa, Homo sapiens
  CDR3 for alpha chain variable domain of TCR clone 21023 (TRAV12-3, TRAJ9)
CAMSTNTGGFKTIF

SEQ ID NO: 42046 - protein, 12 aa, Homo sapiens
  CDR3 for beta chain variable domain of TCR clone 21023 (TRBV19, TRBJ1-5)
CASSIAQQPQHF

SEQ ID NO: 42047 - protein, 15 aa, Homo sapiens
  CDR3 for alpha chain variable domain of TCR clone 21024 (TRAV12-3, TRAJ6)
CAMSATSGGSYIPTF

SEQ ID NO: 42048 - protein, 11 aa, Homo sapiens
  CDR3 for beta chain variable domain of TCR clone 21024 (TRBV20-1, TRBJ1-5)
CSAQGDRPQHF

SEQ ID NO: 42049 - protein, 14 aa, Homo sapiens
  CDR3 for alpha chain variable domain of TCR clone 21025 (TRAV17, TRAJ39)
CATDPVRAGNMLTF

SEQ ID NO: 42050 - protein, 15 aa, Homo sapiens
  CDR3 for beta chain variable domain of TCR clone 21025 (TRBV13, TRBJ1-5)
CASSFGQGGVQPQHL

SEQ ID NO: 42051 - protein, 16 aa, Homo sapiens
  CDR3 for alpha chain variable domain of TCR clone 21026 (TRAV26-1, TRAJ53)
CIVRVAMGGSNYKLKF

SEQ ID NO: 42052 - protein, 12 aa, Homo sapiens
  CDR3 for beta chain variable domain of TCR clone 21026 (TRBV7-9, TRBJ1-5)
CASSPQGQPQHF

SEQ ID NO: 42053 - protein, 23 aa, Homo sapiens
  CDR3 for alpha chain variable domain of TCR clone 21027 (TRAV26-1, TRAJ38)
CIADNAGNNHIQNPNPAVYQLRD

SEQ ID NO: 42054 - protein, 13 aa, Homo sapiens
  CDR3 for beta chain variable domain of TCR clone 21027 (TRBV20-1, TRBJ1-1)
CSARGGGNTEAFF

SEQ ID NO: 42055 - protein, 13 aa, Homo sapiens
  CDR3 for alpha chain variable domain of TCR clone 21028 (TRAV17, TRAJ26)
CATVDNYGQNFVF

SEQ ID NO: 42056 - protein, 15 aa, Homo sapiens
  CDR3 for beta chain variable domain of TCR clone 21028 (TRBV13, TRBJ1-3)
CASSPNRGSGNTIYF

SEQ ID NO: 42057 - protein, 14 aa, Homo sapiens
  CDR3 for alpha chain variable domain of TCR clone 21029 (TRAV1-2, TRAJ16)
CAVNRFSDGQKLLF

SEQ ID NO: 42058 - protein, 17 aa, Homo sapiens
  CDR3 for beta chain variable domain of TCR clone 21029 (TRBV20-1, TRBJ2-1)
CSARDPLAGVWDNEQFF

SEQ ID NO: 42059 - protein, 14 aa, Homo sapiens
  CDR3 for alpha chain variable domain of TCR clone 21030 (TRAV1-2, TRAJ8)
CAVREDTGFQKLVF

SEQ ID NO: 42060 - protein, 14 aa, Homo sapiens
  CDR3 for beta chain variable domain of TCR clone 21030 (TRBV19, TRBJ2-5)
CASSMTGQQETQYF

SEQ ID NO: 42061 - protein, 13 aa, Homo sapiens
  CDR3 for alpha chain variable domain of TCR clone 21031 (TRAV13-1, TRAJ39)
CAASIWAGNMLTF

SEQ ID NO: 42062 - protein, 12 aa, Homo sapiens
  CDR3 for beta chain variable domain of TCR clone 21031 (TRBV19, TRBJ1-5)
CASSIAQQPQHF

SEQ ID NO: 42063 - protein, 13 aa, Homo sapiens
  CDR3 for alpha chain variable domain of TCR clone 21032 (TRAV12-2, TRAJ20)
CAVYPPNDYKLSL

SEQ ID NO: 42064 - protein, 15 aa, Homo sapiens
  CDR3 for beta chain variable domain of TCR clone 21032 (TRBV27, TRBJ2-5)
CASSLYPRGGETQYF

SEQ ID NO: 42065 - protein, 14 aa, Homo sapiens
  CDR3 for alpha chain variable domain of TCR clone 21033 (TRAV1-2, TRAJ16)
CAVNRFSDVQKLLF

SEQ ID NO: 42066 - protein, 14 aa, Homo sapiens
  CDR3 for beta chain variable domain of TCR clone 21033 (TRBV7-9, TRBJ2-3)
CASSLEDGTDTQYF

SEQ ID NO: 42067 - protein, 10 aa, Homo sapiens
  CDR3 for alpha chain variable domain of TCR clone 21034 (TRAV30, TRAJ48)
CGIGNEKLTF

SEQ ID NO: 42068 - protein, 14 aa, Homo sapiens
  CDR3 for beta chain variable domain of TCR clone 21034 (TRBV25-1, TRBJ1-1)
CASTHLGGNTEAFF

SEQ ID NO: 42069 - protein, 14 aa, Homo sapiens
  CDR3 for alpha chain variable domain of TCR clone 21035 (TRAV12-3, TRAJ42)
CAMNYGGSQGNLIF

SEQ ID NO: 42070 - protein, 15 aa, Homo sapiens
  CDR3 for beta chain variable domain of TCR clone 21035 (TRBV11-3, TRBJ2-7)
CASSPGPASSYEQYF

SEQ ID NO: 42071 - protein, 16 aa, Homo sapiens
  CDR3 for alpha chain variable domain of TCR clone 21036 (TRAV26-1, TRAJ37)
CIVRGDGSGNTGKLIF

SEQ ID NO: 42072 - protein, 17 aa, Homo sapiens
  CDR3 for beta chain variable domain of TCR clone 21036 (TRBV4-1, TRBJ2-7)
CASSRDPLGGRGGEQYF

SEQ ID NO: 42073 - protein, 11 aa, Homo sapiens
  CDR3 for alpha chain variable domain of TCR clone 21037 (TRAV12-3, TRAJ43)
CAMSVSNDMRF

SEQ ID NO: 42074 - protein, 13 aa, Homo sapiens
  CDR3 for beta chain variable domain of TCR clone 21037 (TRBV20-1, TRBJ1-1)
CSAPPGGGTEAFF

SEQ ID NO: 42075 - protein, 15 aa, Homo sapiens
  CDR3 for alpha chain variable domain of TCR clone 21038 (TRAV3, TRAJ22)
CAVRDRGGSAGQLTF

SEQ ID NO: 42076 - protein, 13 aa, Homo sapiens
  CDR3 for beta chain variable domain of TCR clone 21038 (TRBV7-3, TRBJ2-1)
CASSPVAYNEQFF

SEQ ID NO: 42077 - protein, 12 aa, Homo sapiens
  CDR3 for alpha chain variable domain of TCR clone 21039 (TRAV13-1, TRAJ21)
CAAKEGFNKFYF

SEQ ID NO: 42078 - protein, 15 aa, Homo sapiens
  CDR3 for beta chain variable domain of TCR clone 21039 (TRBV6-1, TRBJ2-3)
CASSERGGITDTQYF

SEQ ID NO: 42079 - protein, 13 aa, Homo sapiens
  CDR3 for alpha chain variable domain of TCR clone 21040 (TRAV21, TRAJ27)
CAARPGNAGISTF

SEQ ID NO: 42080 - protein, 14 aa, Homo sapiens
  CDR3 for beta chain variable domain of TCR clone 21040 (TRBV7-6, TRBJ2-3)
CASSLGTVTDTQYF

SEQ ID NO: 42081 - protein, 12 aa, Homo sapiens
  CDR3 for alpha chain variable domain of TCR clone 21041 (TRAV12-3, TRAJ17)
CAMTLTGNKLTF

SEQ ID NO: 42082 - protein, 15 aa, Homo sapiens
  CDR3 for beta chain variable domain of TCR clone 21041 (TRBV20-1, TRBJ2-7)
CSARVPAAYFYEQYF

SEQ ID NO: 42083 - protein, 11 aa, Homo sapiens
  CDR3 for alpha chain variable domain of TCR clone 21042 (TRAV3, TRAJ21)
CAVGNFNKFYF

SEQ ID NO: 42084 - protein, 14 aa, Homo sapiens
  CDR3 for beta chain variable domain of TCR clone 21042 (TRBV6-1, TRBJ1-3)
CASVQGGGGNTIYF

SEQ ID NO: 42085 - protein, 12 aa, Homo sapiens
  CDR3 for alpha chain variable domain of TCR clone 21043 (TRAV12-3, TRAJ17)
CAMTLTGNKLTF

SEQ ID NO: 42086 - protein, 13 aa, Homo sapiens
  CDR3 for beta chain variable domain of TCR clone 21043 (TRBV6-6, TRBJ2-1)
CASSLHQGDEQFF

SEQ ID NO: 42087 - protein, 15 aa, Homo sapiens
  CDR3 for alpha chain variable domain of TCR clone 21044 (TRAV9-2, TRAJ52)
CALYAGGTSYGKLTF

SEQ ID NO: 42088 - protein, 13 aa, Homo sapiens
  CDR3 for beta chain variable domain of TCR clone 21044 (TRBV9, TRBJ1-2)
CASSRLGGGGYTF

SEQ ID NO: 42089 - protein, 14 aa, Homo sapiens
  CDR3 for alpha chain variable domain of TCR clone 21045 (TRAV1-1, TRAJ27)
CAAIYNTNAGKSTF

SEQ ID NO: 42090 - protein, 15 aa, Homo sapiens
  CDR3 for beta chain variable domain of TCR clone 21045 (TRBV7-2, TRBJ2-1)
CASSSGLAGGNEQFF

SEQ ID NO: 42091 - protein, 15 aa, Homo sapiens
  CDR3 for alpha chain variable domain of TCR clone 21046 (TRAV17, TRAJ57)
CATGPSQGGSEKRVF

SEQ ID NO: 42092 - protein, 14 aa, Homo sapiens
  CDR3 for beta chain variable domain of TCR clone 21046 (TRBV12-5, TRBJ2-5)
CASGSRTHQETQYF

SEQ ID NO: 42093 - protein, 13 aa, Homo sapiens
  CDR3 for alpha chain variable domain of TCR clone 21047 (TRAV20, TRAJ20)
CAVQAGSGYKLSF

SEQ ID NO: 42094 - protein, 16 aa, Homo sapiens
  CDR3 for beta chain variable domain of TCR clone 21047 (TRBV3-1, TRBJ2-3)
CISVPAAKGGGDTQYF

SEQ ID NO: 42095 - protein, 13 aa, Homo sapiens
  CDR3 for alpha chain variable domain of TCR clone 21048 (TRAV13-2, TRAJ53)
CAENMGSNYKPTF

SEQ ID NO: 42096 - protein, 13 aa, Homo sapiens
  CDR3 for beta chain variable domain of TCR clone 21048 (TRBV4-1, TRBJ2-2)
CASSQENTGELFF

SEQ ID NO: 42097 - protein, 12 aa, Homo sapiens
  CDR3 for alpha chain variable domain of TCR clone 21049 (TRAV3, TRAJ31)
CAVGDGNARLMF

SEQ ID NO: 42098 - protein, 18 aa, Homo sapiens
  CDR3 for beta chain variable domain of TCR clone 21049 (TRBV7-2, TRBJ2-3)
CASSLKREGSGITDTQYF

SEQ ID NO: 42099 - protein, 13 aa, Homo sapiens
  CDR3 for alpha chain variable domain of TCR clone 21050 (TRAV12-2, TRAJ34)
CAVRGYNTDKLIF

SEQ ID NO: 42100 - protein, 15 aa, Homo sapiens
  CDR3 for beta chain variable domain of TCR clone 21050 (TRBV28, TRBJ2-1)
CASRTGAGAIARQFF

SEQ ID NO: 42101 - protein, 16 aa, Homo sapiens
  CDR3 for alpha chain variable domain of TCR clone 21051 (TRAV30, TRAJ24)
CGTEIVDADSWGKFQF

SEQ ID NO: 42102 - protein, 15 aa, Homo sapiens
  CDR3 for beta chain variable domain of TCR clone 21051 (TRBV7-2, TRBJ2-7)
CASSLKGALTYEQYF

SEQ ID NO: 42103 - protein, 14 aa, Homo sapiens
  CDR3 for alpha chain variable domain of TCR clone 21052 (TRAV26-1, TRAJ38)
CIANNAGNNRKLIW

SEQ ID NO: 42104 - protein, 12 aa, Homo sapiens
  CDR3 for beta chain variable domain of TCR clone 21052 (TRBV5-1, TRBJ2-7)
CASSFRGYEQYF

SEQ ID NO: 42105 - protein, 15 aa, Homo sapiens
  CDR3 for alpha chain variable domain of TCR clone 21053 (TRAV13-2, TRAJ37)
CAEPHGSSNTGKLIF

SEQ ID NO: 42106 - protein, 16 aa, Homo sapiens
  CDR3 for beta chain variable domain of TCR clone 21053 (TRBV18, TRBJ1-1)
CASSPGVGGRGGEAFF

SEQ ID NO: 42107 - protein, 15 aa, Homo sapiens
  CDR3 for alpha chain variable domain of TCR clone 21054 (TRAV8-3, TRAJ23)
CAVGDRYNQGGKLIF

SEQ ID NO: 42108 - protein, 22 aa, Homo sapiens
  CDR3 for beta chain variable domain of TCR clone 21054 (TRBV29-1, TRBJ2-5)
TVSNMSPEDSSIYLCSAGTQYF

SEQ ID NO: 42109 - protein, 16 aa, Homo sapiens
  CDR3 for alpha chain variable domain of TCR clone 21055 (TRAV3, TRAJ10)
CAVRDMRAGGGNKLTF

SEQ ID NO: 42110 - protein, 16 aa, Homo sapiens
  CDR3 for beta chain variable domain of TCR clone 21055 (TRBV27, TRBJ2-2)
CASSFRGLVRTGELFF

SEQ ID NO: 42111 - protein, 13 aa, Homo sapiens
  CDR3 for alpha chain variable domain of TCR clone 21056 (TRAV27, TRAJ56)
CAGEPGANSKLTF

SEQ ID NO: 42112 - protein, 15 aa, Homo sapiens
  CDR3 for beta chain variable domain of TCR clone 21056 (TRBV6-1, TRBJ2-3)
CASSERWDSTDTQYF

SEQ ID NO: 42113 - protein, 13 aa, Homo sapiens
  CDR3 for alpha chain variable domain of TCR clone 21057 (TRAV2, TRAJ40)
CAVVTSGTYKYIF

SEQ ID NO: 42114 - protein, 18 aa, Homo sapiens
  CDR3 for beta chain variable domain of TCR clone 21057 (TRBV4-1, TRBJ1-4)
CASSPRTGGAWTNEKLFF

SEQ ID NO: 42115 - protein, 14 aa, Homo sapiens
  CDR3 for alpha chain variable domain of TCR clone 21058 (TRAV1-2, TRAJ16)
CAVNRFSDGQKLLL

SEQ ID NO: 42116 - protein, 17 aa, Homo sapiens
  CDR3 for beta chain variable domain of TCR clone 21058 (TRBV10-3, TRBJ2-4)
CTSVPSVNKGSKNIQYF

SEQ ID NO: 42117 - protein, 14 aa, Homo sapiens
  CDR3 for alpha chain variable domain of TCR clone 21059 (TRAV3, TRAJ7)
CAVSEEEREQQTRF

SEQ ID NO: 42118 - protein, 12 aa, Homo sapiens
  CDR3 for beta chain variable domain of TCR clone 21059 (TRBV7-8, TRBJ2-7)
CASSLGDREQYF

SEQ ID NO: 42119 - protein, 14 aa, Homo sapiens
  CDR3 for alpha chain variable domain of TCR clone 21060 (TRAV38-1, TRAJ40)
CALRPTSGTYKYIF

SEQ ID NO: 42120 - protein, 14 aa, Homo sapiens
  CDR3 for beta chain variable domain of TCR clone 21060 (TRBV25-1, TRBJ1-1)
CASTHLGGNTEAFV

SEQ ID NO: 42121 - protein, 15 aa, Homo sapiens
  CDR3 for alpha chain variable domain of TCR clone 21061 (TRAV3, TRAJ22)
CAVRDRGGSARQLTF

SEQ ID NO: 42122 - protein, 18 aa, Homo sapiens
  CDR3 for beta chain variable domain of TCR clone 21061 (TRBV28, TRBJ2-1)
CASSSTSGRANSYNEQFL

SEQ ID NO: 42123 - protein, 14 aa, Homo sapiens
  CDR3 for alpha chain variable domain of TCR clone 21062 (TRAV29/DV5, TRAJ20)
CAATIRSNDYKLSF

SEQ ID NO: 42124 - protein, 15 aa, Homo sapiens
  CDR3 for beta chain variable domain of TCR clone 21062 (TRBV19, TRBJ1-1)
CASTSGQIQNTEAFF

SEQ ID NO: 42125 - protein, 14 aa, Homo sapiens
  CDR3 for alpha chain variable domain of TCR clone 21063 (TRAV8-3, TRAJ4)
CAVGAAGGYNKLVF

SEQ ID NO: 42126 - protein, 15 aa, Homo sapiens
  CDR3 for beta chain variable domain of TCR clone 21063 (TRBV6-5, TRBJ2-1)
CASSYDAGAGNEQFF

SEQ ID NO: 42127 - protein, 15 aa, Homo sapiens
  CDR3 for alpha chain variable domain of TCR clone 21064 (TRAV3, TRAJ20)
FAVRDIKLSDYKLSF

SEQ ID NO: 42128 - protein, 15 aa, Homo sapiens
  CDR3 for beta chain variable domain of TCR clone 21064 (TRBV7-9, TRBJ1-6)
CASSSPGRGNSPLHF

SEQ ID NO: 42129 - protein, 12 aa, Homo sapiens
  CDR3 for alpha chain variable domain of TCR clone 21065 (TRAV12-1, TRAJ20)
CVVNPDDYKLSF

SEQ ID NO: 42130 - protein, 12 aa, Homo sapiens
  CDR3 for beta chain variable domain of TCR clone 21065 (TRBV11-2, TRBJ2-2)
CASSLGGGELLF

SEQ ID NO: 42131 - protein, 16 aa, Homo sapiens
  CDR3 for alpha chain variable domain of TCR clone 21066 (TRAV4, TRAJ37)
CLVGWFGSSSTGKLIF

SEQ ID NO: 42132 - protein, 15 aa, Homo sapiens
  CDR3 for beta chain variable domain of TCR clone 21066 (TRBV12-4, TRBJ2-3)
CASSLAERPTDTQYF

SEQ ID NO: 42133 - protein, 16 aa, Homo sapiens
  CDR3 for alpha chain variable domain of TCR clone 21067 (TRAV26-2, TRAJ57)
CILRDVGSGGSEKLVL

SEQ ID NO: 42134 - protein, 13 aa, Homo sapiens
  CDR3 for beta chain variable domain of TCR clone 21067 (TRBV18, TRBJ2-3)
CASSPGVTDTQYF

SEQ ID NO: 42135 - protein, 14 aa, Homo sapiens
  CDR3 for alpha chain variable domain of TCR clone 21068 (TRAV26-1, TRAJ38)
CITDNAGNNRKLIW

SEQ ID NO: 42136 - protein, 13 aa, Homo sapiens
  CDR3 for beta chain variable domain of TCR clone 21068 (TRBV20-1, TRBJ1-1)
CSARGGGNTEAFF

SEQ ID NO: 42137 - protein, 12 aa, Homo sapiens
  CDR3 for alpha chain variable domain of TCR clone 21069 (TRAV12-3, TRAJ40)
CAMSSGTYKYTF

SEQ ID NO: 42138 - protein, 15 aa, Homo sapiens
  CDR3 for beta chain variable domain of TCR clone 21069 (TRBV7-3, TRBJ2-2)
CASSETGQGTGELFF

SEQ ID NO: 42139 - protein, 11 aa, Homo sapiens
  CDR3 for alpha chain variable domain of TCR clone 21070 (TRAV2, TRAJ33)
CAVESNYQLIW

SEQ ID NO: 42140 - protein, 15 aa, Homo sapiens
  CDR3 for beta chain variable domain of TCR clone 21070 (TRBV19, TRBJ1-1)
CASTLGQIQNTEAFF

SEQ ID NO: 42141 - protein, 12 aa, Homo sapiens
  CDR3 for alpha chain variable domain of TCR clone 21071 (TRAV2, TRAJ37)
CAVTMNTGKLIF

SEQ ID NO: 42142 - protein, 19 aa, Homo sapiens
  CDR3 for beta chain variable domain of TCR clone 21071 (TRBV5-1, TRBJ2-5)
CASSFGGPPKRPSTSGQAR

SEQ ID NO: 42143 - protein, 14 aa, Homo sapiens
  CDR3 for alpha chain variable domain of TCR clone 21072 (TRAV8-3, TRAJ4)
CAVGAAGGYNKLIF

SEQ ID NO: 42144 - protein, 15 aa, Homo sapiens
  CDR3 for beta chain variable domain of TCR clone 21072 (TRBV6-5, TRBJ2-1)
CASSYDARAGNEQFF

SEQ ID NO: 42145 - protein, 11 aa, Homo sapiens
  CDR3 for alpha chain variable domain of TCR clone 21073 (TRAV29/DV5, TRAJ31)
CAAMNNARLMF

SEQ ID NO: 42146 - protein, 13 aa, Homo sapiens
  CDR3 for beta chain variable domain of TCR clone 21073 (TRBV27, TRBJ1-1)
CASSLSIGAEAFF

SEQ ID NO: 42147 - protein, 11 aa, Homo sapiens
  CDR3 for alpha chain variable domain of TCR clone 21074 (TRAV23/DV6, TRAJ58)
CAARLLRGETS

SEQ ID NO: 42148 - protein, 13 aa, Homo sapiens
  CDR3 for beta chain variable domain of TCR clone 21074 (TRBV7-3, TRBJ2-1)
CQQLSGGTNEQFF

SEQ ID NO: 42149 - protein, 18 aa, Homo sapiens
  CDR3 for alpha chain variable domain of TCR clone 21075 (TRAV13-1, TRAJ52)
CAAKNPNAGGTSYGKLTF

SEQ ID NO: 42150 - protein, 15 aa, Homo sapiens
  CDR3 for beta chain variable domain of TCR clone 21075 (TRBV6-1, TRBJ2-3)
CASSERGGSTDTQYF

SEQ ID NO: 42151 - protein, 14 aa, Homo sapiens
  CDR3 for alpha chain variable domain of TCR clone 21076 (TRAV26-1, TRAJ38)
CIADNAGNNRKLIL

SEQ ID NO: 42152 - protein, 17 aa, Homo sapiens
  CDR3 for beta chain variable domain of TCR clone 21076 (TRBV7-9, TRBJ2-3)
CASSPTVAGDLTDTQYF

SEQ ID NO: 42153 - protein, 12 aa, Homo sapiens
  CDR3 for alpha chain variable domain of TCR clone 21077 (TRAV1-1, TRAJ8)
CAGGTGFQTLVF

SEQ ID NO: 42154 - protein, 15 aa, Homo sapiens
  CDR3 for beta chain variable domain of TCR clone 21077 (TRBV7-9, TRBJ1-4)
CASSRTGGFNEKLFF

SEQ ID NO: 42155 - protein, 13 aa, Homo sapiens
  CDR3 for alpha chain variable domain of TCR clone 21078 (TRAV3, TRAJ15)
CAVRDQAGTALIL

SEQ ID NO: 42156 - protein, 15 aa, Homo sapiens
  CDR3 for beta chain variable domain of TCR clone 21078 (TRBV11-1, TRBJ2-7)
CASSLNYGASYEQYF

SEQ ID NO: 42157 - protein, 18 aa, Homo sapiens
  CDR3 for alpha chain variable domain of TCR clone 21079 (TRAV21, TRAJ52)
CAVRPSPAGGTSYGKLTF

SEQ ID NO: 42158 - protein, 17 aa, Homo sapiens
  CDR3 for beta chain variable domain of TCR clone 21079 (TRBV13, TRBJ2-3)
CASSLSRVAVGRNTQYF

SEQ ID NO: 42159 - protein, 14 aa, Homo sapiens
  CDR3 for alpha chain variable domain of TCR clone 21080 (TRAV12-2, TRAJ13)
CAVKKTGGYQKVTF

SEQ ID NO: 42160 - protein, 12 aa, Homo sapiens
  CDR3 for beta chain variable domain of TCR clone 21080 (TRBV12-4, TRBJ1-2)
CASSFIWLDLRF

SEQ ID NO: 42161 - protein, 13 aa, Homo sapiens
  CDR3 for alpha chain variable domain of TCR clone 21081 (TRAV20, TRAJ34)
CAVRSYNTDKLIF

SEQ ID NO: 42162 - protein, 12 aa, Homo sapiens
  CDR3 for beta chain variable domain of TCR clone 21081 (TRBV11-2, TRBJ2-1)
CASSPGNNEQLF

SEQ ID NO: 42163 - protein, 13 aa, Homo sapiens
  CDR3 for alpha chain variable domain of TCR clone 21082 (TRAV8-3, TRAJ47)
CAVSMEYGNRLVF

SEQ ID NO: 42164 - protein, 14 aa, Homo sapiens
  CDR3 for beta chain variable domain of TCR clone 21082 (TRBV2, TRBJ1-5)
CASSGTGFNQPQHF

SEQ ID NO: 42165 - protein, 16 aa, Homo sapiens
  CDR3 for alpha chain variable domain of TCR clone 21083 (TRAV3, TRAJ37)
FAVRGKGSGNTGKLIF

SEQ ID NO: 42166 - protein, 13 aa, Homo sapiens
  CDR3 for beta chain variable domain of TCR clone 21083 (TRBV14, TRBJ2-7)
CASSQDRRYEQYF

SEQ ID NO: 42167 - protein, 14 aa, Homo sapiens
  CDR3 for alpha chain variable domain of TCR clone 21084 (TRAV12-3, TRAJ22)
CAMSLFGPARQLTF

SEQ ID NO: 42168 - protein, 11 aa, Homo sapiens
  CDR3 for beta chain variable domain of TCR clone 21084 (TRBV12-4, TRBJ2-2)
CASSSAGELFF

SEQ ID NO: 42169 - protein, 18 aa, Homo sapiens
  CDR3 for alpha chain variable domain of TCR clone 21085 (TRAV9-2, TRAJ52)
CALSRHNAGGTSYGKLTF

SEQ ID NO: 42170 - protein, 13 aa, Homo sapiens
  CDR3 for beta chain variable domain of TCR clone 21085 (TRBV20-1, TRBJ1-1)
CSAPLGGGTEAFF

SEQ ID NO: 42171 - protein, 11 aa, Homo sapiens
  CDR3 for alpha chain variable domain of TCR clone 21086 (TRAV2, TRAJ33)
CAVDSNYQSIW

SEQ ID NO: 42172 - protein, 15 aa, Homo sapiens
  CDR3 for beta chain variable domain of TCR clone 21086 (TRBV19, TRBJ1-2)
CASSVGQVLNYGYTF

SEQ ID NO: 42173 - protein, 12 aa, Homo sapiens
  CDR3 for alpha chain variable domain of TCR clone 21087 (TRAV16, TRAJ10)
CSRTGGGNKLTF

SEQ ID NO: 42174 - protein, 16 aa, Homo sapiens
  CDR3 for beta chain variable domain of TCR clone 21087 (TRBV11-3, TRBJ2-5)
CASSSVVAGSTETQYF

SEQ ID NO: 42175 - protein, 12 aa, Homo sapiens
  CDR3 for alpha chain variable domain of TCR clone 21088 (TRAV35, TRAJ39)
LAPNNAGNMLTF

SEQ ID NO: 42176 - protein, 16 aa, Homo sapiens
  CDR3 for beta chain variable domain of TCR clone 21088 (TRBV2, TRBJ2-3)
CASSTSVGGVTDTQYF

SEQ ID NO: 42177 - protein, 14 aa, Homo sapiens
  CDR3 for alpha chain variable domain of TCR clone 21089 (TRAV17, TRAJ33)
CATDARRSNYQLIW

SEQ ID NO: 42178 - protein, 13 aa, Homo sapiens
  CDR3 for beta chain variable domain of TCR clone 21089 (TRBV25-1, TRBJ1-4)
CQQWGGQPEKLFF

SEQ ID NO: 42179 - protein, 14 aa, Homo sapiens
  CDR3 for alpha chain variable domain of TCR clone 21090 (TRAV1-2, TRAJ6)
CAVSLSGGSYIPTF

SEQ ID NO: 42180 - protein, 15 aa, Homo sapiens
  CDR3 for beta chain variable domain of TCR clone 21090 (TRBV28, TRBJ2-7)
CASSPGGRGFYEQYL

SEQ ID NO: 42181 - protein, 16 aa, Homo sapiens
  CDR3 for alpha chain variable domain of TCR clone 21091 (TRAV30, TRAJ24)
CGTEIVDADSWGKFQF

SEQ ID NO: 42182 - protein, 14 aa, Homo sapiens
  CDR3 for beta chain variable domain of TCR clone 21091 (TRBV28, TRBJ1-2)
CASRIQGANYGYTF

SEQ ID NO: 42183 - protein, 15 aa, Homo sapiens
  CDR3 for alpha chain variable domain of TCR clone 21092 (TRAV26-1, TRAJ22)
CIVRVSFWFCKATDL

SEQ ID NO: 42184 - protein, 13 aa, Homo sapiens
  CDR3 for beta chain variable domain of TCR clone 21092 (TRBV7-9, TRBJ1-2)
CASSLKQNYGYTS

SEQ ID NO: 42185 - protein, 15 aa, Homo sapiens
  CDR3 for alpha chain variable domain of TCR clone 21093 (TRAV27, TRAJ38)
CAARRNAGNNRKLIW

SEQ ID NO: 42186 - protein, 17 aa, Homo sapiens
  CDR3 for beta chain variable domain of TCR clone 21093 (TRBV7-8, TRBJ2-6)
CASSAGTGGAGANVLTF

SEQ ID NO: 42187 - protein, 16 aa, Homo sapiens
  CDR3 for alpha chain variable domain of TCR clone 21094 (TRAV21, TRAJ37)
CAVRTAGSSNTGKLTF

SEQ ID NO: 42188 - protein, 13 aa, Homo sapiens
  CDR3 for beta chain variable domain of TCR clone 21094 (TRBV7-9, TRBJ2-5)
CASLPSGRETQYF

SEQ ID NO: 42189 - protein, 15 aa, Homo sapiens
  CDR3 for alpha chain variable domain of TCR clone 21095 (TRAV17, TRAJ56)
CATEPFTGANSKLTF

SEQ ID NO: 42190 - protein, 12 aa, Homo sapiens
  CDR3 for beta chain variable domain of TCR clone 21095 (TRBV11-2, TRBJ2-2)
CASSLGGGELFF

SEQ ID NO: 42191 - protein, 15 aa, Homo sapiens
  CDR3 for alpha chain variable domain of TCR clone 21096 (TRAV25, TRAJ52)
CAGTSGGTSYGKLTF

SEQ ID NO: 42192 - protein, 16 aa, Homo sapiens
  CDR3 for beta chain variable domain of TCR clone 21096 (TRBV15, TRBJ1-2)
CATSRGPRTGGGGYTL

SEQ ID NO: 42193 - protein, 15 aa, Homo sapiens
  CDR3 for alpha chain variable domain of TCR clone 21097 (TRAV2, TRAJ13)
CCLLLCFRGYQKVTF

SEQ ID NO: 42194 - protein, 15 aa, Homo sapiens
  CDR3 for beta chain variable domain of TCR clone 21097 (TRBV20-1, TRBJ2-7)
CSARDRVSGMDEQYF

SEQ ID NO: 42195 - protein, 19 aa, Homo sapiens
  CDR3 for alpha chain variable domain of TCR clone 21098 (TRAV1-2, TRAJ26)
CLLPLCWERPDNYGQNFVF

SEQ ID NO: 42196 - protein, 17 aa, Homo sapiens
  CDR3 for beta chain variable domain of TCR clone 21098 (TRBV13, TRBJ2-3)
CASSLSRVAGGRNTQYF

SEQ ID NO: 42197 - protein, 16 aa, Homo sapiens
  CDR3 for alpha chain variable domain of TCR clone 21099 (TRAV12-3, TRAJ52)
YAVSNAGGTSYGKLTF

SEQ ID NO: 42198 - protein, 16 aa, Homo sapiens
  CDR3 for beta chain variable domain of TCR clone 21099 (TRBV6-6, TRBJ2-1)
CASSYSFSGSYNEQFF

SEQ ID NO: 42199 - protein, 12 aa, Homo sapiens
  CDR3 for alpha chain variable domain of TCR clone 21100 (TRAV3, TRAJ20)
CAVRDGDYKLSF

SEQ ID NO: 42200 - protein, 16 aa, Homo sapiens
  CDR3 for beta chain variable domain of TCR clone 21100 (TRBV12-5, TRBJ2-5)
CASGPRTSGNQETQYF

SEQ ID NO: 42201 - protein, 15 aa, Homo sapiens
  CDR3 for alpha chain variable domain of TCR clone 21101 (TRAV8-3, TRAJ15)
RAVGAPNQAGTALIF

SEQ ID NO: 42202 - protein, 14 aa, Homo sapiens
  CDR3 for beta chain variable domain of TCR clone 21101 (TRBV20-1, TRBJ2-1)
CSPNDEASYNEQFF

SEQ ID NO: 42203 - protein, 11 aa, Homo sapiens
  CDR3 for alpha chain variable domain of TCR clone 21102 (TRAV17, TRAJ9)
CATTGGFKTIF

SEQ ID NO: 42204 - protein, 14 aa, Homo sapiens
  CDR3 for beta chain variable domain of TCR clone 21102 (TRBV7-9, TRBJ2-2)
CAISGLADTGELFF

SEQ ID NO: 42205 - protein, 15 aa, Homo sapiens
  CDR3 for alpha chain variable domain of TCR clone 21103 (TRAV25, TRAJ53)
CPTSNSGGSNYKPTF

SEQ ID NO: 42206 - protein, 14 aa, Homo sapiens
  CDR3 for beta chain variable domain of TCR clone 21103 (TRBV11-2, TRBJ2-3)
CASSRLARTDTQYF

SEQ ID NO: 42207 - protein, 11 aa, Homo sapiens
  CDR3 for alpha chain variable domain of TCR clone 21104 (TRAV39, TRAJ49)
CAVDISTQFYF

SEQ ID NO: 42208 - protein, 11 aa, Homo sapiens
  CDR3 for beta chain variable domain of TCR clone 21104 (TRBV7-8, TRBJ2-7)
CAGSLSLEQYF

SEQ ID NO: 42209 - protein, 14 aa, Homo sapiens
  CDR3 for alpha chain variable domain of TCR clone 21105 (TRAV12-1, TRAJ17)
CVVNYKAAGNKLTF

SEQ ID NO: 42210 - protein, 18 aa, Homo sapiens
  CDR3 for beta chain variable domain of TCR clone 21105 (TRBV20-1, TRBJ2-6)
CSAETTPTHGSGANVLTF

SEQ ID NO: 42211 - protein, 13 aa, Homo sapiens
  CDR3 for alpha chain variable domain of TCR clone 21106 (TRAV30, TRAJ34)
CGTVGYNTDKLIF

SEQ ID NO: 42212 - protein, 16 aa, Homo sapiens
  CDR3 for beta chain variable domain of TCR clone 21106 (TRBV7-9, TRBJ1-2)
CASSLGFSSGEDGYAF

SEQ ID NO: 42213 - protein, 14 aa, Homo sapiens
  CDR3 for alpha chain variable domain of TCR clone 21107 (TRAV12-2, TRAJ17)
CAVLFKAAGKKLTF

SEQ ID NO: 42214 - protein, 17 aa, Homo sapiens
  CDR3 for beta chain variable domain of TCR clone 21107 (TRBV20-1, TRBJ2-2)
CSASGSGQGGLTGELFF

SEQ ID NO: 42215 - protein, 14 aa, Homo sapiens
  CDR3 for alpha chain variable domain of TCR clone 21108 (TRAV2, TRAJ37)
CAVDFTSNTGKLIF

SEQ ID NO: 42216 - protein, 13 aa, Homo sapiens
  CDR3 for beta chain variable domain of TCR clone 21108 (TRBV19, TRBJ1-2)
CASSVPGQDGYTF

SEQ ID NO: 42217 - protein, 11 aa, Homo sapiens
  CDR3 for alpha chain variable domain of TCR clone 21109 (TRAV36/DV7, TRAJ45)
SGGGGADGLTF

SEQ ID NO: 42218 - protein, 13 aa, Homo sapiens
  CDR3 for beta chain variable domain of TCR clone 21109 (TRBV28, TRBJ2-7)
CASNPSGTYEQYF

SEQ ID NO: 42219 - protein, 13 aa, Homo sapiens
  CDR3 for alpha chain variable domain of TCR clone 21110 (TRAV36/DV7, TRAJ54)
CAVCTQGAQKLIF

SEQ ID NO: 42220 - protein, 13 aa, Homo sapiens
  CDR3 for beta chain variable domain of TCR clone 21110 (TRBV7-6, TRBJ2-7)
CASSLDHTHEQYF

SEQ ID NO: 42221 - protein, 14 aa, Homo sapiens
  CDR3 for alpha chain variable domain of TCR clone 21111 (TRAV20, TRAJ56)
CAVQFGGANSELTF

SEQ ID NO: 42222 - protein, 14 aa, Homo sapiens
  CDR3 for beta chain variable domain of TCR clone 21111 (TRBV20-1, TRBJ2-7)
CSAKRGRSSYEQYF

SEQ ID NO: 42223 - protein, 16 aa, Homo sapiens
  CDR3 for alpha chain variable domain of TCR clone 21112 (TRAV1-2, TRAJ10)
CAVRGVLTGGGNKLTF

SEQ ID NO: 42224 - protein, 13 aa, Homo sapiens
  CDR3 for beta chain variable domain of TCR clone 21112 (TRBV20-1, TRBJ1-6)
CSAPSGVGSPLHF

SEQ ID NO: 42225 - protein, 13 aa, Homo sapiens
  CDR3 for alpha chain variable domain of TCR clone 21113 (TRAV2, TRAJ15)
CAVASQAGTALIF

SEQ ID NO: 42226 - protein, 13 aa, Homo sapiens
  CDR3 for beta chain variable domain of TCR clone 21113 (TRBV4-2, TRBJ1-1)
CASSQAGNTEAFF

SEQ ID NO: 42227 - protein, 14 aa, Homo sapiens
  CDR3 for alpha chain variable domain of TCR clone 21114 (TRAV2, TRAJ37)
CAVDFNSNTGKLIF

SEQ ID NO: 42228 - protein, 15 aa, Homo sapiens
  CDR3 for beta chain variable domain of TCR clone 21114 (TRBV20-1, TRBJ1-1)
CSASRGVTGNTEAFF

SEQ ID NO: 42229 - protein, 16 aa, Homo sapiens
  CDR3 for alpha chain variable domain of TCR clone 21115 (TRAV12-3, TRAJ53)
CAMSPGSGGSNYKLTF

SEQ ID NO: 42230 - protein, 14 aa, Homo sapiens
  CDR3 for beta chain variable domain of TCR clone 21115 (TRBV18, TRBJ2-7)
CASSPRGGAYEQYF

SEQ ID NO: 42231 - protein, 14 aa, Homo sapiens
  CDR3 for alpha chain variable domain of TCR clone 21116 (TRAV8-4, TRAJ54)
CAVSEVLGAQKLGF

SEQ ID NO: 42232 - protein, 13 aa, Homo sapiens
  CDR3 for beta chain variable domain of TCR clone 21116 (TRBV27, TRBJ2-7)
CASSFVSSYEQYF

SEQ ID NO: 42233 - protein, 18 aa, Homo sapiens
  CDR3 for alpha chain variable domain of TCR clone 21117 (TRAV26-1, TRAJ23)
CIVRVGLEVWNQGGKLNF

SEQ ID NO: 42234 - protein, 16 aa, Homo sapiens
  CDR3 for beta chain variable domain of TCR clone 21117 (TRBV12-4, TRBJ2-5)
CASSFFVRGRQETQYF

SEQ ID NO: 42235 - protein, 15 aa, Homo sapiens
  CDR3 for alpha chain variable domain of TCR clone 21118 (TRAV12-1, TRAJ44)
CVADLPTGTASKLPF

SEQ ID NO: 42236 - protein, 13 aa, Homo sapiens
  CDR3 for beta chain variable domain of TCR clone 21118 (TRBV6-5, TRBJ2-5)
CASSPQGGETQYF

SEQ ID NO: 42237 - protein, 13 aa, Homo sapiens
  CDR3 for alpha chain variable domain of TCR clone 21119 (TRAV19, TRAJ57)
CALLQGGSEKLVF

SEQ ID NO: 42238 - protein, 15 aa, Homo sapiens
  CDR3 for beta chain variable domain of TCR clone 21119 (TRBV6-3, TRBJ2-7)
CASSSPGTVFYEQYF

SEQ ID NO: 42239 - protein, 11 aa, Homo sapiens
  CDR3 for alpha chain variable domain of TCR clone 21120 (TRAV21, TRAJ34)
CAVTNTDKLIF

SEQ ID NO: 42240 - protein, 14 aa, Homo sapiens
  CDR3 for beta chain variable domain of TCR clone 21120 (TRBV19, TRBJ2-1)
CASPTFVLSGEQFF

SEQ ID NO: 42241 - protein, 13 aa, Homo sapiens
  CDR3 for alpha chain variable domain of TCR clone 21121 (TRAV17, TRAJ26)
CATVDNYGQNFVF

SEQ ID NO: 42242 - protein, 14 aa, Homo sapiens
  CDR3 for beta chain variable domain of TCR clone 21121 (TRBV7-2, TRBJ2-7)
CASSPKTSFYEQYF

SEQ ID NO: 42243 - protein, 15 aa, Homo sapiens
  CDR3 for alpha chain variable domain of TCR clone 21122 (TRAV12-1, TRAJ42)
CVVTRDGGSQGNRIF

SEQ ID NO: 42244 - protein, 14 aa, Homo sapiens
  CDR3 for beta chain variable domain of TCR clone 21122 (TRBV11-2, TRBJ2-3)
CASSLGGGANTQYF

SEQ ID NO: 42245 - protein, 15 aa, Homo sapiens
  CDR3 for alpha chain variable domain of TCR clone 21123 (TRAV12-3, TRAJ10)
CASYILTGGGSKLTF

SEQ ID NO: 42246 - protein, 15 aa, Homo sapiens
  CDR3 for beta chain variable domain of TCR clone 21123 (TRBV7-2, TRBJ1-6)
CASSLGPDRGMPLHF

SEQ ID NO: 42247 - protein, 17 aa, Homo sapiens
  CDR3 for alpha chain variable domain of TCR clone 21124 (TRAV3, TRAJ6)
CAVRDRPRAGGSYIPTF

SEQ ID NO: 42248 - protein, 14 aa, Homo sapiens
  CDR3 for beta chain variable domain of TCR clone 21124 (TRBV7-2, TRBJ2-7)
CASSPKTSFYEQYF

SEQ ID NO: 42249 - protein, 14 aa, Homo sapiens
  CDR3 for alpha chain variable domain of TCR clone 21125 (TRAV17, TRAJ56)
CATVPAGANSKLTF

SEQ ID NO: 42250 - protein, 13 aa, Homo sapiens
  CDR3 for beta chain variable domain of TCR clone 21125 (TRBV12-4, TRBJ2-2)
CASSITGSGELFV

SEQ ID NO: 42251 - protein, 15 aa, Homo sapiens
  CDR3 for alpha chain variable domain of TCR clone 21126 (TRAV4, TRAJ39)
CLVGPNNNAGNMLTF

SEQ ID NO: 42252 - protein, 13 aa, Homo sapiens
  CDR3 for beta chain variable domain of TCR clone 21126 (TRBV10-3, TRBJ2-7)
CASKLAVNYEQYF

SEQ ID NO: 42253 - protein, 17 aa, Homo sapiens
  CDR3 for alpha chain variable domain of TCR clone 21127 (TRAV3, TRAJ12)
CAVRDGGRMDSSYKLIF

SEQ ID NO: 42254 - protein, 14 aa, Homo sapiens
  CDR3 for beta chain variable domain of TCR clone 21127 (TRBV20-1, TRBJ1-1)
SAVLHLGGGTEAFF

SEQ ID NO: 42255 - protein, 14 aa, Homo sapiens
  CDR3 for alpha chain variable domain of TCR clone 21128 (TRAV29/DV5, TRAJ36)
CAARRKTGANNLFF

SEQ ID NO: 42256 - protein, 14 aa, Homo sapiens
  CDR3 for beta chain variable domain of TCR clone 21128 (TRBV25-1, TRBJ1-1)
CASTHLGGNTEAFF

SEQ ID NO: 42257 - protein, 12 aa, Homo sapiens
  CDR3 for alpha chain variable domain of TCR clone 21129 (TRAV27, TRAJ9)
CAGESGGLKTIF

SEQ ID NO: 42258 - protein, 14 aa, Homo sapiens
  CDR3 for beta chain variable domain of TCR clone 21129 (TRBV6-1, TRBJ2-1)
CASAKDGFYNEQFF

SEQ ID NO: 42259 - protein, 14 aa, Homo sapiens
  CDR3 for alpha chain variable domain of TCR clone 21130 (TRAV12-2, TRAJ17)
CAVLFKAADNKLTF

SEQ ID NO: 42260 - protein, 17 aa, Homo sapiens
  CDR3 for beta chain variable domain of TCR clone 21130 (TRBV20-1, TRBJ2-2)
CSASGSGQGGLTGELFF

SEQ ID NO: 42261 - protein, 13 aa, Homo sapiens
  CDR3 for alpha chain variable domain of TCR clone 21131 (TRAV29/DV5, TRAJ47)
CAASEEYGNKLVF

SEQ ID NO: 42262 - protein, 12 aa, Homo sapiens
  CDR3 for beta chain variable domain of TCR clone 21131 (TRBV29-1, TRBJ2-3)
CSVTGGADTQYF

SEQ ID NO: 42263 - protein, 12 aa, Homo sapiens
  CDR3 for alpha chain variable domain of TCR clone 21132 (TRAV8-3, TRAJ20)
GAVGANDYKLSF

SEQ ID NO: 42264 - protein, 16 aa, Homo sapiens
  CDR3 for beta chain variable domain of TCR clone 21132 (TRBV19, TRBJ2-2)
CASRSPGTGATGELFF

SEQ ID NO: 42265 - protein, 14 aa, Homo sapiens
  CDR3 for alpha chain variable domain of TCR clone 21133 (TRAV26-1, TRAJ39)
CIVRGARAGNMLTF

SEQ ID NO: 42266 - protein, 15 aa, Homo sapiens
  CDR3 for beta chain variable domain of TCR clone 21133 (TRBV7-9, TRBJ1-5)
CASSQGHQPNQPQHF

SEQ ID NO: 42267 - protein, 14 aa, Homo sapiens
  CDR3 for alpha chain variable domain of TCR clone 21134 (TRAV12-3, TRAJ10)
SHLPLAGGGNKLTF

SEQ ID NO: 42268 - protein, 16 aa, Homo sapiens
  CDR3 for beta chain variable domain of TCR clone 21134 (TRBV19, TRBJ2-1)
CASSKAGPSSYNEQFF

SEQ ID NO: 42269 - protein, 12 aa, Homo sapiens
  CDR3 for alpha chain variable domain of TCR clone 21135 (TRAV8-2, TRAJ5)
CVVSDIGRALTF

SEQ ID NO: 42270 - protein, 19 aa, Homo sapiens
  CDR3 for beta chain variable domain of TCR clone 21135 (TRBV5-1, TRBJ2-2)
CASSLAPGLAGVRTGELFF

SEQ ID NO: 42271 - protein, 15 aa, Homo sapiens
  CDR3 for alpha chain variable domain of TCR clone 21136 (TRAV34, TRAJ38)
CGADFTPGNNRKLIW

SEQ ID NO: 42272 - protein, 16 aa, Homo sapiens
  CDR3 for beta chain variable domain of TCR clone 21136 (TRBV12-5, TRBJ2-5)
CASGPRTSGKQETQYF

SEQ ID NO: 42273 - protein, 13 aa, Homo sapiens
  CDR3 for alpha chain variable domain of TCR clone 21137 (TRAV1-2, TRAJ9)
CAALNTGGFKTLF

SEQ ID NO: 42274 - protein, 13 aa, Homo sapiens
  CDR3 for beta chain variable domain of TCR clone 21137 (TRBV19, TRBJ1-2)
CASSVPGQDGYTF

SEQ ID NO: 42275 - protein, 14 aa, Homo sapiens
  CDR3 for alpha chain variable domain of TCR clone 21138 (TRAV29/DV5, TRAJ36)
CAARRKTGANNLFF

SEQ ID NO: 42276 - protein, 14 aa, Homo sapiens
  CDR3 for beta chain variable domain of TCR clone 21138 (TRBV12-5, TRBJ2-5)
CDSGSRTHQETQYF

SEQ ID NO: 42277 - protein, 18 aa, Homo sapiens
  CDR3 for alpha chain variable domain of TCR clone 21139 (TRAV21, TRAJ52)
CAVRPSPAGGASYGKLTF

SEQ ID NO: 42278 - protein, 15 aa, Homo sapiens
  CDR3 for beta chain variable domain of TCR clone 21139 (TRBV20-1, TRBJ2-5)
CSATPLTGDQETQYF

SEQ ID NO: 42279 - protein, 14 aa, Homo sapiens
  CDR3 for alpha chain variable domain of TCR clone 21140 (TRAV13-1, TRAJ39)
CAASYNNAGNMLTF

SEQ ID NO: 42280 - protein, 13 aa, Homo sapiens
  CDR3 for beta chain variable domain of TCR clone 21140 (TRBV24-1, TRBJ1-4)
CATNNGRSERLFF

SEQ ID NO: 42281 - protein, 16 aa, Homo sapiens
  CDR3 for alpha chain variable domain of TCR clone 21141 (TRAV3, TRAJ28)
CAVLPRSGAGSYQLPF

SEQ ID NO: 42282 - protein, 13 aa, Homo sapiens
  CDR3 for beta chain variable domain of TCR clone 21141 (TRBV12-4, TRBJ2-5)
CASRLAVQETQYF

SEQ ID NO: 42283 - protein, 20 aa, Homo sapiens
  CDR3 for alpha chain variable domain of TCR clone 21142 (TRAV12-1, TRAJ42)
SSVIQPPTSVKGGSQGNLIF

SEQ ID NO: 42284 - protein, 18 aa, Homo sapiens
  CDR3 for beta chain variable domain of TCR clone 21142 (TRBV11-3, TRBJ2-3)
CASSLGGASRGAPNTQYF

SEQ ID NO: 42285 - protein, 16 aa, Homo sapiens
  CDR3 for alpha chain variable domain of TCR clone 21143 (TRAV12-3, TRAJ53)
CAMSPGSGGSNYKLTF

SEQ ID NO: 42286 - protein, 15 aa, Homo sapiens
  CDR3 for beta chain variable domain of TCR clone 21143 (TRBV28, TRBJ2-1)
CASSIIAGGRSEQFF

SEQ ID NO: 42287 - protein, 15 aa, Homo sapiens
  CDR3 for alpha chain variable domain of TCR clone 21144 (TRAV26-1, TRAJ29)
CIVRVVGSGNTPLVF

SEQ ID NO: 42288 - protein, 14 aa, Homo sapiens
  CDR3 for beta chain variable domain of TCR clone 21144 (TRBV18, TRBJ2-5)
CASSPGVSQETQYF

SEQ ID NO: 42289 - protein, 13 aa, Homo sapiens
  CDR3 for alpha chain variable domain of TCR clone 21145 (TRAV8-3, TRAJ4)
WVLYSGGYNKLIF

SEQ ID NO: 42290 - protein, 16 aa, Homo sapiens
  CDR3 for beta chain variable domain of TCR clone 21145 (TRBV7-8, TRBJ2-3)
CASSTEGQRETDTQYF

SEQ ID NO: 42291 - protein, 14 aa, Homo sapiens
  CDR3 for alpha chain variable domain of TCR clone 21146 (TRAV12-2, TRAJ40)
RAVKIPSGTYKYIF

SEQ ID NO: 42292 - protein, 14 aa, Homo sapiens
  CDR3 for beta chain variable domain of TCR clone 21146 (TRBV20-1, TRBJ1-1)
CSAQTRIGGTEAFF

SEQ ID NO: 42293 - protein, 13 aa, Homo sapiens
  CDR3 for alpha chain variable domain of TCR clone 21147 (TRAV8-6, TRAJ21)
CAVSPSSLNKFYF

SEQ ID NO: 42294 - protein, 13 aa, Homo sapiens
  CDR3 for beta chain variable domain of TCR clone 21147 (TRBV7-9, TRBJ1-2)
CASSLKQNYGYTF

SEQ ID NO: 42295 - protein, 15 aa, Homo sapiens
  CDR3 for alpha chain variable domain of TCR clone 21148 (TRAV8-4, TRAJ29)
CAVSEGFRGNTPLVF

SEQ ID NO: 42296 - protein, 18 aa, Homo sapiens
  CDR3 for beta chain variable domain of TCR clone 21148 (TRBV20-1, TRBJ2-6)
CSARTLAGGPSGANVLTF

SEQ ID NO: 42297 - protein, 13 aa, Homo sapiens
  CDR3 for alpha chain variable domain of TCR clone 21149 (TRAV1-1, TRAJ9)
CAAKNTGGFKTIF

SEQ ID NO: 42298 - protein, 14 aa, Homo sapiens
  CDR3 for beta chain variable domain of TCR clone 21149 (TRBV20-1, TRBJ2-1)
CSAQIGGSADEQFF

SEQ ID NO: 42299 - protein, 12 aa, Homo sapiens
  CDR3 for alpha chain variable domain of TCR clone 21150 (TRAV26-2, TRAJ21)
CILKGDFNKFYF

SEQ ID NO: 42300 - protein, 14 aa, Homo sapiens
  CDR3 for beta chain variable domain of TCR clone 21150 (TRBV7-9, TRBJ1-1)
CASTPLQSYTEAFF

SEQ ID NO: 42301 - protein, 13 aa, Homo sapiens
  CDR3 for alpha chain variable domain of TCR clone 21151 (TRAV8-3, TRAJ28)
CAVGAVGSYQLTF

SEQ ID NO: 42302 - protein, 15 aa, Homo sapiens
  CDR3 for beta chain variable domain of TCR clone 21151 (TRBV7-9, TRBJ1-5)
CASSHGHQPNQPQHF

SEQ ID NO: 42303 - protein, 15 aa, Homo sapiens
  CDR3 for alpha chain variable domain of TCR clone 21152 (TRAV13-2, TRAJ24)
CAEILTTDSWGKLQF

SEQ ID NO: 42304 - protein, 20 aa, Homo sapiens
  CDR3 for beta chain variable domain of TCR clone 21152 (TRBV6-6, TRBJ1-3)
CASSWDRGRNLLNAGNTIYF

SEQ ID NO: 42305 - protein, 14 aa, Homo sapiens
  CDR3 for alpha chain variable domain of TCR clone 21153 (TRAV3, TRAJ9)
CAVRLNTGGFRTIF

SEQ ID NO: 42306 - protein, 15 aa, Homo sapiens
  CDR3 for beta chain variable domain of TCR clone 21153 (TRBV7-2, TRBJ2-1)
CASSLASGRVNEQFF

SEQ ID NO: 42307 - protein, 12 aa, Homo sapiens
  CDR3 for alpha chain variable domain of TCR clone 21154 (TRAV1-1, TRAJ39)
CAVPVVGNMLTF

SEQ ID NO: 42308 - protein, 15 aa, Homo sapiens
  CDR3 for beta chain variable domain of TCR clone 21154 (TRBV19, TRBJ1-6)
CASSTQGAVGSPLHS

SEQ ID NO: 42309 - protein, 15 aa, Homo sapiens
  CDR3 for alpha chain variable domain of TCR clone 21155 (TRAV27, TRAJ38)
CAARRNAGNNRKLIW

SEQ ID NO: 42310 - protein, 13 aa, Homo sapiens
  CDR3 for beta chain variable domain of TCR clone 21155 (TRBV2, TRBJ1-1)
CASSEGGNTEAFF

SEQ ID NO: 42311 - protein, 14 aa, Homo sapiens
  CDR3 for alpha chain variable domain of TCR clone 21156 (TRAV26-1, TRAJ34)
CIVRVAYNTDKLIF

SEQ ID NO: 42312 - protein, 15 aa, Homo sapiens
  CDR3 for beta chain variable domain of TCR clone 21156 (TRBV20-1, TRBJ2-7)
RSARVPAAYFYEQYF

SEQ ID NO: 42313 - protein, 16 aa, Homo sapiens
  CDR3 for alpha chain variable domain of TCR clone 21157 (TRAV3, TRAJ37)
CAVRGKGSGNTGKLIF

SEQ ID NO: 42314 - protein, 13 aa, Homo sapiens
  CDR3 for beta chain variable domain of TCR clone 21157 (TRBV5-5, TRBJ1-2)
CASSFWRGEDYTF

SEQ ID NO: 42315 - protein, 14 aa, Homo sapiens
  CDR3 for alpha chain variable domain of TCR clone 21158 (TRAV16, TRAJ54)
CALSGVRGAQKLVF

SEQ ID NO: 42316 - protein, 15 aa, Homo sapiens
  CDR3 for beta chain variable domain of TCR clone 21158 (TRBV18, TRBJ2-2)
CASSTSGLHTGELFF

SEQ ID NO: 42317 - protein, 16 aa, Homo sapiens
  CDR3 for alpha chain variable domain of TCR clone 21159 (TRAV30, TRAJ24)
CGTEIVDADSWGKFQF

SEQ ID NO: 42318 - protein, 12 aa, Homo sapiens
  CDR3 for beta chain variable domain of TCR clone 21159 (TRBV11-2, TRBJ2-1)
CASSPGNNEQFL

SEQ ID NO: 42319 - protein, 15 aa, Homo sapiens
  CDR3 for alpha chain variable domain of TCR clone 21160 (TRAV16, TRAJ12)
CSKWPLRDSSYKLIF

SEQ ID NO: 42320 - protein, 13 aa, Homo sapiens
  CDR3 for beta chain variable domain of TCR clone 21160 (TRBV4-2, TRBJ1-1)
CASSQAGSTEAFF

SEQ ID NO: 42321 - protein, 14 aa, Homo sapiens
  CDR3 for alpha chain variable domain of TCR clone 21161 (TRAV9-2, TRAJ39)
CALYIYNAGNMLTF

SEQ ID NO: 42322 - protein, 15 aa, Homo sapiens
  CDR3 for beta chain variable domain of TCR clone 21161 (TRBV27, TRBJ2-5)
CASSLYPRGGETQYF

SEQ ID NO: 42323 - protein, 11 aa, Homo sapiens
  CDR3 for alpha chain variable domain of TCR clone 21162 (TRAV13-1, TRAJ52)
PGGTSYGKLTF

SEQ ID NO: 42324 - protein, 16 aa, Homo sapiens
  CDR3 for beta chain variable domain of TCR clone 21162 (TRBV28, TRBJ2-7)
CASSPWVAAGDLSQYF

SEQ ID NO: 42325 - protein, 14 aa, Homo sapiens
  CDR3 for alpha chain variable domain of TCR clone 21163 (TRAV14/DV4, TRAJ23)
CAMRLYNQGGKLIF

SEQ ID NO: 42326 - protein, 16 aa, Homo sapiens
  CDR3 for beta chain variable domain of TCR clone 21163 (TRBV2, TRBJ2-7)
CASSEPWTGPSYEQYF

SEQ ID NO: 42327 - protein, 14 aa, Homo sapiens
  CDR3 for alpha chain variable domain of TCR clone 21164 (TRAV1-2, TRAJ16)
CAVNRFSDGQKLLF

SEQ ID NO: 42328 - protein, 14 aa, Homo sapiens
  CDR3 for beta chain variable domain of TCR clone 21164 (TRBV19, TRBJ2-1)
CASSRLASINEQFF

SEQ ID NO: 42329 - protein, 13 aa, Homo sapiens
  CDR3 for alpha chain variable domain of TCR clone 21165 (TRAV3, TRAJ21)
CAVREPDFNKFYF

SEQ ID NO: 42330 - protein, 14 aa, Homo sapiens
  CDR3 for beta chain variable domain of TCR clone 21165 (TRBV7-2, TRBJ2-7)
CASSPKTSFYEQYF

SEQ ID NO: 42331 - protein, 18 aa, Homo sapiens
  CDR3 for alpha chain variable domain of TCR clone 21166 (TRAV9-2, TRAJ52)
CALSRHNAGGTSYGRLTF

SEQ ID NO: 42332 - protein, 16 aa, Homo sapiens
  CDR3 for beta chain variable domain of TCR clone 21166 (TRBV19, TRBJ2-1)
CASSKAGPSSYNEQFF

SEQ ID NO: 42333 - protein, 14 aa, Homo sapiens
  CDR3 for alpha chain variable domain of TCR clone 21167 (TRAV20, TRAJ42)
CAVQAGGSQGNLIF

SEQ ID NO: 42334 - protein, 14 aa, Homo sapiens
  CDR3 for beta chain variable domain of TCR clone 21167 (TRBV28, TRBJ1-2)
CASRIQGASYGYTF

SEQ ID NO: 42335 - protein, 15 aa, Homo sapiens
  CDR3 for alpha chain variable domain of TCR clone 21168 (TRAV21, TRAJ40)
CAVRPQTPGTYKYIF

SEQ ID NO: 42336 - protein, 13 aa, Homo sapiens
  CDR3 for beta chain variable domain of TCR clone 21168 (TRBV7-2, TRBJ2-2)
CASSSVRAGELFF

SEQ ID NO: 42337 - protein, 13 aa, Homo sapiens
  CDR3 for alpha chain variable domain of TCR clone 21169 (TRAV21, TRAJ57)
CAVTQGGSEKLVF

SEQ ID NO: 42338 - protein, 16 aa, Homo sapiens
  CDR3 for beta chain variable domain of TCR clone 21169 (TRBV29-1, TRBJ2-7)
CSVEDAEDGTACEQYF

SEQ ID NO: 42339 - protein, 11 aa, Homo sapiens
  CDR3 for alpha chain variable domain of TCR clone 21170 (TRAV1-2, TRAJ40)
CAVPVTYKYIF

SEQ ID NO: 42340 - protein, 16 aa, Homo sapiens
  CDR3 for beta chain variable domain of TCR clone 21170 (TRBV29-1, TRBJ2-7)
CSVEVVGTSGSYEQYF

SEQ ID NO: 42341 - protein, 13 aa, Homo sapiens
  CDR3 for alpha chain variable domain of TCR clone 21171 (TRAV1-1, TRAJ9)
CAAKNTGGFKTIF

SEQ ID NO: 42342 - protein, 14 aa, Homo sapiens
  CDR3 for beta chain variable domain of TCR clone 21171 (TRBV20-1, TRBJ2-1)
CSAQIGGSANEHFF

SEQ ID NO: 42343 - protein, 14 aa, Homo sapiens
  CDR3 for alpha chain variable domain of TCR clone 21172 (TRAV12-3, TRAJ10)
SHLPLTGGGSKLTF

SEQ ID NO: 42344 - protein, 15 aa, Homo sapiens
  CDR3 for beta chain variable domain of TCR clone 21172 (TRBV11-2, TRBJ1-3)
CASSLDGTVGNTIYF

SEQ ID NO: 42345 - protein, 17 aa, Homo sapiens
  CDR3 for alpha chain variable domain of TCR clone 21173 (TRAV26-1, TRAJ53)
CVVRVDDSGGSNYKLTF

SEQ ID NO: 42346 - protein, 15 aa, Homo sapiens
  CDR3 for beta chain variable domain of TCR clone 21173 (TRBV20-1, TRBJ2-7)
CSARVPAAYFYEQYF

SEQ ID NO: 42347 - protein, 19 aa, Homo sapiens
  CDR3 for alpha chain variable domain of TCR clone 21174 (TRAV17, TRAJ40)
TASRAADTASYFCASKYIF

SEQ ID NO: 42348 - protein, 17 aa, Homo sapiens
  CDR3 for beta chain variable domain of TCR clone 21174 (TRBV11-2, TRBJ2-4)
CASSFLALGGAGDMQYF

SEQ ID NO: 42349 - protein, 16 aa, Homo sapiens
  CDR3 for alpha chain variable domain of TCR clone 21175 (TRAV16, TRAJ4)
CALSRMFSGGYNKLIF

SEQ ID NO: 42350 - protein, 16 aa, Homo sapiens
  CDR3 for beta chain variable domain of TCR clone 21175 (TRBV24-1, TRBJ2-3)
CATSAPGTGATDTQYF

SEQ ID NO: 42351 - protein, 14 aa, Homo sapiens
  CDR3 for alpha chain variable domain of TCR clone 21176 (TRAV29/DV5, TRAJ36)
CAARRKTGANNLFF

SEQ ID NO: 42352 - protein, 16 aa, Homo sapiens
  CDR3 for beta chain variable domain of TCR clone 21176 (TRBV19, TRBJ2-1)
CASSKAGPSSYNEQFF

SEQ ID NO: 42353 - protein, 15 aa, Homo sapiens
  CDR3 for alpha chain variable domain of TCR clone 21177 (TRAV17, TRAJ56)
CATDANTGANSKLTF

SEQ ID NO: 42354 - protein, 12 aa, Homo sapiens
  CDR3 for beta chain variable domain of TCR clone 21177 (TRBV7-8, TRBJ2-7)
CASSLEDREQYF

SEQ ID NO: 42355 - protein, 12 aa, Homo sapiens
  CDR3 for alpha chain variable domain of TCR clone 21178 (TRAV2, TRAJ31)
CAVEGNNARLMF

SEQ ID NO: 42356 - protein, 16 aa, Homo sapiens
  CDR3 for beta chain variable domain of TCR clone 21178 (TRBV10-3, TRBJ2-1)
CAISGVGDGGGGEQFF

SEQ ID NO: 42357 - protein, 15 aa, Homo sapiens
  CDR3 for alpha chain variable domain of TCR clone 21179 (TRAV26-1, TRAJ29)
CIVRVEGSGNTPLVF

SEQ ID NO: 42358 - protein, 15 aa, Homo sapiens
  CDR3 for beta chain variable domain of TCR clone 21179 (TRBV7-9, TRBJ1-5)
CASSQGHQPNQPQHI

SEQ ID NO: 42359 - protein, 12 aa, Homo sapiens
  CDR3 for alpha chain variable domain of TCR clone 21180 (TRAV12-3, TRAJ17)
CAMTLTGNKLTF

SEQ ID NO: 42360 - protein, 15 aa, Homo sapiens
  CDR3 for beta chain variable domain of TCR clone 21180 (TRBV2, TRBJ2-7)
CASSEGLARSYEQYF

SEQ ID NO: 42361 - protein, 11 aa, Homo sapiens
  CDR3 for alpha chain variable domain of TCR clone 21181 (TRAV21, TRAJ48)
CAVDGNEKLTF

SEQ ID NO: 42362 - protein, 13 aa, Homo sapiens
  CDR3 for beta chain variable domain of TCR clone 21181 (TRBV10-3, TRBJ2-7)
CASKLAVNYEQYF

SEQ ID NO: 42363 - protein, 13 aa, Homo sapiens
  CDR3 for alpha chain variable domain of TCR clone 21182 (TRAV21, TRAJ20)
CAVGLRFDYKLSF

SEQ ID NO: 42364 - protein, 13 aa, Homo sapiens
  CDR3 for beta chain variable domain of TCR clone 21182 (TRBV6-1, TRBJ1-1)
CASSRQGNTEAFF

SEQ ID NO: 42365 - protein, 12 aa, Homo sapiens
  CDR3 for alpha chain variable domain of TCR clone 21183 (TRAV12-3, TRAJ17)
CAMTLTGNKLTF

SEQ ID NO: 42366 - protein, 15 aa, Homo sapiens
  CDR3 for beta chain variable domain of TCR clone 21183 (TRBV20-1, TRBJ2-7)
RSARDRVSGMDERYF

SEQ ID NO: 42367 - protein, 14 aa, Homo sapiens
  CDR3 for alpha chain variable domain of TCR clone 21184 (TRAV35, TRAJ13)
CAGRSPGGYQRVTF

SEQ ID NO: 42368 - protein, 14 aa, Homo sapiens
  CDR3 for beta chain variable domain of TCR clone 21184 (TRBV19, TRBJ2-2)
CASSMVGLSGELFF

SEQ ID NO: 42369 - protein, 15 aa, Homo sapiens
  CDR3 for alpha chain variable domain of TCR clone 21185 (TRAV8-3, TRAJ11)
CAVGLLNSGYSTLTF

SEQ ID NO: 42370 - protein, 13 aa, Homo sapiens
  CDR3 for beta chain variable domain of TCR clone 21185 (TRBV19, TRBJ1-2)
CASSVPGQDGYTF

SEQ ID NO: 42371 - protein, 12 aa, Homo sapiens
  CDR3 for alpha chain variable domain of TCR clone 21186 (TRAV35, TRAJ28)
GVEGAGSYQLTF

SEQ ID NO: 42372 - protein, 15 aa, Homo sapiens
  CDR3 for beta chain variable domain of TCR clone 21186 (TRBV27, TRBJ2-1)
CASSNGGGSSNEQFF

SEQ ID NO: 42373 - protein, 14 aa, Homo sapiens
  CDR3 for alpha chain variable domain of TCR clone 21187 (TRAV17, TRAJ34)
CATDSLEGTDKLIL

SEQ ID NO: 42374 - protein, 13 aa, Homo sapiens
  CDR3 for beta chain variable domain of TCR clone 21187 (TRBV11-2, TRBJ2-7)
CASSGTRPYEQYF

SEQ ID NO: 42375 - protein, 14 aa, Homo sapiens
  CDR3 for alpha chain variable domain of TCR clone 21188 (TRAV8-4, TRAJ9)
CAVRINTGGFKTIL

SEQ ID NO: 42376 - protein, 15 aa, Homo sapiens
  CDR3 for beta chain variable domain of TCR clone 21188 (TRBV20-1, TRBJ2-7)
CSARDRVSGMDEQYF

SEQ ID NO: 42377 - protein, 13 aa, Homo sapiens
  CDR3 for alpha chain variable domain of TCR clone 21189 (TRAV2, TRAJ15)
CAVASQAGTALIF

SEQ ID NO: 42378 - protein, 14 aa, Homo sapiens
  CDR3 for beta chain variable domain of TCR clone 21189 (TRBV7-6, TRBJ2-3)
CASSLGTVTDTQYF

SEQ ID NO: 42379 - protein, 12 aa, Homo sapiens
  CDR3 for alpha chain variable domain of TCR clone 21190 (TRAV13-2, TRAJ23)
CAERQRGGKLIF

SEQ ID NO: 42380 - protein, 16 aa, Homo sapiens
  CDR3 for beta chain variable domain of TCR clone 21190 (TRBV20-1, TRBJ1-4)
CSAPGQGLLTNEKLFF

SEQ ID NO: 42381 - protein, 14 aa, Homo sapiens
  CDR3 for alpha chain variable domain of TCR clone 21191 (TRAV2, TRAJ9)
CAVEDRSGGFKTIF

SEQ ID NO: 42382 - protein, 14 aa, Homo sapiens
  CDR3 for beta chain variable domain of TCR clone 21191 (TRBV12-4, TRBJ1-1)
CASSLGTGGTEAFF

SEQ ID NO: 42383 - protein, 18 aa, Homo sapiens
  CDR3 for alpha chain variable domain of TCR clone 21192 (TRAV13-1, TRAJ52)
CAAKNPNAGGTSYGKLTF

SEQ ID NO: 42384 - protein, 18 aa, Homo sapiens
  CDR3 for beta chain variable domain of TCR clone 21192 (TRBV11-2, TRBJ2-3)
CASSLGGASRGAPNTQYF

SEQ ID NO: 42385 - protein, 12 aa, Homo sapiens
  CDR3 for alpha chain variable domain of TCR clone 21193 (TRAV12-3, TRAJ17)
CAMTLTGNKLTF

SEQ ID NO: 42386 - protein, 10 aa, Homo sapiens
  CDR3 for beta chain variable domain of TCR clone 21193 (TRBV12-4, TRBJ2-3)
CQTATDTQYF

SEQ ID NO: 42387 - protein, 11 aa, Homo sapiens
  CDR3 for alpha chain variable domain of TCR clone 21194 (TRAV3, TRAJ13)
CSVTSYQKVTF

SEQ ID NO: 42388 - protein, 15 aa, Homo sapiens
  CDR3 for beta chain variable domain of TCR clone 21194 (TRBV7-9, TRBJ2-7)
CASSSSGLAVYEQYF

SEQ ID NO: 42389 - protein, 15 aa, Homo sapiens
  CDR3 for alpha chain variable domain of TCR clone 21195 (TRAV2, TRAJ9)
RAVEDRGTGGFKTIF

SEQ ID NO: 42390 - protein, 16 aa, Homo sapiens
  CDR3 for beta chain variable domain of TCR clone 21195 (TRBV24-1, TRBJ2-3)
CATSDPGTGATDTQYF

SEQ ID NO: 42391 - protein, 14 aa, Homo sapiens
  CDR3 for alpha chain variable domain of TCR clone 21196 (TRAV12-1, TRAJ3)
CVVNPGSSASKIIF

SEQ ID NO: 42392 - protein, 15 aa, Homo sapiens
  CDR3 for beta chain variable domain of TCR clone 21196 (TRBV5-7, TRBJ1-2)
CASSSPGQGNYGYTF

SEQ ID NO: 42393 - protein, 14 aa, Homo sapiens
  CDR3 for alpha chain variable domain of TCR clone 21197 (TRAV8-2, TRAJ37)
CVVSISGNTGKLIL

SEQ ID NO: 42394 - protein, 11 aa, Homo sapiens
  CDR3 for beta chain variable domain of TCR clone 21197 (TRBV18, TRBJ2-5)
CASSPRETQYF

SEQ ID NO: 42395 - protein, 14 aa, Homo sapiens
  CDR3 for alpha chain variable domain of TCR clone 21198 (TRAV12-2, TRAJ13)
CAVKKTGGYQKVTF

SEQ ID NO: 42396 - protein, 15 aa, Homo sapiens
  CDR3 for beta chain variable domain of TCR clone 21198 (TRBV29-1, TRBJ2-1)
CSGRDRKSSYNEQFF

SEQ ID NO: 42397 - protein, 11 aa, Homo sapiens
  CDR3 for alpha chain variable domain of TCR clone 21199 (TRAV2, TRAJ13)
CSSGGYQKVTF

SEQ ID NO: 42398 - protein, 16 aa, Homo sapiens
  CDR3 for beta chain variable domain of TCR clone 21199 (TRBV6-1, TRBJ2-5)
CASSETLDRGAETQYF

SEQ ID NO: 42399 - protein, 13 aa, Homo sapiens
  CDR3 for alpha chain variable domain of TCR clone 21200 (TRAV13-1, TRAJ5)
CAASDTGRRALTF

SEQ ID NO: 42400 - protein, 12 aa, Homo sapiens
  CDR3 for beta chain variable domain of TCR clone 21200 (TRBV28, TRBJ2-3)
CASSLYRDAQYF

SEQ ID NO: 42401 - protein, 13 aa, Homo sapiens
  CDR3 for alpha chain variable domain of TCR clone 21201 (TRAV1-1, TRAJ9)
CAAKNTGGFKTIF

SEQ ID NO: 42402 - protein, 14 aa, Homo sapiens
  CDR3 for beta chain variable domain of TCR clone 21201 (TRBV20-1, TRBJ2-1)
CSAQIGGPANEQFF

SEQ ID NO: 42403 - protein, 11 aa, Homo sapiens
  CDR3 for alpha chain variable domain of TCR clone 21202 (TRAV2, TRAJ20)
CAVLNDYKLSF

SEQ ID NO: 42404 - protein, 16 aa, Homo sapiens
  CDR3 for beta chain variable domain of TCR clone 21202 (TRBV11-1, TRBJ2-2)
CASSAEGLENTGELFF

SEQ ID NO: 42405 - protein, 15 aa, Homo sapiens
  CDR3 for alpha chain variable domain of TCR clone 21203 (TRAV20, TRAJ4)
CAVQVFSGGYNKLIL

SEQ ID NO: 42406 - protein, 14 aa, Homo sapiens
  CDR3 for beta chain variable domain of TCR clone 21203 (TRBV7-6, TRBJ2-3)
CASNSGGDANTQYF

SEQ ID NO: 42407 - protein, 12 aa, Homo sapiens
  CDR3 for alpha chain variable domain of TCR clone 21204 (TRAV12-3, TRAJ17)
CAMTLTGNKLTF

SEQ ID NO: 42408 - protein, 16 aa, Homo sapiens
  CDR3 for beta chain variable domain of TCR clone 21204 (TRBV5-5, TRBJ2-2)
CASSGRREGATGELFF

SEQ ID NO: 42409 - protein, 12 aa, Homo sapiens
  CDR3 for alpha chain variable domain of TCR clone 21205 (TRAV12-3, TRAJ20)
CAMVRGDYKFSF

SEQ ID NO: 42410 - protein, 14 aa, Homo sapiens
  CDR3 for beta chain variable domain of TCR clone 21205 (TRBV5-5, TRBJ1-5)
CASSGQGVDQPQHF

SEQ ID NO: 42411 - protein, 12 aa, Homo sapiens
  CDR3 for alpha chain variable domain of TCR clone 21206 (TRAV12-1, TRAJ40)
CVVYSGTYKYIF

SEQ ID NO: 42412 - protein, 18 aa, Homo sapiens
  CDR3 for beta chain variable domain of TCR clone 21206 (TRBV11-2, TRBJ2-3)
CASSLGGASRGAPKTQYF

SEQ ID NO: 42413 - protein, 14 aa, Homo sapiens
  CDR3 for alpha chain variable domain of TCR clone 21207 (TRAV19, TRAJ37)
CALRGSSNTGKLIF

SEQ ID NO: 42414 - protein, 13 aa, Homo sapiens
  CDR3 for beta chain variable domain of TCR clone 21207 (TRBV7-9, TRBJ2-3)
CASSPGSTDTQYF

SEQ ID NO: 42415 - protein, 15 aa, Homo sapiens
  CDR3 for alpha chain variable domain of TCR clone 21208 (TRAV2, TRAJ15)
CAVEDREQAGTALIF

SEQ ID NO: 42416 - protein, 13 aa, Homo sapiens
  CDR3 for beta chain variable domain of TCR clone 21208 (TRBV10-2, TRBJ2-3)
CASSGSGDHTQYF

SEQ ID NO: 42417 - protein, 22 aa, Homo sapiens
  CDR3 for alpha chain variable domain of TCR clone 21209 (TRAV21, )
CAVRQDAGSNHIQNPDPAVYQL

SEQ ID NO: 42418 - protein, 16 aa, Homo sapiens
  CDR3 for beta chain variable domain of TCR clone 21209 (TRBV4-2, TRBJ1-1)
CASRPLDGGGDTEAFF

SEQ ID NO: 42419 - protein, 14 aa, Homo sapiens
  CDR3 for alpha chain variable domain of TCR clone 21210 (TRAV29/DV5, TRAJ36)
CTARRKTGANNLFF

SEQ ID NO: 42420 - protein, 14 aa, Homo sapiens
  CDR3 for beta chain variable domain of TCR clone 21210 (TRBV12-5, TRBJ2-5)
CASGSRTHQETQYF

SEQ ID NO: 42421 - protein, 13 aa, Homo sapiens
  CDR3 for alpha chain variable domain of TCR clone 21211 (TRAV8-3, TRAJ28)
CAVGAVGSYQLNF

SEQ ID NO: 42422 - protein, 15 aa, Homo sapiens
  CDR3 for beta chain variable domain of TCR clone 21211 (TRBV7-9, TRBJ1-5)
CASSQGHQPNQPQHF

SEQ ID NO: 42423 - protein, 14 aa, Homo sapiens
  CDR3 for alpha chain variable domain of TCR clone 21212 (TRAV20, TRAJ56)
CAVQFGGANSKLTF

SEQ ID NO: 42424 - protein, 14 aa, Homo sapiens
  CDR3 for beta chain variable domain of TCR clone 21212 (TRBV20-1, TRBJ2-7)
CSAKRGRRSYEQYF

SEQ ID NO: 42425 - protein, 16 aa, Homo sapiens
  CDR3 for alpha chain variable domain of TCR clone 21213 (TRAV12-3, TRAJ53)
CAMSPGSGGSNYKLTF

SEQ ID NO: 42426 - protein, 11 aa, Homo sapiens
  CDR3 for beta chain variable domain of TCR clone 21213 (TRBV29-1, TRBJ2-5)
CSEDRTGIQYF

SEQ ID NO: 42427 - protein, 13 aa, Homo sapiens
  CDR3 for alpha chain variable domain of TCR clone 21214 (TRAV8-3, TRAJ36)
CAVGATGANNLFF

SEQ ID NO: 42428 - protein, 15 aa, Homo sapiens
  CDR3 for beta chain variable domain of TCR clone 21214 (TRBV7-2, TRBJ1-2)
CASSPRAGWNYGYTF

SEQ ID NO: 42429 - protein, 12 aa, Homo sapiens
  CDR3 for alpha chain variable domain of TCR clone 21215 (TRAV21, TRAJ58)
CAAETSGSRLTF

SEQ ID NO: 42430 - protein, 18 aa, Homo sapiens
  CDR3 for beta chain variable domain of TCR clone 21215 (TRBV20-1, TRBJ2-6)
CSAETTPTHGSGANVLTF

SEQ ID NO: 42431 - protein, 13 aa, Homo sapiens
  CDR3 for alpha chain variable domain of TCR clone 21216 (TRAV13-1, TRAJ5)
CAASDTGRRALTF

SEQ ID NO: 42432 - protein, 12 aa, Homo sapiens
  CDR3 for beta chain variable domain of TCR clone 21216 (TRBV28, TRBJ2-3)
CASSLYRDTQHF

SEQ ID NO: 42433 - protein, 15 aa, Homo sapiens
  CDR3 for alpha chain variable domain of TCR clone 21217 (TRAV35, TRAJ50)
CAGQLRKTSYDEVIF

SEQ ID NO: 42434 - protein, 12 aa, Homo sapiens
  CDR3 for beta chain variable domain of TCR clone 21217 (TRBV5-1, TRBJ2-5)
CASSLGLETQYF

SEQ ID NO: 42435 - protein, 12 aa, Homo sapiens
  CDR3 for alpha chain variable domain of TCR clone 21218 (TRAV8-3, TRAJ20)
CAVGANNYKLSF

SEQ ID NO: 42436 - protein, 16 aa, Homo sapiens
  CDR3 for beta chain variable domain of TCR clone 21218 (TRBV19, TRBJ2-2)
CASRSPGTGATGELFF

SEQ ID NO: 42437 - protein, 14 aa, Homo sapiens
  CDR3 for alpha chain variable domain of TCR clone 21219 (TRAV3, TRAJ17)
CAVRGAAAGNKLTF

SEQ ID NO: 42438 - protein, 15 aa, Homo sapiens
  CDR3 for beta chain variable domain of TCR clone 21219 (TRBV3-1, TRBJ2-7)
CASSQVRQGAYEQYF

SEQ ID NO: 42439 - protein, 17 aa, Homo sapiens
  CDR3 for alpha chain variable domain of TCR clone 21220 (TRAV3, TRAJ6)
CAVRDGPRAGGSYIPTF

SEQ ID NO: 42440 - protein, 20 aa, Homo sapiens
  CDR3 for beta chain variable domain of TCR clone 21220 (TRBV28, TRBJ2-1)
CASTPTGRSPGLAGGNEQFF

SEQ ID NO: 42441 - protein, 11 aa, Homo sapiens
  CDR3 for alpha chain variable domain of TCR clone 21221 (TRAV17, TRAJ49)
CATNTGDQFYF

SEQ ID NO: 42442 - protein, 12 aa, Homo sapiens
  CDR3 for beta chain variable domain of TCR clone 21221 (TRBV2, TRBJ2-7)
CASSGGSGIPYF

SEQ ID NO: 42443 - protein, 13 aa, Homo sapiens
  CDR3 for alpha chain variable domain of TCR clone 21222 (TRAV26-1, )
CIVSHRVEGIWNQ

SEQ ID NO: 42444 - protein, 14 aa, Homo sapiens
  CDR3 for beta chain variable domain of TCR clone 21222 (TRBV20-1, TRBJ2-7)
CSAWTALSSYEQYF

SEQ ID NO: 42445 - protein, 16 aa, Homo sapiens
  CDR3 for alpha chain variable domain of TCR clone 21223 (TRAV3, TRAJ23)
YAVKIGIYNQGGKLIF

SEQ ID NO: 42446 - protein, 17 aa, Homo sapiens
  CDR3 for beta chain variable domain of TCR clone 21223 (TRBV10-3, TRBJ2-6)
CAISESTAPSGANVLTF

SEQ ID NO: 42447 - protein, 13 aa, Homo sapiens
  CDR3 for alpha chain variable domain of TCR clone 21224 (TRAV8-1, TRAJ28)
CAVSGAGSYQLTF

SEQ ID NO: 42448 - protein, 14 aa, Homo sapiens
  CDR3 for beta chain variable domain of TCR clone 21224 (TRBV7-2, TRBJ2-2)
CASRGQGAAGELFL

SEQ ID NO: 42449 - protein, 17 aa, Homo sapiens
  CDR3 for alpha chain variable domain of TCR clone 21225 (TRAV23/DV6, TRAJ57)
CAASSTLSQGGSEKPVF

SEQ ID NO: 42450 - protein, 14 aa, Homo sapiens
  CDR3 for beta chain variable domain of TCR clone 21225 (TRBV25-1, TRBJ1-1)
CASTHLGGNTEAFF

SEQ ID NO: 42451 - protein, 15 aa, Homo sapiens
  CDR3 for alpha chain variable domain of TCR clone 21226 (TRAV12-1, TRAJ44)
CVADLPTGTASKPTF

SEQ ID NO: 42452 - protein, 13 aa, Homo sapiens
  CDR3 for beta chain variable domain of TCR clone 21226 (TRBV6-5, TRBJ2-5)
CASSPQGGETQYF

SEQ ID NO: 42453 - protein, 16 aa, Homo sapiens
  CDR3 for alpha chain variable domain of TCR clone 21227 (TRAV21, TRAJ52)
CAVTNAGGTSYGKLTF

SEQ ID NO: 42454 - protein, 11 aa, Homo sapiens
  CDR3 for beta chain variable domain of TCR clone 21227 (TRBV2, TRBJ1-1)
CAGREGTEAFF

SEQ ID NO: 42455 - protein, 14 aa, Homo sapiens
  CDR3 for alpha chain variable domain of TCR clone 21228 (TRAV13-2, TRAJ28)
CAEASGAGSYQLTF

SEQ ID NO: 42456 - protein, 12 aa, Homo sapiens
  CDR3 for beta chain variable domain of TCR clone 21228 (TRBV12-4, TRBJ2-7)
CASSLGGYEQYF

SEQ ID NO: 42457 - protein, 13 aa, Homo sapiens
  CDR3 for alpha chain variable domain of TCR clone 21229 (TRAV3, TRAJ27)
CAVRPLGAGKSTF

SEQ ID NO: 42458 - protein, 13 aa, Homo sapiens
  CDR3 for beta chain variable domain of TCR clone 21229 (TRBV7-9, TRBJ2-3)
CASSPGSTDKQYF

SEQ ID NO: 42459 - protein, 15 aa, Homo sapiens
  CDR3 for alpha chain variable domain of TCR clone 21230 (TRAV26-1, TRAJ44)
CIVRANTGTARKLTF

SEQ ID NO: 42460 - protein, 16 aa, Homo sapiens
  CDR3 for beta chain variable domain of TCR clone 21230 (TRBV7-7, TRBJ2-1)
CASSLASGTSYNEQFF

SEQ ID NO: 42461 - protein, 16 aa, Homo sapiens
  CDR3 for alpha chain variable domain of TCR clone 21231 (TRAV8-1, TRAJ42)
CAVTSRYGGSQGNLIF

SEQ ID NO: 42462 - protein, 12 aa, Homo sapiens
  CDR3 for beta chain variable domain of TCR clone 21231 (TRBV6-3, TRBJ2-7)
CANSLGRRGLYF

SEQ ID NO: 42463 - protein, 20 aa, Homo sapiens
  CDR3 for alpha chain variable domain of TCR clone 21232 (TRAV26-1, TRAJ42)
CCVLLHRQTCYGGSQGNLIF

SEQ ID NO: 42464 - protein, 16 aa, Homo sapiens
  CDR3 for beta chain variable domain of TCR clone 21232 (TRBV7-3, TRBJ2-2)
CASSLKRGTLSGELFF

SEQ ID NO: 42465 - protein, 14 aa, Homo sapiens
  CDR3 for alpha chain variable domain of TCR clone 21233 (TRAV8-3, TRAJ9)
CAVVYNTGGFKTIF

SEQ ID NO: 42466 - protein, 14 aa, Homo sapiens
  CDR3 for beta chain variable domain of TCR clone 21233 (TRBV7-3, TRBJ2-2)
CASGSGGYTGELFF

SEQ ID NO: 42467 - protein, 11 aa, Homo sapiens
  CDR3 for alpha chain variable domain of TCR clone 21234 (TRAV17, TRAJ9)
CAKTGGFKTIF

SEQ ID NO: 42468 - protein, 14 aa, Homo sapiens
  CDR3 for beta chain variable domain of TCR clone 21234 (TRBV7-9, TRBJ2-2)
CASSGLADTGELFF

SEQ ID NO: 42469 - protein, 13 aa, Homo sapiens
  CDR3 for alpha chain variable domain of TCR clone 21235 (TRAV12-2, TRAJ20)
CAVYPSNDYKLSF

SEQ ID NO: 42470 - protein, 15 aa, Homo sapiens
  CDR3 for beta chain variable domain of TCR clone 21235 (TRBV27, TRBJ2-5)
CASSLSPRGGETQYF

SEQ ID NO: 42471 - protein, 14 aa, Homo sapiens
  CDR3 for alpha chain variable domain of TCR clone 21236 (TRAV26-1, TRAJ38)
CIADNAANNRKLIW

SEQ ID NO: 42472 - protein, 13 aa, Homo sapiens
  CDR3 for beta chain variable domain of TCR clone 21236 (TRBV20-1, TRBJ1-1)
CSARGGGNTEAFF

SEQ ID NO: 42473 - protein, 12 aa, Homo sapiens
  CDR3 for alpha chain variable domain of TCR clone 21237 (TRAV13-1, TRAJ53)
AASGGRNYKLTF

SEQ ID NO: 42474 - protein, 15 aa, Homo sapiens
  CDR3 for beta chain variable domain of TCR clone 21237 (TRBV5-1, TRBJ2-1)
CASSPPRAPYNEQFF

SEQ ID NO: 42475 - protein, 18 aa, Homo sapiens
  CDR3 for alpha chain variable domain of TCR clone 21238 (TRAV13-1, TRAJ52)
CAASKRSAGGTSCGKLTF

SEQ ID NO: 42476 - protein, 13 aa, Homo sapiens
  CDR3 for beta chain variable domain of TCR clone 21238 (TRBV12-4, TRBJ1-2)
CASSLRQGKGYTF

SEQ ID NO: 42477 - protein, 13 aa, Homo sapiens
  CDR3 for alpha chain variable domain of TCR clone 21239 (TRAV21, TRAJ26)
CAVLDNYGQNFVF

SEQ ID NO: 42478 - protein, 16 aa, Homo sapiens
  CDR3 for beta chain variable domain of TCR clone 21239 (TRBV29-1, TRBJ2-2)
CSVETRASGDTGELFF

SEQ ID NO: 42479 - protein, 12 aa, Homo sapiens
  CDR3 for alpha chain variable domain of TCR clone 21240 (TRAV2, TRAJ10)
CASTGGGNKLTS

SEQ ID NO: 42480 - protein, 14 aa, Homo sapiens
  CDR3 for beta chain variable domain of TCR clone 21240 (TRBV7-2, TRBJ2-2)
CASRGQGAAGELFF

SEQ ID NO: 42481 - protein, 16 aa, Homo sapiens
  CDR3 for alpha chain variable domain of TCR clone 21241 (TRAV1-2, TRAJ10)
CAVRGVLTGGGNKLTF

SEQ ID NO: 42482 - protein, 14 aa, Homo sapiens
  CDR3 for beta chain variable domain of TCR clone 21241 (TRBV19, TRBJ2-1)
CASPTFVLSGEQFF

SEQ ID NO: 42483 - protein, 13 aa, Homo sapiens
  CDR3 for alpha chain variable domain of TCR clone 21242 (TRAV13-2, TRAJ53)
CAENMGSNYKLTF

SEQ ID NO: 42484 - protein, 14 aa, Homo sapiens
  CDR3 for beta chain variable domain of TCR clone 21242 (TRBV25-1, TRBJ1-1)
CASTHLGGNTEAFF

SEQ ID NO: 42485 - protein, 20 aa, Homo sapiens
  CDR3 for alpha chain variable domain of TCR clone 21243 (TRAV12-1, TRAJ42)
SSVIQPPTSVKGGSQGNLIF

SEQ ID NO: 42486 - protein, 18 aa, Homo sapiens
  CDR3 for beta chain variable domain of TCR clone 21243 (TRBV11-2, TRBJ2-3)
CASSLGGASRGAPNTRYF

SEQ ID NO: 42487 - protein, 10 aa, Homo sapiens
  CDR3 for alpha chain variable domain of TCR clone 21244 (TRAV12-3, TRAJ18)
CAMSAEARPW

SEQ ID NO: 42488 - protein, 13 aa, Homo sapiens
  CDR3 for beta chain variable domain of TCR clone 21244 (TRBV15, TRBJ1-6)
CATSGGLNSPLHF

SEQ ID NO: 42489 - protein, 16 aa, Homo sapiens
  CDR3 for alpha chain variable domain of TCR clone 21245 (TRAV30, TRAJ24)
CGTEIVDADSWGKFQF

SEQ ID NO: 42490 - protein, 15 aa, Homo sapiens
  CDR3 for beta chain variable domain of TCR clone 21245 (TRBV11-2, TRBJ1-2)
CASSLEGVQRNGYTF

SEQ ID NO: 42491 - protein, 15 aa, Homo sapiens
  CDR3 for alpha chain variable domain of TCR clone 21246 (TRAV8-3, TRAJ45)
CASSYSGGGADGLTF

SEQ ID NO: 42492 - protein, 13 aa, Homo sapiens
  CDR3 for beta chain variable domain of TCR clone 21246 (TRBV10-3, TRBJ2-7)
CASKLAVIYEQYF

SEQ ID NO: 42493 - protein, 13 aa, Homo sapiens
  CDR3 for alpha chain variable domain of TCR clone 21247 (TRAV27, TRAJ6)
CAGGTRGSYIPTF

SEQ ID NO: 42494 - protein, 16 aa, Homo sapiens
  CDR3 for beta chain variable domain of TCR clone 21247 (TRBV7-3, TRBJ2-2)
CASSLKRGTLSGELFF

SEQ ID NO: 42495 - protein, 15 aa, Homo sapiens
  CDR3 for alpha chain variable domain of TCR clone 21248 (TRAV34, TRAJ38)
CGADFTPGNNRKLTW

SEQ ID NO: 42496 - protein, 16 aa, Homo sapiens
  CDR3 for beta chain variable domain of TCR clone 21248 (TRBV12-5, TRBJ2-5)
CASGPRTSGNQETQYF

SEQ ID NO: 42497 - protein, 12 aa, Homo sapiens
  CDR3 for alpha chain variable domain of TCR clone 21249 (TRAV21, TRAJ31)
CAVWGNNARLMF

SEQ ID NO: 42498 - protein, 16 aa, Homo sapiens
  CDR3 for beta chain variable domain of TCR clone 21249 (TRBV27, TRBJ2-5)
CASSYGPGGQKETQYF

SEQ ID NO: 42499 - protein, 13 aa, Homo sapiens
  CDR3 for alpha chain variable domain of TCR clone 21250 (TRAV25, TRAJ26)
CAGMDNYGQNFVF

SEQ ID NO: 42500 - protein, 13 aa, Homo sapiens
  CDR3 for beta chain variable domain of TCR clone 21250 (TRBV7-3, TRBJ2-1)
CASSLDSYNEQFF

SEQ ID NO: 42501 - protein, 13 aa, Homo sapiens
  CDR3 for alpha chain variable domain of TCR clone 21251 (TRAV29/DV5, TRAJ31)
CAASRNNNARLMF

SEQ ID NO: 42502 - protein, 12 aa, Homo sapiens
  CDR3 for beta chain variable domain of TCR clone 21251 (TRBV14, TRBJ2-5)
CASSQLKETRYF

SEQ ID NO: 42503 - protein, 12 aa, Homo sapiens
  CDR3 for alpha chain variable domain of TCR clone 21252 (TRAV17, TRAJ57)
CATDGRSEKLVF

SEQ ID NO: 42504 - protein, 13 aa, Homo sapiens
  CDR3 for beta chain variable domain of TCR clone 21252 (TRBV7-9, TRBJ2-7)
CASSFAGAYEQYF

SEQ ID NO: 42505 - protein, 12 aa, Homo sapiens
  CDR3 for alpha chain variable domain of TCR clone 21253 (TRAV2, TRAJ9)
CAVGAGGFKTIF

SEQ ID NO: 42506 - protein, 16 aa, Homo sapiens
  CDR3 for beta chain variable domain of TCR clone 21253 (TRBV13, TRBJ2-2)
CASSPRTGEQTGELFF

SEQ ID NO: 42507 - protein, 13 aa, Homo sapiens
  CDR3 for alpha chain variable domain of TCR clone 21254 (TRAV8-3, TRAJ28)
CAVGAVGSYQLTF

SEQ ID NO: 42508 - protein, 14 aa, Homo sapiens
  CDR3 for beta chain variable domain of TCR clone 21254 (TRBV7-2, TRBJ2-7)
CASRSQGAAYDQYF

SEQ ID NO: 42509 - protein, 13 aa, Homo sapiens
  CDR3 for alpha chain variable domain of TCR clone 21255 (TRAV22, TRAJ29)
CAVGGSGNTSLVF

SEQ ID NO: 42510 - protein, 13 aa, Homo sapiens
  CDR3 for beta chain variable domain of TCR clone 21255 (TRBV4-2, TRBJ1-1)
CASSQAGNTEAFF

SEQ ID NO: 42511 - protein, 11 aa, Homo sapiens
  CDR3 for alpha chain variable domain of TCR clone 21256 (TRAV21, TRAJ20)
CAARDDYKPSF

SEQ ID NO: 42512 - protein, 14 aa, Homo sapiens
  CDR3 for beta chain variable domain of TCR clone 21256 (TRBV12-4, TRBJ1-1)
CASSFSQMNTEAFF

SEQ ID NO: 42513 - protein, 10 aa, Homo sapiens
  CDR3 for alpha chain variable domain of TCR clone 21257 (TRAV17, TRAJ36)
CATVAGNHFF

SEQ ID NO: 42514 - protein, 12 aa, Homo sapiens
  CDR3 for beta chain variable domain of TCR clone 21257 (TRBV11-2, TRBJ2-4)
CASSSASGSEYF

SEQ ID NO: 42515 - protein, 13 aa, Homo sapiens
  CDR3 for alpha chain variable domain of TCR clone 21258 (TRAV2, TRAJ15)
CAVASQAGTALIL

SEQ ID NO: 42516 - protein, 14 aa, Homo sapiens
  CDR3 for beta chain variable domain of TCR clone 21258 (TRBV20-1, TRBJ1-1)
CSAQTRIGGTEAFF

SEQ ID NO: 42517 - protein, 13 aa, Homo sapiens
  CDR3 for alpha chain variable domain of TCR clone 21259 (TRAV12-3, TRAJ33)
CAMSVNSNYQLIW

SEQ ID NO: 42518 - protein, 13 aa, Homo sapiens
  CDR3 for beta chain variable domain of TCR clone 21259 (TRBV7-2, TRBJ2-2)
CASSLAVTRELFF

SEQ ID NO: 42519 - protein, 13 aa, Homo sapiens
  CDR3 for alpha chain variable domain of TCR clone 21260 (TRAV27, TRAJ45)
CRSSGGGAEGLTF

SEQ ID NO: 42520 - protein, 17 aa, Homo sapiens
  CDR3 for beta chain variable domain of TCR clone 21260 (TRBV11-2, TRBJ2-1)
CASSLYPPGVEYNEQFF

SEQ ID NO: 42521 - protein, 14 aa, Homo sapiens
  CDR3 for alpha chain variable domain of TCR clone 21261 (TRAV1-2, TRAJ16)
CAVNRFSDGQKLLF

SEQ ID NO: 42522 - protein, 15 aa, Homo sapiens
  CDR3 for beta chain variable domain of TCR clone 21261 (TRBV9, TRBJ1-6)
CAISVAGTGDSPLHF

SEQ ID NO: 42523 - protein, 16 aa, Homo sapiens
  CDR3 for alpha chain variable domain of TCR clone 21262 (TRAV4, TRAJ9)
CLVGDPNRPGGFKTIF

SEQ ID NO: 42524 - protein, 16 aa, Homo sapiens
  CDR3 for beta chain variable domain of TCR clone 21262 (TRBV28, TRBJ1-4)
CASSPPYRGRGEKLFF

SEQ ID NO: 42525 - protein, 13 aa, Homo sapiens
  CDR3 for alpha chain variable domain of TCR clone 21263 (TRAV13-1, TRAJ6)
CVASKGGSYIPTF

SEQ ID NO: 42526 - protein, 14 aa, Homo sapiens
  CDR3 for beta chain variable domain of TCR clone 21263 (TRBV7-2, TRBJ2-1)
CASSLGVGYNEQFF

SEQ ID NO: 42527 - protein, 23 aa, Homo sapiens
  CDR3 for alpha chain variable domain of TCR clone 21264 (TRAV26-1, TRAJ38)
CIADNAGNNHIQNPDPAVYPLRD

SEQ ID NO: 42528 - protein, 12 aa, Homo sapiens
  CDR3 for beta chain variable domain of TCR clone 21264 (TRBV11-2, TRBJ2-2)
CASSLGGGELFF

SEQ ID NO: 42529 - protein, 16 aa, Homo sapiens
  CDR3 for alpha chain variable domain of TCR clone 21265 (TRAV4, TRAJ22)
CLVGDLYSGSASQLTF

SEQ ID NO: 42530 - protein, 16 aa, Homo sapiens
  CDR3 for beta chain variable domain of TCR clone 21265 (TRBV7-9, TRBJ2-1)
CASSDVAGGSYNEQFF

SEQ ID NO: 42531 - protein, 15 aa, Homo sapiens
  CDR3 for alpha chain variable domain of TCR clone 21266 (TRAV27, TRAJ38)
CAARRNASNNRKLIW

SEQ ID NO: 42532 - protein, 13 aa, Homo sapiens
  CDR3 for beta chain variable domain of TCR clone 21266 (TRBV12-5, TRBJ2-3)
CASGDRQSDTQYF

SEQ ID NO: 42533 - protein, 17 aa, Homo sapiens
  CDR3 for alpha chain variable domain of TCR clone 21267 (TRAV26-2, TRAJ42)
CILRDVGHGGSQGNLIF

SEQ ID NO: 42534 - protein, 16 aa, Homo sapiens
  CDR3 for beta chain variable domain of TCR clone 21267 (TRBV12-4, TRBJ2-7)
CASSLIGGTGTYEQYF

SEQ ID NO: 42535 - protein, 12 aa, Homo sapiens
  CDR3 for alpha chain variable domain of TCR clone 21268 (TRAV21, TRAJ33)
CAKMDSNYQLIW

SEQ ID NO: 42536 - protein, 14 aa, Homo sapiens
  CDR3 for beta chain variable domain of TCR clone 21268 (TRBV2, TRBJ2-7)
CASSRTSGGYEQYF

SEQ ID NO: 42537 - protein, 13 aa, Homo sapiens
  CDR3 for alpha chain variable domain of TCR clone 21269 (TRAV1-1, TRAJ9)
CAAKNTGGFKTIF

SEQ ID NO: 42538 - protein, 14 aa, Homo sapiens
  CDR3 for beta chain variable domain of TCR clone 21269 (TRBV20-1, TRBJ2-1)
CSAKIGGSANEQFF

SEQ ID NO: 42539 - protein, 15 aa, Homo sapiens
  CDR3 for alpha chain variable domain of TCR clone 21270 (TRAV1-1, TRAJ39)
CAVRAPLIMQATCSP

SEQ ID NO: 42540 - protein, 13 aa, Homo sapiens
  CDR3 for beta chain variable domain of TCR clone 21270 (TRBV12-4, TRBJ1-5)
CASSPDRAQPQHF

SEQ ID NO: 42541 - protein, 20 aa, Homo sapiens
  CDR3 for alpha chain variable domain of TCR clone 21271 (TRAV12-1, TRAJ42)
SSVIQPPTSVKGGSQGSLIF

SEQ ID NO: 42542 - protein, 15 aa, Homo sapiens
  CDR3 for beta chain variable domain of TCR clone 21271 (TRBV4-1, TRBJ2-7)
CASSQNTGRLYEQYF

SEQ ID NO: 42543 - protein, 13 aa, Homo sapiens
  CDR3 for alpha chain variable domain of TCR clone 21272 (TRAV27, TRAJ54)
CAGAGQGAQKLVL

SEQ ID NO: 42544 - protein, 15 aa, Homo sapiens
  CDR3 for beta chain variable domain of TCR clone 21272 (TRBV18, TRBJ2-6)
CASSPSYAGANVLTF

SEQ ID NO: 42545 - protein, 13 aa, Homo sapiens
  CDR3 for alpha chain variable domain of TCR clone 21273 (TRAV8-3, TRAJ36)
CAVGATGANNLLF

SEQ ID NO: 42546 - protein, 16 aa, Homo sapiens
  CDR3 for beta chain variable domain of TCR clone 21273 (TRBV20-1, TRBJ1-4)
CSAPGQGLLTNEKLFF

SEQ ID NO: 42547 - protein, 14 aa, Homo sapiens
  CDR3 for alpha chain variable domain of TCR clone 21274 (TRAV26-1, TRAJ34)
CIVRVAYNTDKLIF

SEQ ID NO: 42548 - protein, 15 aa, Homo sapiens
  CDR3 for beta chain variable domain of TCR clone 21274 (TRBV20-1, TRBJ2-7)
CSARVPAAYLYEQYF

SEQ ID NO: 42549 - protein, 14 aa, Homo sapiens
  CDR3 for alpha chain variable domain of TCR clone 21275 (TRAV1-2, TRAJ8)
CAVREDTGFQKLVF

SEQ ID NO: 42550 - protein, 14 aa, Homo sapiens
  CDR3 for beta chain variable domain of TCR clone 21275 (TRBV7-9, TRBJ2-1)
CASSPRDSLYEQFF

SEQ ID NO: 42551 - protein, 14 aa, Homo sapiens
  CDR3 for alpha chain variable domain of TCR clone 21276 (TRAV1-2, TRAJ33)
CAVRAPDSNYQLIW

SEQ ID NO: 42552 - protein, 15 aa, Homo sapiens
  CDR3 for beta chain variable domain of TCR clone 21276 (TRBV19, TRBJ2-1)
CASSINREPSHEQFF

SEQ ID NO: 42553 - protein, 10 aa, Homo sapiens
  CDR3 for alpha chain variable domain of TCR clone 21277 (TRAV23/DV6, TRAJ57)
CAASSTLSQG

SEQ ID NO: 42554 - protein, 14 aa, Homo sapiens
  CDR3 for beta chain variable domain of TCR clone 21277 (TRBV25-1, TRBJ1-1)
CASTHLGGNIEAFF

SEQ ID NO: 42555 - protein, 15 aa, Homo sapiens
  CDR3 for alpha chain variable domain of TCR clone 21278 (TRAV12-2, TRAJ53)
CAVNGGGGSNYKLTF

SEQ ID NO: 42556 - protein, 13 aa, Homo sapiens
  CDR3 for beta chain variable domain of TCR clone 21278 (TRBV9, TRBJ2-1)
CASSPSGGNEQFF

SEQ ID NO: 42557 - protein, 14 aa, Homo sapiens
  CDR3 for alpha chain variable domain of TCR clone 21279 (TRAV13-1, TRAJ44)
CAAKATGTASKLTF

SEQ ID NO: 42558 - protein, 13 aa, Homo sapiens
  CDR3 for beta chain variable domain of TCR clone 21279 (TRBV5-5, TRBJ1-2)
CASSFWRGEDYSF

SEQ ID NO: 42559 - protein, 18 aa, Homo sapiens
  CDR3 for alpha chain variable domain of TCR clone 21280 (TRAV38-2/DV8, TRAJ42)
CAYRSADLTGGSQGNLIF

SEQ ID NO: 42560 - protein, 12 aa, Homo sapiens
  CDR3 for beta chain variable domain of TCR clone 21280 (TRBV11-3, TRBJ2-2)
CASSLGGGELFF

SEQ ID NO: 42561 - protein, 13 aa, Homo sapiens
  CDR3 for alpha chain variable domain of TCR clone 21281 (TRAV35, TRAJ48)
CAGHEFGNEKLTF

SEQ ID NO: 42562 - protein, 16 aa, Homo sapiens
  CDR3 for beta chain variable domain of TCR clone 21281 (TRBV12-5, TRBJ2-5)
CASGPRTSGDQETQYF

SEQ ID NO: 42563 - protein, 12 aa, Homo sapiens
  CDR3 for alpha chain variable domain of TCR clone 21282 (TRAV8-3, TRAJ20)
CAVGANDYKLSF

SEQ ID NO: 42564 - protein, 16 aa, Homo sapiens
  CDR3 for beta chain variable domain of TCR clone 21282 (TRBV19, TRBJ2-2)
CASRSPGTGATGEMFF

SEQ ID NO: 42565 - protein, 13 aa, Homo sapiens
  CDR3 for alpha chain variable domain of TCR clone 21283 (TRAV8-3, TRAJ28)
CAVGAVGSYQLTF

SEQ ID NO: 42566 - protein, 14 aa, Homo sapiens
  CDR3 for beta chain variable domain of TCR clone 21283 (TRBV7-2, TRBJ2-7)
CASRSQGAAYERYF

SEQ ID NO: 42567 - protein, 14 aa, Homo sapiens
  CDR3 for alpha chain variable domain of TCR clone 21284 (TRAV12-2, TRAJ5)
CAVNRSTGRRALTF

SEQ ID NO: 42568 - protein, 12 aa, Homo sapiens
  CDR3 for beta chain variable domain of TCR clone 21284 (TRBV19, TRBJ1-5)
CASSIAQQPQHS

SEQ ID NO: 42569 - protein, 15 aa, Homo sapiens
  CDR3 for alpha chain variable domain of TCR clone 21285 (TRAV3, TRAJ4)
CAVRDGTGGHNKLIF

SEQ ID NO: 42570 - protein, 16 aa, Homo sapiens
  CDR3 for beta chain variable domain of TCR clone 21285 (TRBV27, TRBJ2-2)
CASSSSGVSNTGELFF

SEQ ID NO: 42571 - protein, 14 aa, Homo sapiens
  CDR3 for alpha chain variable domain of TCR clone 21286 (TRAV12-3, TRAJ22)
CAMSLFGSARQLTF

SEQ ID NO: 42572 - protein, 11 aa, Homo sapiens
  CDR3 for beta chain variable domain of TCR clone 21286 (TRBV12-4, TRBJ2-2)
CASSSAGELFV

SEQ ID NO: 42573 - protein, 14 aa, Homo sapiens
  CDR3 for alpha chain variable domain of TCR clone 21287 (TRAV1-2, TRAJ16)
CAVNRFSDGQKLLF

SEQ ID NO: 42574 - protein, 11 aa, Homo sapiens
  CDR3 for beta chain variable domain of TCR clone 21287 (TRBV19, TRBJ1-1)
CASSIGSEAFF

SEQ ID NO: 42575 - protein, 12 aa, Homo sapiens
  CDR3 for alpha chain variable domain of TCR clone 21288 (TRAV3, TRAJ39)
CAVIKWSNMLTF

SEQ ID NO: 42576 - protein, 14 aa, Homo sapiens
  CDR3 for beta chain variable domain of TCR clone 21288 (TRBV7-8, TRBJ2-3)
CASSFPDGQDTQYF

SEQ ID NO: 42577 - protein, 12 aa, Homo sapiens
  CDR3 for alpha chain variable domain of TCR clone 21289 (TRAV13-1, TRAJ9)
CASHTGGFKTIF

SEQ ID NO: 42578 - protein, 18 aa, Homo sapiens
  CDR3 for beta chain variable domain of TCR clone 21289 (TRBV11-2, TRBJ2-3)
CASSFGGASRGAPNTQYF

SEQ ID NO: 42579 - protein, 12 aa, Homo sapiens
  CDR3 for alpha chain variable domain of TCR clone 21290 (TRAV13-1, TRAJ53)
AASGGSNHKLTF

SEQ ID NO: 42580 - protein, 15 aa, Homo sapiens
  CDR3 for beta chain variable domain of TCR clone 21290 (TRBV5-1, TRBJ2-1)
CASSPPRAPYNEQFF

SEQ ID NO: 42581 - protein, 14 aa, Homo sapiens
  CDR3 for alpha chain variable domain of TCR clone 21291 (TRAV38-1, TRAJ45)
CAYYSGGGAGGLTF

SEQ ID NO: 42582 - protein, 20 aa, Homo sapiens
  CDR3 for beta chain variable domain of TCR clone 21291 (TRBV28, TRBJ2-1)
CASTPIGRSPGLAGGNEQFF

SEQ ID NO: 42583 - protein, 13 aa, Homo sapiens
  CDR3 for alpha chain variable domain of TCR clone 21292 (TRAV17, TRAJ5)
CAPTDTGRRALTF

SEQ ID NO: 42584 - protein, 14 aa, Homo sapiens
  CDR3 for beta chain variable domain of TCR clone 21292 (TRBV19, TRBJ2-1)
CASPTFVLSGEQFF

SEQ ID NO: 42585 - protein, 15 aa, Homo sapiens
  CDR3 for alpha chain variable domain of TCR clone 21293 (TRAV8-3, TRAJ45)
CASSYSGGGADGLTF

SEQ ID NO: 42586 - protein, 13 aa, Homo sapiens
  CDR3 for beta chain variable domain of TCR clone 21293 (TRBV10-3, TRBJ2-7)
CSSKLAVNYEQYF

SEQ ID NO: 42587 - protein, 12 aa, Homo sapiens
  CDR3 for alpha chain variable domain of TCR clone 21294 (TRAV12-3, TRAJ3)
CAIDSSASKIIF

SEQ ID NO: 42588 - protein, 17 aa, Homo sapiens
  CDR3 for beta chain variable domain of TCR clone 21294 (TRBV7-9, TRBJ2-3)
CASSLEEAGAYPDTQCF

SEQ ID NO: 42589 - protein, 12 aa, Homo sapiens
  CDR3 for alpha chain variable domain of TCR clone 21295 (TRAV21, TRAJ11)
CAATSGYSTLTF

SEQ ID NO: 42590 - protein, 14 aa, Homo sapiens
  CDR3 for beta chain variable domain of TCR clone 21295 (TRBV20-1, TRBJ2-7)
GSAPELAGVGEQYF

SEQ ID NO: 42591 - protein, 14 aa, Homo sapiens
  CDR3 for alpha chain variable domain of TCR clone 21296 (TRAV8-4, TRAJ8)
CAVSVGTGFRKLVF

SEQ ID NO: 42592 - protein, 15 aa, Homo sapiens
  CDR3 for beta chain variable domain of TCR clone 21296 (TRBV2, TRBJ2-3)
CASSGEGTGTDTQYF

SEQ ID NO: 42593 - protein, 18 aa, Homo sapiens
  CDR3 for alpha chain variable domain of TCR clone 21297 (TRAV13-1, TRAJ52)
CAASKRSAGGTSYGKLTF

SEQ ID NO: 42594 - protein, 13 aa, Homo sapiens
  CDR3 for beta chain variable domain of TCR clone 21297 (TRBV12-4, TRBJ1-2)
CASNLRQGKGYTF

SEQ ID NO: 42595 - protein, 13 aa, Homo sapiens
  CDR3 for alpha chain variable domain of TCR clone 21298 (TRAV27, TRAJ49)
CAPRPYTGNQFYF

SEQ ID NO: 42596 - protein, 16 aa, Homo sapiens
  CDR3 for beta chain variable domain of TCR clone 21298 (TRBV4-1, TRBJ1-2)
CASSQDAGQVLYGYSF

SEQ ID NO: 42597 - protein, 15 aa, Homo sapiens
  CDR3 for alpha chain variable domain of TCR clone 21299 (TRAV26-1, TRAJ40)
CIVRVTTSGTYKYIF

SEQ ID NO: 42598 - protein, 12 aa, Homo sapiens
  CDR3 for beta chain variable domain of TCR clone 21299 (TRBV7-9, TRBJ1-4)
CASSTDREELFF

SEQ ID NO: 42599 - protein, 11 aa, Homo sapiens
  CDR3 for alpha chain variable domain of TCR clone 21300 (TRAV2, TRAJ13)
CASGGYQKVTF

SEQ ID NO: 42600 - protein, 19 aa, Homo sapiens
  CDR3 for beta chain variable domain of TCR clone 21300 (TRBV25-1, TRBJ2-2)
CAILVYRVDRGRKTGELFF

SEQ ID NO: 42601 - protein, 14 aa, Homo sapiens
  CDR3 for alpha chain variable domain of TCR clone 21301 (TRAV12-2, TRAJ13)
CAVKKTGGYQKVTF

SEQ ID NO: 42602 - protein, 15 aa, Homo sapiens
  CDR3 for beta chain variable domain of TCR clone 21301 (TRBV19, TRBJ1-1)
CASTSGRIQNTEAFF

SEQ ID NO: 42603 - protein, 17 aa, Homo sapiens
  CDR3 for alpha chain variable domain of TCR clone 21302 (TRAV12-3, TRAJ6)
CAMSARGGAGGSYIPTF

SEQ ID NO: 42604 - protein, 12 aa, Homo sapiens
  CDR3 for beta chain variable domain of TCR clone 21302 (TRBV12-4, TRBJ2-3)
CASGTLPDTQYF

SEQ ID NO: 42605 - protein, 12 aa, Homo sapiens
  CDR3 for alpha chain variable domain of TCR clone 21303 (TRAV17, TRAJ12)
CATLLSSYKLIF

SEQ ID NO: 42606 - protein, 16 aa, Homo sapiens
  CDR3 for beta chain variable domain of TCR clone 21303 (TRBV28, TRBJ2-7)
CASSLFFETGGPEQYF

SEQ ID NO: 42607 - protein, 14 aa, Homo sapiens
  CDR3 for alpha chain variable domain of TCR clone 21304 (TRAV12-2, TRAJ17)
CAVLFKAAGNKLTF

SEQ ID NO: 42608 - protein, 17 aa, Homo sapiens
  CDR3 for beta chain variable domain of TCR clone 21304 (TRBV20-1, TRBJ2-2)
CSASGSGQGGLTGELFV

SEQ ID NO: 42609 - protein, 17 aa, Homo sapiens
  CDR3 for alpha chain variable domain of TCR clone 21305 (TRAV17, TRAJ28)
CATDPRRGGAGSYQLTF

SEQ ID NO: 42610 - protein, 16 aa, Homo sapiens
  CDR3 for beta chain variable domain of TCR clone 21305 (TRBV25-1, TRBJ1-1)
CASSGDRDGGRIEAFF

SEQ ID NO: 42611 - protein, 13 aa, Homo sapiens
  CDR3 for alpha chain variable domain of TCR clone 21306 (TRAV1-2, TRAJ9)
CAALNTGGFKTIS

SEQ ID NO: 42612 - protein, 13 aa, Homo sapiens
  CDR3 for beta chain variable domain of TCR clone 21306 (TRBV19, TRBJ1-2)
CASSVPGQDGYTF

SEQ ID NO: 42613 - protein, 11 aa, Homo sapiens
  CDR3 for alpha chain variable domain of TCR clone 21307 (TRAV2, TRAJ13)
CASGGYQKVTF

SEQ ID NO: 42614 - protein, 12 aa, Homo sapiens
  CDR3 for beta chain variable domain of TCR clone 21307 (TRBV11-2, TRBJ2-1)
CASSPGNNEQFF

SEQ ID NO: 42615 - protein, 12 aa, Homo sapiens
  CDR3 for alpha chain variable domain of TCR clone 21308 (TRAV13-1, TRAJ15)
CAASQAGTALIF

SEQ ID NO: 42616 - protein, 14 aa, Homo sapiens
  CDR3 for beta chain variable domain of TCR clone 21308 (TRBV19, TRBJ2-2)
CASSTLHRSGELLF

SEQ ID NO: 42617 - protein, 15 aa, Homo sapiens
  CDR3 for alpha chain variable domain of TCR clone 21309 (TRAV4, TRAJ39)
CLVGPNNNAGNMLTF

SEQ ID NO: 42618 - protein, 13 aa, Homo sapiens
  CDR3 for beta chain variable domain of TCR clone 21309 (TRBV11-2, TRBJ2-5)
CAGSSTGEETQYF

SEQ ID NO: 42619 - protein, 12 aa, Homo sapiens
  CDR3 for alpha chain variable domain of TCR clone 21310 (TRAV27, TRAJ53)
CRQGGSNYKLTF

SEQ ID NO: 42620 - protein, 13 aa, Homo sapiens
  CDR3 for beta chain variable domain of TCR clone 21310 (TRBV29-1, TRBJ1-1)
CSVESGFGTEAFF

SEQ ID NO: 42621 - protein, 14 aa, Homo sapiens
  CDR3 for alpha chain variable domain of TCR clone 21311 (TRAV12-1, TRAJ17)
CVVNPKAAGNKLTF

SEQ ID NO: 42622 - protein, 15 aa, Homo sapiens
  CDR3 for beta chain variable domain of TCR clone 21311 (TRBV14, TRBJ2-5)
CASSRRGGVQETQYF

SEQ ID NO: 42623 - protein, 15 aa, Homo sapiens
  CDR3 for alpha chain variable domain of TCR clone 21312 (TRAV3, TRAJ22)
CAVRDRGGSARQLTF

SEQ ID NO: 42624 - protein, 16 aa, Homo sapiens
  CDR3 for beta chain variable domain of TCR clone 21312 (TRBV5-4, TRBJ2-3)
CASQQPGAGGVDTQYF

SEQ ID NO: 42625 - protein, 15 aa, Homo sapiens
  CDR3 for alpha chain variable domain of TCR clone 21313 (TRAV12-2, TRAJ53)
CAGNGGGGSNYKLTF

SEQ ID NO: 42626 - protein, 17 aa, Homo sapiens
  CDR3 for beta chain variable domain of TCR clone 21313 (TRBV7-3, TRBJ2-3)
RASSLMKRMRGADTQYF

SEQ ID NO: 42627 - protein, 13 aa, Homo sapiens
  CDR3 for alpha chain variable domain of TCR clone 21314 (TRAV8-3, TRAJ48)
CAVVPFGNERLTF

SEQ ID NO: 42628 - protein, 15 aa, Homo sapiens
  CDR3 for beta chain variable domain of TCR clone 21314 (TRBV11-2, TRBJ2-1)
CASSSPSTRYNEQFF

SEQ ID NO: 42629 - protein, 13 aa, Homo sapiens
  CDR3 for alpha chain variable domain of TCR clone 21315 (TRAV30, TRAJ34)
CGTVGYNTDKLIF

SEQ ID NO: 42630 - protein, 16 aa, Homo sapiens
  CDR3 for beta chain variable domain of TCR clone 21315 (TRBV7-9, TRBJ1-2)
CASSLGFSSGEDGDTF

SEQ ID NO: 42631 - protein, 13 aa, Homo sapiens
  CDR3 for alpha chain variable domain of TCR clone 21316 (TRAV26-1, TRAJ34)
CIVRGHNTDKPIF

SEQ ID NO: 42632 - protein, 15 aa, Homo sapiens
  CDR3 for beta chain variable domain of TCR clone 21316 (TRBV4-1, TRBJ2-7)
CASSQEWGPSYEQYF

SEQ ID NO: 42633 - protein, 10 aa, Homo sapiens
  CDR3 for alpha chain variable domain of TCR clone 21317 (TRAV23/DV6, TRAJ57)
CAAISTLSQG

SEQ ID NO: 42634 - protein, 14 aa, Homo sapiens
  CDR3 for beta chain variable domain of TCR clone 21317 (TRBV25-1, TRBJ1-1)
CASTHLGGNTEAFF

SEQ ID NO: 42635 - protein, 15 aa, Homo sapiens
  CDR3 for alpha chain variable domain of TCR clone 21318 (TRAV8-3, TRAJ45)
CASSYSGGGADGLTF

SEQ ID NO: 42636 - protein, 13 aa, Homo sapiens
  CDR3 for beta chain variable domain of TCR clone 21318 (TRBV10-3, TRBJ2-7)
CASKLAVTYEQYF

SEQ ID NO: 42637 - protein, 10 aa, Homo sapiens
  CDR3 for alpha chain variable domain of TCR clone 21319 (TRAV4, TRAJ15)
CLPFWTALIF

SEQ ID NO: 42638 - protein, 15 aa, Homo sapiens
  CDR3 for beta chain variable domain of TCR clone 21319 (TRBV5-1, TRBJ2-1)
CVSSFSGTGYNEQFF

SEQ ID NO: 42639 - protein, 19 aa, Homo sapiens
  CDR3 for alpha chain variable domain of TCR clone 21320 (TRAV3, TRAJ6)
CAVRDRNTSRSGGSYIPTF

SEQ ID NO: 42640 - protein, 15 aa, Homo sapiens
  CDR3 for beta chain variable domain of TCR clone 21320 (TRBV18, TRBJ2-7)
CASSPTFMDSYEQYF

SEQ ID NO: 42641 - protein, 14 aa, Homo sapiens
  CDR3 for alpha chain variable domain of TCR clone 21321 (TRAV12-3, TRAJ10)
SHLPLTGGGNKLTF

SEQ ID NO: 42642 - protein, 13 aa, Homo sapiens
  CDR3 for beta chain variable domain of TCR clone 21321 (TRBV12-4, TRBJ2-7)
CASSPTETYEQYF

SEQ ID NO: 42643 - protein, 15 aa, Homo sapiens
  CDR3 for alpha chain variable domain of TCR clone 21322 (TRAV14/DV4, TRAJ26)
SAMREGQNYGQNFVF

SEQ ID NO: 42644 - protein, 13 aa, Homo sapiens
  CDR3 for beta chain variable domain of TCR clone 21322 (TRBV24-1, TRBJ2-2)
CATSDWSTGELFF

SEQ ID NO: 42645 - protein, 12 aa, Homo sapiens
  CDR3 for alpha chain variable domain of TCR clone 21323 (TRAV38-1, TRAJ20)
CAFIWSDYKLSF

SEQ ID NO: 42646 - protein, 14 aa, Homo sapiens
  CDR3 for beta chain variable domain of TCR clone 21323 (TRBV19, TRBJ2-1)
CASSMGSGATEQFF

SEQ ID NO: 42647 - protein, 18 aa, Homo sapiens
  CDR3 for alpha chain variable domain of TCR clone 21324 (TRAV13-1, TRAJ52)
CAASKRSAGGTSYGKLTF

SEQ ID NO: 42648 - protein, 13 aa, Homo sapiens
  CDR3 for beta chain variable domain of TCR clone 21324 (TRBV12-4, TRBJ1-2)
RASSLRQGKGYTF

SEQ ID NO: 42649 - protein, 13 aa, Homo sapiens
  CDR3 for alpha chain variable domain of TCR clone 21325 (TRAV13-1, TRAJ39)
CAASIWAGNMLTF

SEQ ID NO: 42650 - protein, 15 aa, Homo sapiens
  CDR3 for beta chain variable domain of TCR clone 21325 (TRBV7-9, TRBJ1-1)
CASSLLEQGGTEASF

SEQ ID NO: 42651 - protein, 18 aa, Homo sapiens
  CDR3 for alpha chain variable domain of TCR clone 21326 (TRAV13-1, TRAJ52)
CAAKNPNAGGTSYGELTF

SEQ ID NO: 42652 - protein, 15 aa, Homo sapiens
  CDR3 for beta chain variable domain of TCR clone 21326 (TRBV28, TRBJ2-1)
CASSIIAGGRSEQFF

SEQ ID NO: 42653 - protein, 15 aa, Homo sapiens
  CDR3 for alpha chain variable domain of TCR clone 21327 (TRAV17, TRAJ52)
CATEAGGTSYGKLAF

SEQ ID NO: 42654 - protein, 14 aa, Homo sapiens
  CDR3 for beta chain variable domain of TCR clone 21327 (TRBV28, TRBJ1-5)
CASSLGVLVKPQHF

SEQ ID NO: 42655 - protein, 14 aa, Homo sapiens
  CDR3 for alpha chain variable domain of TCR clone 21328 (TRAV1-2, TRAJ16)
CAVNRFSDGQKLLF

SEQ ID NO: 42656 - protein, 15 aa, Homo sapiens
  CDR3 for beta chain variable domain of TCR clone 21328 (TRBV7-9, TRBJ1-6)
CASSSPGHGNSPLHF

SEQ ID NO: 42657 - protein, 12 aa, Homo sapiens
  CDR3 for alpha chain variable domain of TCR clone 21329 (TRAV2, TRAJ9)
CAVGAGGFKTIF

SEQ ID NO: 42658 - protein, 14 aa, Homo sapiens
  CDR3 for beta chain variable domain of TCR clone 21329 (TRBV25-1, TRBJ1-1)
CASTHLGGNTEAFF

SEQ ID NO: 42659 - protein, 13 aa, Homo sapiens
  CDR3 for alpha chain variable domain of TCR clone 21330 (TRAV13-1, TRAJ20)
CAARVSNDYKLSF

SEQ ID NO: 42660 - protein, 15 aa, Homo sapiens
  CDR3 for beta chain variable domain of TCR clone 21330 (TRBV6-3, TRBJ2-7)
CASSSPGTVFYEQYF

SEQ ID NO: 42661 - protein, 14 aa, Homo sapiens
  CDR3 for alpha chain variable domain of TCR clone 21331 (TRAV4, TRAJ17)
CLVGDMAAGNKLTF

SEQ ID NO: 42662 - protein, 14 aa, Homo sapiens
  CDR3 for beta chain variable domain of TCR clone 21331 (TRBV4-1, TRBJ2-7)
CASRPVAGGDEQYF

SEQ ID NO: 42663 - protein, 15 aa, Homo sapiens
  CDR3 for alpha chain variable domain of TCR clone 21332 (TRAV26-1, TRAJ29)
CIVRVEGSGNSPLVF

SEQ ID NO: 42664 - protein, 15 aa, Homo sapiens
  CDR3 for beta chain variable domain of TCR clone 21332 (TRBV7-9, TRBJ1-5)
CASSQGHQPNQPQHF

SEQ ID NO: 42665 - protein, 16 aa, Homo sapiens
  CDR3 for alpha chain variable domain of TCR clone 21333 (TRAV30, TRAJ24)
RGTEIVDADSWGKFQF

SEQ ID NO: 42666 - protein, 14 aa, Homo sapiens
  CDR3 for beta chain variable domain of TCR clone 21333 (TRBV7-2, TRBJ2-7)
CASSPKTSFYEQYF

SEQ ID NO: 42667 - protein, 13 aa, Homo sapiens
  CDR3 for alpha chain variable domain of TCR clone 21334 (TRAV5, TRAJ11)
CAETTSGYSTLTF

SEQ ID NO: 42668 - protein, 13 aa, Homo sapiens
  CDR3 for beta chain variable domain of TCR clone 21334 (TRBV10-2, TRBJ2-7)
CASGASGGYEQYF

SEQ ID NO: 42669 - protein, 18 aa, Homo sapiens
  CDR3 for alpha chain variable domain of TCR clone 21335 (TRAV21, TRAJ52)
CAVRPSPAGGTSYGKLTF

SEQ ID NO: 42670 - protein, 13 aa, Homo sapiens
  CDR3 for beta chain variable domain of TCR clone 21335 (TRBV7-3, TRBJ1-1)
CASSQDWGAEAFL

SEQ ID NO: 42671 - protein, 13 aa, Homo sapiens
  CDR3 for alpha chain variable domain of TCR clone 21336 (TRAV2, TRAJ40)
CAVVTSGTYKYIF

SEQ ID NO: 42672 - protein, 14 aa, Homo sapiens
  CDR3 for beta chain variable domain of TCR clone 21336 (TRBV19, TRBJ2-1)
CASPTFVLSGEQFI

SEQ ID NO: 42673 - protein, 14 aa, Homo sapiens
  CDR3 for alpha chain variable domain of TCR clone 21337 (TRAV35, TRAJ22)
CAGLRPGSARQLTF

SEQ ID NO: 42674 - protein, 15 aa, Homo sapiens
  CDR3 for beta chain variable domain of TCR clone 21337 (TRBV12-4, TRBJ2-5)
CASSPPTGLHETQYF

SEQ ID NO: 42675 - protein, 11 aa, Homo sapiens
  CDR3 for alpha chain variable domain of TCR clone 21338 (TRAV21, TRAJ11)
CAVNGYSTLTF

SEQ ID NO: 42676 - protein, 11 aa, Homo sapiens
  CDR3 for beta chain variable domain of TCR clone 21338 (TRBV19, TRBJ1-1)
CASSSGSEAFF

SEQ ID NO: 42677 - protein, 13 aa, Homo sapiens
  CDR3 for alpha chain variable domain of TCR clone 21339 (TRAV21, TRAJ27)
CAARPGNAGKSTF

SEQ ID NO: 42678 - protein, 14 aa, Homo sapiens
  CDR3 for beta chain variable domain of TCR clone 21339 (TRBV11-3, TRBJ2-7)
CASSLGAGAYEQYF

SEQ ID NO: 42679 - protein, 16 aa, Homo sapiens
  CDR3 for alpha chain variable domain of TCR clone 21340 (TRAV3, TRAJ3)
CAVRDRAKSSASEIIF

SEQ ID NO: 42680 - protein, 13 aa, Homo sapiens
  CDR3 for beta chain variable domain of TCR clone 21340 (TRBV10-3, TRBJ2-7)
CASKLAVNYEQYF

SEQ ID NO: 42681 - protein, 14 aa, Homo sapiens
  CDR3 for alpha chain variable domain of TCR clone 21341 (TRAV12-2, TRAJ5)
CAVNRSTGRRELTF

SEQ ID NO: 42682 - protein, 12 aa, Homo sapiens
  CDR3 for beta chain variable domain of TCR clone 21341 (TRBV19, TRBJ1-5)
CASSIAQQPQHF

SEQ ID NO: 42683 - protein, 19 aa, Homo sapiens
  CDR3 for alpha chain variable domain of TCR clone 21342 (TRAV30, TRAJ32)
NLLLRHREGYGGATNKLIF

SEQ ID NO: 42684 - protein, 13 aa, Homo sapiens
  CDR3 for beta chain variable domain of TCR clone 21342 (TRBV10-3, TRBJ2-7)
CASKLAVNYEQYF

SEQ ID NO: 42685 - protein, 14 aa, Homo sapiens
  CDR3 for alpha chain variable domain of TCR clone 21343 (TRAV12-2, TRAJ6)
CASRWGGGSYIPTF

SEQ ID NO: 42686 - protein, 13 aa, Homo sapiens
  CDR3 for beta chain variable domain of TCR clone 21343 (TRBV2, TRBJ1-1)
CASSEGGNTEAFF

SEQ ID NO: 42687 - protein, 14 aa, Homo sapiens
  CDR3 for alpha chain variable domain of TCR clone 21344 (TRAV12-2, TRAJ40)
CAVKIPSGTYKYIF

SEQ ID NO: 42688 - protein, 14 aa, Homo sapiens
  CDR3 for beta chain variable domain of TCR clone 21344 (TRBV20-1, TRBJ1-1)
CIAQTRIGGTEAFF

SEQ ID NO: 42689 - protein, 16 aa, Homo sapiens
  CDR3 for alpha chain variable domain of TCR clone 21345 (TRAV35, TRAJ28)
CAGQRYSGAGSYQLAF

SEQ ID NO: 42690 - protein, 13 aa, Homo sapiens
  CDR3 for beta chain variable domain of TCR clone 21345 (TRBV19, TRBJ1-2)
CASSQGQVYGYTF

SEQ ID NO: 42691 - protein, 17 aa, Homo sapiens
  CDR3 for alpha chain variable domain of TCR clone 21346 (TRAV3, TRAJ42)
YAVRDRDYGGSQGNLIF

SEQ ID NO: 42692 - protein, 15 aa, Homo sapiens
  CDR3 for beta chain variable domain of TCR clone 21346 (TRBV6-6, TRBJ2-7)
CASSYSYGGSYEQYF

SEQ ID NO: 42693 - protein, 16 aa, Homo sapiens
  CDR3 for alpha chain variable domain of TCR clone 21347 (TRAV21, TRAJ37)
CSVRTAGSSNTGKLIF

SEQ ID NO: 42694 - protein, 13 aa, Homo sapiens
  CDR3 for beta chain variable domain of TCR clone 21347 (TRBV7-9, TRBJ2-5)
CASLPSGRETQYF

SEQ ID NO: 42695 - protein, 14 aa, Homo sapiens
  CDR3 for alpha chain variable domain of TCR clone 21348 (TRAV4, TRAJ30)
CLLTLMNRDDKIIF

SEQ ID NO: 42696 - protein, 15 aa, Homo sapiens
  CDR3 for beta chain variable domain of TCR clone 21348 (TRBV7-2, TRBJ1-5)
CASSRGQGDNQPQHF

SEQ ID NO: 42697 - protein, 13 aa, Homo sapiens
  CDR3 for alpha chain variable domain of TCR clone 21349 (TRAV21, TRAJ27)
CAARPGNGGKSTF

SEQ ID NO: 42698 - protein, 14 aa, Homo sapiens
  CDR3 for beta chain variable domain of TCR clone 21349 (TRBV7-6, TRBJ2-3)
CASSLGTVTDTQYF

SEQ ID NO: 42699 - protein, 12 aa, Homo sapiens
  CDR3 for alpha chain variable domain of TCR clone 21350 (TRAV12-3, TRAJ41)
CAMSYSGYALNF

SEQ ID NO: 42700 - protein, 13 aa, Homo sapiens
  CDR3 for beta chain variable domain of TCR clone 21350 (TRBV7-3, TRBJ2-1)
CASSLDSYSEQFF

SEQ ID NO: 42701 - protein, 15 aa, Homo sapiens
  CDR3 for alpha chain variable domain of TCR clone 21351 (TRAV3, TRAJ22)
CAVRDRVGSARQLTF

SEQ ID NO: 42702 - protein, 16 aa, Homo sapiens
  CDR3 for beta chain variable domain of TCR clone 21351 (TRBV5-4, TRBJ2-3)
CASQQPGAGGADTQYF

SEQ ID NO: 42703 - protein, 16 aa, Homo sapiens
  CDR3 for alpha chain variable domain of TCR clone 21352 (TRAV6, TRAJ37)
CALDIFGSSNTGKLIF

SEQ ID NO: 42704 - protein, 14 aa, Homo sapiens
  CDR3 for beta chain variable domain of TCR clone 21352 (TRBV5-6, TRBJ2-7)
CASSLRSATYEQYF

SEQ ID NO: 42705 - protein, 15 aa, Homo sapiens
  CDR3 for alpha chain variable domain of TCR clone 21353 (TRAV25, TRAJ52)
CAGRPGGTSYGKLTF

SEQ ID NO: 42706 - protein, 17 aa, Homo sapiens
  CDR3 for beta chain variable domain of TCR clone 21353 (TRBV7-8, TRBJ2-6)
CDSSAGTGGAGANVLTF

SEQ ID NO: 42707 - protein, 13 aa, Homo sapiens
  CDR3 for alpha chain variable domain of TCR clone 21354 (TRAV27, TRAJ54)
CAGAGQGAQKLVF

SEQ ID NO: 42708 - protein, 15 aa, Homo sapiens
  CDR3 for beta chain variable domain of TCR clone 21354 (TRBV18, TRBJ2-6)
CASSPSYAGANDLTF

SEQ ID NO: 42709 - protein, 14 aa, Homo sapiens
  CDR3 for alpha chain variable domain of TCR clone 21355 (TRAV12-1, TRAJ30)
CVVNIGGRDDKIIF

SEQ ID NO: 42710 - protein, 13 aa, Homo sapiens
  CDR3 for beta chain variable domain of TCR clone 21355 (TRBV12-5, TRBJ2-1)
CASGLGRGSEQFF

SEQ ID NO: 42711 - protein, 15 aa, Homo sapiens
  CDR3 for alpha chain variable domain of TCR clone 21356 (TRAV8-3, TRAJ27)
CAVGPAKTNAGKSTF

SEQ ID NO: 42712 - protein, 15 aa, Homo sapiens
  CDR3 for beta chain variable domain of TCR clone 21356 (TRBV7-2, TRBJ2-1)
CASSSGLAGGNEQFF

SEQ ID NO: 42713 - protein, 12 aa, Homo sapiens
  CDR3 for alpha chain variable domain of TCR clone 21357 (TRAV3, TRAJ43)
CAVRDPNNDIRF

SEQ ID NO: 42714 - protein, 15 aa, Homo sapiens
  CDR3 for beta chain variable domain of TCR clone 21357 (TRBV6-5, TRBJ2-1)
CASSYDAGAGNEQFF

SEQ ID NO: 42715 - protein, 13 aa, Homo sapiens
  CDR3 for alpha chain variable domain of TCR clone 21358 (TRAV1-2, TRAJ12)
CAVSMDSSYKLIF

SEQ ID NO: 42716 - protein, 15 aa, Homo sapiens
  CDR3 for beta chain variable domain of TCR clone 21358 (TRBV27, TRBJ2-5)
CASSLIPAGGETQYF

SEQ ID NO: 42717 - protein, 15 aa, Homo sapiens
  CDR3 for alpha chain variable domain of TCR clone 21359 (TRAV17, TRAJ22)
CATVAPSGSARQLTF

SEQ ID NO: 42718 - protein, 16 aa, Homo sapiens
  CDR3 for beta chain variable domain of TCR clone 21359 (TRBV10-3, TRBJ2-7)
CAISADCADRPYEQYF

SEQ ID NO: 42719 - protein, 14 aa, Homo sapiens
  CDR3 for alpha chain variable domain of TCR clone 21360 (TRAV29/DV5, TRAJ36)
CAARRKTGANNLFF

SEQ ID NO: 42720 - protein, 14 aa, Homo sapiens
  CDR3 for beta chain variable domain of TCR clone 21360 (TRBV12-5, TRBJ2-5)
CASGSRTHQETHYF

SEQ ID NO: 42721 - protein, 12 aa, Homo sapiens
  CDR3 for alpha chain variable domain of TCR clone 21361 (TRAV2, TRAJ9)
CAVGAGGFKTIF

SEQ ID NO: 42722 - protein, 15 aa, Homo sapiens
  CDR3 for beta chain variable domain of TCR clone 21361 (TRBV7-9, TRBJ1-5)
CASSQGHQPNQPQHF

SEQ ID NO: 42723 - protein, 21 aa, Homo sapiens
  CDR3 for alpha chain variable domain of TCR clone 21362 (TRAV12-1, TRAJ32)
SSVIQPPTSMNYGGATNKLVF

SEQ ID NO: 42724 - protein, 15 aa, Homo sapiens
  CDR3 for beta chain variable domain of TCR clone 21362 (TRBV7-9, TRBJ2-2)
CASGPLDTFPGELFF

SEQ ID NO: 42725 - protein, 14 aa, Homo sapiens
  CDR3 for alpha chain variable domain of TCR clone 21363 (TRAV12-2, TRAJ9)
CAVNALEGGFETIF

SEQ ID NO: 42726 - protein, 16 aa, Homo sapiens
  CDR3 for beta chain variable domain of TCR clone 21363 (TRBV19, TRBJ1-6)
CASSVAPVAGNSPLHF

SEQ ID NO: 42727 - protein, 15 aa, Homo sapiens
  CDR3 for alpha chain variable domain of TCR clone 21364 (TRAV12-1, TRAJ44)
CVVFVNTDTASKLTF

SEQ ID NO: 42728 - protein, 17 aa, Homo sapiens
  CDR3 for beta chain variable domain of TCR clone 21364 (TRBV7-8, TRBJ2-6)
CASSAGTGGAGANVLTF

SEQ ID NO: 42729 - protein, 13 aa, Homo sapiens
  CDR3 for alpha chain variable domain of TCR clone 21365 (TRAV3, TRAJ41)
CAVSSNSGHALNF

SEQ ID NO: 42730 - protein, 13 aa, Homo sapiens
  CDR3 for beta chain variable domain of TCR clone 21365 (TRBV20-1, TRBJ2-2)
CSALSGGAGELFF

SEQ ID NO: 42731 - protein, 15 aa, Homo sapiens
  CDR3 for alpha chain variable domain of TCR clone 21366 (TRAV3, TRAJ20)
CAVRDIKLSDYKLSF

SEQ ID NO: 42732 - protein, 15 aa, Homo sapiens
  CDR3 for beta chain variable domain of TCR clone 21366 (TRBV7-9, TRBJ1-6)
CASSSPGRGNSLLHF

SEQ ID NO: 42733 - protein, 12 aa, Homo sapiens
  CDR3 for alpha chain variable domain of TCR clone 21367 (TRAV12-1, TRAJ23)
CVVNNQGGKLIF

SEQ ID NO: 42734 - protein, 16 aa, Homo sapiens
  CDR3 for beta chain variable domain of TCR clone 21367 (TRBV11-1, TRBJ2-7)
CASSAQTGALSYEQYF

SEQ ID NO: 42735 - protein, 14 aa, Homo sapiens
  CDR3 for alpha chain variable domain of TCR clone 21368 (TRAV13-1, TRAJ35)
CAASKGGFGNVLHC

SEQ ID NO: 42736 - protein, 14 aa, Homo sapiens
  CDR3 for beta chain variable domain of TCR clone 21368 (TRBV12-5, TRBJ2-5)
CASGSRTHQETQYF

SEQ ID NO: 42737 - protein, 11 aa, Homo sapiens
  CDR3 for alpha chain variable domain of TCR clone 21369 (TRAV2, TRAJ13)
CASGGYQKVTF

SEQ ID NO: 42738 - protein, 12 aa, Homo sapiens
  CDR3 for beta chain variable domain of TCR clone 21369 (TRBV11-2, TRBJ2-2)
CASSLPTGELFF

SEQ ID NO: 42739 - protein, 15 aa, Homo sapiens
  CDR3 for alpha chain variable domain of TCR clone 21370 (TRAV12-1, TRAJ44)
CVVFVNTGTASKLTF

SEQ ID NO: 42740 - protein, 17 aa, Homo sapiens
  CDR3 for beta chain variable domain of TCR clone 21370 (TRBV7-8, TRBJ2-6)
CASSAGAGGAGANVLTF

SEQ ID NO: 42741 - protein, 17 aa, Homo sapiens
  CDR3 for alpha chain variable domain of TCR clone 21371 (TRAV26-1, TRAJ53)
CIVRVDDSGGSNYKLTF

SEQ ID NO: 42742 - protein, 15 aa, Homo sapiens
  CDR3 for beta chain variable domain of TCR clone 21371 (TRBV20-1, TRBJ2-7)
CSARVPAAYFYERYF

SEQ ID NO: 42743 - protein, 14 aa, Homo sapiens
  CDR3 for alpha chain variable domain of TCR clone 21372 (TRAV12-3, TRAJ54)
CAMRGIQGAQKLVF

SEQ ID NO: 42744 - protein, 13 aa, Homo sapiens
  CDR3 for beta chain variable domain of TCR clone 21372 (TRBV19, TRBJ1-1)
YASSPSNGGEAFF

SEQ ID NO: 42745 - protein, 11 aa, Homo sapiens
  CDR3 for alpha chain variable domain of TCR clone 21373 (TRAV21, TRAJ34)
CAPLDTDKLIF

SEQ ID NO: 42746 - protein, 13 aa, Homo sapiens
  CDR3 for beta chain variable domain of TCR clone 21373 (TRBV27, TRBJ1-1)
CASSLSIGAEAFF

SEQ ID NO: 42747 - protein, 18 aa, Homo sapiens
  CDR3 for alpha chain variable domain of TCR clone 21374 (TRAV12-3, TRAJ52)
CAMSRTNAGGTSYGKLTF

SEQ ID NO: 42748 - protein, 17 aa, Homo sapiens
  CDR3 for beta chain variable domain of TCR clone 21374 (TRBV7-3, TRBJ2-3)
CASSLMKRRRGADTQYF

SEQ ID NO: 42749 - protein, 14 aa, Homo sapiens
  CDR3 for alpha chain variable domain of TCR clone 21375 (TRAV12-3, TRAJ22)
CAMGLFGSARQLTF

SEQ ID NO: 42750 - protein, 11 aa, Homo sapiens
  CDR3 for beta chain variable domain of TCR clone 21375 (TRBV12-4, TRBJ2-2)
CASSSAGELFF

SEQ ID NO: 42751 - protein, 11 aa, Homo sapiens
  CDR3 for alpha chain variable domain of TCR clone 21376 (TRAV12-2, TRAJ31)
CAVTIWARLMF

SEQ ID NO: 42752 - protein, 15 aa, Homo sapiens
  CDR3 for beta chain variable domain of TCR clone 21376 (TRBV19, TRBJ2-7)
CASSIGGGLVNEQYF

SEQ ID NO: 42753 - protein, 16 aa, Homo sapiens
  CDR3 for alpha chain variable domain of TCR clone 21377 (TRAV3, TRAJ10)
CAVRDMRAGGGNKLTF

SEQ ID NO: 42754 - protein, 14 aa, Homo sapiens
  CDR3 for beta chain variable domain of TCR clone 21377 (TRBV7-2, TRBJ2-7)
CASRSQGAAYEQYF

SEQ ID NO: 42755 - protein, 12 aa, Homo sapiens
  CDR3 for alpha chain variable domain of TCR clone 21378 (TRAV9-2, TRAJ6)
CALRGGSYIPTF

SEQ ID NO: 42756 - protein, 17 aa, Homo sapiens
  CDR3 for beta chain variable domain of TCR clone 21378 (TRBV7-3, TRBJ2-3)
CASSPRGQGYGTDTQYF

SEQ ID NO: 42757 - protein, 11 aa, Homo sapiens
  CDR3 for alpha chain variable domain of TCR clone 21379 (TRAV1-2, TRAJ40)
CAVPGTYKYVF

SEQ ID NO: 42758 - protein, 13 aa, Homo sapiens
  CDR3 for beta chain variable domain of TCR clone 21379 (TRBV7-2, TRBJ2-2)
CASSSRPTGELFF

SEQ ID NO: 42759 - protein, 13 aa, Homo sapiens
  CDR3 for alpha chain variable domain of TCR clone 21380 (TRAV1-1, TRAJ9)
CAAKNTGGFKTIF

SEQ ID NO: 42760 - protein, 14 aa, Homo sapiens
  CDR3 for beta chain variable domain of TCR clone 21380 (TRBV20-1, TRBJ2-1)
CSAHIGGSANEQFF

SEQ ID NO: 42761 - protein, 12 aa, Homo sapiens
  CDR3 for alpha chain variable domain of TCR clone 21381 (TRAV20, TRAJ56)
CAVTGANSKLTF

SEQ ID NO: 42762 - protein, 14 aa, Homo sapiens
  CDR3 for beta chain variable domain of TCR clone 21381 (TRBV20-1, TRBJ2-5)
GSALVPGYQETQYF

SEQ ID NO: 42763 - protein, 15 aa, Homo sapiens
  CDR3 for alpha chain variable domain of TCR clone 21382 (TRAV3, TRAJ4)
CAVSDGTGGYNKLIF

SEQ ID NO: 42764 - protein, 16 aa, Homo sapiens
  CDR3 for beta chain variable domain of TCR clone 21382 (TRBV27, TRBJ2-2)
CASSSSGVSNTGELFF

SEQ ID NO: 42765 - protein, 14 aa, Homo sapiens
  CDR3 for alpha chain variable domain of TCR clone 21383 (TRAV12-1, TRAJ17)
CVVNYKAAGNKLTF

SEQ ID NO: 42766 - protein, 13 aa, Homo sapiens
  CDR3 for beta chain variable domain of TCR clone 21383 (TRBV7-3, TRBJ1-1)
CASSQDWGAEAFF

SEQ ID NO: 42767 - protein, 16 aa, Homo sapiens
  CDR3 for alpha chain variable domain of TCR clone 21384 (TRAV30, TRAJ24)
CGTEIVDADSWGKFQF

SEQ ID NO: 42768 - protein, 18 aa, Homo sapiens
  CDR3 for beta chain variable domain of TCR clone 21384 (TRBV12-4, TRBJ2-2)
CASSLVAGTRGRTGELFF

SEQ ID NO: 42769 - protein, 10 aa, Homo sapiens
  CDR3 for alpha chain variable domain of TCR clone 21385 (TRAV12-3, TRAJ49)
CAMNDDQFYF

SEQ ID NO: 42770 - protein, 13 aa, Homo sapiens
  CDR3 for beta chain variable domain of TCR clone 21385 (TRBV12-4, TRBJ1-1)
CASSPGTGFEAVF

SEQ ID NO: 42771 - protein, 14 aa, Homo sapiens
  CDR3 for alpha chain variable domain of TCR clone 21386 (TRAV9-2, TRAJ39)
CALYIYNAGNMLTF

SEQ ID NO: 42772 - protein, 11 aa, Homo sapiens
  CDR3 for beta chain variable domain of TCR clone 21386 (TRBV5-1, TRBJ1-1)
CASSSGGEAFF

SEQ ID NO: 42773 - protein, 14 aa, Homo sapiens
  CDR3 for alpha chain variable domain of TCR clone 21387 (TRAV14/DV4, TRAJ26)
CAMREGTYGQNFVF

SEQ ID NO: 42774 - protein, 16 aa, Homo sapiens
  CDR3 for beta chain variable domain of TCR clone 21387 (TRBV9, TRBJ1-2)
CASSVEERVSPYGYTF

SEQ ID NO: 42775 - protein, 13 aa, Homo sapiens
  CDR3 for alpha chain variable domain of TCR clone 21388 (TRAV21, TRAJ57)
CAVTQGGSEKLVF

SEQ ID NO: 42776 - protein, 16 aa, Homo sapiens
  CDR3 for beta chain variable domain of TCR clone 21388 (TRBV29-1, TRBJ2-7)
CSVEDAEDGTAYEQFF

SEQ ID NO: 42777 - protein, 13 aa, Homo sapiens
  CDR3 for alpha chain variable domain of TCR clone 21389 (TRAV2, TRAJ40)
CAVVTSGTYKYIF

SEQ ID NO: 42778 - protein, 15 aa, Homo sapiens
  CDR3 for beta chain variable domain of TCR clone 21389 (TRBV5-1, TRBJ2-1)
CASSPPRAPYNEQFF

SEQ ID NO: 42779 - protein, 11 aa, Homo sapiens
  CDR3 for alpha chain variable domain of TCR clone 21390 (TRAV12-2, TRAJ54)
CAVEGAQKLVF

SEQ ID NO: 42780 - protein, 17 aa, Homo sapiens
  CDR3 for beta chain variable domain of TCR clone 21390 (TRBV18, TRBJ1-3)
CASSPYPTGPSGNTMYF

SEQ ID NO: 42781 - protein, 14 aa, Homo sapiens
  CDR3 for alpha chain variable domain of TCR clone 21391 (TRAV26-1, TRAJ38)
CIADNAGNNRKLVW

SEQ ID NO: 42782 - protein, 13 aa, Homo sapiens
  CDR3 for beta chain variable domain of TCR clone 21391 (TRBV20-1, TRBJ2-1)
CSARSSPRDEQFF

SEQ ID NO: 42783 - protein, 14 aa, Homo sapiens
  CDR3 for alpha chain variable domain of TCR clone 21392 (TRAV12-3, TRAJ10)
SHLPLTGGGNKLTF

SEQ ID NO: 42784 - protein, 13 aa, Homo sapiens
  CDR3 for beta chain variable domain of TCR clone 21392 (TRBV12-4, TRBJ1-1)
CASSPGTGFGAFF

SEQ ID NO: 42785 - protein, 15 aa, Homo sapiens
  CDR3 for alpha chain variable domain of TCR clone 21393 (TRAV26-1, TRAJ29)
CIVRVEGSGNTPLVF

SEQ ID NO: 42786 - protein, 14 aa, Homo sapiens
  CDR3 for beta chain variable domain of TCR clone 21393 (TRBV18, TRBJ2-5)
CASSHGVSQETQYF

SEQ ID NO: 42787 - protein, 21 aa, Homo sapiens
  CDR3 for alpha chain variable domain of TCR clone 21394 (TRAV8-4, TRAJ38)
CARLNAGNNHIQNPDPAVYQL

SEQ ID NO: 42788 - protein, 14 aa, Homo sapiens
  CDR3 for beta chain variable domain of TCR clone 21394 (TRBV7-8, TRBJ2-3)
CASSLEAGTDTQYF

SEQ ID NO: 42789 - protein, 14 aa, Homo sapiens
  CDR3 for alpha chain variable domain of TCR clone 21395 (TRAV1-2, TRAJ16)
CAVNRFSDGQKLLS

SEQ ID NO: 42790 - protein, 14 aa, Homo sapiens
  CDR3 for beta chain variable domain of TCR clone 21395 (TRBV13, TRBJ2-5)
CASSLGRGQETQYF

SEQ ID NO: 42791 - protein, 14 aa, Homo sapiens
  CDR3 for alpha chain variable domain of TCR clone 21396 (TRAV35, TRAJ33)
CAGSSQDSDYQLIW

SEQ ID NO: 42792 - protein, 15 aa, Homo sapiens
  CDR3 for beta chain variable domain of TCR clone 21396 (TRBV20-1, TRBJ2-7)
CSAESGTSGAYEQYF

SEQ ID NO: 42793 - protein, 14 aa, Homo sapiens
  CDR3 for alpha chain variable domain of TCR clone 21397 (TRAV13-1, TRAJ9)
CAASALTGGFKTIF

SEQ ID NO: 42794 - protein, 13 aa, Homo sapiens
  CDR3 for beta chain variable domain of TCR clone 21397 (TRBV20-1, TRBJ1-1)
CSAWTVGNTEAFF

SEQ ID NO: 42795 - protein, 14 aa, Homo sapiens
  CDR3 for alpha chain variable domain of TCR clone 21398 (TRAV17, TRAJ54)
CATDANQGAQKLVF

SEQ ID NO: 42796 - protein, 12 aa, Homo sapiens
  CDR3 for beta chain variable domain of TCR clone 21398 (TRBV7-9, TRBJ2-7)
CASSIKREEQCF

SEQ ID NO: 42797 - protein, 10 aa, Homo sapiens
  CDR3 for alpha chain variable domain of TCR clone 21399 (TRAV1-2, TRAJ20)
CALNDYKLSF

SEQ ID NO: 42798 - protein, 16 aa, Homo sapiens
  CDR3 for beta chain variable domain of TCR clone 21399 (TRBV20-1, TRBJ1-1)
CSARALAQGMNTEAFF

SEQ ID NO: 42799 - protein, 14 aa, Homo sapiens
  CDR3 for alpha chain variable domain of TCR clone 21400 (TRAV1-2, TRAJ16)
CAVNRFSDGQKLPF

SEQ ID NO: 42800 - protein, 15 aa, Homo sapiens
  CDR3 for beta chain variable domain of TCR clone 21400 (TRBV20-1, TRBJ2-7)
CSARDRVSGMDEQYF

SEQ ID NO: 42801 - protein, 18 aa, Homo sapiens
  CDR3 for alpha chain variable domain of TCR clone 21401 (TRAV13-1, TRAJ52)
CAAKNPNAGGTSYGKLTF

SEQ ID NO: 42802 - protein, 13 aa, Homo sapiens
  CDR3 for beta chain variable domain of TCR clone 21401 (TRBV12-4, TRBJ2-5)
CASRLAVQETQYF

SEQ ID NO: 42803 - protein, 16 aa, Homo sapiens
  CDR3 for alpha chain variable domain of TCR clone 21402 (TRAV4, TRAJ22)
CLVGDLYSGSARQRTF

SEQ ID NO: 42804 - protein, 16 aa, Homo sapiens
  CDR3 for beta chain variable domain of TCR clone 21402 (TRBV7-9, TRBJ2-1)
CASSDVAGGSYNEQFF

SEQ ID NO: 42805 - protein, 16 aa, Homo sapiens
  CDR3 for alpha chain variable domain of TCR clone 21403 (TRAV16, TRAJ4)
CALSRMFPGGYNKLIF

SEQ ID NO: 42806 - protein, 12 aa, Homo sapiens
  CDR3 for beta chain variable domain of TCR clone 21403 (TRBV29-1, TRBJ2-3)
CSVTGGADTQYF

SEQ ID NO: 42807 - protein, 13 aa, Homo sapiens
  CDR3 for alpha chain variable domain of TCR clone 21404 (TRAV20, TRAJ37)
CAGCSSNTGKLIF

SEQ ID NO: 42808 - protein, 11 aa, Homo sapiens
  CDR3 for beta chain variable domain of TCR clone 21404 (TRBV12-4, TRBJ2-3)
CASTATDTQYV

SEQ ID NO: 42809 - protein, 16 aa, Homo sapiens
  CDR3 for alpha chain variable domain of TCR clone 21405 (TRAV13-1, TRAJ48)
CAASIFGNFGNEKLTF

SEQ ID NO: 42810 - protein, 14 aa, Homo sapiens
  CDR3 for beta chain variable domain of TCR clone 21405 (TRBV19, TRBJ2-1)
CASGKSTQYNEQFF

SEQ ID NO: 42811 - protein, 17 aa, Homo sapiens
  CDR3 for alpha chain variable domain of TCR clone 21406 (TRAV3, TRAJ6)
CAVRDGPRAAGSYIPTF

SEQ ID NO: 42812 - protein, 14 aa, Homo sapiens
  CDR3 for beta chain variable domain of TCR clone 21406 (TRBV7-2, TRBJ2-7)
CASSPKTSFYEQYF

SEQ ID NO: 42813 - protein, 13 aa, Homo sapiens
  CDR3 for alpha chain variable domain of TCR clone 21407 (TRAV2, TRAJ40)
CAVFTSGTYKYIF

SEQ ID NO: 42814 - protein, 15 aa, Homo sapiens
  CDR3 for beta chain variable domain of TCR clone 21407 (TRBV11-3, TRBJ2-3)
CASLKDGREGDTQYF

SEQ ID NO: 42815 - protein, 15 aa, Homo sapiens
  CDR3 for alpha chain variable domain of TCR clone 21408 (TRAV35, TRAJ40)
CAGQLGTSGTYKYIF

SEQ ID NO: 42816 - protein, 14 aa, Homo sapiens
  CDR3 for beta chain variable domain of TCR clone 21408 (TRBV7-3, TRBJ2-1)
CASSLAGGTDEQFF

SEQ ID NO: 42817 - protein, 13 aa, Homo sapiens
  CDR3 for alpha chain variable domain of TCR clone 21409 (TRAV17, TRAJ9)
CATDYTGGFKTIF

SEQ ID NO: 42818 - protein, 16 aa, Homo sapiens
  CDR3 for beta chain variable domain of TCR clone 21409 (TRBV7-7, TRBJ2-1)
CASSLASGTPYNEQFF

SEQ ID NO: 42819 - protein, 10 aa, Homo sapiens
  CDR3 for alpha chain variable domain of TCR clone 21410 (TRAV12-1, TRAJ37)
ARGNTGKLIC

SEQ ID NO: 42820 - protein, 15 aa, Homo sapiens
  CDR3 for beta chain variable domain of TCR clone 21410 (TRBV7-2, TRBJ2-3)
CASSLEQGGTDTQYF

SEQ ID NO: 42821 - protein, 17 aa, Homo sapiens
  CDR3 for alpha chain variable domain of TCR clone 21411 (TRAV3, TRAJ6)
CAVRDGPRAGGSYILTF

SEQ ID NO: 42822 - protein, 13 aa, Homo sapiens
  CDR3 for beta chain variable domain of TCR clone 21411 (TRBV19, TRBJ2-7)
CASSIDRTYEQYF

SEQ ID NO: 42823 - protein, 14 aa, Homo sapiens
  CDR3 for alpha chain variable domain of TCR clone 21412 (TRAV16, TRAJ33)
CALPAMDSNYQLIW

SEQ ID NO: 42824 - protein, 12 aa, Homo sapiens
  CDR3 for beta chain variable domain of TCR clone 21412 (TRBV5-1, TRBJ1-2)
CASSQDTYGYTF

SEQ ID NO: 42825 - protein, 12 aa, Homo sapiens
  CDR3 for alpha chain variable domain of TCR clone 21413 (TRAV35, TRAJ39)
LAPNNVGNMLTF

SEQ ID NO: 42826 - protein, 16 aa, Homo sapiens
  CDR3 for beta chain variable domain of TCR clone 21413 (TRBV2, TRBJ2-3)
CASSTSVEGVTDTQYF

SEQ ID NO: 42827 - protein, 14 aa, Homo sapiens
  CDR3 for alpha chain variable domain of TCR clone 21414 (TRAV12-3, TRAJ10)
SHLPLTGGGNKLTF

SEQ ID NO: 42828 - protein, 19 aa, Homo sapiens
  CDR3 for beta chain variable domain of TCR clone 21414 (TRBV6-1, TRBJ1-3)
CASVQGGGWKHHIFWRGKL

SEQ ID NO: 42829 - protein, 12 aa, Homo sapiens
  CDR3 for alpha chain variable domain of TCR clone 21415 (TRAV12-1, TRAJ40)
CVFYSGTYKYIF

SEQ ID NO: 42830 - protein, 13 aa, Homo sapiens
  CDR3 for beta chain variable domain of TCR clone 21415 (TRBV7-9, TRBJ1-2)
CASSLKQNYGYTF

SEQ ID NO: 42831 - protein, 11 aa, Homo sapiens
  CDR3 for alpha chain variable domain of TCR clone 21416 (TRAV1-2, TRAJ40)
CAVPGTYTYIF

SEQ ID NO: 42832 - protein, 16 aa, Homo sapiens
  CDR3 for beta chain variable domain of TCR clone 21416 (TRBV29-1, TRBJ2-7)
CSVEVVGTSGSYEQYF

SEQ ID NO: 42833 - protein, 14 aa, Homo sapiens
  CDR3 for alpha chain variable domain of TCR clone 21417 (TRAV14/DV4, TRAJ50)
CAMREFPTDDKVIF

SEQ ID NO: 42834 - protein, 15 aa, Homo sapiens
  CDR3 for beta chain variable domain of TCR clone 21417 (TRBV20-1, TRBJ1-1)
CSASRGVTGNTEAFF

SEQ ID NO: 42835 - protein, 16 aa, Homo sapiens
  CDR3 for alpha chain variable domain of TCR clone 21418 (TRAV8-6, TRAJ6)
CAVIPLSSGGSYIPTF

SEQ ID NO: 42836 - protein, 19 aa, Homo sapiens
  CDR3 for beta chain variable domain of TCR clone 21418 (TRBV24-1, TRBJ2-2)
CATSAGIVLAGANTGELFF

SEQ ID NO: 42837 - protein, 14 aa, Homo sapiens
  CDR3 for alpha chain variable domain of TCR clone 21419 (TRAV35, TRAJ22)
CAGLRPGSAMQLTF

SEQ ID NO: 42838 - protein, 15 aa, Homo sapiens
  CDR3 for beta chain variable domain of TCR clone 21419 (TRBV12-4, TRBJ2-5)
CASSPPTGLQETQYF

SEQ ID NO: 42839 - protein, 14 aa, Homo sapiens
  CDR3 for alpha chain variable domain of TCR clone 21420 (TRAV12-2, TRAJ40)
CAVKIPSGTYKYIF

SEQ ID NO: 42840 - protein, 16 aa, Homo sapiens
  CDR3 for beta chain variable domain of TCR clone 21420 (TRBV13, TRBJ2-3)
CQQPLQGSGGRNTQYF

SEQ ID NO: 42841 - protein, 14 aa, Homo sapiens
  CDR3 for alpha chain variable domain of TCR clone 21421 (TRAV12-3, TRAJ9)
RAMSPNTGGFKTIF

SEQ ID NO: 42842 - protein, 12 aa, Homo sapiens
  CDR3 for beta chain variable domain of TCR clone 21421 (TRBV19, TRBJ1-5)
CASSIAQQPQHF

SEQ ID NO: 42843 - protein, 15 aa, Homo sapiens
  CDR3 for alpha chain variable domain of TCR clone 21422 (TRAV26-1, TRAJ44)
CIVRANTGTASKLTF

SEQ ID NO: 42844 - protein, 16 aa, Homo sapiens
  CDR3 for beta chain variable domain of TCR clone 21422 (TRBV7-7, TRBJ2-1)
CASSVASGTSYNEQFF

SEQ ID NO: 42845 - protein, 16 aa, Homo sapiens
  CDR3 for alpha chain variable domain of TCR clone 21423 (TRAV12-3, TRAJ53)
CAMSPGSGGSNYKLTI

SEQ ID NO: 42846 - protein, 11 aa, Homo sapiens
  CDR3 for beta chain variable domain of TCR clone 21423 (TRBV29-1, TRBJ2-5)
CSEDRTGTQYF

SEQ ID NO: 42847 - protein, 11 aa, Homo sapiens
  CDR3 for alpha chain variable domain of TCR clone 21424 (TRAV12-1, TRAJ21)
CVVNDFNKFYF

SEQ ID NO: 42848 - protein, 17 aa, Homo sapiens
  CDR3 for beta chain variable domain of TCR clone 21424 (TRBV7-8, TRBJ2-1)
CASSPPTGTLAYNEQFF

SEQ ID NO: 42849 - protein, 12 aa, Homo sapiens
  CDR3 for alpha chain variable domain of TCR clone 21425 (TRAV38-1, TRAJ32)
CAPLGATNKPIF

SEQ ID NO: 42850 - protein, 14 aa, Homo sapiens
  CDR3 for beta chain variable domain of TCR clone 21425 (TRBV29-1, TRBJ2-5)
CSVETSGSGETQYF

SEQ ID NO: 42851 - protein, 11 aa, Homo sapiens
  CDR3 for alpha chain variable domain of TCR clone 21426 (TRAV29/DV5, TRAJ47)
CAATYGNKLVF

SEQ ID NO: 42852 - protein, 14 aa, Homo sapiens
  CDR3 for beta chain variable domain of TCR clone 21426 (TRBV4-1, TRBJ2-2)
CASSQAVNTGELFF

SEQ ID NO: 42853 - protein, 11 aa, Homo sapiens
  CDR3 for alpha chain variable domain of TCR clone 21427 (TRAV29/DV5, TRAJ31)
CAPFRLARLMF

SEQ ID NO: 42854 - protein, 14 aa, Homo sapiens
  CDR3 for beta chain variable domain of TCR clone 21427 (TRBV19, TRBJ2-1)
CASEVTGARNEQFF

SEQ ID NO: 42855 - protein, 13 aa, Homo sapiens
  CDR3 for alpha chain variable domain of TCR clone 21428 (TRAV21, TRAJ57)
CAVTQGGSEKLVF

SEQ ID NO: 42856 - protein, 19 aa, Homo sapiens
  CDR3 for beta chain variable domain of TCR clone 21428 (TRBV29-1, TRBJ2-7)
SAALKMLRTVRPKSSTSGR

SEQ ID NO: 42857 - protein, 15 aa, Homo sapiens
  CDR3 for alpha chain variable domain of TCR clone 21429 (TRAV8-3, TRAJ11)
CAVGLLNSGYSTLTF

SEQ ID NO: 42858 - protein, 16 aa, Homo sapiens
  CDR3 for beta chain variable domain of TCR clone 21429 (TRBV7-9, TRBJ1-2)
CASSLGFSSGEDGYTL

SEQ ID NO: 42859 - protein, 12 aa, Homo sapiens
  CDR3 for alpha chain variable domain of TCR clone 21430 (TRAV21, TRAJ11)
FAATSGYSTLTF

SEQ ID NO: 42860 - protein, 14 aa, Homo sapiens
  CDR3 for beta chain variable domain of TCR clone 21430 (TRBV20-1, TRBJ2-7)
CSAPELAGVGEQYF

SEQ ID NO: 42861 - protein, 14 aa, Homo sapiens
  CDR3 for alpha chain variable domain of TCR clone 21431 (TRAV26-1, TRAJ34)
CVVRVAYNTDKLIF

SEQ ID NO: 42862 - protein, 15 aa, Homo sapiens
  CDR3 for beta chain variable domain of TCR clone 21431 (TRBV20-1, TRBJ2-7)
CSARVPAAYFYEQYF

SEQ ID NO: 42863 - protein, 14 aa, Homo sapiens
  CDR3 for alpha chain variable domain of TCR clone 21432 (TRAV12-2, TRAJ17)
CAVLFKAAGNKLTF

SEQ ID NO: 42864 - protein, 17 aa, Homo sapiens
  CDR3 for beta chain variable domain of TCR clone 21432 (TRBV20-1, TRBJ2-2)
CSASGSGQGGSTGELFF

SEQ ID NO: 42865 - protein, 16 aa, Homo sapiens
  CDR3 for alpha chain variable domain of TCR clone 21433 (TRAV30, TRAJ24)
CGTEIVDADSWGKFQF

SEQ ID NO: 42866 - protein, 16 aa, Homo sapiens
  CDR3 for beta chain variable domain of TCR clone 21433 (TRBV7-3, TRBJ2-2)
CASSLRRGTLSGELFF

SEQ ID NO: 42867 - protein, 19 aa, Homo sapiens
  CDR3 for alpha chain variable domain of TCR clone 21434 (TRAV26-1, TRAJ52)
CIVRAHRNAGGTSYGKLTF

SEQ ID NO: 42868 - protein, 15 aa, Homo sapiens
  CDR3 for beta chain variable domain of TCR clone 21434 (TRBV29-1, TRBJ2-1)
CSGRDRKSSYNEQLF

SEQ ID NO: 42869 - protein, 15 aa, Homo sapiens
  CDR3 for alpha chain variable domain of TCR clone 21435 (TRAV27, TRAJ38)
CAARRNAGNNRKLIW

SEQ ID NO: 42870 - protein, 13 aa, Homo sapiens
  CDR3 for beta chain variable domain of TCR clone 21435 (TRBV12-5, TRBJ2-3)
CASDDRQSDTQYF

SEQ ID NO: 42871 - protein, 17 aa, Homo sapiens
  CDR3 for alpha chain variable domain of TCR clone 21436 (TRAV12-3, TRAJ6)
CAMSARGGAGGSYIPTF

SEQ ID NO: 42872 - protein, 12 aa, Homo sapiens
  CDR3 for beta chain variable domain of TCR clone 21436 (TRBV12-4, TRBJ2-3)
CASSTPPDTQYF

SEQ ID NO: 42873 - protein, 15 aa, Homo sapiens
  CDR3 for alpha chain variable domain of TCR clone 21437 (TRAV2, TRAJ9)
CAVAALNTGGFKTIF

SEQ ID NO: 42874 - protein, 15 aa, Homo sapiens
  CDR3 for beta chain variable domain of TCR clone 21437 (TRBV6-1, TRBJ2-3)
CASSERGGITDTQYF

SEQ ID NO: 42875 - protein, 11 aa, Homo sapiens
  CDR3 for alpha chain variable domain of TCR clone 21438 (TRAV3, TRAJ21)
CAVGNFNKFYF

SEQ ID NO: 42876 - protein, 13 aa, Homo sapiens
  CDR3 for beta chain variable domain of TCR clone 21438 (TRBV4-2, TRBJ2-1)
CASSPGTYNEQFF

SEQ ID NO: 42877 - protein, 11 aa, Homo sapiens
  CDR3 for alpha chain variable domain of TCR clone 21439 (TRAV3, TRAJ21)
CAVGNFNKFYF

SEQ ID NO: 42878 - protein, 16 aa, Homo sapiens
  CDR3 for beta chain variable domain of TCR clone 21439 (TRBV19, TRBJ2-1)
CASSKAAPSSYNEQFF

SEQ ID NO: 42879 - protein, 18 aa, Homo sapiens
  CDR3 for alpha chain variable domain of TCR clone 21440 (TRAV21, TRAJ52)
CAVRPSPAGGTSFGKLTF

SEQ ID NO: 42880 - protein, 13 aa, Homo sapiens
  CDR3 for beta chain variable domain of TCR clone 21440 (TRBV7-3, TRBJ1-1)
CASSQDWGAEAFF

SEQ ID NO: 42881 - protein, 14 aa, Homo sapiens
  CDR3 for alpha chain variable domain of TCR clone 21441 (TRAV8-6, TRAJ9)
CAVSSYTGGFKTNF

SEQ ID NO: 42882 - protein, 15 aa, Homo sapiens
  CDR3 for beta chain variable domain of TCR clone 21441 (TRBV2, TRBJ1-2)
CASSESRTVNYGYTF

SEQ ID NO: 42883 - protein, 17 aa, Homo sapiens
  CDR3 for alpha chain variable domain of TCR clone 21442 (TRAV26-2, TRAJ42)
RILRDVGYGGSQGNLIF

SEQ ID NO: 42884 - protein, 16 aa, Homo sapiens
  CDR3 for beta chain variable domain of TCR clone 21442 (TRBV12-4, TRBJ2-7)
CASSLIGGTGTYEQYF

SEQ ID NO: 42885 - protein, 13 aa, Homo sapiens
  CDR3 for alpha chain variable domain of TCR clone 21443 (TRAV3, TRAJ27)
CAVRSLGAGKSTF

SEQ ID NO: 42886 - protein, 13 aa, Homo sapiens
  CDR3 for beta chain variable domain of TCR clone 21443 (TRBV7-9, TRBJ2-3)
CASSPGSTDTQYF

SEQ ID NO: 42887 - protein, 14 aa, Homo sapiens
  CDR3 for alpha chain variable domain of TCR clone 21444 (TRAV12-3, TRAJ42)
CAMNYRGSQGNLIF

SEQ ID NO: 42888 - protein, 15 aa, Homo sapiens
  CDR3 for beta chain variable domain of TCR clone 21444 (TRBV5-7, TRBJ1-5)
CASSYGKLWDQPQHF

SEQ ID NO: 42889 - protein, 14 aa, Homo sapiens
  CDR3 for alpha chain variable domain of TCR clone 21445 (TRAV8-2, TRAJ4)
CVVSPSGGYNKLIF

SEQ ID NO: 42890 - protein, 15 aa, Homo sapiens
  CDR3 for beta chain variable domain of TCR clone 21445 (TRBV4-1, TRBJ1-4)
CASSDTGGTNGKLFF

SEQ ID NO: 42891 - protein, 16 aa, Homo sapiens
  CDR3 for alpha chain variable domain of TCR clone 21446 (TRAV29/DV5, TRAJ52)
CAASGRRGTSYGKLTF

SEQ ID NO: 42892 - protein, 15 aa, Homo sapiens
  CDR3 for beta chain variable domain of TCR clone 21446 (TRBV6-3, TRBJ1-2)
CASSYRGQGRVGYTF

SEQ ID NO: 42893 - protein, 13 aa, Homo sapiens
  CDR3 for alpha chain variable domain of TCR clone 21447 (TRAV20, TRAJ37)
CAGCSSNTGKLIF

SEQ ID NO: 42894 - protein, 11 aa, Homo sapiens
  CDR3 for beta chain variable domain of TCR clone 21447 (TRBV12-4, TRBJ2-3)
CASTDTDTQYF

SEQ ID NO: 42895 - protein, 13 aa, Homo sapiens
  CDR3 for alpha chain variable domain of TCR clone 21448 (TRAV17, TRAJ54)
CATVVQGAQKLVF

SEQ ID NO: 42896 - protein, 15 aa, Homo sapiens
  CDR3 for beta chain variable domain of TCR clone 21448 (TRBV13, TRBJ2-1)
CASSLLSGLNNEQFF

SEQ ID NO: 42897 - protein, 10 aa, Homo sapiens
  CDR3 for alpha chain variable domain of TCR clone 21449 (TRAV13-2, TRAJ20)
CAENICRLQA

SEQ ID NO: 42898 - protein, 12 aa, Homo sapiens
  CDR3 for beta chain variable domain of TCR clone 21449 (TRBV14, TRBJ2-7)
CASSRLKGEQYF

SEQ ID NO: 42899 - protein, 11 aa, Homo sapiens
  CDR3 for alpha chain variable domain of TCR clone 21450 (TRAV2, TRAJ33)
CSVESNYQLIW

SEQ ID NO: 42900 - protein, 15 aa, Homo sapiens
  CDR3 for beta chain variable domain of TCR clone 21450 (TRBV19, TRBJ1-1)
CASTSGQIQNTEAFF

SEQ ID NO: 42901 - protein, 15 aa, Homo sapiens
  CDR3 for alpha chain variable domain of TCR clone 21451 (TRAV19, TRAJ45)
CALSASGGGADGLTF

SEQ ID NO: 42902 - protein, 15 aa, Homo sapiens
  CDR3 for beta chain variable domain of TCR clone 21451 (TRBV13, TRBJ1-5)
CASSLTGRGHQPQHF

SEQ ID NO: 42903 - protein, 12 aa, Homo sapiens
  CDR3 for alpha chain variable domain of TCR clone 21452 (TRAV21, TRAJ31)
CAVWGNNARLMF

SEQ ID NO: 42904 - protein, 13 aa, Homo sapiens
  CDR3 for beta chain variable domain of TCR clone 21452 (TRBV7-9, TRBJ1-2)
CASSLKQNYGYTF

SEQ ID NO: 42905 - protein, 12 aa, Homo sapiens
  CDR3 for alpha chain variable domain of TCR clone 21453 (TRAV12-3, TRAJ20)
CAMVRGDYKLSF

SEQ ID NO: 42906 - protein, 17 aa, Homo sapiens
  CDR3 for beta chain variable domain of TCR clone 21453 (TRBV13, TRBJ2-3)
CASSLSRVAGGRNTQYF

SEQ ID NO: 42907 - protein, 12 aa, Homo sapiens
  CDR3 for alpha chain variable domain of TCR clone 21454 (TRAV21, TRAJ33)
CAKMDSNYQLIW

SEQ ID NO: 42908 - protein, 15 aa, Homo sapiens
  CDR3 for beta chain variable domain of TCR clone 21454 (TRBV6-3, TRBJ2-7)
CASSSPGTVFYEQYF

SEQ ID NO: 42909 - protein, 13 aa, Homo sapiens
  CDR3 for alpha chain variable domain of TCR clone 21455 (TRAV21, TRAJ27)
CAALNTNAGKSTF

SEQ ID NO: 42910 - protein, 14 aa, Homo sapiens
  CDR3 for beta chain variable domain of TCR clone 21455 (TRBV27, TRBJ1-1)
CASSLLSGLYEAFF

SEQ ID NO: 42911 - protein, 14 aa, Homo sapiens
  CDR3 for alpha chain variable domain of TCR clone 21456 (TRAV12-3, TRAJ15)
CAMIPPQAGTALIF

SEQ ID NO: 42912 - protein, 12 aa, Homo sapiens
  CDR3 for beta chain variable domain of TCR clone 21456 (TRBV11-2, TRBJ2-2)
CASRFGGGELFF

SEQ ID NO: 42913 - protein, 14 aa, Homo sapiens
  CDR3 for alpha chain variable domain of TCR clone 21457 (TRAV26-1, TRAJ39)
CIVRGSRAGNMLTC

SEQ ID NO: 42914 - protein, 15 aa, Homo sapiens
  CDR3 for beta chain variable domain of TCR clone 21457 (TRBV7-9, TRBJ1-5)
CASSQGHQPNQPQHF

SEQ ID NO: 42915 - protein, 14 aa, Homo sapiens
  CDR3 for alpha chain variable domain of TCR clone 21458 (TRAV35, TRAJ50)
CAGHRKTSYDKVIF

SEQ ID NO: 42916 - protein, 13 aa, Homo sapiens
  CDR3 for beta chain variable domain of TCR clone 21458 (TRBV7-7, TRBJ2-3)
CASSISRADTQYF

SEQ ID NO: 42917 - protein, 15 aa, Homo sapiens
  CDR3 for alpha chain variable domain of TCR clone 21459 (TRAV4, TRAJ39)
CLVGPNNNAGNMLTF

SEQ ID NO: 42918 - protein, 13 aa, Homo sapiens
  CDR3 for beta chain variable domain of TCR clone 21459 (TRBV11-2, TRBJ2-5)
CASSSTGEENQYF

SEQ ID NO: 42919 - protein, 14 aa, Homo sapiens
  CDR3 for alpha chain variable domain of TCR clone 21460 (TRAV26-1, TRAJ38)
CIADNAGNNRKLIW

SEQ ID NO: 42920 - protein, 13 aa, Homo sapiens
  CDR3 for beta chain variable domain of TCR clone 21460 (TRBV20-1, TRBJ1-1)
CSARGGRNTEAFF

SEQ ID NO: 42921 - protein, 14 aa, Homo sapiens
  CDR3 for alpha chain variable domain of TCR clone 21461 (TRAV13-1, TRAJ35)
CAASKGGFGNVLHC

SEQ ID NO: 42922 - protein, 13 aa, Homo sapiens
  CDR3 for beta chain variable domain of TCR clone 21461 (TRBV7-3, TRBJ1-1)
CASSEDWGAEAFF

SEQ ID NO: 42923 - protein, 14 aa, Homo sapiens
  CDR3 for alpha chain variable domain of TCR clone 21462 (TRAV12-2, TRAJ17)
CAVLFKAAGNKLTF

SEQ ID NO: 42924 - protein, 15 aa, Homo sapiens
  CDR3 for beta chain variable domain of TCR clone 21462 (TRBV7-9, TRBJ1-6)
CASSSPGRGNSPLHF

SEQ ID NO: 42925 - protein, 11 aa, Homo sapiens
  CDR3 for alpha chain variable domain of TCR clone 21463 (TRAV16, TRAJ29)
WAPSGNTPLVF

SEQ ID NO: 42926 - protein, 15 aa, Homo sapiens
  CDR3 for beta chain variable domain of TCR clone 21463 (TRBV5-7, TRBJ2-7)
RASSPYFEGSYEQYF

SEQ ID NO: 42927 - protein, 16 aa, Homo sapiens
  CDR3 for alpha chain variable domain of TCR clone 21464 (TRAV30, TRAJ24)
CGTEIVDADSWGKFQF

SEQ ID NO: 42928 - protein, 12 aa, Homo sapiens
  CDR3 for beta chain variable domain of TCR clone 21464 (TRBV11-2, TRBJ2-2)
CASSRGGGELFF

SEQ ID NO: 42929 - protein, 15 aa, Homo sapiens
  CDR3 for alpha chain variable domain of TCR clone 21465 (TRAV17, TRAJ23)
CATDAEDNQGGKLIF

SEQ ID NO: 42930 - protein, 12 aa, Homo sapiens
  CDR3 for beta chain variable domain of TCR clone 21465 (TRBV2, TRBJ2-1)
CAKREGYNEQFL

SEQ ID NO: 42931 - protein, 15 aa, Homo sapiens
  CDR3 for alpha chain variable domain of TCR clone 21466 (TRAV2, TRAJ15)
CAVEDRGQSGTALIF

SEQ ID NO: 42932 - protein, 13 aa, Homo sapiens
  CDR3 for beta chain variable domain of TCR clone 21466 (TRBV10-2, TRBJ2-7)
CASGASGGYEQYF

SEQ ID NO: 42933 - protein, 11 aa, Homo sapiens
  CDR3 for alpha chain variable domain of TCR clone 21467 (TRAV1-1, TRAJ23)
CAVRQGGELIF

SEQ ID NO: 42934 - protein, 13 aa, Homo sapiens
  CDR3 for beta chain variable domain of TCR clone 21467 (TRBV11-2, TRBJ2-5)
CASSRGPSETQYF

SEQ ID NO: 42935 - protein, 11 aa, Homo sapiens
  CDR3 for alpha chain variable domain of TCR clone 21468 (TRAV2, TRAJ33)
CAVESNYQLIW

SEQ ID NO: 42936 - protein, 15 aa, Homo sapiens
  CDR3 for beta chain variable domain of TCR clone 21468 (TRBV19, TRBJ1-1)
CASTSGQIQNAEAFF

SEQ ID NO: 42937 - protein, 20 aa, Homo sapiens
  CDR3 for alpha chain variable domain of TCR clone 21469 (TRAV26-1, TRAJ42)
CCVLLHRQTYYGVSQGNLIF

SEQ ID NO: 42938 - protein, 16 aa, Homo sapiens
  CDR3 for beta chain variable domain of TCR clone 21469 (TRBV7-3, TRBJ2-2)
CASSLKRGTLSGELFF

SEQ ID NO: 42939 - protein, 14 aa, Homo sapiens
  CDR3 for alpha chain variable domain of TCR clone 21470 (TRAV13-2, TRAJ43)
CAEIPTYNNNDMRF

SEQ ID NO: 42940 - protein, 15 aa, Homo sapiens
  CDR3 for beta chain variable domain of TCR clone 21470 (TRBV7-9, TRBJ2-2)
CASGPLDTLPGELFF

SEQ ID NO: 42941 - protein, 17 aa, Homo sapiens
  CDR3 for alpha chain variable domain of TCR clone 21471 (TRAV13-1, TRAJ31)
FAPRDRLMFGDGTQLVV

SEQ ID NO: 42942 - protein, 12 aa, Homo sapiens
  CDR3 for beta chain variable domain of TCR clone 21471 (TRBV7-9, TRBJ2-7)
CASSLEGYEQYF

SEQ ID NO: 42943 - protein, 13 aa, Homo sapiens
  CDR3 for alpha chain variable domain of TCR clone 21472 (TRAV12-3, TRAJ33)
CAMSVNRNYQLIW

SEQ ID NO: 42944 - protein, 13 aa, Homo sapiens
  CDR3 for beta chain variable domain of TCR clone 21472 (TRBV7-2, TRBJ2-2)
CASSLAVTGELFF

SEQ ID NO: 42945 - protein, 11 aa, Homo sapiens
  CDR3 for alpha chain variable domain of TCR clone 21473 (TRAV1-2, TRAJ40)
CAVPGTYKYIF

SEQ ID NO: 42946 - protein, 16 aa, Homo sapiens
  CDR3 for beta chain variable domain of TCR clone 21473 (TRBV29-1, TRBJ2-7)
CSVGVVGTSGSYEQYF

SEQ ID NO: 42947 - protein, 18 aa, Homo sapiens
  CDR3 for alpha chain variable domain of TCR clone 21474 (TRAV13-1, TRAJ52)
CAAKNPNAGGTSYGKLTF

SEQ ID NO: 42948 - protein, 13 aa, Homo sapiens
  CDR3 for beta chain variable domain of TCR clone 21474 (TRBV19, TRBJ1-2)
CASSVPGQDGYTF

SEQ ID NO: 42949 - protein, 14 aa, Homo sapiens
  CDR3 for alpha chain variable domain of TCR clone 21475 (TRAV21, TRAJ35)
CAVMPIGFGNVLHC

SEQ ID NO: 42950 - protein, 12 aa, Homo sapiens
  CDR3 for beta chain variable domain of TCR clone 21475 (TRBV7-9, TRBJ2-7)
CASSIKREEHYF

SEQ ID NO: 42951 - protein, 17 aa, Homo sapiens
  CDR3 for alpha chain variable domain of TCR clone 21476 (TRAV3, TRAJ6)
CAVRDGPRAGGSYIPTL

SEQ ID NO: 42952 - protein, 14 aa, Homo sapiens
  CDR3 for beta chain variable domain of TCR clone 21476 (TRBV7-2, TRBJ2-7)
CASSPKTSFYEQYF

SEQ ID NO: 42953 - protein, 14 aa, Homo sapiens
  CDR3 for alpha chain variable domain of TCR clone 21477 (TRAV1-2, TRAJ16)
CAVNRFSDGQKLLF

SEQ ID NO: 42954 - protein, 16 aa, Homo sapiens
  CDR3 for beta chain variable domain of TCR clone 21477 (TRBV10-3, TRBJ2-1)
CAISGVGDGGGGEQFF

SEQ ID NO: 42955 - protein, 14 aa, Homo sapiens
  CDR3 for alpha chain variable domain of TCR clone 21478 (TRAV2, TRAJ37)
CAVDFTSNTGKLIF

SEQ ID NO: 42956 - protein, 15 aa, Homo sapiens
  CDR3 for beta chain variable domain of TCR clone 21478 (TRBV20-1, TRBJ1-1)
CSASRWVTGNTEAFF

SEQ ID NO: 42957 - protein, 14 aa, Homo sapiens
  CDR3 for alpha chain variable domain of TCR clone 21479 (TRAV1-2, TRAJ16)
CAVNRFSDGQKLLF

SEQ ID NO: 42958 - protein, 13 aa, Homo sapiens
  CDR3 for beta chain variable domain of TCR clone 21479 (TRBV7-9, TRBJ1-2)
CASGLKQNYGYTF

SEQ ID NO: 42959 - protein, 16 aa, Homo sapiens
  CDR3 for alpha chain variable domain of TCR clone 21480 (TRAV8-1, TRAJ42)
CAVTSRYGGSQGNPIF

SEQ ID NO: 42960 - protein, 12 aa, Homo sapiens
  CDR3 for beta chain variable domain of TCR clone 21480 (TRBV6-3, TRBJ2-7)
CASSLGRRGLYF

SEQ ID NO: 42961 - protein, 15 aa, Homo sapiens
  CDR3 for alpha chain variable domain of TCR clone 21481 (TRAV8-3, TRAJ15)
CAVGAPNQAGTALIF

SEQ ID NO: 42962 - protein, 14 aa, Homo sapiens
  CDR3 for beta chain variable domain of TCR clone 21481 (TRBV20-1, TRBJ2-1)
CSTNDEASYNEQFF

SEQ ID NO: 42963 - protein, 13 aa, Homo sapiens
  CDR3 for alpha chain variable domain of TCR clone 21482 (TRAV38-1, TRAJ42)
CARWGGSQGNLIF

SEQ ID NO: 42964 - protein, 17 aa, Homo sapiens
  CDR3 for beta chain variable domain of TCR clone 21482 (TRBV20-1, TRBJ2-1)
CSARDPLAGVRDNEQFF

SEQ ID NO: 42965 - protein, 18 aa, Homo sapiens
  CDR3 for alpha chain variable domain of TCR clone 21483 (TRAV12-3, TRAJ52)
CAMSVGGAGGTSDGKLTF

SEQ ID NO: 42966 - protein, 15 aa, Homo sapiens
  CDR3 for beta chain variable domain of TCR clone 21483 (TRBV27, TRBJ1-6)
CASSFDRGLGSPLHF

SEQ ID NO: 42967 - protein, 14 aa, Homo sapiens
  CDR3 for alpha chain variable domain of TCR clone 21484 (TRAV1-2, TRAJ8)
CAVREDTGFQKLVF

SEQ ID NO: 42968 - protein, 12 aa, Homo sapiens
  CDR3 for beta chain variable domain of TCR clone 21484 (TRBV4-1, TRBJ2-3)
CASSQGTDTQYF

SEQ ID NO: 42969 - protein, 10 aa, Homo sapiens
  CDR3 for alpha chain variable domain of TCR clone 21485 (TRAV1-1, TRAJ5)
CAVIWESTYF

SEQ ID NO: 42970 - protein, 15 aa, Homo sapiens
  CDR3 for beta chain variable domain of TCR clone 21485 (TRBV4-1, TRBJ1-4)
CASSDTGGTNEKLFF

SEQ ID NO: 42971 - protein, 12 aa, Homo sapiens
  CDR3 for alpha chain variable domain of TCR clone 21486 (TRAV12-1, TRAJ40)
CVVYSGTYKYIF

SEQ ID NO: 42972 - protein, 14 aa, Homo sapiens
  CDR3 for beta chain variable domain of TCR clone 21486 (TRBV19, TRBJ1-1)
CASRRGQGNTEAFF

SEQ ID NO: 42973 - protein, 15 aa, Homo sapiens
  CDR3 for alpha chain variable domain of TCR clone 21487 (TRAV1-2, TRAJ28)
CAVQYSGAGSYQLTF

SEQ ID NO: 42974 - protein, 13 aa, Homo sapiens
  CDR3 for beta chain variable domain of TCR clone 21487 (TRBV20-1, TRBJ2-7)
CSATHTSGYERYF

SEQ ID NO: 42975 - protein, 17 aa, Homo sapiens
  CDR3 for alpha chain variable domain of TCR clone 21488 (TRAV3, TRAJ38)
CAVRDCLNAGNNRKLIW

SEQ ID NO: 42976 - protein, 13 aa, Homo sapiens
  CDR3 for beta chain variable domain of TCR clone 21488 (TRBV23-1, TRBJ1-4)
CASRGKFNEELFF

SEQ ID NO: 42977 - protein, 12 aa, Homo sapiens
  CDR3 for alpha chain variable domain of TCR clone 21489 (TRAV17, TRAJ4)
CSTDGGYNKLIF

SEQ ID NO: 42978 - protein, 13 aa, Homo sapiens
  CDR3 for beta chain variable domain of TCR clone 21489 (TRBV29-1, TRBJ2-2)
CSTTGVNTGELFF

SEQ ID NO: 42979 - protein, 12 aa, Homo sapiens
  CDR3 for alpha chain variable domain of TCR clone 21490 (TRAV8-3, TRAJ20)
CAVGANDYKLSF

SEQ ID NO: 42980 - protein, 16 aa, Homo sapiens
  CDR3 for beta chain variable domain of TCR clone 21490 (TRBV19, TRBJ2-2)
CASRSPGTGATVELFF

SEQ ID NO: 42981 - protein, 12 aa, Homo sapiens
  CDR3 for alpha chain variable domain of TCR clone 21491 (TRAV16, TRAJ10)
CSRTGGGNKLTF

SEQ ID NO: 42982 - protein, 15 aa, Homo sapiens
  CDR3 for beta chain variable domain of TCR clone 21491 (TRBV6-3, TRBJ2-7)
CASISPGTVFYEQYF

SEQ ID NO: 42983 - protein, 15 aa, Homo sapiens
  CDR3 for alpha chain variable domain of TCR clone 21492 (TRAV3, TRAJ22)
CAVRDRGGSARHLTF

SEQ ID NO: 42984 - protein, 16 aa, Homo sapiens
  CDR3 for beta chain variable domain of TCR clone 21492 (TRBV5-4, TRBJ2-3)
CASQQPGAGGADTQYF

SEQ ID NO: 42985 - protein, 16 aa, Homo sapiens
  CDR3 for alpha chain variable domain of TCR clone 21493 (TRAV21, TRAJ52)
CAVTNAGGTSYGKPTF

SEQ ID NO: 42986 - protein, 11 aa, Homo sapiens
  CDR3 for beta chain variable domain of TCR clone 21493 (TRBV2, TRBJ1-1)
CASREGTEAFF

SEQ ID NO: 42987 - protein, 11 aa, Homo sapiens
  CDR3 for alpha chain variable domain of TCR clone 21494 (TRAV17, TRAJ43)
CATPRSNDMRF

SEQ ID NO: 42988 - protein, 13 aa, Homo sapiens
  CDR3 for beta chain variable domain of TCR clone 21494 (TRBV7-9, TRBJ1-2)
CASSLKQNYGYTF

SEQ ID NO: 42989 - protein, 12 aa, Homo sapiens
  CDR3 for alpha chain variable domain of TCR clone 21495 (TRAV21, TRAJ3)
CCFYSSASTIIF

SEQ ID NO: 42990 - protein, 16 aa, Homo sapiens
  CDR3 for beta chain variable domain of TCR clone 21495 (TRBV19, TRBJ2-1)
CASSKAGPSSYNEQFF

SEQ ID NO: 42991 - protein, 14 aa, Homo sapiens
  CDR3 for alpha chain variable domain of TCR clone 21496 (TRAV12-2, TRAJ13)
CAVKKTGGYQKVTF

SEQ ID NO: 42992 - protein, 17 aa, Homo sapiens
  CDR3 for beta chain variable domain of TCR clone 21496 (TRBV15, TRBJ2-4)
CATSRDNPQTGLDTQYF

SEQ ID NO: 42993 - protein, 16 aa, Homo sapiens
  CDR3 for alpha chain variable domain of TCR clone 21497 (TRAV26-1, TRAJ53)
CIVRVAMGGSNYKLTF

SEQ ID NO: 42994 - protein, 12 aa, Homo sapiens
  CDR3 for beta chain variable domain of TCR clone 21497 (TRBV7-9, TRBJ1-5)
CASSPQGQPQHL

SEQ ID NO: 42995 - protein, 16 aa, Homo sapiens
  CDR3 for alpha chain variable domain of TCR clone 21498 (TRAV27, TRAJ13)
CAGAKSDSGGYQKVTF

SEQ ID NO: 42996 - protein, 14 aa, Homo sapiens
  CDR3 for beta chain variable domain of TCR clone 21498 (TRBV19, TRBJ2-1)
CASPTFVLSGEQFF

SEQ ID NO: 42997 - protein, 12 aa, Homo sapiens
  CDR3 for alpha chain variable domain of TCR clone 21499 (TRAV8-3, TRAJ26)
CAGDNYGQNFVF

SEQ ID NO: 42998 - protein, 15 aa, Homo sapiens
  CDR3 for beta chain variable domain of TCR clone 21499 (TRBV9, TRBJ2-1)
CASSLAGSSYNEQFS

SEQ ID NO: 42999 - protein, 13 aa, Homo sapiens
  CDR3 for alpha chain variable domain of TCR clone 21500 (TRAV17, TRAJ29)
CATDAFRKHTSCL

SEQ ID NO: 43000 - protein, 13 aa, Homo sapiens
  CDR3 for beta chain variable domain of TCR clone 21500 (TRBV5-6, TRBJ2-6)
CASTSSGANVLTF

SEQ ID NO: 43001 - protein, 14 aa, Homo sapiens
  CDR3 for alpha chain variable domain of TCR clone 21501 (TRAV38-1, TRAJ45)
CAYYPGGGADGLTF

SEQ ID NO: 43002 - protein, 20 aa, Homo sapiens
  CDR3 for beta chain variable domain of TCR clone 21501 (TRBV28, TRBJ2-1)
CASTPIGRSPGLAGGNEQFF

SEQ ID NO: 43003 - protein, 15 aa, Homo sapiens
  CDR3 for alpha chain variable domain of TCR clone 21502 (TRAV35, TRAJ40)
CAGQLGTPGTYKYIF

SEQ ID NO: 43004 - protein, 14 aa, Homo sapiens
  CDR3 for beta chain variable domain of TCR clone 21502 (TRBV7-3, TRBJ2-1)
CASSLAGGTNEQFF

SEQ ID NO: 43005 - protein, 12 aa, Homo sapiens
  CDR3 for alpha chain variable domain of TCR clone 21503 (TRAV2, TRAJ9)
CAVGAGGFKTIF

SEQ ID NO: 43006 - protein, 16 aa, Homo sapiens
  CDR3 for beta chain variable domain of TCR clone 21503 (TRBV13, TRBJ2-2)
CASSPGTGEHTGELFF

SEQ ID NO: 43007 - protein, 14 aa, Homo sapiens
  CDR3 for alpha chain variable domain of TCR clone 21504 (TRAV17, TRAJ33)
CATDARRSDYQLIW

SEQ ID NO: 43008 - protein, 14 aa, Homo sapiens
  CDR3 for beta chain variable domain of TCR clone 21504 (TRBV25-1, TRBJ1-4)
CASSGGGQPEKLFF

SEQ ID NO: 43009 - protein, 12 aa, Homo sapiens
  CDR3 for alpha chain variable domain of TCR clone 21505 (TRAV13-1, TRAJ21)
CAAKEGFNKFYF

SEQ ID NO: 43010 - protein, 14 aa, Homo sapiens
  CDR3 for beta chain variable domain of TCR clone 21505 (TRBV12-4, TRBJ1-1)
CASSLGTGGTEAFF

SEQ ID NO: 43011 - protein, 15 aa, Homo sapiens
  CDR3 for alpha chain variable domain of TCR clone 21506 (TRAV8-2, TRAJ40)
CVVLGTTSVTYKYIF

SEQ ID NO: 43012 - protein, 16 aa, Homo sapiens
  CDR3 for beta chain variable domain of TCR clone 21506 (TRBV7-3, TRBJ2-1)
CASSLEGYRSYNEQFF

SEQ ID NO: 43013 - protein, 12 aa, Homo sapiens
  CDR3 for alpha chain variable domain of TCR clone 21507 (TRAV13-2, TRAJ49)
CAENSFGNQFYF

SEQ ID NO: 43014 - protein, 14 aa, Homo sapiens
  CDR3 for beta chain variable domain of TCR clone 21507 (TRBV19, TRBJ1-1)
CASSIEVSGGSAFF

SEQ ID NO: 43015 - protein, 14 aa, Homo sapiens
  CDR3 for alpha chain variable domain of TCR clone 21508 (TRAV1-2, TRAJ8)
CAVREDTGFQKLVF

SEQ ID NO: 43016 - protein, 13 aa, Homo sapiens
  CDR3 for beta chain variable domain of TCR clone 21508 (TRBV27, TRBJ1-4)
CASSLMGDEKLFF

SEQ ID NO: 43017 - protein, 12 aa, Homo sapiens
  CDR3 for alpha chain variable domain of TCR clone 21509 (TRAV12-1, TRAJ20)
CVVNIDDYKLSF

SEQ ID NO: 43018 - protein, 13 aa, Homo sapiens
  CDR3 for beta chain variable domain of TCR clone 21509 (TRBV7-3, TRBJ2-5)
CASSFRGRETQYF

SEQ ID NO: 43019 - protein, 13 aa, Homo sapiens
  CDR3 for alpha chain variable domain of TCR clone 21510 (TRAV21, TRAJ20)
CAVGLRVDYKLSF

SEQ ID NO: 43020 - protein, 13 aa, Homo sapiens
  CDR3 for beta chain variable domain of TCR clone 21510 (TRBV6-1, TRBJ1-1)
CASSRQGNTEALF

SEQ ID NO: 43021 - protein, 12 aa, Homo sapiens
  CDR3 for alpha chain variable domain of TCR clone 21511 (TRAV29/DV5, TRAJ43)
CAAPYNNNDMRF

SEQ ID NO: 43022 - protein, 12 aa, Homo sapiens
  CDR3 for beta chain variable domain of TCR clone 21511 (TRBV27, TRBJ2-7)
CASSGGFYEQYF

SEQ ID NO: 43023 - protein, 11 aa, Homo sapiens
  CDR3 for alpha chain variable domain of TCR clone 21512 (TRAV2, TRAJ33)
CAVESNYQLIW

SEQ ID NO: 43024 - protein, 15 aa, Homo sapiens
  CDR3 for beta chain variable domain of TCR clone 21512 (TRBV19, TRBJ1-1)
CAITSGQIQNTEAFF

SEQ ID NO: 43025 - protein, 13 aa, Homo sapiens
  CDR3 for alpha chain variable domain of TCR clone 21513 (TRAV2, TRAJ15)
CAVASQAGTALIF

SEQ ID NO: 43026 - protein, 16 aa, Homo sapiens
  CDR3 for beta chain variable domain of TCR clone 21513 (TRBV19, TRBJ2-1)
CASSKAGPSSYNEQFF

SEQ ID NO: 43027 - protein, 10 aa, Homo sapiens
  CDR3 for alpha chain variable domain of TCR clone 21514 (TRAV16, TRAJ39)
CSSTGNMLTF

SEQ ID NO: 43028 - protein, 14 aa, Homo sapiens
  CDR3 for beta chain variable domain of TCR clone 21514 (TRBV27, TRBJ1-4)
CASSLDGGWEKLFF

SEQ ID NO: 43029 - protein, 16 aa, Homo sapiens
  CDR3 for alpha chain variable domain of TCR clone 21515 (TRAV30, TRAJ26)
CGTESVGDNYGQNFVF

SEQ ID NO: 43030 - protein, 13 aa, Homo sapiens
  CDR3 for beta chain variable domain of TCR clone 21515 (TRBV19, TRBJ1-2)
CASSISEGYGYTF

SEQ ID NO: 43031 - protein, 13 aa, Homo sapiens
  CDR3 for alpha chain variable domain of TCR clone 21516 (TRAV2, TRAJ15)
CAVASQAGTALLF

SEQ ID NO: 43032 - protein, 16 aa, Homo sapiens
  CDR3 for beta chain variable domain of TCR clone 21516 (TRBV5-1, TRBJ1-1)
CASSSGGNSLNTEAFF

SEQ ID NO: 43033 - protein, 13 aa, Homo sapiens
  CDR3 for alpha chain variable domain of TCR clone 21517 (TRAV12-1, TRAJ6)
CVVFPGGSYIPTF

SEQ ID NO: 43034 - protein, 14 aa, Homo sapiens
  CDR3 for beta chain variable domain of TCR clone 21517 (TRBV19, TRBJ2-1)
CASPTFVLSGEQFF

SEQ ID NO: 43035 - protein, 13 aa, Homo sapiens
  CDR3 for alpha chain variable domain of TCR clone 21518 (TRAV13-1, TRAJ21)
CAASIYNFNKFYF

SEQ ID NO: 43036 - protein, 16 aa, Homo sapiens
  CDR3 for beta chain variable domain of TCR clone 21518 (TRBV19, TRBJ2-1)
CASSKAGPSSYNEQFF

SEQ ID NO: 43037 - protein, 12 aa, Homo sapiens
  CDR3 for alpha chain variable domain of TCR clone 21519 (TRAV2, TRAJ9)
CAVGVGGFKTIF

SEQ ID NO: 43038 - protein, 16 aa, Homo sapiens
  CDR3 for beta chain variable domain of TCR clone 21519 (TRBV13, TRBJ2-2)
CASSPRTGEHTGELFF

SEQ ID NO: 43039 - protein, 15 aa, Homo sapiens
  CDR3 for alpha chain variable domain of TCR clone 21520 (TRAV26-1, TRAJ15)
CIVRAANQAGTALIL

SEQ ID NO: 43040 - protein, 15 aa, Homo sapiens
  CDR3 for beta chain variable domain of TCR clone 21520 (TRBV20-1, TRBJ1-1)
CSARSAATSNTEAFF

SEQ ID NO: 43041 - protein, 14 aa, Homo sapiens
  CDR3 for alpha chain variable domain of TCR clone 21521 (TRAV12-2, TRAJ45)
CAGNIGGGADGLTF

SEQ ID NO: 43042 - protein, 13 aa, Homo sapiens
  CDR3 for beta chain variable domain of TCR clone 21521 (TRBV19, TRBJ2-2)
CASSIWSTGELFF

SEQ ID NO: 43043 - protein, 16 aa, Homo sapiens
  CDR3 for alpha chain variable domain of TCR clone 21522 (TRAV3, TRAJ21)
CAVRDIERGNFNKFYF

SEQ ID NO: 43044 - protein, 13 aa, Homo sapiens
  CDR3 for beta chain variable domain of TCR clone 21522 (TRBV27, TRBJ2-7)
CASSLTTGYEQYL

SEQ ID NO: 43045 - protein, 14 aa, Homo sapiens
  CDR3 for alpha chain variable domain of TCR clone 21523 (TRAV9-2, TRAJ39)
CALYIYNAGNMLTF

SEQ ID NO: 43046 - protein, 13 aa, Homo sapiens
  CDR3 for beta chain variable domain of TCR clone 21523 (TRBV7-9, TRBJ2-1)
CQQPPDSLYEQFF

SEQ ID NO: 43047 - protein, 11 aa, Homo sapiens
  CDR3 for alpha chain variable domain of TCR clone 21524 (TRAV9-2, TRAJ39)
NIYNAGNMLTF

SEQ ID NO: 43048 - protein, 16 aa, Homo sapiens
  CDR3 for beta chain variable domain of TCR clone 21524 (TRBV19, TRBJ2-2)
CASRSPGTGATGELFF

SEQ ID NO: 43049 - protein, 13 aa, Homo sapiens
  CDR3 for alpha chain variable domain of TCR clone 21525 (TRAV27, TRAJ45)
CRSSGGGADELTF

SEQ ID NO: 43050 - protein, 17 aa, Homo sapiens
  CDR3 for beta chain variable domain of TCR clone 21525 (TRBV11-2, TRBJ2-1)
CASSLYPPGVEYNEQFF

SEQ ID NO: 43051 - protein, 17 aa, Homo sapiens
  CDR3 for alpha chain variable domain of TCR clone 21526 (TRAV12-3, TRAJ6)
CAMSARGGAGGSYIPTL

SEQ ID NO: 43052 - protein, 12 aa, Homo sapiens
  CDR3 for beta chain variable domain of TCR clone 21526 (TRBV12-4, TRBJ2-3)
CASSTLPDTQYF

SEQ ID NO: 43053 - protein, 16 aa, Homo sapiens
  CDR3 for alpha chain variable domain of TCR clone 21527 (TRAV3, TRAJ10)
CAVRDMRAGGGNKLTF

SEQ ID NO: 43054 - protein, 11 aa, Homo sapiens
  CDR3 for beta chain variable domain of TCR clone 21527 (TRBV12-4, TRBJ2-3)
CASTATDTQYF

SEQ ID NO: 43055 - protein, 14 aa, Homo sapiens
  CDR3 for alpha chain variable domain of TCR clone 21528 (TRAV12-1, TRAJ30)
CVVNIGGRDDKIIF

SEQ ID NO: 43056 - protein, 15 aa, Homo sapiens
  CDR3 for beta chain variable domain of TCR clone 21528 (TRBV18, TRBJ1-2)
CASSPSNTSNYGYTF

SEQ ID NO: 43057 - protein, 13 aa, Homo sapiens
  CDR3 for alpha chain variable domain of TCR clone 21529 (TRAV2, TRAJ15)
CAVASQAGTALIF

SEQ ID NO: 43058 - protein, 16 aa, Homo sapiens
  CDR3 for beta chain variable domain of TCR clone 21529 (TRBV12-5, TRBJ2-5)
CASGPRTSGNQETQYF

SEQ ID NO: 43059 - protein, 16 aa, Homo sapiens
  CDR3 for alpha chain variable domain of TCR clone 21530 (TRAV8-3, TRAJ13)
CAVGAYPSGGYQKVTF

SEQ ID NO: 43060 - protein, 15 aa, Homo sapiens
  CDR3 for beta chain variable domain of TCR clone 21530 (TRBV19, TRBJ1-5)
CASSIVWADNQPQHL

SEQ ID NO: 43061 - protein, 13 aa, Homo sapiens
  CDR3 for alpha chain variable domain of TCR clone 21531 (TRAV21, TRAJ36)
CAVIKTGANNLFF

SEQ ID NO: 43062 - protein, 10 aa, Homo sapiens
  CDR3 for beta chain variable domain of TCR clone 21531 (TRBV29-1, TRBJ2-3)
NAGGRDTQYF

SEQ ID NO: 43063 - protein, 17 aa, Homo sapiens
  CDR3 for alpha chain variable domain of TCR clone 21532 (TRAV4, TRAJ13)
CLVGVQGSSGGYQKVTF

SEQ ID NO: 43064 - protein, 18 aa, Homo sapiens
  CDR3 for beta chain variable domain of TCR clone 21532 (TRBV15, TRBJ2-3)
CATSRDGARSWDTDTQHF

SEQ ID NO: 43065 - protein, 17 aa, Homo sapiens
  CDR3 for alpha chain variable domain of TCR clone 21533 (TRAV13-1, TRAJ31)
CAPRDRLMFGDGTQLVV

SEQ ID NO: 43066 - protein, 13 aa, Homo sapiens
  CDR3 for beta chain variable domain of TCR clone 21533 (TRBV7-9, TRBJ1-2)
CASSLKQNYGYTF

SEQ ID NO: 43067 - protein, 13 aa, Homo sapiens
  CDR3 for alpha chain variable domain of TCR clone 21534 (TRAV13-1, TRAJ5)
CEARVTGRRALTF

SEQ ID NO: 43068 - protein, 15 aa, Homo sapiens
  CDR3 for beta chain variable domain of TCR clone 21534 (TRBV7-9, TRBJ2-7)
CASSPGGGLTYEQYF

SEQ ID NO: 43069 - protein, 11 aa, Homo sapiens
  CDR3 for alpha chain variable domain of TCR clone 21535 (TRAV23/DV6, TRAJ48)
CAPRWGGKLTF

SEQ ID NO: 43070 - protein, 13 aa, Homo sapiens
  CDR3 for beta chain variable domain of TCR clone 21535 (TRBV12-4, TRBJ2-5)
CASSPGTEETQYF

SEQ ID NO: 43071 - protein, 14 aa, Homo sapiens
  CDR3 for alpha chain variable domain of TCR clone 21536 (TRAV1-1, TRAJ27)
CALIYNTNAGKSTF

SEQ ID NO: 43072 - protein, 15 aa, Homo sapiens
  CDR3 for beta chain variable domain of TCR clone 21536 (TRBV7-2, TRBJ2-1)
CASSSGLAGGNEQFF

SEQ ID NO: 43073 - protein, 11 aa, Homo sapiens
  CDR3 for alpha chain variable domain of TCR clone 21537 (TRAV23/DV6, TRAJ58)
CAARLLRGETS

SEQ ID NO: 43074 - protein, 14 aa, Homo sapiens
  CDR3 for beta chain variable domain of TCR clone 21537 (TRBV12-5, TRBJ2-5)
CASGSRTHQETQYF

SEQ ID NO: 43075 - protein, 18 aa, Homo sapiens
  CDR3 for alpha chain variable domain of TCR clone 21538 (TRAV21, TRAJ52)
CAVRPSPAGGTSYGKLTF

SEQ ID NO: 43076 - protein, 19 aa, Homo sapiens
  CDR3 for beta chain variable domain of TCR clone 21538 (TRBV25-1, TRBJ2-2)
CAILVYRVDRGRKTGELFF

SEQ ID NO: 43077 - protein, 14 aa, Homo sapiens
  CDR3 for alpha chain variable domain of TCR clone 21539 (TRAV2, TRAJ37)
CAVEDQGNTGKLIF

SEQ ID NO: 43078 - protein, 14 aa, Homo sapiens
  CDR3 for beta chain variable domain of TCR clone 21539 (TRBV18, TRBJ2-1)
CASSPQGRFNEQLF

SEQ ID NO: 43079 - protein, 15 aa, Homo sapiens
  CDR3 for alpha chain variable domain of TCR clone 21540 (TRAV27, TRAJ38)
CAARRHAGNNRKLIW

SEQ ID NO: 43080 - protein, 13 aa, Homo sapiens
  CDR3 for beta chain variable domain of TCR clone 21540 (TRBV12-5, TRBJ2-3)
CASGDRQSDTQYF

SEQ ID NO: 43081 - protein, 11 aa, Homo sapiens
  CDR3 for alpha chain variable domain of TCR clone 21541 (TRAV3, TRAJ21)
CAVGNFNKFYF

SEQ ID NO: 43082 - protein, 13 aa, Homo sapiens
  CDR3 for beta chain variable domain of TCR clone 21541 (TRBV7-2, TRBJ2-2)
CASSLAVTGELFF

SEQ ID NO: 43083 - protein, 16 aa, Homo sapiens
  CDR3 for alpha chain variable domain of TCR clone 21542 (TRAV12-3, TRAJ53)
CAMSPGSGGSDYKLTF

SEQ ID NO: 43084 - protein, 16 aa, Homo sapiens
  CDR3 for beta chain variable domain of TCR clone 21542 (TRBV7-9, TRBJ1-2)
CASSLGFSSGEDGYTF

SEQ ID NO: 43085 - protein, 14 aa, Homo sapiens
  CDR3 for alpha chain variable domain of TCR clone 21543 (TRAV12-3, TRAJ9)
CAVSPNTGGFKTIF

SEQ ID NO: 43086 - protein, 12 aa, Homo sapiens
  CDR3 for beta chain variable domain of TCR clone 21543 (TRBV19, TRBJ1-5)
CASSIAQQPQHF

SEQ ID NO: 43087 - protein, 13 aa, Homo sapiens
  CDR3 for alpha chain variable domain of TCR clone 21544 (TRAV27, TRAJ6)
CAGGTRGSYIPTF

SEQ ID NO: 43088 - protein, 14 aa, Homo sapiens
  CDR3 for beta chain variable domain of TCR clone 21544 (TRBV20-1, TRBJ2-4)
CSASGRVGENSQYF

SEQ ID NO: 43089 - protein, 15 aa, Homo sapiens
  CDR3 for alpha chain variable domain of TCR clone 21545 (TRAV17, TRAJ57)
CATGPSQGGTEKLVF

SEQ ID NO: 43090 - protein, 16 aa, Homo sapiens
  CDR3 for beta chain variable domain of TCR clone 21545 (TRBV12-4, TRBJ1-5)
CASSRPVGGSNQPQHF

SEQ ID NO: 43091 - protein, 16 aa, Homo sapiens
  CDR3 for alpha chain variable domain of TCR clone 21546 (TRAV8-3, TRAJ42)
CAVAGDYGGSQGNLIF

SEQ ID NO: 43092 - protein, 16 aa, Homo sapiens
  CDR3 for beta chain variable domain of TCR clone 21546 (TRBV7-8, TRBJ2-1)
CASSLVGGGPYNEQFF

SEQ ID NO: 43093 - protein, 14 aa, Homo sapiens
  CDR3 for alpha chain variable domain of TCR clone 21547 (TRAV12-2, TRAJ17)
CAVLFKAAGNKLTF

SEQ ID NO: 43094 - protein, 17 aa, Homo sapiens
  CDR3 for beta chain variable domain of TCR clone 21547 (TRBV20-1, TRBJ2-2)
CIASGSGQGGLTGELFF

SEQ ID NO: 43095 - protein, 12 aa, Homo sapiens
  CDR3 for alpha chain variable domain of TCR clone 21548 (TRAV13-1, TRAJ21)
CAAKEGFNKFYF

SEQ ID NO: 43096 - protein, 12 aa, Homo sapiens
  CDR3 for beta chain variable domain of TCR clone 21548 (TRBV11-2, TRBJ2-2)
CASSLPTGELFF

SEQ ID NO: 43097 - protein, 14 aa, Homo sapiens
  CDR3 for alpha chain variable domain of TCR clone 21549 (TRAV1-2, TRAJ16)
CAVNRFSDGQKLLF

SEQ ID NO: 43098 - protein, 15 aa, Homo sapiens
  CDR3 for beta chain variable domain of TCR clone 21549 (TRBV7-9, TRBJ1-6)
CASSSPGRGNSPHHF

SEQ ID NO: 43099 - protein, 16 aa, Homo sapiens
  CDR3 for alpha chain variable domain of TCR clone 21550 (TRAV26-1, TRAJ53)
CIVRVAMGGSNYQLTF

SEQ ID NO: 43100 - protein, 12 aa, Homo sapiens
  CDR3 for beta chain variable domain of TCR clone 21550 (TRBV7-9, TRBJ1-5)
CASSPQGQPQHF

SEQ ID NO: 43101 - protein, 11 aa, Homo sapiens
  CDR3 for alpha chain variable domain of TCR clone 21551 (TRAV1-1, TRAJ23)
CAVRQGGKLIF

SEQ ID NO: 43102 - protein, 20 aa, Homo sapiens
  CDR3 for beta chain variable domain of TCR clone 21551 (TRBV7-8, TRBJ2-2)
CASSHLFPGPTIHITGKLFF

SEQ ID NO: 43103 - protein, 12 aa, Homo sapiens
  CDR3 for alpha chain variable domain of TCR clone 21552 (TRAV12-3, TRAJ17)
CAMTLRGNKLTF

SEQ ID NO: 43104 - protein, 15 aa, Homo sapiens
  CDR3 for beta chain variable domain of TCR clone 21552 (TRBV20-1, TRBJ2-7)
CSARDRVSGMDEQYF

SEQ ID NO: 43105 - protein, 12 aa, Homo sapiens
  CDR3 for alpha chain variable domain of TCR clone 21553 (TRAV2, TRAJ9)
CAVGAGGFKTIF

SEQ ID NO: 43106 - protein, 16 aa, Homo sapiens
  CDR3 for beta chain variable domain of TCR clone 21553 (TRBV13, TRBJ2-2)
CASSPSTGEHTGELFF

SEQ ID NO: 43107 - protein, 15 aa, Homo sapiens
  CDR3 for alpha chain variable domain of TCR clone 21554 (TRAV21, TRAJ53)
CATLNSGGSNYKLTF

SEQ ID NO: 43108 - protein, 16 aa, Homo sapiens
  CDR3 for beta chain variable domain of TCR clone 21554 (TRBV9, TRBJ2-1)
CACSVGGGGNYNEQFF

SEQ ID NO: 43109 - protein, 12 aa, Homo sapiens
  CDR3 for alpha chain variable domain of TCR clone 21555 (TRAV8-3, TRAJ26)
CAGDNYGQNFIF

SEQ ID NO: 43110 - protein, 15 aa, Homo sapiens
  CDR3 for beta chain variable domain of TCR clone 21555 (TRBV9, TRBJ2-1)
CASSLAGSSYNEQFF

SEQ ID NO: 43111 - protein, 11 aa, Homo sapiens
  CDR3 for alpha chain variable domain of TCR clone 21556 (TRAV1-2, TRAJ23)
CAVRQGGKLIF

SEQ ID NO: 43112 - protein, 20 aa, Homo sapiens
  CDR3 for beta chain variable domain of TCR clone 21556 (TRBV7-8, TRBJ2-2)
CASSHLFPGPTIHITGELFF

SEQ ID NO: 43113 - protein, 12 aa, Homo sapiens
  CDR3 for alpha chain variable domain of TCR clone 21557 (TRAV3, TRAJ43)
CAVRDPNNDMRF

SEQ ID NO: 43114 - protein, 15 aa, Homo sapiens
  CDR3 for beta chain variable domain of TCR clone 21557 (TRBV27, TRBJ1-5)
CASSLETGFDQPQHF

SEQ ID NO: 43115 - protein, 15 aa, Homo sapiens
  CDR3 for alpha chain variable domain of TCR clone 21558 (TRAV38-1, TRAJ37)
CAFIFGSGNTGKLIF

SEQ ID NO: 43116 - protein, 15 aa, Homo sapiens
  CDR3 for beta chain variable domain of TCR clone 21558 (TRBV4-3, TRBJ2-7)
CASSQGGRGIYEQYF

SEQ ID NO: 43117 - protein, 12 aa, Homo sapiens
  CDR3 for alpha chain variable domain of TCR clone 21559 (TRAV35, TRAJ39)
LAPNNAGDMLTF

SEQ ID NO: 43118 - protein, 16 aa, Homo sapiens
  CDR3 for beta chain variable domain of TCR clone 21559 (TRBV2, TRBJ2-3)
CASSTSVEGVTDTQYF

SEQ ID NO: 43119 - protein, 15 aa, Homo sapiens
  CDR3 for alpha chain variable domain of TCR clone 21560 (TRAV27, TRAJ38)
CASRRNAGNNRKLIW

SEQ ID NO: 43120 - protein, 13 aa, Homo sapiens
  CDR3 for beta chain variable domain of TCR clone 21560 (TRBV12-5, TRBJ2-3)
CASGDRQSDTQYF

SEQ ID NO: 43121 - protein, 11 aa, Homo sapiens
  CDR3 for alpha chain variable domain of TCR clone 21561 (TRAV2, TRAJ33)
CAVESNYKLIW

SEQ ID NO: 43122 - protein, 15 aa, Homo sapiens
  CDR3 for beta chain variable domain of TCR clone 21561 (TRBV19, TRBJ1-1)
CASTSGQIQNTEAFF

SEQ ID NO: 43123 - protein, 12 aa, Homo sapiens
  CDR3 for alpha chain variable domain of TCR clone 21562 (TRAV22, TRAJ22)
CAPGGSARQLTF

SEQ ID NO: 43124 - protein, 13 aa, Homo sapiens
  CDR3 for beta chain variable domain of TCR clone 21562 (TRBV20-1, TRBJ1-2)
CSASTERIYGYTF

SEQ ID NO: 43125 - protein, 14 aa, Homo sapiens
  CDR3 for alpha chain variable domain of TCR clone 21563 (TRAV38-2/DV8, TRAJ30)
CAYRSADRDDKVIF

SEQ ID NO: 43126 - protein, 16 aa, Homo sapiens
  CDR3 for beta chain variable domain of TCR clone 21563 (TRBV15, TRBJ1-3)
CATSSPIGFSGNTIYF

SEQ ID NO: 43127 - protein, 15 aa, Homo sapiens
  CDR3 for alpha chain variable domain of TCR clone 21564 (TRAV12-1, TRAJ44)
CVVDTPQGTASKLTF

SEQ ID NO: 43128 - protein, 13 aa, Homo sapiens
  CDR3 for beta chain variable domain of TCR clone 21564 (TRBV27, TRBJ2-1)
CGSSSGSYNEQFF

SEQ ID NO: 43129 - protein, 11 aa, Homo sapiens
  CDR3 for alpha chain variable domain of TCR clone 21565 (TRAV2, TRAJ33)
CAVASNYQLIW

SEQ ID NO: 43130 - protein, 15 aa, Homo sapiens
  CDR3 for beta chain variable domain of TCR clone 21565 (TRBV19, TRBJ1-2)
CASSVGQVLNYGYTF

SEQ ID NO: 43131 - protein, 18 aa, Homo sapiens
  CDR3 for alpha chain variable domain of TCR clone 21566 (TRAV21, TRAJ52)
CAVRPSPAGGTSYGKLTF

SEQ ID NO: 43132 - protein, 17 aa, Homo sapiens
  CDR3 for beta chain variable domain of TCR clone 21566 (TRBV13, TRBJ2-3)
CASSLSRVAGGRNTQYL

SEQ ID NO: 43133 - protein, 16 aa, Homo sapiens
  CDR3 for alpha chain variable domain of TCR clone 21567 (TRAV26-2, TRAJ57)
CILRDVGSGGSKKLVF

SEQ ID NO: 43134 - protein, 13 aa, Homo sapiens
  CDR3 for beta chain variable domain of TCR clone 21567 (TRBV18, TRBJ2-3)
CASSPGVTDTQYF

SEQ ID NO: 43135 - protein, 14 aa, Homo sapiens
  CDR3 for alpha chain variable domain of TCR clone 21568 (TRAV13-1, TRAJ15)
CAPGGNQAGTALIF

SEQ ID NO: 43136 - protein, 16 aa, Homo sapiens
  CDR3 for beta chain variable domain of TCR clone 21568 (TRBV6-1, TRBJ2-1)
CASILRQGSSYNEQFF

SEQ ID NO: 43137 - protein, 14 aa, Homo sapiens
  CDR3 for alpha chain variable domain of TCR clone 21569 (TRAV1-2, TRAJ16)
CAVNRFSDGQKLLF

SEQ ID NO: 43138 - protein, 14 aa, Homo sapiens
  CDR3 for beta chain variable domain of TCR clone 21569 (TRBV7-9, TRBJ2-5)
CASSLVGGEETQYF

SEQ ID NO: 43139 - protein, 16 aa, Homo sapiens
  CDR3 for alpha chain variable domain of TCR clone 21570 (TRAV20, TRAJ22)
CAVQASSSGSARQLTF

SEQ ID NO: 43140 - protein, 13 aa, Homo sapiens
  CDR3 for beta chain variable domain of TCR clone 21570 (TRBV7-2, TRBJ2-5)
CASSQTSVGTQYF

SEQ ID NO: 43141 - protein, 12 aa, Homo sapiens
  CDR3 for alpha chain variable domain of TCR clone 21571 (TRAV12-3, TRAJ17)
CAMTLTGNKLTF

SEQ ID NO: 43142 - protein, 13 aa, Homo sapiens
  CDR3 for beta chain variable domain of TCR clone 21571 (TRBV29-1, TRBJ1-1)
CSVGDSRNTEAFF

SEQ ID NO: 43143 - protein, 12 aa, Homo sapiens
  CDR3 for alpha chain variable domain of TCR clone 21572 (TRAV17, TRAJ57)
CATDGGSEKLVF

SEQ ID NO: 43144 - protein, 13 aa, Homo sapiens
  CDR3 for beta chain variable domain of TCR clone 21572 (TRBV7-9, TRBJ2-7)
CASSFAGTYEQYF

SEQ ID NO: 43145 - protein, 14 aa, Homo sapiens
  CDR3 for alpha chain variable domain of TCR clone 21573 (TRAV26-1, TRAJ34)
CIVRVAYNPDKLIF

SEQ ID NO: 43146 - protein, 15 aa, Homo sapiens
  CDR3 for beta chain variable domain of TCR clone 21573 (TRBV20-1, TRBJ2-7)
CSARVPAAYFYEQYF

SEQ ID NO: 43147 - protein, 14 aa, Homo sapiens
  CDR3 for alpha chain variable domain of TCR clone 21574 (TRAV38-1, TRAJ29)
CAFITPSGNKPLVF

SEQ ID NO: 43148 - protein, 14 aa, Homo sapiens
  CDR3 for beta chain variable domain of TCR clone 21574 (TRBV18, TRBJ2-7)
CASSPRGGAYEQYF

SEQ ID NO: 43149 - protein, 14 aa, Homo sapiens
  CDR3 for alpha chain variable domain of TCR clone 21575 (TRAV9-2, TRAJ39)
CALYIYNAGNMLTF

SEQ ID NO: 43150 - protein, 16 aa, Homo sapiens
  CDR3 for beta chain variable domain of TCR clone 21575 (TRBV19, TRBJ2-1)
CASSSKGTRSYNEQFF

SEQ ID NO: 43151 - protein, 14 aa, Homo sapiens
  CDR3 for alpha chain variable domain of TCR clone 21576 (TRAV17, TRAJ39)
CATDPVRAGNMLTF

SEQ ID NO: 43152 - protein, 15 aa, Homo sapiens
  CDR3 for beta chain variable domain of TCR clone 21576 (TRBV13, TRBJ1-5)
CASSFGQGGVQTQHF

SEQ ID NO: 43153 - protein, 14 aa, Homo sapiens
  CDR3 for alpha chain variable domain of TCR clone 21577 (TRAV8-3, TRAJ4)
CAVGAAGGYNKLIF

SEQ ID NO: 43154 - protein, 13 aa, Homo sapiens
  CDR3 for beta chain variable domain of TCR clone 21577 (TRBV10-3, TRBJ2-7)
CASKLAVNYEQYF

SEQ ID NO: 43155 - protein, 16 aa, Homo sapiens
  CDR3 for alpha chain variable domain of TCR clone 21578 (TRAV30, TRAJ24)
CGTEIVDADSWGKFQF

SEQ ID NO: 43156 - protein, 14 aa, Homo sapiens
  CDR3 for beta chain variable domain of TCR clone 21578 (TRBV7-9, TRBJ2-4)
CASSLAMGGNSQYF

SEQ ID NO: 43157 - protein, 13 aa, Homo sapiens
  CDR3 for alpha chain variable domain of TCR clone 21579 (TRAV12-2, TRAJ42)
CAVKRGGQGNLIF

SEQ ID NO: 43158 - protein, 12 aa, Homo sapiens
  CDR3 for beta chain variable domain of TCR clone 21579 (TRBV5-7, TRBJ1-2)
CASSLVQNGYTF

SEQ ID NO: 43159 - protein, 15 aa, Homo sapiens
  CDR3 for alpha chain variable domain of TCR clone 21580 (TRAV17, TRAJ57)
CATGPSQGGSEKLVF

SEQ ID NO: 43160 - protein, 16 aa, Homo sapiens
  CDR3 for beta chain variable domain of TCR clone 21580 (TRBV12-4, TRBJ1-5)
CASSRPVGGSNQPQNF

SEQ ID NO: 43161 - protein, 16 aa, Homo sapiens
  CDR3 for alpha chain variable domain of TCR clone 21581 (TRAV30, TRAJ24)
CGTEIVDPDSWGKFQF

SEQ ID NO: 43162 - protein, 14 aa, Homo sapiens
  CDR3 for beta chain variable domain of TCR clone 21581 (TRBV12-5, TRBJ2-5)
CASGSRTHQETQYF

SEQ ID NO: 43163 - protein, 12 aa, Homo sapiens
  CDR3 for alpha chain variable domain of TCR clone 21582 (TRAV8-3, TRAJ20)
CAAGANDYKLSF

SEQ ID NO: 43164 - protein, 16 aa, Homo sapiens
  CDR3 for beta chain variable domain of TCR clone 21582 (TRBV19, TRBJ2-2)
CASRSPGTGATGELFF

SEQ ID NO: 43165 - protein, 14 aa, Homo sapiens
  CDR3 for alpha chain variable domain of TCR clone 21583 (TRAV8-4, TRAJ38)
CAVSYAGNNRKLIW

SEQ ID NO: 43166 - protein, 13 aa, Homo sapiens
  CDR3 for beta chain variable domain of TCR clone 21583 (TRBV12-4, TRBJ1-2)
CASSSGPNYGYTF

SEQ ID NO: 43167 - protein, 16 aa, Homo sapiens
  CDR3 for alpha chain variable domain of TCR clone 21584 (TRAV3, TRAJ18)
CAVRDGRGSTRGRLYF

SEQ ID NO: 43168 - protein, 15 aa, Homo sapiens
  CDR3 for beta chain variable domain of TCR clone 21584 (TRBV7-9, TRBJ1-6)
CASSSPGRGNSPLHF

SEQ ID NO: 43169 - protein, 13 aa, Homo sapiens
  CDR3 for alpha chain variable domain of TCR clone 21585 (TRAV4, TRAJ28)
CLFIWGWELPTHF

SEQ ID NO: 43170 - protein, 14 aa, Homo sapiens
  CDR3 for beta chain variable domain of TCR clone 21585 (TRBV7-9, TRBJ2-5)
CASSLDTARETQYF

SEQ ID NO: 43171 - protein, 16 aa, Homo sapiens
  CDR3 for alpha chain variable domain of TCR clone 21586 (TRAV27, TRAJ13)
CAGAKGDSGGYQKVTF

SEQ ID NO: 43172 - protein, 15 aa, Homo sapiens
  CDR3 for beta chain variable domain of TCR clone 21586 (TRBV29-1, TRBJ2-1)
CSVGRHALFYNEQFF

SEQ ID NO: 43173 - protein, 14 aa, Homo sapiens
  CDR3 for alpha chain variable domain of TCR clone 21587 (TRAV20, TRAJ42)
CAVQAGGSQGNLIF

SEQ ID NO: 43174 - protein, 14 aa, Homo sapiens
  CDR3 for beta chain variable domain of TCR clone 21587 (TRBV28, TRBJ1-2)
CASGIQGANYGYTF

SEQ ID NO: 43175 - protein, 13 aa, Homo sapiens
  CDR3 for alpha chain variable domain of TCR clone 21588 (TRAV2, TRAJ40)
CAVVTSGTYKYIF

SEQ ID NO: 43176 - protein, 20 aa, Homo sapiens
  CDR3 for beta chain variable domain of TCR clone 21588 (TRBV28, TRBJ2-1)
CASTPIGRSPGLAGGNEQFF

SEQ ID NO: 43177 - protein, 16 aa, Homo sapiens
  CDR3 for alpha chain variable domain of TCR clone 21589 (TRAV12-3, TRAJ53)
CAMSPGSGGSNYKLTF

SEQ ID NO: 43178 - protein, 16 aa, Homo sapiens
  CDR3 for beta chain variable domain of TCR clone 21589 (TRBV28, TRBJ2-7)
CASSLFFETGGPEQYF

SEQ ID NO: 43179 - protein, 12 aa, Homo sapiens
  CDR3 for alpha chain variable domain of TCR clone 21590 (TRAV16, TRAJ10)
CSRTGGGNKLTF

SEQ ID NO: 43180 - protein, 15 aa, Homo sapiens
  CDR3 for beta chain variable domain of TCR clone 21590 (TRBV28, TRBJ2-1)
CASSIIAGGRSEQFF

SEQ ID NO: 43181 - protein, 13 aa, Homo sapiens
  CDR3 for alpha chain variable domain of TCR clone 21591 (TRAV26-1, TRAJ33)
CIVRVEGNYQLIW

SEQ ID NO: 43182 - protein, 16 aa, Homo sapiens
  CDR3 for beta chain variable domain of TCR clone 21591 (TRBV15, TRBJ2-7)
CATSRDRGRRRGEQYL

SEQ ID NO: 43183 - protein, 14 aa, Homo sapiens
  CDR3 for alpha chain variable domain of TCR clone 21592 (TRAV12-3, TRAJ10)
SHLPLTGGGNKLTF

SEQ ID NO: 43184 - protein, 15 aa, Homo sapiens
  CDR3 for beta chain variable domain of TCR clone 21592 (TRBV19, TRBJ1-2)
CASSVGQVLNYGYTF

SEQ ID NO: 43185 - protein, 14 aa, Homo sapiens
  CDR3 for alpha chain variable domain of TCR clone 21593 (TRAV12-3, TRAJ9)
CAISPNTGGFKTIF

SEQ ID NO: 43186 - protein, 12 aa, Homo sapiens
  CDR3 for beta chain variable domain of TCR clone 21593 (TRBV19, TRBJ1-5)
CASSIAQQPQHF

SEQ ID NO: 43187 - protein, 12 aa, Homo sapiens
  CDR3 for alpha chain variable domain of TCR clone 21594 (TRAV1-1, TRAJ12)
CAVGDSSYKLIF

SEQ ID NO: 43188 - protein, 14 aa, Homo sapiens
  CDR3 for beta chain variable domain of TCR clone 21594 (TRBV20-1, TRBJ2-7)
CGAPELAGVGEQYF

SEQ ID NO: 43189 - protein, 13 aa, Homo sapiens
  CDR3 for alpha chain variable domain of TCR clone 21595 (TRAV21, TRAJ27)
CAARPGNAGKSTF

SEQ ID NO: 43190 - protein, 14 aa, Homo sapiens
  CDR3 for beta chain variable domain of TCR clone 21595 (TRBV7-6, TRBJ2-3)
CASSLGTVIDTQYF

SEQ ID NO: 43191 - protein, 14 aa, Homo sapiens
  CDR3 for alpha chain variable domain of TCR clone 21596 (TRAV13-1, TRAJ6)
CAASGPGGSYIPTF

SEQ ID NO: 43192 - protein, 15 aa, Homo sapiens
  CDR3 for beta chain variable domain of TCR clone 21596 (TRBV27, TRBJ2-1)
CASSPLAGGANEQLF

SEQ ID NO: 43193 - protein, 14 aa, Homo sapiens
  CDR3 for alpha chain variable domain of TCR clone 21597 (TRAV12-2, TRAJ17)
CAALFKAAGNKLTF

SEQ ID NO: 43194 - protein, 15 aa, Homo sapiens
  CDR3 for beta chain variable domain of TCR clone 21597 (TRBV20-1, TRBJ2-7)
CSARDRVSGMDEQYF

SEQ ID NO: 43195 - protein, 14 aa, Homo sapiens
  CDR3 for alpha chain variable domain of TCR clone 21598 (TRAV8-2, TRAJ37)
CVVSISGNTGKLIF

SEQ ID NO: 43196 - protein, 15 aa, Homo sapiens
  CDR3 for beta chain variable domain of TCR clone 21598 (TRBV9, TRBJ1-6)
CASSVAGTGDSPLHF

SEQ ID NO: 43197 - protein, 14 aa, Homo sapiens
  CDR3 for alpha chain variable domain of TCR clone 21599 (TRAV20, TRAJ42)
CCAADGGSQGNLIF

SEQ ID NO: 43198 - protein, 14 aa, Homo sapiens
  CDR3 for beta chain variable domain of TCR clone 21599 (TRBV14, TRBJ2-3)
CASGRKLAADTQYF

SEQ ID NO: 43199 - protein, 11 aa, Homo sapiens
  CDR3 for alpha chain variable domain of TCR clone 21600 (TRAV12-2, TRAJ29)
CAVTLRSPLVF

SEQ ID NO: 43200 - protein, 16 aa, Homo sapiens
  CDR3 for beta chain variable domain of TCR clone 21600 (TRBV19, TRBJ1-5)
CASSIDRGGPRQPRHF

SEQ ID NO: 43201 - protein, 12 aa, Homo sapiens
  CDR3 for alpha chain variable domain of TCR clone 21601 (TRAV3, TRAJ31)
CAVRDGNARLMF

SEQ ID NO: 43202 - protein, 15 aa, Homo sapiens
  CDR3 for beta chain variable domain of TCR clone 21601 (TRBV20-1, TRBJ2-7)
CSARDRVSGMDEQYF

SEQ ID NO: 43203 - protein, 15 aa, Homo sapiens
  CDR3 for alpha chain variable domain of TCR clone 21602 (TRAV27, TRAJ38)
CAARRNAGNNRKLIW

SEQ ID NO: 43204 - protein, 14 aa, Homo sapiens
  CDR3 for beta chain variable domain of TCR clone 21602 (TRBV7-2, TRBJ2-7)
CASSPKTSFYEQYF

SEQ ID NO: 43205 - protein, 13 aa, Homo sapiens
  CDR3 for alpha chain variable domain of TCR clone 21603 (TRAV13-1, TRAJ21)
CAASIYNFNKFYF

SEQ ID NO: 43206 - protein, 13 aa, Homo sapiens
  CDR3 for beta chain variable domain of TCR clone 21603 (TRBV27, TRBJ1-4)
CASSLMGDEKLLF

SEQ ID NO: 43207 - protein, 16 aa, Homo sapiens
  CDR3 for alpha chain variable domain of TCR clone 21604 (TRAV17, TRAJ53)
CATDAPSGGSNYKLTF

SEQ ID NO: 43208 - protein, 12 aa, Homo sapiens
  CDR3 for beta chain variable domain of TCR clone 21604 (TRBV5-1, TRBJ2-7)
CASSFRGYEQYF

SEQ ID NO: 43209 - protein, 12 aa, Homo sapiens
  CDR3 for alpha chain variable domain of TCR clone 21605 (TRAV8-4, TRAJ43)
CAVSVNNNDMRL

SEQ ID NO: 43210 - protein, 14 aa, Homo sapiens
  CDR3 for beta chain variable domain of TCR clone 21605 (TRBV11-2, TRBJ1-2)
CASSLGTANYGYTF

SEQ ID NO: 43211 - protein, 10 aa, Homo sapiens
  CDR3 for alpha chain variable domain of TCR clone 21606 (TRAV26-1, TRAJ40)
CIAGTYKYIF

SEQ ID NO: 43212 - protein, 15 aa, Homo sapiens
  CDR3 for beta chain variable domain of TCR clone 21606 (TRBV19, TRBJ2-1)
CASSSPGVPLDEQLF

SEQ ID NO: 43213 - protein, 11 aa, Homo sapiens
  CDR3 for alpha chain variable domain of TCR clone 21607 (TRAV1-2, TRAJ20)
CSVANDYKLSF

SEQ ID NO: 43214 - protein, 18 aa, Homo sapiens
  CDR3 for beta chain variable domain of TCR clone 21607 (TRBV20-1, TRBJ2-6)
CSAETTPTHGSGANVLTF

SEQ ID NO: 43215 - protein, 12 aa, Homo sapiens
  CDR3 for alpha chain variable domain of TCR clone 21608 (TRAV13-1, TRAJ21)
CAAKEGFNKFYF

SEQ ID NO: 43216 - protein, 14 aa, Homo sapiens
  CDR3 for beta chain variable domain of TCR clone 21608 (TRBV5-4, TRBJ1-1)
CAGSLDSRRDEAFF

SEQ ID NO: 43217 - protein, 13 aa, Homo sapiens
  CDR3 for alpha chain variable domain of TCR clone 21609 (TRAV12-3, TRAJ54)
RALVPQGAQKLVF

SEQ ID NO: 43218 - protein, 15 aa, Homo sapiens
  CDR3 for beta chain variable domain of TCR clone 21609 (TRBV4-1, TRBJ2-2)
CASSQDSRGTGELFF

SEQ ID NO: 43219 - protein, 13 aa, Homo sapiens
  CDR3 for alpha chain variable domain of TCR clone 21610 (TRAV3, TRAJ27)
CAVRPLGAGKSTF

SEQ ID NO: 43220 - protein, 13 aa, Homo sapiens
  CDR3 for beta chain variable domain of TCR clone 21610 (TRBV7-9, TRBJ2-3)
CASRPGSTDTQYF

SEQ ID NO: 43221 - protein, 13 aa, Homo sapiens
  CDR3 for alpha chain variable domain of TCR clone 21611 (TRAV27, TRAJ45)
CRSSGGGAVGLTF

SEQ ID NO: 43222 - protein, 17 aa, Homo sapiens
  CDR3 for beta chain variable domain of TCR clone 21611 (TRBV11-2, TRBJ2-1)
CASSLYPPGVEYNEQFF

SEQ ID NO: 43223 - protein, 10 aa, Homo sapiens
  CDR3 for alpha chain variable domain of TCR clone 21612 (TRAV8-1, TRAJ21)
CAVNGTKLYF

SEQ ID NO: 43224 - protein, 16 aa, Homo sapiens
  CDR3 for beta chain variable domain of TCR clone 21612 (TRBV7-2, TRBJ1-5)
CASSPWGPEGNQPQHF

SEQ ID NO: 43225 - protein, 15 aa, Homo sapiens
  CDR3 for alpha chain variable domain of TCR clone 21613 (TRAV17, TRAJ23)
CATDAEDNQGGKLTF

SEQ ID NO: 43226 - protein, 12 aa, Homo sapiens
  CDR3 for beta chain variable domain of TCR clone 21613 (TRBV2, TRBJ2-1)
CAKREGYNEQFF

SEQ ID NO: 43227 - protein, 10 aa, Homo sapiens
  CDR3 for alpha chain variable domain of TCR clone 21614 (TRAV30, TRAJ48)
CGIGNEKLTF

SEQ ID NO: 43228 - protein, 14 aa, Homo sapiens
  CDR3 for beta chain variable domain of TCR clone 21614 (TRBV7-6, TRBJ2-3)
CASSVAGGTDTQYL

SEQ ID NO: 43229 - protein, 17 aa, Homo sapiens
  CDR3 for alpha chain variable domain of TCR clone 21615 (TRAV23/DV6, TRAJ57)
CAASSTLSQCGSEKLVF

SEQ ID NO: 43230 - protein, 14 aa, Homo sapiens
  CDR3 for beta chain variable domain of TCR clone 21615 (TRBV25-1, TRBJ1-1)
CASTHLGGNTEAFF

SEQ ID NO: 43231 - protein, 20 aa, Homo sapiens
  CDR3 for alpha chain variable domain of TCR clone 21616 (TRAV26-1, TRAJ42)
CCVLLHRQTYYGGSQGNLIF

SEQ ID NO: 43232 - protein, 16 aa, Homo sapiens
  CDR3 for beta chain variable domain of TCR clone 21616 (TRBV7-3, TRBJ2-2)
CACSLKRGTLSGELFF

SEQ ID NO: 43233 - protein, 15 aa, Homo sapiens
  CDR3 for alpha chain variable domain of TCR clone 21617 (TRAV21, TRAJ53)
CATLNSGGSNYKLTF

SEQ ID NO: 43234 - protein, 16 aa, Homo sapiens
  CDR3 for beta chain variable domain of TCR clone 21617 (TRBV9, TRBJ2-1)
CASSVGGGGNYDEQFF

SEQ ID NO: 43235 - protein, 14 aa, Homo sapiens
  CDR3 for alpha chain variable domain of TCR clone 21618 (TRAV12-2, TRAJ38)
CAVANAGNNRKLIW

SEQ ID NO: 43236 - protein, 16 aa, Homo sapiens
  CDR3 for beta chain variable domain of TCR clone 21618 (TRBV12-4, TRBJ1-5)
CASRQGSGLGNQPQHF

SEQ ID NO: 43237 - protein, 14 aa, Homo sapiens
  CDR3 for alpha chain variable domain of TCR clone 21619 (TRAV12-2, TRAJ17)
CAALFKAAGNKLTF

SEQ ID NO: 43238 - protein, 16 aa, Homo sapiens
  CDR3 for beta chain variable domain of TCR clone 21619 (TRBV20-1, TRBJ2-2)
CSASASGIPGAGELSF

SEQ ID NO: 43239 - protein, 14 aa, Homo sapiens
  CDR3 for alpha chain variable domain of TCR clone 21620 (TRAV1-2, TRAJ16)
CAVNRFSDGQKLLF

SEQ ID NO: 43240 - protein, 15 aa, Homo sapiens
  CDR3 for beta chain variable domain of TCR clone 21620 (TRBV19, TRBJ2-7)
CASSPAGSGEALRYF

SEQ ID NO: 43241 - protein, 13 aa, Homo sapiens
  CDR3 for alpha chain variable domain of TCR clone 21621 (TRAV23/DV6, TRAJ20)
CAAGGFHDYKLGF

SEQ ID NO: 43242 - protein, 14 aa, Homo sapiens
  CDR3 for beta chain variable domain of TCR clone 21621 (TRBV3-1, TRBJ2-7)
CASSQSGAHYEQYF

SEQ ID NO: 43243 - protein, 12 aa, Homo sapiens
  CDR3 for alpha chain variable domain of TCR clone 21622 (TRAV1-1, TRAJ24)
CAVRGSWGKFQF

SEQ ID NO: 43244 - protein, 11 aa, Homo sapiens
  CDR3 for beta chain variable domain of TCR clone 21622 (TRBV29-1, TRBJ2-5)
CSEDRTGTQYF

SEQ ID NO: 43245 - protein, 16 aa, Homo sapiens
  CDR3 for alpha chain variable domain of TCR clone 21623 (TRAV4, TRAJ18)
CCVLLIGGSTLGRLYF

SEQ ID NO: 43246 - protein, 14 aa, Homo sapiens
  CDR3 for beta chain variable domain of TCR clone 21623 (TRBV12-5, TRBJ2-5)
CASGSRTHQETQYF

SEQ ID NO: 43247 - protein, 15 aa, Homo sapiens
  CDR3 for alpha chain variable domain of TCR clone 21624 (TRAV3, TRAJ5)
CAVRDLDTGRRALTF

SEQ ID NO: 43248 - protein, 14 aa, Homo sapiens
  CDR3 for beta chain variable domain of TCR clone 21624 (TRBV7-3, TRBJ2-1)
CASSLAGGTNEQFF

SEQ ID NO: 43249 - protein, 13 aa, Homo sapiens
  CDR3 for alpha chain variable domain of TCR clone 21625 (TRAV23/DV6, TRAJ58)
CAASEIGGSRLTI

SEQ ID NO: 43250 - protein, 14 aa, Homo sapiens
  CDR3 for beta chain variable domain of TCR clone 21625 (TRBV28, TRBJ2-5)
CASSRLAGGETQYF

SEQ ID NO: 43251 - protein, 20 aa, Homo sapiens
  CDR3 for alpha chain variable domain of TCR clone 21626 (TRAV12-1, TRAJ42)
SSVIQPPTSVKGGSQGNLIF

SEQ ID NO: 43252 - protein, 18 aa, Homo sapiens
  CDR3 for beta chain variable domain of TCR clone 21626 (TRBV11-2, TRBJ2-3)
CASSLGGASREAPNTQYF

SEQ ID NO: 43253 - protein, 15 aa, Homo sapiens
  CDR3 for alpha chain variable domain of TCR clone 21627 (TRAV26-1, TRAJ22)
CIVRVSFWFCTATDL

SEQ ID NO: 43254 - protein, 13 aa, Homo sapiens
  CDR3 for beta chain variable domain of TCR clone 21627 (TRBV7-9, TRBJ1-2)
CASSLKQNYGYTF

SEQ ID NO: 43255 - protein, 15 aa, Homo sapiens
  CDR3 for alpha chain variable domain of TCR clone 21628 (TRAV3, TRAJ5)
CAVRDLDTGRRALTF

SEQ ID NO: 43256 - protein, 13 aa, Homo sapiens
  CDR3 for beta chain variable domain of TCR clone 21628 (TRBV12-4, TRBJ2-7)
CASSPTETYDQYF

SEQ ID NO: 43257 - protein, 14 aa, Homo sapiens
  CDR3 for alpha chain variable domain of TCR clone 21629 (TRAV12-2, TRAJ40)
CAVKIPSGTYKYIF

SEQ ID NO: 43258 - protein, 14 aa, Homo sapiens
  CDR3 for beta chain variable domain of TCR clone 21629 (TRBV7-6, TRBJ2-3)
CASSLGTVTDTQYF

SEQ ID NO: 43259 - protein, 11 aa, Homo sapiens
  CDR3 for alpha chain variable domain of TCR clone 21630 (TRAV3, TRAJ21)
CAVGNFNKFYF

SEQ ID NO: 43260 - protein, 16 aa, Homo sapiens
  CDR3 for beta chain variable domain of TCR clone 21630 (TRBV19, TRBJ2-1)
CASSKAGPSSYNELFF

SEQ ID NO: 43261 - protein, 20 aa, Homo sapiens
  CDR3 for alpha chain variable domain of TCR clone 21631 (TRAV21, TRAJ4)
AASQPGDSATLAGGYNKLIF

SEQ ID NO: 43262 - protein, 19 aa, Homo sapiens
  CDR3 for beta chain variable domain of TCR clone 21631 (TRBV18, TRBJ1-3)
CASSPLSRTGMSSGNTTYF

SEQ ID NO: 43263 - protein, 14 aa, Homo sapiens
  CDR3 for alpha chain variable domain of TCR clone 21632 (TRAV35, TRAJ40)
CAGSTTPGTYKYIF

SEQ ID NO: 43264 - protein, 13 aa, Homo sapiens
  CDR3 for beta chain variable domain of TCR clone 21632 (TRBV20-1, TRBJ1-6)
CSAPLGVGSPLHF

SEQ ID NO: 43265 - protein, 11 aa, Homo sapiens
  CDR3 for alpha chain variable domain of TCR clone 21633 (TRAV12-3, TRAJ27)
CAMANAGKSNF

SEQ ID NO: 43266 - protein, 13 aa, Homo sapiens
  CDR3 for beta chain variable domain of TCR clone 21633 (TRBV20-1, TRBJ1-1)
CSARVGGNTEAFF

SEQ ID NO: 43267 - protein, 16 aa, Homo sapiens
  CDR3 for alpha chain variable domain of TCR clone 21634 (TRAV23/DV6, TRAJ30)
CAASMCADANRDDKII

SEQ ID NO: 43268 - protein, 11 aa, Homo sapiens
  CDR3 for beta chain variable domain of TCR clone 21634 (TRBV19, TRBJ2-3)
CHRPRGDTQYF

SEQ ID NO: 43269 - protein, 10 aa, Homo sapiens
  CDR3 for alpha chain variable domain of TCR clone 21635 (TRAV16, TRAJ22)
SAMYLRQLTF

SEQ ID NO: 43270 - protein, 15 aa, Homo sapiens
  CDR3 for beta chain variable domain of TCR clone 21635 (TRBV7-9, TRBJ1-6)
CASSSPGRGNSPLHC

SEQ ID NO: 43271 - protein, 11 aa, Homo sapiens
  CDR3 for alpha chain variable domain of TCR clone 21636 (TRAV1-2, TRAJ40)
CAVPGTYKYIF

SEQ ID NO: 43272 - protein, 16 aa, Homo sapiens
  CDR3 for beta chain variable domain of TCR clone 21636 (TRBV29-1, TRBJ2-7)
RSVEVVGTSGSYEQYF

SEQ ID NO: 43273 - protein, 13 aa, Homo sapiens
  CDR3 for alpha chain variable domain of TCR clone 21637 (TRAV1-1, TRAJ9)
CAAKNTGGFKTIF

SEQ ID NO: 43274 - protein, 14 aa, Homo sapiens
  CDR3 for beta chain variable domain of TCR clone 21637 (TRBV20-1, TRBJ2-1)
GSAQIGGSANEQFF

SEQ ID NO: 43275 - protein, 13 aa, Homo sapiens
  CDR3 for alpha chain variable domain of TCR clone 21638 (TRAV3, TRAJ21)
CAVREPDFNKFYF

SEQ ID NO: 43276 - protein, 14 aa, Homo sapiens
  CDR3 for beta chain variable domain of TCR clone 21638 (TRBV12-5, TRBJ2-5)
CASGSRTHQETQYF

SEQ ID NO: 43277 - protein, 15 aa, Homo sapiens
  CDR3 for alpha chain variable domain of TCR clone 21639 (TRAV12-3, TRAJ6)
CAMSATTGGSYIPTF

SEQ ID NO: 43278 - protein, 16 aa, Homo sapiens
  CDR3 for beta chain variable domain of TCR clone 21639 (TRBV20-1, TRBJ1-2)
CSASMGQDVANYGYTF

SEQ ID NO: 43279 - protein, 14 aa, Homo sapiens
  CDR3 for alpha chain variable domain of TCR clone 21640 (TRAV9-2, TRAJ39)
CALYIYNAGNMLTF

SEQ ID NO: 43280 - protein, 16 aa, Homo sapiens
  CDR3 for beta chain variable domain of TCR clone 21640 (TRBV27, TRBJ2-2)
CASSLRPGGAPGELFF

SEQ ID NO: 43281 - protein, 11 aa, Homo sapiens
  CDR3 for alpha chain variable domain of TCR clone 21641 (TRAV3, TRAJ21)
CAVGNFNKFYF

SEQ ID NO: 43282 - protein, 20 aa, Homo sapiens
  CDR3 for beta chain variable domain of TCR clone 21641 (TRBV28, TRBJ2-1)
CASTPIGRSPGLAGGNEQFF

SEQ ID NO: 43283 - protein, 11 aa, Homo sapiens
  CDR3 for alpha chain variable domain of TCR clone 21642 (TRAV16, TRAJ49)
RSLNTGNQFYF

SEQ ID NO: 43284 - protein, 12 aa, Homo sapiens
  CDR3 for beta chain variable domain of TCR clone 21642 (TRBV7-9, TRBJ1-4)
CASSTDREKLFF

SEQ ID NO: 43285 - protein, 13 aa, Homo sapiens
  CDR3 for alpha chain variable domain of TCR clone 21643 (TRAV13-1, TRAJ5)
CAARATGRRALTF

SEQ ID NO: 43286 - protein, 15 aa, Homo sapiens
  CDR3 for beta chain variable domain of TCR clone 21643 (TRBV7-9, TRBJ2-7)
CASSPGGGLTYEQYF

SEQ ID NO: 43287 - protein, 14 aa, Homo sapiens
  CDR3 for alpha chain variable domain of TCR clone 21644 (TRAV12-3, TRAJ42)
CAMNYGGSQGNLIF

SEQ ID NO: 43288 - protein, 11 aa, Homo sapiens
  CDR3 for beta chain variable domain of TCR clone 21644 (TRBV5-6, TRBJ1-2)
CASSRGGGYTF

SEQ ID NO: 43289 - protein, 13 aa, Homo sapiens
  CDR3 for alpha chain variable domain of TCR clone 21645 (TRAV12-3, TRAJ33)
CAMSGNSNYQLIW

SEQ ID NO: 43290 - protein, 13 aa, Homo sapiens
  CDR3 for beta chain variable domain of TCR clone 21645 (TRBV7-2, TRBJ2-2)
CASSLAVTGELFF

SEQ ID NO: 43291 - protein, 18 aa, Homo sapiens
  CDR3 for alpha chain variable domain of TCR clone 21646 (TRAV29/DV5, TRAJ52)
CAAGFRGAGGTSYGKLTF

SEQ ID NO: 43292 - protein, 16 aa, Homo sapiens
  CDR3 for beta chain variable domain of TCR clone 21646 (TRBV7-3, TRBJ2-2)
CASSLKRGTLSGELLF

SEQ ID NO: 43293 - protein, 14 aa, Homo sapiens
  CDR3 for alpha chain variable domain of TCR clone 21647 (TRAV12-3, TRAJ12)
CAMSEVDSSYKLIF

SEQ ID NO: 43294 - protein, 12 aa, Homo sapiens
  CDR3 for beta chain variable domain of TCR clone 21647 (TRBV18, TRBJ1-4)
CASSPSREKLVF

SEQ ID NO: 43295 - protein, 16 aa, Homo sapiens
  CDR3 for alpha chain variable domain of TCR clone 21648 (TRAV17, TRAJ52)
CATGIIGGTGYGKLTF

SEQ ID NO: 43296 - protein, 12 aa, Homo sapiens
  CDR3 for beta chain variable domain of TCR clone 21648 (TRBV7-3, TRBJ2-1)
CASSFINNEQFF

SEQ ID NO: 43297 - protein, 17 aa, Homo sapiens
  CDR3 for alpha chain variable domain of TCR clone 21649 (TRAV26-1, TRAJ11)
CIVRVDQSNSGYSTLTF

SEQ ID NO: 43298 - protein, 15 aa, Homo sapiens
  CDR3 for beta chain variable domain of TCR clone 21649 (TRBV27, TRBJ2-5)
CASSLIPSGGETQYF

SEQ ID NO: 43299 - protein, 13 aa, Homo sapiens
  CDR3 for alpha chain variable domain of TCR clone 21650 (TRAV3, TRAJ21)
CAVREPDFDKFYF

SEQ ID NO: 43300 - protein, 13 aa, Homo sapiens
  CDR3 for beta chain variable domain of TCR clone 21650 (TRBV9, TRBJ2-1)
CASSPSGGNEQFF

SEQ ID NO: 43301 - protein, 15 aa, Homo sapiens
  CDR3 for alpha chain variable domain of TCR clone 21651 (TRAV8-3, TRAJ27)
CAVGPSKTNAGKSTF

SEQ ID NO: 43302 - protein, 15 aa, Homo sapiens
  CDR3 for beta chain variable domain of TCR clone 21651 (TRBV9, TRBJ1-6)
CASSVAGTGDSPLHL

SEQ ID NO: 43303 - protein, 15 aa, Homo sapiens
  CDR3 for alpha chain variable domain of TCR clone 21652 (TRAV26-1, TRAJ29)
CIVRVEGSGNTPLVF

SEQ ID NO: 43304 - protein, 15 aa, Homo sapiens
  CDR3 for beta chain variable domain of TCR clone 21652 (TRBV7-9, TRBJ1-5)
CASSQGPQPNQPQHF

SEQ ID NO: 43305 - protein, 12 aa, Homo sapiens
  CDR3 for alpha chain variable domain of TCR clone 21653 (TRAV3, TRAJ43)
CAVRDPNNDMRS

SEQ ID NO: 43306 - protein, 15 aa, Homo sapiens
  CDR3 for beta chain variable domain of TCR clone 21653 (TRBV27, TRBJ1-5)
CASSLGTGFDQPQHF

SEQ ID NO: 43307 - protein, 16 aa, Homo sapiens
  CDR3 for alpha chain variable domain of TCR clone 21654 (TRAV3, TRAJ10)
CAVRDMRAGGGNKLTF

SEQ ID NO: 43308 - protein, 12 aa, Homo sapiens
  CDR3 for beta chain variable domain of TCR clone 21654 (TRBV11-2, TRBJ2-1)
CASSPGNNEQFF

SEQ ID NO: 43309 - protein, 18 aa, Homo sapiens
  CDR3 for alpha chain variable domain of TCR clone 21655 (TRAV13-1, TRAJ52)
CAASRRSAGGTSYGKLTF

SEQ ID NO: 43310 - protein, 13 aa, Homo sapiens
  CDR3 for beta chain variable domain of TCR clone 21655 (TRBV12-4, TRBJ1-2)
CASSLRQGKGYTF

SEQ ID NO: 43311 - protein, 12 aa, Homo sapiens
  CDR3 for alpha chain variable domain of TCR clone 21656 (TRAV17, TRAJ39)
CATGAAGNMLTF

SEQ ID NO: 43312 - protein, 14 aa, Homo sapiens
  CDR3 for beta chain variable domain of TCR clone 21656 (TRBV7-9, TRBJ1-2)
CASSRQGANYGYTF

SEQ ID NO: 43313 - protein, 16 aa, Homo sapiens
  CDR3 for alpha chain variable domain of TCR clone 21657 (TRAV26-1, TRAJ53)
CIVRVAMGGSNYKLTF

SEQ ID NO: 43314 - protein, 12 aa, Homo sapiens
  CDR3 for beta chain variable domain of TCR clone 21657 (TRBV7-9, TRBJ1-5)
CASSPQGRPQHF

SEQ ID NO: 43315 - protein, 14 aa, Homo sapiens
  CDR3 for alpha chain variable domain of TCR clone 21658 (TRAV12-2, TRAJ13)
CAVKKTGGYQRVTF

SEQ ID NO: 43316 - protein, 18 aa, Homo sapiens
  CDR3 for beta chain variable domain of TCR clone 21658 (TRBV24-1, TRBJ2-2)
CATSDSGQGTANTGELFF

SEQ ID NO: 43317 - protein, 11 aa, Homo sapiens
  CDR3 for alpha chain variable domain of TCR clone 21659 (TRAV2, TRAJ33)
CAVESNSQLIW

SEQ ID NO: 43318 - protein, 15 aa, Homo sapiens
  CDR3 for beta chain variable domain of TCR clone 21659 (TRBV19, TRBJ1-1)
CASTSGQIQNTEAFF

SEQ ID NO: 43319 - protein, 13 aa, Homo sapiens
  CDR3 for alpha chain variable domain of TCR clone 21660 (TRAV21, TRAJ27)
CAARPGNAGKSTF

SEQ ID NO: 43320 - protein, 18 aa, Homo sapiens
  CDR3 for beta chain variable domain of TCR clone 21660 (TRBV7-6, TRBJ2-1)
GHVSLGQQLGGGADEQFF

SEQ ID NO: 43321 - protein, 13 aa, Homo sapiens
  CDR3 for alpha chain variable domain of TCR clone 21661 (TRAV2, TRAJ40)
CAVVTSGTYKYIF

SEQ ID NO: 43322 - protein, 14 aa, Homo sapiens
  CDR3 for beta chain variable domain of TCR clone 21661 (TRBV19, TRBJ1-5)
CASRAPDSFLSQHF

SEQ ID NO: 43323 - protein, 14 aa, Homo sapiens
  CDR3 for alpha chain variable domain of TCR clone 21662 (TRAV2, TRAJ37)
CAVDFTSNTGKLIF

SEQ ID NO: 43324 - protein, 14 aa, Homo sapiens
  CDR3 for beta chain variable domain of TCR clone 21662 (TRBV7-2, TRBJ2-7)
CASRSQGAAYEQYF

SEQ ID NO: 43325 - protein, 14 aa, Homo sapiens
  CDR3 for alpha chain variable domain of TCR clone 21663 (TRAV2, TRAJ9)
CAVEDRSGGFKTIF

SEQ ID NO: 43326 - protein, 14 aa, Homo sapiens
  CDR3 for beta chain variable domain of TCR clone 21663 (TRBV7-2, TRBJ1-1)
CASSFLTGTTEAFF

SEQ ID NO: 43327 - protein, 13 aa, Homo sapiens
  CDR3 for alpha chain variable domain of TCR clone 21664 (TRAV23/DV6, TRAJ22)
CAPYSGSARQLTF

SEQ ID NO: 43328 - protein, 15 aa, Homo sapiens
  CDR3 for beta chain variable domain of TCR clone 21664 (TRBV11-3, TRBJ1-6)
CASSLDPWAVSPLHF

SEQ ID NO: 43329 - protein, 16 aa, Homo sapiens
  CDR3 for alpha chain variable domain of TCR clone 21665 (TRAV19, TRAJ37)
CALSPHGSSNTGKLIF

SEQ ID NO: 43330 - protein, 16 aa, Homo sapiens
  CDR3 for beta chain variable domain of TCR clone 21665 (TRBV4-2, TRBJ2-1)
CASSQETATPYNEQFF

SEQ ID NO: 43331 - protein, 12 aa, Homo sapiens
  CDR3 for alpha chain variable domain of TCR clone 21666 (TRAV21, TRAJ31)
CVLAGNNARLMF

SEQ ID NO: 43332 - protein, 16 aa, Homo sapiens
  CDR3 for beta chain variable domain of TCR clone 21666 (TRBV27, TRBJ2-5)
CASSCGPGGTKETQYF

SEQ ID NO: 43333 - protein, 12 aa, Homo sapiens
  CDR3 for alpha chain variable domain of TCR clone 21667 (TRAV1-1, TRAJ20)
CAVRDRTTSSAL

SEQ ID NO: 43334 - protein, 18 aa, Homo sapiens
  CDR3 for beta chain variable domain of TCR clone 21667 (TRBV20-1, TRBJ2-6)
CSAETTPTHGSGANVLTF

SEQ ID NO: 43335 - protein, 14 aa, Homo sapiens
  CDR3 for alpha chain variable domain of TCR clone 21668 (TRAV1-2, TRAJ16)
CAVNRFSDGQKRLF

SEQ ID NO: 43336 - protein, 15 aa, Homo sapiens
  CDR3 for beta chain variable domain of TCR clone 21668 (TRBV7-9, TRBJ1-6)
CASSSPGRGNSPLHF

SEQ ID NO: 43337 - protein, 16 aa, Homo sapiens
  CDR3 for alpha chain variable domain of TCR clone 21669 (TRAV12-3, TRAJ53)
CAMSPGSGGSNYKLSF

SEQ ID NO: 43338 - protein, 11 aa, Homo sapiens
  CDR3 for beta chain variable domain of TCR clone 21669 (TRBV29-1, TRBJ2-5)
CSEDRTGTQYF

SEQ ID NO: 43339 - protein, 14 aa, Homo sapiens
  CDR3 for alpha chain variable domain of TCR clone 21670 (TRAV13-1, TRAJ44)
CAAKATGTASKLTF

SEQ ID NO: 43340 - protein, 12 aa, Homo sapiens
  CDR3 for beta chain variable domain of TCR clone 21670 (TRBV7-8, TRBJ2-7)
CASSLGDRGQYF

SEQ ID NO: 43341 - protein, 12 aa, Homo sapiens
  CDR3 for alpha chain variable domain of TCR clone 21671 (TRAV12-1, TRAJ40)
CVVYSGTYKYIF

SEQ ID NO: 43342 - protein, 18 aa, Homo sapiens
  CDR3 for beta chain variable domain of TCR clone 21671 (TRBV11-2, TRBJ2-3)
CASSLGGASRGAPNTQCF

SEQ ID NO: 43343 - protein, 13 aa, Homo sapiens
  CDR3 for alpha chain variable domain of TCR clone 21672 (TRAV8-3, TRAJ28)
CDVGAVGSYQLTF

SEQ ID NO: 43344 - protein, 14 aa, Homo sapiens
  CDR3 for beta chain variable domain of TCR clone 21672 (TRBV7-2, TRBJ2-7)
CASRSQGAAYEQYF

SEQ ID NO: 43345 - protein, 18 aa, Homo sapiens
  CDR3 for alpha chain variable domain of TCR clone 21673 (TRAV21, TRAJ52)
CAVRPSPAGGTSYGKLTF

SEQ ID NO: 43346 - protein, 13 aa, Homo sapiens
  CDR3 for beta chain variable domain of TCR clone 21673 (TRBV12-5, TRBJ2-3)
CASGDRQSDTQYF

SEQ ID NO: 43347 - protein, 14 aa, Homo sapiens
  CDR3 for alpha chain variable domain of TCR clone 21674 (TRAV1-2, TRAJ8)
CAVREDTGFQKLVF

SEQ ID NO: 43348 - protein, 15 aa, Homo sapiens
  CDR3 for beta chain variable domain of TCR clone 21674 (TRBV2, TRBJ2-1)
CASSELAGSYNEQFF

SEQ ID NO: 43349 - protein, 15 aa, Homo sapiens
  CDR3 for alpha chain variable domain of TCR clone 21675 (TRAV3, TRAJ3)
CAVRDRDSSASEIIF

SEQ ID NO: 43350 - protein, 18 aa, Homo sapiens
  CDR3 for beta chain variable domain of TCR clone 21675 (TRBV25-1, TRBJ1-2)
CASSGLQNGQGLIFGYTF

SEQ ID NO: 43351 - protein, 11 aa, Homo sapiens
  CDR3 for alpha chain variable domain of TCR clone 21676 (TRAV2, TRAJ13)
CASGGYQKVTF

SEQ ID NO: 43352 - protein, 16 aa, Homo sapiens
  CDR3 for beta chain variable domain of TCR clone 21676 (TRBV12-4, TRBJ1-5)
CASSRPVGGSNQPQHF

SEQ ID NO: 43353 - protein, 15 aa, Homo sapiens
  CDR3 for alpha chain variable domain of TCR clone 21677 (TRAV17, TRAJ48)
RATDETNFGNEKLTF

SEQ ID NO: 43354 - protein, 14 aa, Homo sapiens
  CDR3 for beta chain variable domain of TCR clone 21677 (TRBV10-3, TRBJ1-3)
CAIRGQRAGNTIYF

SEQ ID NO: 43355 - protein, 14 aa, Homo sapiens
  CDR3 for alpha chain variable domain of TCR clone 21678 (TRAV35, TRAJ24)
CAGPRRGSWGKLQF

SEQ ID NO: 43356 - protein, 12 aa, Homo sapiens
  CDR3 for beta chain variable domain of TCR clone 21678 (TRBV12-4, TRBJ2-3)
CASSLGQDTQYF

SEQ ID NO: 43357 - protein, 14 aa, Homo sapiens
  CDR3 for alpha chain variable domain of TCR clone 21679 (TRAV13-1, TRAJ35)
CAASKGGFGNVLHC

SEQ ID NO: 43358 - protein, 14 aa, Homo sapiens
  CDR3 for beta chain variable domain of TCR clone 21679 (TRBV7-2, TRBJ2-7)
CASSPKTSFYEQYF

SEQ ID NO: 43359 - protein, 13 aa, Homo sapiens
  CDR3 for alpha chain variable domain of TCR clone 21680 (TRAV12-3, TRAJ33)
CAMSVNSNYQLIW

SEQ ID NO: 43360 - protein, 13 aa, Homo sapiens
  CDR3 for beta chain variable domain of TCR clone 21680 (TRBV10-3, TRBJ2-7)
CASKLAVNYEQYF

SEQ ID NO: 43361 - protein, 14 aa, Homo sapiens
  CDR3 for alpha chain variable domain of TCR clone 21681 (TRAV1-2, TRAJ8)
CAVREDTGFQKLVF

SEQ ID NO: 43362 - protein, 15 aa, Homo sapiens
  CDR3 for beta chain variable domain of TCR clone 21681 (TRBV6-3, TRBJ2-7)
CAISSPGTVFYEQYF

SEQ ID NO: 43363 - protein, 14 aa, Homo sapiens
  CDR3 for alpha chain variable domain of TCR clone 21682 (TRAV12-2, TRAJ44)
CAVNPAGAASKLTF

SEQ ID NO: 43364 - protein, 13 aa, Homo sapiens
  CDR3 for beta chain variable domain of TCR clone 21682 (TRBV20-1, TRBJ1-6)
CSAPLGVGSPLHF

SEQ ID NO: 43365 - protein, 16 aa, Homo sapiens
  CDR3 for alpha chain variable domain of TCR clone 21683 (TRAV22, TRAJ45)
CAVERGKGGGADGLTF

SEQ ID NO: 43366 - protein, 13 aa, Homo sapiens
  CDR3 for beta chain variable domain of TCR clone 21683 (TRBV27, TRBJ1-1)
CASSLSIGAEAFF

SEQ ID NO: 43367 - protein, 12 aa, Homo sapiens
  CDR3 for alpha chain variable domain of TCR clone 21684 (TRAV17, TRAJ12)
CATLRSSYKLIF

SEQ ID NO: 43368 - protein, 16 aa, Homo sapiens
  CDR3 for beta chain variable domain of TCR clone 21684 (TRBV28, TRBJ2-7)
CASSLFFETGGPGQYF

SEQ ID NO: 43369 - protein, 15 aa, Homo sapiens
  CDR3 for alpha chain variable domain of TCR clone 21685 (TRAV21, TRAJ24)
CAARSSTDSGGKLQF

SEQ ID NO: 43370 - protein, 13 aa, Homo sapiens
  CDR3 for beta chain variable domain of TCR clone 21685 (TRBV11-2, TRBJ2-5)
CASSSTGEETQYF

SEQ ID NO: 43371 - protein, 12 aa, Homo sapiens
  CDR3 for alpha chain variable domain of TCR clone 21686 (TRAV21, TRAJ11)
CAATSGYSTLTF

SEQ ID NO: 43372 - protein, 14 aa, Homo sapiens
  CDR3 for beta chain variable domain of TCR clone 21686 (TRBV20-1, TRBJ2-7)
CGAPELAGVGEQYF

SEQ ID NO: 43373 - protein, 15 aa, Homo sapiens
  CDR3 for alpha chain variable domain of TCR clone 21687 (TRAV17, TRAJ57)
CATGPSQGGSEKLVF

SEQ ID NO: 43374 - protein, 14 aa, Homo sapiens
  CDR3 for beta chain variable domain of TCR clone 21687 (TRBV12-5, TRBJ2-5)
CASGSRTYQETQYF

SEQ ID NO: 43375 - protein, 15 aa, Homo sapiens
  CDR3 for alpha chain variable domain of TCR clone 21688 (TRAV8-3, TRAJ45)
CASSYSGGGADGLTF

SEQ ID NO: 43376 - protein, 13 aa, Homo sapiens
  CDR3 for beta chain variable domain of TCR clone 21688 (TRBV10-3, TRBJ2-7)
CGSKLAVNYEQYF

SEQ ID NO: 43377 - protein, 14 aa, Homo sapiens
  CDR3 for alpha chain variable domain of TCR clone 21689 (TRAV1-2, TRAJ16)
CAVNRLSDGQKLLF

SEQ ID NO: 43378 - protein, 14 aa, Homo sapiens
  CDR3 for beta chain variable domain of TCR clone 21689 (TRBV13, TRBJ2-5)
CASSLGRGQETQYF

SEQ ID NO: 43379 - protein, 15 aa, Homo sapiens
  CDR3 for alpha chain variable domain of TCR clone 21690 (TRAV26-1, TRAJ38)
CIASSNAGNNRKPIW

SEQ ID NO: 43380 - protein, 12 aa, Homo sapiens
  CDR3 for beta chain variable domain of TCR clone 21690 (TRBV5-8, TRBJ1-2)
CASSFGVYGYTF

SEQ ID NO: 43381 - protein, 16 aa, Homo sapiens
  CDR3 for alpha chain variable domain of TCR clone 21691 (TRAV16, TRAJ4)
CALSRMFSGGYNKLMF

SEQ ID NO: 43382 - protein, 16 aa, Homo sapiens
  CDR3 for beta chain variable domain of TCR clone 21691 (TRBV24-1, TRBJ2-3)
CATSDPGTGATDTQYF

SEQ ID NO: 43383 - protein, 13 aa, Homo sapiens
  CDR3 for alpha chain variable domain of TCR clone 21692 (TRAV12-1, TRAJ7)
CVVSMRGNNRLAF

SEQ ID NO: 43384 - protein, 15 aa, Homo sapiens
  CDR3 for beta chain variable domain of TCR clone 21692 (TRBV27, TRBJ2-3)
CASSLGLAATDTQYF

SEQ ID NO: 43385 - protein, 15 aa, Homo sapiens
  CDR3 for alpha chain variable domain of TCR clone 21693 (TRAV12-1, TRAJ44)
CVADLPTGTASKLTF

SEQ ID NO: 43386 - protein, 13 aa, Homo sapiens
  CDR3 for beta chain variable domain of TCR clone 21693 (TRBV6-5, TRBJ2-5)
CASSPQGGETQYV

SEQ ID NO: 43387 - protein, 13 aa, Homo sapiens
  CDR3 for alpha chain variable domain of TCR clone 21694 (TRAV1-1, TRAJ9)
CAAKNTGGFKTIF

SEQ ID NO: 43388 - protein, 14 aa, Homo sapiens
  CDR3 for beta chain variable domain of TCR clone 21694 (TRBV7-2, TRBJ2-7)
CASSPKTSFYEQYF

SEQ ID NO: 43389 - protein, 17 aa, Homo sapiens
  CDR3 for alpha chain variable domain of TCR clone 21695 (TRAV8-6, TRAJ58)
CAVSSWVGETSGSRLTF

SEQ ID NO: 43390 - protein, 14 aa, Homo sapiens
  CDR3 for beta chain variable domain of TCR clone 21695 (TRBV4-2, TRBJ2-1)
CARGLDRAYNEQFF

SEQ ID NO: 43391 - protein, 16 aa, Homo sapiens
  CDR3 for alpha chain variable domain of TCR clone 21696 (TRAV12-3, TRAJ53)
CAMSPGSGGSNYQLTF

SEQ ID NO: 43392 - protein, 11 aa, Homo sapiens
  CDR3 for beta chain variable domain of TCR clone 21696 (TRBV29-1, TRBJ2-5)
CSEDRTGTQYF

SEQ ID NO: 43393 - protein, 12 aa, Homo sapiens
  CDR3 for alpha chain variable domain of TCR clone 21697 (TRAV3, TRAJ43)
CAVRDPNNDMRF

SEQ ID NO: 43394 - protein, 15 aa, Homo sapiens
  CDR3 for beta chain variable domain of TCR clone 21697 (TRBV25-1, TRBJ1-5)
CASSLGTGFDQPQHF

SEQ ID NO: 43395 - protein, 12 aa, Homo sapiens
  CDR3 for alpha chain variable domain of TCR clone 21698 (TRAV1-2, TRAJ33)
CAALGSNYQLIW

SEQ ID NO: 43396 - protein, 14 aa, Homo sapiens
  CDR3 for beta chain variable domain of TCR clone 21698 (TRBV20-1, TRBJ2-7)
CSAKRGRSSYEQYF
